United States Patent Application Publication US 2007/0083945 A1 - sequence listing, part 39

SEQ ID NO: 265175 - DNA, 416 bp, Glycine max
  unsure (1)..(416): unsure at all n locations
ntgtgtcatcgatgacacttatttgggaatcgattacccgtgtttgtttctgaacaatctaaagatgtacctcttcaaaaaggttttgactttttcaaatgggttataagtttttctaaaagctataactcttctgaatggtcttcttgaccagagatggagagtctataaaagcaaggctttgatgtgcatttcaaaaataatcttgaacacttttctaatcaatcctttaaaagccccgaatctctttgaatctctttgaacatcttcttcgtctttgtaccaaaagctttctgaagttctctgcgtttctaaaccttgacaacttgtgttattcatccttttcattctcttctccctttgacaaaaagaattcgccaggactaatcgtctgaattcttntgtgtctctcttct

SEQ ID NO: 265176 - DNA, 445 bp, Glycine max
  unsure (1)..(445): unsure at all n locations
agctntgagggtgcgtaccccactatcttttcatagtagagtatcgataatgtgtctaccatcacgattatcgtctccctttccatcattgggggtaccacctgngccgccagatccctccaccttttgggcgtgttctttgaaagatctgtcccccattttgcacatgttctgtagttgcatcctatccggaaccatatcaaaattgtactgatactgcctaacaaaggcaaccattatgtccttccaagaatggactcgggaaggttccaagttagtgtaccaggtaacagctaccacagtaagactntattggaaggaatgtatcagcaattcctcatcttttgcgtattcccccatcttctgacaatacatctttagatggttcttgggacaagtagtccccttgtacttgtcanagtacagcacctttgacttgggaggg

SEQ ID NO: 265177 - DNA, 457 bp, Glycine max
  unsure (1)..(457): unsure at all n locations
tattntcattattttcgagatatttagaagagaacacaagctagttatttatagagaaaacaattattgattaaagtgttcttcccaaaacctgtaatcgattaaatctacaaggaaatcgattaatttaatgaagtaatcgattaaattatctttttttattgattaaagtgttcttcccaaaacctggaaatagctcaaggacaatgtaatcgattagatactcaaagtaatcgattaaagtgttcttgttcacttctgaaacacttatagaaagagaagtaataatttatattacatggtaatcgattaaagcagagacttctgaataaatcactcattatctcanaaacaactatgtaatcgattacgaatagggntgaaccaattaaaccgatatgagacataactctattagcttcaacaacttatgtaattgttacaataagtctgtaat

SEQ ID NO: 265178 - DNA, 430 bp, Glycine max
agcttctagagtagtataatgaagtcggctatgatgaggagttaatatctgacctccaatactaaatgccgattcaaaagctacagtggagatcggaatagctaacacatcccttgcaattgcttgtagtgttggatacattagctcgttcaatttccaccacattaagatatcaaaatctgaatttcttggtaaaacttcatcctctaagtaatgatccaacttcgttttcatagttgaggttcttgccctttctttctttcaatgtatctatcataatcacacaatttactctttccatcactaaccacatctagtgattcaaaagaactagtagaatctggatgctttttggcttgatattccgaaataaaatcataacacaagtttcggatcctattaacttgtgaaaaataatccatgggataaa

SEQ ID NO: 265179 - DNA, 360 bp, Glycine max
  unsure (1)..(360): unsure at all n locations
atcttaagtttaataaggtccttctatggtgatatttagccatggagttgcagtggaagataaaggagaaaaggtgagaggaggcgccacccactatagaataagccatggaaggagaagatttaccaccaagaaagtgtcttggataagttgcttaaagaggaagctctaatggaggaagagaatgagagagagagagtaccgtggaatgaatgagaataacgagagagactgaactttgaagtgtgtctcacaagtttctcattcatcanagntgtgacaagtgttgcacnatgttctatttatagcctacgtcactaactaaatggaattgcctttttgaatttcattttcatttca

SEQ ID NO: 265180 - DNA, 445 bp, Glycine max
  unsure (1)..(445): unsure at all n locations
agcttcaaaccacagcaacacaaaatctaggtgtccaaaacccctcaattcaatggcttttctaggtttgaaaggtggaatttagaatgaggtaaatttggagcaaattctcacctcacacaagtctataacatcaatctaaacttgctcaaactggatttacacctaaatttccaccgaatcaaaatttgactcctcaacacccaattttgccctaaaaatggctcttggttcactttggtcatttgtttttctctctagctcagcctaacctttctcacatgtcctaaatgacatttcaagctagtattaactcactttaacctccatttaccacagaattcagacttagtcttccaactctcaaggtctcactctttttccactcataacatcacattctcactttctaaccctangttagttctacccttcatctctaaca

SEQ ID NO: 265181 - DNA, 440 bp, Glycine max
tgtgtggaatcgacaagcaaggacaaaaaggaatcttcaagtgacgtgacgaggaatccgtggggtagctcactatatgtaaggggagtttattataaaatttaccattttaacaccatagttaggattaaggaacctagctatgaggatatctgcctgtccttgtgcatgctgatttttcttcaaagaaaattacgttttaactaatgggatgcgatatatatattgtgatgaatgatattgttttggctgtttgaaggctgtgcgtgaggaaatgaatattgtgtgtttgtttgaattgttggtgatgttgctattgagggatttaattgatatgtgatgataatgatgattatgatgatattgatttgagatgacattgttaataaagaccatgtcaacatgaattggtattattgatgaatatgtgaatatgaaat

SEQ ID NO: 265182 - DNA, 437 bp, Glycine max
  unsure (1)..(437): unsure at all n locations
agctntgagccaaaatcctgactcaccatanaccttgacccattgtgagaatgtcaattcttaccctcggaagcaaaaaanaaggggagagggaaaatttccaatcaaagaggaagcaaaaaaggagagaaggaaaatttccaatcaaaggaaaaaaagagaggaaagggaattcccaatcaaagagtgggagaaagcaaaaagaaaagaaagaaaattcccaatcaaagaatgggagaaagaaaaaagagaagaagaaagggaagaaagttcccgatcaaaaaaaaataatatgcagaaaggtctttggaccggacaatatctgaacaatacagaattgtcaccaaatgaataaaaagaaggaaagggaaccatgacctaaaatggtcttccccctttagttgccaggcaaaatcttgtgcgctatgcaacctttt

SEQ ID NO: 265183 - DNA, 282 bp, Glycine max
  unsure (1)..(282): unsure at all n locations
gtgttgannggtgaaacttnctgcttttattggtgaccacatagtggtacctggagatatgtcgcgggggtcaggagaccttggggacctcaggtggggtgctattgcccaaaaccaagcttgaccaatcccgacccaacccgggcataatcggtcaatgagaacctgtgatgtacctaagcaggcgagctcctggcagtcaacagattaaaggaaaacaagaccaccaagcaaggaggcttgtggtggctggccagctgtgaattttgtgtaatatgtgga

SEQ ID NO: 265184 - DNA, 427 bp, Glycine max
  unsure (1)..(427): unsure at all n locations
agcttgtcactttnttgagtcactcaggacagccctaagttttattaatnggngtctntatagaacttgtcttttcttaatacacttaagcaaactcataaataggcattaattgaaaatgcttatgatttgtgtttagaagggttgtaataattaaagcatcaagggttttggactcaacaaatttcccataaaataagatgtaaaaacaattatcaaagagacattggagaacattcaccatacaaggatagagagcacatatgaactaatcaaactgaatggtacacatattgaaataataagggactaaacaataaatatctaaacttcatataaccggttaaaattacctgctacaacaaagtcgatttggtgattcatcgtgcactggccatttcanaacatttctaanacttatgatggg

SEQ ID NO: 265185 - DNA, 470 bp, Glycine max
  unsure (1)..(470): unsure at all n locations
tctccttcctggcttattctctagtggatgtcgccccctctcacctcttcttatttatcttccgctgcaactccatggctgaaaatcaccattctaagaccttattgaagttcaaagattcagctttcatagaagcttccatcaagtatatacaaaaaaaagtggatgactggaagttattttggttatacttatttaattagtggcttaatattagtattatacatgttgccattggctttcttaatgaattgtgcattttgataaggataagtatatatgtaatcccgcatattcatgctggtcatttacctacatgcggattggagaaccttgggctatacttattctcatttcttttttttttttacaatgaagtgttgaacaacatgttaggaaataattcaaggtatgagactngagttcatcattaagtatcctaatttatggataatatgacacaactcttc

SEQ ID NO: 265186 - DNA, 324 bp, Glycine max
agcttattcaacattgacgtatcacatcacacatatcttcgaatctgagcctcactagcagcagaaggtaaaggcataattcttgcttccatgcgtaaatgtgaaataatggtttgttcacttgatgaccatgatatcactccacccgctcaagttaggacatcgtcgcttgtactttttgattcatctgaatgaataatccactttgcatcactataccactcgattgcattttaatctaccatctacatatgcattgtgcacgtctatagaactttgtcaaacgccacaaagaactctttgttcgatgtcttatgtgaggag

SEQ ID NO: 265187 - DNA, 96 bp, Glycine max
ttagccatgtgcaaggagacaggcattctagccaaattcctatgtcgctagcagtcatattgccttgcgcacacacgacaaggccctatgaactcg

SEQ ID NO: 265188 - DNA, 459 bp, Glycine max
  unsure (1)..(459): unsure at all n locations
agctntgagcaaattctaacgacaataactntttatcttggatgttcgataaagtcacgtaatatatcgagtcgctcgaaatagaatacagaagctgtgagaaaattctaacgtcaataactttttactcggatgtccgattgagtcacgtaatatatcgagacgcccgaaattcaatacagaaactctgagcaaattctaacgacaataattttttacttggatgtccaattgagtcgcgtaatatttcgagacactcgaaattgagtacagaagctctgaggaaattcaaatataaataccttttgactcggatattcgattgagtcccgtaatgtatcgagacattcgaaattgaatacagaagctgtgagcaaattctaatgtcaataactttctactcggatgtccgactggagtactttatatatcgagacgctcgaaattcaatacagaagc

SEQ ID NO: 265189 - DNA, 282 bp, Glycine max
  unsure (1)..(282): unsure at all n locations
cgagatgatgcgctccatgtatgttggatcaaatggagaatagagatcataatgaagaataaaggaggagaagagggaatgatggtgttcctatacaaaaccgaattgatggtattaaactcaacattgctccatttaaaggaaagaatgatcccgaggcctacttggagtgggagatgaaaatagagcatgttttctcatgcaacaactatgangaggaccaaaaggtgaagcttgccaccacggagttttccgactatggtcttgtgtggtggaacaagc

SEQ ID NO: 265190 - DNA, 354 bp, Glycine max
  unsure (1)..(354): unsure at all n locations
tagctcgtgcaaatcaagtcactgccgcattctatctctagcatgcattgaatgtnggnctcgtccttcgtcacgggaagccggaaggtccatatcaccttgttgatcgtacacatggggcacatgccccacaaatgcgcaagtaagaagagataattatccgggctctcgtgtccgtaaaatgcattcatatcatgcatcgcataagcatctattcataacatcataatggacatatcctgcatttgtccgttatcatattacagcctcacattntgcatgagtcatggcatcatcatgcatatgcgttcaacaaactttgtgatctgcaaaattgcataccattggttttca

SEQ ID NO: 265191 - DNA, 377 bp, Glycine max
acacttcaaactaagcttgcaattgccaacggaagctctcgaaagattcaaatggtcataactcttatctcggaggtctgattgaggcgcattatatatcgagacgctcgaaaatgaacaatgggagctctcgagcaagtacaatggtcataacttttcactctgaggtacaatataggcgcataatatatcgagacgctctcaattgaacaatggaagctcttgagcaattcaaatggtcataacttttcactcggatgtccgattcaggcgcataatatatcgagacgctcgaaattgaacaacggaagctctcgagaaattcaaatggtcataacttttcactccgaggtccgattgaggcgcataatatatcg

SEQ ID NO: 265192 - DNA, 435 bp, Glycine max
  unsure (1)..(435): unsure at all n locations
agcttcacacttgcaagaaggtttgccatgccttatatatgagcataatngggcttcacaccaaacacatcagtcatctgtttgaagtaagacctcccctcatccaacatctctgcccgagcacacgcacagagaacaccaatgaaggttacttcattagggagcaatctcagagtctcgtcactctcaactccatgtttcatcttccccatactgatcattacttcaaacaggtcgagtccatcttcaggactcccacgaatgcagtgccccaagatcatcatattccacgataccaaattcctttctctcatcctctcaaacactatctgcgcaacctccaccttcctacacttacagtacatgccaatcaatgccgtatcaagaatcaaacttgacctcaatgacatcctaacaatgctcccatgaaactga

SEQ ID NO: 265193 - DNA, 418 bp, Glycine max
  unsure (1)..(418): unsure at all n locations
tctagagattaagactatgctttcgagttcctctatgggatntttatatgggtcgggtttctacagttgattctgcccggcgaacagtggtggaatttctccgccgccactgttttgttagatctgagatttgggaatttttggatttttttaatgataataaatataatgacggtaaagaatcgtctttactcgttattaaaagaagcttcttcacaccaacgaaaccatggcttccgtgtacagctgtacggactgcggctccaacctgaatttgaactccgtttatgcgtaccctccggacttctacatcgaagccggcaacaagggctccgtctncttctccgccgtcgacgccaccaagttcaaattcgacaaggaggacaagaatcgtcccttcttcgaaaccgtcaactac

SEQ ID NO: 265194 - DNA, 436 bp, Glycine max
  unsure (1)..(436): unsure at all n locations
agctntgcttcaacagtagaggtactggtagtgtatgattagatgcttcatgcttcttttgtgtcttgagttctttagcaagaatctttttttcttcttcctcctagtgagcttgtcttattgttttgaccttgctcttttgctcttgaatgatcctcttgacccttttggcaatgccaaaggtgtggagagctctgtcttctttagcaatagtttgagtgagcttcctctgcctccttttttagatatcttcctcatccactggagtaactgtcatgttcctcttgatgtccactttcattgcctttagattgacagcgctgaagtgttggtatcttgcaacacaggtgctcttggtgatgatggaatgctntaactcctcgtccattctctcgaacacatgatatacttggtgttcccagataagcttattgat

SEQ ID NO: 265195 - DNA, 251 bp, Glycine max
tttaacttaaatttcttggcccaaccttttgctacttcaattggaattccccttctatttaatataccctgtctaagactagagacttgtcttgatcattcatcttgaatatctttaacttctttgtcttgaataagctttggacgcatgtaacctttggatcatcaaacattcacttgacctttgctacatcatgtatcaatatttcgacaagtatcgatatatatcattcaattattaagtgtcttcca

SEQ ID NO: 265196 - DNA, 443 bp, Glycine max
agcttataagaacaaaattgcctcattcatttctaaatatgaatgtgaattaggacgcatcaacaagaatcaagccaaggctattgtgcaagcaatcaatggggcaaaacacaccaaatgattatgatgatggatggctcaaattctcacaaaggtaaactcatcactttcaaattgagctttcaaaactatcatgacatgtagagaagaatcaaggatttcaagtcacaaaatgtcaagaacttttattttcaaaacaattacccatttcttgaacatatcctataattcaaagaaaaacatgcaaattcgagcgtgcacactaaattgacccaaaatattaaactaaaaatccgacgaaactaacaacattaacaaattaacacaactaacaaattaacaaaaccaacaaaactagcaaaaccaaagaacacttccccccc

SEQ ID NO: 265197 - DNA, 420 bp, Glycine max
  unsure (1)..(420): unsure at all n locations
tatctgactcanacgaggctggatagacttctcgtatctgactctctagttcccatgtggcgtcttctcctaatgcacctccctagatcaacttgactaatggattctccttctctcttaagtgctttgttcgcatatcctcgatcctcaaaggcaatgtttgatatgtcaagttctccttcacttgtatgtcatccaatttgatcacatgagatggatcatggatatacttacgagttaagacacaagaaagacattgtgaagattagaaagagacggnggtaatgcaatttggtatgccatgggactgactctttntgagaatttggaaaggaccaagaaaatgaggtgtgagtttttgggatttcaatgctcgaccaacccaagtncacggagtgactctagagaatacatgatcac

SEQ ID NO: 265198 - DNA, 448 bp, Glycine max
agcttagaaggaaatcatagcatctgtgcatgggaatattgttatttgaacaagagtaattgcgcccaatctgttcgagtaaggctgcctccacgttgtgaccttcaatggtaagctctttcaaagttgttggatgatcaatttgcagctcttcacagtctgctaggtataattgatgaatatcaggggcactgagagcagaaggtacaagttgttggcacccagaaatctttagataatttaaatgacatagttgctctggcaagtgccctttcagcttgggacaacactccatagaaagacgttgaagacgtggaaaagcacctgtcacacctttacattcccattcttcccattccttcatatcggagaacttcaaagattccaaggatgtaaatgaacaagagctactcccgaaaaaatcagcattaatactcacaatcccatc

SEQ ID NO: 265199 - DNA, 395 bp, Glycine max
  unsure (1)..(395): unsure at all n locations
tttgtgtgtgtganaatctcttcattaatgttgtcctgngttgggcattntttttgtgctacaaccacatgattgtgtaagataactaaagtctagttattagataaatagcttctgcaaatgcaattcaaatgagcaaagatcagatccacatccatcccaacaatccctctatttgagtttttttttcttaatacctctctatcatgagatgagatttacttttgaagttgttgggtaccaatactcactggtaaaaaatggttaccctcttcagccatgtaccatatttgattcacttagaaactcttgaaaatgaaaatattatctacagaaccatgatttggtctaaaacatcaaggtttttaattgtccgcacgcaaacatgacacaat

SEQ ID NO: 265200 - DNA, 250 bp, Glycine max
  unsure (1)..(250): unsure at all n locations
tcgacanaacaatagctactctgactaacataagctacatttactccctagattcaagagaataactagaggtatatatagcccaaggtagaggtgcaagtagcactagttctaacatctgatcctctatggaagagactttatatagcaaacatataaactaagcaaattaataagaaacaccacctccacattntgtgaaccatctgcagccacccctttgagaattctcacaagtattgttcatgta

SEQ ID NO: 265201 - DNA, 420 bp, Glycine max
  unsure (1)..(420): unsure at all n locations
tagtagcagttacagaagtcaatatttccgccaataactatgatcatttctaccttacctattttccatcatggtcttggtttgtgtgtttagattgccaccagagtcctaaatagacaatatctttcattgtatgtttgcaacagtcccaaaacccaatttttgccgaaaccaagtgtcatgatttctatattaccaattttgctagctgttgatgttgcatcatagttttgctatgtcatctacctttggtctcatctctttaccttacaatttaggcaattctatcattatcctttnntcaatatatagaatggcaacatgcaaacatatctaatccaggaaattccaccactaatagccagcctataatccataaccaatgaagtcccccatctccaatttattccatcttctaat

SEQ ID NO: 265202 - DNA, 437 bp, Glycine max
  unsure (1)..(437): unsure at all n locations
agcaccaaatcgggatgaatggagggcaaagaaacaataggtggcagtgttggtgggtagcgctaacatggtcaatgtggcagcacagaaataagattcttttctcgaacgaatcattcaacgcctctaaactgatggatgatgctttgtttgtgctgtggtcttggcttagagcatcggagacagacttcaatattcactataactattggtctaccaatctatcaatatgtttttcagtagattaggatgtctgttatgctgtagggatgtgtttcgggagggttcataagccatgaggctttgtttatgtacctttggtcttggttggagcccaccattgttaggtggatccactatgacttcaatatctcccttgtaatcatagtacccctggtactgttattntaatatacataccctattttgctgataaa

SEQ ID NO: 265203 - DNA, 377 bp, Glycine max
  unsure (1)..(377): unsure at all n locations
atggctcctattttcactctcattgatggacagacactaccatagtggaatgtcagttgaagaagcaattgatctcgttgataagtgcattatggaaatcagatccaggcttgttgttgcgccgcccaactttgttattaaaatcgtggacaaggatggtgcaagagagtacgcatggcgtgagtcagtcaaggatactcctgttccttcagcttgagtaactctttccctaattntcgttggacttctttctttctatttgcccatgcttttgtcttgctatagttntttttactggtcttggaatgtctctgaaaattatggtctatagatgctctaaagtaagacagtttatcattngaatttaatatgcatga

SEQ ID NO: 265204 - DNA, 390 bp, Glycine max
actgcacattacacgtctctattttaccatgaactaaccatgtgtcacagtcacatacttatagccgataagctgaaaaatggatttcatgatggtaggaaaatgatcacaacaattatattgggttataaacagttcagatgaattaaagaatgctttcataaatgagacatataatttccatcttgcaaaaggaacaccgatgtgttctattcccagtcaatcatcttacaacgccagcgtatgagataaacggagatcaagtaaagctgttctttcagaacttgtgcatgtatatataatctcaagcaatctcattcttcagatgcagcacttgcagcactcaagtccaccggatgatcaagaacctataacaaatgaagacgatga

SEQ ID NO: 265205 - DNA, 427 bp, Glycine max
  unsure (1)..(427): unsure at all n locations
ggagaatgtgaatatatgtatacatgatcttgatgatgtcttaagaagaatcaaaccacgcttattttgcttcaagaataatacaagattggttcaacaaacaaagccttgattcaagatttcttcaagatcaagccttgcctcacaatgaaagggttcaagtcattcaaggcacatgtaatcgattaccaatgggttgaaagtgtgtaatcgattacacatcatatgtaatcgattaccagagactctgaacgttgggaattcaaattttaaatgaagggtcacaactgttcaagaaaaacaactgtgtaatcgatacactaattctgtaattgattaccagagangaatttcagggatatcgccaacagtcacatcttatcatttgaattntgaatggccatcnaggcctatatatatgtgtgac

SEQ ID NO: 265206 - DNA, 450 bp, Glycine max
  unsure (1)..(450): unsure at all n locations
agcttctatctntaattngtaggaaatcaaagctctgatccctctaaccatggccactcagatgatatggatgatggtgagaagtggatgctnttgccctttgctgttcctgatagtttattgttttaatgtttcaacaattacttcattgcatgtacagatcatcctgttcacctttgcattgtgtgtttgatttcactaacagttccattttgtatgtgctggaaatttccatcagtgatttaccaactagtgcgctagaagttcccattggaaaatgtaaaaatctttatattaacaatgtatcaaaattaaactcataataatatgataaaatatttaaaaatgattgtcctgacaattattctctgtcactcgtctttgcagtaaagacctacagtagtacataaaccactaggacacattaactactaacaaanattgaactca

SEQ ID NO: 265207 - DNA, 635 bp, Glycine max
  unsure (1)..(635): unsure at all n locations
cgccccnacgcgcncgnnncnncgattgatacgccattgngantntnacncgtcgacanctantacgaaataccctcanatgccttttcgatggggcttcantgtnggtctggggaananaccannattatttgagtggacaatattatgtnttgattgatgtntgaannnactgacgggctaaaagggttntggttagtgttttctttttttcaatcannattgaaacatttcgacacagtccgtttttgtacgcacgatgggtgcattcttttgaacattgtgtaacataagatccatccatctcactcaatacattgaaggggaaaaaaaagaggtaaaagatatatcttctagactaaatcaatggttaaaaactttgagtagatactataacactattcctgttttggttgcaccaagaatacccccaacggataatcggagactaattcatttcaaggcataaagatcactgaaatacattnttgcctcttccaacaaagtcttctcatacacatgactagaaattgaatccttggtaacatgcttaaggaatctaactatctatcaacttgtgtggacctgcgttgccttaacacgtgtttacctannaggacaactggtactacact

SEQ ID NO: 265208 - DNA, 416 bp, Glycine max
  unsure (1)..(416): unsure at all n locations
agcttctgttttcaattacgagcgtctcgatatattatgggactgaatcgcacatccgagtcaaaagttaatttcgtttgaatttgcttagagcatctgttttcaattacgagcgtctcgatatattatgggactgaatcgcacatccgagtcaaaagttaatttcgtttgaatttgctcagagcttctgttttcaatttcgagcgtctcgatatactactagacacaatcggacatccgagtcaaaagttattgtcgtttgaatatgctcagagcatctgttttcaattacgagcgtctcgatatattacgggactcaatcggacatccgagtaaaacgttattgtcgntggaatttgctcagagcttctgttttcaattacgagcgttttgatatattacgggactcaatcgga

SEQ ID NO: 265209 - DNA, 434 bp, Glycine max
  unsure (1)..(434): unsure at all n locations
gcgcgggtctgggagacanaggtcaagtggtcgcgatatgcgaagatgatgtttcgagtacattggatttggtacgaccatgccctcctgatttccagctggaaaattggcgagtggaggaacgccccggcatttacgcaacgagcataatgtaaacctttacggttttaaaagctctatagttgggcctaagctttagagtttttccttttgttaaggctttgtgtcttttgttgttgaatttataatacaaggatctttcttcatttgttcctacgtctctacccattctcattcatttgcatgtttacttctttttctgaaacggcagatccgatgacgagntccccgaatgtactaatacctgngacccgcctatcgacttcgagcaagaaatgaatcanacggaagatgaagganacgacgatgtggga

SEQ ID NO: 265210 - DNA, 434 bp, Glycine max
  unsure (1)..(434): unsure at all n locations
agctntgcagaattggtcttcgccagtgaaatgatcgatgtgggtctgaaaaaaaaggcaaatttgatcatcctactaggacgactgagaaaactggggcaaataaagagggtgaggataagggagaaacccatgttgtgactgccattcctgtacgaccaagtttcccaccaacccaacaatatctttactcagccaataacaaaccttctccttacccaccacccaggtatccacaaaggccatccctaaatctaccacaaagtctgtctaccgcacttccaatgacgaacaccacctttagcacaaaccaaaaacaccaaccaagaagtgaattttgcagcgagaaagcctgtagaattcaccccaattccagtgtcctatgctgacttgctctcatatctacttgataattcaatggtagccataaccct

SEQ ID NO: 265211 - DNA, 432 bp, Glycine max
  unsure (1)..(432): unsure at all n locations
tctatagaaggttcgttcctaatttctctacaattgcatcacctctcaatgagctggtgaagaagaatgtggcatttacctgnggtgaaaaacaagagcaagcctttgctttgctcaaagaaaagcttactaaggcacctattctagctcttcctgacttttctaaaacttttgagctagaatgtgatgcctctagagtgggagttggagttgtattgttacaaggtgggcaccctattgcttattttagtgaaaaacttcatagtgccacccttaacaggggggttcatagaactaccaagaagtccccttctgaggttgtctatgggttcaatcccttaacaccgttagacctcattcccctcccactagacacttcttttatacataaagaaggggaatctanggtcaaagttgtaaagaagttgcatg

SEQ ID NO: 265212 - DNA, 382 bp, Glycine max
agcttgctcattatttaatctgttataccaactctagtagaagcaccaaaacttcattgtttaattacacattacgcttagtgcgtaatacaattatattgataaatacgtgcatgcaagcgctatatctatctgtattatcaacgatcaaaatttccatattaaggcaatagtttaatatctgacatgtgtccagaattatattattctgtgctggagcaaacaagaaaataatcttatctagataggcgtgtgttgtgaatcgtaaacatgttacaatattacatgggcgtaattaatatatacgtgaaaaatatgactatgaaatactgctaccagctggacctattacacaaccaacagacacttactgctagctctt

SEQ ID NO: 265213 - DNA, 259 bp, Glycine max
  unsure (1)..(259): unsure at all n locations
ggtcggcacacttcgccctcaatacacctcatccattttctctctggaagaagcagaaatcaagtggtaagtgacacaaattacaaagcagaactattttatctttcggcgcaagagatcaaacaaacacaatcatacattacaaatatcttattggtaagagcaacagtgatatatnggcaaatatgctggtctaagaagaaagtgataatcaagtaccgcaatattaatgctcanaggacataaaacaaatgctcac

SEQ ID NO: 265214 - DNA, 444 bp, Glycine max
  unsure (1)..(444): unsure at all n locations
agcttcattggtatgtattatcatgttcagatttatttgcttgattagtttgtccctttattagatctgaactaatgtcttcagtttttccaggtgatggatgataatgataatgcagagatgagggaagatgaaaacaaatttttcactaattacaaggctgtacgaagaccgagctactgaattttaatgttggttcaattgttttaaactttctctacagtaaagaaattcattttctactgttgtttgtcatgacagagtgcaattgattcccagtctggtactgtcaaaatgaatacagagaaatcaccacagaataaaatcacatcactggtaggtgcttttgacataaaacagactgagcanaatgaatacttgaacaaaaaggagaagaatcttgaaagtgatctccaggaacctggattgcccagaaatattatt

SEQ ID NO: 265215 - DNA, 427 bp, Glycine max
  unsure (1)..(427): unsure at all n locations
gatgaatcaagattgatttgattcanagatgttatgatgataacaaaagatgatgacaaaaagcttaaaggtctttctaagaatgagttcaagatattccagatagaatcaagaacacttcaagattcaagaggaaagttgatttcaagaatcaagattcaaaagatcaagattcaagactcaaggttcaagaatcaagagaaggcttaatcaagataagtatgaaaaggtttttctcacaaattgagtagcacatggattnttctcaaaacatgtttaccaaagagtttttactctctggtaatcgattactagattgttgtgatcgattaccagtaacaaaatggatttgaaaaagttttcaactaaatntacaacgttccaattgatttcnaaagttgaatcgatacaatgtttggtatcgata

SEQ ID NO: 265216 - DNA, 440 bp, Glycine max
agcttcttagtttcagatgatgcatctgagtttgtagctacctcatgcactcctctaatgactatcgcataatttctggcgctaaactgctgggagttggaagccatcttctcaattaaatttttggcttcagcaggagtcatgtctccaagggctccaccactggcagcatctatcatacttttctccatattactgagtctttcataaaaatattggagaagcagctgctttgaaatctgatggtgagggcaactagcacatagttttttaaatctctcccagtattcatacaggctctctccactgagttgtctaatacctgagatatccttcctgatggttgtggtcctggaagcagggaaatgtttttctaagaatactctcttaaggtcatcccagctcgtgacagaccttggagcaaggtaatacagccagtc

SEQ ID NO: 265217 - DNA, 445 bp, Glycine max
  unsure (1)..(445): unsure at all n locations
ntacagcagatgccactctactccaagttcttaaaggatatgttaacaaggaaacacaagtatattcaccaggaaaacattgttgtggaaggaaatggtagtgttgtgattcaaaagatccttccacccaagcataaagaccctgngagtgtaaccattccttgttcaattggagaagtcactgtgggaaaagctcttattgacctgngagccagtattaacttaatgccactctccatgtgcagaaggtttggagagttggagatcatgcccactacgatgactttacaacttgttgaccgctccattacaagaccatatggagtaattgaagatgtgctggtcagagtaaaacattntatcttctcggcaaactttgtggtaatggatatctgtgaagatactgacanttctgtaatattgggaaggccattttcatgtaact

SEQ ID NO: 265218 - DNA, 443 bp, Glycine max
  unsure (1)..(443): unsure at all n locations
agcttgtccnctatatgaaagatgagtcgcaccaagctgtgcactacacggagattgcaggggagttgaagggtccaaggagttagagttgtatatgagaaccaatgatgacaaccagattaaaccaattgaagaaacatgtaccttccatcttggcattaaagaggaacaagttactcaagttagcaacccactttcaatggaagataagaacaacttacaacaagttatccgagagcatgctaacctatttgcatggcccgcgaccgacatgccaagcatagatccaaccttccattgttgtagattatccatatgcagagacaccaaacccatagatcagaagaagagaaagatgggggaagaaaggtgttaggtagtgcggaaagaggtcgccaaactaatggcgacccaatttatcagacaggtagactacaccacat

SEQ ID NO: 265219 - DNA, 448 bp, Glycine max
  unsure (1)..(448): unsure at all n locations
taacatgtagagaatggaacacatcatcgaaagtatcccanaatgaatgtgttcggtgctgtaagttaaggaggttgaagtataacttctcaatggttcttttgaaaaaatgcatttgcaggtgcaagaaagaaaaggactacctatataagcatgaagtttagccgcttcaagaagctgggacttggctntgatatgcttatgaaggatagcaacataggctagtaaactagtgtcgagcaagagtaatgttataaactattgtgcaaattatcttcatgtattcattatgaatagaaagggttcattccttagtgacaccctgatattcgaatatttgaaacgtgtaatttgctaagatgaaattcaatcgtcacgatatttcatctatgcagtagtttggtggatggtatgactntggtgatntgatcggtaattacactaaaat

SEQ ID NO: 265220 - DNA, 428 bp, Glycine max
  unsure (1)..(428): unsure at all n locations
agcttctatataagctgaaccattttatcaataaagacaagttgagttttattcagaanattagagtttatctcttttatcttagtgagagtgattctcctaaattcttgagtgattcaagaacaccctggctatatcaaaggactttcacaacctttgtgtgttgccctcgctggaaagagtgattctttccttcctatcatctccacccttgttctttcaaaccacaattccagaaaatccacctctgcccaaaattagctcgtgaccataactcccattttatacactcaaattaagtgattcttgagcctaaattgaatttcaaaacgagacctttcacctcgttnttgaatcacctcatttggagccctgtagcttccgttattgtcatttctatatttctgtccagccaccacttaacctac

SEQ ID NO: 265221 - DNA, 271 bp, Glycine max
tataaaactcagcttgaggattatggcgtacccatcacatgtggtactatgtggtggtcgggcgatggtgcacaacaagttttccacattcacaaagcgcgcataaacccaccatcccctgttgcccacctccaactgagctcacgtactcccacgtagcccatatactcttttctctcaacaccgggtccccatcaatcctcccaagctttcccaacatcaaagtaaaacgacattcaaacagcacaagctatcacagccaagcaaaaca

SEQ ID NO: 265222 - DNA, 416 bp, Glycine max
  unsure (1)..(416): unsure at all n locations
agctnttcgattcattctatgtacccgtagtggtccacattgtgtttcgtgcatttttattctcgttntgtttactttttatacccccctcttgacgtgcttaagccattttacttaagtcatttctcgcttaacttaaaaataaaataaatttccaccgaatgtttgaattgtattatccattaacttcggttaaaatcaattccgaccgttcggtcatgccgtaaccacgttggaaatcaaaaagaggtaaaaaataatataataatcaaaaaaatatctttttagtgaaataaagcggaaaatcaatcggacgttttctctttgggatttctcattcttaatcgaattaattaataactaaagtgaaactaaggctaaaatcaactcgcctagtcaagctcgtccacaaaaat

SEQ ID NO: 265223 - DNA, 439 bp, Glycine max
tccttgagaaaattcctaaagaagctagagcttagctacacacacctctctaatagctaagctcacctccttgagatgagaagctagagcttagctacacaccccctataatagctaagctcacccccatgacaaaatacatgaaaatacaaaaaagtccctactacaaagactactcaaaatgcctcgaaatacaaggctaaaaccctatactactagaatggccgaaatacaaggcctaaacaaaggtaaaatctattctaatatttacaaagataagcaggctcatacttagcccatgggctcgaaatctaccttaaggctcatgagaaccctagggccttcccttggatctctggcccaatctacttggagtcttctatccaatgcccttgcgggatatgaatggatcattcctcccttcttctcattctctcta

SEQ ID NO: 265224 - DNA, 446 bp, Glycine max
  unsure (1)..(446): unsure at all n locations
agcttatcttgctcaatattagcaagttcttttgattgctgtgcatatgttaacacctaatttcaggaaaatacacaaaagtaaaatcaggtcagaattttcatgcaacaatctaggtttgagtcattgatagccaccatcatcaaatattaaagagattactttcaaagatgatcattataaaataaaactatcaaagaaaacattttgtagtgtcacaatgtataaaaatgacccgttgttcatacataacattccccaaccaacagcatagaacaagcaagaaaatggtagggctatagagtcctcgtaaagatagtgcaagagatatctaagagaaaggttaaccacattgtgatattaaaactcatcttacacgatagtttcctttttttccttttcaagcacgtagattgagcaactttntaacgtgggagaaacaattt

SEQ ID NO: 265225 - DNA, 423 bp, Glycine max
  unsure (1)..(423): unsure at all n locations
taacaaccttaacactcttctccttttaacactatcgacctgaagaatagcaaccatcaaaacccattctaagcagtagcaggatcctgtgagtttcgcagcagatcaatagatagtatcctagctcctagatacgtactaaatacaaatcaagacattgacatcataacatgtataggttcatcgaattcctttgacaaaatattgaaatttcaactgataacagaatcttggatttcaagtaattagtgttacataaagcacaactttgaatattgtcatcaatcatcacactnttgaggttgttaaccaaccctaccccatagtcagactagtgccttccagcattatctttcatatttctaagtcagcagatttgcatttgccaacattatttgcaatccacaacatcgatattatact

SEQ ID NO: 265226 - DNA, 368 bp, Glycine max
catgcactcctctaatgactattcgcataatttctggcgctaaactgctgggagttggaaaccatcttctcaattaaatttttggcttcagcaggaatcatgtctccaagggctccaccactggcagcatctatcatacttctctccatattactgaatctttcatacaaatattggagaagccactgctctaaaatctgaaggtgagggcaactagcacatagttttttaaatctctcccagtattcatacaggctctctccactgagttgtctaatacctgagatatccttcctgatggttgtggtcctgcacacaaggacatgtatttctaagaatactcctttaaggtcatcccacctcgtgac

SEQ ID NO: 265227 - DNA, 423 bp, Glycine max
gtcgatcaatatctattatatcgaaggtcagattggacttgtatgtggaacctatacacttgaatgatagcgctatgaatttgcgctttgctttgggtaatcagtctaatcaggtagattatataggcctaataaaggctcattcttctcttctgagtaataactgtatatattagtggaagttaattatactagttagttaggtagttacttcattgtgtactaaaaatggatttagctacttggtgtgcaagctgtaggatcaaaaactctattctctctttgtttcttaactggtattcatggtctcttccctctttcactttggtacttacgtttttttgcgcaaatttcatggcttttccactgatgatgatcatggaacgctaaacactcaatctatcaaaggatccactccattta

SEQ ID NO: 265228 - DNA, 147 bp, Glycine max
tcttcacctcctcactgggagctctatgttgatgagatcccgctcacagaaatataggcatgctccacaaaacaatatactcttatagacttttagacctactttctctaacttaataaaggaaagaaaaagatcgtcatggatgga

SEQ ID NO: 265229 - DNA, 350 bp, Glycine max
aacaacaaccttctggaggaatcttctggagggcccaaaagagcctggttggtatttgcacctcccattataactaagcacacccccctgactttttatggggactctttttccgtaaagctatgaaaacttacgaatttcctaacgatactggttatctttccgtaatggcacggaacctcgtggattacataatcatcccctttttgacttacggaatgtaacaaaacctgtctaattgtgcaacaaagcttccataagatttccggagtgacacagaaccttacggatagggcctcaatatattgttttactatatggccttccccggagatttacaaatagcctaa

SEQ ID NO: 265230 - DNA, 367 bp, Glycine max
tctgagaatgaccttcaccgctctgacattcttcatggatgcttctctcaaaatataggatcagcagcatattgtagaacatccacaggcaccttgttattccccaccgagaaacttctaaagcacgtttttgagattgcttccctcatcatacctgtcatgccttcaaccactaaatcagttggtttactgtatcccacaaaattcttttattgcgcatgtcacatgcggaataaatagttacaagggtgaccagttgagcttcttggacccattccccaaccattaagataaaaccactaccactgtttttcctctgcaatctaaatgaattatctttccacatacatagtatgccacctgctga

SEQ ID NO: 265231 - DNA, 467 bp, Glycine max
caattcaattccattggtcatgatactacttctaaaccaagaaaacagagtggaggcagaaaactctgcacaaaactcattcaaattccacagtttttcctactcacataccccagtaacattctctttgttctgatttgttaaccattggatcaccttgaaaattttactggaggttccaaataaagaaatctaaattttgaccgttgggatcttcttgaaaatatctagaacacgagatgtactacctttcccgtgactagcgctgcacaaccagttttttgcataattggtaaaatctgctgcacaacttgacagcttttgctgcataatttggcagatttcgtattctagcttgcttgtatccaatttcactcagattggatcctacaagtcctaaaccatgtctatatcatgtttaaaccataaacatacttcaaaccaaggtaaatcaatatataggtatc

SEQ ID NO: 265232 - DNA, 353 bp, Glycine max
cactttgggctcaatttccactggaagaatatattcctttccttatacaacccgataaggagacattcctatgggtgctctgtaggcagtcccatgcgcccatagagcatcatcaagcctggtactccaatctttcctgcttggctgcacaatcttatctaaaattcgcttgaattctcgggtaaaaatttttgcctgtccattggtctgggggtggtatggagtggataccctgtgtaccaccccgtacttttataaacaggcatgcatggcgctgttgcaaaaatgggttcctgatcacataacaaagttttggtactccaaacctgcaaaacatattatacctgacaaag

SEQ ID NO: 265233 - DNA, 431 bp, Glycine max
  unsure (1)..(431): unsure at all n locations
ctgcggatttggtcttcgccggcgacatgatcgaagtgtgtcttataagaggcanatctgatcatcttgctttgataaatgcaaataaaaactggggcaaatgaagagggtgaggatgaaggagaagcccgtgctgtgactgccattcctataccgccaagttgtccaccaacccaacaatgtcattactcagccaataacaaaccttctccttacccaccgcccagttatccacaaaggccatccctaaaacaaccacaaagtctgtcttccacactctcaatgacgaacatcaccttttgcacaaacgaagagcaccaaccaagatatgaattttgcagcgagaaagcctgtagaattcaccccaattccagtgtcctatgctgacttgctcccatatctacttgataattcaatggtagccataaccc

SEQ ID NO: 265234 - DNA, 370 bp, Glycine max
tgcaaactttccgaatcaatctatggacctcattgttgtctcacattgcgcttaatgtattcgtgttctcattacatatactttttataccccctttgtacgtgcttaagccatattacttaagtctgttttcgcctgagctataaattaaatagagtctccaccgatcgcttattatccgttaacttcggttaaaaagaaatccaaccgttctggcgtgccgtaaccacgtggaaaacaaaggaggggggaggattatataataataaatgaacggcttttcggtaaattaaacgtaaaatctatcggacgttttctcttggggaattctcattcttaatggattgactattaactaaagtgaaactaa

SEQ ID NO: 265235 - DNA, 420 bp, Glycine max
tgagatgaggaagcgtataacggtgatacttcttgctttttattcgtgaccacacagtggtacctggagatatgtcgcgcgggtcatgagaccttgtagacctcatgtggggtgctattgcccaaaaccaagcttgaccaatcccgacccaacccgggcataatcggtcagtgagaacctgtgatgtacctaaacaggcgagctcttggcagtcaacagataaaaggaacaaagaccacaaatcaaggaggcttgtggtggctggccacctgtgaaacttgattgatatgtgagatatggcctctggtaatcgattaccatgggtgggtaatcgattacaatgcttaaaaatgaacacaggaggctaagatggtctctggtaatcgattaccacggcgtgtaatcgattaccacgcttga

SEQ ID NO: 265236 - DNA, 340 bp, Glycine max
  unsure (1)..(340): unsure at all n locations
gcttgcttctacattntgcagagctttactttagagatattgtcattttcttttgatatttttcaccaagtcgcttgttttgtaaagtttgccttctatagacttcaatgaaggattcgttacaagattattggattgagcacttaccactaggccaaaagttatagtagatagttagggcacaactttttctacttaaaattatacagcccaagtgccacgagacgactatgacttgacccacctgggcctccatcactggacaattgatgccacaacccaaaaaataggggttagtgctaattccttgaaatgatcggtgtctcacactgaaaaaaaa

SEQ ID NO: 265237 - DNA, 434 bp, Glycine max
  unsure (1)..(434): unsure at all n locations
tttatatcanattaaacaaattattaactaattaatttatataatcaatntanctgctagtaaattgtataccagtatgtatgtgcatggctgcacataaatgaaaatgaaaagaaattagcatgccaaactaccgctctagattaaaaagcataccaaactagcaatatatcacttctcacatgacttgcatattatttttatataaacttttaattctatattaatataggttcatgcatggttggtcctattaaactaacacataaatacaaaaagaatattgaacgtgccggtaaatggtacctagagaacatacaaaaaactatttacattttaaaaatccctgtattgtgatataattccatatatatatatatatatatatatatatatatacacacacgttctcttgtttgcttaaanaaactaat

SEQ ID NO: 265238 - DNA, 360 bp, Glycine max
agctttaagtcgtaactaacctaagttttttcaaacttaaaaagcgtcacgaagcttacttggatcgctcatataggatgcaacatatagaagcactgggtttagcgtactgcacaaaaaaagctccttcgacaatgcctaattgcagtttataatcccatatgaaaatgtcactgccaaaggcagttatgccttgatgtgtcgcggaatccaatgccttgcttagcgcatgaattcgttggccgaccatacatggggttcaagtatacatacacatgctcttagcgggctaactcattttcccaacgcattaatggatatttttccataaaatattgtgggcttaccgcaaagagttgc

SEQ ID NO: 265239 - DNA, 344 bp, Glycine max
  unsure (1)..(344): unsure at all n locations
tgccccactcaccttcatgtaggacgcactgcccatgtgcaggttcctccactctggggtggnatggtcatagtcaacaaattttgcgagaaaatctgtcatgaattgtgtcttcatggggccttgaggctcatactgaagattaaacatctgacacttcttccgaccatactaccatccttcctgtcattccacgctgtcataacacctgcttgatggggtgattcatcttgactaccacttggttactttgatagtatggactgatgcgccctgccatagttatgcgaaccaatactaccttcttgatcatctggtatcgcttctcaacatcgagaacgatg

SEQ ID NO: 265240 - DNA, 407 bp, Glycine max
agcttgtaacctcctcataatctttctctgtgttggactttttgattctcccacttaaagggtgggcacccccctaatcaagagaacctcctttcgccgaaaaagggtttcactgcaattatcttcacctgtaatcctgtaggcccagctaaactaaacaatattttaagcttgacatgcctataatgtgttatatacataataatgaccatatatactaaacacttccatgttacccattaaatggaggtatgagaattgtgattgcgcgattcaatttctgtgtagccatctaggtggacaataaaattatcactctcattttggaatgtgacattactaagagaagaggaagatctctcctgagaatctattgctaagttcaaatctcatattgatgctggata

SEQ ID NO: 265241 - DNA, 307 bp, Glycine max
caccacatgcaataagtgagagcttcatggtgtaagctacaacacatagttgcataccgagtcccttccatttgccatcgttgcgtataatttctaggactttgggtgatacataacttcactgttttctaattaggactgtcgagatgaatacctttcgaacacgaacctcgctagtgctttattgaccagcttactttgatcagacctgcactccgtatgatctatgaggggatatttatgtccataccgcatagcgcgcctctctgtaaagtttgacatcttgaggcccctatataacatctat

SEQ ID NO: 265242 - DNA, 260 bp, Glycine max
caatgcgaggaaggatgaccctaaggctgccaattcgtcaatctctggggtatggcttttgaaaaagagggaaaagaagtttttgaatgttaaccccccccccccttttcgtcatttttataatttggtgcaggggtggctcgcccatgcgagctaacctgcactttattatttattttcacatctatcaccttatgagaggggaacatatatccttttcccttccttcttatgggttaaccttttggctaacttgaact

SEQ ID NO: 265243 - DNA, 398 bp, Glycine max
agcttagttaattaattattaatgatgattgataatcgactttacaattacagggaattgaaacatggagtgatgaaaacgaacctcgcttcgacattgttgctactcggtggaactacacaaaccctaggttgagttcttttgatgtatatatacatgctcgatgcaactcagactagggtttaatctccgtaggcctgggcttcgctcttagacaggcccattactaccccgggccactttcaatgtttcaaaaattatacacgcacaagtgatacaaaaattctagaccaaaaaataagggaagttaaagaaaaaatatatttattaattttattttttgaaaatagttttcattttgcatgttttaaaaaaaaaaattctatgacctcaaaaaa

SEQ ID NO: 265244 - DNA, 401 bp, Glycine max
  unsure (1)..(401): unsure at all n locations
gaaaatcttgggaacttctaagactcttttttattgccggaatacacacgtgagcttgcttaaagataagggatgagtttatcacaattggggttagaatgaacatgtgtagggatccttaaaggattaaattgggtttattttaggatgtttattaaattataattnttcctttacgattataaatatgatattgttgtgtttgatgaactaattgatgtcctgatgtgaattggttgataaaatgagtgctcttggtgtttttcatgtctttttacctatgattttggttctttgattctgatatgattatgtgaaattatttgaggggtttactccccatgttgtgagaaacatttttgtataaattgtttgtattttggataagatttactaggtga

SEQ ID NO: 265245 - DNA, 473 bp, Glycine max
  unsure (1)..(473): unsure at all n locations
tataagaacaaaattgccttaatcatntccaaatatgattgttattatgacgcatcaacaagaatcaagacaaggctattgtgcaagcaatcaatggggcaaaacacaccacatgattataatgatggatggctcaaattctcacaaaggtaaaatcatcactttcaaattgagctttcaaaactatcatgacatgtagagaagaatcaaggatttcaagtcacaaaatgtcaagaacttttattttcaaaacaattacccatttcttgaacatatcctataattcaaggaaaaacatgcaaagtcgtacgtgcacacgaaattgacccaaaatattaaactgaaaatccgacgaaactaacaacattaacaaattaacacaactaacaaattaacaaaaccaacaaaactagcaaaaccaaagaacactcccccccatacttaaacaacacattgtcctcaatgtatcacaa

SEQ ID NO: 265246 - DNA, 417 bp, Glycine max
agcttttgatgaaaagaataacaacaaatcatgatttatttaaaagaccacctggaagaaaggatgttgaaaagcctctgaagctgttggcctcttgcagggatcccaggagcaaagtgactacattaaagccaagaaaacagaaaaaaaaataaaatgggattacatactatttgttgatcagtggctcgcagctaagcaatatataaaaaatacttactgtaataaggctgattgcatcatcactagcagacggaatcaaagcagaaagatgcacaccggcaagctgtggaaagtaaaagcgtatagtaaaaagtgttaagtaaaatactattacacctagcacattaattaggcaagtagcatcctagaggctaattaccaaacatagcaagatccaagttatatatctaacct

SEQ ID NO: 265247 - DNA, 149 bp, Glycine max
tcttttaattttagccttgtgaaaaaaaaaaaataaaacactgtcttttatcctctaccacatagaaaccactatgatacttaaccagctctatctatcattttggactcgcttattaaatgataattgaaggactctctactatgttt

SEQ ID NO: 265248 - DNA, 398 bp, Glycine max
  unsure (1)..(398): unsure at all n locations
gccttgagtaatcattacatgggttggtaatctattactagcgacaagttttgataaaaatcaagaaatataactcttccaatggttttctggtttttctaaaggttataactcttataatggttttcttgaccatacatgaagagtctataaaagcaagaccttgacttgcatttaaacaacatttattacaaatttttcatatattcttttacaacctttgaatctctttgaacatcttcttgaacttcttcttcttcttccttttccaaaagctttttaaagttttctggtttccaaaccttgaaaacaggagtgngctatatcttttcattctcttctccctttgccaaaaggaattcgccaaggactaatcacctgaattctttttgtgcctc

SEQ ID NO: 265249 - DNA, 449 bp, Glycine max
gatgtaactcagactcatgctcgaggtcacacatgggccaatcattatgctcagccattccccgaatatggcgatacttattgatgtaagctccattggagcttgtaggcctaagatcttcttcatcaatggattccgtttcttcttggaagataaatggcagcggaatggagaaggaagagagagaggagacgccacttcaaagagaagatgagtctagaagaagctcaccaccataggaggccatggataagagcttgaagaaagaaggagatgaatgaagggagagggagagaagagcacgaaattttgtgctctaaaagagctctcaaatctgaagttaatattcaaatgatcaaagttgaaaaaaatgcacacacatgacctctatttatagcctaagtgtcacaccacaatggagggaaatctgaatttccattcacatttca

SEQ ID NO: 265250 - DNA, 340 bp, Glycine max
  unsure (1)..(340): unsure at all n locations
actctcacatcccaaatacccataaatccccccttcccagttgcccaccttcaactgagctcacgtactcccacgtagcccttatcctcgttcctctcaacaccgggtccccataaatccctccaagcttccacaacatacaagcgattaaaatccaaacatcatgaactatccaaaaccaagataatagggcagaggcagaaaactctgcccaaaacacataccaataccacaactttccttactcaaataccccagtaacattttcttcgttccaatttgttcaccgctggatcgactcgaaaattatactggaggtccctantacataagtctacat

SEQ ID NO: 265251 - DNA, 481 bp, Glycine max
  unsure (1)..(481): unsure at all n locations
tctacttatgtggcaaggcgggcttccttcactttcttgtcttatccgcgagctttgactaccgctcttccttcccgcgatgcttctctttatatcttcctgagtgggcttatagcctaaaccatacttcccacgatttcctttggcatttattatgccagttatgccgccgctgtctttgcctaaacccattccggattcgtaaccgttccccaacataactcgggccaccattactgctgcatcggacaggcaagcttgcccagagaagaagtccacggaggaaatgcttaccacctcaaaagactggaaagcggtttctaatgactcctctgcggcctccacataaggcatagaggatgggcagctcaccaagatgtcttccacgccagacacgatgaccagaatgcccttcactacaaatntcaacttttggtggagtgtagagggaacaactcccactgagtggatccacggacgt

SEQ ID NO: 265252 - DNA, 383 bp, Glycine max
acctgcggcatgcaacttctagaattcaatggaggcttttgtcattctaacttctcaacacattattgacaagtgatctgtatgccaattctaaaatatcacgtgtgaatatcttgatgtggatgttgagtcatgtggagttttgtttaggtaagctcaaattttgatatttcaaattttacctaaacctatttcagtaaaatcgcgaatccaaattcgttaaccgttggattgtcttcaaattttggctggaggttcctataacaattctccaaagtttgaccgttgggatatgacaataacaacatttgatgtctcgctaagtgcaaggacgacgctaagcacaattctcacctgagagggaattgcgctgaccaagaatt

SEQ ID NO: 265253 - DNA, 481 bp, Glycine max
  unsure (1)..(481): unsure at all n locations
gcattctagacacatgaaactcagcttatagggagttgttcgaccagaatacttgtttactccctctttctattggtattacttgttattatatgggagtggtcttaccagcaagtgcaccgggtcaccaagtaaaataattaaaacggaatgaaccgagtatcgaacacagcgaacttgttcgattagcaaagttgttttaagtaagcaagcatttgcaaacagaaattaatgattgtgaattaaagcaaaagtatgttctatcctaagtgaaagcaataaacgagaacaagtaagtgtgaaaacatatatctaaaagcgttgggtcctcctactaagtaagttgatgcaattaaagatgttcttctaattaaagatgttcctatgttctatgttgaggacaagnataccaaacacaaattcctccagagtttgactaatttaaaatcagacttcattcttagatccctcttattgactt

SEQ ID NO: 265254 - DNA, 414 bp, Glycine max
agcttgtaggattatggggtacccgtcatatttggtactagggggcaatcgggcgagggtgcatgtcgactctccacatccacaaatcacacataaatccaccatccccagttgcccaccttcaattgagctcacgtactcccacgtagcccttatcctcgttcctctcaacaccgggtcctcatcaatccctccaagcttccacaacatccaagaaattcaacatccaaacatcatgaactatccaaaaccaagaaaacagggcagaggcaaaaaactctgcccaaaacataaaccaataccaccgctttccttactcaaataccccagtaacattctcttcgttccaattcgttcaccgttggatcgactcgaaaattttattggaggtccctagtacataagtctacattt

SEQ ID NO: 265255 - DNA, 430 bp, Glycine max
  unsure (1)..(430): unsure at all n locations
tgtagaattgctagacatgatacatgtcagggtttggtttggttcaaggataanagggatgccccacattatntccatgacacaaatgcaaaaatgatgatttggaaacttcatgcaaaactggtcatgcatgcacctatgtggacactcaagtgtcaaatttttatggtcatgtgatgctagggctcaggattcatttcctctattttaaatcaacccaatgtttccaaaatatgttcttttatcaatttgtgcattcatccgagtccatttcgggtatccggggaaatttcacagcattcacccttcaggtgtagacacattntccaaaaattggttatgatcaatgaattttttttcanagaaaagttggagatcatctctcttcaaaagcatgtcggntttcaactagacaactaattttctcttt

SEQ ID NO: 265256 - DNA, 403 bp, Glycine max
  unsure (1)..(403): unsure at all n locations
agctttgaactttgggcaggtggcctttgtctcttgtttttgcgagnagggacttgtgtttccacgtcgaagcttaattttcctacacctttttctctttctccgcctgtcatcgctggaggaacttgcgtaagatgatgaaaatacatctgagtcaaaatcactattactttctgaagattccatgtctaaatctgaggaactatcaaattctgatgagtagcattttctccttctgtctgctctagattttttgtgctctcccttatgcggcacttcatgactattggttttggaagatccatctcttaccttttttgaattatttatcttctttccctctacaaatgtgaagatgcaaatcaacaactcacatattcttgagaatgacaaaaaccagctg

SEQ ID NO: 265257 - DNA, 237 bp, Glycine max
  unsure (1)..(237): unsure at all n locations
tcaagaaanagatggcctcagcaaattccttatttccttataggaattctatcaatagacctccaatctctaatggagagggttaccactactggaaaacccgaatgcatatttttatcgaggcactagatctaaatatctgggaagccattgaaatagggccttatatacccaccacagtagaaagagtttcaatagatgggaggtcatcaagtgaaagcgtaaccatagaaaaac

SEQ ID NO: 265258 - DNA, 391 bp, Glycine max
agactgacctccaccctatgcaaactccgtctttgccgctaatagcgtgtcctcgtcaacgtagcgggaaggaattacaaccatagaagagacccaccgaagaaactacctctccgaatccaaacttccttcgcttgtaggactgccctaattccccaaattcggggcttttttttttcttttttttttttgggctttcttatcagatcccggtggccttttccctccctttctcaggaaaattcccccgattttctcgagaaagtgaaacggaattatgagctttcaggacatcgaggccgggcgccccttcggttcgaggcgcgggttgatgaatgggaagcaagaccccacgcaagcggtggctgccggcatattccagataaacact

SEQ ID NO: 265259 - DNA, 474 bp, Glycine max
  unsure (1)..(474): unsure at all n locations
actcagcttgttacaaaacccattggtttcattagcttattataagaaagtttatggactaaatcccatacttcattccttttaaactgatttaattcttcatgcaaagccaacaaccaatgctcatcatgtagtgcttcacatcttcatcttccaaagcattttcttgaacaagagagttagtttcatcacaaacaacatgtacatattcttccacacataatgtacttctattaaacactctatatgccttgctttataatgaataaccaagaaagatttcctcgtcggcttttgcatcaaatttgccaagagattcatttccattgtttaaaacaaagcatttacatccaaaaacccttaaatgagaaatgtttggttttctccctctgtaaggctcataaggagttttctttaatatacgtcttactagaagcttattgagagtgtaacanacaatactaatatcatctg

SEQ ID NO: 265260 - DNA, 404 bp, Glycine max
  unsure (1)..(404): unsure at all n locations
agctagcggactataccttcgaccaaacactgntgtgattctgtctcggcccggatttaaggcgggctgcaacaccggctaggcttccctaactgtactggaggcggttaccgtggctttatcctctatagttttctaaagttttaacatgacctcccagatggaagccatttgatcttttaaggccgatagatcggccttcatctgttcctgcatgccctcttcattatccatttttctggatcgagtgttataggggtgccttggtgttttcttagttatgatgaaattcccaaagatataaataatggtgagtatgccaccaaaacatgaatatgcaaatgaatgatcggagcacttggatccacgccaaggttgtttagataacatgatgagttcacaac

SEQ ID NO: 265261 - DNA, 469 bp, Glycine max
  unsure (1)..(469): unsure at all n locations
tagctacacacacctatctaaaaactaagctcaccttcttgagaagctttcttgagaagctagagcttagctacacacacccatctaaaaactaagctcacctccttgacaaaatacatgagaatacaaaaaaaaagtccctactacaaagactactcaaaatgccctgaaatacaaggctaaaaccctatactactagaatggtcaaaatacaaggcccaaaagaaggaaaaacctattctaatatttacaaagaagagtggatccaaccttgatccatgggctcagaaatttgccctaaggttcatgagaaccctagggccttctttagtagctctagcccaagcctcttggagtcttctatccaatccccatggngggtaggattgcattaattggagacgccacttcaaggaaaagatgagtcaagaagaagctcaccaccataagaagccatggataagagctc

SEQ ID NO: 265262 - DNA, 370 bp, Glycine max
  unsure (1)..(370): unsure at all n locations
tcagctttggagattacaaggccatttcttctttttttaaaccaaccctcggctggcttcaatttatcagtgggctatccttctgtggccaacatcatgggatgttcccagcctttgatgacagctttccaagttctgctattccaggatttgagggaggccaccattcttgctttccaatattcatagttgctcccatcaaaaattggtggactgaccacaggtcctccttatttttccatgttcatcanaattaatctcgccacatctcactctgggatttcgagtgctggccttgatacccattgaaattctgataccatgggacacatgtctttcaggatgtcgcgacatcacccttcaaaacatg

SEQ ID NO: 265263 - DNA, 204 bp, Glycine max
aactcagctgtatgagctctgtatcacccacaacctatggttatcgtgttatcaccgcggatggagtatattatgcgcctccgtctccagaacctccatacggggctagctgttaatgtcggctgtgtggtcctataatacgatccatcacttacgtgtcggtgtctcaccggttgaggtcacatatggtccgtaaccacccaa

SEQ ID NO: 265264 - DNA, 310 bp, Glycine max
ttaatgactgggctgcaactgaaattttaaatctaatatacttttccaagtgtgagtatggatctttcatttggtaaaccatgaaacaaatatctaaaggcgttgggtcctcctactgagtaagttgatgcaattaaagatgtttttctaattaaagatgttcttgtggtctatgctgaggacaaaaataccaaacactgatatcctcagagtttggactaatgtaaatcaaactttgttacagatccctcttgtgaacttagccttatttaaaccacatttttcttcccacctaataaacaaaacttaa

SEQ ID NO: 265265 - DNA, 398 bp, Glycine max
  unsure (1)..(398): unsure at all n locations
gcttagccatggagtagtaagcacctcctctttctcctttgggttccattttcgtctttctcatataacacgcatggaagctcatgagaaatctttgtttttggggttttggttctatttgtggtgattcttggatttaggtgatgttgatgggatgggcttgttgttggagtggaggaaaactccttctttggacccaaagctcattcctttctcctccttcttcacaaagttctctttttagttctatggaggtaagtgaagctttcatttggttcgattaatgctttgattgtgttatttatacttggaatgatgatgccttggtgttctatatgctggattagatggaanactattttgattngatgctagatatatgaattttgaaaacttca

SEQ ID NO: 265266 - DNA, 398 bp, Glycine max
  unsure (1)..(398): unsure at all n locations
agctnattggattctgcatagaagagattatccatcgaggtttatacgatataaagagacactttgtcattctgtatagagcaaacggccctcggttgttacaacaattcacacacactgttcatatgaactattcggcacagatcactattcaattgtttaaaaaacgatattaactcaatgcgccaaaatggggaaaaataactttgggtcctccagtgatatacataaaacagattttatatgtttagcataccaatccaccggtgattttgagtgaatccgtgctcttaatatgagactctttataacagtgttgcaaggaaaagcgacgacagataaccaaatgggcattgcgagatccatattaatactcggccacatattcccctgcctat

SEQ ID NO: 265267 - DNA, 369 bp, Glycine max
agcttatctgagtccactctttatgggatatttatattaaataactttctcatagttgctctctatgttgatgatcttttacaaactggagatgatgcaaggctagttgaagagttcaagcaagaaatgatgcaagctattgaaatgactcatcttggtctcatgacttattttcttggaattgagaccaagcaaagttaatacaaagtgttaatctgttaaggaaatacccaaaacaaattttgaagaagtttcaatggaggaatgcaaatttattatcccaccaatgaatcaaaaggagcaattcaacaaggacgatggtgctgatcaaattgatgaaggaaattataggagtttgattgaatgtct

SEQ ID NO: 265268 - DNA, 365 bp, Glycine max
  unsure (1)..(365): unsure at all n locations
ngtcagcacaagtgttgtcgtccctatatatgtgagatattctataactataatgtgttgttaagctctatactcttcatccaacgagtgtaaatagaccaatgcattgacttaagatagttaaaagcatgaacgagttatgagtctgtgtctaacaaaaaatatcgtcaactacaagatctagccttttctatggaagaaatatctggcattgtcttcgcaaaaaaagctataaaaatagccacatcgcaagcacatgctcccaaaacaataagatcatcgttgatgaacaattgccacttccaactaaatcgaggcatcctctagttgccccatctatgttacatgtgacccagtgcactctc

SEQ ID NO: 265269 - DNA, 375 bp, Glycine max
cagcaactaaacaaggaagaccaattaattccaacccctgaccgggtccttcctagcaaaaccccctcaaaccttaacgaaaaaactgagttgccatatactaaaggaattatgcgactaagaaaacgtgcgggaataaaagggagggttaattgaaacaacgcacatcacgttcagaagctatcctccaagacagacgatgggcacaaacttgatgaacatagaccattggttaaatgttcgacaagctcaaagaaaaggagaaatcacaggcccacgagtaaagtaaaaaaaaaaattcgaaaaagaaaagtcccaaaccaaagaaaaaaagccgtgcaggtgtgcgaacaaaatctcaactggcacaaaaaa

SEQ ID NO: 265270 - DNA, 218 bp, Glycine max
acaatgacagctctgctgcctccacataaggcatcgaggaagggcatctcaccaggacatcctccttgcctgatacaaagaacaaatgtgcttgctctactaattccaactgttggtggagtggatatgcaacatctccaactagattggatccacgggcgccacaactgacaagattgatgggggggacatgtccataatttggaaagggacttgac

SEQ ID NO: 265271 - DNA, 407 bp, Glycine max
agcttaatgagcagattatattgtaaatgattttttagactcggaaaaaacaaatgatgtgaaaaataattgatttaccgtccttaagccaaattctttatgagagtacacagaattctggaaaaaccaaaaaaccaatggcatgaaatgctctggaatacaactctagattgatcacactcttgtcccttctcactcccccaaatttccattttcatcccaaaaattaacgtgttttggattcatgaccttcaacagcgtacaccttaaatatgtaacttacttgttcttctttccatcttttcctgcctcttgtttgaattgcatgtactgttcaagcaattccatcgtaatcctctacttctgctcgtcttacaacaacctcattgcctcagttcaatgttttc

SEQ ID NO: 265272 - DNA, 438 bp, Glycine max
  unsure (1)..(438): unsure at all n locations
tgtgcaaatcaaatcactcctacatntcatctctagcatgcattttctttctttacccactcctcacgtttggttntttagggaaaaacaccataactaaacgcgccgcaaggtatccctatcacaccagatccaaatctagaacgatgggtgatcaaaaggagacgcaggaacagatgaaagctgacatgtcggctctgaaagaacaaatggcctccatgatggaggccatgttaagtatgaagcagctcatagagaagaacgcggccaccgccaccgctgtcagttcggctgccgaagcagacccgactctcttggcaactacgcaccatcctccctcaaacatagtatgacggggaagggacacactgtggcacgatggcagccctcacctgtgatacaaccgagcggcttacccttatggattgccgccaacta

SEQ ID NO: 265273 - DNA, 419 bp, Glycine max
  unsure (1)..(419): unsure at all n locations
agcttntntgagaaaacttgcttaagaagttttagcttggcttctttcacccctctaataactaaggtcacctccttgaaaagcttgcttgagaaaattcctaaagaagcttgagcttagctccacaccttctataatagctaagctcacccccattccaataatacatgaaaataaaaaagaaaaagtgtctactacaaagattactcaaaatgccctaaaatacaaggctaaaaccctatactactagaatggcccaaaagaaggaaaaacctattctaatatttacaaagaagaggggatccaaacttgacccatgggctaaaaaatctaccctaaggttcatgacaaccctagggccttctttagtatctctaactcaatcctcttggagcctcttgctcatggctctggtaact

SEQ ID NO: 265274 - DNA, 381 bp, Glycine max
  unsure (1)..(381): unsure at all n locations
gnganagatctaatagtctcaatctaatgttgatgatattgtctttgcagatagtattaagacaactctgcctaaaatcgaaaatgctaaaaagtttatggggttagtgggagagcactcccaaacagctgataaatctgttgttgaaacattaatgagtacattgatcaccatgaagtttgatggttcacgtactatgtatgaacatgtcattgagatgacaaacattgcaacaagactaaagaccttgagaatgactatgaatgagaacttccttgttcagtttattttgaactcattaccatctgagtatggctcgttccaaatgagctataataccatgaaagataaatgaaatgtgcatgaattgcctaatatatt

SEQ ID NO: 265275 - DNA, 145 bp, Glycine max
  unsure (1)..(145): unsure at all n locations
agctttgtaactcagtgttaagtattgtttttttcattgtatgatacgncacacacatggttgtcggcttttantaataaactcacacacctcaaacgctactcatcaacgacattctccttacgtcgctaaccaattaatatca

SEQ ID NO: 265276 - DNA, 469 bp, Glycine max
  unsure (1)..(469): unsure at all n locations
tcctcaatntttgtggattgatgcacttaagactgctgcatatatattaaatcgagttccaaccaaggctgtctcaaagacaccttttgagttattcaagggtttgaaaccaagtttgcaacatatacgcgtttggggatgtccgtctgaagtaagaatttataatccacaaaagaagaaactagaccctatgactattactgggtatttcattggatatgctgaaaagtctaaagggtataggttctattgtccatcccacaacactaggattatggaatcaaggaatgcaaagtttcttgaaaatgacttcatcagtgggagtgatcaatttcagaacatttcttctgaaagggatcactatgaagctgaaccttctgggataggtaatagattgtagtcattcccacccctcaagtcaaatgggtggtagacaactagtgattgaagtttcacaagctgttgaaag

SEQ ID NO: 265277 - DNA, 324 bp, Glycine max
attgctactaactcgccttacagaccaaaaactgattatcttctaatattatagattgaattggacaactcatttatcaaaggcagaagtatgtatatcatacttaaccgcccatagaggaggtggcttcaaagactgaagggcgaacctacaaattaacggaaatgttgtgaatattcgtcgacctaaactaagggagacctcttaataaaatattgaaaatgatttttcactagtgtgcaaaaataaaatgcggaccgtgcacttcatgtcgagccaagggtggattgtcaagcatttcgacatcattaaaagactatttgg

SEQ ID NO: 265278 - DNA, 407 bp, Glycine max
  unsure (1)..(407): unsure at all n locations
actaagcctgcacatgctcaggaagaacatgacccatcactttataaggtgcaagagagatagttgggcgctgcatttattgagaggacatttaatcatattctaaagcttgtatcataagcatgcctttacttgtctctgatgtttagctatcttaatgaaatgctagtagcttttgtagctgcttgccacccaatttgctctatataagcagacagaaagatgcaaggctaaagtttcttattttctttgcctagcgataaccatgaaaactgattagacccactaagatatccattgacatgtattctagtgcacgtctaatancaatttggttatgttcatgttgcttaattggctcgatcaaatgggaatttcactctcattggtgcttcccccgaatattt

SEQ ID NO: 265279 - DNA, 404 bp, Glycine max
  unsure (1)..(404): unsure at all n locations
agcttnatatctgacaccaattttgttactttcaataccatctaaggaaatctcactctctcaagcagcatccacatagaaatgtttctccctaaatcctgtggttgcccagggctgccctgtcacaaaaaaaattgtaaatattttgtttaagcttgtaacagttgtgaatcatgccgaaagcatgtaaaagtagttcatcactattttcttccataactacaccggtaatgccaagattaatgtgtgtgatttgcattaaaaatgggaaataaggtcaatcattaaaagaaatgcctaaactagtggaggagactgcagtgactaaagagagcacacgactctacagacttgcaattgcaatatatcagactccttataattatatttttctaatatgattt

SEQ ID NO: 265280 - DNA, 429 bp, Glycine max
  unsure (1)..(429): unsure at all n locations
ctctcttattagtgcacaactccttcagaattggcttatcttnggaattgctntattgcatccaacagaggtatgtgtacctctacttttcaaatgtttccaagatctctttctctgcctcttccattnttttgttggaaactgctcttggagggaatggaagaggaggaatgtgctgcttctgcaaatcagaattaccagtggaagattcacctgcacagaaattgttaggtaaatttttgtcgttacctttttctggagtagagtgaagtttggcaggttcatttgcagatgaagaaggtgttatgggttgaggtccttgacactgctttcccgacctcaatgaaatggcactgacattnttgggattntggacagcttgngacggcagctggtcagaattctgggacctgtgttgattcaattgtg

SEQ ID NO: 265281 - DNA, 391 bp, Glycine max
  unsure (1)..(391): unsure at all n locations
agcttggaggggtggatggggaccctgtgttgatacnaatgaggaaaagggctacgtacgtgtgcgtgagctcaatttaaaggtgggcaactggggatggtgtgcttatgcctgggcttgtggaaatgggatagctgatttgtgccatcgcccgatcgccaccttgtaccacatatgacgggtgccccataacccaataagctcggtgtgagaatgcgtggaagagtcactcttccaacttttattatttgaccacacagtggtacctgaggatatgtctcgggggtcacaaaaccttagggacgtcaggtggggtgctattgcccaaaaccaagcttgaccaatcccgacacaccccgggcatagtcagccagtgagaacctgtgacgta

SEQ ID NO: 265282 - DNA, 393 bp, Glycine max
agctttgagccaattcaaacgacatattctttttactcggatgtctgattgagtcctgtaatataacgagacgctcgaaattgaatattgaacctctgaggaaattcaaacgacaataacttttttctcggatgtttgattgagactcgtattatatcgagacgctcgaaattgaatgttgaagctctgagctaattcaaacgacaataacgttttactcggatgtctgaatgagtcccgtaatatatcgagacgctcgaaattgaatgttgaatctctgagccaatccaaacgacaataaatttttactcggatgtctgattgaggcccgtaatatatcgagacgctcgaaattgaatgtggaagctctgagcaaattcaaacgacaataac

SEQ ID NO: 265283 - DNA, 464 bp, Glycine max
  unsure (1)..(464): unsure at all n locations
ctcagcttaacattcaatttcgagcgtctcgatatatgacaggtttcaatcanacatccgagaaaaaaggtaatgtcgtttgaatatgctcaaaggttcaacattcaatttcgagcgtctcggtatatgaaaggactcaatcagacatccgagtaaaaagatattgtcacctgaattggctcagagcttcaacattcaatttcgagcgtctcgatatatgacgggactcaatcagacatccgagtaaaaagttattgtcgtttgaatttgctcagagcttcaacatttcaatttgagcgtctcgatgtatgacgggactcaatcagacatccgagtgaaaggttattgtcgtttgaatttgctcagagcttcaacattcaatttcgagcgtctcgatatattacgagactctatcagacatccgagtaaaagttattgtcgtttgaattgctagagcttcaaca

SEQ ID NO: 265284 - DNA, 390 bp, Glycine max
  unsure (1)..(390): unsure at all n locations
agcttgtccattacttgcgcgtttccaccgttgtgtcgcattgttgaaatcttggcacaccggacaaacaagctgcaccttatcccttcctctttttatgattcactcacgtttcattgattcaacctttcttcggttcctccagcgctggcaaggtcggatctcantccaacgagctcgtttgacccccgccacaaaatgcataaatggttggtgttagggagtgcttggtttggtttggttagttagagggaaagggaaaaggttagagacaaagactaaagggtgcttgtctgagtttaagaaagaggtttagaaacaaaaatcataggattctgaagaaaagcgaggttgaagaaagaaagacgtgagtgagaatatagagagccc

SEQ ID NO: 265285 - DNA, 219 bp, Glycine max
aactggaaccacaggaaccttggatcctaataacacagcatctgttaactaccaggtttcctactccacctatttgcagatcttgatgaacttagattcgagtcacggggctctgagaacctatcatttctagttgcagatctaggtgaacttagatttgagtcacggggctccgagaacctatcatttttagtggccaatctgtgggaatttaaattg

SEQ ID NO: 265286 - DNA, 313 bp, Glycine max
agctttcatcaatgtgacaaaagggaattcttccctcttgtagcccttgtggctgactcgtgcctctctccctcctttctagggtgatcctcctcatgtcggcgtgcataggttcgtatcccagcccaaacctttcgcgattctgtgtgaactctactagacatgctatgccatttccgttctggcccaaacccatttcaggctcatatccgtgccccaacatcacccaagctaccatcaacgcggcaccagatgagtgcggttgtactgggggagactccacctaagcattgctcacaacttccaatgcctg

SEQ ID NO: 265287 - DNA, 411 bp, Glycine max
gcttttgctgtggaagcaatgcctctcattattattttgatgatgccaaaaaatcaagaagtcaacttgatttcaggattgtcatcatcaaaaagggggagactgtggaagcaatgtcttccaagattattttgatgatgccaaagaatcaagaagtccaacaagtttcaagaatcaagatcaagattcaagattcaagaataatcaagatcaacatccacgattcaagtaaagaatcaagactcaagattgaagaatcaacagaagactcaatcaagataagtattaaaagaatttttcacaacattgaatagcacaagaattttttaaaaagaaaaatcttttaccaaagagttttattctctggtaatcgattacccaaaggcagtaatccattaccaatagtcagca

SEQ ID NO: 265288 - DNA, 450 bp, Glycine max
gtaacccatcaacttctcatagtagaatactggtaatgtgtctactatcattgttatcatctgcttctccgccattgggggcactatttgagctgcccaatcccttcacccttggccgtattctttgaacgactctccttcttgcacaagttctatagctgcattctatccaaagccatatcagaattatactagtactacctaatgaaggcaaccattaggttcttccaagaacgaacccgggaagattccaggttggtataccaagtgattgctgccccagccaaactttcctggatgaaatgcatcaataatatttcatctttcgcgtatgccccatcttcctgcagtacattttcacgtgattcttggggcaagtagccccgtgtacttagtcgagactaacaccttgaacttctgacgaatgaacatgccgggtactaagcacac

SEQ ID NO: 265289 - DNA, 426 bp, Glycine max
  unsure (1)..(426): unsure at all n locations
ttaagtcacctgcagcatcaagcttgctgatntctttaccactaaatgttcatttttcatactggccaccccgacaccatgtatctagaataacaaagaatcttgcatctaattaaattattgcccaccaatgattgggagtcttatctcaattaattaaggacatattcctgatatattttcactaaatgaagcctacctagcagtcgctttatatttgagtgaacaaatgccttttattttatatttaggtacacgtgaggaagggaaaggaggggttactattttgataatatagacaataacggggtgatcttgctaatgagtaatcttgcgctgattattaaagaatacttcaacgaatatggtgataagggaggggacacataaccttggtttacgcaagttcttcaaaatgctgaacag

SEQ ID NO: 265290 - DNA, 374 bp, Glycine max
acttccgaggatgatgactaacgtgatgaacttacagctcaagagactcggcgatcgtctcatctctagccaatctagaactagtcaacgagttcctgaggcatgataatttgctgactcgagaggatagcctactcacgcgactctggagtcatgagctcgtgacatctgatcaatgctcacgactcaagggattcttgatctcatgaatcacgatgaagattcatcactcatgatgtccgagtgccgaaaagactcatccagactagcgtttataagggtattcctactctgggagcacaggagttatcgacataaccgtgtccaaagagttttatctctgtggtaatggatgaccatattgatgtaatcga

SEQ ID NO: 265291 - DNA, 416 bp, Glycine max
agctttgcacgtgtcagtcaagtgtatggactatgtcgtaaccaaaatgctcatcgataatggttccaatttaaatgtgatgcctaaaagcactttggagaaattaccattcaatgcttcccacttaaagccgagttcaatggtggttcgtgccttcgacggcacccgccgaaaggttaggggagagatcgatctcccagtacagataggccctcacacctgtcaagtcaccttccaaataatggatattaaccccccctacagctgtctgttggggcgcccgtggatccactcagtgggggttgttccctctacactccaccaaaagttgaaattcgtagtggaagggcatctggtcatcgtatcaggcgaagaaaacatcttggtgagctgcccatcctctatgccttatgtgg

SEQ ID NO: 265292 - DNA, 446 bp, Glycine max
agattccctaagaagctagagctgagctacacatacctctataatagctaagctcacctccttgagatgagaagctagagcttagctacacaccccctataatagctaagctcacccccatgacaaaaaacatgaaaataacaaaaaaaagtccttattacaaagacaactcaaaatgccccgaaatacaaggctaaaaccctatactactaaaatggccaaaatacaaggcctagacgaaggaataacctattctaatatttacaaagataagcgggctcatacttagcccatgggctcgaaatctaccctaaggctcatgagaaccctagggcctttccttggatctctagcccaatctacttggagtcttctagctaatgcccttgcggggtaggattgcatcaggaaactcctctaactcggcgcccatccagcaacacaca

SEQ ID NO: 265293 - DNA, 416 bp, Glycine max
  unsure (1)..(416): unsure at all n locations
acctgcggctgcaagctntagaaaaaaagagattttgtctgtttttgattatcggcttgacattgacttgcaactcacaataatctgagtctaacatgaaacttcatgagaatatgattttagttggtcggccctctcttattaaatgttttgtaggccaatttaaggaagaacaatggcattggtattaatcttgtacaatgataatatagcccaaaccttgtttacaaattacccacagaaatgaaaattatgtagtggagaaaaactatcacggactaatatgataaaagtcacagagaaatgcaatgttaccaatcatagtcatgctttcctccttccgtggatgacaatagatcatcaatcccacttgtggccagttttgctgattcaaacgagagtatccctatccagaa

SEQ ID NO: 265294 - DNA, 230 bp, Glycine max
  unsure (1)..(230): unsure at all n locations
tttaatctcagcttacaagtgcggttgcctgatgaagagaaattgtttttattgtccanacttcccatcgaatctcccgcgtgagtccgaagatcaagcaacttaacacgaatggagggggaagccctatcacacgattagctaacctctcaaatctggtaagtaatcctaataaatcccacctttaaaatttgaaaaaacctactttgattattttaaaaaacgggcca

SEQ ID NO: 265295 - DNA, 407 bp, Glycine max
agcttggaaggaggctccaaaggaggaatataagattttgtatagagagaggggggagctcgaaattgaaggaataaaagagggagagaagtggaactttgaagtatgtctcacacgactctcattcatcaaagttacaacaagtgttacacatgcttctatttataggctaggtagcttccttgagaagctttcttgagaaaacttccttgagaagcttctttgagaaaacttccttgagaagctagagcttacctacacacacccctctcataactaagctcacctccttgagaagcttccttaagaagattcataaagaagctagagcttagccacacatacctctctaatagctaagctcacctccttgagatgagaagctagagcttatcttcacaccccct

SEQ ID NO: 265296 - DNA, 309 bp, Glycine max
cttcaaactcagctttcttgtggtgagggtttgcacgttatggtctatactgttgcaacccattacctatgcttttcttgggtttacttattttcccccgggaaaccataaacctctcggttggggccccccctctttacatatcattgggggggctgaaaccccggggggaggttttcaaaaaccttacccccaaacctcttccaaattttcggaactgtaaggaaaaatccctttccttccatctggactgtaagtttctttaaactttaaccttttccaggtttaactgtccctaacagggacccc

SEQ ID NO: 265297 - DNA, 403 bp, Glycine max
  unsure (1)..(403): unsure at all n locations
agctttagctcaggctattnggaatatatatttggaaaaaccgccggagctactgagtatcaaaggatggaccacttccaacaaaacaattgatgcaatcctaccccccaagatcattggatagaagactccaagaagattgggccaaagatgcaagagaaggccctagggttctcatgagccttagggtagattcttaagcacatgggccaaggttgggtccaattatctttgtacatattagactaggatgtcattatatttggtccttgtatttagggctccatattgtaggtagggtatcctaaaaatataggatttttcagcccttgtattttagggcacctaaactagttcttgtattatgggtagttttgtaatttcacatgcactaagtggatat

SEQ ID NO: 265298 - DNA, 440 bp, Glycine max
  unsure (1)..(440): unsure at all n locations
tccttngaaagattcctagagaagctagagcttatctattcacacctctctaatagctaagctcacctccttgagatgagaagctagaacttagctacacaccccctataatagctaagctcacccccatgacaaaaaacatgaaaatacaaaaaagagtccttactacaaagactactcaaaatgccccgaaatacaaggctaacaccctatactactagaatggccaaaatacaaggcccaaacgaaggaaaaacctattctaatatttacaaagataagcgggtttatacttagcccatgggctcgaaatctaccctaaggctcatgagaaccctagggccttcccttggatctctagcccaatctacttggagtcttctacccaatgcccttgcgggataggattgcatcattccctccaccttggaaaggatttg

SEQ ID NO: 265299 - DNA, 426 bp, Glycine max
ggaccttgagtcacctgcggcatgcagcttgtggtttagggattgatgtttgtttttgtttgtgtcaaagcttgagtttgtgtttgaggtttgtgttttggacaaaaaactcgaaaaaaaaggtttgagtttaggtgtatatttctcttcatagagttgggccaacgaaactgttctgaggagtgatgtacgtgattgcgcaatgacatccattctgatattaggttttaatcctcccataaagcaatccaatagagctctttgtgtaattccttgcactcgattagctaaagccgtgaactgcacgtaatatgactgaactgaaccaatttgagtgagttttaacaactgagatctaggacattcccacggtgatgggccaaatcttgtctctaaggctcgcataaaagcaatccatgttttgaa

SEQ ID NO: 265300 - DNA, 476 bp, Glycine max
gtttacatgcatgtgcacaccatatttactatactttgttcaactgatacaatctatttgattgaaaagataatttatactactcttctaatgtagtggacaactaaaattaaaataatataatagaaaatactgcttaagccattcaaatcaagtcattttgaatctcaccattagtatcatgcatgtcaaagataaggagaatcaggcatcgtaatgcataacacaaccaaacattaaaagaaaacatgcttcctaaagccaaccaaggtaaaaatgtattcatatttcatgaactttttcaaaattataagacacatataaccatatatgaaaacatggcagaacaatctcaccacatgaacaacatagaccacacatttcagaaaatgagtggtaaggaaaataataaagcactgttaataaaaccgtagatacactaagataacaaaggtgtcatgacaaatggaacacat

SEQ ID NO: 265301 - DNA, 405 bp, Glycine max
agcttgtatacatgatttggatattcatgatccttataacttgagggttgggaaacataaacttcctcttcaatgtatccatttaggaaagcacttttgacattcattgggtataacttgaaatcaataaagcaagcataagcaagtggcaatcttacgacctctagtctatctatcggtgcataggtttcaccaaagcctataccttcttgctggtggtaccctaagcttcatgtcttgccttatttctattgatcaaaccatgttcatccaatttatttttaaacacccatttatttccaatgaagttcatgtttatggtataaggtatcaattcccatacatcgtttcttttgaattgattcaattcctcatgcattgatatagtccaaaactcatctttga

SEQ ID NO: 265302 - DNA, 440 bp, Glycine max
  unsure (1)..(440): unsure at all n locations
ggccatgtcgtcgtcgttctgacctaaaccacttcctggcttgtaccctagcctcaacattacacgggctaccatcaatgctgcactggatgaacggtgttacactgggggagactcgatgtcgcaacctacccttcagcgggagggcgacgcgagactcacgggtgcatcttccaaggaaggaaaacacgcggagttgccaccaacgtttattcgaggaaaacgtcggataaaaccagaaaaggcgtggtctacgaactttaagtgtgaaaggttcgggagttgtatttatgcacggngaaggtactagcaccccacgcgtccgtccaaggtacgacagcctttaatcaagtgtgcaaatatgacttcaatttgttttatattccctttttagggttttatgtctttctatgctttctgatttnttatctttttgtggg

SEQ ID NO: 265303 - DNA, 398 bp, Glycine max
  unsure (1)..(398): unsure at all n locations
agcttgtaaggaaatgccgcataccngtttatatcagtcacaagcggcatgtggggccgatggcgcacattatttttgagacagtgatagatccggccatgtgcttctgctccaagtgactaccctgcgacataatccattacctctctttctatcaatgttctaaaagtgatcaacaaacactttcccttgattatcttgaggagttcatcacttacattgtttttgacaggtttccagctctttgggaagaatctttaatcagtgaaggaaatatacttgacacttcatcgaaccaaatgactactttgttcatttaatgacccccgggcaattattttgttctctctataaaccgtcggcttgagtcttttgttacaccggctgcacgtacttct

SEQ ID NO: 265304 - DNA, 304 bp, Glycine max
aggctcctgcaatatacacaaatgttcatgggatggttgagccaactcatgcacacacgttcctgttcagcgattactcgcacagagattttcttgtaagctatatcaaatgcagcgcatgcacgaatgcatggcacctctcctgcgctagattatatatgggcacattcatggagtattagctacctgcatgacatgcacttgcttgggtaaatgtacatacgtgcatgctcaagggctcttggatacctaaaaatgcacacgcgctcattgtggtatctctgatacctatgcatatacaaac

SEQ ID NO: 265305 - DNA, 401 bp, Glycine max
agcttaggaacccaatcttttttatcttctttgcaagaggacatactcatggctaggaatccaaaatttggttttagagttagaaaagcatgaaatttaggactagcttgtgagagtttttttactcgaatttgagctgccccatgatcgatactttgcacctaagtgatgtgggaaatgcttttcaatggtatgtggatatatgtggggcatgaaattctttgcaaagggtgaatggatattgagatcgcttcctaaatgaatgtatgatagcatggaattcccttttgaatgcaagtgtgtgcataatgtaaatagcttgccaatatgaataaatgtgagtgaaacaataaaaatctgtatgatatatattccaaatgtgtgtagttagtttgtaatac

SEQ ID NO: 265306 - DNA, 331 bp, Glycine max
  unsure (1)..(331): unsure at all n locations
taaagcgggttgcagtaccggctccgcttccctaaccgtactggaggcggttgtcgtggctttatcctctatggttntctggagttataacatgacctccgagatggaagccatttgatcttttaaggccgataaatcggccttcatctgttcctgcacgccctcttcattatccatttttctggatcgagtgttataggggtgccttggtgttctcttagctatgatgaaattcctaaagacataaacaacggtgagtatgccaccaaaacatgagtatgcacatggatgatcggagcacttggatccaccccacggttttaaacaacgt

SEQ ID NO: 265307 - DNA, 377 bp, Glycine max
caaccttctatcccctgtgaggttgatatactattgatttttactttatttctaaaccggccctcgttaaaaaactcatttgacttcaacagcttttttaagctatccctagtgtttctctcaaacaaatttcaagttatctttcaaaacatacatcccctactctcctatatttccttccattcccttattatttcttctagaacacaatatgatcttattattcttattcactttatattttttaggtattccaacaactacattcaaataccttataattaataaattaattgtttaactttcattaacttttccacttttagtccccagttcactctttaatcagttttatcaaacctaatgtttctcaatac

SEQ ID NO: 265308 - DNA, 419 bp, Glycine max
acccacgcttgacgaatagattaatcgagttacgaaccttgagaacataaccttatccttccttcttaccgacaccgtccgcaagtatgcccataccacagaatcaatccggtcactccacatatactgaaactcgaagttccccaatttgaccgctctgacccctcacggcgggtattcaaaaatacccaaattttcgaataccacgcaacccctgaggctgagaggctcaccgtggcgtccttttacatggacggaccggacctcgcggggtttcaatggatggctcgaaaccaccagctcaccacgtggacggggatcctgcaagcaatccaaacacaatttgctcaatctccatatgaggagtcaacaggactcctctctaaactatcccagaaaagcacagcgagggaatacct

SEQ ID NO: 265309 - DNA, 296 bp, Glycine max
caaaagacaaatgtattgggcatgtgtttgcccaccatcaatgcataaaatagatgactaggtgaagccgatatttcttctctcttttcctcaccccttttgtgacagagcaatggaaaataaaaattaaataggaaaatcctgtccgaaacaacaaagaaatatacattttcatcgattgccaccaaataaggcaaaaaaatggttaaaacagtcttggcagaggaagaggaccaacagaaaggcggagcaccccaactatattaggaacctcccaagtgagagaaacccaaacg

SEQ ID NO: 265310 - DNA, 477 bp, Glycine max
ctaagcttataaccatgttccctcatactacacgcctgcataatttacttctctatgcattcaacattaacacaaaattaacatcctaaacatcaacatcaaccataggtatattgccacaaacctatccttattccccatatattgacgttgaagttacaatagtgtagataaacatgtgcctctgtccaataacgaggcactaggtgcacttagaaatgcatacacaaggctccatccatgcagcatattagtaattctgacgtaggaagcaaatgataacatataatttgtagtatgaattagttcaataatttgtgataaacacaaattacaaataacaattgcatattaagatacatgaatgtagttgtcgaacctcatatttgctgatgtcaattggtctatcatcaacactatggacattcgatgtacagaatgacctgcaaaatgggcatttcgatcgcacaacaaaaa

SEQ ID NO: 265311 - DNA, 407 bp, Glycine max
agctttaatctaatatgtacatagataagtggtctcatactaagtccacgggcctgaaatctaccctatggcgcgtgagaatcctaaggccttctcttgcatctctggcccaatcttcttggagtcttctatccaatacccttggggtgtaggattgaatcaatcctaggtcaaggttatggcaaaaagttggtgtttggctcaaaaggcctgcaaatggcgggacataatgtatgtcaggatatctgcttagccaaatggcttataaagaagggattgctcaaatcatttccgcaaaatgaatattatgacaattacaaattcatgcaaaattaatcatagcacacatccatgcggacactcaaatataaggctttgtgaccatgcaaacactaaggtttagagtt

SEQ ID NO: 265312 - DNA, 465 bp, Glycine max
  unsure (1)..(465): unsure at all n locations
gctacttgcttcttcccaaattgattagttcactcccattntcatttccctcgaattgatcacggaaacgttacaaaagtgccttgaccttaattntattattttttatccttcttttccctaattttaagtgaaacatgcttgcccagggtgctggaccccttcctctcagccctctatgccattttatagcaaaataagggaggtggtggccgcccagtgttggatcgagtggcctcagaataattaagaaggggggttgaattaattattcctaaacctttagtaagttggagctcgcccaagcaagctggttgcttcgagctgaagctttcccatggcccaagcgagccaaatgctggcctgcgcgagtttagacctagaaagttcctganaatgaccattttccncttttgcttgtggctntctgttccagttatgacaatcaaacatcaaccctgagcg

SEQ ID NO: 265313 - DNA, 410 bp, Glycine max
  unsure (1)..(410): unsure at all n locations
agcttctatagttatggaataatcgaacatctattgtggtaatcgaatantccgatacacgaagaacttcctaagtttcctacacaatataaacgattactaaatgtgggaatcaattatctggaaccacaacgacttccttctgttggaactagcttatgtaatcggttactaaaaatgggaatcaattaatttgatgattcttatcaaatttcaagagaagtgagttttgttgcttgttctaacactttgtaattaattaccaaacttggtaatcaattacactatgttgaattcattgcttctaagaaactttgagattaatacatttatcttatcatgttggattcctactaaacctatatgataaaactaagtctaaaacacttgacatgcctagtctaaaaaca

SEQ ID NO: 265314 - DNA, 465 bp, Glycine max
ctcaagaaagcttctcaaggaagctaccttattctataaatagaagcatgtgtaacatttgttgtaactctgatgaatgagagtcttgtgagacacaactcaaagttcaacttctcctcctttttcttccttcaatttcgtgctcccccctctctctatctctccctctttcttttcctccattgaagcatcctctccaagcttcttatccaaggctcatcttggtggtgaatctccttcttccatggcttattccctagtggatggcgcctcctctcacctcttctcctttgtcttccgctgcatctccatggtggaaaatcaccattaaaggacctcattgaagctcatagatccagcctccacagaagccccacaagcaagatttcatcaataaacttcataagattttatcaatgtgatcataattatcataatatctacctagagagcaaagctcattca

SEQ ID NO: 265315 - DNA, 477 bp, Glycine max
  unsure (1)..(477): unsure at all n locations
tgctctanatatacattgatgttagtatatatagggtgtgtgttgttgccattcttgttttaagggtagcatttcttggtaaaaactaactttccaaatgtttgccttcgcaggaatggccccgacgaagcttgcctcatagaggtccaggaaagacaaagcggccgaaggaactaattccgctccggagtatgacagtcaccgctttatgagcgctgtacaccatcaacgcttcgaggccatcaagggatggtcgtttctccgggagcgatgcgtccagctcatggacgactagtatactgatttccaggaggaaatatggcaccggcagtggacatcactggttactcccatggccaagttcgatccagaaatagtacttgagttttatgccaatgcttggccaacagaggaaggcgtgcgtgacattatatactgcgtaaagggtcagtggatcccgtttgatgccgacgctat

SEQ ID NO: 265316 - DNA, 338 bp, Glycine max
cactatcttttgagtcagcattgatgtccatttgaataaatgattgaaaaactctgatttgaagatgcctcctatccaatatgatacaatggtggtcagttgttatacatgcaaacaaagccaatctttattcatggatgtacatggtgtaactgtactcaacttgagattcttgttgtgagccttggttttctttcctgagacgatgttggtttatctttacatgcactgaaaatcccttctatagaagctggacaaaatttatcttgctggcattttcctccatcacacctttctcttggaagctgttgactgccttaattacagaaatgcaatat

SEQ ID NO: 265317 - DNA, 370 bp, Glycine max
  unsure (1)..(370): unsure at all n locations
tcagaaccatacagcgaagcaattattaaagctctgtttgagcaaaagaagccatgctgcggattagatatcgtatgagccaaatgggggaggctgcaggtgtntcaataagttcatgaactaattgagcacttatttttatggttcatatgatggcgattttgattatacaaatatatattgtgggaatatacattacccttgttttgatcacattgtgattttttttttttgggtagaaatttagcgatattagctttttccattaacacctctttcggtactactacatctctcatattcctatggaataagaatgatcgtgaagctaagttgcgcaatttactcgcaaataatatatgtcatccca

SEQ ID NO: 265318 - DNA, 401 bp, Glycine max
agcttataattttaaggtgtgactatgccacctggctttttattctgccactttagctatttcttcgataatgtttctgtgggttgtgactcttgctccttgttgcccaatttcagtggccttccctgagctgaaaaggtcccatgaaaaatcattaaggaaagaaaaatagcactgaccatgaacccaagcttcgaattggccattattgttagagagtgccaggcctcggagctgaaactattttaatgtttggattgtgagaactgagattatgaaatattgtggcttgaaaaatgtggtatgttaaggtgagtattaataggccacgagggaagggtgggggctcaacatcaatatctatatttagttggaacgtggggaaatattaatggtgaatg

SEQ ID NO: 265319 - DNA, 457 bp, Glycine max
  unsure (1)..(457): unsure at all n locations
actcagcttggatgatgcttgcgcatatgccttgaagaattttgctnaagtgatcctgccactgtaatatgcagctttttcgctttcctctttccttttgacagaattataggcagggatggcttcatttgaaaaacatttgtttactccttttccttgtatttgttttcaggtcactaattgcaagcatgagttccacctgcagtgcattcttgaatggtaagttttaatattttttcatgtgtgtctttcacaaaacaaagatatttagtgttatttttacctctatgttgtcatagggtaatatatttttggttcaattggttcctgtgtattaaaatggcttctagctntcggcattctcatgaanagttagaacttgaagtctaataaatgcattgttttggaaaggtgatatactaaccacctacaaaattggtagcagctctaaatgaaa

SEQ ID NO: 265320 - DNA, 403 bp, Glycine max
agcttgctgtcaaagagctaacttttttgttatgttttgtttcactgacaagtcacatattctttatacttgaagctttcttaataaaatggcctatttggaaaaaaattattgattctcattccttaaatttgatggtttaggtatcttctgttcgcagataaataacaaaatattttaaggagagaaacagtaaatgattgttacaaaatatgtcttttatttgccctaaaatactcccttttgtttttttatacaagaagcaaacaactaattcatcaaaaccaatgaaagtagttaattaatttattcaaaaaatacccatagaattaaattgttttagtagtgattatggttaatgacacgtcacataatcaagagataatcttttctactgatgaat

SEQ ID NO: 265321 - DNA, 458 bp, Glycine max
  unsure (1)..(458): unsure at all n locations
ctcagctgcatctagtctgattctttgngtgtaagcctactatgtgtgatacatctctgttcgtgcatgctacaccaaatattatcacctacattctggtttatgttaatgatatcattataacaggcagctccacctctgcagtccaatatgtgatttctaaacttcactctctgtatcctctcaaagacctagacaccttacatttctttctaggcatcgaagccaaatacaccactactggggctcttctcctatctcaatccaaatatatcactgatattttaaccaaagccaatatgcataatgccaaacccataaagactcatcttgcccttggttcaaaactgcatatggatggtacaaatgccttttctgacccaactctctacanatatgtagttggagcccaacaatatgccaccatcattcgtccagatatagcttatgcagtaaat

SEQ ID NO: 265322 - DNA, 349 bp, Glycine max
tgcatcgggagaaattgcttaattaatgaaatctccgtgatgaatgttacaactacagcccatataatttctttgattgagctggaacttagagatcaattagaggaattcatacctcagtacttgattgtaataacaatggttagaggaaagacacataaagcttctggtttaataagtagaattgtgtcttgacagaatcacaatgacatgaattgagttctactaatccattgaattatatttggtgtgatttatatatgcatctgatatatatgcatttgtatgccacatatttggataaattatgttgaactaacaattataatccgtgggcttggataaatta

SEQ ID NO: 265323 - DNA, 422 bp, Glycine max
  unsure (1)..(422): unsure at all n locations
tcaaggtgctcattgacttcagatcgctgcanagaactatctagatctgtatggggatcngcagaagaacatagaccacagactcttgcaacaggtgcatatttctgattcatggcaagttgagtcactatgttgaccaatgcatcaagttttccctcaagcattttattttcagcacatgaagatgaatttgtggccacctcatggactcctctaaggacaatcacatcatttcttgcactgaattgttgggagttggaagccatcttctcaatcaaattcctagcctcagcaggggtcatatgaccaagagctccaccactggcagcatcaatcatactcctctccatgttgcaaagtccttcatagatatattgaagaaggagttactcagaaatctggtggtgacgacagctcgcaca

SEQ ID NO: 265324 - DNA, 412 bp, Glycine max
agcttcttaatagaagatggaaacagtgattgacaactcatttatatataccaactaggaacaaattgtgagatcacaataatgcatgcataaaatgcaagttttattaattgtacgaattacacaactatcttacaattatttatttagataaggaatgacattcttggctaaaccagaaacagcaaaatagtatcaatgatttccttgtgattttaaaatactcaccgtgcgttgtccagatataatcctaaaaacattagttagtttaaggcgcttctcttctttccctgagaaccatatcaaaacagattcatcctgaaagcaatagacaaatcaaatactttcaactgttgataacccaacattattggaaggaaaaaaaaacaacagcaaaaaatagaaactgtca

SEQ ID NO: 265325 - DNA, 413 bp, Glycine max
  unsure (1)..(413): unsure at all n locations
ggactctgacaatttcacgtttagcatcactttttgttgtgatcatgattgnngcgatagtgacaacaacatttcaatacatgataacgattcttcaaactcctttctttttaacaacatttgtgatattgacatcatgagtagaaattgaaaactctaacattccaagtagattagaatcgtatggaaacaaacttaactgcaatgatggtggaaactccaacatcaaatggcatgtgattttgccgatctaaatggtgaatgataaatcataatctgagtgatattctatgtgagttgtcatgttatttcgtgtattttcttggtaaattcagattcgaatattagttctcatcttgtagaagtataattgctcaatcaagtaaaacagttaaaaaatacacaatttcatg

SEQ ID NO: 265326 - DNA, 390 bp, Glycine max
agcttgccacccagctctcccaggcgagctataatgctttcaccgccttctggagaacttcctaaaaggcccaagtgggcctggttgctatttgtaccccccttatttactaaatacacccccttgccttttttgctgattttttttccgtaacgttacggaaacttacgaattacgtaacgatacttgttttctttccgcaatgttatggaacattacggattgcataatcatcccttttttgccttccggaatgttatggaactttacggattgcgcactaacacttcctttaactttcggcatgtcacggaacttcacggattgtgctacaatgctttcttttgacttccggcatgtctcggaacttcacgaattgcctaacgattg

SEQ ID NO: 265327 - DNA, 315 bp, Glycine max
  unsure (1)..(315): unsure at all n locations
tgtaatcgattacacatatactgtgatcgattaccatatcagatctttagaaaatattctcaacagtcacatctttttatgtggttcttgaatggctatcaaaggcctatatatatgtgacttgagacacgaatttgctaagagtttctcagacaaaaaggtcttatcctcttataaagaagaatcgctgtatcctcttacaaattccttggccaanacacttgggattcaataacgaattatttgagtgctcaaattggtcaatctatctctttcaagagagatatcttctttttttcttcttcattctgaaaa

SEQ ID NO: 265328 - DNA, 401 bp, Glycine max
  unsure (1)..(401): unsure at all n locations
agcttggactttgggctggattgtcatatttcttaatttncccttttgcgtcaaatagatgcatgttgtttgtgctaataaaggatgtgagtttaaacttcttaataatgaaaatgtaagattgatttaataatgaaaagaaaaagaaaggaaatagaaattgtgaattaaaattttctcactaataagtctaacaaaataattattaatatttactgataaaaagaaaacttcttaatttgttgtccatgaagaacttataataagaaggattaattccattgactagagcaccttgaaatacaagaaaagttttattttagaaaaaaaaaacagttaagatgcttgcatgggaactgttggaaggtaacgaatataatataagaatatgctctgttttg

SEQ ID NO: 265329 - DNA, 433 bp, Glycine max
  unsure (1)..(433): unsure at all n locations
taagaaatagacacaatgattatattttcattaactttcaagaatatttgcttccacctcacaatctccacaagaatatgttcaaggggtcaaaattcataataattaattaaacaaacaaaagcgtaactctaatacataacaattcaaaacttaaagagaagaaaaaaattaatgaagaattggttaacctatgatgttaaaaaaggaaaaataagagatggaaaatgatgatctaaagagaaatcgaaaaattgaagagagattgacgaacggaggagggaggcacgtaacttctaaggaacaagagagagaaaccaagacttaagggtttagaatatatggagggcatgttttcagtttgaaactctcttatgacaaaattgtccaagcatcatntagggaataaattcccgaaagtaagaattcataa

SEQ ID NO: 265330 - DNA, 429 bp, Glycine max
ttaagtcacctgcggcatgcagcttgcacccaactctgtcattcagattttgggattttctatataccatctgttgtatgagatatgatattttcactgaagtagtaaaatttgttggagcaaaattcgcccaagagagtcaaattttgcctaggcgaatttgagctggattatcttgcccaggcgagccaaatttcacataggcgagtcttgtaggctacaaatatgtccagcagcataaaacatccattttcaccttcatctatttccctaaaccctgccccaacaccccaacctccttctgcaccaccactaaccgccatgagctatcttttcttgttgtcggaccacaacatggagaagaatagtttaataggagttgaatcttctaaactcaactcacgaatttgatagagaacgaagccttct

SEQ ID NO: 265331 - DNA, 451 bp, Glycine max
ggtcgcctatgccttactaattatgtattgtcttctatgacactctataaaacatatgcaaacaatgtggctcgctcaatcattttgcactaagattgatcaatgttgtcgctcaatgatttggtcggcccacggtgcaccaagatgctggaatctggcttcctggcaattgattactcgacctaaactctaaggatgattaagagtgcgtgatactagagctgcaaatgcagaatgaaggtttatggaatgcctggaaccgtggatatatcgtcaaattatttgcgagactgattgcagagaggcttttgaagtcatccaactaggtgatcatggaagttatagagcacacctgcaccaagatgttgtccacgagatctgtgtatcggtgatgttcaaaaccgcaagtatagttccagttatttgagaaatcaaatggagggctctacac

SEQ ID NO: 265332 - DNA, 409 bp, Glycine max
  unsure (1)..(409): unsure at all n locations
cacctgcggcctgcaagcttgaaatctgattntttggaggagtgtggctttttcttttaagaagcctctgcatgcatgagagtctgaccttggcttgaaacttttgcatgtgtaccaagtcctatagagagaaaggctcaagttcacaacagttctaagagattttgctgtatgaagatctacacagacgagagcttgaggcggaagccattctgagagcttgagatgagtttgtgagtaattgtgagatcctagaggtgaaggagacatcctcaccacttgtagttttgcaaactttcatcttgttcttctatgtgaggaaaaggaggtttctggactatggaaagctaaatcctctgtttgatcttccctgtagggacctgaggtaaatatatttctatctatggaa

SEQ ID NO: 265333 - DNA, 468 bp, Glycine max
  unsure (1)..(468): unsure at all n locations
ctgataaataaactacatacatcaaataaataactgaatcattatattgtaatcatcaagcaataacttgagaaagaaaatgggctacaatactgtcaatacatgttgctatcaatattgggcaggaatattatatttgaaagttgaaaccaaaggagataatattttaaagaatgaatgaaactgtctgagtaagaagcatgggtgaaaatgtgttatggctcacgatgtagttgacccagccccacttaatcatgggttaggaagacttatactatacatataaaagaaaacacggatcatgcggacggagtataaaacgaaattantggggtagaagcagctttacaatttttacattttgagggcagtggaaaggagcattgctctggggtgggtattgcagtatcttcattaatacatcactcttcatcttcaatattatccaattctactgattttaattct

SEQ ID NO: 265334 - DNA, 408 bp, Glycine max
agcttgcttgtggggcttctatggaagcttgtctttgtactttaatgaagccctctaatggtattttccaccatggaaatgcaccggaagacaaaggaatataagtgaaaggcggcgccatccactatggaataagccatggaagaaggagcttcaccaccaagatgaaccttggataagaagcttggagaggatgcttcaatggaggaaaagaaagagggagacaaagagagaggggggagcacgaaattgaaggaagaaaaagggagagaagttgaactttgagttgtgtctcacaagactctcattcatcaaagttaccacaagtgttacacatgcttctctttatagactaggtagcttccttgagaagctttcttgagaaaacttccttgagaagcttctttg

SEQ ID NO: 265335 - DNA, 465 bp, Glycine max
  unsure (1)..(465): unsure at all n locations
ngtaattagactgacaaaagtgttcgagacccatcatctttgtttatgtgcttcattgcaacattcagattctttgacatggtacccttatagaccttacctaaaattgaaatccattaataggaattcgttatacatacacattcaatcaagctaggagaatataaataaataaatggatgtcttcaattggttacgcaaggcaaagaaccaagattttaagtttttaactctaggaacacttatccaattccatgttatgttagtgtgaacctgtatctgcattgatagtaaaatcagcctccacatatagctgactagtggctatagtcccgacagacttgccattgaaatcatatgatctgacaacttttgtagccaaaactggaaattccgcagcatgacaaatagtttgcaaccatccccatagagtaactcaacacttcggcagcatgtcattaactg

SEQ ID NO: 265336 - DNA, 404 bp, Glycine max
  unsure (1)..(404): unsure at all n locations
agctttaataatagactttaagctctacacacattttccattaaggagttgaaacttttttcttctgcagtttagggaaaaaaaaaaaacagaatatatatatatatatatatatatatatatataataagtattaaccaatgattcaatcttcctttcctcatacatctaactggtagaaattgaccaaaaaagttgaaaaaagaattgttaatcaaccaaaacattatgatatgattgttcaataattatagttatggtcttatagtgatttcaaattatgccaaccatttctattttcaatcagcataagatcaataaattaatatgacctttgaaggtttctttggtgatgaaggggattgatcattttcagagtngttcccattattttcttcaatccc

SEQ ID NO: 265337 - DNA, 417 bp, Glycine max
cacctgcggcatgcaagcttatgaaatagagcaaaaacccgtttttcttgctctatgtcgacctatccctaaccccaagagaatgtgtgctttataatggggcccaggtccttgtcttgtcacttaagaaaataccctacctgttgggaaaacaaccctcattacgcgagttgtttgccattcaataagactccccttcaattgacttttctcattgggagagttcttgtgaattcctaattcgaagggaatttgcttcctttcagagagatttgcttgtgacgcgagtcttacatatgacgtggccctttttctatgatagtaagacgaagtgtgggtttgcctgcacaacctctctgactaggcgaacatacctcactaatcgagttatctttgttgcgacaacttcccttcctc

SEQ ID NO: 265338 - DNA, 429 bp, Glycine max
tatgtcataacaatccattacccgtgacttttctaagcagaacagatatccaaaatgactaggtcactcaattaatagcgcttgaccttaatttcaagaaccccgttttcgtgaaagaagttattaaaaagctaatcttttttcagcatttcagttggactatatccctttgtggaacgaagtatcttatgtttagatttagacaacaaaaatatatacttatctaccaccacatgttaagaccacatgttaagaccatgcaatctcatattcctaataatcaacacgtgtaatatacaaagttcacgacaacagccaaagaattcactcatcccataaaaataatatattatggtgttaaagaacttataaaaaatgtaaatctgattgtaatccttgaatttaacggtgatgttttgtctttcaaat

SEQ ID NO: 265339 - DNA, 402 bp, Glycine max
agcttccaaattggtataccaaattacctgtcttcctcaccaaactatattggaggaaatgcatcaatagcttctcatcccttgagtatgccccgttgcccccatcttttggcagtacatcttcaaatgattcttggggcaagttgtccctttgtacctatcaaaatcaggtaccttgaattttggggagatgacaacatccggcaccatacatatgtcggtcatgttggcaaagggatagtcaccaaacccttcaatagctctcaatctctcttcgatgagattgagcttttctcttccttccactgccggaggcagtccccctacggaaaagagtaatggttgcatctagcggggttgagagactcccgcgatattaggctgaggcaaggcattgggtgc

SEQ ID NO: 265340 - DNA, 461 bp, Glycine max
  unsure (1)..(461): unsure at all n locations
tcgngggagactantggttggatggcaaggttttatgttgaagttgatttgtgggagtcataataatgaattggctaagtcattacttggacatccatacattgcgcgattgactaaggatgaaaagacaattattgctgaaatgaaaaagtcaatggtgaaaccaagaaacattctgctaacgttgaaggagcacaatgacaatagttgtacaacaatcgaacaaatatacaatgcaagaagtgtatatcgttcttccattagaggaagtgatactgaaatgcaacatctaataaagcttcttgaatgggatcaatatattcattggcatagattaaaggatgaagatgtggtatgtgatatcttttggtgtcaccctaatgcagtgaagttatgcaatgcatgtaattcggtgtttntgatagatagtacctacaaacaaatangtactgactcccact

SEQ ID NO: 265341 - DNA, 302 bp, Glycine max
ggaccttaagtcacctgcggcatgcagcttgacctccaaaatactggaatgtgacctgaaataaaatcggttgacacggctataaccttcaaagagctgcttgtcctgtcatttatgattgttgatagtgaacccaccagcagattagcatgcaaatctatggaagacagttctgttggtgatttgatttcagaaatgtcaaacctcaccttggtgtttgagaacttgaccttttgcaagctggacatgtttgtgaagaaattttaaataccatccaccagatagttatttgataggtcaat

SEQ ID NO: 265342 - DNA, 269 bp, Glycine max
ttttaataattaaacaggattttatatttaaattggaccaaaaaagatggttataagattaattttttctaaaatattaaaataataaaaaatttattatattgtttagatattaagttttttataattaaatttaccgtgagaaaaaaattagatatatttttcagatataatttttaataattaattttatgataattattcgagtaatttaataatatgaaaatttatttatgttaaccagcatgttttaattaatgaattcaaat

SEQ ID NO: 265343 - DNA, 430 bp, Glycine max
  unsure (1)..(430): unsure at all n locations
ccgggatccttaagtcacctgcggcatgcaactaccccactttacccctctttattctaacctatcaatggaaaaaaaatgacattcacagaaatgcatatgacaagggaaaggggcctaatctntacttgtgatgacaagttttcccctagccatcggtgtcctaataagcaacattttgttctacagggggaagaaaaggatgatcctgcttttcaaccaaatccaccagacgaggttgagacagctggtgaccccagtttgcaagatcatcatttgtcttataatgctttaaaaggctcatcaggtcttggaataatgaagtttcaaggatcaataaatggattgggagtgcagattctactatatagtgggagttcagataacttccttcagcctagactagctcaatgcctgaagtcacctgtag

SEQ ID NO: 265344 - DNA, 441 bp, Glycine max
  unsure (1)..(441): unsure at all n locations
attngtnactccacccatatctggctttgatattattctatactaaaactgtcgacaacagcgtcgacatattcttgcacccagcatacaaaggtgtctttgaatcagtttgcaatgaatcatacacaggggcatgagcttgctgaaaagactcttgtccaatgtcacaaatcatatcctcaaagcgatctcccatttctacatcaaacggttcggattgctgcccactctgcatgtctatcatttcaccatgccatattcacgtcgtataattcctctaattctatcacacaacagatgctctcgtatgtcatccattatttgtcgtcttccgttcaaacaatagatgcagggacaataatattgttcatcttcatccggttgacctctctctgaaagaaataagtaaaattgctcaatgccttcatatattctgggctg

SEQ ID NO: 265345 - DNA, 292 bp, Glycine max
ttcctgatttttaagaggccaccaaaggcttatatatatttgactagagacacacatttaacaagagttttgacaaacaaaagagtcttatcctcttaacaagcaaaattgttgtatcctttaacaaattcctcggccaaaacacttgtgatgtaataaggaataatttgagggctgaaaatgatcaatctatctctttcaagagagatagctacctctcttctcctctattccgaaaagggatcaataggccgatggtctcttgttgtgaaaggatcctcaacaccaagga

SEQ ID NO: 265346 - DNA, 384 bp, Glycine max
gtttatcttggcaccacgtggatcaacgatcatgatgttgagcaatcatttctcctcagatgcattttaaagtgttgtagggttaccttgctctataacaaaaggatcaggaatttttgaggtggttcctcgtgagtctactgcaaatccccaataatgtggaagaatgtcaccattacatgtgccttcggttctttggaaaaaagcatcctcaggacgacgaagcttacgattaggtgacatggtaatattctggtggtactttattgcaaaccaatgatgaagagaagtttcatacgaaggtatagagttcccttcttggtcaactagttccgcataaaaactcttagattcaacacgaccttatggaaacgttatattctc

SEQ ID NO: 265347 - DNA, 416 bp, Glycine max
acctgcggcatgcaagcttatagaatatataataaaagaactatttctattgtagaatctattcatgtttcctttgatgagactaatgctatttctccaaaaaaggatattttagatgatgttacagaatctttataacaaatgcacattcatggacaagattctaaaggaagaagtcaaatcaaatgatgaacttccaaaagaatggaaagcttcaaaagatcatccccttgacaacattattggtgatatctcaaaaggggtaacaactagacattctcttaaatatttatgcaataatatggcttttgtgtctatgattgaacctaaaaatataaatgaagccataatagatgatcattggatagtagctatgcaagaagaactatatcagtttgaaagaaacaatgtgtggg

SEQ ID NO: 265348 - DNA, 405 bp, Glycine max
tgtccattaaaaataggttattgagagttatcatttctttttctcattaagtaaaatggatcattttcaaggtccaacgccttaaaatgatcaccttttaagtaaaaaagaatcacttgataagaaagaactacgtaggtctgatttcctcatcgcaaattgaggaatacgtaggagcaaagggaaacacccttgtcgaccacaaaaagaaaaaaatataaaaagggtataaaggatataaggacataaaaagggaacataaaaaaatcaaagtcatgtgtgcacattcgattaaaggctgtcgttccttgggacggacgtgtggggtgctaatactttccccgtgcttaaatacaactcccgaacctttcacttatagttcgtagaccgcgtcttttccggttt

SEQ ID NO: 265349 - DNA, 392 bp, Glycine max
agcttggttcgagtacttactttttgttttctaagaaccgagaagaacgaatgaggaacgtctaaaaacagttcaaaaccttcgcgaaatcactcacggaaacgttacagaagcgcctcggattggattttcttcacaaaaacaatttctctaagtaaattcgaaagagagagaagtgcctaaggggctgaacccttttccacttcacttctccccctatttatagaaaattgggggagaagcttgccacccagctcgcccaggcgagcatggttgcttccttcaaaagcaacagccttctggaggaatcttctggagggcccaagtgggcctggttgctatttgcacccccagttttactaagtacacccgctgcctttttgtggtgatta

SEQ ID NO: 265350 - DNA, 445 bp, Glycine max
  unsure (1)..(445): unsure at all n locations
tcatgctaaaacatgtaaggcaaaacttcattactgtttgttaacacatacaagtgagcgtgttacacatcttctacacttggagtgataacatgcaggcctcttgaacccttactgccaactgtgtcatcatggcgagactcaggaaggccaacaagtttagccttttcaatgtactgtgaacaaaattcaatggcttcttctgcaatgtacctttcaacaatagatgctttcgtacgatgtagattcttggtatacctttttaagatcttcatgtatcgctcaactgggtacatccaccgcaaataaataggaccacaacatttgatttctctgaccagatgaacaattaagtgaatcatgatgtctaagaaagtacgaggattatacatctccaactggcacaatataattgcggcctcattttcaggtcatcanacattat

SEQ ID NO: 265351 - DNA, 399 bp, Glycine max
  unsure (1)..(399): unsure at all n locations
agcttaaaaacatacaattgctcttcttcttgtgccaacanaacggacacactttctcatgatttatgctataccttttggtgcctcaatacgcaagttgaaaataacacctacaatattttaatgtgatgtgaaaatagaagtagggagcttgcttttcttaaaaaattaattttctctcgtcctgtgattattaataaatattggcttctgttctttcgaaattgcaagtaatgaaacaaatcactgttcttaatgatttgtttctacaactttcactttgcattgctttgtagctttgtgttcatccaatcgcggtaagtggatatacttctcatgtataactgtgatacggatttgctttctaatttgcaggtctccagtaaggcacatgatgat

SEQ ID NO: 265352 - DNA, 304 bp, Glycine max
aatgggagaagatgttttctgggccattagaggaggaagtgccactcattttggaatcatacttggatggaggatcaggttggtcagagttccacctattgttactgggttcaacattcccagaacacctgatgaaggagccaccaatctcattcacaggtggctactgataacacatgaatcgcataggatcttttcattatagtaattgctcaaaatatgggagacaaatcaaaataattccaagcaaccttttactctgtcttcctaggatgaatagacagttcgatcccactgatgaatg

SEQ ID NO: 265353 - DNA, 407 bp, Glycine max
agcttttggtttaaataaaaagggagctcccctctttttttccattaatatatgcaagctctgccacatgtccctatttgattggagcaaaaagggcccactttctttttttgactgtgacccatactcagtcacaaaagtgagaaaaatctgacctttgaaacgctacaatcctgcctcggtttgcgtgccgtttctctgattccagtttctcgcgtttctctgcgtccgtcggggccagttttcgaaagcaagcaatatatatatcaaaacgctcagaataaaaccccgagcgtggttcaaaggttggtttcgtcaaattccaagttgcacgcaaaacgatgatttttaaactaattaattaagaattaacccataacctctcagttatggatttctcttcctta

SEQ ID NO: 265354 - DNA, 470 bp, Glycine max
  unsure (1)..(470): unsure at all n locations
tctggtgggacatcttgacttgctttccaatctgacattcaccacagattctgtcttcttctattgtcagattgngaatgcctctaacagcacctttgtcaatgattatcttcatgcctcttatgtgcagatgtccaaatctttgatgccatattttgacttcatcttctttggaggatagacatgtggaggagtaactggtttcttgaggtgtccataggtaacaattgtcctttgatctgctgcccttcattagaacttcactcttctcatttgtcaccaagcattctgactttgtgaagtttacattgaatccttcatcacacaactgactgatgctgatcaagtttgcagtcagtcccttcaccagcagtactttgttcagactaggaagtccatcatggactagctctcccattccagtgatctttcctttatagccatctccaaatgtcacatagctagtggag

SEQ ID NO: 265355 - DNA, 408 bp, Glycine max
agcttgcacatgtttatgtatgaatgcacattcttgtggaagaacacaaaaatcaattacatctgcttcttagggctgcaaacttttctcgtagtcaaattgatgtcattcctaaaggttagtctaatgactattgcttttccttgttatttataaaataaactagcttagtttgctttaaacttgagaaagtaatatctaaatataatattgactatgaaattgcactttctgtttttcataatgctgctcatttgcccatttcttttgcttttgcagtaaaagtatttgtacatgcacatgttttattgtctctgatttctttcctctttattattatttactccataattaagtgttaaaatccaatttgaataccatttaaaaaaataaattaaaaaccaactc

SEQ ID NO: 265356 - DNA, 469 bp, Glycine max
aatcactagctagtagttctggcagttggagctttatgtctcaacctcctttctagaaatgcactattaaaaaaagattacccctctcaaagataaattaaaaatggataggatgactgatgaagagagagagagaggagagtggacaatgaaattagttgtgtaaaatggcagcagcctctctttgcttaattttttttttcttttctatcatcatatatataaaatgtgaaggtaaaaggtacatgtgttgcttcatataagcaataaattaaaggtgtgcatgtgtcatgcaccgtaaatgctctggggatactcaagaggaatcattaaatttcatgcttgaaaagggaaatatgttctagacacaaaattagttttctggaccagctgtaattgtctcttgtgtatgaccagcttagacgtggtttgctaatatatgattaaggaaatatatcatttttacctt

SEQ ID NO: 265357 - DNA, 296 bp, Glycine max
aaacaccatacccaaacgcgccgcacgggatcccctatcgcaccagatacaaatcaataaacacggggcatcaagaggagacaagggacacatgaaagcccgccacgtggctctgaaagacaaaatggcccccatgacggaggccacgtcacgtatgaaacaacccatggagaagaacgcggccactgccgccgctgacaggtcggatgacgaagcaaaccccactctattggaactacccaccatcctacccacaacatactaggacggggaagggacgcactggggcacaatgg

SEQ ID NO: 265358 - DNA, 417 bp, Glycine max
  unsure (1)..(417): unsure at all n locations
agctttcacttgagtacatgaagaaaatgttggtttttgggtntcccatctcacacttggttttcaaccgcctcattattttgcattcctcgccaggtcgcaggaaaatgatacccaagttgctcacccacatgaaggctgataaagtcaccccacatgtgtccacctacaatattttgatgaaaatagaggctaatgaacataatcttgagaatttggtgaaggtcttcggtcgtatgaaagttgcacaggttgaaccgaacgaaatatcttactgcattttggctattgctcatgcggtggccaggttatatactgcaactgaagcatatgttgaagctgtggagaagtttattacagggaacaactggtcaacattggatgtcctgcttatgttgtatgggtatcttgggaacc

SEQ ID NO: 265359 - DNA, 427 bp, Glycine max
  unsure (1)..(427): unsure at all n locations
tgcccggnctgcgccattgattagaagggccattttctacttctgtgccggctttggtggacactctcttcgaacgcgatcgcgtcccctttccattggaccctcctaaattaacactgtgtgatggttctgcagcagcacaaaggagggattgacttcttccagattgacaaagcagcacctcatctaagatctctggtgactctgactcgtccgaaaagacagctgaaaccttgctgcctcttcttccttcttgttcatgaaaagcataatcatccatcccatggcttctcttttctcttggtgctgaagctgaaaaaccctcttccaccatcagtggcttcttggtctgactctgagactganagagatttcaggttccatcatgaaaatagccagcagcttgtgacttcacacatggatcatg

SEQ ID NO: 265360 - DNA, 406 bp, Glycine max
  unsure (1)..(406): unsure at all n locations
agcttgccacaccaaagctgaacttgcctttatccatttcgggcttgtacgcatgccctaacatcacctgagctaccattaatgcgaccctaaatgagcgtggttgtactgggggagactccatgtnagcattgcttaccacttccaaggatgtctccaaggactcctccgcggcttccacatatggtgtagaagaaggacaactcacaagaatgtcctattttcctgagactatgattaactgtcgttccaccacaaacttcagcttttggtgtagcattgaaaggaccacccccaatgaatgaatccaaggtcggcctattaagcagctgtaggcagggtttatgtccatcacttggaaagtaatttggcatgtgtgaggtccaatttgaatggggagatcaat

SEQ ID NO: 265361 - DNA, 451 bp, Glycine max
tgatcaaataaggtgacagatggatgaaatccatttgtctttttgggtgatgtttcaatgggtgcagatactgactttgccaaaactaattcccaacaatctttggagctattatgggaacttgcatttatattctgctgctcccacaattttatttcattctgttgcacttccaactgcaattcattaaaacttaccacatccaagcttgacctcgatgtttgatcaattgaaaatgattttgtagaatcatgaccatttgcaatagcataatcatcatatagcgattctttctcatcttggtctgattgctctgaatacatgtcttgctcaagcgatctcctaggactcatatcagcatcagtagcactcatgagatcttcaatgatgtcattgtgaccctgatcagaccctatttaaaagacctttcaagagtcccatattttcacta

SEQ ID NO: 265362 - DNA, 386 bp, Glycine max
cgtctgcaagctttaagtagacacaattgcttcctactacaaagtttccaatgtccttgatgtacttatccatttttatgggaaagaaatacctccttaaaagtgcactttgtgcattgattccatgtagtgatgccattctcatgtagtaagcacaaccattctcatgccttcttgttgagcgagaaagaaaatgcataaagttcgacttattcttccaatacacgattctacctcaccatgctggtaaacttgatgaactttctcaggtgttgcaatatgatctttatgggcatgaccactgaatgggttgttattcaacatctataagaaccactgcttgaagtcaaatgtgacttcctcaaataaatccgggagttaaatgg

SEQ ID NO: 265363 - DNA, 460 bp, Glycine max
  unsure (1)..(460): unsure at all n locations
tatgcacggaanatgtaattatgaaattgagatgccctatataaaaccatttcctagttaaccatgcattaggtaccatgttcaattattttgtttttaagtgaaacgggtttatgatcccaacatggttggctcgtggtgcctaacacatgaaactaagaatgtagtgtgaagtttcacgcttccccctttttttgtttttgttttgtagaggaaaacgcaaggatgagcaaacatgaaaacaaatggtatgcaattttgcagatcaaaaagtttgttgaacgcatatgcatgatgatgccatgactcatgcaaaatgtgaggctggaatatgataacggacaaatgcaggatatgtccattatgatgttatgaagagatgcttatgtggtgcatgatatgaatgcattntacggacacgagagcccanaanattatctcttcttacttgcgcatttgg

SEQ ID NO: 265364 - DNA, 412 bp, Glycine max
agctccattctacactggaaaaatttgttttatattttgcacaaaagacaagagcttggcttcagagtttgacaaatcagatggagttcatggctactcaaatgaatcaagctcagtcccaaaattctaacaaattgccttcacaaactgtgtagaatccaaaaaatgtgagtgccataaccttgagttctggcaaccaaattcaagtgcctccatcagtagcagcacctgcacctgaacctgtcaagcttcattctacaactgaaaaagaggataagatagttgcacataagagaaagcttcctaacaaaaattttcatgcaggtggaccttcttttataaattttgacttacaacagcctcctatctctcttccattcccacctagagcaattccaaacaaaaagatgaa

SEQ ID NO: 265365 - DNA, 479 bp, Glycine max
  unsure (1)..(479): unsure at all n locations
tatgcgcatatatccttacgaacgtacacttgtacaatacattctatttaactaagaaaagcgcacccatatacagtcaaggcagcttcgttacctagattatttacatgtacttccaaggtgtatttgttacttacatcatacacacctccttggctgaatttacatacatgcatactcaaagcattttggggtaccaaaaattgtacatgtgcacatcttggtatttctaatacctatacatacacaaacttcatgatgaatcttgactacctacacaataaggtgctacatttcatgcccttttcaagtttttgctacctaaagccgcatgcaaattcaagtatattttcctttgctgactagaattgtattcaaattaaaaggtatatattttcttgtaatgtattttctttacataacatgcaacatatttatatatatttntctgtgagacatattgactaccaacaattata

SEQ ID NO: 265366 - DNA, 405 bp, Glycine max
agcttatgcaccttatgtaccattattttgtactctatacgaaggccaagctatgtttcctttaccatatacaataaatgttaatgtacatcctataactaatcacatgaaactttgtcaattgaaaaactatctaaacacagataacatggactttatccaccataactaatgataattaattatacttaaatgacttagacctaatgactaattaatccactatattacccgttttacttgaacaaaaattagtaatatgaaactcaacactaaatatttacattaaatgtactattttatggttaaattaaatctgattgttgttgtgcagttccacaacaaagacaatatatcttcacactgtgagttttattacaagatttcaagatatgacagtaaaac

SEQ ID NO: 265367 - DNA, 465 bp, Glycine max
  unsure (1)..(465): unsure at all n locations
tgacactatnaaaactcaacttgtgcaccgttcttcttgggcttctgtcaatgttttttgtatccttccggaaaggacccacagcactaaatgctggtgagccacatgttcagatgatcgctaggcgacaacatattgattaccaactcagcggcctatacgatgatggtggtgaaagtgattataatgatgatggaaatgactatgacatcattgaaggtggtgagttgagctttgactactgagcacataatcaagggccatatattgtgtccacattaccgaacacaagagacgttggcagatagtattactcaaaacttgaatggttattaaagcctgggcgcatattgaactttattcttatagcgcgttggctatgttatttaaaataatacataaccctgtcacagaacggatgtcatacttgtcgcaaccataacaccctacaaataagaacatacc

SEQ ID NO: 265368 - DNA, 400 bp, Glycine max
agcttctcaaggaagctacctattctatattatataagcatgtgtgacacttgttgtgactttgatgaatgagagtcttgtgagacacaactcaaagttcaacttctctccctttttcttccttcaatttcgtgctcccccccctctctttctctccattgaagcatcctctccaagcttcttatccaaggctcatcttggtggtgaagctccttcttccaaggcttattccctaggggatggcgccgcctcttacctcttctcctttgtcttccgctgcatctccatggtggaaaatcaccattaaaggacctcattgaagatcaaagatccagcctccatagaagctccacaagcaagctttcatcaaagaccgttgtcctttaccacctctagcatt

SEQ ID NO: 265369 - DNA, 429 bp, Glycine max
  unsure (1)..(429): unsure at all n locations
tgctctaaattacattgatgtttgtatttatgggatgtggttatatgccatttttgctttaaggatagtgtcccactggtaaaattaactttccaaatgtttgccttctcaggaatggccccgaggaagcttgcctcaaagaggtccaggaaagacaaagcggccgaaggaactatttccgctccggagtacgacagtcaccgctttatgagcgctgtacaccagcagcgcttcgaagccatcaagggatggtcgtttctccgggagcgacgcgtccagctcanggacgacgagtatactgattttcangaggaaatagggcgccggcggtgggcaccactggttactcctatggccaagtttgatctagaaatagtccttgagttttatgccaatgcttggccaacagaagagggcgtgcgtgacatg

SEQ ID NO: 265370 - DNA, 401 bp, Glycine max
agctgggttcgaggtacttacccgttgattatctaagaacgatgaagaacgaatgaggaacgtcgaagaacggttgaaacctttgcgagattcctcacggaaaacgttacgaaaacgtttcggaagcgcctcggcttaaattttcttcacggaaacaatttttccaagcaaattcgaaagagagagaagtgcctaaggggctggacccctttcttcttcatttcctcccctatttatagcaaaataggggaggtggttgccgcccagctcgcccaggcgagcagggttgcttcctccagaagcaaccgccttctggaggaatcttctggagggcccaaatgggcctgggtgctatttgcacccccattattactaagtacacccccctctgctgttttttg

SEQ ID NO: 265371 - DNA, 464 bp, Glycine max
  unsure (1)..(464): unsure at all n locations
ttgcagatntggtcttcgccagtgaaaggatcaatgttggtccgaaaagaggcaaaattgatcatcctactangacgactgagaaaactggggcaaataaagagggtgaggatgagggagaaacccatgctgtgactgccattcctgtacggccaaatttcccaccaacccaacaatatctttactcagccaataacaaaccacctccttacccaccacccagttatccacaaaggccatccctaaatctaccacaaagtctgtctaccgcacttccaatgacgaacaccacctttagcacaaaccaaaaacaccaaccaagatatgaattttgcagcgagaaagcctgtagaattcaccccaattccagtgtcctatgctgacttgctcccatatctacttgataattcaatggtagccataaccctagccaaggttcatcaaccttcacttttctgacgata

SEQ ID NO: 265372 - DNA, 401 bp, Glycine max
agcttggaggcaactggacccattctcgttctgattcgaaaaggtccataaaaacgctttgagagcttggactgggctgctccccacaccgtggtctgtcgatatgaccgtagcttgaccagaacccaatcgcccacctgaaactcatggtccctacggtgactgtcaacaatctccttcatacgatcatgggctttctgaagcttttgtcgaagtaaagcaaatatggcttccctctgagtgagtaaatcgtctacggccgccacctttgaggtgcccgtcaggtactgcaaaaagctcggtggtttgcggccaaaggttacttcaaatggcgtcaatctcgtggctgagtgagtggacgtattgtatgaccactcagcccacaataagaaacggcccca

SEQ ID NO: 265373 - DNA, 388 bp, Glycine max
agcttgccatagctcaacgataatggcgtttttttttcctctaaacaggccataatgcacttgtttaagaacataactaagttgttttcggacaaagagaaacacagagaggtttccttttccggagttgggagcgacggcggcggcaccgtctggtggttgccccttcattgcttcagtgggcgctggaggttgatttaagggaacggcgatgcatctctctcgtggtgatttatccaaaagcgaatatcaaaggaaatgagggtcgggaaagggaatccgattggaatggatagtgaattcaattcaaggaatggcgaaccgaagatattctcttagtcaaaggtgcccgacagacgctctcttatttgttagaggaagacggttg

SEQ ID NO: 265374 - DNA, 409 bp, Glycine max
tcactctatatacccaacaactaatgccatgcacactatagtgtgaacagtagatctactataagacaacaatattattacacctaatattatataccatccctagttccctttttcgtaataaaaatggttaccctaactagacatttaagatgttggactcggacattatttcaacaagacttaaacagattgccggttactctcacaaaccgatgaagcttgctgcacagacatacagcgtatttaacaatctattagaatatatgaacggcaaagcactttaccttgcgctctatatatatcaaaaaaagaattagctttcgctatcgctttcgctaattatttcaaagtttatgaacatggtacatatgaatttgatgactgccttagcgtctacacttgtaca

SEQ ID NO: 265375 - DNA, 156 bp, Glycine max
gacttaccttgaataatttttttgtagcccttttgagccttgatgccctttccttgttttgaagctcactccaagccttaagtgaaaaaccatgatattaccatattctttaggacatttggagctttggaattgttttgggaataagtgtggggg

SEQ ID NO: 265376 - DNA, 423 bp, Glycine max
ttacaccacctggcggcatgcaaactttaagaattatggcctcatcgactttttgttctcatggaaattcacaaatagacctcccatctttaatggaatgggttaccactattggaaaacccgcatgccaatctatatagaggcaatagatttaaatattggggaagccataaaacaaggaccttatgttccctctatagtggccggaagtgcaacaataaaaaaacctagagcatattggactgaggaagaaaaaagattatctcaatataatttaaaggccaaaaatattattacatctgctctacgaatagatgaatactttacggtttcaaattgtaaaagtgctaaggatatgtgggataccctacaagtaacacatgaaggcacaacaaatgttaaaagatctaggataaacacatt

SEQ ID NO: 265377 - DNA, 486 bp, Glycine max
gcgtgattggtcttcgttggtgaaatgatcgaagtgttttttataagaggcatctctgatcatcatgctttggtaaatgcaaaaactggggtaaatgaagagggtgagaatgacggagaaacccatgttgtgattgtcattcctatacggccaagtttcccaccaacccaacaatgtcattactcaaccaataacaacccttctgcttaccaaccacccagttatccacaaaggccatccctaaattaaccacaaaacccacctaccacacaaccaatgctaaacaccacctttagcacaaaccaaaacactaaccaatgaaggaattttgcagcaaaaagcctgtagaattcaccccaattctggtgtcctatgctaacttgctcccttatctacttgataatgcaatggtagccataactcctgctatggtatctcaaactctatattttcgaggattcgactcgaacgcaacatgtgcatatc

SEQ ID NO: 265378 - DNA, 415 bp, Glycine max
agcttgctatcaatgttaatcccaaactcctttgcttagggataatactcataatcagattcgggaattgtctgcttgtatattggaaaagctatacattaatttaactaaaccaaacctgccatacacattatatttttgttgtgaaaaaaaataaatattgaaatggacatgttaaaacaattgcattttatcatacaaccatggctattcagcccccaatcgtttctgacaaaactacgaatataaagaacaaaataaaaggtttggtgagaattctaaaattacccaaattcgggaaccagtgactaggagtaggatcaaataactagcggataccctctaacaaatgatagcagacatgcttaacaaggctcaagtggagaaggatgaaggccatagacagaggcactac

SEQ ID NO: 265379 - DNA, 406 bp, Glycine max
  unsure (1)..(406): unsure at all n locations
cttatgcacgatntgtatactaggaagatacgcttctctagattattacctacctctttgttcaaccaagtatctgaaaaatatccaggttcattttactacctaccgatagtcaccttccgttaagcgatgaagtaaccaaccgaatatcatgttgttacaccttgtcacggacacctcattgtgaagacatcacattcaatgatggggcaggcactggcgtgtcagcgattgagtgtgatgatgtgacactctatttgtaacgacgtcctttaacggaagaccattaacggtggaatgacactgaatctttctttgatgtaggtatttgacaaagaaaatgagggtttatgtcgaataagacaacgacatactttgttggataaaactcatctaatatatgaca

SEQ ID NO: 265380 - DNA, 411 bp, Glycine max
  unsure (1)..(411): unsure at all n locations
agcttgtnaaaacttaagtctgatatttctctatagataaggaacaaaaatggtcagaccagaccaacatctttttacaatacagggtttctgatatttttgactcaaaaatttccattcatctcattggaaaagtccaacgccacactttcactggtttattaggattcaaacttcttgatatcatgtgctaacgaagcacaagatttagactcatgatattgagttcgggatactcagaaatttaatctacactgggcattttgttgaataaaaagcaggcaaaaattaaaatgaacaaaatcatgcccataataactatagaacattagacaacactgacaaacttagtcgcattagccactaattgaataacagagcttagttgccaaataatagtaagccaataaa

SEQ ID NO: 265381 - DNA, 453 bp, Glycine max
  unsure (1)..(453): unsure at all n locations
ctctgcacaagctactcctcttgctacctccagagcgtctttcccaaaatatgcactgtggtgtgctgcggaattctatgccctgtgcattgtaccctaattctgcacaaaataggctgtaaataggctctgaattcacgacgttgcacttagcgccacccttgcacttagcgcgagtaagtggatttgagcttagtgctagtcgtgcactgagcatggctgaaaacaactgttgcgcttagcgcactgatctcgcacttagcgcgcgaccttgatgatgatgctctatcagattcttctgtcgcgctatgcgggctgaagctgtgcttaatggtgaatgcgcgcttagcccactgatgagctaagttcaactgtcatgtttagcacttcatgacttatcctcattttcacctgaaattgcacatatntcatcattaaatccaatggacatat

SEQ ID NO: 265382 - DNA, 394 bp, Glycine max
  unsure (1)..(394): unsure at all n locations
caccatcgctgntctggccctaacccatttcgggcttgtacccatgccctaacatcacctgagctaccattaatgcgaccctatatgagcgtggttgtactgggggagactccatgtaagcattgcttaccacttccaaggatgtctccaaggactcctccgcggcttccacatatggtgtaaaagaaggacaactcacaagaatgtcctattttcctgaaactatgattaactgtcgttccaccacaaacttcagcttttggtgtagcattgaaaggaccacccccaatgaatgaatccaaggtcggcctantaagcagctgtaggcagggtttatgtccatcacttggaaagtaatttggcatgtgtgaggtccaatttgaatggggagatc

SEQ ID NO: 265383 - DNA, 468 bp, Glycine max
  unsure (1)..(468): unsure at all n locations
tgatcaaataaggtgacagatggatgaaatccatttgttctattgggtgatgttcaatgggtgcagttactgtctatgccaaaactaattcccaacaatctttggagctattatgggaacttgcatttatattttgctgctcccacaatttttattcattctgttgcacttccaactgcaattcattaaaacttaccacatccaagcttgacctcgatgtttgatcaattgaaaatgattttgtagaatcaggaccatttgcaatagcataatcatcatatagcgattctttctcatcttggtctgattgctctgaatacatgtcttgctcaagcgatctcctaggactcatagcagcatcagtagcactcatgagatcttccaatgatgtacattgtgaccctgattcataccctatttcanaagacctctcaagtgtcccatatctttcactagcttcgtcttgtg

SEQ ID NO: 265384 - DNA, 408 bp, Glycine max
agcttcaagcatatagaatatgaaacagtttttttttatcttagcaaatctggcctctaaaagggattgggtatacaacacatccatatgcaaatcaatctcaaaacacacaaatggtatttcattaaaaaaattgtaaaggaaaaaagtttatgttcatcacacctctttcagtgttgtaaccttggcagcaaaaacgaacacctgccataaagttttaaaaaaaatcagtaaaaaaaaaggctaaatcccataatcatgaagaacaagcaaattaacactaacacatactcaaaaaaaaaaaaaaaaaaaaaccgccaccccaccaaaaaattgaatattccgattagaataaactatcaatctccacgtcaaaaaaaaaaaaaactatcaatctcatcactaaag

SEQ ID NO: 265385 - DNA, 476 bp, Glycine max
  unsure (1)..(476): unsure at all n locations
ntgactaagttctcaaattggaaattaaagaagagaatattattacatttagtattggggtggaaagaaaagatagaatataaatgctgaaagttacagagagaaaaaaaagccaagttgacaaaattatgttattagtagaaatatttttgaactcggtaattttgtctttctgagatattaatttcattaagtgatcttaattacctttattacttaatttatataacttgccctaattaagagtaataaattatgttattaatataaaattaatttgattcatctttaaatatgcacacaataaatttaatttttaaatcaaagtttatatttgatcataaaatttatatatgttttaatttttattcacataattggttngaaataactgggaagtcaaagtcaagagccggaactgaatagacaatactcattctcgctcccgtcccattattatgtctacaatcaagtat

SEQ ID NO: 265386 - DNA, 140 bp, Glycine max
  unsure (1)..(140): unsure at all n locations
catgcagcttgttgacttgatgaacattgtctttttataantcataaaaaaaagattttgttttaaaggttaaattactcatttggcccctatagtttcaagattcttatctttttagttttagttcctatagtttgaaa

SEQ ID NO: 265387 - DNA, 256 bp, Glycine max
tatggaggtgagctccttatttattcatcttctccttgaagaggcgtgtgctctctatcttccattgtacataccgaggcgcgacatcttccaagaagcgaaagaatccagtgatgaagaagatcctaaggctacaagctccaatggagcgagcatcacattatgaccaaagcattaagaaggcgtctaacccagattctgctaggcaagctgggcattcgtaatcctcatgcaccacctcgaggggggggggggg

SEQ ID NO: 265388 - DNA, 400 bp, Glycine max
  unsure (1)..(400): unsure at all n locations
agctttgattaagattcaaaaattttttttttctgaaattataagcgggaaaattatatatatatagagtcagtgtgaggagcaatacattagtaatgattttgattctatttgttctgtacttttcagtctcatatcagttttaaactggtctgcatccctccctactgttgtaatctcatctctacacctctattcaagctagtctctattcaaacttgattttactttgcttatgtgaataccattaaaaatcaatcgatcaattcctgctgccaaacttctccaaatcccaacaaaatccctaccattcaaacttacttctaccactgacattntgctttgaagataatccagggcttctattagagatcttgacatagtccatccttcttcaccc

SEQ ID NO: 265389 - DNA, 470 bp, Glycine max
cttcaatgggtaaaaggctcacattctctttcttctacatcatattcaaacttgtccaaataaataatatagtcatctcgactcaaagaaagtcatataagtctcatacaattaatatagaacctatatcctaatgtcacatcctatcagagcgtggtgttcccgtgtcctctagcatgaggttcttcatagtcatccacctattcatctgctcccccgaacacaagttcaagatcatcacaggatccaaacacaacaacacacagggagtgagttatcacattcctagctaatagagaaacaagacaattaaatatacatattatataaatgagataccacttgcttaaacatagctcacgtaacttcaccacttcgtcattcaaaaattcacttttaattatcaatcacattacacaagaatgccacacttcgatcaagatattataacacattcaatagcaagcata

SEQ ID NO: 265390 - DNA, 415 bp, Glycine max
cccgggatcctctgagtcaccgcagctgcagctttttggacctgaacttgcacttcttctcttacaaacctgctatggctcgcgactggacccttttctcctttcgcaactttgagtcactattgctcccccataaaaccccccgaaatttgtgccggccatactctggcttgcgagcccttttggtctcttgttcaaaggctcttgcggtaattgcattctcttcccgtaacccggcacactccttccgaacgtgtgtagcggccaacttgaacttctccttggcaagtattgcctttcctaactcgcttttgagagcttggacttcttcgtcctcttgcggtgcattaaaactctctttgctgacgacttttaactgggcgagccaatctaaaccttgtatatgaactttcag

SEQ ID NO: 265391 - DNA, 412 bp, Glycine max
cccagacgcacccttcttcagacattctgtcataggacttgctatagtgctaaaattctggataaagcgtcgataaaatgatgcatgaccaatgaaagatctcacctccgaaactgttgtagggctcggccaagtcttgatagcatccacttttgtttgatcaacggatactccatctttagacaccacatatccgagaaacaccacactttcaaccaagaaatcacacttttccctcttcccatagagttcttgtgctcttatggtctcaaatatctgttgcatatgagcgagatgctcctctatagatttgctatacaccaatatgtcatctagattaacaacaactaacttaccccaaaaaggcttgagtcatgagcctcataaaggtgctaagtgcattggtgagccc

SEQ ID NO: 265392 - DNA, 387 bp, Glycine max
  unsure (1)..(387): unsure at all n locations
agcttggaaatgcgaaaataattgtttgttcatgatcaacgaccagtgaggaacggtcgaagaacaacgagagaacatatccataatggtgtccggaaacgtcccggaagcgtcacggaaacatgacggaagcgcctcaacctagaattgcgcctgtgttctacatgtcctgactaattggtaatgaaaaaggaataccaagggggctgaacgcctttcccttagcctnccctgtgcatttatagaaaaaatgggggagaaggtggtggcttccttcttaagcaacctactcacccaggacgagctggttgcttacaccctaagtcttctattgggcccaggggctagggaatgttccaaaatggaccatggggcccncatcttgag

SEQ ID NO: 265393 - DNA, 347 bp, Glycine max
gatgtttgggacagtaatttatgctgttggtctaccgaatttaatgaatgaatgctacatgactcggtgggattaccaatcacctgttggagctgaccacacagctgtgacgatttctgggtccatctatggcaaggcttcatgatatataattgcgcccaatttaaaggcttgttcttggtaaaaagatgaatgacatgggactgggggaactagaaaaggatgctgcatctgctgacgaattctccaccttttattgcgatcccatgctagacaccttcttataagatccagaagacatggatttgaaactggtgcgtacataaattcatgattgggatcaatta

SEQ ID NO: 265394 - DNA, 270 bp, Glycine max
ttttagctttcgacacgggggataagctaaaaactgggccaagaaagggagataagaaaacctgcttactccatctatacccagatcccccaccaacaatgtattatcaccgatacaaacttttttaccacgccatttcccaaaggcaccctaacacccaagttgcttcaactccatgacgaacaactttgccaacaggagcccccccgaatgatttgccgaaacgctgtgattcccccaattccctgcctatcgattctcccttaactg

SEQ ID NO: 265395 - DNA, 407 bp, Glycine max
agctggctattacattaagcagagcaattattttaaagatatggccactacgctctttgaggagatgccaccaagaacgctatggatagaaagagatatgcccttctatagaactcaaatggaagggatgccggtaacaagaaaaaattggaattagagcacttaaccaactaaggccaaaaaaataataagtatgaaaagttaaaggcgacaaactctttttaccttaaaaagaaataacaagccccaagaggccacctagaaagacttaataactgggaccccaccctggggcccgccatcaactgggacgaagttgagggccaccaaacccaaaaaaaataggggggagagggcttaaatacccttgaaaagaaacggttgccctcacacctgaggaaaaaaaa

SEQ ID NO: 265396 - DNA, 397 bp, Glycine max
tataggggatcaattagccaatgagactctgtatactctttctatgaatgatcaccggtgattctggggattgcgtttatgattaacgtggtctatattctatgaagagcgcctatagggtcttcatgaagaatgtgatagatgagacccctttgctagtgaggactacgttctagatttggaatatggaagcttcacctagaacaaagctattcacatagaggatttgcagagacataccccaccaagataaaacttccttaaaaaggtatggattgggatactctctgtctccactgcacctctggtttggagtctgtgtggcgttgtttttctcttggggtgtctctatgcaaaacacttgggacaagatgggcccggattcaaaggtgtagct

SEQ ID NO: 265397 - DNA, 192 bp, Glycine max
caagaggaaaacaaggaacgaagaccaagcaaggcagccagcccaaaagagccacaacaaacgaggaacaacccacacaacaagaaacgagcaaacacgaaggcgcacccaacaaccaccagaaaacggaaaagcccgagacacgaaaacgagcccaacccgaaaagaaacgcgcgggggcaacccagccag

SEQ ID NO: 265398 - DNA, 336 bp, Glycine max
aatacacggcttgaccaacgacacctttttttttttctgaagacccaaaagggacgccgtggtccattacctcacttatcttattactcaattttctcccttcgcttgctttatatatatatgctaacccggtgaggatatttaacgctcataactgctactctcagtcacaataacatgaaattctcgcattccacaatctcataatatctgatacgaatcttgcagtcactattcaccaaaattccgaaagatttatcaggtgacaataaattcatcatcccatgacaagatgttcaaatttcctaataaaactgaggatacctcggtcaaact

SEQ ID NO: 265399 - DNA, 618 bp, Glycine max
aaaaaagaaaagaacaaaaagaaaaaagaagcgagaacaaaacacacaagcagggaaaatgaaaccgtgaacctgaacccgaaaccgaaaaaaaaaacaaaggagaaacaaaagagaaaaaaaaaaaaaaacgagagacaaaaaaaaggaagaaagaaaaaaaaacaaagaggaaaacaaaaaaagaaacaagaaaacaaccaaaaacaacaaaaaaaaacaaaaaaagagaaaaaaaaaacaaaaagcaagccaaaaaaaaaacagagcgaaaaagaaaaaggaacaacaaaagaagagagcaaaaaacaaaaaaaaagagggaacaaaaaaaagaaaacaaaaaaaaaaaaaggaaaaagcaaaaaaaaaaaccgagaaaagaaaaaaaaaaacaaaaagaaaagacagcacgcaaaaacaagaaaaaaaaaagcaagcaaaaaggaaaaagaaaaaaaggaaaaaaaagaaaagaaaagaaaaaaagaaaaaaaagaaaaaccaaaaacaaaagaacaaaaacaaaaaacaaaagaaaaaaaggaagccaaaaagaaaaaaacaagaaaaacacgaagaaagaaaacaaaagaaaaaacaaaaaaaacaagaaaa

SEQ ID NO: 265400 - DNA, 401 bp, Glycine max
gtgtgtgagtgattacactacattgcggatttattaccttctatcgcgcccgcaaaaaagcaaaagatgggactcttcaaatggttattgactttttcaaattggtgtttcagttttttctaaaagtcataactcttctaatggttgtcttgaccagacatgaagagtttataaaagcaaggctttgttttgcatttcaacacatcttaatacttttctaatcaatctcttacaatcctttcaaaccttgaatctctttgaacttcttcttctttgtacccaaagcttttcaaagttttctggttttcaaaaccttgaaaactcgggctattcattcttttcatctcttctccctttgccaaaaataactccgccaccgactaaccaccctgaattctttt

SEQ ID NO: 265401 - DNA, 459 bp, Glycine max
actatcgaaaaaagaggagagggacaagccttaaagcagaccccgaaaaaacccggggaggccaaaaaaaaagaaagtccaaaaccacaaaagtcctgaaaagagtatgatgaacaaaggaccgcaaaaaggccacagctaaaaccttggaacaaaaaaggggaaagaaacatcacgggtcaaaggcagaatccccaaaaaggggaaaggaaacaccacggggcaaaagcaagaactgaaaggacgagctaaagggcctcgccctagggcaaaaaaaaaaatgtcccaaacagttaaagtgaaaactgaaagggaaaaatagtgtggccactcaaacgaagaagcgccaaaaaaaaaactaaaatcctagcgggggaactcacgaaacaaaaggccaagaagaggaaagcaccccaaaaaaatcaccacaaaaagggaaaccacgggaaaaagggaaat

SEQ ID NO: 265402 - DNA, 360 bp, Glycine max
  unsure (1)..(360): unsure at all n locations
gtacaccacccatcgttttctaagccatcaaggggatgggtcgctttttccgagaaccgacgccgtccacgctcactggagggacgaagtatatcttgatttccaggaacgaaataatggccgccggcgagcgggcacccacttggttatctcccatgggccaagtttcgatcccacaaatagtnccttgagttttacgccaatgcttggccaacaaaagaaagcgtgcgtgacatgagatcctgtgttacgggtcagtggattccgttcgatgcccacgctatcaggcagctcctgggatattcgatggtattggaagagggccacgaatgctagtatggccagaagatgaaccggtct

SEQ ID NO: 265403 - DNA, 395 bp, Glycine max
  unsure (1)..(395): unsure at all n locations
tttctataatatggggagaaggaagtgtttatgtttttccccttangcactcctctctctttcgaatatgctgagaaaaattgttcccgcgaagaaaatccaagccgaggcgctttcgtaacgtttttggaggaattactcgaaagtcttacgaccgttctttgacgttcttcattccgttcttcagtctttaacggggtaagtgcccttaaacccgagcttttctattcattctatgtacccagggggggccacacttggtttcatgtatttttattctcggttcattcactctttatacccccttttgacgtgcttaagcccttttatttaagacatttctcgcttaaccaaaaaataaaataaatttgcaccgatccgttgaattgtattat

SEQ ID NO: 265404 - DNA, 414 bp, Glycine max
tactcacgctgccagaccatctaactatggagatgtactcagactttgctcttgtcacacatgggccaatcattatgctcagccattccccgaatatggcgaaacttattgatgtaagctccattggagcttgtaagcctaagatcttcttcatcaatggatacgatttcttcttggaagataaatggcagcggaatggagaaggaagaaagagaggacacgccactttaaagagaagatgagtctagaagaagctcaccaccatacgaggccatggattatagcttgaagaaagaaagagatgaatgaagggagagggagagaagagcaccaaattttgtgctctaaaaaagctcttaaatctgaaggttatattctaatgatcaaagttgaaaaaaaagctcacccatgacc

SEQ ID NO: 265405 - DNA, 315 bp, Glycine max
acaacggcggtataactacgcttgataaactgccaaaggaaatcgtgggaagtatggtttaggcctataaacccactcaggcggatgtaaagagaaccattcctggaacgaaagagcggtggtcaaagccccctgttgaggccagaaaaggatagaagctcgccctgccacataagtagaagctttataagcgcaggtctgggagacgaatgtcaactggtcccgatataccaagatgatgttccgagtaccttggatttggtacgaccatgccctcctgatttccaactgcgaaattggcgagtggaggaacgc

SEQ ID NO: 265406 - DNA, 645 bp, Glycine max
aaaacattaaaaaccaaaaagaaataagaaagagtaagagaaaaaatatataaaaaagacaaacaaaaaaaggaagacataaagtaggggaaataataataaatagaagaggaaagaaagaatggagagaaaaaaaataagaaagaaaaagtaaagaggaaaaaataaagaaatataaaaataaagatagaagaaatgaagaaaaaaatgaaaaaaaaaaaataatagaaagaaaaataaatgaaaaaataagagggagaggaaaaaagagaaaagagaaaagaaaaaaaagaaggaaaataataaagaatagataaaagaagaaatgataagtgaaggggaagaaaatagtgaaaaaaggtaagcagaagaagagataacaacgaagaaagaataaataggaaaggaggaatggacacaagaaagggaaatgattaagaggaaaaaacataagacaagaaaagaaggcgacagagaaataaggagacaaagaaataaaaaatgaagatgagagtgaaaaaaaattattagataaaaagaatgggagggaagaaaaggataaggataggagaaaagaaagaagaagagacaaggaaaagtaggatgataacgaaaagaaggaaggagaagaggagagaaaaacaa

SEQ ID NO: 265407 - DNA, 226 bp, Glycine max
atgaacagagatgcacttaacctgaggcttgcgcttagcaaaaagacttttttttcaagaaatatttgactcagtgatttttcagcactttttctcagaaactgaaacccttatgttaaacacccaaaatggggtgatatacacctatggatacaatttcttgcaagtccaaatgaattaaatgctgaaatcaaacataatagaatttgaaactggggaggctccc

SEQ ID NO: 265408 - DNA, 328 bp, Glycine max
gaaaaggagaaaaaaagaaaagaagagaagggaagagaagagaagagaagaggggggggaaggatggagacaaagaaaagaggaaggaaaagaggaagaatgggaagagagaaggggaggaaaagaaggagaggaaggagatgaggagagaagaaggaaggagggaagggagggaagagatggaagaaggatggagaaggagagagaaaaagaagaagagggaggtgaaggaaggagggaggaggaaaaaagaaggggggggaaaaaaagaataataagggaggggaagaaggaatgtagagaggaagaggaaggaggaaggaaaggg

SEQ ID NO: 265409 - DNA, 128 bp, Glycine max
aacttctccaccaatattatataaatagggggagcaaatgaaaaacaaaaagggacacaccctcccggagaatattaaaaacaacttaaagatgatgagaaaaaaaataggttcccgtgaaaaaaaaa

SEQ ID NO: 265410 - DNA, 423 bp, Glycine max
tattggattatggggcacccgatatatgtggtactatgtggcgatcgggcgatggcgcaaaacaaatatcccacttacacaagcgcaggcataagcacaccatccccagttgcccacctttaaattgagctcacgcacacctacgtagcccttctcctcgttcctctcagcaccgggtccccattaacccctccaagctttcacaaatatccaaacagattcacattccatttattcatgaaacctaccttaaacaaagaaaaacacagtggaggccgaaatctttgcacaagattcattcaaattccacagagtttttcctaccctcatacctcagcaaaatcctcttcgttccgattcgttaaccattggatcgccttgaaaatttaactgggggttcctaatacaaaaaactaaattttg

SEQ ID NO: 265411 - DNA, 404 bp, Glycine max
tgaggtttggtgttggtgatcaaaggaaagaccattttgctctccctttgatgttgcttggcttacccatggagtagtaagcacctcttcttcctcctttgggttccattttcgtttttctcatagaacacgcatggaagctcatgaaaaatctttgtttttgggcttttggttctatttgtggtcatttttggatttaggtgatgttgatgggatgggcttgttgttggagtggaggaaaactccttctttggacccaaagctcattcctttctcctccttcttcacaaagttctctttttaattctatggaggtaagtgaagctttcatttggtttgattaatgctttgattgtgttatatatacttggaatgatgatgctttggtgttgctatatgctgga

SEQ ID NO: 265412 - DNA, 391 bp, Glycine max
ttgacctgtaaagtcctcaagtgtggaaggtgccagtattatgctcaatgcctcaccagacatgccaatggtttctgaatgtcattgcatccaaccttggtcacgttcaccaataattctcattacccagatccatctaggtaagagccatatttggacacacaatatgtactacctgtagtggcagttcatgttttacattttacttgtatatatacagcgtacaataaatgtatacgtagtaaggtctacaagatgacattactgaagtacaaattgtcccaaaccctacagatgccattttcaacgtttgatagtgatagaggatagtgatagagatagagatactaagcatggctggcttgcaaggttctagaattataaaaaatat

SEQ ID NO: 265413 - DNA, 354 bp, Glycine max
tcctgctgttactcgttgaccacagattggtacctggagatatgtagcgggggtcatgagaccttggagacgtcacgtaaggtgctattgcccaaaaccaagcttgaccaatcccgacccaacccgggcatagtcagtcagtgagaacctgtgatgtacctaaacaagcgagctcctggcagtctatatataaaaggaacaaagaccacaaagcagggaggcttgtggaggctggccaactgtgaattttgggtgatatatgggttgtggcctttggtaattgattaccaagggtgggtaatcgattacaaggcttaaaaatgacaacaggagactgagatggtctctggtaat

SEQ ID NO: 265414 - DNA, 600 bp, Glycine max
gaaaagaacaaaagagggggaaaaaggaaaaaaaagacagaagcagagaaagggaagaaaaaaaaaccccaagaaaaagaaaaaaagagaaacaaaaggagaaagaaaaggaaaaaaaaaaaacaggaaaagaaggaaaaagagaaaacaagcaaaaaagggagaaaaatagaaaaagaaaagaaaaatagaaaaaagaacgaagaaaaacaaagaagaaaccaaaagaaaaaaaaaaaaaggggaaaaaaagggaggggaagaagaaaaagaggacacaaacagaaaaggagaaaaaagggaaggagcagaaaaagaaagaagaagaccggcaaaaaaaaaaaaggagggaaaaaaaaggaaaaaaaaaaaggggaaagaaaaaaaggaaaagaggggaaaaaaaaaggtggaaagaaaaaaaaagagaggggcgaaaaaaaaataaaaaaggcaagaaaaaaacaacagggggaaaggaaagaaggaaaatcaagaaaaaaagagggaacgacaaaaagaggggggaaagaagaaaaaaaagaagaaggaaagaaaaaggaaaaaaaaagacaaaaaaaaacaaagaaaaggaaaaag

SEQ ID NO: 265415 - DNA, 391 bp, Glycine max
aagtgagaggagggagagctaaactagatctctctaatacttgttctcactgcaggggccacgtgcagcggacgaacttttaaccttcatcctcgctgacccagggaaagctttactcgttccgaccccttactattctgggtaaggcattaacgacaggctctttcatttaattaaaaatactaactgacactttcaatattgattggaatttatcggaaatcaccattcttttagagtttgtgggtgctatctaataattctcacttctttatatattaaatgagaaatgaaatctattaaaattgatttttaataaatcctagaaagtgtgagagagaaagagtcatctttatttactttatagttaaaataaaatgagcattcttgg

SEQ ID NO: 265416 - DNA, 394 bp, Glycine max
gctgactcatgccgaacaggttagcaaaatttcttctcttttttaaaccaccaaggcatgaaagttaggataagcttgtgacaatttttaccccactttggctgccccatgaggggtactttgcacctatgtagcatggaaaatacctttccatgctatgtaaatatgagttgtaaatataggtaccatggaaaacacctttccatggtgtggatatatgcgaatatatgggataaaatttcttgcatactgtgaatgattagcacaaaaatgtcttttctcatatgcctattttaagggtcggtaccattatgaacctttttaaaaatgtacccattgttaaaaagggctaagacccttcctatataaatatatgatggaatggaatttcctt

SEQ ID NO: 265417 - DNA, 441 bp, Glycine max
  unsure (1)..(441): unsure at all n locations
aactataccatactcaagcttagttatagaatactatgtcacatgctcgatcttactgtttattcacttaancgctgcagactataacaaccagatcaacttggctgccaacaactctctatctatgattgagttcaagaaacacgctagctttttatttaacatctctcgatttactacaaattttgcttgacatacttcaataggccaaaattccttgtgtaacttctgtgtgctgacattccacgaacaatctgttcatggtccaacttcgaacattttcttgattgtcctatccattagttggcatactatacctctgttctttggttacattaaaggttctattaaaaaccatttgctatagtcaccaattgttccttcatctgcaattagtttcacccatacgacatgatgaagtctttggttggcataccaacc

SEQ ID NO: 265418 - DNA, 424 bp, Glycine max
  unsure (1)..(424): unsure at all n locations
aactatnaaactcaactnctcaattttgggatgatgcacttaataggctgcttattattaaatcgagttccaaccaaggctgtctcaaagacaccttttgagttattcaagggtttgaaaccaagtttgcaacatatacacgtttggggatgtccgtctgaagtaagaatttataatccacaaaagaagaaactagaccctaggactattactgggtatttcattggatatgctgaaaagtctaaagggtataggttctattgtccatcccacaacactaggattatggaatcaaggaatgcaaagtttcttgaaaatgacttcatcagtgggagtgatcaatttcagaacatttcttctgaaagggatcactatgaagctgaaccttctgggataggtaatagattgtagtcattcccacccc

SEQ ID NO: 265419 - DNA, 412 bp, Glycine max
  unsure (1)..(412): unsure at all n locations
ctcaaccttataagaacaaaancgccttactcatgagctaatatgcatgnttattangacgcancaacaagaatcgagccaaggctattgtgcaagcaatcaatggggcaaaacacaccaaatgattataatgatggatggctcaaattctcacaaaggtaaaatcatcactttcaaattgagctttcaaaactatcatgacatgtggagaagaataaatgatttcaagtcacaaaatgtcaagaacttttattttcaaaacaaaatacccatttcttgaacatatcctataattcaaagaaaaacatgcaaagtcttacgtgcacacgaaattgacccaaaatattaaactgacaatccgacgaaactaacatcattaacaaattaacacaactaacaaatttacaaaacc

SEQ ID NO: 265420 - DNA, 91 bp, Glycine max
tccagggagatactgccaactgtcgaatctttattcctttttgacaaggaattggccgtcatgccatcagaggtatggttgagcctgaact

SEQ ID NO: 265421 - DNA, 403 bp, Glycine max
tggagagatatggcacaaactctcacagatgccaacttttgttatgtaaaggaactactggaagcagagcctccacaatggttagcaaatagtgctgcttcttcttgtatgctttgtggtgtgagatttcatcccatcatgtgctcccgtcatcactgccggttttgtggaggaatattttgtggggagtgttccaatgggcggagtttgttgccttcaaaattccgagtttctgacccccaaagaatatgtgatgtatgctgtgtccgacttgactctgcgcagccttatttgatgaatcatgtaagtaatgctgctcagttgccaacccatgaccttgcagatctgagcactttgagatcctggattaattttccttgggggcagtctatggaatattaaa

SEQ ID NO: 265422 - DNA, 380 bp, Glycine max
agcttgtactaacttgcgcgggaaaacaccggaagtggcgcaatggtgaatatttggcacaccggaaaaaacaagctgcaccttaacccttcctctttctatgatacactccacgtttcagtgattcaacctttttttcggtacctccaacgctggcaagggcggaactaatccaacaactcgttggaccccgcccaaaagcaaaatggtggtgttagggagagctaggattggcttgggaagttaaagggaaagggaaaaggttatagacaaagactaaagggtgcttgtctagagttaagaaagaggtttaaaaacaaaaatcatgggattttgaagaaaagcgaggttgaagaaaaaaagacgtgagtgataatata

SEQ ID NO: 265423 - DNA, 416 bp, Glycine max
  unsure (1)..(416): unsure at all n locations
tccncagaatacaaagtgaaaatacctccataacaaacttcttgatatgtaaaggatttcttgaacacaaccacacatggttgttacgatcagaaaactgtgaaccacaggaaccttggatcctaataacacagcatctgttaactaccaggtttcctactccacctatttgcagatcttgatgaacttaaattcgagtcacggggctctgagaacctatcatttctagttgcagatctaggtgaacttatatttgagtcacggggctccgagaacctatcatttctagttgcagatcttggtgaatttagatttgagtcatggggctctaagaacctatcatttctagttgcagatcccattgcatcattcctgccacctcctctcctgtgtttatgtctctttgtgtgacgact

SEQ ID NO: 265424 - DNA, 600 bp, Glycine max
agcttgtaataggatttaaactcaagcccttcttctgtaaatggacttggggaaagaccagacataaagccttcacaaagaagccagtgacctgataaactggaccgacttacaataaaaagaatttctcccgtggaggaaatgaaaactccaacactgaccatcaacatgttgaaaaaaacattcaaaccctggtttggtaagtgccacaccataacagccaccaggaatgttgccacaggcactgaaacatcaagttttagaattaagaaaatatcattcagacagtaaacaagcatgtgaagatcattaaagacatactcaaagctttgaacatctggataaaagccacagaaaaatgcaaataagctggggtaccaaacctgtaaaaacccaaaacataagggtttttttcataagtaccgaaattacatgagggggaaacaggttaataagagaacatataagaaccccccaaggaatcattggattattcaagggaactaacataatttccttaaaaaaacaaactttgaaccgaataaaatttttgagaatgaaaccaatccaaagggggtgggggaaaaaaaaagtaaaatc

SEQ ID NO: 265425 - DNA, 417 bp, Glycine max
  unsure (1)..(417): unsure at all n locations
tctcacgtctntgtctctcagcttcaacatgattcagcggttcctctctcccatttgccggctttctacctctttttctgggcttccgctcatctgcatgaatggaggatgagtcttcattaccgagatctagacaaggaaccccgcttccttgagcattaaaattcccagccatcatttgattcagttgagggaacattttaccttcattactgacacctaaagtcccattggaagaatttccataagcatggttcacccctagtgcttgaacctcataggagtccgaagtaaaaccaggatcatcttccaccttcggggagaaactaatagttatagactgagattttgtgtcccctaggcttaactcatgcccaaaaatcttcggaaacacctttgcctgtccgggactggatt

SEQ ID NO: 265426 - DNA, 80 bp, Glycine max
ccgaacgcgaatgtcgagaaggaaaatgtcgacaaggaagacgaaaggaagatacaaaagatgacggaaaactactaaaa

SEQ ID NO: 265427 - DNA, 564 bp, Glycine max
ttattagagaaacacaaaacaacaaccctacagttacaccattaacaataagagagaacaaatggtcagacataaagcaaagcgcagggaagccatcaccaccttaaccgggaaaaggtgcttcccggaaacccaaaagaggcttattccgcccgaaggaaggaaaaaaacaaaacacgactaaggtgggggacggctaaaacgtgggaaagggaaggaaaggaggcaccaggaaaaagatgggccaatgaacctacctaccaaaggagaaaacatggcaaaaaagcgaaaaagggggaaaaggagaacaggcaggaggcgaacagaaaaaaaagcgaggaaaagggcgctccgaaagaaaaaaatggcccaaaggcactaccaaaaaatgggccttttacggcggaggaaacaaaaacaggtgggcaagggactgcccttaaaaagggcaaagggggggtgattcgtaaaaaaaccccaaatgaaatggaacaacttttccgcaaggaacaaccgttgaataagggaaatttgggaggggggaacggggcaaatattttaaat

SEQ ID NO: 265428 - DNA, 418 bp, Glycine max
tgtggtatgaataacttcctcaattcatttccctcttcactataactaaaacatatcaatctattgcgctagatagatattaattgtgttcattgacactcttaatttgcattccatttgtcaggcactgaagttgaagaaacatgtgtatcttcattatatgcttgcaatcagatattcaatcagatcatgaccatcgcttacgatataaatgtaagatatagaaaaacaatagtatgaccaagatgaatgaaaataatgcagcactaacaaactagtgtatatctcattattctaactccagtactatgacattagaaagaaatgtatgggagatctgtgttatgacttctctgtcatggaggatttcttaaacaacaaattacagtgtagtctgtttctcttctactcgttaata

SEQ ID NO: 265429 - DNA, 423 bp, Glycine max
ctatcatgaacttgattgtaatagggtgcagtcttttatatacaatgcatacgtagcataaggacattatagtaaaaaaattggtttgcagacacataccttgattttaaatttttgaacataaacgatcataagctctagaaaaaatactcaccagtctccaaaaacatggttggcaatggcacatggtgaggggccttggcctccaatggtatctaaattacggaaataaatcaaattctaccaaaagtgcttttcaaatttcaaaatgtagacttaaaaaacacaaattaacactatgttatcatcctccaacaaaaacaaacctgtgtttgcattctatgaagtgaactatttggttaaatgattatgcttgaagacattaaacacagttgtaccataaatatgcaaaaataggagaat

SEQ ID NO: 265430 - DNA, 373 bp, Glycine max
ataggaaacccaggaccaaaaaaacgagcagaaggcatgccaacgatgaaaaaaaaaaaaatcaatacgattataatatagaaaaacagagagaggataaaaagacagaaaaacgaaaagtaaaagcacaagacaaaacaagaaaacacgaataaaaaaaagagaaagcaacaaagaaccgagacaccaaaccaacaaagacgaccacgaaaggacacaaacaaaaagagaaaaacaacggagcaaaggaaaggaaagagaaggaacaagggaaaaacaaacacgacaagaaacaggaaagagagacatgaacacgacagaaaaaaaaaaaaaaaagagaagagggaaaaaaaaaccaagacggagaaacaaa

SEQ ID NO: 265431 - DNA, 143 bp, Glycine max
ctgaaccgggaccaacacgagcagcacggggcacaacattaagaccaagaactaagggaaaaccagaccggaaaaacggaaaaccaaaaccgcccaaaaagaaaaaacaaaaaaaaaaaggagaaaaaaaagagaaaaaacaa

SEQ ID NO: 265432 - DNA, 415 bp, Glycine max
tactaagctttcatcaggaagggtcgcacctgtgtggctcatactttgttaaatgtattttacaaacacagtggagcattgcagcgggttgtttgaggactggacgtatacacgggaagtggccgaaccaatctaaatcaatgttgcattccctctttccttaaacgttcttttattaattggtatgtatcttatgctttaaagaagtgtattttgaattgtcttttgagtaatccatgttaagggtgcattggtaattcatcaagagacagtgaaagtttaattggggaatagtctttgtatttcaattcaaacccccaccccttcttaatataactgaggccatttgttccatctcctatttttgaaaagctactcttctctaaaagaacaaaccttccggaatgataaactg

SEQ ID NO: 265433 - DNA, 585 bp, Glycine max
agctttaccccaggccttttggtatacattttttggacaagccgctcgatgctactgaatctcaaattgttggaccaatttccaactaaatcattgatcgcaatccatccctcccaatagtctttggatgccaagactttctataattattggtcacatttactcaagaataatgccctttgggttttttactatccttaaaggaaaagtcttaacactttgactccaaggctgggtccacattgttcatggccaatttacacatcgtattcttaaatttaggtcctcaaataaagggctccatattctacccatggtatgctttaagtccaggattattagcaattaattttaaatggcaactattacaatttatgtataaaggggaaatttggtcatttcacaatccctgaatgcattatttgatgatactgggtgaataataaaattactggccattgtaaaagccttacccatacaatttatagcggggaggtttttattcattatgtatgacacattgcacatctttattcacactatgcctgtctttagcttaattacctcaaaatacttatcacattg

SEQ ID NO: 265434 - DNA, 425 bp, Glycine max
acctgcattacgcgacacttagatactcagcttcttgtaagatcatgaaggcagattttgttctccatcttgagatagctaagctcacctcgttgagatgagaatcttgaacttagctactcgcgctctagtccaccattttcttggccgcctgacaaataacatgattgttcgaattaaagctgttactacaaagactagtcgaaatgcccgcagatacaagggtaagagcctatactactcgaatgggctgaatacaaggccgagacgaaggagaaacgtattctaatatttacaaggataagcgggtttatacttagaccatgggcgcgaaatgtagcctaatggtcatgataaccctagggccttgccttggatctatagcccaatctacttggagtgttgtacccaatgcccttgtggga

SEQ ID NO: 265435 - DNA, 574 bp, Glycine max
agcatggggaaataagggaatgagggccgtttttggttatgggaacagggcgaaataagggcatgaggcgtaggggtttgggaagaaaaaccccaagaaaaaaggtttgagctaaaggggaatattccacccacataaagataggccaaagaaaacagatctgaaggagggatgaagggtgaaggcgcaaagaaatcaaatactgaaaaaagagataaaaaccccccataaagaaaatccaataaaagctcttggggaaatactggaacacaataaaaataaagccgagaactgcacctaaaatgactgaactgaaccaaattgagggagtttaaacaacggaaaccaaggacattcccacggggaggggccaaaatccgactcaaagggtccgaaaaaaacaaaccaggtatgaaagaattatatcagaaaaaattggaacacaggcactaactctttatcccagagaagtgaaaaaaaaacaaaccagggacccgcggggaaataaagaaacaaaacgaagaaaaaacatgacccaaaaaatggggaaaaaaaaaaaaaaaccaaaaccaaa

SEQ ID NO: 265436 - DNA, 412 bp, Glycine max
  unsure (1)..(412): unsure at all n locations
ttacatgcatgtgcacaccatatnnactatactttgattaactgatattatctcatcgagggaaaagataatttatactactcttctaatgtagtggacaactaaaattaaaataatataatagaaaatactgcttaagccattcaaatcaagtcattttgaatctcaccattagtatcatgcatgtcaaagataaggagaatcaggcatcgtaatgcataacacaaccaaacattaaaagaaaacatgcttcctaaagccaaccaaggtaaaaatgtattcatatttcatgaactttttcaaaattataagacacatataaccatatatgaaaacatggcagaacaatctcaccacatgaacaacatagaccacacatttcagaaaatgagtggtaaggaaaaataataaa

SEQ ID NO: 265437 - DNA, 611 bp, Glycine max
ctggtgatacatgaataaggaagttttcatgtatctctcaaaacatcgaaggggggggaaaacataaaaactatcctcttgcaagggaatctcaataaagagaaagacacgttttggacaaataaaatagggtgataaacattggaaaatcaaataaaaagcaaggcataaaagccaagaagggaaaatacttacagacactccaagtccaatccaatacaggggcattagggattcaacacaaagacctataacctctctggcgagggggggacaccaaaacattaagggcatagccgataataacaataggaccaaaaccatgtgacatccaatgtaattattgaaacaacccaatttattatccaatgaaaaataaatggctaatggaataaaggaatcaattcccaaacatcgcattctttggaaatagaataaaattcctcatgcattgatataaaccaaaactcatcttagagggcccttttaaaaaaaaaagggtactacttctaacacaaaagtaaaatgcccacaaaaaaagggaaagaaaagggctaagaataaacccacattcaaagacaagggaaaggggacaaaaaagaaatacaatg

SEQ ID NO: 265438 - DNA, 419 bp, Glycine max
tgccatgtcgtcgtcgttctgacctaaactctcttttgttttgtacccaagcctcaacattacacgggctaccatcaatgcagcactggatgaacggggttacactgggggagactcgatgtcgcaacctacccttcagcgggagggcgacgcgagactcacgggtgcatcttccaaggaaggaaaacacgcggagttgccaccaacgtttattcgaggaaaacgtcggaaaaaaccacaaaaggcgtggtctacgaactttaagtgtgaaaggttcgggagttgtatttatgcacggggaaggtactaacaccccacgcgtccgtcacaaggtacgacagcctttaatcaagtgtgcaaatatgacttcaatttgtgttatttcccctttgtaggatcttatgtctctttatgctttt

SEQ ID NO: 265439 - DNA, 402 bp, Glycine max
tgatcgacacggagtggctaacattccaagaagacgacttctttgtaaagacaaatctacttgtcaatcacggaggatcagcagtaaacgcaatagaggagtgcgaactgcagaggccgaagcaaatgaaggacgtggtaacctctatgaggtttatatctgaagcactgcaagaagcggacatggtttcctttgatgtgcaaaagggggattcctatttgatgcatccaggtgcatcgcatgacatataaacattttaaaggcagaggagctattacagtgaatgatggaccaaggccgatttgaaattggtgttgcaagcaagggatgcaatcgacagacaaaagcccaagcaaacccaaacctttggtgatacactttaccagagatgttgcctcccaa

SEQ ID NO: 265440 - DNA, 623 bp, Glycine max
agcttaaaaaacccaacttttttaacaaaaatgcaaaaggactaaccaatgaatatgaaaaaaaaattaaggaacaaagtgaaaaaaatatgaacactaagaaaaccttgggaaaaaaatccaacaaggcccgaaacggacaaaagaaccaaaataagtacctaaagggatttaggagaaactaataaaaggcattaaacatcaaaaaggggaaaggaaatattacgcgaaaggggaatgaaaatgaagaacgatctcaaagttagcgttagatcgaaagaaaattcgttccaaagggcaaagtgagactaaagggaataatctggcccaaaataataaaaggaaagaaaaaaataaaaaagcggctgaattaaaatacaaaaggtggaggataagttcgccaaaatataaacttaaagataaaaatgggagagggtttggaatcaatggctcgaaaaagaaaaattgaggaaggaccaaatggatattaatttgaacaagaaaaaaggagattgccggaatgttattcaagacaaaaaaatggggagaccctaattcgcccccaaaaaaaaacatgaatttttaccttttgaaacaaaaaggaaaacccaaggcacctttgg

SEQ ID NO: 265441 - DNA, 340 bp, Glycine max
tttttccagaataaaacggttgagaaccggtacgcaacctgcctactgaggcagtgtctgctacatccctatggattatggagactagcacgaactgcgatacgaaaaccaactgcatctgttaaagacgataaacctgcctacatctgttactgcacacacggctcatgattcaaccttctggactcattgttattagggggccatgccgatctcacctacatgatcaaattgctattgaaaactacgatcgagtgatttccgactccacttgactctgcacccggatgatctgatcttagcatccacacctacgctgttatacctacagacagatgtc

SEQ ID NO: 265442 - DNA, 332 bp, Glycine max
acaattcaaatgaggcaatgaatattctccgaatcatcacccaaattacggctcgtgcctctatggtgcaaccctgggatattcttcaaagtttcgatcatttgagtaagctataaaacccatactccaacacttagtcccacctataaggtcattgtttttctttaaggatgtcttatgtcagaaaaattttaatttgattaaaatatttgcattaagaataagaacataccttattaattcatggataagtttaaaaccagaatatacactttgaaaaacatatattatttaactaaattccttattcattgtgaactaattgtcccttt

SEQ ID NO: 265443 - DNA, 296 bp, Glycine max
cgccagcaagctactgctattgccaagcgattttctcatttcatttctattcttccacgagagcgagcgcggtaacgctacaaaagtgccttcaacttacatcttataattataatccctcttttccctacctttaagtgaaacatgcttggccatggtgcttgacccctttctctagtcctttaatggcatttatccaaaaatatgagagtgggtgtcgcccaatgctagattaatggtcactgaatatttagtaaggggggttgaactaatatttccaaaccttattaagtttg

SEQ ID NO: 265444 - DNA, 345 bp, Glycine max
ggactctgaggcacttatgatagccgccgatgatcccattactgcttcccctaagctctctctcctttcttcacgccccatcccatgccttgcgaactccttggagtaccctctcgttgtggtcaccgaaaccccgtgcgatgaaaggcatgatgctttcgtttgatggcactcctctcattcggacatccttcgcatgaagatagaatcctgattcttccttccttcttacgagggaaccgattaacagacgcccctccatgctagccaagaatggtcccacatttcctttcctttttcgacgcacgagcggtgaccttgtaacggataaaccggcctaccctt

SEQ ID NO: 265445 - DNA, 105 bp, Glycine max
tatctgctaagcaaaacccactcgggcttccctactatccaaaatacgtgttttcaaacatgcttgcaacaaaaagacatcctgctcaacgtaggaggaaaatcc

SEQ ID NO: 265446 - DNA, 170 bp, Glycine max
aaaaaagaacagaaagaaaagaaagaacaaaaggacggaacaaaacacagggaaagggcgagcatgaaacccgatgacccttggaaacccgggaccccagagaagccgaggcaccaaacaaaggaggcaaacaagcgcccgaaaaaaaaacacgccccggagaacaacaa

SEQ ID NO: 265447 - DNA, 344 bp, Glycine max
  unsure (1)..(344): unsure at all n locations
ctaacgagtcacatatcttcataaactaactcttcaatcgattaccacttttatgtaatcggacaccagtccggaattcttgacattcacccccaccactccnnnntgttcaagaaaaatgttatgaccatctaaggcctttctatctgtgatcggcgatacaaaactctttataatgtatttgaacaaaaatgtctcatcctcttataaccatatagtcttattactctcaaaatactacttgccccaactctcgctgatttaattaagaatcttgtgggagccttacctctgcatatcctcttcttaatagagaaacttctttccttttattcaatgaaatt

SEQ ID NO: 265448 - DNA, 402 bp, Glycine max
  unsure (1)..(402): unsure at all n locations
tgtaatcgattacacatatactgtaatcgattaccagattatattcttagaanatattctcaacagtcacatctttttatgtggttcttgaatggctatcaaaggcctatatatatgtgacttgagacacgaatttgctaagagtttttcagaacaaaaaggtcttatcctcttaaaaagaaaaatcggtttatcctcttacaaattccttggccaaaacacttgtgattcaataaggaattatttgagtgctcaaattgttcaatctatctctttcaagagagatttcttctttttttcttcttcattctgaaaagggattaagagaccgagggtctcttgttgtgaaagaattctaaacacaaaggaaggattgtccttgtgtgtttagaacttgtaaaa

SEQ ID NO: 265449 - DNA, 327 bp, Glycine max
catattctgcattatacatctaacaatggagtacagcattcgctcttatttactatcgaatggttcaacacctacagtgggccacctgatcgcccacctattagcccctcttagataataaaactaactaacctaacaactattacattattaatatccctgctaaccccgttatagggcaggacgtgttgaatgaatcaatgtactacaaaccgcacgcaatggggggatggtgatgtctctgtcttttgcacatactgtcgggatcaatggtggggattgttcaaagcactggagtctctatcgatatcgcggcctcggcgtgaa

SEQ ID NO: 265450 - DNA, 403 bp, Glycine max
ctatgtggcagggggcttcttcactttctttcttatccgtcaacctttattaccgctcttccttcccgcgatgcttctctttatatctgtctgagagggcttataacctaaaccatacttcccacgatttcctttggcattaatcaggctagttatgccgccgttgtctttgcctagacccattccgggttcgtaaccgatccccagcataactggggccatcattactgctgcatcggacaggcaaggctgcccatacaaagagtccatggaggaaatgcttaccacctcaaaagactggaaagcggtttctaatgactcctccgcggcttccacataaggcatataagatgggcaacctaccaaaatgtcttcctcgcctgataccatgaccagatgccct

SEQ ID NO: 265451 - DNA, 373 bp, Glycine max
  unsure (1)..(373): unsure at all n locations
actagcttttatgggtgtgtaattcaacaaacttctttttttttttgngcaacgcattgttgaggactacaccaaagtaaattttgaacttgtgcacatttaaatactcatagaagccatgtggtgaaccataaaacaaaggggaaactacttggaaggagggcgaagtttactgtcttaaggtgagaatactaacagagatagaccacacattaattgtcggcctacaactttagaaaaattcactactatgaaaacaaccttttacgttggttttttagaaatacgacatcggttatgaaccgtcatcatattgaatgtcgaaaaatgttaagcgtgtacaacaacgggttcctacccatcttggaatgtg

SEQ ID NO: 265452 - DNA, 451 bp, Glycine max
agcttccctgctatggagagctaaaacctttattggttcttcccatggggaactccaaggattatgtgagcactgggcaaacaaaacttcattctaggggtcctttgccttgaacacacaaatacatgcttaattaggggcactcaaaaatgggaaaaagggtaatcacaaaaactatgatagacaagggccgggctaaaaaaatttccaaaaaaaaatcggggtacaaaaactaagctcttgggatggaaagccttaaagcgaaactggttaaaataaatccaacaggagacatctgaagacgatgcttgttaaggataaggctaaacatgcgcaagacataggggtttagaaacccaggagaaaacataaaacaccggaacattgttaggtagaaaacaaccttagaaacaatcttccccctaggaggaagaacgacacggggttaata

SEQ ID NO: 265453 - DNA, 409 bp, Glycine max
  unsure (1)..(409): unsure at all n locations
ctttgtcttaaatgttagctnttatgctctatgtggtctttatatatttatctcgcngtatgctcttgtgttatatatctctctctccctcatgttaatagttcttttcattttccgcacctttgaatctgtgatctacatgccctcaatttgtaataaagttaaacatctttcttgcattttaaagagagtttgatgaaatatagtatcaatatgttcctcagttttaaatgggctgaaagattgattggggtggttgctatgtcagggtacctctcactgtagtgttctttcttccactagaaataatgaaagtgtgcttattactttttttagtttcacctcgaaagactaccttgtcaagttatgaacttgagaattcctggttaatccaaatctaagttgtcca

SEQ ID NO: 265454 - DNA, 413 bp, Glycine max
atagtctgacaaaagtgtccgagacccaccaccattgattatgtgcttcatcgcaacacccagaggctttgtcatggtacccttatagaccttaacctaaatatgaattcattaataggaattcggtatacatacacattcaatcaagcttggagaatttaaataaataagtggatgtcttcaatcggttacgcaaggcaaagaaccaagattttaagtttttaactctatgaacacttatccaattccatgttatgttagtgtgatcctgtatctgcattgatagtaaaatcagcctccacatatagctgactaatggctatagtcccgacagacttcccattgaaatcatttgatctgacaacttttgtagccaaaactggaaattcccagcatgacaaatagtttgcaac

SEQ ID NO: 265455 - DNA, 298 bp, Glycine max
tgaacactaaagactaaaagtgcgtgcgccaacatcaaacatgatacaattcagccggcacttactaaaccataaggatgcgaaagtctttccttcaaatagtcctgcgttttatcattggaagaagcatcatctagagctaatgcaaaaatattgtggtcaatcacccattcttccaagaagccatatataactctacccacttcacgcccctactgcggtggaggaaaatatcaaaaattaaccatcttactattaacttccaatttgcatgaacataatgcgcagtgaatgaaac

SEQ ID NO: 265456 - DNA, 584 bp, Glycine max
agcttatagaatctcttattaaagacctctttccattgtcttaatctttgcctgcctcccttgatgagtctatatgccttttctccaaaaaaggaatttttttatgaagttactaaatcttttaacctaatgcccttttatgggccaaattttataaggaagaagtctaatcgaatgatgaacttccaaaagaatgggaagcttcaaaaatcttcccctcgacaacatttttggggatatacaaaaaggggtaacaactagactttctctttaaatattcatgccataatatgagtctcgagtctcctcattgatcctataacattaaatgaacccctctttcatgatcattggaatgttcctatgcaagaagaactaatttcatttgaaaaaacaaatggggggaattataaagaaaccctgaaactaccctatattagaacaaaaaggtgtttcgaataagttgaagaacctggcctactcttttggataggctgtaattttgcccaggttccctccaaagaagggtttttattgaaaacatatgctccctcgctgattaaagccctagatgcttttaccct

SEQ ID NO: 265457 - DNA, 420 bp, Glycine max
ggacctatgaaactaagctgtcctataaataggtgttgaaggcatcatttcaatttctcattaagtaaaatggatcattttcgaggtccaacgccttaaaatgatcaccttttaagtaaaaaagaatcacttgataagaaagaactacgtaggtctgatttcctcatcgcaaattgaggaatacgtaggagcaaagggaaacacccttgtcgaccacaaaaagaaaataatataaaaagggtataaaggatataaggacataaaaagggaacataaaaaaatcaaagtcatgtttgcacattcgattaaaggctgtcgttccttgggacggacgtgtggggtgctaatactttccccgtgcttaaatacaactcccgaaccttttacttaaagttcgtagaccgcgtcttttccgggttt

SEQ ID NO: 265458 - DNA, 400 bp, Glycine max
  unsure (1)..(400): unsure at all n locations
tcatgctanagcaagcaaggcataacttctttattgttttctacacacaccagcgaacgtgtaaccgagtgtttacacttggagtgataacatgcagtcctcttgaacccttactgccaactgtgtcatcatggcgagacttatgaaggccaacgaagttacccttttcaatgtactttgaacaaaattcaatggcttcttctgcaatgtacctttcaacaatagatgcttttctaccatgtagattcttgggatacctttttaagatcttcatgtctcgctcaactgggtacatccaccgcaaataaataggaccacaacatttgatttctctgaccagatgaacaattaagtgaatcatgatgttcaagaaaagtacgaggaaaatacctctccaact

SEQ ID NO: 265459 - DNA, 428 bp, Glycine max
agctttaaaacaaaaaattgctagcttttttgtgccaacaaatatgacaccaatcccatgatatagggtatacatttatgtggacaacaaaaaacaaatggaaaaaaacaccaacaaaattttaatgtgaagggaaaaaaaaagtagggagcaagcattatttaaaaaatttattttttcacgaccaggagataataaaaaaaaatgggcatctgcaactttgaaattggaagtaaggaaacaaatcactgtgcttaaagatttgaatatacaactaagaattagcatagaattgaagcttgagtgtcatccaatcgaggtaaggggaaatacctcccatggataaccgagaaaaggaattggcttctaaaaaagcaaggactccagtacaggcacaatgataaattggtatttggaacaaatgaagc

SEQ ID NO: 265460 - DNA, 397 bp, Glycine max
tgcttcattgtgaaatgggaagacgtcttctcattgatgtttacctcattgatgtaaatgggaagattcatgattgaaaatcaatgggagaagatgttttctgggccattaaaggaggaagtgccactagttttggagtcatccttggatggaagatcacgttggtcacagttccacctattgttactgggttcaacattcccagaacaccggaggaaggagccaccaatctcattcacaggtggcaacacatagcacatgaattgcatgaggatcttttcattacagtaattgctcacaatagtggagacaaattaaaaaaattccaagcaaccttcaactctgtctttcttggagggaaatacagtctgatcctcctgatgaatgagagtttccc

SEQ ID NO: 265461 - DNA, 405 bp, Glycine max
  unsure (1)..(405): unsure at all n locations
cgaactgaatacataacaacngacgactttctcttttatctcgttgttataaccaaggaatttgtgcgtagccttaaaaaaaactaattaattttgtgcatagtctatcacatcaattgtataatttttctataagctaaaaaaaattatttgaaagagaccaattactcacaacttctttttccgtgaaacaatttattttagaaactattataattattaaaatattttttaaggtataccaaacattttaaaattcagtccatgcctgatatataattactgtgttaatttcgcattatttttccgaatacacaacttcagttttccttttgatttcttcattggcattaaagcattattaaaaaaaaatatcttaaattggccttgcgctataccaactga

SEQ ID NO: 265462 - DNA, 407 bp, Glycine max
tactcagcttgaagcttgcttcacatttaaaccatattggatttttatttcttgaacactctgtgttcttgactaggaacttgacacccttcacgttgagtcatacatatctcttcctctaaatcgccattcaaaaaagttgttttcacatccatttgatgaatgactaacttatgaatgaccactaaagctatcaaaactcggataaaggaaatcctagtaatatgggcaaaggtatcaaaagaatctatgtctggtaacaatgtcatcattgtcaacgccacaacactgttgtcataaagattcttggccaatgagaagaacttcaggacgaactaaagaattagagggcgagcttgcttgctccatttcttgacgaggttggaggaaatctttagttcaactgc

SEQ ID NO: 265463 - DNA, 571 bp, Glycine max
gacctgcatgcttgcactacttattgcgtttctcgctgttggagctctttaaaatcccaaaatcaaatccctcttattactaagcaattttgaatttattttaaatccctgaatgtacaacacttcaaattggttgctcgattccctctttcttttcttgcaaaaaaaaaaatcaattatcacagaaaaccatggatgaaatccttagggaagcccttttccatgtgtatttttttaagaaatagtttttattttccatcaaaacataccattggatgggggaatacatgtaataaactttttataacatgggtgccccccatcacaatttaaaagcagcacctaccaattttttaaaaaactttgcgtaaaaagactggttcccttatgtggggggggttttgttaaaaacaatatagtgttgcccttccaaaaaaacttatgactgacccttgagctttttcattaaacctattatgctggtaactaggataaaaaaaaaggagtttttcaactaactcaaatcctacttcttctacctctttatataatttatctacgacaaattttg

SEQ ID NO: 265464 - DNA, 437 bp, Glycine max
actcaagcttgtactagtcatatatatgttacaaaacaacgaaagcaattattgaatttattattgcagatacagaaatacttaaacaaacctgccaattaagagttttgcggctttttgcaaattccgcccatgtttctggatcaaggccatacttgactgtaggatcagatatttgctgaccttcattgtcagcaaagacaaattttgaagtcaatgaaaacttaaattgcctccatcttgctgcagctgttgacatcacctttttttttgcattttcaccttcagggatatcaaatttgcgctgcacaacaaaaggagttatgtaacagtatgtaaatgaatcctttaaaagtaacttaacaacaaaatcatgaatacaagtgtatttagaattacttcaaaatatatttccatattaagctctttagatcgtc

SEQ ID NO: 265465 - DNA, 467 bp, Glycine max
gagaaaaaaaaaataggggaaaaacaaaaaatacaaaaaataaaaatggagaggaaaggaataaaaaggaaagaaaaaaagacgaaaagaaaaaagcaaataaagaatacggaagacagggaaatagacaacatgaaaaaaacaaagaatgggggaaaaaaagagacaaacgcaagtataaaaaaaggggggaaggacactaaagaagaaaggataaaaaaaaggggaaaaaaaaaaacgccggcgggagacaaatgagaaaagggcacaaagggaaggaaatagacaacaaaataaaaaaaaggagaaaagaaaattaagaacgagagagaaaaaaaaggaacagaaaaaagtaaagacaaaggacacaaagaaagggacacaacgaggaaaaaaaaaaaaaggcgaaaaagagaaagaagaaagggaggaaaaacaagaagagagagttaataaggaaacaaacc

SEQ ID NO: 265466 - DNA, 418 bp, Glycine max
  unsure (1)..(418): unsure at all n locations
ctcacgctttgaggatttggtctctgctagtgaaaggatcgatgtgtgtctgaanaaaggcaaatttagtcattctgcttggacgaacgagaaaactggggcaaatgaagggggtgagaaagagggagaaacccatgctgtgactgccattcctatacggccaagtttcccaccaacccaacaatgtcattactcagccaataacaaacctcctccttacccaccgcccagttatccacaaaggccatccctaaatcaaccacaaagcctgtctaccgcacttccaatgacgaagaccacctttatcacaaaccaaaaaacaccaacaaaaggaattttgcagcaaaaagcctgtagggttcaccccaaattccgttgtcatatgttaaacttgatcccatatccactcaataattca

SEQ ID NO: 265467 - DNA, 406 bp, Glycine max
tatgcacggacaatgtaattatgaaattgagatgcccgtttaaataccatttcctagttaaccatgcattaggtaccatgttcaattattttgtttttaaatgaaacgggtttatgatcccaacatggttggctcgtggtgcctaacacatgaaactaagaatgtagtgtgaagtttcacgcttccccctttttttgtttttgttttgtagaggaaaacgcaaggatgagcaaacatgaaaacaaatggtatgcaattttgcagatcaaaaagtttgttgaacgcatatgcatgatgatgccatgacttatgcaaaatgtgaggctggaatatgataacggacaaatgcacgatatgtccattatgatggtatgaagagatgcttatgttgggcatgatatgaatg

SEQ ID NO: 265468 - DNA, 697 bp, Glycine max
accggggaaaccaaaaagaaaaactgaaggcatgaaaacaaaaagaagcaaaaaaaagaaccgtttataaaataaaaaaaaaaaaaaaactacaagagggataagaaaaaagcaaaaaaggaaaaaggaacaaaaaacagaaaagcagaataatggaaaaaacaaaccaatggaacgaaggacacaaagaaaaaaaggaaaaacaaaacaaaaaggacggaaaacaagaatggaaaaaaaaagaagagaagaagacggaagtaaaaaaaaaaaaaaaaaggaaaaaagaaaaaaacaaaaaaaggaaaagaagaataaaaagcaaaaaaaaaacaacaacaaataatagtaaaacaaaagaaataaaaaaaaggaaagcataacaaaaacaaacgagaacaacacaagataaaggaaaggcaaaaaaacaaaaaaaagaatcagatcaagacaaaagaccaaaacaagaaaacaaagcaaatccaagaaacgcaacacggaaaaaaaagcaaaaagacgacaaaacaaaaaagagaagtaacagaaggcggaagaacacaaaagaagagaaacaaaacaataaaaacaaaaagacaacaagaaaaccgtcaaagaaaaggaaacaaaagcagaaaaaaaaaaaaaaatagaagaaacaagaaaaaaaaaaaaaatggagaaccaaaaaaaaagaaga

SEQ ID NO: 265469 - DNA, 272 bp, Glycine max
  unsure (1)..(272): unsure at all n locations
tatgggggagatanacatgcaaagcattgtcctttttgtttctaagaaacctttctgccgggtttacatgaggaaaggtcagagtcttcgtaaaggtacacacaacttccactggatatagaataatagggccctggtttgggtagataccttagactccccacaagacatttgaaaaccgtggagactaccttctctccttcattaaacattgataacttcaaccccccttccataagtgtgttaccggattgcatcaagcatattaattt

SEQ ID NO: 265470 - DNA, 105 bp, Glycine max
ggaccttagatcgaccgaggcatgcaacacgtaggaaataggggacccaacacatgtggatttatggggcgggcaggccgaaggggcacaaacaaggatttcaaa

SEQ ID NO: 265471 - DNA, 416 bp, Glycine max
  unsure (1)..(416): unsure at all n locations
tgaatgcaaactggatgcattggttaacttgttaacctatttgtccttgaaccacaaatctgtacctgtcgcaagggtctgtggattgtgctcctctgctgaccaccatacaaacctttgccctttcatgcagcaacctggagcaattgagcagcccgaagcttatgcttgcaaacatttacatataggactctccctcaatcctcaggtagcaacaatcaaccacaacanaacaattatgacctctccagcaacagatacaaccctggatggaggaatcaccctaatctcagatggtctaaccctcatcaacaacaacagtagcctgctccttccttccaaaatgttgctggccaaagcagaccatacattccttcaccaatccaacaacagcaacagccccagaaacagccaac

SEQ ID NO: 265472 - DNA, 214 bp, Glycine max
tctttttttttccccacgggggggtgccacacctctatctttattagggaaccctctctcaaatgcagtctacccccacgctaacatggtcccttgcgagaaacatgactacggggcaagctcatattacatcaactgagccatagaacccaactttaccatactatacaggccacccttgatatcaaataataaaactggttcccgaaaaaat

SEQ ID NO: 265473 - DNA, 397 bp, Glycine max
cgccttgcagatatgcgcttcgcctgtgaacggattattgttttttctaacagaagacaatttgatctttctactatgtcgactgatacaactggggcaaattaagagggtgaggatgacggagaaacccatgctgcgactgccattcctgtacggccaaattttccaccatcccaacaatatctttactcagccaataacataccacctccttatccaccacccacatatccacaaaggccctccctaaatctaccacaaagtttgtctaccgcactttcaatgacgaacaccaccattatcacaaaccaaagacaccaaccacgaaatgaattttgccgcgagaaagcctgtataattcaccccaatttcaatgtcctatgctgacttgctccca

SEQ ID NO: 265474 - DNA, 491 bp, Glycine max
aaaaaaaaagagagaaaacaaaaaaagaaaagggttagatcaaccaaaaaaaaggaagacaaaaaggggaaaaatcgaaaaagaaaaaaaaaacagaccgcacaaaacaagaacacaaaggaaaagggaaaaaaaacgacaaaagacaaaaaaagaaacaacgggacaaaaacaaagaggcagcaccaaacaaaaggaaagagggggctaccaaaccaaagacgaacacagaaagaagaaacgaaaacaaggcggaaagaaaaaaacaaaacataaaataaataaaaacaaaaaaaccgtgaagggagagaaataaaaccaaaaaaataaccgaacacccccaagaaaaagagggaaaaaaatggaaacggccagaagacaaaaaggagagcaacaaaaaaacgaaaaggaaaaaagccaacaaaaataggggtaaaaaaggagacagaaaaatgacacaaataaaaggaaaaaagagaaacgcaaacaaa

SEQ ID NO: 265475 - DNA, 315 bp, Glycine max
aaaccagggttaatgtacaggatgacaataggaaagaacccatgttgtgactgtcattcctatatgggcaaaatttttcacgaaacccaattgatgtccattagatcacactcaatattgggcgcctttatcatgtacccaccaccccagcatccataaaggccattcctaactcatacacaaagtttgttggccgcgcatccaatgcccaacgccaacctttaaatgaattttgctgcgaaaaatcctgtgaaattcaccccaaatacggagtgctatgctgacatgctcccaatctaattgatgtgtgctcat

SEQ ID NO: 265476 - DNA, 171 bp, Glycine max
accatacaacgaccgcaggcagcagcttgcaacaggacgacacaaaaaagacatgggaggggcctaatacataagacaacataaggacagtggggaccagaaaaaaagcgaccaaaccaagagggacggcccagaaaacagaccaggaaaaaaaaacattgtgtagcaaaa

SEQ ID NO: 265477 - DNA, 419 bp, Glycine max
  unsure (1)..(419): unsure at all n locations
ngcgcacaatttgncttacatgaagtcactcttcttgggttggtntgatcccttaaggaatgcaattctcgctgatcaagagctttgcaaggatagcaagtgcacgatgagccatgctccttatttcaatgacttgcccgccgacatgatggctgttgtcaccatgcacaagttgatggccttgttgatgacaaatactaatggggttggcaccgctcgggtcattcaagccgcttgtcaaataggtgaagctgttgagaacgaggtacattattaatctatctatctattgggaaaaacccaagtccctcattggctagagatgttgtcaaggtaacatgagggtatgtatcggaaaaatacaattcccacattggctagagatagtgccaagataaagtatataagtggaagacaaa

SEQ ID NO: 265478 - DNA, 406 bp, Glycine max
tcagaccaaagcagctcaacatcttggcatctaatacctttcaatatagcggagacccaaggtgtgagaagtgaaaatgagcatggggtaaatatggaacaaaccctcacctcaaacaagtctatatcatgaatctaaacttgcctaaactggtttcacgatgaaaactctaccgaatcaaaatttgactactcaacacccaattttaccctagaaatggctcttgccttcactttgggcatttgtttttctatcttgcacagcccaagctttctcataagtcctaaatgacatttcaaactaggattaactcattttaacctctatttaccattgaatccagatttagccttccaactctcaaagcctcactctttttccactcataacaccacattctcacttt

SEQ ID NO: 265479 - DNA, 408 bp, Glycine max
  unsure (1)..(408): unsure at all n locations
gttactacagagttaagaaagtaacgaacagaaatagattcttatccaaagtaanagcgataattaagagtgcacagcgaanataaaagagtgtcggaaagaagaagacaaacacaagatttatactggtgcggccgtaaaccatgcctacatccagtccccaagcaacctgcgggtcttgagatatctttcaaccttgtaaaatcctttacaagccaaagatctacaagggatgtaccctcccttgttctctttgaaaaaccaagtggaagagagacacaaaagaattcaggcgggtagtcctttgaatcttttgtgagggagaagagagacaccaaagaattcaggcgggtaggtcttcgttcttttggcaaagggagaagagaatgaaaaagatgaatagcacac

SEQ ID NO: 265480 - DNA, 513 bp, Glycine max
cgaaaatgaagaagaagagataatgaaaaaaaaagtataaaaaagagaaggtaacatacacaactaaaaaaactaaaaaaaagcacaagggaacagatgaaacatggaaacccggaccccaagacacggagcagcaacttcagaaagaagagaacagctatttaataacaaatagactaaaagggaggggaaacaacaaacaaagcaaataaacacaaaaaaacaaagagaatcacaaaaaaacagaaaggagaaaagtaaagaccaaaaaacctattaaaaaggaaaaacctagggcgagaaaaaacaaaaacacctgaaaaaaacacttaaaaaaaaaaattaaaaaaaaaaggctaaagccaaaatcatgaaaaaaaaagcaattaacactaacaccaactctaaaaaaaaaaataaaaagaaccgcacccccaccaaaaaaaacgaaaaatccccgatataaaaaaaagactaatccaatcaactaacgggcaaaaaaaagaaaaaaaa

SEQ ID NO: 265481 - DNA, 416 bp, Glycine max
tgaccttagaaactcacgcttgactaagtctcagatggaagtgaagaacaaaacttatactttatattgagggtggaaagaaaagatagactataaatgctgaaatgtagagagagaaaaaaaagccaatgtgacaaaattatgttattagtagaaatattttggaactcgtaatcctgtgtttctgagatattaatttcattaagtgatcttaattacctctattactcaatttatataactcgccctaattaagagtaataaattatgttattaatataaaaataatttgatgcatctttaaatatgcacacaataaatttaattcttaaatcaaagtctatatttgatcctaaaatttatatatgtcttaatttttattcaaagaattgggccgacaaaactgggaagtcaag

SEQ ID NO: 265482 - DNA, 408 bp, Glycine max
  unsure (1)..(408): unsure at all n locations
ntataactgcggatttaagacacaaagaccaagtcgtctttatatgcgaggatgactccctgaggagatcagatttggtacggccatgtcctcctggtttccgactaggaaattggcgagtggaggagcgcccagacgtttacgccacaagcataatgtaaccctttgtagctttaaaactctacggttgggcctagactttagagtttccttttgttaaggctttatgtcttttggttcttgaatttataatataaagatctttcttcatctgtttctgcgcctcttctcattctcattcatttgcatatttatttctttacgcttaaaaacaccaaatctgacgatgagtccatcgaggtactaatacccgggacccaaccatcaatttcgagcaagaagcgggtc

SEQ ID NO: 265483 - DNA, 362 bp, Glycine max
aaaccaggaacccaaaaacaacagcaggcagcaagcgagttaataaagacgacagaaaaagaaccaaacaaaacacaacagccgaagagaagagaaaaaagaagaagaaacaaaaaacaaagaagaaaaaaagaaaaaaaaaggaagacaaaagaagaaagacgaagggaagatagataaacacttcgaaataaaaacacaagaaggacaaaataaaaaaggagactaagaaataaaataaaaacggaaaaaaaaaactaaggacaaaacaaaaagataacgaatataaacgagaccaaaattaaaaaatagaagaagggaagaccaaaaaaaaagaagacgcacacaaagaaagcggaaaa

SEQ ID NO: 265484 - DNA, 418 bp, Glycine max
  unsure (1)..(418): unsure at all n locations
ntaatgtgaaaaccatgatatcaccatatccttaaggaattttggagctntggaattgttttgggaataagtgtgggggtttttgtttcattggataacatgttttgttggtcatgcttcatgatatattttgagccatacttgatgtacattgcatattggttaaatgttggacatgctgaatatgatgctgtttctcaaaggctacaatgcttaaaaaaatcgaaaaagaaaaagaaaagcagtaaagttgagtgaataagatcttaaatgacaaaagaatgatgagactcttggttctactctttatgtttaaattttatctttacttctttttattttcttatgttttcttaatatgcacttattccccattgctcctctattcctttgggattcagccacttattccatattt

SEQ ID NO: 265485 - DNA, 488 bp, Glycine max
agctttaaataaatcaaaataaacaggtattttttaagacatgacaggaatgaaaaaggagtttttaaatgcctaaatgcattcaaaaaactcattggaaaaaaaaaccatgtaaataaaaattggatcaataatggaatgaaaaaaaaaaaaaattgggaatcgaaaaccgtggtatcttttgatgaaaacaatgaggaataggaaatggaaggaggggaaaattagggtattcaaagaaatcatacaagataaggacagttaggcttttcgaaacaacaaaaaaaaaaccattttcagcttacaattgaaaggagtccaccaatatgagggagtaatttaaaaaaccaataggcacaagtgaaagagaatgaaaaaagatgaaatttgggctatggggggagagaatcggacaaaaaaagagggaaatatgggaaaaaaaaaaattgggaacgaaggttttccgagaaaaagaggagaggcaaatt

SEQ ID NO: 265486 - DNA, 322 bp, Glycine max
ctgggagttggaggcctcttctaattaaattactgcgttccccagaattatgtctccaaggctccaccactggccgcatctatcatacttctctccatattactgagtccttcaataaaataattggagaataagactgtctggaatctgatggtgggggcaactggcacatagattcttaaaactctcccacttctcatacaggctctctccactgaggtgcctaatacctgaaatatccttcctgatcgctgaggtcctggatgcagggaatattttttctataaatactttcttaaaggcatcccacctcgcgatggac

SEQ ID NO: 265487 - DNA, 700 bp, Glycine max
gggaccttaaaacgacctgcggcaagaaactggatatcataaggacaacaattaattggagaaaaaaaggaaaaactggggactgtgaaaaaaggaaaacataaaaaaaacaaaaaaaaatagaaccaggaaaaaaaaaagagtaaaccagggggagaccaaaggagagagagaaaataaaaaataaatgggaatggcaaaaaagtcccaaatataaaagtggaaaaaactgataggagcaaaataacaataaaaaaataggagaaaaacgaaaacccttgggggaaaaacagggaagaactaaaaaataaaaaaggtgagacaagaaaataacaaaaaaatataacgaattaatacggtgaaaaaaagaacttataaaggggagaaggacgaaagaggattatagggcacaaaagaaaaagagtttaaaaaaaaaataaaaaatcaaccaatgataataataagaaagaagcagacgagaataaaataaaagaaatattgtgagaaaagagaaaaagaataattatatagggaggagaaaaaaacaaagatctacgaagagtaataaaaaacgtagaacttaagagaaaaaaaagacaaaccagaaaaaatagagaggaaaaaaaaattaataaaaactaacacaaataaaaaaagaaaagggaaataaaaacaaggtgatggggaaaaaaaaaaaaat

SEQ ID NO: 265488 - DNA, 402 bp, Glycine max
agcttgaaaaggaaaaaaaattgatggaatatgatcaacaaacaacgaagaacgcgccgaagaacacccaaaaaaacaaaccacaacaatgggtgtagcgagaaaacagttcatcgggaaaacactccacaggaaaaacaatccacgcggaaagcagccctcaaacactaagaaaatatgctctcgacgatctttgatacattattaccacgaactaaattggtgtaaagggaaaataaggaaagaaccagaggggggctaaaacacccttccccataacactcccagggccatttaatgaaaaaatgggggaaaaagtggaggcttccattaaaagacacctactcacccaggcgagctgggtagctaccccacctaagacatcgaattgggccccagagg

SEQ ID NO: 265489 - DNA, 318 bp, Glycine max
acctgttcatgtgggttcttttattttaaaatttgggcctccaccatcttcatattgtgaattctttcaaaaaactcttgactcctctgggtattagaatcattgggcacataggccaagtatctaaggccttattttgctactgcgcaaagttcgtcttgtcaccctcatgtaatatatcttagccctagactttcttggtctaactctttatttgatgaatttcttaaaaccattggtctgcatcctaatttgttgggaccatgttatggctcaactttgcttgacttttagatttggcccctgtgacaaacatac

SEQ ID NO: 265490 - DNA, 357 bp, Glycine max
tgcatcacctctcaatgagctggggaagaagaatgtggcatttacctggggagaacaacaagagcaagcctttgctttgctcaaaaaatagcttactaaggcacctgttctagctcttcctgacttttctaaaacttttgagctaaaatgtgatgcctctggagtgggagttggagctgtattgttacaaggtgggcaccctattgcttattctagtgaaaaacttcatagtgccaccctcaactaccccacctatgataaagagctctatgccttaataagagcccttcaaacttgggaacattaccttgtttcaaggaagttgcattcatagtgttatcaatcactaaatacatt

SEQ ID NO: 265491 - DNA, 315 bp, Glycine max
  unsure (1)..(315): unsure at all n locations
actgcatcacgagtttctcatcttttgagtatgcccccatcttacgatagtacatcctctagtggttcttgggacaagtggtccccttgtacttgacgaactttggaaccttgaattntggagggatgacgacgtcgggcactaagcatagctctgccatgtcagaataagtagtcaccaatcccctcaatggtcctcagactctcccctataacaacaaatctatctctttcttccatggcatgaggtagcctccccatcgagaaacgtacgtgttgcacctagcgatgttgaggggccctctaagtattgggc

SEQ ID NO: 265492 - DNA, 434 bp, Glycine max
  unsure (1)..(434): unsure at all n locations
agcttatatacatctgcaacgtgaattctgttacatctganaagctaactaactaattcagccaactaactaactatttctgttaaagctgtttatactgctaagaagatatataaagaatgataatttaattctgatatattataagtcaaatggcaataataatgacaacaaataacaatgatgaccatggttatagggtgacaattatgtttgtgatgaaaatgagttaataaaaattgatgcaataattaaaattttctataaatttaatttttattttgtgaattttttaaatatttgatgattaaattaaatttttgaatgttttaatcttaatttaaaggatggtttttatatgttattatgatgtttttacatataaaaaaatattctcatagattcatactcatccttacaaaaacaagtaatat

SEQ ID NO: 265493 - DNA, 465 bp, Glycine max
  unsure (1)..(465): unsure at all n locations
ttaacanaacaggcacctatagnttatctggcattggcaatctttcttgtagtagaatacaaagttctgatattcgggacagcaatttatgcttggggtctaatgaatttaatgaatgaatactagttgacttgatgggattaccaagcacctgttggagctgacaacagaactgggatgattctgggacatttatgcgagcttcaaatataagttgcatcaatttaaaggtttgttcttggttaaaagatgaatgacatgggactgggggaactaaagaaggatgctgtatcagcttgggaattctccacctttcattgcgatcccatgctagacaccttctcataagatccagaagccatggatttgaaactggtgcgtacataatttcatgatttggatcagttataaacttgaaatctgcccaaatgtcttgtatctgcaatggtgtccccatatccattg

SEQ ID NO: 265494 - DNA, 360 bp, Glycine max
  unsure (1)..(360): unsure at all n locations
agcttggactcatgagtggtaagttgaggtctaagtggatttttccttttgntggtactaatgtttttccttatggtacatttgagatcaaaagcgactccacaaacaagagcttcaaggtcaatgcacaccgacttaagccattcctaacaaacccttctttagtggatgtagtggtggaagagactttcttactccaccctactcttcctccaccatgacttagggagtttttctttcgtatctccttctttacttttattacatttgtccgattctatttgatgttctaattgcttttaatcttttaattgtgctacattgaggacaatgtgttngttaagtatggggggagggggg

SEQ ID NO: 265495 - DNA, 451 bp, Glycine max
ttcaatgctcttaagcaaaagttaaccaatgcccccatacttgctttgccatatttttcaaaatcttttgaaattgaatgggacgcttcaaatattgggattggggctgtattgttacaagaaggtccatccattgcttattttagtgaaaaattaagtggtcctacccttaactattctacttatgataaggaagtgtatgccttactgagagggttgaaaacatgacaacactatctttattccaaggagtttgggatccataatgaccatggagtcctaaaatatttaaaaggacaagggtagctaaataaaaggcatgcccaatgggtggaacttcttgagcaatttccttatgttattaaacatcaaaatggaaaaggaaatattgttgctgatgccttgcaaggagacacttttgcttctatgcttgaacaaaatgatggattga

SEQ ID NO: 265496 - DNA, 466 bp, Glycine max
  unsure (1)..(466): unsure at all n locations
ggatcttaagtcacctgcggcatgcaagcttcatgatgatgaaccaatcttttttgatgatgccaaaagcccaagtgattgattcaagacttcaagatcaagcatcaagaatccaatccaagattcaagaatcaagagaagaaatcaagaagcaataagtcaagacttcatataggataagtattacaagaatttttcaaaaaccaaatagcacagttttgttttacaaaagaattttctcaaattttgtaagttaccagagtgattactctctggtaatcgattaccagttatcaataattgattaccagtgaccagtttggttttcaaaatggtttcaaattatttgtaacattccagaatgatnttcaaatagtggaatccgatacactatattagtaacccaattaaagtgaatcagaacgttggagttcanattcaattgtgaagagtcacaacttttcat

SEQ ID NO: 265497 - DNA, 473 bp, Glycine max
  unsure (1)..(473): unsure at all n locations
tctttgagaanacttccttaagaagatagagcttagctactcacacgcatctaaactaaggtcacctccttgagaagcttccttaagaagattcctaaagaagctagagcttagctacacacacatctctaatagctaagctcacctccttgagatgagaagctagagcttagctacacacccccaataatagctaagctcacccccataacaaaatacatgaaaatacaaaaaattccctactacaaagactactcaaaatacctcgaaatacaaggcaaaacccctataatattagaatggccaaaatacaaggcccaaatgaaggaaaaagctattctaatatttacaaagataagcgggctcatacttagcccatgagctcaaaatctaccctaaggatcaagagaaccctaggggccttccttggatctctggcccaatctgcttggattcttctatccaatgccctt

SEQ ID NO: 265498 - DNA, 375 bp, Glycine max
actaatcaagcttatcacaaatatagggaaaacaatttaataagtgcatccaatccttaaaaacaaattttcacaaagatagtttttgtaaaagctgtgtgttcaaagataagatagaaacaattgaaaataaacaagttataataaaagctagattaaaatcacaatgtttatactggttcacttaacttgagttatgtctagttctccttcacaaattttaaagggtcccactgatcataactgattacaaatgaatttttaccctaccactcttggctacaacaagtattcttgtgtttgatcaaatagataactttgcttgaatacaaatagataactttgctaagcacaggataaactttctatgttatt

SEQ ID NO: 265499 - DNA, 105 bp, Glycine max
  unsure (1)..(105): unsure at all n locations
gcttnttatgtttagagatttctagagagaaaaaggtctcatgttgttggatcaagtggcctcagaataattaagaaggcggggggggggttgaatctatcctcc

SEQ ID NO: 265500 - DNA, 440 bp, Glycine max
agcttagacctcaccgccagctgttcctttgttctcagcgtcatcataaactcatgaagcgatacttcggcccatttcccattctggaacgcattggcagcgttgcttaccgtttgcaactacctgaagggtctcgtatccaccccgtcttccattgttccttactacgccctcatcacagacctcttgacctcccaacctcttcccttccggcggatacttcctccccacaccctatacttgagccactagccatccttgactctcgaatggacttctctgtggaccccccaactcgtttcgttcttgttcaatgggttggtcttcctccggaagactccacgtgggaaaagtgggatgatgtttgccatgctcatcaccttgaggacaaggtgagtttcacagggtcggatgatgttagcagcagcaacacaactaag

SEQ ID NO: 265501 - DNA, 440 bp, Glycine max
  unsure (1)..(440): unsure at all n locations
tataggggatcaattagccaatgagattctgaatactcttctctatnaatttatcaccgctgaatcttggaattggttttatgataaacgtggtctatattctatgaagagcgcctatagggtcttcatgaagaatgtgatagatgagacccctttgctagtgaggactagcttcagatttggaatatggaagcttcacctagaacaaagctattcacatagaggatttgcagagacataccccaccaggataaaacttcgttaaaaaggtatggattgtcatactctctgtctccactgcacctctggtttggagtctgtgaggcgtgttttttttattggtgtatatctatgcaagacactcgagacaagatgggcctgaatctaagttgaagctatattgaactgctactcattaaaagcagcattgcgctttgcta

SEQ ID NO: 265502 - DNA, 397 bp, Glycine max
ctgcagctttacaaaaaggttcatcttgtcttgttgaaatattgaagtaaccatcctgcaaacttggggcaatagatgaatcgagtcacatcactgcttcgtctactgccaaacatatttaggattattgatgtccttgttacttccagtttcaccatgacaaagatgtcatggaccatgttgaaaatctaaattgattcaaccccatatcctgcgtaaaaattcgcaatacttcgactgtacatcattcgcatgcatccatgcttttcattggttgcattgctcattgcattctttccttgaacaataaaataaaataaaatgaacttatcaaaaagaaaaggaaacgctttacggcgcccttaccgaactcgtgctagagctagagtaatgggtg

SEQ ID NO: 265503 - DNA, 432 bp, Glycine max
  unsure (1)..(432): unsure at all n locations
ctccgaatacaaccaganncggatgtatactctagatgaggagaaaaagacattcatcactgaagatgacaacttttgctatagggtcatgccctttggccttaaaaatgtaggcgctacatactagagaatgatggatcgaattttcaaacagcagatcgaatgaaacattgaggtctacatcgacgacatggntgtcaagtctcatagcatagcccaacacatgatagaactggaagaggtcttcggagagatctgcaaatacggcatgcgccttaacccggaaaaaagtatttttgggggtggaggaggcaagntcctaagctttatgctcacacaatcccgacatatgcacaactatattggagatgcataggcctactaacatccaagaagtccagatgctgaataagagactagcatccctggcca

SEQ ID NO: 265504 - DNA, 427 bp, Glycine max
  unsure (1)..(427): unsure at all n locations
agcttgcttccacataanataaagtcaataataaagctagagttgagggatcgatttgtgaagcgtacttattggaggagacatctacctttgccttgttttactatcctgatcaaattgcaacaagaaggactaggatgcctcgaaatgttgatgcggatgaaggttcttcatcttctcctcctatatcagttttcaattacccaggaagagcgagtggtaaatccaaaacatattttttggaccaagttgatcttcatgctgctcacttgtatgttcttcaaaattgtccagagattgagccatatttaaagtaagatgattttaatacttttataactctaattaatattttaatgatgttatgttttttacgttgagtaatttgttttctcttttccagtatttatgagaatttttgagggag

SEQ ID NO: 265505 - DNA, 354 bp, Glycine max
tttatagaagcaatcaactcatagtactaaaatttatattactgaagtttaaagaattgaaacataaaaactcaaattaaaatgactgaacataaatcataaaataactgaaaataaactaaaatgttcaaaatgcacaaatttaaatgtccttcttctgtggttgctcctgtgcatgctcattaagatccaacacctgagcacctggtgaatcctgagggataggctgctctaactcaaatgctggtgcaaatggtatggcatcatctggtattggtgctggggatggctctgggatctggtatatggaaagtccttcctcctgagccatgtgtgcatatgtatcataataaa

SEQ ID NO: 265506 - DNA, 339 bp, Glycine max
gcttaagaacatttttcttgttattatccacagctaagtcaaagttatcgggcttacatctgatcaggcttccccataatttttagcccacacttcttttgatcatacaaacaccactctagtgtttaaaaaatttaactcgcctgcctaacagcgattatacttgccgaatacccatagtggagaccatcacattaatgttggcacattaactcttttaccactgagggtttcactttggtgagagtgtaccagacatgacttattcttcactgctcataacatgtcgattcatgtgtttttttacaatttattacctactcttgttatgacagacac

SEQ ID NO: 265507 - DNA, 130 bp, Glycine max
gacatccaaaagctagtacatacgacatgcatcatatattggaagttatgaatcataaacgctcatttcttaggacagattaggctatacctaccctttcacgttctcgaacatataaacgtctatttgt

SEQ ID NO: 265508 - DNA, 432 bp, Glycine max
  unsure (1)..(432): unsure at all n locations
agctctgatctaccattaccatcgccaccatcatcttagntntctattatggttaacattattagtactttgatttctagccgcgtatttggctatattattatgacatttgaacaatttagtatttcttttatttgcatagtatgattgaataattatgaattatgttatatgactatgtggnttttatatatttgatctattcatgtttcttgcttcatgattggtttagatttttcaatgaatgtcttgtgaatgattagtaatgtatgtatgttttatatttgttacgcactntggctttttgttgatgccaaagggggagagaaatagagattaaatcaagaactcacataagtaattaacttaatttcaagtgaagcataaactcaaaaacaaagggggagaatatggagaattaagtgagtgatc

SEQ ID NO: 265509 - DNA, 448 bp, Glycine max
  unsure (1)..(448): unsure at all n locations
tgaagatcaaaancttttcactctttctctctctatctttcttcaatcttaatcttttcacttttggtcttcctttttacttgcaaaaattttgtggcttttacactggtgatgattatggaaggatagacacttgatcaatccaaggattcactccaagccaggctgaatttgagttctagtttagtatttctaatctgtgtgaatgctcatctttntcttcaaacctattctttattctgatgattatgaatatgattaggatagaaaatgaattattttagggattcctttcctaatttcaactttaatcacaaaatgtttggatgatattcaacctaatttgcaatctcatgaattatggattaatcgatgaaacactctaatgatttgagtgactctcacaacatgacattctcttgagaattggatatttgttgcattggtt

SEQ ID NO: 265510 - DNA, 316 bp, Glycine max
cccgggtagtcgaagagaagttcaagtccatagccatcaaagtctgaaaagagtatgatgaactaagggacgtcaatatgggcacagctgaagccttggaacgaagaggtgtaaggaatcatcacgggtcaaaggcatgatctccgaagaggtgaaaggaatcatcaccggtcaaaggcatgatcttgaaggacgagctaaaggcttgccttatgtcgaaaagaaatttgtcccaacagttaaagtgagactgaagggaatatgtgggccatcatcgatgagtgcaaagagaagctaaatctagcggcgactcacg

SEQ ID NO: 265511 - DNA, 333 bp, Glycine max
  unsure (1)..(333): unsure at all n locations
tgcctcaaagaggtccaggaaagacaaggcggccgaagttactttttcttcccggagtacgacagtcaccgctttatgagcgttgtacaccagcagcgtttcgaagccatcaagggatggtcgtttctccgagagcgacgcgtccagctcagggaggacgagtatactgatttccaggaggaaatatggcgcctgcggtgggcaccactggttactcccatggccaagtttgatccagaaatagtccttgagtttacgccaatgctnggccaacagaggaaggcgtgcgtgacatgacatcctgggttatgggtcagtggatcccgttcgatg

SEQ ID NO: 265512 - DNA, 364 bp, Glycine max
  unsure (1)..(364): unsure at all n locations
atatgtgacttttgactaataatattataagagttagagttaaccataaatgataagatgttaacaattatttttgatagacttaaccaccttattatagcatgattacaaattttcatcatatagtgtgcctaaattttaagaatagtaagagctacacatttgataaacacttatcaaatacgttaggatcatcaatttttttgtagtttctaatgaaagtttagatgtaaaatgaaattcaattcaaggtaaccttaactttggcataactaactagtaaatgtagcttttatgggccccgtatgataaaggttgaattattctcanaatatatgacacatgctttcctcatataagttca

SEQ ID NO: 265513 - DNA, 390 bp, Glycine max
  unsure (1)..(390): unsure at all n locations
tctccctcattttctataatagggggagaagtgaagtgtattatgtccagccacttangcacttctctttctttcgaatttgcttagaaaaattgtttccgggaagaaaatccaagccgaggcgcttccgtaacgttttcgtgaggatattctcgaaggttttcgaccgttcttcgacgttctgcattcgttcttcactcttcaacgggtaagtaccttaaaccgagcttttcaattcattctatgtacccgtggtggtccacacttgtgttcatgtatttttattctcgtttcattcactttttataccccctgttgacgtgcttaagccattntatttaagtcatctctcgcttaaccaaaaaataaaataaacttccaccgatcgtt

SEQ ID NO: 265514 - DNA, 426 bp, Glycine max
  unsure (1)..(426): unsure at all n locations
agctntgagaagcatgtgnatccttggtttatcttaacattcagctggatcctttgtctacagaaggaacataaaagtggggattgtatttgaaccccccccaaatgaaaaataattatatgcacactctaaaatcttaacctcctgatgttctgaatataaaaggcagtttttcagaaactttnttttaccaaattataaccttttctgttgcaagttcaaaagaataaaaaaataatctcatagttaatgtatttcttgaaggttgctgaattgcttggtttatatgaagcagcagttctgccaaaacgagcaatcctggtgtgcatctctgaaactttacacttgaattttacttgatgtaaaatggactgtggggttctaaaactatgcaaaaccattaaaggaagtaaatatgctatttga

SEQ ID NO: 265515 - DNA, 430 bp, Glycine max
  unsure (1)..(430): unsure at all n locations
agcttagtgacatccgtgacttgatcttgtgcgattatgttcgcaagagagattcaggagaatcttccagtcatgtttccaattcagcattgaatactgaaggcaggggaaggactacccagaagggtcagaatggtcgaggcagatcaaagtcaagagggaaaggtcagagaaaatttcaaagtgacgttacttgttggaattgtgacaagagaggtcactttagcaatcagtgcaaggcaccaaagaagaacaagtcgcacaaaaacaagaagcgcgatgatgatgaatccgcaaatgcagcaactgatgaacttgatgatgcattaatttgcagtttggatagtcctggtgattcatggatcatggactcaggtgcgtcgttccacactactccctctaaagatttattgtctaactatgtntctgg

SEQ ID NO: 265516 - DNA, 446 bp, Glycine max
tgcctgtccgatgcagcagtaatgatggcccgagttatgttgttgaacggttacgaacccggaatgggtttaggcaaagacaacggcggcataactagcttgataaatgccaaaggaaatcgtgggaagtatggtttaggctataaacccactcaggcggatataaagagaagcatcacggaaagaaagagcggtggtcaaagctcgcggttgaggcaagaaagtgaaggaagctcgccctgccacataagtagaagctttataagcgcgggtctgggagacgaaggtcaagtggtcgcgatatacgaagatgatgttccgagtacattggatttggtacgaccatgccctcctgatttccagctgggaaattggcgagtggaggaacgccccggcatttacgcaacgagcataatgtaaacctttacgggtttaaaagctctata

SEQ ID NO: 265517 - DNA, 292 bp, Glycine max
agcttgtaagagatcacacgcagagcgtttgccatttctaacagagtcaacaacattatagactcgtgagctgcatgccaatattagaatatcacgtgtgcatctaatgatgtggtatatgtgtcttgtgaacccaccgttctgctagttgaatatatcatatttgaaatattcccttagactgcttaaccgagatatcctattcaaattcctagcccaaacactgtggacaaattcgggggatgtgctactacaattgacaaactatatcgtgagatagaccctacgacat

SEQ ID NO: 265518 - DNA, 355 bp, Glycine max
agcttgtatggttaaagtctcattatgtttctgctcatgcaacaattgttagtcgtggctatacgagacatcttgccaaacaaagttaggttaacgataacttgcctgtgctttttcttccatgctatatgtagcaaagtcattgatccaatcatgtttgatgagttggaaaatgaggccgcaattatactgtgccagttggagatgtattttccccctgctttctttgacatcatgattcacttgattgtgcatctggtcagagaaatcaaatgttgtggtcctgtatatctacggtggatgtacccggttgagcgatacatgaagatcttaaaagggtatacaaaagaatcta

SEQ ID NO: 265519 - DNA, 429 bp, Glycine max
  unsure (1)..(429): unsure at all n locations
ttgatgatgccgtctttaccgacgaagggactttttttgttaaacagaggcaaanctgatcatcacgctttgaacatgccaaaaaaaactagggcaaatgcaaagggtgagaatgagggagaagcccatgctatggctgccattcctatacagccaagtatcccacccaccgaacgaatgtcgtactcagccaataacaaaccttctcattacccaccgcccagttgtccactaaggaaatccctaaatcaaccacaaagtctgtctaccgcacgttccatgacgaacaccacctatatcacaaaccaataacaccaaccaagacatgaattntgcggagagaaagcctgtagaagtcaccccaattctggtgtcctatgctaacttgcctccatatctacttgatgattcaatggtaggcataacccc

SEQ ID NO: 265520 - DNA, 434 bp, Glycine max
ccgcagcagcagctgaccttaaagacatttttttatagtaaagctaactcggagaaaccctctatgaatctccggtagtatcctgccaagcccacaaaactcctaatctcaaaaatagatttaggactctcccactcaagaacgacttctatcttagagggatctaccgctataccctctcgagatatcacatgccctaggaaactaactttctctaaccaaaactcacacttggacaacttaacatagagttgttggtccctaagggtatgcaacacaaacctcaaatgttcttcatgttcctctctagtcttggagtataccaaaatatcatctatgaatactaccacaaaactatcaaggtaagggtgaaagactctaatcatgtagttcatagacacacctggagcattagtcacaccccaaggcctgac

SEQ ID NO: 265521 - DNA, 434 bp, Glycine max
aactactgatcaacgattaagtagcgattccatccttgtctagcttagcgtcaataaacctgaaatgcaagggttgggcactaagtgcttgagactcgcagcttaacgcatgaacagagatgcacttagcccgaggcttgcgcttagcaaaaagactttgttttcaggaaatatatttctaagctatttttcaggcctttttccaagaaattgaaacccttatgctaaacatccaaagaatggctgatatactcctatgtatagattttattgcaagttccaaatgatttaaatgcatgaaaacaaacataacagaatttagaactgggttgcctcccaggaagcgcttctttaacggcaatagcttgacgctcttacctcattgggtgatcttatggtttgggtcctactttcagaacagtctgacctccttc

SEQ ID NO: 265522 - DNA, 441 bp, Glycine max
agcttaaggcctgctttcatatttttatcttatcaggggttcaaaagttgttcttttatcaagtccatgcaaaaatatctgagttcatttggtttttgggaaagtccttcattgtttttcattctcaaatgttttcaaaagaaatccttttgttgtcttctgatccaaaaataagtttcaaaaatactagttgttgattttttccaaaggatgttacattcaagaaaaaaaaaatttaagtcccaaaaagagttataatctataactatactaatagaatataaaagcacgcacaaattagtcaaaataaactcgtgtaagtttttcaaaaaattcaaaacaagttcaaatcatggttgaagagctcaatctccttgacgatcatggttgaggagctcagtctcatccaatgaaataatcaacaggatctgtcatgtcttc

SEQ ID NO: 265523 - DNA, 405 bp, Glycine max
  unsure (1)..(405): unsure at all n locations
atttcaatcgacattccttacaagacattggatgatactctctcgcgcttcagccattcattctttgcttagcaaagatatttcagttgattcaagcttaagtgtttatcaactcaatgagagttatttgaatctatgaatcattcaaacatttgttgtttgcgaaaactagaagtggcttagtgttaaacaatattagggtgttcttagattcagagggagtctaaggggtctgcanaagtgtcatacagattgttggtgtagccagcagtggctaggcaatatactcgttgcaatcaggctttgattagtggaatcatttactagtatgtaaaggagaactagatgcggttatgtttgagtaaaccgaaataaacctaagtatttagacttctctctaaacta

SEQ ID NO: 265524 - DNA, 430 bp, Glycine max
  unsure (1)..(430): unsure at all n locations
agcttaaggcctgctatcatattcaaattttatcagaggctcaaaagcggcgcttttatcaagtccatgcaaaaatatctgaggtcattcggtttttgggaaagcccttcattgtttatcattctcaaatgtcttcaaaacatatccttttgatgtcttctgatccaaaaataagattcaaaaatactagttgttgattttttccaaaggatgttacattcaagagaaaaaaaatttaattcccaaaaagagttataatctataactatactaatagaatataaaagcacgcacacattaatcaaaacaaactcgtgttagttcttcaaaaaattcataacaagttcaaatcatggttgaagagctcaatctccttgacgatcatggttgangagctcantctcatccaatgaaataatcaacaggatct

SEQ ID NO: 265525 - DNA, 266 bp, Glycine max
atatttgcaattgacactccttaccggacatggacgatactctcttacgcttcacccatatattctttgcttaacaaagctatttcagtggatgctacctgacacgatcatccgctctattgagttatttgaatttatgaataattcaacattagtgtgtggaaaactagagaggctaagtgttaaacaatatcacggggtacatagattcataaggagtctctggggtcagcagagagagacattcacatcgttgttgtaaccag

SEQ ID NO: 265526 - DNA, 445 bp, Glycine max
  unsure (1)..(445): unsure at all n locations
agcttgtttgttagaaagacccaacgctttttacctattggtgncaacttttacttgcatttactgtttttaccatagaagtagtttatttctgtttttaaccatcgattatcaatgttgttccaacaatgccttacttctgaataaaactctatctaagaagcaagttccctgagttcgatactcggatcatttcgttttaattntaaatacttgacgacccagtgtgctttccggtgtttcatttcccttgaatataattgttgaaaattagagaaaaaggaaccatatgggaaaatgaacaatggacgtgtctttggcatgccaggtaagggaagtcatcagaattgacaactctgcctttntttcttgaccgtggagagtccatngaagacaactcgtaacaattattttgtgtaacaagcgcatacggcacacttcgcat

SEQ ID NO: 265527 - DNA, 364 bp, Glycine max
  unsure (1)..(364): unsure at all n locations
agcttctccctattttcctataatagggggagaggttgttggataaaatgttcacccctcctagtaattcgagatcacttgaaattagtgaaaaaaattgtttccgtgaagaaaatccaagccgaggcgcttncgtatacgttcccggggtgatttcgcaaagatttcaaccattcttcgaccgtcttcgttcggtcttcggcgatcttcggtcttcaaccggntagttcccgaaatcgaacttttcaattctttctatgtacccttagggggcctcatttggtttcacgtgcctttattttcatttcatttaccttccggacccccttttgacgtgctttaatcatatactttaggcattttc

SEQ ID NO: 265528 - DNA, 415 bp, Glycine max
tcttagtttcagatgatgcagatgggtttgtagctacctcatgcactcctctaatgactatggcatcatttctggcgctaaactactgggagttggaggccatcttctcaattaaatttctggcttcagcaagagtcatgtctccaagggctccaccactggcagcatctatcatacttctttccatattactgagtccttcataaaaatattggagaagaagctgttctgaaatctgatggtgggggcaactggcacatagtttcttaaatctctcccagtactcatacaggctctctccactgagttgtctaatacctgagatatccttcctgatggctgtggtcctggaagcacggaaaagtttttctaagaatactctcttgaggtcaatccaactcgtgatggaccttgg

SEQ ID NO: 265529 - DNA, 404 bp, Glycine max
agcttgtcccaattttttataattggtggagaagaggagagaaaattcgttcaggcctactggtaattcataatcactcaaaattagtgagaaaaatcggttccgtgaagaatattcaagccgagacacttccgtgacgtttccgtgggtgatttcgcgaaggttttcaaccgttcttcgacagtcttcattcgttcttagtcggtcttcggtcttcgaccggcaagttccctagatcgaacttttcaattcattctatgcacccttagtggacctcatttgtttttacgtgcttacatttactttgcgtaccccctttagacgtgctttagtcattagcttatgttattttctcgcctaatcaaaagattatatttattccaccgatcgtttgaattgttcaa

SEQ ID NO: 265530 - DNA, 394 bp, Glycine max
  unsure (1)..(394): unsure at all n locations
tgtgcattcaatatcctgatgaggatgttttatatgntctctagactggactaatacattagctgcccaagatttatggtcttacaggggaaaaacctgattagcgtcttaaggaggtccatattggatgatccaccatgaagccccctgatgtacgacaagatcatatctttctatagactttctctcattctctagaaggagaggcaaaagattggctatactaccttgctcccagggccattatcagctaggatgaccttcagagggtgttcttggagaaattcttccctgcatctaggaccactgccataaaaaaagacatctcantgcttatgcaacttaatggagagagcttgcatgagtactgggaaagattctagaaattgcgtgc

SEQ ID NO: 265531 - DNA, 324 bp, Glycine max
gcatgcaactctgtagttataaaaaatgagaaggtttgtactcatcacattatctaagagaccgtggagtggatccaaaagctcccatcattcattcgcacattcatagtcttggtggcatactcacaccccgatcattacaatatgaatctcatcctacctaataaagcacaaagacaccccttatacactcgctccatgaaaacggaaatgaatacggcgtgcacgaacagataaaagtcaatctatccgccctaaaagatcaaatggctaccatctgggaggacatgctaaaactccataaaactatacacgataaagcca

SEQ ID NO: 265532 - DNA, 368 bp, Glycine max
tgagacgaggaagcggagatcggtgaaacttcctgctttttctctttgaccacagagaggtacctggagatatgtcgcggaggtgaggataccttggggacgtcatgaatggtgctattgcccaaaacctagcttgaccaatcccgatcctacccgggcatagtcagtcagtgagaacctgtgatgtacctaaacaagcgagctcctggcagtcaatatataaagggaacacatgaccacaaagcagggaagcttggggaggctggccaactgagaatcttgagtgatatatggcttgtggcctttggtaatcgattaccaaggtggggtaatcgactacaaggcttaaaaatgaagacacgagactg

SEQ ID NO: 265533 - DNA, 275 bp, Glycine max
agcttgcacgctatgaaacatgaggaactgttactatgactctgcagaggacttaaagcgcatatagtcttcagcatgccacatccactagaccacattatgttactatggacagatggaaaagaggacttgaattcgaaaccggtacaactgaagccagatatggatcttcaatgtgccagtatgaccaattgtaaccctgtttaatttgtaactttatgtccataatttacatggtggattaatcctatttgaataaaaattggggattaaat

SEQ ID NO: 265534 - DNA, 433 bp, Glycine max
  unsure (1)..(433): unsure at all n locations
ttatgttatgtaananattaaccgtaattaactagttttatgttccttgtaatgcacgagctagtgattaaattattcgatcaattgatatgaaattattcttaaacatataacataatttcctaaacttgccaattgcattttgaagtttgacaactaataaaaatgaaacaaaatacaaattattctaaatttaaactgcaaaatagaaagtggataactatatacaaataaaaatatatattgttccagatttaaaattgaaattgatagttaatcactatttgttctagtctagagagtactaacaaaataacttatcgagagatcaaacgtaacctaaacaggattgtccttttctcaaagtgaacgatgttaactcttttagaggttttcggtcatgcatggcatcaatttaaatttggctggtttt

SEQ ID NO: 265535 - DNA, 426 bp, Glycine max
  unsure (1)..(426): unsure at all n locations
agcttgtcgctggagctggcccatcaattgcccattctctnttanatcgtggattcctaggctctcgaccttgactttatagaacctcttttaaagcgacggcgcctgactcgatcccatgttttactaaagtgaaacaaaacccagtgcgaatcaaaactctgacatgtatcatgggtggaatggatgaatgcatgaataaatgcatatggcacagatgcattttatgaatatgggagcccagggaattgtccccttcttatatacaacattcaggcagcatggtgcccgacgtatgcatttaaaaaggtgacacaaaccctacgtctgtttgacaaagtgaggggatcaagacaccattcgtgcatgatgcccatgcaaatgcacaacacggtgatgttcatattgcaacgatattcatatata

SEQ ID NO: 265536 - DNA, 319 bp, Glycine max
ctttgagcctcactgaggacctattattgtttttttacaccatggtaatgcctaggactatcaatgataagaggtgagatgaggcgccatcctctagggaataagccataaaagaaggagcttcacaacacaatagagtgccttggatacaaaacttacataggatactctatgggtgaaaagacttagactgatagagagagagtgagagagagaaacggagcactatattgttggaggaaaagacggagagaagtagaactttgagggtgtatcataagacatctattcatctaagtgacagcaagtgttacacatg

SEQ ID NO: 265537 - DNA, 385 bp, Glycine max
agcttttaacctcacaaagtattgattatcagttttaccctcagtcatctgcagcaattcatattgccttcttagagcttgcaatcgtaccttctttaacttttcatctccaccatagttcctagccaaagtatcccaagcttcttttgcattttcacaatgcacaatcttctcaaaaatgtctgcatccaaacattgatgaatgatgaacaaagctttaccatcccttttcttttgttctttgtgcgcagcattttgatcatcagttgggtttctgggtaatgcagcaactccagtattcacgatttcaaccacatcttgaaatctgaatattaccttcatcttcgcgatccattgatcatagtgtttcccatcaaatattggt

SEQ ID NO: 265538 - DNA, 347 bp, Glycine max
  unsure (1)..(347): unsure at all n locations
ctggttgcacaaattccagcccaatcatataagacatgggttcatcattgttgcacatattcatgaaccaatagcaaaaatgtctcaatattctcaatactattttaatttcatgtgtgaaaatgcaataacagcttttatcttctaatttgataacctggtctcttcccccgtgattgatgccaggctttcatttgatcccactcaaaaattgggtctggatattgcctctcgcatccttacaaggtgtgatagaatgtcaataattaaccatggtttgctattggtataatatatttctctcttggttcactacantctgtataactgcagggctccattgggac

SEQ ID NO: 265539 - DNA, 445 bp, Glycine max
  unsure (1)..(445): unsure at all n locations
agcttgagaatgttttgctntaggaaatattgaanacatgattgtcaaaatcgtgagatctacgtatgctcatgagagttttcgtagactcgaatagtagatttgtaaaagtttacttcaaataaaanaataataaattaactataaatatcatatcaatttaacattttattaatattttaaagcacataagtaataagttcatccaattacaaaacataagctcttctccaacaaaaggtcatacaattagaaaacacaaatagagaagatgaacctgattggcagcaattgtttacgaatggaatgcangatagagaacaagtgctgctgagtgagtatactaatactctttggaattataaagatatgaanaagactagcccacatagagaagaaaaatcangacnnacactctgattcatctttccagctaaaagaactg

SEQ ID NO: 265540 - DNA, 159 bp, Glycine max
aaagatgactttgacgtgggactcacagaactttatttatcacgatgcctacctgtgttacaactgccttaatatatagacctaagagccttcctggacaacttcgctaacaagcctccttgaatagctcgcttgagaaacttccctgagaaactttct

SEQ ID NO: 265541 - DNA, 393 bp, Glycine max
  unsure (1)..(393): unsure at all n locations
aattaaataataaagntcttggtacaactgtaaagctaacgcggtgagcataatgccgacaccatgcaatcttacacattgttttcatgtcgtcactatctttctacctactgatactttcattagtttactttattcgtcgtcccgagattcctgaaatgaaataatgatgcaatttttgttaacacggttatggaaattaattggttaaaacataacaaagttttatcatttntctccaatgacgaacttgctataacttgcaacttgcaagtatgcccaaacctccaattgatgacttatagcatcaacccgttaattntatctgacttggattatcttgttagagagtataaccccttctatttngctgtaacattagctcacctttta

SEQ ID NO: 265542 - DNA, 415 bp, Glycine max
  unsure (1)..(415): unsure at all n locations
tgctttgcctatacaaccagatcaactggctgccaaaagcttctttctatgttgtgttaagaaaatgctgtttttttttaactctctcatttactaaattttgttgacagctcaatagccaaattctgtgtaactttgtggctgaattccagaaaattgttatggtcaacttgaacattcttgattgcctatccattgtgggcatctatactntgtttttggttacataaaggttctatttaaaacattntgctatgttcacagattgttccttcagctgcaattagtttcaccacatacgacatgatgaagtcttggcttgcataccaccgcaacagaagtctcgatcagtttcgcaacatgaatgctctgtgctccccgtgatggcctaacttacaattcactttctaatgac

SEQ ID NO: 265543 - DNA, 381 bp, Glycine max
acacaatgttattcacttattcttagatctgatgtcgtgtaatgagcatctggcacgtatgattttattggttggcttgttagtctgtcgcatattgacgtaagtaacgatttatatatccctccatgatggtgtttttacttttatgcattttttctttatcttcagagccacggtcttcattttccaaagatgaattagagaatgattttgacttttacgttgctagcagctcaaggtatgagcattattcttagaagttctgtaataggatgagcactttttatgtttttgtgctgtcgttaattatatagattaggtgggaacttcaatgctcacaatttaattccagaagatgttagggataattcgagcttgctg

SEQ ID NO: 265544 - DNA, 314 bp, Glycine max
  unsure (1)..(314): unsure at all n locations
tcttcaatttctgtgtacccgttcccatgcgatctgtttgatatactctagggacgncctactcatggtgtgctaccaacgaggcatactttataacatggccagcacatttatgacacccgtatcagatggccaggatctctggccgaggatcatagtggccatacactatagaacatgctacaatgccacaaatggtgctgagtatctccgtnatattcagaaagactgcatgctttaggtgatgttgccatcttacagaataggagcaatgaatgctagtatcacctttttccgaccatgatggcgaccag

SEQ ID NO: 265545 - DNA, 434 bp, Glycine max
  unsure (1)..(434): unsure at all n locations
agcttaatggacgaagggttaattggtgtatgtgttgccgaataacatattgacagtcctaagttggttttcgcttattaaattaaaatagggttggattaagtggttaactgttagggacgaattctctataacctaggacaagagagtgacttctgaatcagaggaaacaacccgtttttaatactattaatttcgtattctagttcgcttgttctttatttcacaaaacaaacaaccccccctaatcattactattactgcaagtatattaggaacatttggtttatcattgctctttgggaaacgacctaggatcacttcctagttactgcattttcatgtttatttgattccggtacggcctcgatcacatattcaactattnttgctacctaaattaacacataaatgaacaaggcatttttctacct

SEQ ID NO: 265546 - DNA, 442 bp, Glycine max
  unsure (1)..(442): unsure at all n locations
acaaaatggccttaatcatttccaaatatgcttgtttattangacgcaccaaccagaatcaagccacagctattgtgcaagcaatcaatggggcaaaacacaccaaatgattataatgatggatggctcaaattctcacaaaggtaatatcatcactttccaattgagctttcaaaactatcatgacatgtagagaagaataaaggatttcatgtcacaaaatgtcaagaacttttattttcaaaacaaattacccatttcttgaacatatcctataattcacagaaatacatgcaaagttcgacgtgcacacgaaattgacccaaaatattaaactgaccattcgacgaaactaacaacattaacaaaataacacaacttacaaataacataaccaacaaactagccaaaccaatgacacttctcccatacttaacacaca

SEQ ID NO: 265547 - DNA, 439 bp, Glycine max
agcttcaaaccacagcaacacataatctatgtgtcttatacccctcaattcaatgggttttctacgtttgaaaagtgaaatctacaattagataaatttgaaacaaactctcacctcacacaagttcataacatcaatctaaacttgctcaaactgaatttacacctaaaattccaccaaatcagaatgtgactcctcaacacccaattttgccctagaaatggctcttggttcactttggtcatttgtttttctctctagctcagcctaacctttctcacatgtcctaaatgacatctcaagctattattaactcactttaacctccatttaccacagaattcatacttagccttccaactctcaaagtctcactctttttccactcataacctcacattctcactttctaaccttgggttagttctacccttcatct

SEQ ID NO: 265548 - DNA, 433 bp, Glycine max
actagctgacaggtaaaacagagcaagatagagcagttcttttttgatctttaagagatttggagtattgagtgattgcgagattcctagaggtggaggagacatcccgaatcctttgtaagcaaacaatttctcttaattcctcttcttcattggaaaaggagcttccttgctatggaaggctaaaccctaagatgcggattcttgctgagtaattgatgtaaactttttccctatctaattaaggttgttttatgtgttcattgcttctatcagcactttattattgcatgcttatggcttgatcacccatatgtgtgtactgttaggggatttagcattgaaagatgtactgtctccttagaacttgatagagcaggattagggtaccatatgtctggacacagagcgcttgcaattaagttttattatg

SEQ ID NO: 265549 - DNA, 377 bp, Glycine max
actcagcttggaggtagtctacctcacacaatatatgtatgcgtgtctaggtagcgaaaaataccttaaatatgcatgtatgtaatttaggtagcaaacaactacctcacaaaatatatatatgtatgtttaggtagccagataccttggatatgcatgtatatagcaaaagtacctcacaaaaatatacacatgtttaggtagcaaaatacctcatgaaaaaaaaaggaaaaaaaaacaaaaaccaacgagaaaaagaaatgaaccaatgaaaaaaaaaagagaaaaaagaaaaataagttatctagctaaaaaaccaacatgcttttgaaagagataacctccaacttttctttgaaaaaaattcactgatcata

SEQ ID NO: 265550 - DNA, 435 bp, Glycine max
  unsure (1)..(435): unsure at all n locations
agcttaaagcttanagcgtcgcgtgccttttttccccccccaaacaacaaattaagcagagacacttgcacattccagcgtttgcctcttggcaaaatctcatgtagggaaatgcactcttcctttggttgttgaagtgattgtgaagcttggatgaagattaagattcaaatatcaataatgacgtttttcttttacaataatattttcaacgtgaagaaatatttactattttttatactcgagaatattcaaaataatagtatttcaaattatttttttattttatttgtgatataaggtgatctatagcaattcttaattgaggtcgaaagtttagaaaaagggctcagaccagtaaattaagaaaggttctgacaccaccttcgacatagaagaatatctcttttagattttatctgactatttaaaacg

SEQ ID NO: 265551 - DNA, 422 bp, Glycine max
  unsure (1)..(422): unsure at all n locations
nggagagaaatggcacaaactctcacagaggccaacttttgtaatgtaaaggaactactggaagcagagcctccaaaatggttagcagatagtgctgcttcttcttgtatgctttgtggtgtgagatttcatcccatcatgtgctcccgtcatcactgccggttttgtggaggaatattttgtggtgagtgttccaaggggcggagtttgttgccttcaaaattccgaggttctgacccccaaagagtatgtgatgtatgctgtgtccgacttgactctgtgcagccttatttgatgaatcatgtaagtaatgctgctcagttgccaacccatgacctgacagatctgagcactttgagatccgggaataattttccttggnggcagtctatgtgatatgaaatttacacggcacttacact

SEQ ID NO: 265552 - DNA, 256 bp, Glycine max
gacctcgcaaaagacaggcgtcacgagcaccccaacacctacaccgggcgacgagggaccgagaacataaccaagaaggggcacgccgaggacaacaaggccaggctcatacccaaacgacctctccgcggaggcggggccaccagacctcactacaacaacagagcctgacagagcaagagccaaaacaagcaagcggctgtggagaggacccacaagggggcagatgaaaaggcggtcaagagcgagaccaaga

SEQ ID NO: 265553 - DNA, 302 bp, Glycine max
  unsure (1)..(302): unsure at all n locations
tgctcatatagtcagaagcacgttatattgaacttgatcgattatctagcgccctttcagggcgcaacctcatcatgtccacacaatcatctgtatctggcatagatctggaatcatatcctacataaatatctaacactacaattagtaatcattctctaattaaaaattcaaacaccatgacgaaaatattgtttgcattccctgacatgagtagactacacctggttcatgacatggcatctggccaccaccaatagagttggggctgatgcagacgcanaatacttataggactacat

SEQ ID NO: 265554 - DNA, 342 bp, Glycine max
  unsure (1)..(342): unsure at all n locations
tnggctcatacaatnnttcatcattcagagacactatttctgtctttgtatccatcacaacttcccagtattcatccttagtcatgaacatcccgcattacggtttgacattcttagaaatgtggaatttacataaaaagctggttgaagacaggaagacaacatccattaagaaatgaacatctctcttagtagcgggatccaaaaacagaataggaaaggcgaattcattatagctctaacttgtggtacggacaataatcacctgaagtagcacattattcttcacaaaattttgttttgacctcaccgaaagcccattcacaatcttcaacctctctg

SEQ ID NO: 265555 - DNA, 289 bp, Glycine max
  unsure (1)..(289): unsure at all n locations
agcttcgcaacttaacacanaatgaaatgatagaatcatactttacaccacagcgcatgtgtgagagtggaagttatgaggaaaattgtactggggctgagcataaaactttcgacattttactaaacgaggttgtcaatgaacttgtggacctttatattgagaaatttgttatgctgatgggcagggaggtaactcaccttatgacttgtttttatttctatgacaaaagcctattaattggctccttcctttttcctactacgccataaacatttctactttatca

SEQ ID NO: 265556 - DNA, 411 bp, Glycine max
taaaaactcagcttactggagacagacttcgagctcaatgaggtccttctatggtgatttcactccatggtgacgcaccggacgaccaaggagaatacgcgagaggacgcgccatccactagggactactccatagaataaggagcttcacaactcagagagtgctctggatcagatgcttacagaggaagctttaatggaggaaaagaaagatacagacaaatagagagagatatgatacaaagggagcacgaaactgaatgatgataagagggagagaagttgacacttgaagtgtgtatcataagactcttattcataaagttccacacgcgtacccatgctactatttatagcctagtagctccttgaaagcttcttgaaatattcttggaagctccttgaaagcta

SEQ ID NO: 265557 - DNA, 451 bp, Glycine max
  unsure (1)..(451): unsure at all n locations
agcttatccccataagagtgcagaacagctggcgagtcagcattgattataagaggctaatccaggtaaccaaaaaagatcattttcccctgccattcattgatcaaatgcttgagcgcttggcaagtatgtctcattacaatttttttatggtttttctggttatttacaaattcatattgctcctgaggatcaagaaaacaccacattcacctatccctttggcattnttgcctataggaggatgccctttggcctatgcaacgcctctggtaccttccaacggtgtatgcttagcattntcaatgattttttagagagttgcatagatgtgtttatggatgattntactgtttatggatcctcttttgatgcatgtttggatagtctagatagagttcttaatagatgcattgaaactaaccctgtgcttgaatttgaaaaatgtcac

SEQ ID NO: 265558 - DNA, 286 bp, Glycine max
  unsure (1)..(286): unsure at all n locations
ccttataaatgatatgttctgaattcttataaagaagcaataatccatttaataatgtcccttaaacatgcaagacaaatattattgccatactaaatgagataaggaaagagagaaatgccaacttgagttatactgggtcgaccacttcccgagcctacgtncagtccttaagcaacccacttgaaatgtttcactctccttggaaaaatactattacaaaatttgaaccacacacggacaatccttcccttgtgttcagcaactcttacaacttaagagaccc

SEQ ID NO: 265559 - DNA, 449 bp, Glycine max
ctttaagatgtgctcatttgtataaacaacatctatttattggtagtacttcaggctcacgtaaccacaagctgcaataatatgagaacatggatagtgaagcgcagaataccttccgcattgacaataatgaccgttcaagttaactgcccacttttgtctgccacgctgcgtaataggattgaaggtctcctctacttcaaaccttgtggagtggatgtcatacacgcgaacgatgtgcgaacaagcttgatcttgattttctctaagatctttaacaagctttgaacaatatacttggccttcatttaactgtctctgggcttggcggccacactcaacaaagtactttcgacacctactgtacgttgatttgaccaatgcttgtatgggaatgttgcgacaatccttcaaaacctaatgatacattctgagagggtggttgcatg

SEQ ID NO: 265560 - DNA, 448 bp, Glycine max
  unsure (1)..(448): unsure at all n locations
ctcgacccggatcttaagtcaccgcggctgcagctgacaccatgaccaaacttcctataacaacactatggcgaccgaccaacatcaattgaaacatgctcataacacgaaggctgagagggcccttgacttgttacagcctgacaccataagttcatcatcacgttttcttttaatcaagatggaggaagacatgttggggtgacctcaagaaattcattattattattgtcaaccttatcagtaggttgccccctttctacgatgggtggctcgacagcagacgatggcacaaccctatcatcaggttcaacctgcttgaccaagggcctccaagagaagtcgccattatatttgccaaataagcaaaaatgtaacaaaccacgttgtcgagagtttctttttatgttatnggaataataagtgtaaaatttctaccatattatgt

SEQ ID NO: 265561 - DNA, 418 bp, Glycine max
agcttgttatgtttcttgtgggtgtggttgctgatgctcaaggctgagaagaatgaaggagtgtttgaaagagaagaggcagtggtgggatgcagttatgaaagatagtggcagtttttagctgccactatgttaaaataattatttcaaaatttaaatgtaacagaactctaacgttttaaacggtaaattaaaaaaggaccaaaaagatatctttcgaaaacataaaggaccaacatgaaaattttaaaacttaatgtatcaaaatagaaaaatactaaaacatagaggaccaaaagtgacatttagccaaaaggaacatacactacctcaaaaactttttgcatttgggctccgtcgacattcttcattacatcttgctgcttcttagatccatgagtacgcatgatataagatg

SEQ ID NO: 265562 - DNA, 386 bp, Glycine max
agctcgcatacatgatatgagatttcatgttcctttaaacttgaaggcttgagaaacataaactttctcttcaatgtgtccatttaagagagcactcttgacattcagttggtataacttgaaactaattaagcgagcatatgccactggcaagcgtacgacctctactctatctatcggtgcataggtatcaccaaagcctatactcttcttgctggaggtaccctaagcttcatgtcttgccttatttctattgatcaaaccatgctcatccaaattatttttaaactcccatttatttccaatgaacgtcatgtttatggtattaggaatcaactcccatacatagcttcttaggattgaatcattcctctgcaatgatataa

SEQ ID NO: 265563 - DNA, 146 bp, Glycine max
ccaaccctaacattacacaggctaccctcaatgccacactggacgaactggggttctctgggggaaacatcatgtcccaacctaaccttcaaagtgagggcgacacgagacatcaccggtgctacttccaagaacgaaaacccccg

SEQ ID NO: 265564 - DNA, 382 bp, Glycine max
  unsure (1)..(382): unsure at all n locations
agctttataagcaaaactctctcttcattattttttggtncttctctgcaccattttctatgaccctcagcacgacaacaatattataaataccgagttggaaaactattctcttcattcataaaaagacttggatctacagtaagctcatcaatttatctttttttaaacagggatttgggtattgtacgtacgattaacagaaattatgaagaatatcaaacttttcttttacttgacaacccgaccttttattccgctttattagctataaaatctttattagatgtaccgatgaatgatataggggaatgggactacttatcgagtattttgggatataaataagaaatacgttgagctatgaaatacaaaaaatgag

SEQ ID NO: 265565 - DNA, 428 bp, Glycine max
  unsure (1)..(428): unsure at all n locations
agcttgtaggattatggggtacccatcacatgtggnactagggggcggtcgggcgatggtgcacaacaagttttccacattcacaaatcgcgcataaacccaccatcccctgttgcccacctccaactgagctcacgtactcccacgtagcccatctcctcgtttctctcaacaccgggtccccatcaatcctcccaagcttccccaacatccaagtaattcaacattcaaacaacacaaactatcacagccaagaaaatagggcaaaggcagaaaactatgcccaaaacaccaaccaaaatcacagctnttctcacttaaagaccccagtacatttccttcgttccaattcgttaaccgttggatcgactcanaatttntactggaagtctctagtacataagcctacattntgaccgttgggatct

SEQ ID NO: 265566 - DNA, 379 bp, Glycine max
  unsure (1)..(379): unsure at all n locations
taacnaaggcatgcgaagtgggtggaattcctagagctattcccttatgttatcaaacataaaaagggaaaaggtaatattgtagccgatgctctttctcggcgtcatgcattactttctatgcttgaaacaaaattgattggtcttgaatgtttgaaaagcatgtatgaaaatgatgaaacttttggagaaattcttaaaaattgtgaaaaattttcagaaaatggtttctttagacatgaaggctttcttttcaaagaaaacaaattgtgtgtgcctaaatgttctactagaaatttgcttgtttgtgaagcacatgaaggaggtttaatggggcattntggggtccaaaagactctagaaacattacaagaacatt

SEQ ID NO: 265567 - DNA, 421 bp, Glycine max
  unsure (1)..(421): unsure at all n locations
agctttgggggaagcattangcctgcattatctccatgtgtcatgacgangccaccaacaaaacgtgtactaattgcccatgatgtctgccaaacatattcccttaacccattttcgtctgtgaactgcacaagcacacattttgagcaactgcatcctcatcaaaaggattatattaatatttaaaaatatatatatataaaaaaaacagtacatcagacctgtgttccaaaggcacgggcaaagttttgcccaaggttatgactggttcctgcttgtaatgctttcttgtcacccatcatagcctcaattgtataggtcttacaagcaccagcaaatgtttccactttagattttcgacctgtaacaacaggtattgcaacttgctcataagcaaatctggtatagatgtcaatcatct

SEQ ID NO: 265568 - DNA, 312 bp, Glycine max
gcagcaacttctcggaaccatctaagattttactattttaactagacgaatctatatatatgcccaaacatattcaagtccctttacctcaatgttttttaatggccctcacaaatgtgtgtcaccaacttcaacactctaccatttgcataaaatctaacacccattgacttcttattatcgcgcatcattacctactcaaatgtgtgacatgggtcatgaagatgaggaggaggatgatgatgaatacaacaataacgatgatgatgatgacaacagtggtgattatgtttctcaacaaacacaatacat

SEQ ID NO: 265569 - DNA, 449 bp, Glycine max
  unsure (1)..(449): unsure at all n locations
atggcaccaaacacctgagattaagcttttcttatttttgagataagataagttttacaactacattgttcttcagaatcctgcagttaataaatgaggagatgcaggaattgtagactaaccattatgcctggtgatgatgcatgtattaatgtaggcttaaactcagcaaccgcagaaattattcttggactaagtgccaaagagagaggcaccttttgataccagggacaagggaagctgcatttttcaatgtttctgtttaaatgaagatcattcgtacgaagcaatggttgtggtagcaatcataagtttaaagaagatattggcaagtacaatatgaatgtcatgaggacttactagcnncattcattgtgctttgaactgatagaatattgaattttctatgatattaataagggtttacaaagaaatgcagatacctaaac

SEQ ID NO: 265570 - DNA, 448 bp, Glycine max
  unsure (1)..(448): unsure at all n locations
agcttgtaggattatggggtacccatcatatgtgttattatgtggcggncgggcgatggtgcacaacaagttttccacatccacaatgcgcgcataaacccaccatcccctgttgcccaccttcaactgagctcacgtactcccacgtagcccatatcctcgtttctctcaataccgggcccccatcaatcctcccaagcttccacaacatccaagcaaaacaacatacaaacagcacaagctatcacagccaagcaaaacagagcaaggcagagaactctgctcaacacaccaactaatatcacagcttttctcacttaaagaccccagtaacaattccttcgatccaattcactaaccgttggatcgactccaaaattttactggaagtctatagtgcacaaacaaacatccagaactcactctgcactgctcttttcacacacag

SEQ ID NO: 265571 - DNA, 338 bp, Glycine max
actggcgccaacgcacagggtgacaatgaatgagaaacccatgttgtgactgccattcctattacagcaagatatccccaacccaacaatgtcaattactcagccaatgacaaacccttctcctaacccaactccccatttatccacataggccattcctaatacaacaacaaagcctgtctacctgactttcaatgacgtgaccacctctagcacagacctaaacaccacctagaattaatcttgcacgaaaagcctgaaaattccccccaatcggcatctagctgattgctccatatcactgaaatcaatgaaccaaaccccaccaaggtcatcac

SEQ ID NO: 265572 - DNA, 245 bp, Glycine max
  unsure (1)..(245): unsure at all n locations
agcttgaactcgacttgagttgattcattacctgatanatgctatggtgaaagtctcgacttacataaaagtctggattgacttacaagcctatttaaaagcttgcttaaagacgtctttgatcaattaattattttaaggcaaaattacaaatttggtcccccaatttatctccagtttcggatttggtcctccaataatttaattcacaaatttggtcctcatattttgttaaatcgtgtaat

SEQ ID NO: 265573 - DNA, 446 bp, Glycine max
  unsure (1)..(446): unsure at all n locations
tgacagcgttatgagcacaaaaaacttttcataatttgatgaaattattcataatgacagttctcagataagtcttaacctatagtggaagaagtggacagacatatgcagatggacaaaagcaaaatctgccgctgccatttgccataatttatttgtaccttcaaacaaaatataatgaaagccaacaaattaattagttgtacaatagtacaagcttccctctgttctaagctagcatgcccacagaaagaggtgtgtgaaagaggactaaatgatagttattgtcaattaagaaatcacgagttgcaatttctctctcttgtgatgatgaataatgatctagatntccacaacttttgatgaagttaaaggagcattaccggagagcattgagcatatagcatgtcacatattttaattatcaaggaataatctttcgtact

SEQ ID NO: 265574 - DNA, 400 bp, Glycine max
  unsure (1)..(400): unsure at all n locations
agctgtgagagccctgtgcagcaaagggtataacctttttntatggtagatgtcaatgctctaataccatattgatatgggaggaatgatttctcttgtgtatcattgcacagtttgtacaattatttatatacacaaaatctaaatcaatctcttaagaacggagatgaaaagctgtatattttccaatatgagatcccaaagattccattttaaggcgatttctttctgagaagattatgaagaatacaattctgctttgtagctgcctgtatcctaacatgccaaactgccaatcaccaaaacttcatgttaccctttttcttttaggtgggactttcttaacacacacacacacacaacagatgcttaaaaattatattctaaaatattctgtatt

SEQ ID NO: 265575 - DNA, 280 bp, Glycine max
  unsure (1)..(280): unsure at all n locations
ttaaatactaagcttctacaataatttttacagcttgaccgcgaatatttatctatttgtaatataacaaacataactcaaaggcccggtattaattatacggaagaaaagaccatttctagaattaatttgcccactctaaagattaaaacccgactttttaattatctttgacctggttcgcanctagagcttgctgattaattaacctgaacgagatcctcacattttaacctcgagcattatgaatgggttgatgaatgcacacggatgcattttt

SEQ ID NO: 265576 - DNA, 283 bp, Glycine max
actataatgaaacaagtgaacacgagaacattagcacatgatgaggtggagcttcaggacgcttaaagcggccgacggaatatatgttatttccatacgaaatcgagcacaaggatatctgctgggaattcgaaggaaaacaataaaaataaaaataaagaaccagagaaagtttgtgatgatcatacacgagaagcaatatgaggcaacgaaaacgggggaaaggaatactccggtaatatgtctctcggttgaaagttaacgcccaactaaaacgacaaaa

SEQ ID NO: 265577 - DNA, 472 bp, Glycine max
  unsure (1)..(472): unsure at all n locations
actcagcttgaaaagatctaacagactcagnctaatgttatatgattttactgttgcaaacaacattaagacaactctccctaaaatcgagagtgctaaaacatttatggaattagtgggagagcgctcttaaacaactgataagtttgttgttgggacattaatgagtacattggtcaccatgaagtttgatggttcacgtactatgtatgaacatgtcattgagatgacaaacattgaaacaagactaaagaccttgggaatgactgtgaatgagaacttttttgttcagtttattttgaactcattatcgtctgagtgtggctttccaaatgagctataataccatgaaagataaatggaatgtgcatgaattgcacattatgttagttcaagaagaaacgagacttatgaatcaaggaagtcactcagttcattatgtaagccaccaacggaatcaaggagcttgaaa

SEQ ID NO: 265578 - DNA, 423 bp, Glycine max
agccttataaattacaaaccattgtttactttatcggggagaaaacgaaaggaaaaatggtcacaccttgtcgaaaagcaatttacttctgacttatatcaaacctattgcatggttcagtaatatacccacatagaatggagaatgcttattgctcatttatacacaagtccagcggtaacaatcatcaccgaggagtttgcttatttcacatggattaccgaaagcacaacaactgagtaggaggcgagaaaaagttgcataataaaacatcttggcatatacaaaccattacgagaatatcaaaagacaacaaatattaactttaaatccttacggcatacaatatgccccagtattcattttcgtatgagctttacacaaaccttgtgcagatatgtagaaactagacaggacaacatt

SEQ ID NO: 265579 - DNA, 431 bp, Glycine max
  unsure (1)..(431): unsure at all n locations
tatttatgttaaacttcaatctagatgggatgaacctttttatattactaangcncctccccacagcgtagctgagattataaatgaagttattgacaaagtcttcaaagtgaatggtcaccaactcaagttttttcatgagagcccccaagtggaggaagaatttgtggcgaacctctctttggtcttgccaattttatgtgattatgtgccttgaatgacacttgaggagtttcctttccttttcttttatatgttatctctttgtttgcatttcattacatgctcacatcgggggacaatgtgcatttcaagtgtggtgggaaggtttagaaaaaaacatgtctggtttctattcttcgctctctttgctctttgttttaattagctatattctattctttctatttactggacctggaccgttgtct

SEQ ID NO: 265580 - DNA, 438 bp, Glycine max
agcttatccttatggctttccttctgacttcattccccgcgccaccccggaagagttaagccaagcccctacttttgaggggcaactcccgccttatgacgactatcccgggcaagacgatgaggaaggagatacccatcttggccccctgctccacctcaaagatccgtccccacatgaactaccccaaccgaacatggtccgccatatcccggcctcacccacacccgtaaaagaatatgttcccttcgcggaagataagggaaagattgaggcacttgaagagaggctaagagcagtcgagggccttggcaattacccattctcggatttagcggatatatgtctcgtgcccaatatcatcattccttccaagttcaaagtgtccgactttgataagtacaaagggacgacatgtccaaaggggcatcttctgat

SEQ ID NO: 265581 - DNA, 435 bp, Glycine max
agcttatatgaggcgtataaaagtgagttatgtctcatataattagggtgatgcgtgttgtatttatttatttattaaaattaataaatataagaattactcacatgagtgttgaaataagttgtaatgacatgagttatcattgtatgcagctcattattataattataatttgtatagacgacaaaaaaggaaatataaggtgaagctattttaaatattaaatttgagtttttttctcaaaaaatatcttaaacttttattttgattcaataataagtttcaaatttttagaatcatcatagtagaatttttttatcagtttaggatttactaaatacaatagaacctcttatttaccttataaactttgtgtctgtgataagaacatatattgaagtatcttagtttatcttaatgtatctctaatctaaa

SEQ ID NO: 265582 - DNA, 438 bp, Glycine max
  unsure (1)..(438): unsure at all n locations
agcttcttatccaagacactctcttggtggtgaagctccttcttctatggcttattccttagtggttgacgcctcctttcacctcttctcctttatcttccgctgcatctccatggtgaaaaatcatcattgaaggacctcattggagctcacagatctagcctccatagaaacttcacaagcaagcttccatcaaggggtaagtggtatttttggacaatactagataataactaaagagaaaacttatataaagaataaagtatttagcttaaaaattttccaataatattttttaaaaattaaaacgagttagtagaaatatttttaggaaaataaaatttaagacatgagaagtaatattacactattaaaaataagtaatttttttttcaacatcaataggaggtgtntagatatatntttaagaattgaata

SEQ ID NO: 265583 - DNA, 341 bp, Glycine max
atagcactgctaagaatggagtccacttgcaagaacatattgattttcatgatggaagatggaggagaaaatcaatatttgaaaatgattgtgtagtcaataaaaataatgtttgtttatttgggtagaaaaggagtgaaaaagaaatatgaagaagggtttaaaaattgagttatgagtaattggcgtcaaattttctagtttgataaaaaagatttgacgtttgatgttaaatactgaaaattaagttatagcacatacctaattaagacctttttctatcccagtagctgaaatcttcatataattggatgccttttataggcattattgggggatat

SEQ ID NO: 265584 - DNA, 404 bp, Glycine max
  unsure (1)..(404): unsure at all n locations
agcttctttaatgagtggttaagatgaatgcttatgccctcattgatctttgcctactctggtcctcactaacctttattgccatcttggtgttgagctattggaaccctctactcacgagccaatctttcccaccttattctttccttcccccatttgtcctctctttggctataacttggatggtctcttttggcattaagggtcacaaaatccggcaggtttggtgtgggtatgggcttggcgtccncatgtcccttggattcccctctaccacccaacagtcccatagtaagagggaccacttcatttcaataataatctgctgtggggttcttcttattagtcttggcttcttgtgtcaaatngcaacattctacgggattagtcacattcaaatgact

SEQ ID NO: 265585 - DNA, 425 bp, Glycine max
tgtcagtcttcatcacagaacagtacctgtgattgaatgagttggagcattgagcccacatggcgattctattatcttgaagtgctcctagccactcccaaggcttcttggttagagtgacagaaaatacaaccaatcttatgtattcgttactaacgctggactgcctaatagtgtcacacaacctcaaaaaccaccttacatgcatcatggagtctttgcgggatgctccactaaacaggttactttcaatcatttgaaagaatgcaggtttgaaatcaaaagtaaccccttgaggaagtgttggcagttgaatggtgttggtttctcccacctttggggtgagataatccatcaatatcttcaagagagtctttaccacaagtttagccattgctcttggtctctagcaacacttgtaacat

SEQ ID NO: 265586 - DNA, 409 bp, Glycine max
agcttgaaagcttaatataagactcagattatactctgggtatgcactataatgatgaagtcggcatgttcactgaatgaagagaaaaatttccagccgtatgaagagagttagaacttgaggacactgagaatgtcgcaaacatgaagatgtcaacaatgaacatgacattaagaacaacattgttacaacacactcagaatgagatttcatcaacaggatgagttcattttgaacattgtatctaaatttctagaaatgcaatggagatatacttgatggatatggaaatcttgaagaaagatcttcaactcttatgaacaagtcctggtctaatacaatctacatcatggagaaaattgagtttggagttgtaaacactggtctacttgaacaacttgatatgtgt

SEQ ID NO: 265587 - DNA, 195 bp, Glycine max
  unsure (1)..(195): unsure at all n locations
ntagcctaaggatgtactatatgcaccatgttgctcatgttgatgctacacctatctgtaacacataaagggattttgaggaaataattgatctgatagcgtcttaattagtcattcttttgtgtatggtaggcaaatcgtttggatacgcatgaatcgactagatgcccacatcttatggaaagttattctaat

SEQ ID NO: 265588 - DNA, 205 bp, Glycine max
tgacattaccgacaaaaaccgggcacttcgaagcactctcgcttacatcggagagcaacaaatcttacctcataaagacgcaataacacccaaaaacaaaaattggcatgtgctaccaaggacccctcatgcatttgtaccatcaattgctcatcctctctggcatccactcatctaagcaaaactagagcataattcctggtgt

SEQ ID NO: 265589 - DNA, 433 bp, Glycine max
  unsure (1)..(433): unsure at all n locations
actcagcttgagccnagtcctactctccataacctgaccagtggtttaatgtcatccttccctcggaagctgaagacaagacaatggtaatttctatccatgaacaaaagaaggaacttttccaatccatgtgaaagcctcataaaacacaggagaaacgactatttacgatcgtaggaataaagagaggaaaggaaattcccaatcaaaaagtgggacaaacgtaaatgagaagacagaaaattcccaaacaatgagtgggagaaagaaaaggaatgaaagaaagcttctgaacatggaacgaaagatatcacacgacatgtgcagaaaggtctttggaccggacaatatctgtacaatacagaattgtcaccatatgagcaaagaaaacggaaaggagaccacgacctgacagtggtcttctcactttgat

SEQ ID NO: 265590 - DNA, 252 bp, Glycine max
tgggcgatttagattaagccatgtgatggagaacaggctttatttactacataagcgcggatcgatctgtactggtaattatcacaagcttaattctgcgatcattggttgtccggcaaccactgaacacacagtctcccaagtggcccatacaccacttatggtatcctacagtatgtccattctgatgcttgggtgccagcacaggtaccttatttacgaggagaacattatttaataactttcttgctg

SEQ ID NO: 265591 - DNA, 328 bp, Glycine max
gctcacaccatctaatgtataagctcacctccttgagaagctgccttgagaggattcctatagaatctagagctttccttgacacacctatctaatagctcagctcaccttcttgagacgagaagctatagcttagcttcacacacctctgtaatagctaagctcaccttcttgagataagaagctagagcttagctacacatcccctataatagttaagctcactcccatgtcaaaatacatgaaaataccaaagaaggtcatactacaaagactactcaatattgccccgatgacactatgttttgaccctatactattataatga

SEQ ID NO: 265592 - DNA, 318 bp, Glycine max
agcttgtcgagggggcttctatttttgtttttattaagagccatctgtagggcaaatatggtgaatagatcgcgatactcctgcatcagaaggcgaaggttgcgtggagaaagggagggccctcttgtagatgatgttgaaccggccgatgcactcggcgagtaccatttggatagtttaagaacgggaattaggatgccattctgtattgaaagtataattataatggggcatctctaaaaatgaggatttgaattttattgaaattggatcactgtattcgaactagaaagattttcttccataatttgaattgcc

SEQ ID NO: 265593 - DNA, 407 bp, Glycine max
gcttctaaggggcacaattttgatattgagtgttcttgaggaggagacatctaattctcactctcctggttggcacgacagacataaatagaacggagggtcatcaacaatcaatctcaatgttacaactcatagtacacaaaataagatcgatgaggcacttactataacaaggaatagcgagatttagtgcttcaagtgtttgggaagaggtcatatagcttctcaatgaacaactaagaagattgtgttacttaatgatgatggagaaataattagtgaatcttcttcaaaatcttacccatctatcaattaagaggaaatatagtcataacgagatatgttcatgattagaatgatgttgggtattcaagcaagtgaattggataactgacatagataatata

SEQ ID NO: 265594 - DNA, 339 bp, Glycine max
ctagccgatgcagctagagactctgctctcagtttttttatatttttcacgcaattcagcagccaaggcattaagctcattctcaatcgcactctggaggtctgaactgcgaggaaaacagaattaatctctgtcagatttcacgtcgacccacacttatgtctaaggaggaattagccagtgactcatcaagaacaaggtatctggacacagaagatgaagaaagcttacttgaaacttataaacctatagctgtatcttgtgcttcaatttttgaaacaatcccctatttgactgaagctgctcgattacactcttctcaaccttcgaaaaacaata

SEQ ID NO: 265595 - DNA, 72 bp, Glycine max
  unsure (1)..(72): unsure at all n locations
agcttacnctcactattacccacaccatttatattacctatcaatgttaagaaaatgacatcgacagaaatg

SEQ ID NO: 265596 - DNA, 397 bp, Glycine max
  unsure (1)..(397): unsure at all n locations
ttgtcactccacccatatctggctttgatatttatcatacttaatactgacgacaacagcgtctacaaattcttgcaccctggatacaacgggctctatgaatcactttgcaatgtattatacacaggggcatgagcttgctgaaaagactcttgtccaaggtcacaaatcatatccttaaagcgatctcccatttctacatcaaacggttcggattgctgcccactctgcatgtctatcattntaccatgccatatccacgtccgataattcctctaattctatcacacaacagatgctctcgtatgtcatccattattagtcgacttccgtacaaacaattgatgcaaggacaataatattttccatcttcatccggttacctctttctaaggaa

SEQ ID NO: 265597 - DNA, 432 bp, Glycine max
agcttcaaaccacagcaacacacaatctatgtgttctttaccctcaatttaatggattttctaggcttgagaagtgaacattataatgaggtaaatttgaagcaaactctcacctcacacaagtccataacatcaatctaaacttgctcaaactggatttacacctaaaattccaccgaatcaaaatttgacttctcaacacccaattttgccctagaaatggctctttgttcactttgggcatttgtttttctctctatcacagtccaagctttctcccaagtcctaaatgacatttcaagctagtattaactcactttaacctccatttaccacagaattcagacttagccttccaactctcatagcctcactctttttccactcataacaccacattctcacttttcaccctagttaactctatattta

SEQ ID NO: 265598 - DNA, 159 bp, Glycine max
gctcttttctagttagattaacccaaaacatattttcggccagccaactttacaaggattaggccattatttagacaaactgaacactctacaattgatacctagcggtgccatttagtcctcctccatttgggccatgacacaactcacaaccttgga

SEQ ID NO: 265599 - DNA, 392 bp, Glycine max
  unsure (1)..(392): unsure at all n locations
gcttcttggacatgctgnttaaggagtcccaatttatcttgcctgtcattttcatctaaaaaaagtacaaaaacaccaacacactatgtcgaatgttgaaaaaagggcacaaaacctcgaaggctctcaccatggccgaattattggggtggagttaagaaggggctacattcaagtgctcaagtagagcacactataagaaggacctgatacttcaaaacaatgtccctcacccacttatggcaagcaacgataggtgagacgatggtgacctagcactgtgactacatcacacgcagggggaagccctaatgtcccaaccaccacttcttcttgcttccccagaaacagaagagggaagaatcatagttactataatggattccccatct

SEQ ID NO: 265600 - DNA, 189 bp, Glycine max
tctgggggacatactgacttgctttccaatctgacattcaccacagattctgccttcttctattatcagaatgggaatgcctctaacagcacctttgtcaaagattttcttcatgccctttaagtgcagatgtccaaaactttgatgccatattctgacttcatcttctctggagaatagacatgtgga

SEQ ID NO: 265601 - DNA, 297 bp, Glycine max
  unsure (1)..(297): unsure at all n locations
gactgcagcatagaacacaaaagcatgattgattatagaaacatccttatatgcatcaactggtctgttaaaaagacccaacacttctacctactgctgtcaaatttacttacttgcatttttactanttttagcatagacttagtttaatcctattctaaaccatcaattatcaatgtttctttcaacaatgccttatttatgaatttaacccggttttcgactagttccctgagttcgatacttggattcatccggtttaattttaaatacttaacgatccgatgcgctttccgg

SEQ ID NO: 265602 - DNA, 306 bp, Glycine max
ctccatcaagtggtaatcatagcacaagatcttcaagttcttgctccttaaacctccattaatctatttgctttaccttctcttccattggtgagtcttcatatttttctccatgtatctcactcacatgtcttgtgataaacgtttaaacatgattctttagagttttcaccgattaaacttgctattcaaactagaattgattatccatggttcacaattccttgtcttgttcttgaaccatgaatcgagttgaggttacgttcctttgagattggcctgttatttattgtggctgaaacctaa

SEQ ID NO: 265603 - DNA, 415 bp, Glycine max
agctttaaaacatacgattgccagcttctttgtgccaacaattttgacacatttctcatgatttaggctatactctttgttgtcatcaataagcaagttgaagataacacctacaatattttaatgtgatgtgaaaatataagtatggagcatgcttttcttataaaatttattttttctcgtcctgtgattattagtaaatattggcttctgttcttttgaaattggaagtaatgaaacaaatcactgttcttaatgatttgtttctacaactttcactttgcattgctttgtagctttgtgttcatccaatcgtggtaagtggatatacttctcatgtataactgtgataaggatttgctttctaatttgcaagtactccagtacaggcacatgatgatatggtttctggaac

SEQ ID NO: 265604 - DNA, 356 bp, Glycine max
  unsure (1)..(356): unsure at all n locations
tgcttcattntgaaatgggaagatgctttctcatcgatgtttacctcattgatgcaaatgggaagattcatgatataaaatcaatggtggaagatgttttctgggccattagaagaggaagtgccactagttttggagtcatccttggatggaagatcacgttggtcagagttccacctattgttactgggttcaacattcccagaacaccggaggaaggagccaccaatctcattcacaggtggcaacacataacacatgaattgcatgaggatcttttcattaaagtaattgctcataatagtggagacaaatcgaaaaaatttcaagctaccttcaactctgtcttccttgga

SEQ ID NO: 265605 - DNA, 343 bp, Glycine max
  unsure (1)..(343): unsure at all n locations
ctattaattcgcgcatactcgcatccatcagagtgaataactaatcttataagctaaacaaaaatatcggaatgaaaccaatgactcacaacttctttttacgtaaaataatagatgttagacactagtatacgtattcaaatattttgtaaggcataccaaacattttaaatacaggccatgcccgaaatataatttctgtgttagtttccagtaattttccgactacacaacntcagagatcctgtcgttttttcatcggctcaaagatcatgaaaaaaatcttaaaagtggcttgcgccctaccactgacctagacgggcctgacacgtatatctaatac

SEQ ID NO: 265606 - DNA, 401 bp, Glycine max
  unsure (1)..(401): unsure at all n locations
agcttanatatctccatacatatcacaacccgagcactcatttggaagaggtctgatataaataatgagttactggggttagtaaataacaacaaaagtcttacctaggtgagtttaagtaacatatgcaatttcaaaactctatatatataagatgtaattgtatgtgtgatttcatactcatagttgcttaagtaacatactcacaggtttggtgccgtaaatatatgcagctccattgaaaggcagatggagtgcaatcataaccacattttttagtcacttaaaaactctatcataaccccaccaaggtcttaattattatccctgcatttacatgttcagcgaaaaccttaattatgagtggatatagtgtcttctgctttttataagacatacat

SEQ ID NO: 265607 - DNA, 127 bp, Glycine max
ttaaaatctgaaaacactaacagcctacgatcgcatattgttgcattttctatcacacgcgaacggatatgactccgactatgacgaataatataagcaccacgacttttttctcttaccccactac

SEQ ID NO: 265608 - DNA, 412 bp, Glycine max
gcttgctggagctacttgttacttatctgttcaggtgccccatacgcaatatccaagaagtgcatactgagcatacaacataccaagcctatggctgagcctacaacaccatattcacaaaccatcttgcaaggcaatcaaacccaacagggcacccaaaatgagcaccaccacaacccaagcaggcaccctggacctctattccctcacagagtcccctatatagggtggaggatttggcgctagcggtggacaaaccttgatataatgaagagcaacgcagcgaaggaacatgatattcactaacacaatcttctgatttaacacacattgcccgagccatctgacaggaaatgctaccaacaggcctctgattcaaagaaactcgactacatgctgaaaaccaatgaaa

SEQ ID NO: 265609 - DNA, 303 bp, Glycine max
aatgatgacatgcacaaatgaccaaaagtccaaaccgtgctcacaatacctggatgtatagcctttggggacaccacaagggggggggcggggtgagccatatgctattacagcgggtgggccctcgcttatggagatcagtatctccaagggaggagccaatacctccttacaagtccctatatgggggcccacgaacaggaaacacagatgcaagccataacccacaaccaaaaaacaatgagatgtaagctccaccatgttgtgttacaagaaatttttagggatattcaacatttaagc

SEQ ID NO: 265610 - DNA, 204 bp, Glycine max
ctagacagaacttccccctaataaactatttcttaccttttcacccacctatacttggacttcttacccactttttcttgtgaggctccccagcgaatccataaagattgcctttacattaactgatggaaaaaacaattaggaccaattacctggtgtaattatttctggaaaaaaaccccccaacatgcccaattggacaat

SEQ ID NO: 265611 - DNA, 411 bp, Glycine max
cttgacttaattcctttgatatcccctttgagccttggttccctttccttgttttgaagctcactacaagccttaagtgagaaaccatgatatcaccatatccttaaagaattttggagctttggaattggtttgggaataagtatgggggtttttggttcattgaataacatgttttgttggctatgcttcatgatatattttgagccatacttgatgtacatttcatattggttaaatgttggacatgctaaatatgatgttgtttctcaaaggctacagagtaaaatgcaaaaaaaaaattaataaaaaaatcgaaaaagaaaaagaaaagcagtaaggtgagtgaatagatcttaaatgacaaaagactgatgagactcttggttctactctttattgtttaaattt

SEQ ID NO: 265612 - DNA, 458 bp, Glycine max
tgaaatgtatactagatgcacttattaactcaggtatttcatcttggcctcgaactataaatctagactctgtcccaaaggtctcgtgattgtgctcctctgctgaccaccatacagaccttagctcttgcatgctccaacctggagcaattgagcagccctaagcttatgcctgaaacatatacaatagacctccttaacctcagcagcaatatcaaccacaacagaacaattatgacctcttcagcaatagatacaaccttggatggaggaatcaccctaatctcagatggtctagccctcacaatcacaacaacagcctactccttccttccaaaatgctgctggcccaagcagaacatacattccttcacaattcaaagcaacaaccgcccagaaacaccaacagttaatgctcttcgcaacttccctcgaagaacttggacgcaaatgacatg

SEQ ID NO: 265613 - DNA, 435 bp, Glycine max
  unsure (1)..(435): unsure at all n locations
agcttcaagaanaggccaaattcctctctttcaaaatctgatttcaggtttaaataggtggctttgtttgtgcttgcacgcttagcgcaactctgaaccgcttagcgcgcattagtgaatttcggcttagtgcgcgtcttcttgctcaaaggatggactcaagcggtgcacttagcgggatgaaccctcgctcaatgaacatgcacagctcatccttcttccaagttcttccttgcacacagccgaggagtgttgcgctcagtggatggctcgctaagttagcagattggcttagcgagaggatgaaaatcagcacttcacaaacttgcctaattaacctgaaattgagaggaatngatattaaaacagacaanatggaagtactaagtatttattacctttctttagcananagtaattacaacactacaaaat

SEQ ID NO: 265614 - DNA, 429 bp, Glycine max
  unsure (1)..(429): unsure at all n locations
acctttgcaacctctttaagagtttcttttaacatataaaggactatttgcaaatcatttctcttgatttcttaatcttaaatcgaatcaacgttgaatagctttaatcttttggcatcatcaaaatcttcatacagcatatgcacttgcagttcattattttcatgtaattttcgttcttagttttgggggctgttggatcgagtggcctcagaataattaagaagggggttgaattaattattactagacctttactaattaaaaatttacccttcttaggcttttacttatgatgttaagagaataaggagtagaagagaaacttaaccaaaagtaagagcggaaattaaaatgcacagcggaaagttaatgagtagggaagaatgagacanacacacaagagttttatactggttcggaacaacc

SEQ ID NO: 265615 - DNA, 413 bp, Glycine max
  unsure (1)..(413): unsure at all n locations
agcttatagtaatcgactacatagctctttctgtacaatgaangagtntatttcagaatctctactttaatcgattatcaggtgatataatcaattacttctgtttcaaaagtgtttcaaaagtgatcaagaatactgtaatcgattacatcaagaatctaatcgattacattgttcttgaaagttttccaatttttgggatgaacactttaatcgattgatgaaatggtaacataatcaattacttcttcgaaacaatcgattacattgtatatttaatggattacaggaggttataactagtttctctataaatagccaccttgagttcttacttctaacaagttctaacaacttctcttctgagtgagctagaattaagagttgatattatttaaagaaagaagagaaga

SEQ ID NO: 265616 - DNA, 321 bp, Glycine max
ttgcgagaccacgaattttattcacacacatgggcactactatgtcgtgcactacgcatacgtaaccaaaaatactcagacatcacaaatatccctaacgttggagagttcgattatacttatacacagctctatacacaaatgtttatcttttcaccaactaaccaacttccccacgatatacgagttatggttgtcctctcgcttaaagagaacgactcactctgactcaagtgacaatgacatgtagtgactatgaaccaaagtatatgctacaaagttactgattgcgtgataagagaaaggaagaaaatgacctca

SEQ ID NO: 265617 - DNA, 426 bp, Glycine max
  unsure (1)..(426): unsure at all n locations
gcttgtangattatggggtacccatcttatgttttctaggnggcggtcgggcgatggtgcacaacaagttttccacattcacaatgcgcgcataaacccaccatcccctgttgcccacctccatctgagctcacgtactcccacgtagcccatattctcgtttctctcaacaccgagtccccatcaatcctcccaagcttccacaacatccaagcaaaacaacattcaaacaacacaagctatcacagccaagcaaaatagggcaaaggcagaaaactctgccaaaacaccaaccaaatcacagcttttctcacttaaagaccccagtaacaattccttcgatccaattcngtaaccgttggatcgactccaaaattttactggaagtctatagtacataaacctacattgtgaccgttgggatct

SEQ ID NO: 265618 - DNA, 360 bp, Glycine max
actggatgcattggtaacttggaaacctatctggtcttgaaccaaaaatctgtacctttcgcaagggtctgtgagttgtgcttctctgttgaccaccatacaaacctttgcccttccatgcatcaacctggagccatagagcagcccgaagcttatgctgcgaaccattaccataaaccttctcaaccttagtagcaaaatctaccactacagaacaattatgacctcttcagcaacagatacaaccctggatggaggaatcaccctaatctcagatgggctagccctcagcaacaacaacagtagcctgctacttcctatcaaaatgttgctggcccaagcagaccatacatttctcca

SEQ ID NO: 265619 - DNA, 422 bp, Glycine max
  unsure (1)..(422): unsure at all n locations
agcttgcttggggggcttctatggaggttgaatctttgagcttcaatgaggtcctttaatggtgattttccaccatggagatgcagcggaagacaaaggagaagaggtgagaggaggcgccatccactatggaataagccatggaagaaggagcttcaccaccatgatgagccttggataagaagcttggagaggatgcttcaatggaggaaaagaaagagggagagaaagagagaggggggagcacaaaattgaaagaagaaaaagagagagaagttgaactttgagttgtgtctcacaagactctcattcatcaaagttacaacaagtgttacacattcttctatttatagactangtagctttcttgaaaagctttcttgagaaaacttccttgagaagcttctttgagaaaactttct

SEQ ID NO: 265620 - DNA, 357 bp, Glycine max
  unsure (1)..(357): unsure at all n locations
gcttatgatgatgaaccatgcaattntgatgttacctaaagcctaactagntgattcaagattgattcaagacttcagaatacaatcccagattcgagaatccagagaagaaatcaagaacccacaagtccagacttcatataggataagtattaaaatattttttcaaaaaccaaatagcacagttttgttttacaaaagaattttctcaaaatttctaagttaccagagggaatactctctggtaatcgattactaggtggcagtaaagttgggtttcaaaatgttttcaaatgggttacaacggttcaaaatgattttcaaatagtggaatccattacactatattaggcatcg

SEQ ID NO: 265621 - DNA, 394 bp, Glycine max
  unsure (1)..(394): unsure at all n locations
acatttggaaagttaggtttaccaagaaatgctactcttaaaacaaaaatggcatacaacatacaaacatcaatgtaaatttagagtaaacttatgcacatacttctttacgaacgttcacttgcacaagacattcttataactaagaaaaatgcacccatgtacaatcaaggcacatccattacctagattatttatatgtacttccaaggtgtatttgctacctacatcacatgcacttccttggctaaatttacatacatgcatactcaaagcatntggggtaccaaaaattgcacatgtgcacattccggtatttctaatatttatgcatatacaaactttgtgatgaatcttggctatctacacaataaggtgagtacattcatgcttt

SEQ ID NO: 265622 - DNA, 405 bp, Glycine max
  unsure (1)..(405): unsure at all n locations
ctccatgtgctanaaatagaaacatgtgtaacatttgtcataactatgacgaaagggaaactcgtgagacacacttcaaagtttctctccctattctccttcaatttccacgccactatctctctctccctcattttcttcctccattgaagcttcctctctaagcttcttatccaaggcaatctcttggtggtgaagcatctccttccatagcttattctctagcgaatgacacatcctctcaccttttctcctttatcctccgctacaactccatggctgaaaagtaccattgaaagaccttattgaagttctaagatccaacctccatataagcttctcaagcaagctttcatcactttctctctctccttaccttttcctacacccttaagcntgtttttt

SEQ ID NO: 265623 - DNA, 384 bp, Glycine max
  unsure (1)..(384): unsure at all n locations
tgagagtgagacaagggctagggaaaaagctactctcttcaagaacttttaagagttggaaaaaacctgaaagatctttaaaaggatatgaaggagcttaatgaacttcatgattatcaaaagggaaatatgatatatggagagaatatgcacaagcacacaaagaatatgaagacctaanaataagtaaacataatatttgggtgaaatatgaagaacacaagaaatttgtgaaattcttaaatgataagcttttgaagaatcaagaatttaatggtcaacctcaagatgttgtcaaacatcatgaggaaataagaaccttaaaactacattgtccacattgcaatggaataaaaatcttacaaactatttgatgtgtagaag

SEQ ID NO: 265624 - DNA, 330 bp, Glycine max
  unsure (1)..(330): unsure at all n locations
atggagacccggtgttgagagaaacgataatatgggctacgagggagtacgtgagctcagatggaggtgggcaacatgggatggtgggcttatgagcgcattgtggatgtggaaaacttgctgtgcatcattgcccgaccgccaactagtaccacatgtgatgggtaccccataatcctacaagcttgaaatgtggaagcgtgaaaggcgaaacttcctgcttttattggtgaccacacagtggtacctggagatatgtctcgggggtcacgagacctttgggacgtcacgtggggtgcttttggccaanacccagcttgaccaatccca

SEQ ID NO: 265625 - DNA, 433 bp, Glycine max
  unsure (1)..(433): unsure at all n locations
agctngaattgaatatggactcttaatcttctttccataaggagcatcaagttcatagttagcttaactcaaacactactcttaaattttttaatatgaatntaatatgaaccttgttagtttgatctcttgcaaaacacttatgaaaagtagacgtatatctcgttttaaaattttaaattgaatatgattttttgatccaatttacatgaagctagttactaactcaattcaaatcgataaaatgaaatatatgatgtagactttaatttctaaatacaaattaaatttgagtcttctattccaattccctcataagctaatttaggtttaacatgtaaaaatccaaacaaattaaaatttcactagacttatacaattttaaaagcataaattaaatttagactttttgattggatccatcatacctcac

SEQ ID NO: 265626 - DNA, 314 bp, Glycine max
agcttgccgatgtacctggatatgctattatgctcagcctattttcattctctttatctggggaggccaagagatggttgcattcattcaagggcaacagtttaaagacctgcatcttcattccatcagtttcctgatgaatctttgagtgaggcattacaaagattccgtagcttgctgcggaaaactcccactcatggtttttcagagcctatacagctgaacatcttcattgatgggttacggccgcaatcaaagcagttactcgacgtttatgcaagaggaaaaattaaactgtacaaacctaaacaagc

SEQ ID NO: 265627 - DNA, 327 bp, Glycine max
actagcttactcaaaaactccccaaacttgggcaaatcgttatattttacccttacctccagaacgaggctcatatacaccctaagaccaagcataaagacataaaccgcccaagctcaaggatcaatcaaacaatcatacttttatctcaaactgggtgcaacggataatatatctcatacacaatgtaaatattatggctaatcggatacattacaatacaaaattgccctcattatctccaaacccatgcattcatcccatatcaatagatacacgcacaaaccatcagttactgttagcaactctcaccacatcaacatcaca

SEQ ID NO: 265628 - DNA, 424 bp, Glycine max
  unsure (1)..(424): unsure at all n locations
cgctntaagaattatggcctcatcgaactatcttgtttctcgatggaaattctataaatagacctcccatctttaatggagtgggttaccactattggaaaacccgcatgcaaatctatatagaggcaatagatttaaatatttgggaagccatagaacaaggaccttatgttccctctatagtggccggaagtgcaacaatagaaaaacctagagcatattggactgaggaagaaagaagattagtacaatataatttaaaggccaaaaatattattacatctgctctaggaatagatgaatactttagggtttcaaattgtaaaagtgctaaggatatgtgggataccctacaagtaacacatgaaggcacaacaaatgttaaaagatctangataaacacattaactcttgaatatgaact

SEQ ID NO: 265629 - DNA, 339 bp, Glycine max
ttgactcatgcttcggtaaatgcaacaactggggtaaatgaagagggtgagaatgagggataaacccatgttgtgattgtcatttctataccgccaagtttcccacccacccaacaatgtcattactcaaccaataacgaccctatttcttaccaaccaccctgttatccacaaaggccatccctatattaaccacaaaacccacctaccacacaaccaatgctaaacaccacctttatcacacaccaaaacactaaccaatgaatgaattcttgacctaaaagcctgtagaattcaccccaattgtggtgtcctatgataacttgctcccttatctac

SEQ ID NO: 265630 - DNA, 441 bp, Glycine max
  unsure (1)..(441): unsure at all n locations
agcttgcatcaggatcgactcanaatctctattgtatgtccctagtacataagtctacattttgaccgttgggatctgctagaaagcgtccagaacccaatatgtactcccctttccacaaccagcaatacacaacattttttgcacaaacacaattttttgctgcacaaaatttgacagctttttgctgcacaaatagggaagatttcgaaatcccccttaccatcatccaaatttgcccaaaatggatcctacaagtcctaaatcatgtataaatcatatccaaagacaagcttcagaccaaagcaactcagaatctaagtatctaaaacccctcaatttagtggattatcaagggttgagaagtgaaaatgtgaatggggtaattttggagcagactctcatctcagacaaagttataacgtaaatctaaactcgctc

SEQ ID NO: 265631 - DNA, 384 bp, Glycine max
  unsure (1)..(384): unsure at all n locations
tgcgcncaatttgccttacatgaagacactcttcttgggttggtttgagcccttaaggaatgcaactctcgctgatcaatagccttgcaaggatagctagtgcaagatgagccatgctccttatttcaatgacttgcccgccgacatgatggctgttgtcaccatgcacaagaagatggtcttgatgatgacaaatactaatggggttggcaccgctcgggtcattcaaaccgcttggaatataggtgaagctgtgagaacgaggtacattattaatctatctatctattgggaaacacccaagttcctcattggctagagatgttgtcaaggtatcatgatggtatgtatcggaaaaatccaatcccaccatggctagagata

SEQ ID NO: 265632 - DNA, 256 bp, Glycine max
acttacctcttgtatatcgaagaacgatgataaacgtcgaaaaacggtcgaaaccttctcgaaattccttacgaaaacgttatggaaacgtttctaaagcgcctctgtttatattgtctccacgggaacaatttttccaagcaaattctaaagagagagaagtgcctaaggggctgaacccttttcttctttacttcctcccctatttatatcaaaatatgggagatggttggcgtccagctcgcccaggcgaacc

SEQ ID NO: 265633 - DNA, 450 bp, Glycine max
  unsure (1)..(450): unsure at all n locations
ntagaccaaagcagctcanaatcttggcatctataacccttctatttagtggattttcaagggttgagaagtgaatatgagcatggggtaaaatttggagcaaaccctcacctcaaacaagtctatagtatcaatctaaacttgctcaaactggtttcacgatgaaaactctaccgaatcaaaatttgactactcaacacccaattttaccctagaaatggctcttgccttcactttgggcatttgtttttctctcttgcacagcccaagctatctcataagtcctaaatgacatttcaaactaggattaactcattttaacctctatttaccattgaatccagatttagccgcttcactcttaaagcctcactcttttttcactcataacaccacattctcactttctaatactaggtaaatcttaccttatctttacagtcttcatag

SEQ ID NO: 265634 - DNA, 418 bp, Glycine max
  unsure (1)..(418): unsure at all n locations
agcttatgcacggaaaatgtaattatgttattgagatgcccgaagaaacaccatttcctagttaaccatgcattatgtaccatgttcaattattttgttttttaagtgaaacgggtttatgatcccaacatggttggctcgtggtgcctaacacatgaaactaagaatgtagtgtgaagtttcacgcttcccccttttttgtttttgttttgtagaggaaaacgcaaggatgagcaaacatgagaacaaatggtatgcaattttgcagatcaaaaagtttgttgaacgcatatgcatgatgatgccatgactcatgcaaaatgggaatgtgataacggacaaatgcaggaacgatatgttcattatgatgctgaagagatagttatgcggtgcatgatatgaatgcantttactgaca

SEQ ID NO: 265635 - DNA, 462 bp, Glycine max
tgaaagtgtgtaacccaccattttacatagaatggttgtgtgtggtggcgaaaatgacgcccttcctaagtgttatgcaagggtataccaccaactactttcccttcagtggcatattcgaggcaaggctcaaagtcggctatattgtggcggggaatttcatgtgtctcccccatgggttgagagacatgtgcatgacccgattgaggttgtcgactctcaatgagtatgagaatggagttattgacattctcactaggagtgtatgccacattgggtggtgtatagttgggaggcaagtcatatggcgggatggcgcgcttgttctgaaatttcacataatgggggccgcctgacttcctaaatctttgccttccatatctgagggtggatgattcacttggctgaagccaaatgggggcgtctagttcacctttacaacagtgttggaacggtaactgc

SEQ ID NO: 265636 - DNA, 430 bp, Glycine max
  unsure (1)..(430): unsure at all n locations
agcttcactagngccatggatgctaatgtctacatgtggaaagtgaattaccacagagggacgcttgtcttaaagatgaacttgcctataacctactcccataaacacaaacataaatgttaatttagagcaagattatgcgcatattttcttacaaacgagctcttgcgcaatacattctattaagtatgagaaatggccccatatgcaatccatgcagattcgatacctaaagtatctacacattctcacaatgcgcatttgctacgtacattacacacatcttcttggctaaattgacatacatgcgtactcaaagcactgagacgtaccactaatcgctcacgcgcacattgtggatttctaatacctataccacacttatctcatgatgaatgttgactatctacccatactgtgctacatttca

SEQ ID NO: 265637 - DNA, 277 bp, Glycine max
ataccgcctctgaagcatacagatgcgtgattttatagctggagttgatatactttgttaggaagccataaaactgggatgattccctctctccatttaccgcgcacgagcacaaccctaacaccgtcaacatatgtgactgaggataaactatcactggacccctatactgagacggcccgacgtattataaactcttctggcgaacgagcagagtgctatgagtgttcaatccgcaaagcgccatcgatgtgttagatccatcaccgaacacatg

SEQ ID NO: 265638 - DNA, 439 bp, Glycine max
agcttggtggattatggggcacccatcatatgtggttctagggggcgatcgggtgatggcgcatatcaactctcccacttccacaagtcaaacataaacacaccatcctcaggtgcccacctttcaactgagctcacgcattcccatgtagcccttatcctcgctcctctcagcaccgggtccccatcaacccctccaagcttccacaatatccaagcaattcaattctgaatatcatgaaactaccctaaaccaagaaaacagggtagaggcagaaaactctgtccaaaacacattcaaataccacaactttccctactcaaataccccagtaacattctcttcgttctgattcggtaaccgttagatcgccttgaaaaatttactggaggttactagtacataaatatacattttgaccggtgggatctactagaaa

SEQ ID NO: 265639 - DNA, 489 bp, Glycine max
  unsure (1)..(489): unsure at all n locations
acacttanatactcaagcttggatcgattcaacctaactacgaattgaggtcttatatatttatgctacaacatataacacaaaagcgtgattgattagagaaatatctttatatacatcagcttgtttgtttaaaagacccaacacttttacctactactgtcaatcttacttgcattcttgttactatgttttagcctagacttagtctaattctattttaaaccaatcattatcaatgtttctctcaacaatgccttatttctaaatttaaccctgtctaatacaagttccctgagtttgatacttggattcatctggtttaattttaatacctgacgatccggtgtgctttctggctaatcggatttcccttgaacatatttgtataaagaaaaattggaaccaaaagacactgatggggaagttggcatgcgagcacccgcctctgtgcgctgcatgttaatgcccacactcacgctcatttca

SEQ ID NO: 265640 - DNA, 374 bp, Glycine max
  unsure (1)..(374): unsure at all n locations
agctctcattgatgtttcaataggacccgtccacccgggccctcgccttggaataagctaaggttttctctttcctttctgtcacaaccttcccttctgtgggagggcaaaaagggcaagagagatggacccatgtaggtctttaagtctgaaattttgtgtgtacattgattttatctttttcgaaagattgattttaattgcaaaaaaagtaggttaaggtgttggacctcaaaatgatgttttaaacttttaaaaagcaaagagaatcgttaaggtgttggacctcgaaacaatcttctcgagttngaaaggcggagagaatcgttaaggcgtggaccatgaaacaatcttctctagtgatattttgatga

SEQ ID NO: 265641 - DNA, 399 bp, Glycine max
tacggacctataaaactcagcttcgaagaaagtgatgggacaagccctataggcagagcttgaaagagcccgggtagtcgaagagaagttcaagttcatagccatcaaagtctgaaaagagtatgacgaactaagggacgtcaatatggccaccgctgaagcattggaacgagaaaccaagaaggcccgaaaggaagaatacgacccaagcaaagttttgaggggctttatatggcaacaatagtgagctcaagctccgaacaggtgaaaggaatcatcacgggtcaaaggcatgatcttgaaggacgagcttaaagtttgccttaagtcgaaaaaaaatttgttccaacagttaagcgagactgaagggaatatgtgggccatcatcgataagtgcaa

SEQ ID NO: 265642 - DNA, 432 bp, Glycine max
agctattctttgtgggttgatgagctctgtcgcacagaatggcatgactgctggctgacatattctcaattagctcaattgcctctttaggggtcttcagctttattttccccctgttgaagcatctaacagtttcttggtttgtggtctcagcccatccataaacatattcaattgaattggctcagagaacccatgggtggaagtgtttctcaataaacctctaaacctttccaacgcttcactcaaggactcgtcagggaactgatgaaatgaagagattgcagctttcccttccatagtctttgactctaggaaatatttttttagaaacttttcatcaacttcttcccaggttttcagactgttacccttaaatgagtggagccacctcttggcttcttctaccaaggaaaatgaaaatagactgag

SEQ ID NO: 265643 - DNA, 224 bp, Glycine max
tctatggaggctgaatctttgagcttcaatgaggtcgttcaatggtgattttccaacatggagatgcagtggaagataaaggaaaagaggtgagaggaggcgccatccactatgaaataagccatgaaagaaggagcttcaccaccaagagatggccttggataagaagcttagagaggaagcttcaatggaggaaaagaaagagagagagagagaaatgggcg

SEQ ID NO: 265644 - DNA, 360 bp, Glycine max
  unsure (1)..(360): unsure at all n locations
agcttgganggcgaaagactcatgattgtttattgtcggcgcaccaataggtagccgcggctatacgagacataccgccacacaaaggtaagttagccctaactcgcctgtgctctttcttccatgccatatgccgcaaactcgatgatcctgtccagtctgatgagctacataatgaggtcccaattatactgtgccaggtggagatgtatcctcccccctgctctctctgacatcacaattcacttgattgtgcatctggtgagagataacatatgttgcggccctgttcatttgcggaggatgtacccggctgagcgatacatgaagatcttcaaagggtatacaatgaatctatat

SEQ ID NO: 265645 - DNA, 316 bp, Glycine max
tgtttacatggtgcaccacgtgtatcaatgaccatgatgtttagcaaccatactctcctcatatccatttttaattcttgctgggttaccttgttctataccataaggatcatgaagttatgagggtgttcctcgtgagtctactccaaatccccaatcatgaggaagaatgccaccactacatgtgccttcggttctttggaaaagagcatctctaggacgacgaaccttatgattacgtgacatggaaatattttggtggtactttattgctaaccaatgacgaatgtgagcttcatacgaatagatatagttc

SEQ ID NO: 265646 - DNA, 308 bp, Glycine max
aatctgtctcataagactttcatcttcaagtaacacaagagttcacatgcttctatttactaactatgtaggttctttgaaagccttttacagaaaacttccttgagaaacatctttgagataactttcttgataagctaaagccttatctcatcaatacctgtaattactaaactcacctccttaaagaactctcctgagaagatacctaaagaaccctgaactctactacacacacctctctatgagctgactcacctccctgaatcgaaatctaagcttacttccacccctctttataacaatct

SEQ ID NO: 265647 - DNA, 176 bp, Glycine max
actccgagagacatttttttttccggggccatttaattgggcgtgaataagacactccaaccgcaggggcaacccttcgaatttcagaggcctgaacaaagacctggcagagcaagcacttattttgttgaccacccagttgagaaagaaggtcccccaaaccaagtgctaaaagg

SEQ ID NO: 265648 - DNA, 478 bp, Glycine max
  unsure (1)..(478): unsure at all n locations
tgccgcatgcagctnttgaaacaaaacttgccactggtattctattactatagagtaaaactctctggtaaaagcttgtgttaaaacttcatgtgctactcaatgtgttgaaaaactntttagtacttatcttgatagagtctttctcttgattcttgagtcttgaatcttgatcttgattattcttgattcttgattcttgacaacttgaaacttgagacttctcttgaatctttctcttgattcttgaattgttcttgactcaatcttgaaatcattctcttgggctttttgtcatcatctttgttatcatcaaaacaccttgaatcaatcttgattcatcatcatgaaagaatgaagctcgttttacatttaagacaatacatgctgagccataccacctggctgattccacaaatgacccggtcaatacatctttgataagcctgcttacagngcggatcctcggtgcatgttt

SEQ ID NO: 265649 - DNA, 291 bp, Glycine max
ccaccgtctaaggaaatacatgctgagccatactacctggttggtgtccaacatggatccggggatgaatattgacgagaaaccgtacctcactggacggatcgctcgaagccaaatgtggatatccgaaattaactaatgcgcgcaaagcagagaataagggcgcgaagcgcgcgagcacaaaaaggccagccatggaagcccggaagatattataaagaaggagccgggaccgcaagttaaagctacgcatgttaaaagtcgtaggagagaaaggccagctcaaagagg

SEQ ID NO: 265650 - DNA, 425 bp, Glycine max
  unsure (1)..(425): unsure at all n locations
ggagaggggggggctctttataantttctattaaagggcaaaattgtccattcataatagttgctgggtgcaccagcaatattgctgggtgcaccttacatctcccaaataaatttcataataattaaatccagccatgagttggctctagtccacactattttttggtcttttgggtccacaagcttcttgttgcttaaaaagtcttatgagttgggacccaggacgataaagagtaatctcatttaaaatttatcagatgggaataattttgaatgaatacacaaatatgagtaagtcataagaatctttatgattcctaagtatgaaatcataaaaaattatcaattctaaccttttttatatgaagctttaatgacttcaattctttcttttttagtgaaatcatatactctacaacgact

SEQ ID NO: 265651 - DNA, 355 bp, Glycine max
tattttcatgcacttcacatcataaagaccactcatccaaatatatatatgggtcataacggtcttgcaacactaatccacgcatcataagagaaatatgctaactaacaacatacacacaggatgataaaggttccataacaccttttcaatcaatatcaagactacttgcattacccaatggcttgccataatgtccaaccgcactttgcaattatagagatggccagtctcataactcatgactcaacagtggatttatggtatagcagacattaaggatgcaaggcacatacaagcattattattatagcttattatttcatgtaagagaaaatacaaataataattcaag

SEQ ID NO: 265652 - DNA, 473 bp, Glycine max
catgcaagcttgaacgaatataagaaacatcttcttccatcctggtgattctagactccatctcatataagcgcatgtccacttgtaactcccaagtatcaaacctttcaccaacaaaggtttgaagaccatcgaagttatccaaaatcttgtgaagaggagatgaatcttctccaccatgtccttcttcatcaacatgttgagcaccctttttcacccaagagccatcatgctctttttgataaccaaaggatgcaatgactgaagcgcctattagaaaggatctcttgattggaacataaggttcataatcaagagggatgttaaagtgttgaaagaagagggtgactatgtgtggatatggcaatggagcatttaatcgcaatgccttatgcatgcgatattggactatgtgtgccccatcaatatgtcggcctttatgataagcccacataacaatgagatcttcttca

SEQ ID NO: 265653 - DNA, 391 bp, Glycine max
ttttttcacagggacaggggttgtgcacggtcccgcatatgaacattacggggacaatgcggctgttcagccaacggtctccatcttatttcatgcgggaggagaaagagaagaacgagcgtatgggcttcacgtccccatgttgcgaaattacattggtataacttatatacattacaacatctgctctttaaggataactgatgctaactgaatatagttaacatcggtttttagaaaaccgatgttcacatcatctaggtaacaatccgttgttaaacaatctaagttaagatcaactccttaatatcggcgttgcaaaaccgatgttactatatgtagtaacattgggttgcaaaaccgctgttacatattcatctaacttctgtca

SEQ ID NO: 265654 - DNA, 280 bp, Glycine max
tttcttttctgtacaccaccgaatcgacacatatgtaattcttgctcccacgactcgaaacgctttctttgaatcacctggcaatgtaccatacagatcggcatgcgcatgctgtaaagtacttcttccgaggtcactaatgatatcgctcaataagatctcccattcttacatcctacggattacattgggacccactcttcttatttagaaactgaccctgacatattcacatggtgtaatattgtcgaatgcgatcacacaatagatgctgccgtat

SEQ ID NO: 265655 - DNA, 445 bp, Glycine max
atgttacagaaacaaattacataatggtagtatggcacttaaatgcgaaaacaaaatccccggctacggcgtcaaaaacttgttagctttttggcaagagtaccaaatcgctcgtagtaataatctctcggtaagccgagtgttgtaccacaaagatttttgtgcacttatgtgaagtactattcagtttgcaaattgtaaatttagtgtataaaattaaatgcaatctaaatctagcaagggataagaaatttaaaataaaagataatagatagataatagataagataaagaacagataatagatctatgaataataataaaggataaagaaaaaggtaatttaaatctaagcaactacttctaatttacaggaaactaaagcaataaatacagaatagagtctataaaatgtactatatctataagcctaaaacctactcct

SEQ ID NO: 265656 - DNA, 356 bp, Glycine max
gtactcacctatatctggcttcaatttaccttacttacaccaccgacaacaacatcaatgaaatcttgcaccccggatacaaaggcttctttgaatcactttgcaatgtatcatacataagggcatgcgcttgctgaaaagacttttgtccaaggtcacgaatcatatcctccatgcgatctcccatttctacatcaaacggttcatattgtgacccactctgcatatctgtcaattcaccatgccatatccacatggtgtaattctttttaatcccatcacacaatatatgctcccgtatgtcgtccagtatttgtcatcttccgttaaacaattgatgcatggacaataatatt

SEQ ID NO: 265657 - DNA, 489 bp, Glycine max
  unsure (1)..(489): unsure at all n locations
ctcgaccggatcttaagtcacctgcggcattgcagctntgatctaccaccaccatcgtcactatcatcttagttttctattatgtntaacattattagtactttgatttctagccgtgtatttggctatattattatgacatttgaacaatttagtatttcttttatttgcatagtatgattgaataattatgaattatgttatatgactatgtggtttttatatatttgatctattcatgtttcttgcttcatgattggtttagatctttcaatgaatgtcttgtgaatgattagtaatgtatgtatgttttatatttgttacgcactntggctttttgttgatgccaaagggggagagaaatagagattaaatcaagaactcacataagtaattaacttaatttcaagtgaagcatatactcataaacaaaggcggagaatatggagatataagtgagtgatcaactaggaacaagtatgtctatgt

SEQ ID NO: 265658 - DNA, 422 bp, Glycine max
  unsure (1)..(422): unsure at all n locations
tggtgatcanaaactctgcactctttttctctcaactattcttcattcttattcttgacactttggttcttcctgtttacttgcaaaaattatgtggcttttacactggtgatgattatggaaggatagacacttgatcaatccaatgattcactccaagcaaggctgaatttgagttctagtttagtatttctaatctgtgtgaatgctcatctttttcttcaaacctattttttactttgatgattatgaatatgactaggatagaaaatgaattattttagggattcctttcctaatttcaactttaatcacagaattgattggatgatatttcaacctaatttgcgatctcaatgaatttatggattaattcgattgagacaactcctatgatattgattgaactctcacaacatgat

SEQ ID NO: 265659 - DNA, 451 bp, Glycine max
  unsure (1)..(451): unsure at all n locations
ttaacattaatgcggtgtgctaccaacaacttatataaatattatcaacataaattgttagtacctggaaatgaccattttgccctcatgtcactacaagaaaatcatgttttccgacggactacttcccacgaacaaaattgtcagaatgttttgatttttcaacggatattatcgaaggaattaattccgctgcgaaatttgaaaatactgacggatttgaccgatagacaattattctgtgggaacattaatatttccaacggattatacacatggaataaggatccatcngaaaataaaatttctcgaaataaacgagctttaccctagccagctgagtcattatggggttttcgtattcttcttctccttcctccccattagcgctttcctcgctcttggttattgttggcggtattcgggtntataatatcacatttgtctttcg

SEQ ID NO: 265660 - DNA, 325 bp, Glycine max
  unsure (1)..(325): unsure at all n locations
ctattcatgactgttgtaatttcatggcggttngcaaaatctgctgatgttaacatatgacagcacctgttttgtatttcttggcttggtttggtcacttgtgactgcaaaaacctgtgatgaataaaattgatttccttttcatacatatgttaattaaactcatttcttatttcttgttaaataaaaaacattacatgtatttgtaaattctatatcacatcaaacacttctaaaatatgaaaaatgtttcatactttaatgacactgtccaagagccctgttgtctttttatgcaattgcaaggttttataaaattctataa

SEQ ID NO: 265661 - DNA, 504 bp, Glycine max
  unsure (1)..(504): unsure at all n locations
tttagtcacctgacgcatgaagcttgttaagaacttagataaaatcattaactattctgttcgcacatcgttcgcgtgtatgatatccactccacaaggtttgaagtagaagagaccttcaaccctataacgcaacgtggcggacaaaagtgggcagttaacttgaatggccattattgtcaatgcggaaggtattctgcacttcactatccatgttcacacattattgcagcttgtggttacgtgagcatgaactactaccaatatatagatgttgtttacacgaatgagcacatcttaaaagcatactccgcacactggtggcctcttggaaatgaagcggcaatttctcctactgatgaggcatggacactaatctctgacccaactacaattcgtgcanaaggttagccaaaatcaacaaggataatgaatgagatggattggctcgaaccatctgaccaccgacaaatatgtagtatatgtggagcagaaaggcacaat

SEQ ID NO: 265662 - DNA, 460 bp, Glycine max
  unsure (1)..(460): unsure at all n locations
ccactcctatgaatgtgttatcattcatttgaactatgagagtgtttgacacggtttgtgtaactgatttgcctttaaatgcaaaataaatggaaaatgaagtctatttaccggcatctgttttgcatcatttgttaatttgactctgatgtgtccatgacaaactggaccaatattatgctagtttaatgaccaggcataagaattagcaactaacgtaattgtcttcttaattactgaagcataaaatacttacattgtgataacacactccaattaagttcatatcctaagcgctcttggagtataactttcataggaagcccaccattcagctccatagttaattttttattatcatcanatgaaagtcacaagcaatcatataattccttaaaatatcatattagaaataaagatagtttatgtacatagaactctngtattcttgttctaatgg

SEQ ID NO: 265663 - DNA, 464 bp, Glycine max
agctctgaactcaagttctgaagggaggattgttggactgattataaagttaaagggcttagaaagaattattaattccctacatttaaatcttgttagcaaataagtacctcaagatctccaaaacttgtattatttagtatcttcaaggaacattcaatcttttttgcacgcagacacagttgtaactcatgtgattcaaaataaaattataatgccatgttctcgtgaagctttgtaaacatggtctgaaactagtaaatggggcaaaattagacaatacatagactgaaaatactaatatcaagccaggtctaaagagttgtggttactttttcgggaagggtgaggaataagatctgaaatataaataagtactgttggaagtgcaaatattcaagatatatgatgaatagaagccttaacacaaaacatgctataacgatattttagacatgatagga

SEQ ID NO: 265664 - DNA, 404 bp, Glycine max
ttaggattcttatggaactactatagacatcactatctctgccttactactcacatcatcctgcttataggtaagggatgagtttatcgcacttgaggttaaaatgaacatatgtagtgatgtatatccatgtgcagcttgtaggccttggatcttcttcatcaatgaagttttttgcttcttgaagatcaataaaaggggaatagagaaggaagaaagacgattatagatgtcacttcaaggagaagatgagtcaagaacaagctcaccatcaaaagaagccatggataatagcttgaaggtatgatgagatgagtggatggagaacgagagaaggagcatgaaattttatacctcacatgaggtctgaactctgaagtgtaaatctaaaatgatcaaagttg

SEQ ID NO: 265665 - DNA, 502 bp, Glycine max
  unsure (1)..(502): unsure at all n locations
tccttatagtcacctgaggcatgcaagcttgccacccatctcgcccaggcgagcttgtttgcttcctccagaagcaacagccttctggaggaatcttctggagggcccaagtgggcctggttgctattcgcacccccatttttactaagtacaccccctgcctttttttggagattcttttttcgtatagttacggaaacttacgaatttcgtaacgatacttgttttctttccgtaatgttacggaaccttgcggattacataatcatccccttttttgacttatggaatgttacggaacctcactaattgtgcaatgatgcttccatttgatttccggtgtgtcacggaaccttacggattgtgcatcaatattttctttggttttccggcatgtcccggaattcacanaatgtctaatgatgggtgccaagcacctcacaaggaccatacaaaagttgcatgtcatcaagcaaaggtcctcggacgaaattagggtatg

SEQ ID NO: 265666 - DNA, 465 bp, Glycine max
cttgatggtgtcaagaagaaatcacatgtttgtcatcatctattttgtggagaatgcgaatgtatgtatacatgattttgatgatgtcaaagaagaatctaacaaggctgcttcatatgataagcatttgcttcaagaataattcaagattgcttcaacatacaaagccttgtttcaagattcactaaagaccaagccttgccttataacaatgtgctttcaagacatgcaaggctctggtaatcgattaccaggaagtgtaatcgattaccagaagacagggttgagaaatagctgttgaaaaaggttctgaatttgaattttcaacatgtaatcgattaccatatgtctgtaatcgattaccaccaacgaaactttggaaattcaaattcaaaagtcataacccttcaaattataactgtgtgatcgattacacatacattgttatcgattaccaatggaaag

SEQ ID NO: 265667 - DNA, 474 bp, Glycine max
  unsure (1)..(474): unsure at all n locations
ctgcagcatgcancttgcactacagcagatttagagaacatatttttgtgtcctcagtcatcggatgggtgcgtggcataggtacatgcctataactaataataattcctgtgcaaggtatcattgtttttgcatgactgatggctaccttggggctggagatatttggtagaaactgccctcaagagttaattgtgtaacgatcgtagagaacatcctttaggtgttgtttgtatattatatacctaaatttgtgttcaagactaattattcaacatgtggatcatgtaccataagattgttctaacaagtgagtttaacgtacgccgatgattttatcattgaagaggtgtggtcctccttggttgggattcatgacctataagtcaaacatgaaactgaacatgttctagtctaaatatgatacctcgcttaatgaattgaggtatgatcaactggcgtcattatataact

SEQ ID NO: 265668 - DNA, 448 bp, Glycine max
attgatgaagataagaccaaatgctctgtatgtgactctacttttgaatctaacacaaactatgataatctactcgatgcattttaagagatactatggaagcaaagctttgcaagcttattttgatgatgccaaatactcaagtcaataatcaagagtcaaaacaagtgtcaagaatcaaagagtcgttcaatcaagaatcaagattcaagtgaagattcaagagaagactcaagatatgcaagaacttctagaaaagcatcaagattagtataaaaagatgtttttcaaaagaaaagattgaataacacaatttgttcaaaagaacttctcataaaataatcttgtatcatatgttttactctctggtaaccgattaccataaggcagtaatcgattaccataagcccaaacaattttataactgtgatacacagtagtaatcgat

SEQ ID NO: 265669 - DNA, 478 bp, Glycine max
  unsure (1)..(478): unsure at all n locations
gcttcaaaaagatcttgaagaagttttgtctttacatgcccgactcactcgagtgggatctgtattgattattggtatgcgtgctgcagcctaacttccatatattccatatgtgcatcatgcatcatcatgtangactaagaatgacagtttctaaaagtagaaaatttctctagtagttcaaactctttgttataatctattacaggctgatcataatcgattacaggttcatagtaatcgattacacaattctttttgagacaatgattgattctttcaagagtctttacttaaatagattactaggtgatataatcgataacttatttcttagaaagtgtttcacaagtgatcaacaacactttaatcaattacatggttcttgaaagatttctagtgtctgggacaacactctacttgattgaatattaatataatcgatacttcttcaaataatcaattacatcgatactta

SEQ ID NO: 265670 - DNA, 453 bp, Glycine max
  unsure (1)..(453): unsure at all n locations
actcangcatcatgatgatgaatcagatcgaatcgagggttttgcttgcacttagatgacgacaaaaagcccacgataatgatttctggattgagtctagaacaattcaagaatcatgagaaatttgatttcacgattcaagaatcaagaaaagactcaatcgagataagtgctaaatcttttttcacaacattgagtagcacatgaagttttcacaaaatcttttaccaaagagtctttactctctggtaatcgattaccagtttcctgtaatcgattaccagtagcaaaattgtgtttcaaaagtttcaactgaatttacaagttccaattatttcaaatggtgtatcgattacatatattggtattgataccaggggttgatgttgaatcaattcattggaaagctcatctttccataatgctttggaatcattacatgattggtatcga

SEQ ID NO: 265671 - DNA, 415 bp, Glycine max
  unsure (1)..(415): unsure at all n locations
tcttcattctatcttgaacatcttgaactcattcttggattgaccttagagctttttgtcatcacctctgtcaacatgttngttatcatcaacacatctttcaaatcaatctcgattcatcatgaagctttgcttctacaatctccccctttttgatgatgacaacttctgatatcaagaaacacacacacacacacacacactttttcctagacgatcactcacataaatttacattctcccactttgtttttgaatatatacttctcttaacattaagttgattactcatgcgtgttcttgatttaattcctattactctccctctttggcatcaacaaagagccaaagtgcgttacatattaaaaacataccaatataactaagcatccatacaacatccatggaataatat

SEQ ID NO: 265672 - DNA, 405 bp, Glycine max
tgctgatgatgaatcagcttatgtggattcattatttttgataatgacaaacatgctgactaaaagcccaatgaatgatgtctagaatatatcaagaacaaatccatgaatcatgagaaggttgatttcaagattcaagaaaagatgaattcaagctctaagtgaagaaatcaagaagacttcacaagggaagtattgaaaagatttttcataaaacaaacatagcacagtttggtttttcaaaagagttttcacaaactgttctaagttaccagagtttttactctctggtaatcgattaccagtttcatggaatcgattactagtggcaaagttggatttcataagcttttaacttaatttacaatgttccaattgatttcacaatggtgtaatcgattacaa

SEQ ID NO: 265673 - DNA, 464 bp, Glycine max
  unsure (1)..(464): unsure at all n locations
tgcaagcttgagcatagtcaaacgactatatctctttactctgatgnctgatggaggcccgtaacatatctagacgctcgaaattgaatgttgaagctttgagcatattcaaacgacaataactctttactcggatgtctgattgagccccgtaatatatcgacacgctcgaaattgaatgttgaagctctgagtaaactcaaacgacaatagatatttactcggatgtctgatataggccctgaatatatcgagacgctcgaaattgaatgctgaagctctgagcaaattcaaacgacaataacatcttactcggatgtctgattgagacccgtaacatatcgagacgctcgaaattgtatggagaagctctgagtcaattcaaacgacaataatcttttactccgatgtctgattgagtcccgtatatatcgagacgcttagaattgaatgttgaagctctg

SEQ ID NO: 265674 - DNA, 384 bp, Glycine max
tagtatagctaggcactaacagaatttgctcaatgcatctacattcaatttcgagcttctcgatatattacgggactcaatcatacatccgagtaaaaaggtattgtcgcttgaattggctaagagcttcaacattcaatttcgagcatctcgatatgtgacgggactgaatcatacatccgagtaaaaagtcattgtcgtttgaatttgctcagaacttcaacattcaatttcgagcgtctcgatatgttacgagactcaatcacacatccgaggaaaaagatattgtcgtttgaattggctcagagcttcaacattcaatttcgagcatctcgatatatgacaggactcaatcagacatcccgagtaaaagttattgtcgtc

SEQ ID NO: 265675 - DNA, 456 bp, Glycine max
  unsure (1)..(456): unsure at all n locations
ttttatctattgntgncaacttatactggcatttactgttttaccatagaagtagtttatttctgtttctaaccatcgattatcaatgttgttccaacaatgccttacttctgaataaaactctatctaagaagcaagttccctgagttcgatactcggatcatttcgttntaattttaaatacttgacgacccagtgtgctttccggtgtttcatttcccttgaatataattgttgaaaattagagaaaaaggaaccatatgggaaaatgaacaatggacgtgtctttggcatgccaggtaaggtaagtcatcagatntgacaactctgccttttttctgaccgttggagagtccattgaagacaactcgtaacaattatttgttgtaacaagcgcatacggcacactcgcaatactcttgcatacgtgtcacacgtgtgtcataccctaatttc

SEQ ID NO: 265676 - DNA, 395 bp, Glycine max
  unsure (1)..(395): unsure at all n locations
agctttgactcgagtcatcattatattatttatatgtgatcatggcatggatgtttttaaaaataacaatcaagaaatctatctttcaatcttctctctcaacatcattcaactctttcaacagagtttttctgattcatcttctcttcatccttctaaaagattttgttcaaaactttttctttcaagaaaagttctctgataaaaaacttggtctattaatctttttcattctcttctccctttgccaaaagaacaaaggactaaccgcctgaattcttttgtgtctctcttctctctttccaagagaattcacaggacctcgcctgagaattcttttgaattcttccttccnctctaacaaaagatctcaaaggactaacccgctgagatat

SEQ ID NO: 265677 - DNA, 443 bp, Glycine max
tcttaatttcagatgatgcagatgggtttgtatctacctcatgcactcctctaatgactatggcatcatttctggcgctaaactactgggagttggaggccatcttctcaattaaatttctggcttcagcaagagtcatgtctccaatggctccaccactggcagcatctatcatacttctttccatattactgagtccttcataaaaatattggagaagaaactgttctgaaatctgatggtgggggcaactggcacatagtttcttaaatctctcccattactcatacaggctctctccactgagttgtctaatacctgagatatccttcctgatggctgtggtcctggaacaaggaaagtttttctaaaatactctcttagagcatcccaactcgtgatggacttggacaaggtaatacaccagtcctttgcactcctct

SEQ ID NO: 265678 - DNA, 406 bp, Glycine max
gaatagggtacacaagtgaccttgcacccaatttgatgagtaactcaacattatatatatatagtacacaagcacttatgttcatcaaatcttaaaatcatatacatatctacaatgaacttaatgttaatttcaagatgtgtcaaacatcatatactcatgtatgaaatgtgtgggattcacccatctaaatttggaagagattaccgaatgcacgattgtttataatcattggaggaagtttacaaaaattggttatgaatagaagactcttgcacaatcacaaaatttggaagctaatactcatattatatttgagttcctagatgcaacatctaacatttgtgtattatggacttgtttgcaacttaaatataatatactatactaatatctggtacatttt

SEQ ID NO: 265679 - DNA, 357 bp, Glycine max
tcacgcacgctgccactattgaatttgaatttcaaaatgtacatctgagtgaagacttatcgtctgtgatataaccaccaaatgggctattccttatgctcttcaacatgtcatttatttggtaagacattttattgggctgtacccatgcagcattatcaacaagcagaattgattgaaaagtggaaccaccgaagcatattcttacttgcatatcacaagaaatcacctgtgtactctagtgattgtataatgtattctctctctttacatgtactaaggcccgcatctgttatcaccaacagggagtgaccttcaaaatatggtcaggacggaactatctttgcacgaatcact

SEQ ID NO: 265680 - DNA, 269 bp, Glycine max
  unsure (1)..(269): unsure at all n locations
cattatctaanaaaccttggagtggatacaagcgctccgatcattcattcgcatattcatgtcttggtggcatactcaccgctgtttatttctttaagaatctcgtcataactaatagagcactaagacacccctataacactcgatccatgtaaatggataatgaatagggcgagcacgaacagatgaaagtcgatctatcggccttactaaatcaaatggcttccatctgggacgtcatgctaaagctccaaagaactatccacgat

SEQ ID NO: 265681 - DNA, 245 bp, Glycine max
ccaacccgggcatagtcagtcagtgagaacctgtgatgtacctaaacaagctagctcctggcaatctatatatcatgcgaacactgaccacttagcatggatgcttgtggatgctggacacactgtgaactctgtgtgatatatgggttgaggcccttggtaatcgattaccaacggtgggtaatcgattacaaggcttcataatgaagaccggagactgagatggtctctgggcatcgatacct

SEQ ID NO: 265682 - DNA, 493 bp, Glycine max
  unsure (1)..(493): unsure at all n locations
agcttcaggtcacttttattgccaaggttaatctatattagatattcncgaccagaagttctgttcctattctgactttaactgagatattaagtgtaatatttgagtattttgcaatatggtcagtgcaatgacctgatcaatttaatacactgagatgctgcaaatattntctcacacgttcaataaaaacaaaaaatgatgcatttaatttgtgaaacaaaataactgggcagtcatcctagcaagttcttgatcttatcaaaatcacaatctcttttatgatttgccatgtgttgatcacttgcgtgccccctggatggttgatataattgaaacaaatgtgagacatttgtaaagggaatgaatgtctttntcagaacttattgagaagtacttcttacatacaaaaatattctggagaatctgaactcaccaaaattggatcagaactttggccatgcgttgttctcattccaattagatcattttc

SEQ ID NO: 265683 - DNA, 438 bp, Glycine max
ttaaatctaagcttaacctcatcgtctctcacagtcctgagattggagagccaatcttatccttgtgttcggactctcagccacttatgatatccgtcgatgatcccattactgcttcccctaagctctgtgtcctttcttcacgccgcataccatgccttgcgaactcattggagtaccctcgcgttgtggtcaccgaatccccgtgcgatgaaaggcgtgatgctttcgtctgatggcactcctctcatggggtaaccaagctgtcttatggcgaggacgggattataattaatacaaccccttgttccatcaatggaacagttggacatccttcgcatgaagatagaatcctgattcttccttccttctagcgagggaacaaattaatagacgcccccccatgctagccaagagttggtcccaattcgtcttttc

SEQ ID NO: 265684 - DNA, 490 bp, Glycine max
agcttgcttctacagagactaggccaaatatctttctatctctatccactgtcaagtcagaagtgtgtgatgtgggggccaagttggagtatgagaggacactccacacctgagctagtgtggtcaaaccctttctgagaatcttcctaggatggccctctgagttcaagatgaacccttggccaggtatgcataatgcagcctctatctctctgtagtctgtatgcaacctgcagcatctggagtaagcggtaatgtcttcccctcagctaataccataggtgtctccaagaatgtgttgagactgtcagcatcaatcttcaccaaatgacctctgactctggactgctttggtggatgatcctcagaactgtataaatatgcatagaattctgtcaccaaagctaggtctatgctcccatcagctaaattggtgaggcatttatggaaattatgcctctcccactcaacctttaactcatctagctca

SEQ ID NO: 265685 - DNA, 382 bp, Glycine max
gtgcctcaaagaggtccatgaaagataaagcggtcgaatgtgctatgtctgctactgagtatgacagccaccgctttaggagcgctgtacaccaccagcgcttcgaggccatcaagggatggtcgtttctccgggaacgacatgtccagctcagagacgatgagtatactgatttccaagatgatatagggcgccggcggtggacatcactggttacttccatggccaagttccatccagatatagtccttgagtgttatgccaatgcttggccaacatatgacggcgtgcgcgacatgaggtcctgagtaaggggtcaacggatcccgttcgatgcatatgctatcggccatctcctgtgatatacgatattgctagaata

SEQ ID NO: 265686 - DNA, 62 bp, Glycine max
caaacgacaataactttttactcggatgtctgattgagtcccgtaatatatcgagacgctcg

SEQ ID NO: 265687 - DNA, 399 bp, Glycine max
  unsure (1)..(399): unsure at all n locations
taaatattcaatttcgagcgtttcgttatattacggaactcattcatacatccgagtaaaaagttattgtcgtttggaattgctaagaggttcaacattcaatttcgagcgtctcgatatattatggcactgaatcggacattcaaggaaaaagttattgtcgtctgaataggctcataagttcaacattcaatttttagcgtctagatatgttacgggactcaatcagacatccgagtaaaaagttattgtncattgaattggctcataagttcaacattcaatttcgagcgtctagatatattacgggactcaatcatacatacgagaaaaatgttattgtcgtttgaatttgctctgagcgttaacattcaatttcgagcgtctcgatatattact

SEQ ID NO: 265688 - DNA, 403 bp, Glycine max
gaaattatgtttacatgtttgtcaaaatcgggagagctatgtatgctcatgagagactcctcccactccaatagtaaactcgtcacaatttacttcaaataaaaaaacaataaatcaactatatatatcatatcaatttaacattttattaatatttcaaagcacataagttataagttcatccaattacaaaacataagctcttctccaacaaaaggtcatactattagaaaacacttttagagaagatgaacctgattggccgcaattgtgtacgaatggaatgcacgatctataacacattgctgtgagtgagtataccaatactctgtggaactattaagatatgataaagactatcctcaatatagaagataatcaagaccaccactctgattcattt

SEQ ID NO: 265689 - DNA, 427 bp, Glycine max
tggagatgacgcttcaatggaagataagaaagagagagtttctgatttatgatggagcatggaatagaaggaggataataagtcgaactttgagttgtgtatcacaagactatcattcatcaaaggtacaacaagtgctacacatgcttctatttatagcctacgtagcttccttgataaacctcctctaaaagcttccttgataagcccgcttgagaaacttccttgagaaactccttagagaagctctcctgataagctagagcttagctatcacacccctctaatagctatactcacccgcctgagaagccagagcttagcgcacacacccctctatatctaagctcgcctccgtgagatgataagctagaggttaactatacacatcccctataatagctaagtcaccccatgccaaatacaa

SEQ ID NO: 265690 - DNA, 394 bp, Glycine max
  unsure (1)..(394): unsure at all n locations
aatagctaacatataagtcatttttacttcctctcttttcatgcagaaataaatctttactttaaataatacatgcatgcaccatattagtttaaataagggagcttaaacgagatacttttcgcatcctcttagttgaaaatatgagaaagagagagaactgatttacaaaagtaaataatataattaaattcattcacacatatattgtaatgatagtcataaaaaataatcttttaaaaacactcaatcacaataaaggacaaanattctatagatttattttaaaatcaatgactttcattgattcaataaagggttaaatgcataaatcttagtttttaataatcgaatattattctttcatcatgaaaatgtttcatataatgcaaaa

SEQ ID NO: 265691 - DNA, 364 bp, Glycine max
tctatgcagcatgatttttatcgtacacaattgtgaggtaacctgctcgatcttcttcttccttaagggtgaagacttaacctccctaaaggaaatataatgaacaagaaaagaatattttcaaatttgaatttgaaaaaaagaaaagtttaaatttttggctctacaaaatattttctcttctatttctttgtttttcttcaatcaaataaaatataatatattgctactctatttttttgtctttattttctttccttccatccaaacttaccatatatctaataacttctcattaaattattaaagaagacagcacattggcaaacgacaagcatgcacgtgaaatgtggagcactagtat

SEQ ID NO: 265692 - DNA, 405 bp, Glycine max
aatttcgagcgtatgaatatattataagcctgaatcggacctcagtgtgaaaagttatgaccacttgaatttctcgagagcttccgttgttcaatttcgagcgtctctgtatgggatgctcccgaatcggacatccgagtgaaaagttatgaccatttgaatttctcgagagctttcgttgttcattttcgagcgcctctatatgtgatgcgcctgaatcggacctcagtgtgaaaagttattactgtatgaatttctcgagggctttcgatgtttaatttcgagcgtatcaatatattatgagcctgaatcggactccatcgtgtaaagttatgaccacttgaatttctcaagagctctccgtgtcaatttcaagcgtctcgacatattatgcgctcgaatcgg

SEQ ID NO: 265693 - DNA, 322 bp, Glycine max
tgcgcctgacatgcgcatgcgaatgtgagactatgagcatttgtatatagcttgagctgccatagttccatcgtgagcatatataattatcatgcgcttgaaccaaacgtacaagggtatgaccatgagcatttgtatatatcatgagctgcccatgttcaatcgccagcgtatgtgatggagatgcaccggacctccgcgtgagaaggtatgaccatgagcattggtatagagctagaactgttcgagttcaatcgtgtgcacatagatttggcccgcgcttgacatccacgggcgaagctattgccatgtgcatttgtat

SEQ ID NO: 265694 - DNA, 416 bp, Glycine max
aaataacataatgacagtactatagtggttttcgcttattaaattataatagggttggattaagtggcttactgttaaggaccaattctctataacctatgacaagagagtgacttctgaatcagaggaaacaacccggttttaatactaataatttcgtattctagttcgcttgttctttatttcacaaaacagacaaccccccctaatcattactattactgcaagtatattaggaacatttggtttatcattgctctttgggaaacgacctaagatcacttcctagctactgcattttcatgtttatttgattccggtacggactcgatcacatattcaactatttttgctacctaaattaacacattaatgaacaaaggcatttttctacctatataacaaagatattatca

SEQ ID NO: 265695 - DNA, 454 bp, Glycine max
attataacaaaattggctttatcatttcccaatattcatttgaattacgacgcactaaccagaatcaagccaaggctattgtgcaagcaatcaatggggcaaaacacaccaaatgattattatgatggatggctcaaattctcacaaagggaaaatcatcactttcaaattgagctttctaaactatcatgacatgtagagaaaaataaaggatttcaagtcacaaaatgtcaagaacttttattttcaaaacaaattacccatttcttgaacatatcctataattcaaagaaaaacatgcaaagtcgtacgtgcacacgatattgacccaaaatattaaactgacaatccgacgaaacttacaacatttacaaattatcacaacttacatatttacaaaaccaacaatactaccataaccaaagaacactcccgcccatacttaaacaacaca

SEQ ID NO: 265696 - DNA, 387 bp, Glycine max
tgaaaagtgaaatttataatgagataaacttgaaacatactctcacctcacacaagtccataacatcaatctaaactggctcaaactgaatttacacctaataatccaccaaatcaaaatttgactcctcaacacccaattttgccctagaaatggctcttggttcactttggtcatttgtgtttctctctagctcagcctaacctttctcacatgtactaaatgacatctcaagctattattaactcactttaacctccatttaccacagaattcagacttagcctttcaactctcaaagtctcactcttgttccactcataaacctacattctcactatctaaccttgtgttagttctaccccttatctctaacagatttccaac

SEQ ID NO: 265697 - DNA, 310 bp, Glycine max
  unsure (1)..(310): unsure at all n locations
gagcttgttttcctgttttgatcttntatgaagattcgtgagtttttgagtgattgtgaaattcctataggtggaggagacatcccgaatccttcgttagcaaacaatttctcttaattcctcttcttcattgtataaggagcttccttgctatggaaggctaaaccctaagttggggattcttgtgagtaattgatgtaaactctttccctatctaattaaaggtgtgttatgggttcattggttctatcaacaccntattattgcatgcttatggcttgatcacccatatgtgtgtactgtcagggga

SEQ ID NO: 265698 - DNA, 401 bp, Glycine max
  unsure (1)..(401): unsure at all n locations
tggcgaaagcccttggtattngaacctgaagaatatgtttgagtacatctaaagaaagatagatttccttcacaaaggaaatctatactccaacctaagggtgatggtactttcaaggtctttgaggaggattaatgacaatacctacaagattgacttgccaagtgagtatggagtgagttctagtttcaatggtgttgatctttcttcttgtgatatagatgttttggatgcaaatttgagtatgaattattgtcaagaaggaggggatgataaagggatatccaaagagcataaggacctagaagcacttcatgagttgaatggtccaatgacaaggtctaaagccaagcttctacaagaagagagggccaagataatcaaggatggaatactcatca

SEQ ID NO: 265699 - DNA, 457 bp, Glycine max
  unsure (1)..(457): unsure at all n locations
tctaaggaagntttctcaagaaagcttctcatggatgtctcctattctataaatagaagcatgtgtaacacttgttttaactttgatgaatgaaagtcttatgagatacacttcaaagttccacttctttccctcttttattccttcaatttcgtgctccccccttctctctttcttttcctccattaaagcatcctcttcaagcttcttatccaaggcaattcttggtggtgaagctccttcttccatggcttattccttaatggatggcgcctcctctcacctcttttcctttgtcttccgctgcatctccatggtggaaaatcaccatttaaggaccccattgaagctcaaagatccagcctccatagaagctccacaagcaagcttccatcacaactgatatggcttcctgaagtaacataacttcatcatacgtaacacatcttcacaacac

SEQ ID NO: 265700 - DNA, 488 bp, Glycine max
  unsure (1)..(488): unsure at all n locations
tgcaagcttatcagcaatatatntaaataaatattatataatactgtttataaagnatgtctagaggctggtggtacaagaagctaattcctctaaagagtttgagtatgattagttgccgaggaaaaaatatccagattctcacatcataatacatctaatcctccattagagatacacataaatctcgttctggtttctgtgtagcatttatcgatgttttatttcagtaccacaaaaaaaaaaaaaaaaccattatttccaccctctcgtgaaaacaaaaagaggaatagaatttaaaaaacatgggagcaaaggagtataggatgtagaaaacaactttcttctctttattngannatttaatttaatgtcatacaaataaagagaaccaacgtgttaaagaaatttcacaatccaatgttcattggtaaccagtaacagacattttagccgggaataagaagagtgactggaaattaaatgca

SEQ ID NO: 265701 - DNA, 539 bp, Glycine max
tactaacttattcttttttaatattatatatattaataaaacagtaattttgatctctttccgacattacatactaacttctcgtgccattcctgcgaatgcaaacattaggatattttgttttcaccaagaaatgctacccttaaaacaaaaatggcatacaaccccctccaataaatacaaacatcaatgtaaatttatagcaagcttatgcgcatacttctttacgaacgttcacttgcacaagacattcttataactaagaaaaatgcacccatatacaatcaaggcaccttcgttacctagattatttacatgtacttccaaggtgtatttgttacctacatcacacacatttactttgctaaattcacatacatgcatactctaagcactttggctatcaaaaattgcatacgtgcacatcttggtatttctaatacctatacatacacaaacttcatgatgaatcttgactatctacacaataaggtgctacatttcatgactttttaaagtttttttctttactacctaaa

SEQ ID NO: 265702 - DNA, 442 bp, Glycine max
  unsure (1)..(442): unsure at all n locations
tgcagcttaagaataagatcaagattatgattcttgattaagattcaagattcaagaatcaagagaagacttaatcaagataagtatgaaaagaattnttcatgatattgagtagcacatggatttttcacaaaacatgtttaccaaagagtttttactctctagtaatcgatttccagattgctgtaatcgattaccagtagcaaaattgttttgaaacaaggttcaaattgaatttacaacgttccaattaatctcaaaaagctgtaatcgattacaatgttttggtaatcaattaccagtacctttgaacgttgaaattcanattcaaatgtgaagagtcacatcctttcacataaaagccttgtgtaatcgattacactaatcttggcatcgattactagtgattgttatgaataatcacaagatgaactcttcaata

SEQ ID NO: 265703 - DNA, 292 bp, Glycine max
tcccagatccgatcatggacagacttggcaactgccttctttttgcagtaccagtacaatacggacatggctcccgatcggaaccagccttatggtatgactaaacgagagcatgagtccattatagaatatgcccagagatggagagatctcgcagcccaagtcgtaccgcccatgatggagagggaatcgatcactatcatgcgacatacgttacccaacgtctactatcaatagctgataggatacatgctagttaacttcgcggctctcgtcttcgacagacaaagta

SEQ ID NO: 265704 - DNA, 409 bp, Glycine max
atcttaagtcacctgaggcatgcagcttgtaggtaaagtctacgattgtctcatgctcatgcaacaattggtagcctggctatacgagacatcttgccaaacaaagtcaggttagccataactcgcctgtgctttttcttccatgctatatgtagcaaagtcattgatcttgtcaagtctgatgagttggaaaatgatgtcgtaattatactgtgccagttggagatgtattttccccttgctttctttgacatcatgattcacttgattgtgcatctagtaagagaaatcaaatgttgtggtcctttctatctatggtggatgtacctggttgagtgatacatgaagatcttaaaagggtatacatagaatctatatctgtccaaagaatctattcttgagaggtaca

SEQ ID NO: 265705 - DNA, 284 bp, Glycine max
tcactatacaccactcaagcttcggaatactccactgagagaacggctttatggcaatgttgtgtgtgctgttcgcacaacaagcactgactcatagcttgctcatgggaagctcccagatactaaccttttggtgcgcgacgcgagacaatacgtctcggaggagtattcgagatccacaacggcattggtcgtagtggataggcagatgcagcttgatttcggcgggaaactaaccttaactcaatggactacggactgaatcactatccgtgcatatcatg

SEQ ID NO: 265706 - DNA, 486 bp, Glycine max
  unsure (1)..(486): unsure at all n locations
agcttgtcgctggagctggcccatcaattgccctatctctntcagattggtgattcctaagctcttgaccttgactatatagaacctcttttaaagcgacggcgcctgactcgatcccatgttttactaaagtgaaacaaaacccagtgcgaatcataactctgacatctatcatgggtggaatggatgaatgcatgaagaaatgcatatggcacagatgcattttatgaatatgggagcccagggaattgtccccttcttagatacaacattcgggcagcatggtgcccgacgtatgcatttaagaaggtgacacagaccctccgtcggtttgacaaagtgaggggatcaagacgcaatccgtgcatgatgcagatgcaaaaggcacaacacggggatgtacatagtacaacaatatccataaataattataagcaaaggcgtacatgacatttaaagactacatgcatggcagtgttaaaaatg

SEQ ID NO: 265707 - DNA, 443 bp, Glycine max
  unsure (1)..(443): unsure at all n locations
tcttgagcttaatgaggtccttcattggtgattntacaccatggagatgcagcggaagataaaggagaagaggtgagaggaggcgccatccactatggaatatgccatataagaaggagcttcacaaccaagagagtgccttggataagaagcttatagaggaagcttcaatggaggaaaagaaagagagagagagagagagagagagagagagaaagggagcacgaaattgaaggaggaaaagagggagagaagttgaactttgaagtgtgtatcataagactctcattcatcaaagttacaacaagtgttacacatgcttctatttatagcctatgtagcttccttgagaagcttccttgagaaacttccttgagaagcttccttgagaagctagagcttatctacacacacctctctaataactaagctcacctccttga

SEQ ID NO: 265708 - DNA, 450 bp, Glycine max
agcttatccccataagagtgcagaacagcttgcgagtcatcattgattataagaggctaatccaggtaaccaaaaaagatcattttcccctgccattcatagatcaaatgcttgagcgcttggcaagtatgtctcattacaatttttttatggtgtttctggttatttacaaattcatattgctcctgaggatcaagaaaacaccacattcacctatccctttggcatttttgtctataagaggatgccctttggcctatgcaacgcctctggtaccttccaacggtgtatgcttagcattttcaatgatcttttagagagttgcatatatgtgtgtatggatgattttactgtatatggatcctcttcttatgcatgttcggatagtctacataaagttcttaatagatgcattgaaacttaccatgtgctgattttgaaaaatgtcac

SEQ ID NO: 265709 - DNA, 477 bp, Glycine max
  unsure (1)..(477): unsure at all n locations
ttcaaatctattgtaagtccatgcccatataagatatttatattatctggacaagataagatatgattggatgaaataaaatctagatgaaataaaatctggataagataagattttataaaataaaattgtttgctctcttcaagtccaaaccgaattctggattctagcccaattgcttaatattctcttgaaattaaatgtaaaacacaaaattattctagtttgcccaaatgataaaactgcataattaatttgacaattaaggctaatcaataattaaaatggtgacaaaaagggtttagaaataggagataataatgacacatcactctgtttcanatgttagtttgtggattgatcaaccatgtgtctgtcttgtagttttctttgtcattggaaaatgctttgaaaactgagttttcagaatgttaactaatgagtgtctctctatggatagagagtatccattatctc

SEQ ID NO: 265710 - DNA, 468 bp, Glycine max
  unsure (1)..(468): unsure at all n locations
agcttntaacccccttctaaatgatatgttctgaatgcagaagaagaagcaataatcaatttaataatgttctttaaacatgcaagacaaaatttattgcaataataaatgagataaggaaagagagaaatgccaacttgatttatactggttcgaccacttcccgtgcctacgtccagtccttaagcaacccacttgagatttttcactctctttgtaaaaatcctattacaaagtctgaaccacacagggacaatccttcccttgtgttcagcaattcttacaacttaagagaccctcggtcctttaatcaatctctttgaataagaagaagaagaagaattctctctttatgagaaagatattacaattgaagttcctggatgaactcttaatagaattacaagtgtntgcccaagagtttttagagagcatttgacaatgaagttctcttagaatatctctctc

SEQ ID NO: 265711 - DNA, 397 bp, Glycine max
  unsure (1)..(397): unsure at all n locations
ctttaagatgtgctcatgtgtatatacaacatctatatattggtagtagttcaggctcacgtaaccacaagctgcaataatatgtgaacatggatagtgaagcgcataataccttccgcattgacaataatgaccgttcaagttaactgcccacttttgtctgccacgctgcgtaataggattgaaagtctcctctacttcaaaccttgtggagtggatgtcatacacgcgaacgatgtgcgaacaagcttgttcttgattttntctaagttctttaacaagctatgaacaatatacttggccttcatttaactgtctctgggcttggcggccacactcaacatagtactttcgacacctactgtacgttgatttgaccaaggctgttatgggaatg

SEQ ID NO: 265712 - DNA, 482 bp, Glycine max
  unsure (1)..(482): unsure at all n locations
agcttcaaatcttaggtgctcggcttatctatggaagctaagagtcacgtgtaattggacgaactcgaagtgctnaaaaataacaatttgaggaagcagcagcactctgaggcacagtgcatgtggcccgtaatataaaaccatcttgcaaggtcccaactctaccattcgtttaagtaaggtttcaatacgagtctgtagattgaagagtttttatttttcttttgaaaattattgtatttcatggttgtgtttctatcattgttatgagttatagccagataggaataggcagaagctatcgaagaaatgtgcagtttttcctgttatctgcatggaccttgcaatactatgcccaacagaggtcctataaatgagggccttatcaacctactaaatacttgcaaatattcaaatattagttttgatttatggcttgttatcattagagagttatttatttgaatataattttttatatt

SEQ ID NO: 265713 - DNA, 470 bp, Glycine max
tacaccaatgcttatccaccatggacaagattacttcttatgtaactccaataaaccagaacaactcaaatgtcttcaaaaaggatagttcacaaacacttaatgagcataatttcaactcaccaaatcaaatagcttcaataaaagccataatgggacaaatcaaatcattatcaataacaagaaagaaagaaactagggcaaaaataagcatagtagctaaagatgacaatgagtgtgaaaggatcctttcatgtaattttagtatttatctatctcctaataaatattagataggttccaccaatttattgtctatatagagggagatatacacaatttgaacatgaccatgtgatgtaaaatttgagatgagaggaatcattccttgtttgatattgatgagaaattgatggaaactctccttatgatgattaagtagtgtgagaagatgacaatataatgcttaa

SEQ ID NO: 265714 - DNA, 423 bp, Glycine max
  unsure (1)..(423): unsure at all n locations
gaatgaacgagcgttcgaaagaaataatgctccggtgggatgcaactatgacacatagcggcagcttttacccgccactatgttaaaataattatttcaaaatataaatgtcacacaactctcacgttttacactgttaattataaaaggaccactaagatatctttcgaacacattatggaccaacctcgaaaatttaaaacttaatgtatcaaaatagaaaaatactatatcattaacgaccaatagtgacatttagccaaaatgaacatacactacctcacaacttttggcatttgtgctccggcgacattctacattacatcttgctggttcatagaaccatgagtacgcatgatatatgatggttagaataagnggtcactctcgtcatatctggaaagagcatatgaaatgtcttac

SEQ ID NO: 265715 - DNA, 385 bp, Glycine max
  unsure (1)..(385): unsure at all n locations
gagaaagagagaagggggagcaccaaattgaaagaagacaaagggagagaagttgaactttgagttgtgtctcacaagactctcattcatcaaagttacaacaagtgttacacatgcttctatttatagactaagtagctctcttgagaagctttcttgagaaaacttccttgagaagctagagcttagctacacacacccctctcataactaagctcacctccttgagaagctgtcttaagacgattcctaaagaagctagagcttatctacacatacctctcttatagctaagctcacctccttgagatgagaagctaatacttagctacacaccccctataatagctaagctcacccncatgacacaaaacatgaaaataca

SEQ ID NO: 265716 - DNA, 406 bp, Glycine max
  unsure (1)..(406): unsure at all n locations
tatagaanactaaataaacattttcaacatcttgaatgataatgaggatctcaagaaagatcatcaagttcacttatttgattntgtcctggaatccactttgcctggtagtgtacaagatgcctctagttgtgaggaagtcaaggcactatcggacaaaaggtaaggtatctagtggatgcaaaactcttcttaaggattttcatgatttggaagagaaggtaaaatccttaaccacaactcttgaagatttagaagaagggcgcaaggaaatgcttaaacaaaaactcttcaaaaagaatacaccttcgctaatgatgaattggataaactggaaaaaacaactcaaatctctggacgaaaataacattataaaaaattgtcttctgattcaaattgtaagcat

SEQ ID NO: 265717 - DNA, 186 bp, Glycine max
actacctaatgctgtgatgactattttctggcagtttcgactgccgtccctaccttgtgtcactctctaattgagcactcaatgtctttagagctatcagattctagactcacgcgcttagagcgctttcttgctcattctgcttcttaaatatgacattccacacgatattttggtcttatcgtg

SEQ ID NO: 265718 - DNA, 434 bp, Glycine max
  unsure (1)..(434): unsure at all n locations
tgctaaaccaggggaggcgacaatatctcgcatactatttgtggggggatactattggacgggcttgacttttcggggtccacatggaccacatttntagcaactacaaaccctgtcaaaactatattactaacacaaacggcacactagtgtatatttgcagggaaggcagtattcctaacgaccgatacaacttgcctgagatgtacatacgtattcatataggctactacctgtcgctaaaatatgatcaaaactaacagctacaaagctacctatgagatcgcttcacacatgacgcatataacctgtagatgtacttgaggcttgaatgagcccaacatgcatcacttgacatccataccttccgagacttggctttgaaagagatgttgcactcatcacactctttcatgctgattcggtgataacca

SEQ ID NO: 265719 - DNA, 465 bp, Glycine max
  unsure (1)..(465): unsure at all n locations
cccatcacatgtggtactaggtggcggtcgggcgatggtgcacaacaagttttccacattcacaaatcgcgcataaacccaccatcccctgttgcccacctccaactgagctcacgtactcccacgtagcccatctcctcgtttctctcaacaccgggtccccatcaatcctcccaagcttccccaacatccaagtaattcaacattcaaacaacacaaactatcacagccaagaaaatatggcaaaggcagaaaactatgcccaaaacaccaaccaaaatcacagcttttctcacttaaagaccccagtacatttccttcgttccaattcgttaaccggtggatcgactcanaatttttactggaagtctctagtacataagcctacatttngaccgcttggatctgctagaatacatncagaactcattctgcactactctttccacaaccagcataacatgg

SEQ ID NO: 265720 - DNA, 456 bp, Glycine max
  unsure (1)..(456): unsure at all n locations
taacaaaaggcatgcgaagtgggtggaattcctatagctattcccttatgttatcaaacataaaaagggaaaaggtaatattgtagccgatgctctttctcggcgtcatgcattactttctatgcttgaaacaaaattgattggtcttgaatgtttgaaaagcatgtatgaaaatgatgaaacttttggagaaatttttaaaaattgtgaaaaattttcagaaaatggtttctttagacatgaaggctttcttttcaaagaaaacaaattgtgtgtgcctaaatgttctactagaaatttgcttgtttgtgaagcacatgaaggaggtttaatggggcattttggggtccaaaagactctatanacattacaagaacatttttatcggcctcatatgataaaggatgtgcagaaattctgtgaacattntgcattgtatgtaaaaggcaaagtcta

SEQ ID NO: 265721 - DNA, 480 bp, Glycine max
ccgagaaggaatccacggaattatttctttcctcctcacaagactggatagcggtttctaatgaatcctctgcggcctccacatacggcataaaggatgggcagctcaccaagatgtcttcctcgcctgatatgatgaccagatgcccatccactacgaatttcaacttttggtggagtgtagaggaaacaactcccactgagtggatccacggacgccccaacagacagctgtagggggggttaatgtccattatttggaaggtaacttggcatgtgtgagggcctatctgtactgagagatcgatctctcccctaacctctcggcgggtgccgtcgaatgcacgaaccaccattgaactcggctttaagtgggaggcattgaatggtaatttctccaaagtgctcttatgcctcacgcttaaactggaaccattatcgatgagcactttggctacgatatgtgccatacacttgactg

SEQ ID NO: 265722 - DNA, 488 bp, Glycine max
agcttgtctcagcgtttatgcgagactgttatcttcatgtagctatcatcgccaagtaccaagaagagttatgtctagccacggcccacgagcatagaatcgcggatgagtatgctcaagtatatgcggaaaaagaggctagaggaagggtgatcgactctttacaccaagaggcaaccatatggatggaccggtttgctcttaccttgaacgggagtcaagaacttccccgcttgttagccaatgccaaggcgatggcagacacctaatccgcccccgaagagattcatgggcttctcggctattgtcagcatatgatagacttaatggcccacataattagaaatcgttaggaaacttgtatggtctctcagaccttgactagatacgacttccttcttgaaataaaatgagttggtcccatgtttctactccaaaaagcttgagcaaatcaagtcactcccgcatcttatctctagcatgcattg

SEQ ID NO: 265723 - DNA, 474 bp, Glycine max
  unsure (1)..(474): unsure at all n locations
atggggtacccatcatatgtggtactatgtggcgggcgggcgatggtgcacaacatggtttccacatccacaatgcgcgcataaacncaccataccctgttgcccacctgcaactgagctcacgtactcccacgtagcccatatactcgtttctctcaataccgggcccgcatcaatcctcccaagcttccacaacatccaagcaaaacaacatacaaacagcacaagctatcacagccaagcaaaacagagcaaggcagagaactctgctcaacacaccaactaaaatcacagcttttctcacttatagaccccagtaacaattccttcgatccaattcactaaccgttggatcgactccaanattttactggaagtctatagtgcacaagcaaacatccagaactcactctgcactgctctttcacacacagaaatacatagcattttctgcacttgtgcaaatcatgctga

SEQ ID NO: 265724 - DNA, 447 bp, Glycine max
  unsure (1)..(447): unsure at all n locations
ttactgtattggtcttcactggtgaaaggatcgatgtgtagttctataagatgcaaatttaatcatcccgcttggacggatgagaaactggggcatatgaagagggtgagaatgaatgacaaacccatgttgttgactgccattcctatacatgcaagttttccaccaacccaacaatgtcattactcagccaataacaaaccttctccttacccaccacccatttatccacaaaggccatgccttaatcaacaacaaaacctgtctactgcacttccaatgacgttcaccacctttagcacataccataacaccaaccatagaaataattgtgcatcgaataagcctgttgaattcaccccaattccggtatcctatgctgacttgctcccatatctacgggataatncaatggtagccataaccacaaccaagttcatcaacctc

SEQ ID NO: 265725 - DNA, 372 bp, Glycine max
cgagaggctagcttatggctggagtaagctcacgggcctatatagatgcatgcttacctacgtgtttgtacgattaaataatttaaggcaagaccacttagtcggttccccagggttattacagttatagatgacggcctaccataattaaactgagatacccggtgctcatactctagtaataggggcaaacaccgtaattcgattagcaatgatcaaaacatcatatctgaatgataaacacattatatccagatgaaattatggtctgacaaggataaatacgaaagacaataataaaatactataactaacattttaaaaaatattacttctagtgacaattactaataactacctatttactgaaca

SEQ ID NO: 265726 - DNA, 254 bp, Glycine max
atgcataaggacacccactacataacgtttatccgacagcgtgttatactgtcgacacttctgcttatggactgtatcaaaatatgccagttgacatttgacatacttaattatgaaacgtatacaatagactctggagaccagaacatgtatgatttgtacaagagtacaagcctacatcggttattagcattcatgcccgcaaaaagatgtgtgtgaaagaggactattgataatatttgtatataaaaaat

SEQ ID NO: 265727 - DNA, 476 bp, Glycine max
  unsure (1)..(476): unsure at all n locations
agcttagagcctttcatgtctaagtctgcttatcctgcaccanggtcagcttctgaatatgcagagcttgcaggatgttgtccagcaatgactagttatgagcatggaggagtttctgcagaaggtggcctggccaagagtccaaccttcttctttgggagggggtgaggcctttgcagcccaggagcctcagtcggaccaagaggatgacattcgagaggcctcaaagcccattccatctgagcctttcattgtggagactagtccagccattccacaggaggatgctgcagcagttaccccacaggtgactccgcaacctccaccagagtctaccacttcagcgttggatctatcatcttcttagcttgagtcatctgcaccagtgccagacctgcctctttctcgggattcaccatcaagcacttctgcacttggattgaatgagcatgccatggactctgcacaggatcatt

SEQ ID NO: 265728 - DNA, 442 bp, Glycine max
tctctgaggcaagataggctgagagaagtaatgattattgcgtcacctggccgctcctagaataggacgactgttgatcactatgctgatgactgtgggaagccacatggtagaacatcaattattgtcgcataagaatctaacacacaccaatgacgtcattattaaatggtgaccgaattcgcagggttgctagtaaacctactggttcaccctctaccgtgaagagttctggtgaccggtctcaatatacagattgaagcactgatggtttttctgggaatggaactgattcttcttttgaggaggctcaaaagtcaagcatggctgctccaacagagtattcatccttggacaatttgctatcttcacttcatttggtggcacatgaacacctgagagaatacaacttcctgaatcctattgtaagcttcctctctga

SEQ ID NO: 265729 - DNA, 200 bp, Glycine max
gcagctaaaaaacacacgcaaagaacacacacgcacacgcacacacacacacacacacacacatacacaacctcacacccacacacacacacacacacacacaaggggagaagatggacggctggggaccacaattcgagaaaaagccaaagaaagcgcagacctggactagccacgagaggaaagaaaccatatggcac

SEQ ID NO: 265730 - DNA, 469 bp, Glycine max
  unsure (1)..(469): unsure at all n locations
gctgctgatattatgctcatttacctattcaacaatccctttctgaacttgatcggcttcactaatgacactgcttgtcttaacctgaaaagaaattactttaacaaagaccacaaataattatcatcttctaacaaattgcattgtaaagagtacaaaatgagatattttcaacatatgtaccaaaaaagcaggtgcattaataaacatttctataggaattaataagttcaaggcatatatttcaatctcttaacaatttagtgtaagtaaccaatatttctcaaataattaattaaaccctttggttattgtctttgaacacaccattaaccacccgtagagcctgcaatncagtgttacttgtttctttcatcagagcacagtttagtgataagaataattgagggtaggctagtaacacataataatgatgctatagcataaacgaagaatatgataagtaaga

SEQ ID NO: 265731 - DNA, 418 bp, Glycine max
tgacactatttatactcagcttggacaaccgacatatgtataatatttatcttgaggcactttagaattatatcatcggaggcgtagatatatactctatatttgacgcattataaacgaaaatcaaagaaggaaagggttcaagttattaataaacctgaggagaaagcacctggttagtacggattataagagtagttgtagaaatgagaaataaaaagtgtgggaagatcatggttgagtaattaactaaaccggccatcacaaatttatatgagagtggtttgaaatatgcagactgcaacaaattagtgggacttaatttgaaagacggaagaaggaaacaattgtcgtctgtttgtacactactccaactcatgatttgggacatgtctatttagatactacttaataacat

SEQ ID NO: 265732 - DNA, 470 bp, Glycine max
  unsure (1)..(470): unsure at all n locations
ggaccttatagcgactgcagcatgcaacttgcacattttacctatgcagtttataaaagcgnccctgtctagggaccgaatatctcactctttccagaagtgtaaccttaattcatctatatatataaaaaatagtacatgtttcacaacaaagtaaatttggaaattctataattggtttaactaattaaaaatattncaggactgattcttaaatatttaaatttttctattattaattgaagaaattccaataaaaaatttaataaattaagcattaattaataattaaagaaaatgaagaaccatatttcagcaaccatcatattaaacatattgacttaattcaatataataatttagacgactcatattaaaaaattgaacaatgtcataaatttatgataaaatacatattagtccccttacaatatgtcgaattagtcttaactattataaaaccttatatt

SEQ ID NO: 265733 - DNA, 434 bp, Glycine max
tgctgtcaatttggcaagcaaattagaatactcttttcatatacatcatggagagcatcaagaaagttgcaattgattcacacatatgttgggggcctcaaataacaccttcattgaaaggcaatatgttttacactatatttattgatgacttcaccataatgtggtggatttttttcttcaagttcaaatcagaggtggctgaaattttttggaagttcaaagtcaaggtaaagaatgaaagcggtctcaagattcaaaatttatggtctaacaatggcaccgagtacacatctgcaaaaattaatcaattttgtgaggattccataattgaacatcaacttaccagtccctataccccacaacaatatgggggtagtgagaggagaaatagatatatcttggagatgacgagatgcatgttgtatgagaag

SEQ ID NO: 265734 - DNA, 477 bp, Glycine max
  unsure (1)..(477): unsure at all n locations
agcttctcgatatattatgcgcctgaatttgtctttcgtgtgacaagntatgaccattggaatttcgcgagagcttccgatgttcaatttcgagcgtctcgatatattatgcacctgaatcggacttccgcatgacaagttatgagcattttagtttctcgtgagcttccattgttcattttccagcttctcgatatattatgcggctgaatcggacatccgtgtgatgaagtatgacacatttagtttctcgagagcttccgctgttgaatttccagcttctcgatatattatgcgcctgaatcggacttccgtgtgataagttatgaccatttgaatttctcgagagctatgcgtgttcaatttccagcatcttgatatattatgcgcctgaatcgtactttcttgagacaagtatgaccatatgaatatcttgagagcttccgtgtttaattcagagcatctcgttaatgatgc

SEQ ID NO: 265735 - DNA, 332 bp, Glycine max
tctcgatatattatgcgcccgaatcggacctccgtgtgttaatttatgaccataagagcaactcgagagcatgcggtgttcaattccaagcttctctatatattatgcgccagaatcggacctccgcgtgataagcgatgactattcgaatttttcgagagcttccggcattcaatttcaagcttctcgatatattatgccccggaatgggaccctcgtgtgataacatatgaccatgtgaattacttatagctttcgttgtacaatttcgaacgtctcgatatattaagcgccttatacggacctccgggggaaaggtatgaccattggaa

SEQ ID NO: 265736 - DNA, 333 bp, Glycine max
gcggaggcttggcattaccgaccaaagcctagcacttgaggcactctcttacacggatgcaacaatcattctgcatagtgaggccacaccaccctgaaacagtcattggcacgtgctccaaaagacccctcatgcatttgtaccatcattcgctcatcctctctggcatccacacgtctaagcaaaactatatcatattacctggtgtacaagatatctgcacttaagaaaaagctggctgccaacctgtgcaacgttctttagatcccaatagaacatgcacattctcgcctttctatgcttttacggaccggcccatattggaacccattc

SEQ ID NO: 265737 - DNA, 415 bp, Glycine max
tgcgttgagccttgatgctaactcaccataaaccttgaccatgttttaatgtctattcttaccctcggtagctgataacaacagaaggataatttcctatcaaagaacaaatgaaggaacatttccaatccatgtgaagcacataaacaaagagagaacgaaattttccgatcataggaaaaaagagaggaaaggagattcccaatcaaagagtgggagaaagtgataatataagaaagaaaattcccaaccaaagagtgggataaagtaaaaggaatgaaagaaagctcctgatcatggatcgatagaaatcatacgacatgcgcagaaaggtcttggaccggacaatatctgtacaatacagaattgtaccatatgaacaaaaataaatggaaggaaaccacgacctgaaagt

SEQ ID NO: 265738 - DNA, 499 bp, Glycine max
  unsure (1)..(499): unsure at all n locations
gtcacctgccgcatgcaagctttttgatcatcatcaaaacacctattatcttctacaatcntcccacttttgatgatgacaatccctgtaatcaagacaaaccatatacaagatgattgctcgttcacacagcccttactccccctatcttttggcatgtatgcctatgcctaactttaatgagtttaattgatttctaacccaagttctctcaagttctctccccctttggcaacatcataaagaactaaacaacacaatctaaatccaaacagagccaaacattaaaccaaaataaatccatacattgtcataaccaaccaaagcaaagtccagaaatataataatagtgcaagagtatgataactagagccacaaaatagccaaatactcgacgataaaacaaagtactaataatacttaattactaataagacttagtcataataataataacaattaatctaagaggatgatggatgcggtggtggtggatcaa

SEQ ID NO: 265739 - DNA, 472 bp, Glycine max
tgttgtggacatgatttcccttggagtgagttcctgcctatttattctcatctggtcaaccatattagatcatttgtctctatgtattggaattttcgaattctgcatgttataagagagggtaaagcttgtgcgaatcttcttgctaggaatggatcttcttcttttgaaaaatagttattttccataaatgtccctttttcatcaatgtggctttgttgtcagatgtttgtgtcactcttcatgtaaaggaatagttccacttgtagttatttttctgaatgataaataaaaatacaaacatttctcttatcaaaaattcaaaattactttattacattattatgaaagactattccttcttctaaacatatatctcgtacctctaatatcaataacaataactgtcttttcttctgtgttttggcatgcattatttttaagcaatcttcttaaacatataatactaaca

SEQ ID NO: 265740 - DNA, 442 bp, Glycine max
  unsure (1)..(442): unsure at all n locations
cttccttgagaagctagagcttatctactcacacccctttatttatatatctcacctccttgagaagctttcttgagaagattcctaaagaagctagagcttagctatacacacctctttaatagcttagctcacctccctgagaggagaagctcgagctcagcttcccacaccctctctaatagctaagctcacctccttgagataagaagctagagcttatctacacatcccctataatagntaagctcactcgcatgtcaaaatacatgtaaatacatataaagttcatacctacaagactatctcaaaatgcgctgaaatacaaggctgaaaccctatactattagaatgaccataatacacgcccacaaagaatggaaacttattattatatttacaagaagagtggaccgaccttatccatggcgtaaaaatttac

SEQ ID NO: 265741 - DNA, 348 bp, Glycine max
  unsure (1)..(348): unsure at all n locations
aatgaataaaaaaaaagaaaaaaaaaaaaaaatgtgctgctgcaaccaaaaacaactnacacaagaaaagacgacagaaagttcttccaaagaaacgtaagaaaggccagcgaaaaaagagggcgaagaaagacaacacaggattggctgggcggcggaacagccacatccaacccagcacctgggtcgaggaaactgcaccaggaaatccttccaaccaagacacaaggagacccccccgtcccttgaaaaccagggagaagaccaaagaagcagcgtaaccctgaaaccgggaaggagaaaaaccaaagaagagggggagcctcctcctggaagggaaaaaagaaa

SEQ ID NO: 265742 - DNA, 472 bp, Glycine max
  unsure (1)..(472): unsure at all n locations
agcttgcaaaaactataaatagcgtcttatacacaatatntgtacactcaattttcattctctattttccaaattcaatctcagttaatttatttttgagaagaggatccaaatcaatttgatcgaaaaagttatataaattatttacaaaattacaatatgcctccttcatcccaaaattcacaaaatcgtcctctgtttttttgcctccttttttaccaccaccattaccaaattattttatgtcaaacacttaaaccccttttaccattaattctcagagttcgcaaaaatttcattcaattcaaacaaacaatcctatgatggtttcaaatgataacgttggttcgcaatttccataattttctacccatattgggctatacgagatcgtcgttgatgaaataagaggatcttcgacaaatagaaagctctgagtcgcctctgcaattaaagaagatacacacctcat

SEQ ID NO: 265743 - DNA, 419 bp, Glycine max
tctcaaagatgtacttgatcgggtccatcttggttattttccaggtggtatggctcaccatgtactatcttaaacggtgggatgcccacactatagcacatgatctttccagcatggagtattcatctcacagaccgtgaacttcttactcaagtagtagatggctcgctcccttttaccggacctgtcatgttgccccatcatgcatcccattaactcgtccaaaatcgtcatgtacaagatgataggtttcctgggcaccggtggcataagcatgggaggtgtcatgaggcacttgttgatctttccaacacctctctcagccccgttcaatggctggattgttcttgctatgaactgaacagggctacagaaatggcagctggatataaactgcaatgatttcaatgcccaagaaa

SEQ ID NO: 265744 - DNA, 412 bp, Glycine max
cttctctctcagagaggctctctaactttctagctttcttactctaagaagtggattcactcttgtcttggatcgactcactctacggtggctcactcaagcttgaagatagagacttcccaaactatatatctcaaaaatcctcccaactacttcaaaaatttcctctgtactattaacccactctaataatattatttctaagctatggataacactactcaatcgtcaactatttctgtccctatcttcaatggcgaaaattatgatttctggcgtgttaaaatggaaacatatttttcatctcaagatgtatgggacataatagaagatagcttcaccattcccgcggatacttcagttcttaatgcatctcaagacaaagagttgaagaaaataaacagaaaattca

SEQ ID NO: 265745 - DNA, 422 bp, Glycine max
  unsure (1)..(422): unsure at all n locations
tgatgtcattcataacactatgtagacctaaatgttttctatacatgcatcgtttatgttattgtattcattatgcgatataattngttgtaacccgttactaaccaattaatattatcaagtactcgtttggttaaacaaggaaattgttggtccaacaaaaatcatttacgtgtgcagcatacatcattgtcataattgacaacacataatgacatgcatgcgtattacagtttgagcgcgacaacacattggctgacttcagtacacattctgaaactagcagtcgctcgacaacaacattggctgacttgactacacattagcgacaacacattggctgactngactacacatttacgcgtgtctatttttttgtaaacaaagttaaacaaatgctcggacacaaccatctatatata

SEQ ID NO: 265746 - DNA, 489 bp, Glycine max
  unsure (1)..(489): unsure at all n locations
agcttcataccacagcaacacataatctatgtgtccaaaacccctcaatttaatggattttctaggcttgagaagtgaaatttataatgaggtaaatttgaagcaaactctcacctcacacaagtccataacatcaatctaaacttgctcaaactggatttacacctaaaattccaccgaatcaaaatttgacttctcaacacccaattttgccctagaaatggctctttgttcactttggtcatttgtttttctctctagcacagtccaagctttctcccaagtcctaaatgacatttcaagctagtattaactcactttaacctccatttaccacagaattcagacttagccttccaactctcaaagcctcactctttttccactcataacaccacattctcactttccaaccctagggtaactctatatttcatctctatacagtttccatgggcaatntcagcatacaaacatcacatacatcat

SEQ ID NO: 265747 - DNA, 473 bp, Glycine max
  unsure (1)..(473): unsure at all n locations
tacatcagaatttagtaatgacccactaacctataattattataacttaatgccattaacctagggaagtaaaagaacttaatggttgagtgtaactgaaattgtggcaaccaaaagtctgatgcctgngttgccaattgggcccttattacaacttgaactaaacctaactaaagcctttgtagttgattaacccaaaacatatttttggtcagccaactttacaaggattaggccattatttatacaaactgaacactctaaaattgagacaaagtggtgccatttagtcctcctacatttgggccatgatacaactcacaaccttggacttttctccttgaaacttgggcttgtattcaaatagtatggtcaacacttgttgagacgctcgaaattgaacaacggatgccctcgagaaattcacatggtcataacctttcactcggatatgcgaattatgcgcataatat

SEQ ID NO: 265748 - DNA, 431 bp, Glycine max
tcgcttatttattctcaccgacgataggatcatttcttgtatgattagaggataatttaattattcggcttggacaaatgaaaataaaactgtggcaagtgaaaagggtgataatcagggagaaacccatgctgtgactgccattcctattctacctagtttgccaccaacccatacaatgtcattactcagccaataacaaactttctctttacccaccacccagttattcacataggccatccctaaattaaccacaaagcctgtttatctgactttcaatgacgaacaccacctttagcacaaactcaaaacaccaaccaagatatgtattttgcatcgagaaagcctgcagaattcaccccaatttcagtgtgctatgctgacttgcttccatatctacttgataattcaatgttagccataacccc

SEQ ID NO: 265749 - DNA, 486 bp, Glycine max
gtcacctgctgctgcagcttttgcgtaccgttttgtgcttattaatctcaaaaacatatccctcttatttctagttatgttgaattctctagttcctgaatgtacaaccttccaattgttgctctttcccctatttcttttctgcaaaaaagaatatcaatatcagagaaaacatggatgatagtctaagaaaatcaatatcatagaaaacatggatgatatcacaattaaaaagcacaactaccaatctttcagagtccttgggttaatatgtcttatctccttatgtggcgggggtttgtttaataatattatacttttgccttccaaaaaaaacttatgactgattctctcttcattaatcctattctgtatgtgattgtataaaagatcatgggttctccacctgcctgcacttctcctcctacttttcctcctactacttcggacgactcatcttcgacgtcttgcatgaatcagacatgt

SEQ ID NO: 265750 - DNA, 445 bp, Glycine max
taaagaagtgagagaatagcaagggcagtaatgtctctgcattgattggtaaatttgttgcccaaatccctgaaaaatggaaggatccaggtacattctgcataccttgtattatatggaacagatagttgacaatgccatgctagatttaggagcttctgttagtgttatgcctctgactatttttaatactctatctcttggtcctctgcaatcaactgatgtggagattcatttaactaatataagtgtcgcctatcctgccggtgtcatagaggatgtcttaattagagttggtgaacagatattccctgctgactttcatatattgaatatggaggagggagtttctcatggatcaactcctatcattctatacaaaccttctatgaatactgctttaactaagattgatgtttatgctagcacaacatctatggagtct

SEQ ID NO: 265751 - DNA, 488 bp, Glycine max
  unsure (1)..(488): unsure at all n locations
agcttatcaacatcaaacttggagaaagagttcttggtgtctagacatgagaagcaatcaagtataatgttacttccttcactaaagcggtgatccatctccacacatattttatcaatagcaacataaaaaatctctgcacggtaatgatgaagattagtgatagtcctcccttctgctcttgaacgaccccgaactggtatttcgtcatccatatttggtaccagaatacttttagcaacacaaaatccttggacatcggcaaaaaaattattccagccactctctctcattgtgcccaaccgagctttgacaacatcaactaattccatggcattcacaatattaagatcttttctttgcaatatattngaaagctcgtttgtttcctatgacctgnatcacgcacaatctcatttgggttaaactcattaaccacattatgtggcggttctaattctgcttctttgtgacaacattcacattct

SEQ ID NO: 265752 - DNA, 381 bp, Glycine max
gtgctattgaggcttctatggaggctagatctatgagcttcaatgatgtcctttaatggagaatttccaccatggagatgtagcataatacaaaggagaagatgtgagaggatgcgccatccactatggaataagccatggtataaggagcttcaccaccaagatgagccttggataagaagctcggataggatgcttcaatggaggaaaagaaagagggagagaaagagagatgggggagaacgaaattgaaggaagataaagggagagaagttgaactctgagttgtgtctcacaagactctcattcatcaaagttacaacaatgtgttacacatgcttctatttatatactaagtagcttccctgataagctttcttg

SEQ ID NO: 265753 - DNA, 431 bp, Glycine max
  unsure (1)..(431): unsure at all n locations
tgcaagcttgcatgtctaaggtttctagagagagaattgtccaagttccagagagttttgagagatnttgctgtgtgaagatctgcagagaccagagcttgaagaaggagccggtttgagagcttgagatgagtttgtgaatgattgtgagatcctagaggtgaaggagacatcctcaccacttgtatttttgcaatctttcatcttgttcttctctttgntgttaagaaggcttcctggtatggaaaactaaatcctctgttggatcttccctataggtacctgatgtaaatatatttatatctatttaatgatgttttgcgtgttctctgtgctatctgcttttcattcctgtatgcctttaccttgatcacgtagatgcatgctttgttagggtcattcaacagtggaaactggtccgactctaaagt

SEQ ID NO: 265754 - DNA, 409 bp, Glycine max
ctaagctaaggctgctcgattgctcaaggttgctgcatggatggtcaaatgtctgtatggtggtcaataaaggagcacataccacaaacccttgcaacatgtacatatttctgattcaaggccagctgggttaccaagttaaccaatgcatctattttgccttcaagcttcttagtctcagatgatgcagctgagtttgtagctacctcatgcactcctctaatgactatggcatcatttctggcgctaaactgctgagagttggaagccatcttctcaattaaatttctggcttcagcaggagtcatgtctccaagggctccaccactggcagcatctatcatacttctctccatattactgagtccttcatataaatattggagaagaagttgttctgaaatctgat

SEQ ID NO: 265755 - DNA, 373 bp, Glycine max
  unsure (1)..(373): unsure at all n locations
aagctattctgagagctcgagatgattctgtgagtgattgtgagattctagaggtgaaggagacattcctcaccacttgtgtttntgcagtctttcatcttgttcttacctttgctgtaaagaaggtttccggactatggaaaagctaaatcctcttgttggatcttccttgtaggtacttgatgtaaatatatttctatctatgtaatgatgttttgtgtgttctcaatgctatctgcttttcattccagtgtgctgttaccttgatcacgtagatgcatgcttcgttatggtcattcaacagtgggaactggtctgattctaaagtccttgatagtatgggactaagttgttgtgctatcacgaagaatca

SEQ ID NO: 265756 - DNA, 480 bp, Glycine max
  unsure (1)..(480): unsure at all n locations
tctnatgctgcaaacatctacatcagacctcctgatcctcttcttcttattcatccacaacagaataattatgaccattccatcaacatgtacaatcccgggtggaggaatcatcccaaccttatatggtcgaatccttcacaacagcagcaacaacaaccttattttcaaaatgctgctagcctaagcagaccatacgttcctccacctatccatcagcatcagcaacatcaacaacaacaacaacagccccataaacagcatacagttgatgctcttccgcaaccttcccttgaagaacttgtgaggcaaatgactatgcataacatgcaatttcaacaagagaccagagcctccatttagagcttaactaatcagatgggacagttggctacacagttaaatcatcaacactcccagaattctgatagattaccttctcaatctgtgcagaataccaataatgtgagtcgcattaca

SEQ ID NO: 265757 - DNA, 480 bp, Glycine max
  unsure (1)..(480): unsure at all n locations
tcttaatactgagctgcactttgaagaggacaagaaaaagttcttatacggcgggcgagtagtggaggcagtttaaattcgatttgaccagtaaatgggcacttgcagccgacaaggacggtgtggacaacagtgtctgtgaaaaatacggcattagcatggagaaatgggcccaattntgtcagacccgccgagatccctcgtgggaggtatagtactttgtaatttaatttttttccactaaaaattcagttcttataatagattgtacaaatcattttcattaatatttcaattttgcaggatgtgcggaaaaaagcacaagccatccagaagtaaaacactgccccccatgtgttgtcttgtgggggttatgattatttagaacacaagctgatggttgagaagacaaagaanaaactagaggaagctgctcagtctggaagcactgaaggcgtcattaatcctccatctcccatc

SEQ ID NO: 265758 - DNA, 457 bp, Glycine max
tcgaagagaggagagagatcggtcacgggtgcatggcatgatcttaaaagaagagttagttgcttgcgcgaggtccataaagagtttggctcaacacttggaagccacggagcatagcatgctatccatcatatggcaatacaaggaagaattgaaccagtccatggcccatgaacaaaagctagtggaggattttgcacaagtgtatgccgaaaaagaatcaagagggagggtgattgatgcgctgcatcaataagcgactatgtggatcgattgattcgcctttaaccaaagcaaaagccatggccgaagtgtgtactgcccccgaggagattcatgggctaatcaattactgtcaacacatgattgacttgatggcccatataattatgaatcgtaggttctctcgtacaccttttgataaccttggctaatgaaagcttgttcttttataaat

SEQ ID NO: 265759 - DNA, 476 bp, Glycine max
  unsure (1)..(476): unsure at all n locations
agctagngcttgtattcaatagtatggttatttcttgttgaagagcttctttggctctccttgctctatcccttgtcataagtcctccaagtccttcaagtggatccttgcccttgctcttggtcacatccttatcattctctccctcttgagaaggatttgtcctcaaatcggattctccatctgcatcaataagagattaatcatagacattgaaggtggaactaacattatactcaccgggaagctcaactttggaagcattatcattgattctttcaagcacttgaaatggtccatcttcccttggttgaagctttgatatactttgattcggaaacctttcttttcttatgagcacnccaacccaatcttccggttcgaagacaaccttttttctccctttgttggcttgtttaacatagcttttatctctctctcaatttgatctatgactttctcatgaagcttcttac

SEQ ID NO: 265760 - DNA, 252 bp, Glycine max
ataatgactctaccatctctagatctggacctctatttcacactatgttttcattgaagacatagaactatgattggcgtgagatatgaaccaattagagaataattctggagccttgacaacacgcacactttcctatcacctctttcttttgttggatactaattctctaggcttgagagatttctcttaatttgttacattaatacaaagcacctgtttcttttattatgactctgctgacagatgtct

SEQ ID NO: 265761 - DNA, 307 bp, Glycine max
ttcacatccacaatgcgcgcatatacccaccatccgctgttgcccacctccaactgagctacgttcttccacctaacccatataactcgtcgtcttaacaacaggtacccatcattactcccagagcttcacaacatccaagctaaacaacattcatacatgaccatctatcgcggccaatcctaacagagcataggcggaatactctgccgaaacacctaccacatcacaacttttctcactttaagaccactattacaaattccttcgatccaatttctgtatccagttggatcgactcccaaat

SEQ ID NO: 265762 - DNA, 298 bp, Glycine max
acattcgaatgagaaggtatgaccattcgaatttcgcgagagcagactatgtccaatgtcgagcgtctcgatatatttgtcgcccgatatcgacctgggcgtgaaaaaggatgaccatttgaatttctttagagcatccgctggtgattgtacaacgtccctatatgtgatgaaccctaatcggaccatggggtgagaagttatgaccatttgaatttcacgagagcttgcgctgttctattgctagcggccctacatattatgggcccgaatcggacttccttgcgataagatatga

SEQ ID NO: 265763 - DNA, 469 bp, Glycine max
agcttcttcttacatggcttatattctctattggatggagcctcttctcacctcttcttctttgtcttccgctgcatctccatggtggataatcaccaataaaggacctcattgaagctcaaagatccagcctccatagaagccccacaagcaagcttccatcaagtggtaatcagagcacaagagcttcaagtatgtgctccttaaacctccattaatgttttttagccttaccttctcttacattggggattcttcatttatctctccacgtatctcctcatatgtgttgtgctaaattttgttaacatgattctttagagtttccaccgattaaacttgctatagaagttacatttgattttctatggttcaaatctcctgttcttgttcttgaaccatgaactgagttgaggttacgctcctttgagattcgtcttgtattctttgtggctgaaacctaaccata

SEQ ID NO: 265764 - DNA, 451 bp, Glycine max
tagggatgttgtatagaaagccaaataaagctgttggtttatcccacaacagggctcctttgattcccagattactcccaacatccaaagcccatcccatgcagaaatctgcatcacttaagctgattttgttgtcaccattcaaatgaacatcctctatgagcttctcaagcatagttggcatggtgttttgcatatcatcacataacttgcctgcatcgttgggggcataattatgttctaaaccatcggggatagaaaccaactttataagggattcgtcaagactatattgttgtcgcccatggaagctccactcgcttgggtcaaagtccgtgctacataaatgactttggaccatgctcaacaacatttggagaggtcatcatggatgacacgccttgagctggattgtgaaactccacagtgggaagctctgttgatatagatt

SEQ ID NO: 265765 - DNA, 432 bp, Glycine max
ctcatgtgcacccaaacccaatcttcgggttctaagacaaacttctttctccctttgttggcttgagtagcatagcttatatttttcctctcatattgatctttgactctctcatgaagcttcttcacataatccgcctttgcttgaccttctttatgcttaaaaacagaaacattatgcataggcaaaagatcaagaggagttagtgggttaaaaccataaacaactctcaaaggagaaaaattagtggtgctatgaacagctctatcgtaagaaaattcaacatggtagtaacaagcttcccaaggtattaagttctctctcataactgtcctaagcaaagttcccaaagtactattaacaatcttcgttagccatcggtttgtgggtgacaagaggtagaaataacaattatgtgccaacttgctcaca

SEQ ID NO: 265766 - DNA, 347 bp, Glycine max
tggtgactttccaccatggagatgcatcggaagacaaacgataagatgtgagaggatgcgccttccactatggaatatgccatggaagaaggagcttcaccaccatgatgagccttggataataagcttggagaggatgcttcattggaggaatagaacgaaggagagaaatagagaggggggagcatcatattgatagaagaaagagagatagacgttgaacttcgagttgtgtctcacaagactctcattcatcaaagttacaacaagtgttacacattcttgtatttatagactacgtaagctccttgaaaaagcttcttgagataacttccttgagaagcttc

SEQ ID NO: 265767 - DNA, 358 bp, Glycine max
acatgtgctgatacgctgacaatcttcactggatgaccaccacatgcttgaatctctacttgcagatgtactcatattcaatatttacatgccataaccagtactaaaaattgtctcagacaacaagcttcttataaaacaactgtaaatatgtagtcagacaactaaacaagattctccctcatatatataaactaataagcgcgcgcgcgagcgtgtctgtgtgtgcggaaactgataatcaaattgaattatgcttctctaataacgaaagtgagatatctcaaatccaaatactctaagtacaacatgtgatgatagaaaagtgtactctacgacgagtgctatttgtcgaaac

SEQ ID NO: 265768 - DNA, 489 bp, Glycine max
agctttgcggattcgcgcttcgctggcgatattatctaagtgcgcctaaaacacgcaaatctgatcatcatgctttgataaatgcacaacaaatatactggtgcatatgaagagggtgagaatgagggagaaacccatactgtgactgccattactatacagccaaggttcccaccaacccaacaaagtcattactcatccaataacaaaccttcttcttacccaccacccagttatccacaaaggccatccctaaatcaaccactaagcctatctactgcgctttcaatgacgaacaccacctttagcccaaaccaaaacaccaaccaagaaatgaattttgcagcgaaaaagcctgtataattcaccccaattccaatgacctatgctcgacttgctccatatctactcgataattcaatgcgagccactaccacagccaatgtttattaacctccatttcttcgagaataccactctatctcaacg

SEQ ID NO: 265769 - DNA, 144 bp, Glycine max
atccgtactacaattttgagcgtatcgatatattatgggactcgatcggaaacgcgattaaaaaggcatggcagttcgaatgtgctcccaaccgttcgttgacacatttgaacgtcccgattgatgatgggactttcgcggaca

SEQ ID NO: 265770 - DNA, 279 bp, Glycine max
  unsure (1)..(279): unsure at all n locations
gactcaatcggacatccaagttacatgatattgtcgnttgaatctgctcagagattctgctttcaattttgagcgtcacgatttactacaggacacaattccgcatctgagctaaaagatactgtccttcgaattcgctcagagcttatgttttcaatctctagtgtgtctgtttattacaggactcaattggacatctgagtaaaaagtttttgtgcgtcgaattttctcagagcatctgttttcattccgagcggctcgataactacgggatcattc

SEQ ID NO: 265771 - DNA, 411 bp, Glycine max
cgtagcaaattcaaaccacactaactctgtactcggatgttcgtttgtgtgccacactataacgggacgctccaaattgttaacagagcatccgatcaaaatcctacgactataacgtgttactcggatgtcggaccaagtcacgtaatatatcgagacgctcgatatgcataacagaattggtgtccaaaacctaatgacaataaccttctaagtgagaagactaaatggggccggggattcgacgcgacactcgttcttgaaaacaaataccgactgaacaattttaacgacataactcgctaccagatggcggatagtccacacttatagtgaccttaaagggatcgccgtgtcgaaaaatttaccaaataatttgttttggtagcttataatgccgcacatatgtga

SEQ ID NO: 265772 - DNA, 489 bp, Glycine max
  unsure (1)..(489): unsure at all n locations
agctntagtgactcgaccgacatcttgattctctatcgtcgcanaacccttcggaatctgtagatcctgaatgaagtgaagaagttgatgactacgtatcacaagttcgacctacaacttccagaagagatagttaactgcgtcgagcttctttgtaatgaagtgtgttgagaatcaaaataggatcaatttcagattatgtctttattatcatatctaaattataggaacgatatctcctatacttaattgtaattaatctatataaaggagcatcttctgtatactttaacacaataaatatccctcactttctctcatttttacatggtattagagctaggttgagggaataacaaaaattgtccctcacctttatagtcgccgcactttttctgacttacttctttcctttgttttccgcattccagtagacccttctactagctgctcctttntcgtcaactgccaccatcctccaatgatctt

SEQ ID NO: 265773 - DNA, 404 bp, Glycine max
acttttcgaaatgcaaggaccattgttggttcgttaaaacatatagacaaggttttctacattgttataggcacatgatacttaatagaattaaaaataagttttcacaaagaaacacaagcaatacgcactaagtacacagaagataatgtgaaataatagatgcacatagagatttatactggttcatttctgccaccgtttctatgtccattttttttgcaactaaccaagtttccattatcctttacaaaatatacaagcattttctctattggctcttataagaaatcttatccttaagtttttaaaacccaagtattgtttttaccaagccacttctggctctacacaaatcatcatgttcatttaatgattgctacacacaaacaaggttatcgtgt

SEQ ID NO: 265774 - DNA, 462 bp, Glycine max
  unsure (1)..(462): unsure at all n locations
agctnntatacgcccgtacctcgaaattgtttatttggtgacctccatgggatttgaggaaaataacgttgatgattgtgcatatacctcaaagtcaatgggagaaaatttatcttccttgtgctatatatggatgatatattgttggcttctaatgaccttggcatgctacatgcgataaaacatatgctaacgagatctctttacatgaaagatcttgatgaggccttttttgtgttacggattaagattcacaaagataggtcgcaccatacactcgagttatctcaaaagacttacattgatagagtcttatggagattcaatatacaaaattgtaaacctagagatgtttctgttgtcaaaggtgacaaattcaacaaggaccaatgtcctgagaatgagattgagcgagcagagatgaacgataaaccttctcagagtgctctatgtagcctcatc

SEQ ID NO: 265775 - DNA, 370 bp, Glycine max
tactaagcttgtggatatgggtacccgtacatgtggtactaggtggtgttcgggcgatggtgcaattcgactatccacattcacaaatcacacattaattcactatgcccagttgcccaccttctactgatctcacgtactcccacgttgaccttatgctcgttcctctcaacaccgggtccccatcaatcccttcaagctttcataacattcaagcaattttaacatccagacatcatgaactatcaaaaccaatctaatacaatgcagatgcagaaaacttttgccaaaacacataccaataccacaacttttcttactcaaatatcccagtaacattctctttggtcgcaatcgttcaacgttggat

SEQ ID NO: 265776 - DNA, 290 bp, Glycine max
cgagctcactgatgaatcttcccttctatagaataccgcttcacacaatacgtcagacaatgtgtgttgataccacccactcaggttaacattggtttttaaaacacttcgcttcccttattcctgatttagcattaaaatatggccacaaaacatacattgtgttgaggttacagaagtacaaaaagtaatgttttgccaaaagataatcaatagattagtaatctcgcacaaatactaaagttttttatctacagaaatacccattttttaattgacaattgtttttt

SEQ ID NO: 265777 - DNA, 220 bp, Glycine max
tatctcacttcctttgcccccaaatgtgatgaatcagcctattcactccctacgaagcctcgatctctttcttaatgagaagttagcaatccacattcgtatgcttgaaacatcattccctctctcctcttttatatgacttattccatgaccaacttctggaccatatctgtgtcatttcctctcaagtgattaactgattggaacgtaagccctccta

SEQ ID NO: 265778 - DNA, 484 bp, Glycine max
  unsure (1)..(484): unsure at all n locations
agcttatgcacggaaaatgtaattatgattttgagatgcccgaagaaacaccatttcctagtttaccatgcattaagtaccatgttcaattattttgttntttaagtgaaacgggtttatgatcccaacatggttggctcgtggtgcctaacacatgaaactaagaatgtagtgtgaagtttcacgcttcccccttttttgttnttgttttgtagaggaaaacgcaaggatgagcaaacatgaaaacaaatggtatgcaattctgcagatcaaaaagtttgttgaacgcatatgcatgatgatgccatgactcatgcaaaatgggaatgtgataacggacaaatgcaggaacgatatgttcattatgatgctgaagagatgtttatgcggtgcatgatatgaatgcattttacggacacgagagcccagaaaattatctcttcttactttgcgcattggnggtgcagtgccccatgtgtacaat

SEQ ID NO: 265779 - DNA, 401 bp, Glycine max
  unsure (1)..(401): unsure at all n locations
gtgtaacccaccatttgtccatagaatggttgtggntggcggcgaaattgatgcccttccaaagtgttttgcacgggtataccaccaactactttcccttcagtggcatattcgaggcaaggctcgaagtcggctatattgtggcggggaatttcatgtgtctcccccatgggttgagagacatgtgcatgatccgattgaggttgttgactctcaatgagtatgagaatggagttattgacattctcactatgagagtatgccacattgggtggtgtatagttgggaggcaagtcatatggcgggatggcgcgctttgtttgaattttcacataatgtgggccgactgtacttactatatctctgccctccatatctgagggtggatgatacatttggtg

SEQ ID NO: 265780 - DNA, 394 bp, Glycine max
agcttccttaagaagattcctagagaagctagagcttatctacacatacctctctaagagctaagctcacctccttgagatgagaagctagaacttagctacacacaccctattatatctaagctcacccccatgacaaacaacatgaaaatatataacaaagtccttactacaaagactactcaaaatgccccgaaatataaggctaaaaccctatactactagaatggccaaaatacaacgctcaaatgaaggagaaacctattctaatatttacaaagataagcgggctcatacttagcccatgggctcgaaatctaccctaaggctcatgagaaccctacggcctacccttggatctctagcccaatctacttggagtcttctacccaat

SEQ ID NO: 265781 - DNA, 395 bp, Glycine max
attctattgttctaatataccgataacgctccataagctataaaattcgtgacttgttgtcttgagttgatatgcttttttatgttactataacatggttatgagtccctccattcccttacacacacactatacagaacccttacactggtgaagtatgctttatagtatatactatctctggactccaagacagagacagattgtcgcatatgaaacatttctggtgaaggagcaatgtgagacgatgtatctctccacacaatgcaatttttgttattatggttaagcactgtataaatgaattgaccttgaaaagagcttttgcgaaatctgtctgtaacaaaaatgcttggtgggaggaataaagagtgagaaactgactgagtgattta

SEQ ID NO: 265782 - DNA, 372 bp, Glycine max
tgatctcgagggtctctaaacacataaacaagactttgttctatatacttggactacactatactgtctctggacttggtgcgcacactcaacaatagtactttgaacacctacttgaacatgatatgaccaacgctgctatgggaatgctgagacaatgcttccaaaccttattgaacactctaagagggtggctgcaatgtggacatatcgaccgtcttcgtctattataagccatggtccagtattacttagaaaagcgatcaactcatgttgctttggctagacttatttcacgatatctgtctatatttagatgaataaaaatcagattgccagagcggacgatgaataaaactaggtatcaataac

SEQ ID NO: 265783 - DNA, 373 bp, Glycine max
cgcgggacattgatcatcccctccttccaaacacctagctaggcttatattcgcgacctttcccctgaaatcaccatccagaagaatgttactgctgttaatatccttgtggatgtgaagaggagaagtgaaactgtgaagatagtcaagtcctgttgccacatccaatgcaatttgcattctttgagtccaactcagaaacttcccgtccacgttgatgaagtagatccattcactcaagttcccattattagcatacacatataccatgtacccacgaccctcatggaagctaactccagaaaggcgtataacgcttgcatggttgattatgttcagtatctctatctcttatgacacatcttcttctatc

SEQ ID NO: 265784 - DNA, 103 bp, Glycine max
gacacctattctaacgtcggaagcaaaagaagtgaaagaattcgcatcgtttggggaggattgaaaacctttcttctttcttgtgctgcatgagatgaagaac

SEQ ID NO: 265785 - DNA, 340 bp, Glycine max
  unsure (1)..(340): unsure at all n locations
ctcttgcctttctgtcacaaccttgccttcggagggatggcaaaaaggcccagagagatggagccatgtagttctttaagtctgaagatttgtgtgctacattgatcttatctttctcgaaagattgattttaattgcgaaaaaagtagtttaaggtggtggacctcaaaatgatgttttaaacttttaaaaagcaaagagaatcgttaaggtgttggacctcgaaacaatcttctcgagtttgaaaggcggagagaatcgttaagggcgttgaccatgaaacaatcttctctagtgatattttgatgaaaagaaatttagttatgaggtgggtntatct

SEQ ID NO: 265786 - DNA, 325 bp, Glycine max
ctcagcttcgaagaaatgatgtggacaagctctatttgctcatcttgaaagaacccggttagtctaagagaatttctagtccatatccatcaaagtcttgaaagagtatgactaactaatggacgtcaatatggccaccgctgtatcattggaaccagaaaccatgaatgcccgtatagaagaatactaccaaagcaaagttttgaggggctttattgggcaacaatagtgagctcaatctccgaacaggtgaaaggaatcatcacgggtcaaaggcatgatcttgaacgacgagctaaaggtttgccttaagtcgaaaagaaat

SEQ ID NO: 265787 - DNA, 474 bp, Glycine max
gctttctttgtgggttgatgagctctgtcgcacagaatggcatgactgctggctgacatattctcaattagctcaattgcctctttaggggtcttcagctttattttccccctgttgaagcatctaacagtttcttggtttgtggtctcagcccatccataaacatattcaattgaattggctcagagaacccatgggtggaagtgtttctcaataaacctctaaacctttccaacgcttcactcaaggactcgtcagggaactgatgaaatgaagagattgcagctttcccttccatagtctttgactctaggaaatatttttttagaaacttttcatcaacttcttcccaggttttcagactgttacccttaaatgagtggagccacctcttggcttcttctaccaaggaaaatgaaaatagactgagtctaatggctttatctggcatgcctgcaatctttatagtgttac

SEQ ID NO: 265788 - DNA, 227 bp, Glycine max
tctatggaggctgaatctctgagctctaatgaggtcgttcaatggtgattctccaacatggagatgcagtggaagataaaggaaaagaggtgagaggaggcgccatccactatgaaataagccatgaaagaaggagcttcaccaccaagagatggccttggataagaagcttatagaggaagcttcaatggaggaaaagaaagagagagagagagaaatgggcgggg

SEQ ID NO: 265789 - DNA, 466 bp, Glycine max
  unsure (1)..(466): unsure at all n locations
ctatacccggatccttnagtcacctgcggcatgcaagcttgaaagcaaactggatgcggggtttacttgtaacccacctggccttgaatcaaaaatctgtacctgtcacaagggttatgggtttgtgctcctctgctgaccaccatacagacctttgcccttccatgcagcaacctggagcaattgagcagcctgaagcttatgctgcaaatatttacaatagacctcctcaacctcaacagcaaaatcaaccacagcagagcaattatgacctttccagcaacagatacaaccctggatggaggaatcaccctaacctcagatggtccagccctcagcaacaacaacaagagcctgctccttccttccaaaatgctgctggcccaagcagaccatacattcctccaccaatccaacaacagcaacaaccccagaaacaaccaacaggtgaggcccctccacaacc

SEQ ID NO: 265790 - DNA, 432 bp, Glycine max
  unsure (1)..(432): unsure at all n locations
tggatgattatatcctgccccagttggctgatgattgatgattgattgacctcgagcctattcagttgtgtctattgctatcttattttacgctgtaggaaagcatcatccacagaaaatggttcaaggcaaatttgttccaaatttgggggaggcactgggtaaggattgaaatggtaaaataaaatagtatatacacactgcctttgttttctgtgttaaaaaaaaactataagtataaataaagttaataagtgtgtatgctataatttcaggtatgaaatctaagtgcctacgaaaagagggcaagtatggggaaggaatgaataaaaaaatgaaggttattcaatggatgaatgctctcctagaacctaagcttttgaatcctaganaaccatgacctaagctttgaatcctataaaaccatgaatt

SEQ ID NO: 265791 - DNA, 387 bp, Glycine max
  unsure (1)..(387): unsure at all n locations
actcaatcanacattccgagaaataaagttatctgtcgtttgaatttggctcanaagctctcaacattcaatttcttagcgtgctcgatatgttaccgggactcaatcagacatccgtgaaaaaagttattgtcgtttgaattggctcagagcttcaacattcaatttcgagcggctcaatatattacgggactcaatcagacatccgagaaaaaatttattgtcgtttgaattggctcaaagcttcaacattaaatttcgagcgtctcgatatgttacgggactgtatcagacatccgagagaaaagttattgtcgcttgaattggctcanagcttacatcctatattcgagcgcgtcaatatattttcgggctctttctcacatc

SEQ ID NO: 265792 - DNA, 450 bp, Glycine max
  unsure (1)..(450): unsure at all n locations
taagctggagccaatacaacgacgctaactgtttactcggatgtttgattgttgctcgcaatatatcaagacgctcgagattgtatgttgaagctctgagccaatattaacgacaatgaccttttactcggatgtgtgattgagtcccgtaacatatcgagacactcgaaattgaatgttgaacctctgagcatattcaaacgacaataaatttttactcagatgtctgattgagtcccgtgacttatcgagacactcgaaattgaacgttgaagctctgatccaatacaaacgaccataacttcttactcggatgtcagattgaggctcgtaatatatcgagacgctcgaaattgaatggtgaacctctgtgcaaaatcaacgacaataacattttactcggatgtctgattgagtcacgtaacatatcnagacgctcgaaattgaatg

SEQ ID NO: 265793 - DNA, 448 bp, Glycine max
  unsure (1)..(448): unsure at all n locations
ttaagtcacccgccgcatgcaagctntatgaagttatgtcagctaatggtctctctatatangcatatttatctactttatctcatataccaccctatgggaaatgatttttactaggaagattatctgcactaatagtatttattcctaatcatctctggttttttctcttatctgatgattggttgcaatttgcacatttattcatactgcttttgtatcaaattaatttggcaggaaatagcacaactcagatagttttcatgaaatttctccaaaagattaaattgtaacttgtttccccattttgattaataattatgctactgcacttgatgtttgtcatttcatttctttatggggaacctcctctatctaaattgtaaattaatctttcacctttctgtgctgctgagtgtatgccanaagcttgagtttttattttttt

SEQ ID NO: 265794 - DNA, 438 bp, Glycine max
  unsure (1)..(438): unsure at all n locations
tctcccctatnttgctataaatagggggagaagtgaagatgaaatggtttatccccttatgcacttctctctctgtcgaatttgctgaggaaaattatttccatgaagaaaatacaagccgaggcgcttccgtaacgtttccgtgagtaattacgcaaaaattctcgaccggtcttcaagattcatcattcggtcttcattttcttcagtcttcaacgggtaagtacctcaaaccaagcttttcaattcattctatgtacccgtggtgggccacattttggttcatgtatttttattctcgacttcatttactttgtatacccccttttgacgtgcttaagccatttatttaagtcatttctcgcttaatctaaaaataaaataaatttcaccgatcgcttgaattgtatcatccgttaatttggttaaaatgaattc

SEQ ID NO: 265795 - DNA, 239 bp, Glycine max
ctaattaaattccctaaccaagaaaccgacgggacttttttatagaaaaattgtgggagggatatcttatgcataccgtcataggtacatttagatagaatgcaatggaatttcaaaattacttttcccgatctccatatccaactatacactttgcgagctcgctgtactgactatgaataatggcattgatggcgatctcaaacaacgtctgccaatggattccacttatttttcat

SEQ ID NO: 265796 - DNA, 453 bp, Glycine max
  unsure (1)..(453): unsure at all n locations
gcttatgaagatctgtggtgtttctattcttgnaaacttgtgctatccatcttttcattctcttctccctttgccaaaaagaattcgccaaggactaaccgcctgaattctttttgggtctctcttctcccttttccaaaagaacaaaggactaaccgcctgaattcttttgtgtctcccttctcccttgtcaaagaattcaaaacgacacaatctgagaattcttttaattcttccgattctcttatacaaaagtgttcaaggactaaccgcctgagaattcttttgtatctccattcacaaagtatcaaaggtttaacagcctgagatctttgtcttaacacattggagggtacatcctttgtggtacaagtagagggtacatctacttgggtttgactgagaacaagagagggtacatctcttttggatcagntctagtggatggtacat

SEQ ID NO: 265797 - DNA, 451 bp, Glycine max
  unsure (1)..(451): unsure at all n locations
tactctagcttatggacacgctccaaaggcttagacaagggagtatgagtgtcaaanaatataggcaacaaatggaactactccttttaagagctggacttatgaatgaggagagaacaagcattgctaggttcctaagtagtttaaatatggaagtaagagacaaggttgaactcctttcatataaagacatagatgagctagttcaactttttataagggtagagcaacaattaaaaggaaagctatcttctaaaaactctacctcttactcttatacaaagaaggacctatctccaagtgtgttatgagtaccaccttctaagccaaaggatgataagggtaaaaacatagaggaaatcactccaaaggctatttcactagataaaactagtaacatcaagtgcttcaaatgtattgggaaatgccacattgcttctcaataccccac

SEQ ID NO: 265798 - DNA, 423 bp, Glycine max
cggatccttaagtcacctgcagctgcaacttgtgcatcagatagaattttttgttatacactttcctgaaaagctgtcactcgcagattgattgcacagaatgattaatcgatcccgatgagatgtgatccttaatttttagagaaactactatcatttatacttattttttgtgaatctttgaatatggactgaatgcatgaaatcgagatgatgaaagcatgttgattgtgatgccacttaccttaaagctgacatgtgctgaatgaattaaccttgcacccagatgagctgaatgaattattgattgattgaaccccgagcctatacaggttactgctctaccttgactttgttgaggagacatcatcccaggaccgcggttaaacaaatttgtccaatttggggagaattatcaagtaa

SEQ ID NO: 265799 - DNA, 445 bp, Glycine max
tgcactcttgaatgatcgttgcgtggagatatgttgctctattttaggccctataagaccggagtttgcaattctagtaactataagtgcaaactcatgaaaactgtgaatataacattaacatatctaagagactaaaattgaggaaatacaaacttacaagttttaaaaatgagcaatagacttacagaaactaagattggaaaagcctcaagatatagggacttaaattaaaaaaaaatgatcttatagggacaaagaaatgaaaaagtgcaaacttatagggactaagagcatatttaagtcgatcatttatcaaacattgttaaaaacgtcggatactaaaacatgaattaaatatgttgcattataaaatgatatggaatatatgcaatgcatttttataaagaaccattatcttaagaggataagaattgagaaatat

SEQ ID NO: 265800 - DNA, 397 bp, Glycine max
  unsure (1)..(397): unsure at all n locations
agggcaaacacaggttgagaatatgtctttatccacccttttataggctcttttgaaaggcaaccataactcttgggatgagtatcttcctcatgtataatccgcctacaacagggggggttcattgaaccaccaaccaatccccttttgaggttgattattggttcaatgccctaacatcgttagaccatattcccctccactgaactcttcttttatacatacaaaacgggaatcttgaggatagtttgtaaagaactgcttgaaatgttttagaaccaaattgtaaacctaacaaatgtgtattctctaaatgcacagaggtagaacaaatctttntctaatgaagggactggtttggctccatcttagaagataactccttcttaaagaatcc

SEQ ID NO: 265801 - DNA, 393 bp, Glycine max
ggtagacaggttggacatgataaatgtcgcggtttggtttgtttcaatgataacaaggatgccccacattattatcgtgacacaaatgcaaaaatgatgatttggaaattttatgctaaaatggttatgcatgcacctatgcggacactcaaatgtaaattttatggtcatgtgatgctctggctcacgattaatttcctctattttaatcaacccaacgttgacaaaatatgttcttttatcaatatgcgcattcatccgtgtccattttgggcgtctgggaaaatctctacagcattcacacttcatgcgtatacacatgttttcaaatgctagttatgatcactggattgttgcaaagaaaagatggaagtcatatcatgttaaaagcat

SEQ ID NO: 265802 - DNA, 383 bp, Glycine max
  unsure (1)..(383): unsure at all n locations
acaaaagcgcataatggaagagagaatgcgaaaaaggatggccctacggctgcacactacccaatcccgtgggtatggctttcgaaaggggggaaaacaacattctgaaagtgaaaacgccccccctcccgccactctctataatttggggaacggggggctcgcccaggctcgcccaactcgcccacgcgagcaaacccgcacactctctctctatttgtgagggagaaaaaaacacatgcccctcacctctaaaggactagccactcgccaaacccgaacatactcaggccagaaacaggcgccgaacactcattatcttactctgtaaaacaanacacaaagcaaaagaaagctcgcaaacacaaaggaaacgaggctgg

SEQ ID NO: 265803 - DNA, 412 bp, Glycine max
ctcatctatacacaacgcagaggacagacatcaagaatgtccacattacattgaaacatgggttaaggaatcacaatgacaagtgtacttaggaccttacatgaatcagtaagtgaaattaatgttgtacagtggaaaaaaattgtgttataagtagctaattatagttgttcatcttcagggcacattgacaactatttgttttgtgtccacgggacaatattattgtttggctatgttctttgcataagaagcctgatgttaacatcaaggttgcagttaacaggttatttttcaaattataactcaattaatgtataccaattgtagcttggcaacacaatcattattattttatatacgtgaatgttattctgaaagctagtgcaatgaagacattaaccactacttt

SEQ ID NO: 265804 - DNA, 388 bp, Glycine max
  unsure (1)..(388): unsure at all n locations
cctctgatgatctgtgagaatttcttaatggtgacccanattatactgtcgccacttcttaacggcgttcatcattgcagcaagctcacgtacgtatgctgatgatcgtgcaatcttatggcagaactgcttactaaaaaaagctatggggtgccctccctgtgatagtactgcccccatacttgagcctgaggcatccgtctcgacaacgaacggtttggataantccggtaatgtcagcaccggggcgttcgtgactgtgtccttgatggcctggaaggcagctgctacttcaggtgaccacgcaaacccctcctttgttataaggttatagaatggagctgccatcgcaacatatcctttaatgaatctgcgatagaagcctgta

SEQ ID NO: 265805 - DNA, 448 bp, Glycine max
agcttccttgggccatttcctgcgaatttaacatttggaagttagttttacaagataatgcttatcttaacgcaaaaaatgtcatgctaatccctctgatttttgaacgaactcatgtaatctatttatgcacacgcgtacgtgtggaatatcctaccatttatatcaacatagaggccatccaacacattctaattgtcacacacatatatgcatttgaaaagaacatacattcttacgctcaaggcattgcgtcaaaattcacacctaatttatatcctaaacatttgctattacaaactacctacatatatttgaaatatatatcatacaaatttttattgtttcactcacatttattcatattggcaagctatttacattatgcacacacttgcattcaaaagggaattccgtgctatcatacattcatttaggaagcgacctc

SEQ ID NO: 265806 - DNA, 465 bp, Glycine max
  unsure (1)..(465): unsure at all n locations
agcttataagaacaaaatatcctcaatcatattctaatacgcatgcgaattangaagcatcaacaagaatcaagccaaggctattgtgcaagcaatcaatgggggcaaaacacaccaaatgattatgatgatggatggctcaaattctcacaaaggtaaactcatcacttttaaattgagctttcaaaactatcatgacatgtagaggagaatcaaggatttcaagtcacaaaatgtcaaaaacttttattttcaaaacaattacccatttcttgaacatatcctataattcaaagaaaaacatgcaaagttgtacatgcgcacagaattgacccaaaatattaaactaaaagtccgacgaaactaatcaacattaacaaattagcacaaataacaaattaacaaaaccaacaaaactaacaaaaaccaaagaacactcccccccatacttaaacaacacattgt

SEQ ID NO: 265807 - DNA, 409 bp, Glycine max
  unsure (1)..(409): unsure at all n locations
acaccactaattgttctccttttgaagttgtttatggttttaacccactaactcctcttgatcttttgcctatgcctaatgtttctgtttttaagcataaagaaggtcaagcaaaggcggactatgtgaagaagcttcatgagagagtcaaagatcanattgagaggaaaaataaaagctatgctaaacaagccaacaaagggagaaagaaggttgtcttcgaacccggagattgggtttgggtgcacatgagaaaagaaaggtttccggaacaaaggaaatcaaagcttcaaccaaggggagatggaccatttcaagtgcttgaaagaatcaatgacaatgcttacaaaatggagaatccgatgtgaggacaaatccttctcatgaaggagagaatgatgaggacatg

SEQ ID NO: 265808 - DNA, 263 bp, Glycine max
ccttcaatggggatcctcaaccatggacatgcagcggaagataaaggataacaggtgcgaggagacaccatccactagggaataagccatggaaggatgaacttcaccaccatgagagtccttcgttaaaaagcttagaaaggaagcttcaatggaggaaaagaatgacagagagggggggggggcttgaaattcaaggacacacaagagggagaagaatcaaactctgctgcgctatgacaagtttgacatttatcaaaggt

SEQ ID NO: 265809 - DNA, 383 bp, Glycine max
taagcatgtatctccggacgttatgtgattagcaagatgataacatacttgagatcaagagatgtccattcaatcaagccttttattcttgcatttgaaaacacaggctgtatctctccgtgaccttatgccatacggttttcacacaaagccattacacgtgcatgagtttatacaatatgctccaataagtgcctctagatacaagcttaaaggacgttccttctaagcttatattaacatatgaccctatggttgggtgcctcaatttcattttctagagagaatttgacaatacttgagattgcttggaaaactcacattgcataccgaaaatcaaattcggggtgattatatacattgattgcttatcagaaatgaga

SEQ ID NO: 265810 - DNA, 420 bp, Glycine max
tactcaagcttcaatctctgtctgactctcaaaaccagccgagaatggtgacttattcttttacaatggaaatagcacatcaacctgtatatcataacatgccgatacaccggaaatgccacaaactgatgtatgccctaatgataagtcgggttgggacaatgctgtgataacttctgagaaaccatggtggaatccatcttctcttacccgaacaccatttgtagagaaggatcacatatgaagaatgaagggtcattttggctctgtagcttcctggacttgacgtaattaaaaaaagtagctattattcttgagcgagtctctacctcaatccactaaaatttaaacacgtggtgatgaaaccataaacttggcaagtgtgtaattcatttctatcgcaatcagagcagtaaattc

SEQ ID NO: 265811 - DNA, 460 bp, Glycine max
  unsure (1)..(460): unsure at all n locations
agcttaaatcggaatgccatgagcctgcctatctcattgtgntaacattntctaataccttgcaccactgcactctccattattccatggtcatgggacatgtcacttggcctccatgcatggattcaccctctttgataacaatcgttgtcgaaatcgaggaggtaaatatcgtatagatattcaccaatgagccgtgagaaaccacataagtgaatttgacaccatactttaactccaaactttaagggtcaggattatgagtcttcttttcacttatatggtgcttacatttcccactttctacccaatgtgaaattatatgtcacacttgtactcaaacagtgtgaaatggcttcccctatttattgtttatttattcatctgggttgaacataacacaattattgcgatatctgaagactacatactctggcataagaatgaatatattctcaaa

SEQ ID NO: 265812 - DNA, 394 bp, Glycine max
cgtcatttttactacaagcttgcgggctgattctctctgaaaataattcttcacatttgttttcattcttatgtgaccaatacacagctgcaaatttggccactttatatgtatcacacaatctaataaaggggcaactcccagattgtgggaaatcagtaaagcaattagtgtttcttgatttaagcagcaataaattgtcagggaagattcctatgtccatgggcgcccttgttaatatggaagccttggtttacgaaacaatggtttaatgggtgagttgccttcttctttgaagaattgcagcagtttatttatgctggacccgagtgaaaatatgttgtcgggtccaataccatcatggattggagaaagtatgcatcaaatgataatc

SEQ ID NO: 265813 - DNA, 368 bp, Glycine max
  unsure (1)..(368): unsure at all n locations
acactctttattgtatacttcaattataaacctagagtcgtactctntttcactctttattattatatcccacatgtttgggtaatgtctattggctgtaaaagctacttcaagtccgtccgatgtcaaagttgaaagaaacactgatgattgctgatgctttatgatatccctctacgggccatataatgtacaaagagttgccataattactggagtgcggatgtttgcctttaaataaccacatgatctgactgataaacgtggaacccaacactgcgtattgacctattgatgtcatactcaaatatatgtgatgaccgatccaaggattgattcaataatacaatgacattatatcttcgcgc

SEQ ID NO: 265814 - DNA, 256 bp, Glycine max
ggaccagagaaacacgaggccccgcaccaggccgtgtgggcccccggagaccaaagacagaaccaggccagcagacaaaagacggccaccgccagcccaaagccaacacaaaccaggatcattaaaccacagcgccgggtgcaagaaccatagcacacccactaaaaaaaagacacaggccagaccagagggccaccacccaaagacaagcaaacaggaagcaacgaaggacaaaaaacgcctaccaaaaaaccaa

SEQ ID NO: 265815 - DNA, 463 bp, Glycine max
ggaccttagatctcagcttctgatgatgaatcaagttgatgcaagaagttttgtatttgacaaagatgatgataaaaagcccaaagaatgatttcaagattgagtcaacaagttcaagatcaagtttcatgagaagaaatcaagaagattcacgaatcaagagaagtttgatttcaagattcaagagaagatgaattcaagattcaagagaagaaatcaagatgacttcacaagggaagtattgaaaagtttttttcaaaaaataaacatagcacagttttgtttttcaaaagagtttttctcaaaattttctaagttaccaaagtttttactctctggtaattgattaccagtttcctgtaatcgattaccactgataaaatttgatttcaaaagttttcaactgaatttgcaacgttccatttgattcaaaatggtgaatcgattacaaatattggaatcg

SEQ ID NO: 265816 - DNA, 454 bp, Glycine max
  unsure (1)..(454): unsure at all n locations
agcttanagtccattatggatgcatattctaataacattctgaaggctnctaatctagcaattgtagcatatgtttcctcataatctatctcttcttcttgattatatcctttggcgactaatctagccttatttctaataactatgccattttcatctaatttatttctaaacacccattttgctccaatgattgggtagttttcaagtttctcaactaactcccagacattatttctttcaaattggtttagttcttcctgcatagctattatccaattctcatctattatggcttcatttaaatttttaggtttaatcatagatacaaaagcaatgttattgcataaatctttgagagagtatctagttgttaccacttttgagaatcaccaacgttgtcaaagggatgatctcttgatactcttgttagacaagcggcctcacatatctt

SEQ ID NO: 265817 - DNA, 401 bp, Glycine max
ataaataggcaatcgtaatgacatattatgtagattacctaagttctgaaaggcttgaatgcaatcaaatgtttcagcagaacagaattccatatcaataaacttatggtcgataatggaacgagatgagaaaagattggagtaccgtttctgatgttcgtcggaaaaaaacactggggaagaggacaatgagggtggaattggtgctgtggatgcgctattggctccataacgatgagctcttgaagccgaagcggaggcggaagaaccctttcgtttctttgacgattctgccatttgagggagtttttgtagattttaatcggtgaaatcaaaagataaatgaaatagaagaagaatgcactttactggattcgatttgatgaacaaatgaatgatat

SEQ ID NO: 265818 - DNA, 488 bp, Glycine max
  unsure (1)..(488): unsure at all n locations
tcgacccggatcttaagtcacctgcngcatgcaagcttgaccaatctcgacccaaccctgtcttattcggtcagtgagaacctatgatgtacctaagcaggcgagctcctggcagtcaacagataaaaggaacaaagaccacaaagcaaggaggcttgtggtagctggccagttgtgaaacttgactgatatgtgagatatggtctctggtaatcgattaccaagggtgggtaatcgattacaaggcttaaaaaatgaagacaggaggctaagatggtctctggtaatcgattaccaaggggtgtaatcgattaccaggcttgaaaacgaagtcaggaaacttatggagcctctggtaatcgattaccagcctgtgtaatcgattacaaagagggatgggtcactggtaatcgattaccaggcatgtgtaatcgattacacagtgcattattgcatatttcatgtcctgaggctgtgtaattcacgtt

SEQ ID NO: 265819 - DNA, 451 bp, Glycine max
  unsure (1)..(451): unsure at all n locations
cttgatggtgttgagaagaaatcacatgtttgtcatcatctataagggggagaatgtgaatgtatgtatacatgattttgatgatgtcaaaagaagaatcaaacaaggctcattttgtttaaagattaatacaagattgtttcaacaaacaaagccttgattcaagatttcttcaagatcaagccttgcctcacaatgaaaggtttcaagtcattcaaggcacatgtaatcgattaccaatacatgtaatcgattactaatggtttgaaagtgtgtaatcaattacacatcatatgtaatcgattaccagagacaatgaacgttgggaattcaaattttaaatgaaggttcacaattgttcaagaaaaacaactgtgtaatcgattacactaattctgtgatcgatactagagaggattntcaaggaatatcggcaacaatcacatcttat

SEQ ID NO: 265820 - DNA, 353 bp, Glycine max
gatttggtctgtggaagtctcctcctgctaagccatgtgtatacctgcatcaaaataaaagggctcatgatgggtgagctcatcctccccctctgctgctagctcctcaaaaataggctcctaggctgcggaggcccttcctgcacatcaaactcatccatgctcatgatggatggcaagcccaagccctgaaggctcttcatgataatggactgccccctgtgttagctctggaacatggagtgcaacatctgtggagtacatgacaaatatgtaggtgctacatataaaacagctggaagtggtatctgatatgaagctcgaagtggtatctgagatgatgtaagaggaat

SEQ ID NO: 265821 - DNA, 342 bp, Glycine max
  unsure (1)..(342): unsure at all n locations
aaacatgggaccaacgtattgtatttcttttttaataatangaaaaaaaaaaatatggggtcatatctagtctaggtctgaaagaccatacaagtttcctaacgatttctaattatgtgggccattaaatctatcatatgctgacaataaccgagaagcccatgaatctcttcggtggcggagtaggtgtatgccatcgccttggccttggctaacaatcggggaagttcttgactcccgttcaaggtaagagcaaaccgatccatccacatggttgcctcttggtgtaaagagtagatcaaccttcctctaacctctttttccgcatatacttgggcatac

SEQ ID NO: 265822 - DNA, 413 bp, Glycine max
  unsure (1)..(413): unsure at all n locations
agctntgcttacacaaacaagaccttatttgtcaccggtggccgcgatgaaacttttcatcacagttgaagaaaaggtcacgttcccgccgcaaagccaactcctccaatgacaagctcttgatcatgagaggtggagaaagttgcaacggaggtgacaacaaaagtgaaggggataaaggcaccactagcaatggaacttctcctcttgaaaacacgttaatcctacggcttgaaccaaagtcaaaggttgcaaggtttgaacctcgcanagaatctcatgagtcaagcccgagataaagcaacttataggaatggtgggggaaggccaatggtgcggctggcaaggtcttcaaacttgaagaggtaagcattgatggatctacactaggtaaatataaacaaggcgcttat

SEQ ID NO: 265823 - DNA, 415 bp, Glycine max
  unsure (1)..(415): unsure at all n locations
tgtgttgcttccaagagtgagagaagatatattgaagaacaaacggctgcattgtgctntatatcaaactctgaaaaaggctttgtacaaacctgctgcattctttaatggcatactgttttcactatgcgaggaattttgcttgtttctatgttaatttttgacattccaaattaataattggtggatattttcttaggttctatttgtggcattatattaattcttcaattatgggatattttgctttttcatataataatatttcacccatcctttaaggtgagctgcatctgatgtttttttattataattgctggaatataaaagggggaaattaactatgaaccgtgttttgcaaatggaaaatattgaataacatgtatatggaatggtgaatgaacatgagatagtg

SEQ ID NO: 265824 - DNA, 275 bp, Glycine max
agtcacctgcggcatgcagctttgttgctatatttttgtaatttctacaatatcgtcgaactggacagtccatgcactgtggccaaggattcatgggatatcctgggaactcctcttgaaggaacctccggagtgaacatgaccagattgctactatgggctactcaactcataaactctctgataatcgatgacgagagtatttatgactttcacattaacattctctgaattgccactgctatcactgtcttgggagaaaggatgacatatga

SEQ ID NO: 265825 - DNA, 322 bp, Glycine max
gtggcatcaaacgccaagagcttctagtatgttctccttatacctccattaattcactgcgtgaccttgtcttacattggcgtgaaatcattttttctgcatgtatctactcacacgccatgtgcgaaagggcttatacatgactctttatagatgacaacgattaaacgtgctatgaaagctagatgtgattatcgatggctatgaataactgatcatgttcctgaaccatcaatcgtgtcgaaaagatgttcctgagaattatgacatgatatgtctcgaggctcaaacacgaagcataggggtctttcggttttcttaa

SEQ ID NO: 265826 - DNA, 455 bp, Glycine max
  unsure (1)..(455): unsure at all n locations
agcttagagaacttataattttntattgctctatgctctaacctcaattttattttttaatcaacaaaaatttcaagtcacctataagttaacttattctaccaaatcaaacaaagaaaaaccttaaagtggagtaccaatttcagtttgatagaagcaaccatagccattactgacattgaataaaacatagcatatatgcttgaagaagttaacaaaaacacaacacctaaacacaaagctataagtgaggataaaagagatttcaagtcacctaaacatggtgacttattccaccaaagtagaaaaagaaaaaccatatacaataccaatttcaatttgacagaagcatccatagccaataccaaaattgaaataaacatagctaatccttattgcaatatgaatgtcaatttcacagagtaagaaacacatgcagctacaccatatgaccc

SEQ ID NO: 265827 - DNA, 347 bp, Glycine max
gaaagccaaatctacatctgatcagcttaataggtggcttgttcggctcggtgctttcacaatttgaaccactttgcgcgcatatgaatttcggttacgccgcttttttgctcagcggatggactgaagcgggcgctatcaagatgacccttcgtcaggaacatgcatagccatccttcttcgattttcctcgcgctcaccgagagtgtgcgctcacggaggctacttacccgaaatggttacgagagggaaatagcacttaaacttgctattacctgaaatgaagaaaagatataacaacaaatggagacaagtattatcctagttacaaaagtatacacctcaaa

SEQ ID NO: 265828 - DNA, 472 bp, Glycine max
  unsure (1)..(472): unsure at all n locations
gatccttaagtcacctgcggcatgcaagcttcaaaacaccggcctgcccccaatatatgtaaaganaatagctacaagtgtgatgaggctcttgatatccatttccagcatcaacctcctcacaacaaaagccttatccctccaggtgaagttggcaacacgaatggtacaacgccaatgctctaaactacattcttatatcgaaaagtttccagcaccacagtaacaatgctagttctatctagtttaattctcaaacttcatatatctctaaaatcacacacacagcaaaaattgctgcaacctgcttaccagagcagagttaaagaatccgccagaccgcttatctggggaaccaaactccaccttattgtccagcatcttctcatagggtgttctgatatcactaggccttgtggtggtgaaactatcctcctagttggtgcaacacttttcgccaaagactctgatt

SEQ ID NO: 265829 - DNA, 418 bp, Glycine max
ttgtcaactcggatatccgattgagtattgtttatatcgagacgctggtgatggaaaacggaatttcgtagaaaatgaaaatcgcaataacttttaactcagatgatcgattgagtcccgtaacatatcgagacgcttgaaattgaaaacagaagctctgagcaaattcaaacgacaataacttttgactcggatatccgattgagtcatttaataattcgagacgctcaaaattgaatacagaagctctaagcaaattcaaatgacaacaacttttgactcggatgtccgattgagtcattttataatttgagacactcaaaaataaatgcagaagctcttaccaaattcaaatgacaataactttttactcggatgtccgattgagttcccttatatatctatacgctcataattg

SEQ ID NO: 265830 - DNA, 362 bp, Glycine max
atagccctcttgagccgagaggccattccttgatttgaagcccactacaagccttaagggaaaaaccacgatataaccatatccttaaggaattccggagccccggaacagttccgggaataagcgaggggggtttttgtctcattggacaaccaggcttgaaggctatgctccatgatagactttgggccatactggatggacattggatatgggataaaagcggacatgctgaaagaaaagtggattctcaaaggctaaaaaagaaaaaaaaaaaacaaagatggaaaacaaaagtggaaaagacaattcggaaaaaaaaaaagaaaagcacgaaagtggagtgaagaagatcgtaaagg

SEQ ID NO: 265831 - DNA, 433 bp, Glycine max
  unsure (1)..(433): unsure at all n locations
gcgcgacaactctgaattggaatctttgtagctcgcggtggtccaacatgacgcgacgctgagaccaatgacgcactactatgtacgcttccttccttctaccaacgtcacgatggtgcgacggaaatgcatgcaaacagcatatgtcacaatagaattctatacaaatggggagggagctccagcgacgtaagagtgttcatcaattatagcgcaaaagtggtatataaacctcaatgtttacgatggtgggtgtataaaaacgtcgttaatattcaaaatttctaagatgatgtntacaaatacaccatcttatattacctactccataacctactaagacggtcttcctaattaacatcattgtatcatccacgcgccatgctcatgtgccttaaatgtaacatatttatgataatgccaccggttaccc

SEQ ID NO: 265832 - DNA, 276 bp, Glycine max
acacaaaatctctatgatcggcggggtgatgaatgtactgaaaggcgcaaccctctcttgtagaagcactcatgcatcccacattctcatgaattgtctatcatatggactccttatgtaagttcgatatatattttggttataatacaaacctatgtgctcctatgggacaccttacgcttgttatactttttggtaatatttctccacatgataatactgaaataggtatgtgtgatccgctccctttactaaattttaaaatggggacaacgg

SEQ ID NO: 265833 - DNA, 411 bp, Glycine max
  unsure (1)..(411): unsure at all n locations
tcttatgttatcaatcatanaaagggagaaggtgatattgtggtcgatgctctttctcggcgtcatgcattactttctatgcttgaaacaaaattgattcgtcttgaatgtttgaaaatcatgtatgaaaatgatgaaacttctggagaaatttttataaattgtgaaaatttttcacaaaatggtttctttaaacatgaaggctttcttttcaaagaaaacaaattgtgtgtgcctaaatgttctactaaaaatttgcttgtttgtgaagcacatgaaggaggtttaatgtggcattttggggtcctaaatactctataatcattacaagaacatttttattgcgctcatatgtacaaggatgtgcagaaattttgcgaacattgcattgtatgtataaaggcacagtct

SEQ ID NO: 265834 - DNA, 426 bp, Glycine max
gagctgcaacttagacaactgactggttcttgattattatcctttagctcctacatgctaaaaacaaatcaaaattaaattatgagccaacagaaaagaaggaatattaaaggtatatatattactcttttatgccttgattgacagactttacaattgttaaagttatgaaatcttagctttctttcttcttttccactatgtctcttctctatgttaacaaattgaaaaaagttctgatattagctcattctttactatatcacaggacatactcatagctggaactgatacaactgccgctacgtccgtgtgggtgatgaccggattgataaagaacccaagagcaatgggcaaagcccaagaagaaattataaacctgtctggaacaaagagttatataggaaatgatgtcaaagcttgtgt

SEQ ID NO: 265835 - DNA, 453 bp, Glycine max
aaaactagcttctgcgcctttctgcagaacaacatttgggaagttagttttactagataatgcttatcttaacataaaaatgacatgctaatccctctgattttataccgaactcatgtaatctatttatgcacacgcgtatgtgtagaatatcctactatttatgccaacatacaaggacatccgacacattctaattgtcacacatacatatgcattttgaaaagaacatacatttttacgctcaaggcattgcgtcaaaatttacacttaattacatcctaaacatttgctattacaaactacctacacatatttgaaatatatatcatacaaacttttattgtttcactcacacttatgcatattggcaagctatttacattatgcacacacttgcattcaaaagggaattccatgctatcatacattcatttaagaagcgaactcata

SEQ ID NO: 265836 - DNA, 452 bp, Glycine max
  unsure (1)..(452): unsure at all n locations
agcttgcactactagaataagtatattcttcttctgcgaaancgacagggttcatcatgaaccgtcttaatatataaagcgatgacaactttgtaaatagggggctttcaactgtcgcaacgtgcccttcgcgggcgagcgaaggcgaggctcacaggtgcgttttccaaagaggaaagatgcgcggagtcgccaccaacgtttatttgtggaaaacgtcggaaaaaccgaaggaaaccggccaaaaataataagtctaagttcgggagttgtatttacgcttgaagaaggtattaacacctcttacgtgtgtctcgaaagacaacaacctattttttagaattgtggaattgtgttaccttaacttttatttctttttatttcttgagggcgacaaaagcgggactttcgctcctacgtaccctcctttggagaggaaatcacacctacgt

SEQ ID NO: 265837 - DNA, 387 bp, Glycine max
attacacatgttttgtgaatgcgagtaccagatgtgcattgaacgttgaatcttccaattccaatgtgatagagtcacatgtctttcacataataagctgtgtgtgaatcgattacactgaattggtaatcgaataccactgatagtttctgaacaatacaaacgatgtaactcttcaaaaagtttttgactttttcaaattggtgataagattttctaaaaggcataactcttctaatgggtctcttgaccagacatgaagagtctataaaagcaaagctttgttttgcatttcacaataaaattaatcaatcattctacatatctatcttttgcaattcattctttacaacaacgatttttccacattggtttctggatctcttt

SEQ ID NO: 265838 - DNA, 444 bp, Glycine max
  unsure (1)..(444): unsure at all n locations
agcnngagacaaagatgaaaaacttgttgtaaaaggcatgcaagtccaccagcttggacaatattagatgcaccattgaagcatgtgcaaacaatgcgatcataatcctttatgataggataaccatcagcatacaacaactcttcagggacaactgtccacccaagccgaaccccagtaaaaccagcaaattttgagaatgaggaaatttcaattgccacccactcacatacacacaanacccacatgtgagtaatatcaaggattcttctcttaaacctttattttcagcttttactcataacacattcttcttgtaaaaaaatgagagtacaatctttaaaaaatagttgtatacttttgtctatctacaaatcaccttccaattgcgattcgatgacaatctatcagggcatgaatattcagatttaaaataaaaactac

SEQ ID NO: 265839 - DNA, 451 bp, Glycine max
  unsure (1)..(451): unsure at all n locations
ngtaggantatggngtacccatcacatgtggttctatgtgtctgtcgggcaatggtgcacaacaattctgcacatccacaaatcacgtataacccaccatcccttgttgcccacctccaaatgagctcacgtactcccacgtagcccttatcctcgttcctctcaacgtcgggtccccatcaatcctcccaagctgtcacaacatccaggtaattccacatccaatcatcatggactaacaaaaccaagcaaaacagggcaaaggcagaaaactctgcccaaaacacaactcaaaatcacaacttttcacatacaattaccccagtatcatttactttgttccaactcgttaaccgttggatcgactcgaaaattttactggaagtctctagtacataagtctacattctgaccgttgggatctgctagctattgtccagaactccatatg

SEQ ID NO: 265840 - DNA, 443 bp, Glycine max
  unsure (1)..(443): unsure at all n locations
agcttgcctcatagaggaccaggaatgtctttgctgtctattgaagtanttccgctccggagtatgatagtcaccgctttatgagcgctgtacaccagcagcgcttcgaggccatcaagggatggtcgtttctccgggagcgacgcgtccagcttatggatgacgagtatacatatttccaggaggaaatagggcgccgacggtggacatcactggttactcccatggccaagttcgatcaagaaatagtccttgagttttatgccaatgcttggccaacagaggagggcgtgcgtgacatgagatcctgggtaaggggtcagtggatcccgtttgatgccgacgctatcggccagctcctgtgatatccgttggtgttggaagagggccaagaatgtgagtatggccagaggaggaacccgtcggatgggttcgatgatgag

SEQ ID NO: 265841 - DNA, 446 bp, Glycine max
  unsure (1)..(446): unsure at all n locations
ttgcttanacattcaatttcgaatgtctcgatatattacgggactcaatcaaacatacgaganaaatgttattgtcgtttgaatttgctctgagcttcaacattcaatttcgagcgtctcgttatatcacgggacttaatcagacatccgagtaaaaagttattgtcgtttgaatttgctcatagcttatacattcaatttcgaatgtctcgatatattacgggactcaatcaaacatacgagaaaaatgttattgtcgtttgaatttgctctgagcttcaacattcaatttcgagcgtctcgatatattatgggactcaatcagacatccgagtaaaaagttattgtcgtttgaatttgctcaaagcttanacattcaatttcgaatgtctcgatatattacgggactcaatcaaacatacgagaaaaatgttattgtcgtttga

SEQ ID NO: 265842 - DNA, 459 bp, Glycine max
  unsure (1)..(459): unsure at all n locations
agcttctattgacagccactcatgacacttgncttcangcttccctcctttgtgagttattgttgcaatggcatgtcggcatggcatccctacatcaaagttgtaaaatcagcacacatgtaggttaagaatgaaaaaaaaactataaagaacacaacctgttagttgccatactccacaagtgcatgtccattcacctaaattgacctcaaccttattcccccacatgtggacctcatatctcaggcccatgttatcaccacaccaaatgggagtccattgattagcaaaatggaattctttttctagtcttttatactgcactaaacataatggtccaggttttccagaaagtttaaccttgtgggcagccatggttctcatgatataacttctaatttcttcaagcattgtgataataggctcgcatctatactgcagaattctggaattgaatac

SEQ ID NO: 265843 - DNA, 451 bp, Glycine max
tagcttgcctgtccgatgcagcagtaatgatggccctatttatgttgtggaacggttactaacccggaatgggtttaggcaaagacaacggcggcataactagcctgataaatgccaaaggaaatcgtgggaaatatggtttaggctataaacccactcaggcggatataaagagaagcatcgcgggaagaaagagcggtggtcaaagctcgcggttgagacaagaaagtgaaggaagcccgccctgccacataagtagaagctctataagcgcgggtttgggagacgaaggtcaagtggtcgcgatatacgaagatgatgttctaagtacattggatttggtacgaccatgccctcctgatttccagctgggaaaatggcgagtggaggaacgccccggcatttacgcaacgagcatgatgttaaccctttcgggtgttaaaaactctat

SEQ ID NO: 265844 - DNA, 433 bp, Glycine max
atgcagctggatgtgatagaggggaaatctttgttatattcccgccatcattaataatgcattcccctacaacaactcagggaataagaggattatgaaaagcaatgttaatcaagtggggatagatgaatcccaaactgaattgggaaagcaaaacaagctctatcaatgaaaactaagacactcatgagagctcaagctcaagtccccattactatgccttcattcctaacctatgataaatgagatattgtgcatgggtcaggagaatgcattattaatgataaaatagttacaaccatggatgagatcaactatgttaggggaggaaacaattcttataatcaataacagaataatttcaatcaaggataacgcttcaagcaaagtcaaggaatgcttaggccttaacccatgcaaaatcaaaggccaa

SEQ ID NO: 265845 - DNA, 439 bp, Glycine max
cctctaaccttatgtttttcaccatgttgctccccctatctattttatatcaaatattcacacaacaagaaattgaggcaaggatcaaacatacgtattactcttaagaaatcaatctcaatctctcaaagtaataaaaagaacatgtttattcatgaacaacataacaactgacatacaatcatctagaaattatagcaacacacacacacccacccacgcatgcacgcacgcacacacacacacacacacaaaccccccttatgtaacatccctgatttttgaattcttatcatctctcacactatgacactgtaccacacacacacacacacacacacacatgctataaattttcaagacaacaacatattcaaggaagtttaacaacaagaataggaatcaagagtttgagaaaccccccttattgtacatccct

SEQ ID NO: 265846 - DNA, 441 bp, Glycine max
  unsure (1)..(441): unsure at all n locations
agcccggaatcgatgacacatatactgttttctatatgngnaatcgattaccagagcacattctcagataatattctaacatgcacatctttatatgtggttcttgaatggctatcaaaggcctatatatatgtgacttgagacacgaatttgctaagagtctttcagaacaaaaaggtcttatcctcttaaaaagcagaatcgttttatcctcttacaaattccttggccaacatacttgtgattcaataacgaattatttgagtgctcaaattgttcaatctatctctttcaagagagatttcttcttctcttcttctttattctgaaaagggattaagagaccgagggtctcttgttgtgaaagaattctaaacacagaggaaggattgtccttgtgtgttagaacttgtaaaggaattacaagatagggaactctaa

SEQ ID NO: 265847 - DNA, 374 bp, Glycine max
accacaaaagctattcttaaaacaaatggctacacctcccccatatccaacataatgaaattatagcaatatgccatacttcttttaaattcatcgactagatattttcttaactaaaaaaatgcacccaggcacaatctatgcacctctcttacctatatcacttatatgtacttccaaggtgtatttgctaactacatcacatgcacttcctttgctaaatttacatacatgcatactcaaagcattgtggctaccaaaaattgcatacgtgcacattctggtatttctaatacctatacatatacaaactttgtgatgaatcttggctacctacacaataaggtgctacattttatgccttattcaaaagt

SEQ ID NO: 265848 - DNA, 471 bp, Glycine max
  unsure (1)..(471): unsure at all n locations
ggatccttaagtcacctgcggcatgcagcttgaaagagagtgttaaggtttatcttctgctnttattcgttgaccacagagtggtacctgtagatatgtcgcgggggtcaggagaccttggggacgtcaggtggggtgctattgcccaaaaccaagcttgaccaatcctgacccaacccgggcatagtcagtcagtgagaacctgtgatgtacctaagcaggcgagctcctggctgtcaacagataaaaggaacaaagaccacaaagcacgggggcttgtgtggtggctggccacttgtgaatcttgtgggatatatgggttatggcctctggtaatcgattaccaagggtgggtaatcgattacaaggcttataaacaaagacaggagactaagatggtctctggtaatcgtttaccaagggtgggtaatcgattacaaggcttaaaaatgaagacagaagactaagatc

SEQ ID NO: 265849 - DNA, 348 bp, Glycine max
  unsure (1)..(348): unsure at all n locations
cctcaaagtcagatgacagtcgcatgtcttttcgctcgaatacacgtaccactttagagcgctgtcaccacagccttngagccatcaaggatggcgtttccggagcgacgcgtcagctatggacgacagtatactgatttcataggaatatggcccggcggggcatactggtactcccatggccagttcgatcaaaatagtccttgagtttatgccatgctggcaacgagagggcgggtgacatgaatctggtaggggcagggatccattgatgcgaccttcgctactctggatatcgtgggtggagaggcagatggagttgcatagagaccgctgtggtcatgagag

SEQ ID NO: 265850 - DNA, 415 bp, Glycine max
tcaaagcgggtctgaaaagaggcaaatttaatcatcccacttggacgaatgagaaaactggggcaaatgaagagggtgaaaataaaggagaaacccatgctgcgactgtcattcctacatggccaaacttcccaccaacccaacaatgtcattactcagccaataacaaaccttctccttacccaccacccagttatccataaaggccatccctaaatcaaccacaaagcctgtctaccgcacttccaatgacgaacaccacctttagcaaaaccaaaaacaccaaccaagaaatgatatttgcagcgagaaagcctgtagaattcaccccaattccagtgtcctatgctgacttgctcccatatctacttgataattcaatggtagccataaccctagccgaggttcatcaacc

SEQ ID NO: 265851 - DNA, 405 bp, Glycine max
  unsure (1)..(405): unsure at all n locations
tcgttgcaagccagtggctggaggagaatgctggatgatgaagttganttggggagtgcataatcatgaattggccaagtcattatttggacatccatatgcggngcgattgactaaagctgaaaaaacacttattgctgatatgacgaagtccatggtgaagccaagaaacattatgctaactctgaaagaacacaatgccaatagctgtacgactattaaacagatatacaatgcaagaagtgcattccgttcttccataagaggaagcgatcttgaaatgcaacatctgatgaagcttcttgaacgtgatcaatatatttattggcacagaataaaggatgaagacgtgggtcgtgatatcttttggtggcaccctgattcaatgaagttagtcaacgcatg

SEQ ID NO: 265852 - DNA, 333 bp, Glycine max
tttgcaatctaaagcttctttgcatcggtcataaaaatcaaaatcatacccctgtatgatatgggtggcgctcacctctcgcctgaatgataaggctcgcattatgtgattaagcaacacatgcgacaatgtatcatgagcaaaactgatcattaagcttgaactctcaatctaatcgcagaagcaataattaagcactacccgtgtatggattaatatcatcaacatacatgctaattagtgaacaggataaactaatatcaattcattgatcataacataacctcccagatactcgtgcttgatgcgtaagagaaaaccacactgaagact

SEQ ID NO: 265853 - DNA, 307 bp, Glycine max
tacattcgtctgtgactttgtaccgcatcagctacgatttagggaccctctttgtcaaacacgcacatacccctcatggcacgtatgtacgtttgacattgcactgtgtgtatctcaacttattggctcagcctaagttattgcactactctttttcaccaatggtactcttttgcacgatgtgcggctcatggctccggcctttccaaatctaacgactgtcacccacttattgtctggcggtggttatgaatattacgaacagcaactcttgtgtgaaatcacgcacagatgattgataaacact

SEQ ID NO: 265854 - DNA, 421 bp, Glycine max
  unsure (1)..(421): unsure at all n locations
gagctggacaagagacggacgactcgctntttgtttttatctcgcgcttagcgtgcttcttcgatatatgagctcttccaaataccttcttcacgctaaatgggttgaagctacgcttatcgaaggatacgcgctaaacccatcgagttcgcttagcgcgaaagccactctggcacttcaagaaattatctccattatacctgaaattgtgcgtattttaacattaattccaataaaagagaccctaatgacagagatcaaaacacaacataggttatttacaatgcctacacaagaactataaattggggaaaactatacttattttgcacaagttttctataccaaagtcagtcgtataagacgattaacacaccgccttatagaggtagttatctaatacggtgctaatgtaagcacc

SEQ ID NO: 265855 - DNA, 398 bp, Glycine max
ttattcccacgagaacttgagtttacttaacaaatattagaaatttttactaattaaactataaaatgaacaatgatgatttgaacacgatattcaataataaagataaattataacaaaggtacaagttataatatttgtgggatttctttacaagcactcattaaaatgatatgaaattcaaatgacaaaaattatcggaattagatttcaccaaatcaaactctccttacactaagataacatacccaacttgttattcaatgttaatataagacatagttcaaaaatgatattttaatccttaattccttaggtgataatatctaagttcttccattaaaagtcaaactcttgcatatttaacaaagaaatcgttttaagttccatgacccaaa

SEQ ID NO: 265856 - DNA, 359 bp, Glycine max
gaataaaaatctgctccccactcattaatacaactaacctattgctgataaatccagcatatatatatgactaatgctttctgtgataaatttcttatccgggtaacagcttcttccgatgaagaaatggctattgacctgtggaagaatcttctccgcccctgataggaacccccagtgccagatatgccactgtttaccgctacaagtcttttctgtgcatccactaacaaaggagcacacgtttttgaatggatatgacctcttacagaaactgcttaccctacgagcgatgtggtgagtgattctcgacccatagtctattgctaaagggtgagacttcgaattatatatttatt

SEQ ID NO: 265857 - DNA, 405 bp, Glycine max
  unsure (1)..(405): unsure at all n locations
tgttgttcgcctagngcatatactctgaccttgctatgcctgttttcttacataatacattccacattccttttctggagaatcatactatatgtaattggggcattgcaccgctctcttgaatgggcacacctttggacacaatatgcttgataatggggacaacgtggagtacgccactgcttcggaatacatcttgtgaactacagcctcctcattctagtactaatctctggaaaacaagcgtaatagcactaccaaagctggaccactaatattagcgcattatcacaattcttagcacgagaagatgaaaatattgttccatagggaaacctatattcatcactgattgaatacttacttgttggagcgtattatcacaccaaatatgaaaacaaattg

SEQ ID NO: 265858 - DNA, 484 bp, Glycine max
agtcacctgcgggctgcaagcttcaagaatcaagtgtcaagattcatgattcttgaacaatcaagtttcaagaatcaagattcaagaacaatcaagatacaagactcaagattcaagaatcaagagaagactcaatcaagataagtactaaaaaagtttttcaaaacattgagtagcacaagaattttcacaaaatcttttaccaaagagttttactctctggtaatcgattaccagaagctagtaatcgattactagtagcctgcattgtttttcaaactgatttacaaagctgtaatcaattaccatgagcatgtaattgattaccaatgttttaaaacgttagatttcaaatttcaaaagtcacaacttgtgataaaacatttcaaatcatttcaaacttgtgtaatcgattacacaatacttgtaatcaattaccagtgtttctaaatgttttgattctcatatctaaacatgaagagtc

SEQ ID NO: 265859 - DNA, 447 bp, Glycine max
  unsure (1)..(447): unsure at all n locations
gacactataatctaagcttgtatggttagaaaagagcaacacacataatcatctaatatgcaacttgtatttataaaaaaactgtaagtataaaataaaagtgtgtgtgctgctatntaagaaaaagaaaagctaagtgcggaaaggcaagtaatatagctggaataaaaagaaaacaattgatctatggatgaatgctctcttataacctaaacttttgcatcctataaaaaccatgaattgattgcagcacaacctcattacaagcctaataaagtccttcggattcaatttgtgtgttcttgactgtatggcatgagatgaattgcaaagattgagacttgtgttaattgttgattggtgaataagcctaaacacttgttgttgagtgaaacagtaattgtgaggctttgggtaatgatccttccttgatatctgtcactctta

SEQ ID NO: 265860 - DNA, 453 bp, Glycine max
  unsure (1)..(453): unsure at all n locations
agcttagcattagcgtgggggactctgtttcctaatcatcgngtacgngtttgttactttactggatcctatcaaagaacctccgcttataactacaaacatagatctgtctgtttttgttgcgtattgtcatgtggacaaagttccatgccatgtttgagacatctaagattggcgtcttgcctttgcccagtattattttttgcaacatcttcctttcttaaccttgtcattacctcgaaattttaatatggcaacttactcttgtggaaaataatttttaagaattaatataacactttaaaattaaatttagaatattaaaaaaatatacaacatagatataattctttaggtgttattgatactcttctcctgttagaattaaaatcgtacttcagtaatccacataataaagatatacatcaaagaattacataaattatcatagtg

SEQ ID NO: 265861 - DNA, 433 bp, Glycine max
  unsure (1)..(433): unsure at all n locations
ntaacatgtaggtggatggtggagaacatgtgctcatcctattgacagccatttgatttgactatatcaaattgtttcccgactatggcaaccggtatgaaaaaagtttgcctatctttgaaagattgagactaatttgtttgaacggtacttgatgcaatatattgagtcagttaagctttcgagaaacttgattcataaaacaagaaatttcaatgtccgtcactctcattgttaattttcataaaaattgaattctcaagtcgaggtaggtgtgtgaaaagcagacggaaaaattcaaggagaaagttaggaaatttcttctacattaattcttatgggagaaagtttttattagacaatccaatttgcagatgtgattaaacactaaatatgaacatatttttcaacagatttattatataaattgtga

SEQ ID NO: 265862 - DNA, 455 bp, Glycine max
  unsure (1)..(455): unsure at all n locations
agctttctttctggcggtgcaaccacagtagctggcatattantggcccatcaaggtgcccttgaggtacggatcatttaacgacacacaacatcatcataaccaaactcattatctatcgtcattattaaatttcgttacatgcacaataatgcaggctatttggccatatagtggtcactaccaccccacagaagagaacttcaaagaatttataagctttcttgaggagcacaatgtagacctcaccaatgtaaaggtaagtgtttggcccactccaaaattacacaacttatatataaatacctaataataatggttgtttcatgcagagatgtgctatagatgatgataatccatcacttattgggactaattcatttactgccactaatgaatcacaacaagctatgggccctactctaaattctcgcacaggcccagcaagtgcaatc

SEQ ID NO: 265863 - DNA, 448 bp, Glycine max
tgcattacgtgaccttaaatactcagcttaaggatctcggcatgaccgttctcgtcagccatgtcaaccgcctccgcaaaatgaaccgccccgtcgtctgcgtcggctgcgcctccaccggcgatacttccgccgcgctctccgcctactgcgcttccgccggaatcccctccatcgtcttcctccccgccaacaagatctccaccgcgcaactaatccaaccggtttcaaacggctctttagtcttaagcatcaacaccgattttgacggctgcatgaagctgattcgtgaaatcaccgccgaattacccatctatttggcgaattcgttgaacagtttgcgtctggagggtcaaaaaaccgctgcaattgagattctgcagcagttcaactgggaggtgccggattgggttattgtacccgggggcaatctgggaaatatttatgc

SEQ ID NO: 265864 - DNA, 378 bp, Glycine max
  unsure (1)..(378): unsure at all n locations
gcattcatatcttgaaggtgtcagaggntctttactttatttatatcatgtatggtactgaatatgcaattgtaactatttatatcctgttttgaaatttggttctgtggctctttggtttgtaactttactttgaacacaaactatttatatcctacttatgtgtttgaagccctcaaatttagtcactgattagaatcccaaaaggatgctgaaaacaaattagaatttctcataaaatctaccctccttggccctttggttttgatactccatacttattaatatgagggcaatcaagttagagataacataaacatatatataggtacatgtgagaagcttacgaaaatatcataggttaaatttaatttaatt

SEQ ID NO: 265865 - DNA, 371 bp, Glycine max
tctagaaatctagcaatgcccaagatacaaaaccttactctttccacccaagctaaacctgacttcaggaaaaatccaccatctacttcatctaaggaaggtggagttgtacaaatcatcagacctgcacgagtgtccattcttgctgtagaagtctatctgaaggacaaagaacccaaagttcatatcgaacacttttaagatattgactatttggaaaatgttggatacgtcatcaacgcacaccttatgttgtgcgacatccaccacttcttctatgaccccaaggtggtggtggtgcctgaactcatccatgagttttggagaacaaccaaagtctagcacaatgaggttattgaatgatactttgc

SEQ ID NO: 265866 - DNA, 452 bp, Glycine max
  unsure (1)..(452): unsure at all n locations
agctngaagtgagagagtgtggaagagtctttcttcctactcttattcagtggcaacagagtggtacctggagatatgtcgtatgggtcaggagaccttggggacgtcaggtggggtgctattgcccaaaaccaagcttgaccaatcccgacccaacccgggcatagtcagtcagtgagaacctgtgatgtacctaaacaggcgagctcctggcagtcaaccgataaaagaacaaagaccacaaagcaaggaggcttgtgtggtggctggccagctatgaattctgagtgatatatggaatatggcctctggtaatcgattaccaagggtgtgtaatcgattacaaggcttaaaaatgaagacaagaagttacgatggtctctggtaatcgattaccaagggtgtgtaatcgattactaggcctaaaaatgggatcaggaagttgagagggc

SEQ ID NO: 265867 - DNA, 415 bp, Glycine max
gtgacacttagaaactaagcttgtgtctttgttttgaattataatacaaggatctttcttcatctattcctacgtctctacccattctcattcatttgcatgtttacttctttatttctgaaacggcagatccgatgacgagtcccccgaaggtactaatacctgggacccgcttatcaacttcgagcaagaaatgaatcataaggaagatgaagggaacgaggatgtgggacttcccccagaattagaaaggatggtcgcctatgaggaccaagaaatggggcctcatcaagaagaaacagaattagtagacttaggaattggcagtggaaaaagggaagtaaagataggcacaggtattaccgcacctatctgtgaagaattaataatcctgctgaaagactatcaagacatc

SEQ ID NO: 265868 - DNA, 455 bp, Glycine max
  unsure (1)..(455): unsure at all n locations
agcttgttgagagagtgagagagagagtgtctctgatntatcaaanaaaaaatgtaagatttcattgtgantttgaaaaaacacaacaacatctcatgtatgttgttaattaatagaaaatacacaatgaaaccataactatgttgcacgaaatataaaacataaccacatttcattgtgcactccaaatgtatccccaaatttgtatgtgtaacgaaaatgattttttatttaatatttttggtcacaaaatcatattttgtcaaggctatttttgagaaatccaaatatatttggtgggaataacatccccgatgtaggtttttgtttatgttcttggttcaatgttttctcttatcattaacacttttctccaatcaattctattttcttgttctttctcttttatttaggggctaccataggagaaatttgtagttagatcgagaatctag

SEQ ID NO: 265869 - DNA, 368 bp, Glycine max
cgctgctcctgtgctgagtgtgtgatggaatgtgtaaatggttcaatggaacctgtatttatagtagttgagcgtgactgttggtccttgtttgtatgaactgttgtagcctttgtagataattcccaacttgtagataatagccagaagcttatagataatgctagagataaatatttgtttatagataaaaagtagaagataattataccttgtagataatgtctgaccttattgataattaatcaccttccaataaataaaatattcaaatacatgtgaatattaataagttaaagataatctgtttgttggggagcccggctgctgatggttgatcgtccaccctcatgtagtatggctaatat

SEQ ID NO: 265870 - DNA, 449 bp, Glycine max
  unsure (1)..(449): unsure at all n locations
agcttgagtttgtgagttgattctagccttattttcactcttgttattagtcaattcaatttaagaaagaaaaattccaaagagaaacgtccgatagatttttttgtttgattctactaaaagataatgttttattattatattattattttagctcttttttggtttccaacgtggttacgacatgaacgaactgtctgatttcattttaacagaaattaacgaatattataattcaaatgatcggtgaaaatttattttatttttttattaggcgagaaaatgacttaaataaatgactaaagcacgtcaaaaaggggtacagaaagtaaatgaaatgaaaataaaagtatgcgaaacaaatggggaccaccaagggtacatagaatgacttanaaagtttgatttcgggaacttaccggttgaagaccggagaacgacgaagaacg

SEQ ID NO: 265871 - DNA, 437 bp, Glycine max
gttagagaaaacgggtagatttataaattgactaaagagttgctttaatttgaaagtaatgatttgcgatgaataataaatttttaatataataagaaaaaattgatagaaactaatgtgagaaagatgaaattcatagaaaaataaagatatattaacggaaaaaatacgagatatagtaattgtagaatcttaaaaataaaaagtaaatgcgaaatgatgaaaatatgtgttataaagaaaaggaaaatataatgtaaaaataaatataaaatttaagaaaaggggtagaattgtactttaaaaaacatttcataaataatttgggcaaaacaacactttaaaactcaatttgtaattgtaaattaaacgaggttgtgtaaatggcagaacaatactttgtctcaagagtttgtgaaggacaaaaacaaatttac

SEQ ID NO: 265872 - DNA, 451 bp, Glycine max
agcttagtcagtgttgctgtgtaacgtgtatttatatgtgttctattaaatgcattgaggcattgagtgtgacatcccaaaaaatagccgcctataaaacatagaacaatgacaccatatattttcatagctgcacacattaaatgcatttgaagataatgaggttagtaacaaaataataataattgtaaagtattcaaaaaatcagcgcattgaatattgtatatatgaataatagtatataaataataataaattatggacgtctgggatacgctaagcatgggttaaatttttttaaaattattattattattattattattattattattatataattagtattatttattataattattaaaataggaataataataatattaatagtaatactaatactaattgaattaaaatttagaaccatatataaatatataataatact

SEQ ID NO: 265873 - DNA, 329 bp, Glycine max
  unsure (1)..(329): unsure at all n locations
gatactgaatcgagtatggcgcacacattgcatgtctgatatgccttttanaggcttgaaaagtgcgagaaaacgagatgtgttttctgcgttttctggaaaacgtgatgaactcgctaagcaagcattcgacgctaagcgagttcatcaatactcattgtctataagcattatctgaagaactcgctacgcgcgcttactgcgctaaggaagttcatcttttgaggatgaacacttatcctcttgttgaatcgctaagcccaggtaacttaaccattttttttgtgatagtcgtgcactaagccgagcattcttgatccaagtgcaat

SEQ ID NO: 265874 - DNA, 473 bp, Glycine max
  unsure (1)..(473): unsure at all n locations
ttaagtcacctgcagctgcagctatggcggaaaggagaagcattattctcttgcatgttgatgnaggcgcttgtgaacattgtatccatggaaagtataaaacagtcagtttctcaagggcagggaagactcttaaagctgaaaagctagaattggtgcacacagatgtttgggggccagccccagtgataattgttggaaactcacgctgttatgacacctttatcgacgactctaccacaaaggtatgggtttattttcttaaaaataaatctgatgtgttttctgtgtttaaaaggaggaaaacagaagttgaaaatcacataggtctaaaggttaaaagtctgaaatctgacaatggcacggagtatgatagtcaggagtttaaagacttctgttcagaacatgggatcagaatgatcaagacaataccatgaacacctgagcaaatctgtgttgctgaaaggatgaat

SEQ ID NO: 265875 - DNA, 395 bp, Glycine max
  unsure (1)..(395): unsure at all n locations
ttaattttcagctttaccttctcctccattgttgnttcttcatatttctccatgtatctcctcacatgtcttgtgctaaatgttgttaacatgattctttaaaatttcaaccgattaatcttgctatagaaactagagttgattttctatggtttaaatttcttgtttatgttcttgaaccatgagttgtgttgaatataagttcctttgagttatgtcttgctattttttgtggctgatacctaaaccatataattcttacaaaaacattaaattagaataaaaccttaaaaatatagagtgacattgtcacctattgtaagttgttcatagaactcatgtctaatcatgaaacttgtcacataaaaattcttatattgcgctcgaatttattt

SEQ ID NO: 265876 - DNA, 246 bp, Glycine max
aagaatgctgatatagatcgcactggtgttactttctatcatatcaagttagtgctgttggagattgtgtactattttccaccagcaataggaattcatattaatatgtaatggaaggttatgcctgtgcacatgaagtgtcatacaccacctcataaatgcatcttggcatttccttctaaacacaacttcttctgtataaatatattgattctacaacattataaggaaaagatgggtgtaaaa

SEQ ID NO: 265877 - DNA, 445 bp, Glycine max
agcttgcatatcctcaatacacgttgactttatgagtggcactttccttacctttattgtggtgatttgattacacctgaacaaacccctcttctatatgatcatccaactcaatgatccctgtttctttgatgtccgaagaattctgaaagacagggacatgattcgcaaccataacatgttttctgtgaggagggacagacatattaagttagacattctttggattatcagaagggcttgctgtattggtatgtgggggcattgctgaatcacccacttgtggctgatccatggtggggcaagctgtgatcagaacatgcttatttgcagtgacagttttactattagagaggcggtgcccaatcatcttgcagtgagtgctaaaagaatgtcttttttcaactcaatcatttgaacaaaagtcctccctgtaggaagtcta

SEQ ID NO: 265878 - DNA, 385 bp, Glycine max
aggctactgagtattgagatctcgacccagaagatcattagtttggcgatataacagatctcgggttagtccttccatggttgggtctacaagacttctgtggtctacaagagcacattcatcctcatacacttcttttgcgaatggaagcacattctacaaactgccaggtggttggctcataccaggagagaatggtaagatctggcttatatgtttgtaaatataatagaggtgaaaacaacaactcatgattatcttaatgtacattttagtgggcgtgaagagaaagatgactatcaagactggtgctgattcatcatcttttgtgcataactggcaggtattattactatttattgttaaacttggcagtgggcgtcta

SEQ ID NO: 265879 - DNA, 421 bp, Glycine max
  unsure (1)..(421): unsure at all n locations
ttgaatgacaataaggtgtattcttaaccaatataaaatgtgcctcttactatgcatangaattataacaaagataactagaaccagtaattcacgtttctttccaatataaggaccatttcatggatggataattcacaaaatacttcaccacttccatgcatcaaccttatcctcataaacttccacaccattgatgccagaataccccataaaaagaaacaaacttgccatcggatacaatgaggggcacctgggcgcttttgccccacctccttcaaatttctttccactcgtacctctttgttttttctaaattgcacccgacactcctcctttgttgcactctacaaaatacccttaattatttatctcacattacacctagacactctccttctaaacaccgttatttattaac

SEQ ID NO: 265880 - DNA, 456 bp, Glycine max
  unsure (1)..(456): unsure at all n locations
agcttctatactatatacaggantagtaattctgatgcgttcttcgtgagacaagtggcactcatatattctggagaaggaggtggttgaattatagatattacgacactattctctccactctaaaaaacgatactttgatttaatatgggagttccaagtctctcttagagatgagtttataaatgattatacaaattaaacaactttgaatgtaaatgctaaccaacgggaaataaaagattttatgggaagagaaagtgcaaacacaccttttatgctagttcaggaaaagtctgttgcctacatccatatcccacaaatccgcgttggaagttctactatctcacaaatactttacactttctaatacacacaatgacaagtcttcctttgtgtattgatttatacagcaagagactctccatctcttatcgctttgattatactgagaag

SEQ ID NO: 265881 - DNA, 323 bp, Glycine max
tcgatgtcgaacagggtgatatagtcgtcacggaatgggttcttttaccgacatggatttcacttcttgaacaagatttgatcatcatcaatagacatatccattggtagcttctgatgttacaatcttgtatactatctacctatccaactatgattccctcacattaaataaaaaaaggagcgaaggctaatcactgggggtgttgaaacattacatgttattgaataaaaagcaaaggggactagctcagattctttgaaaaataacccgaagattgaacacagaaaattcccgtgactggaccattcacatattcattc

SEQ ID NO: 265882 - DNA, 410 bp, Glycine max
cctactcacagccatatgattccgttcaaaggttgcattccacctcttgacaaaaaaagccccatgccccctcctttgatcttcatcgcagtggcaaccactcagaccattatgccaactccacctcccataagtgcttcccatctcccttcatagaacaacaaactatttatttatctctgtgactatctcgctctcgctcctgtgacgaccaaaggatcgttacagatcacggcctctttcttcatatctgtagagaaccttcttggaccctccgttatcgaaggcgaccctcgacctactgctctagctgtcatcggcatgaacgttcgcagccctcccaccaacatattcaccgccaccgtagttgtatacatctaaatcaccgcctccaccacaccatgggtaac

SEQ ID NO: 265883 - DNA, 431 bp, Glycine max
tcgcatcacatccaaagacgtgtttatgaaactctccttacctcataggagagtataactagacccattcattaatgtgtgttctaaacagaatagcggaatgatgcgaataaaatagaggagaaaacaaatgtatataaacttggagccaaagactggtcatggaaacgtggtttctcatattgctacctgtggtcgtgctatggtgttgtaggaagctactaaactgtgtgtggttgacgccaaacatatgggatatgtacacgcttttggttggatacgctcgggaaatgcctacggttgttatgaatgctgtcaaacctaatatgatacggacgcatcaccggatatgacaacctttatccatcacatttgacaacaaaattgctacatgattaatatgtttaccactgcttattattgtgtgcaat

SEQ ID NO: 265884 - DNA, 464 bp, Glycine max
  unsure (1)..(464): unsure at all n locations
cgatccttaagtcacctgcggcatgcaagcttncatgtataattacgagcgtctctttattctacgggacacaatcagacatccgagtccaaagctattgtcgtttgacttttcttagagcttccgttttcgatttcgagcgtctcgatatattatagggctcaatcggacatccgagttaaaagttattgtcgtttgactattcttagagattccgttatcaatttcgagagtctcgatatattacagggctcaatcgaacatccgagttaaaagttattgtcgttagatttttctcagagcttccgttttcaattacgagcgtctcgatatccaacgcgacacaatcggacatccgagtcaaaagttattgtcgtttgacttttcttagagcttccgttttcaatttcgagcgtctcgatatattacagggctcaatcagacatcccagttaaaaagtattg

SEQ ID NO: 265885 - DNA, 368 bp, Glycine max
attgaaaacaaaagctctgagcatattcaaaccacaataacttttgactcggatgtccgattgtgtcccgtaatatatcgagacgctcgaaattgaaaactgaagctctgagaaaaatcaaacgacaataaatttttactcggatgtgcgattaagtcccgtaatacatggagacgctcgtaattgaaaacagaaactctgagcgaattcaaacgacaataacttttgactcggatgttcgattgagtcccgaaatatatcaggacgctcgtaattgaaaacagaagctctgagataaatcaaacgacaataactttttactcggatgtccgattgagtcctgtaatatatcgagacgctcgtaattg

SEQ ID NO: 265886 - DNA, 341 bp, Glycine max
acctttaacaataacatgatgattttggtttcaccatcgactttgtcatattaacaacaatttgcatttccttcttattcaatcgccccgcgtatggatgcctaactaatgacttggccatttcatgatagtgaataccacagatcaacttcacacattcaaccttccccttccatgcactgttttcccacgaagactgaatggacaaccacatttcctactcccagggtcttctctatcgaattctttattcttacacgtgatcgttccactcctttcgcacgcatataagacaaatgaacttattcctctactaccgttctctgtgtcagacctcataa

SEQ ID NO: 265887 - DNA, 408 bp, Glycine max
  unsure (1)..(408): unsure at all n locations
aagctaagactagcccaacaagagggatatgatgatgaagctcatcttaagatagtctaaacctaggagggctctctaaattttgcctaccccaacaagagggatctgaggacaaagcttggattgattcactctaactagggatcgaggtttatgtaattaggctatagcatagaacaaaaaaacatgattgattagagaaacatctttatatgcatcagctggcttgttagaaagacccaacatatttacctactgctgtcaatcttacttacttgcattcttattgctgntagcctagactcaatttacttatgctctaaatcatcaattatcaatggtcctttcaacaatgccttatatttgaattaaaccctgtctaagaccaaatccctgagttcaatactc

SEQ ID NO: 265888 - DNA, 346 bp, Glycine max
gaagatggtgtcatccgcaaactgaagaatattcactgttaccttattcttacctaccaaaaagctctgaaatatatgtctagacactgcttccctcatcaaacctgtttacccttcttcatccaatacaaataataatggggccaagggatccccttgtctcaatcctctttgaggcttaaattcctcagtcggacttccatttacaaagatggatattgaagctgatgaaaggaaacctttaacccaaccaatccacctttcatggaaccccattcttctatcatataaaataggaattgccaggacacaaagtcataatctttttcgaaatacactttaaaca

SEQ ID NO: 265889 - DNA, 331 bp, Glycine max
atttaaaatcacctgacgcagaacgagagaaagagattactttttcatgacctcaacgaggggaggaacaaaaaacgaccctcccaaaaagaaaagagggaagcaccccacgtaatcaatgaaacgttaaacaccaaaaagggctgcggatacgaaaaaaggaaacgagcgaataaacgggaaggtataaaacctgcggcccatacaagggacgacaccctaaggaagcgcaaacacacccaatataatatctcccccaaaaccacatattggggacacaggatgagcctgctcacaaaaactacgggaagagaaacaaacaacaagccct

SEQ ID NO: 265890 - DNA, 406 bp, Glycine max
caataataaccagcaagtggatataaaatactaggatttttttaatctgggtaaaatactaaaatgttccaaatcaagcaattttactcaaggggggaaatgccatgatgatgaactttaacaagtatcagcaaacacttgattgtacatagtgtgccctcaagaaatcagggtggttcaattctttctgattttctcgttcaggtgatttcatgatccacaaggcccacaattagagttatattattatgttaaacaaaagggggagaagaaaatcgtgggtaggtgattatttgaagccattcatgaaaattcccatgttatttgaaactgcaaacttgatcaaatcctttgagctgaaacaattactgaaatgtgtaaactaaacttatgtaatgttcaattc

SEQ ID NO: 265891 - DNA, 401 bp, Glycine max
tggtaactatcctgaatggtattcttaatggctgctgtcattaccccaaacattgatatcctacatttaaccttatatctctcggaatacatgtcagttatggaaggtctattaatcagctctaccttaagtgatgtagtgagagatggggaatgtataaattaacctgcgggtggagttaacttaaacatggctgtgcagcctttctgaaccacagctgtagtagttgtcatataacattcataaaagaactttatcttaaatgatttgtctttttgtggtggttctgtatattgatgtgcgtaaaactgtcttctgatccaggacttccagatagaaattgtttaagcagcagaaacatttacagctatatgttattagcatattgtaacacgtgaaaa

SEQ ID NO: 265892 - DNA, 458 bp, Glycine max
gctggagaggatgctgtaatgtattttattaaagagggagagaaagagggaggggggagctctaaattgaaggaagaaatagggagagaatgagggaggggggagcaccaaattgaatgaataaaatgggagagaagttgaactttgtattgtgtctcacaaaactctcattcttcaaaattacaacaagtgttacacatgcttctatttatagactaggtagcttccttgagaagctttcttgagaaaacttccttgagatgcttctttgagaaaacttccttgagaagctagagcttatctacacacacccctctcataactaaactcaccttcttgagaagcttccttaagaagattcctaaagaagctatagcttacctacacatacctctctaatagctaagctcaccttcttgagatgaaaagctagaactttactacacaccccctataat

SEQ ID NO: 265893 - DNA, 374 bp, Glycine max
  unsure (1)..(374): unsure at all n locations
tgaagggacacccacatttactagtgccagtgtctcttctgataaatactntgttcgtacacctatactgaccactcctttcacagccaattaacacaaacatagtccttcctctactacctatgtttgtatttgaccttaaaatcaccggcacaaatccgctttcatgatcaacggatcgagcccaccgtaaaacatcctctcaacactcaaacacctacaaagcaatccacataatttaagttttctactagtattcattttattaaatctgtgacaaacaataacattataacctgagaagtattgaacgcatccgaacaatcaacatgttgttcaacacaccacttgcatcttcattttcataatccata

SEQ ID NO: 265894 - DNA, 334 bp, Glycine max
  unsure (1)..(334): unsure at all n locations
ttcatacgccagtgtgactaagagtgtggtggttaggttcatcaacaaaaagataatttgctggtatggtttgtctacgaagattatcactgataatgccaccaatctgtacaataaaatgatgaaggaaatgtgtgaggatttcaagatccaacaccatatatctatgccttgcangcccaatatgaatggggcacttgaggctgcctattacaacatcaagactatagttcacaaaatgatcgcgtcatacaatgattggcacaagatgctcccttttgactacatggttattgaacctccatacgcacatcaactggggcgaccccgttct

SEQ ID NO: 265895 - DNA, 383 bp, Glycine max
  unsure (1)..(383): unsure at all n locations
ngaacgcgtgtaacccaccatgtggcatggtagaacacagttatatgtctactatcatagttaatattgctttcttcgtcatagagagaaacacttgggctgccaagtctctacacctttgggcgtattctttgaaagatacatgcccttttctgcacatgttctgtaattgcatcctatccgaagtcattatactgacactgcctaacgaaagcaaccattatgtccttccaagcatggactcgggaaggttccaagtgtgtgtaccaggtaacagctaccctatgtagacgttcttagaagaaatgtttcacagttcctcatcttttgcatattgacacacgtctttaaatggttcttggggcaagtagtccccttgtgct

SEQ ID NO: 265896 - DNA, 454 bp, Glycine max
  unsure (1)..(454): unsure at all n locations
agcttatattttggcacattgaatgcctgtccttgtcgggtcaactcaataatttgttccttcaattntatttttcagtgcacacattaatgaagaatgttactaacatattttttattttttattattgcagacatttactaaaaattgtaaaattataagtgaaaatcattgatcaacgtaatgtagtgatttatgtaatcaatctcagttgtataagtgagaatcattgaataagaagtgaaatttataaaattatgatttttaattaattttaatcaaatatgaactatgaagagtgttaaaaaaggtgtattattagtactgcatctctcttcatttattttgactggtcaatagttggaaaaagaaaaaataaaaaataaaaaagcgattgggcaattgttggactggtctttggggtagactcttttcacactatagctatttgaaa

SEQ ID NO: 265897 - DNA, 440 bp, Glycine max
  unsure (1)..(440): unsure at all n locations
ctatgaattatgagttagtaagaaacccttcattgttgtatgctntgttgatgttgnggtattgatttcaatagcaaatggttttgtctgtcttgttctatcttctgctgttgctattattgcaaacagtgggcttgtttatttaccatattgtaccattcaccatgtctttgagggtacatctgggattgacaataaatttacaactgtgcaatttaccggagaggtataaactctttttatttattatctactttatttcaaatttaaatgtaaatttatgtatgcaaattttgttttgtattttttgtcaattttctgttaattggtgactttgttcagtaacattgtaattctaattgtgtaggacctacataacatgttaactattaatttgagaggtttattttggtagttgttaatttagaattgggtctttc

SEQ ID NO: 265898 - DNA, 361 bp, Glycine max
cgtcttgctgtattttatctctgtctacatgcacactatcatggatatgatggtactctacataattgagggcactacttgagctgccatattcctacacctttgggcagattttttgaaagattcatgctccctcttacacttgttgtatatactgatttctatctggagccgtatgacatttgcactgatactgcctactgaacgctaccatcttgtctttgctacaatggacttctggaaagtccatattgatgtaccaaacgaccactgaactatgtgagatgtcctggaacaaatgcagaaatatattttcatatcttgagcattccccaatgtttctacagtactatgataaatg

SEQ ID NO: 265899 - DNA, 434 bp, Glycine max
  unsure (1)..(434): unsure at all n locations
agctagaaccaaaaatctgtgttagtgttaccttaaattgagattgaacgactaggtgtgagtaataatctttgcatgaatctctgaattttagaatgaaatgtataaatgaggacatgatgaaggccatgattgtacatacacaagccttttgaccaaaaagcttaccttgaatgataattgcatcttttgctcccttgtataaagattattgatttgacatgaattgaaccttgaactttaaatgattatctcctaataccttgtttagattctaggagagcatatggttcaagacaaatttactctaaattggggggagaaaatttgaaaagaataaaaagaaagaggttaagcatcagcacacacaacaaataagttgtatgttaaaaataagaaaaaanaatgagttgtgttgttacaataaggtcaaa

SEQ ID NO: 265900 - DNA, 440 bp, Glycine max
  unsure (1)..(440): unsure at all n locations
actttaatttctatacaagatagcatgacttacgcctaggtatctaagttttggttctgaatgaacaaaggcatgaatattaggacatgtttgagaggttgttattaaaatttaaatttagctgccccatgaggaataccttgcacctacgtagcatggaaaatacctttcaacgggatgtatatatgtaaatatatagcatggaaatgccttgcaaaatgtctaataaaatgccttgcataaagctgaataaaatgccttgcataataggaatatatatagcatgaagtgccttacaaagtgttggatgggtagcgtaaaagtgttgttcaaaatatgtgtatctgtgagtaggtaacacaagaagccctccaaaaaaatgtgtgtgtgatatatatatgatgtagcatganaaggtttgtcaaaaacaaatatatatg

SEQ ID NO: 265901 - DNA, 405 bp, Glycine max
ctgagcaacatagcgatgtcttgatgctcttgccacctatcctgtaatagatacccctacaatttactccacataatctcaatctactagctttatcaatggattgatgttaagacaaaaggccatcatatgcacaacagaggcttgcctgtcctataatactcatctacttgaaccttgtcgtgtatcgaaatatttcatatgcaagtcgttgataccttgcgatctatagctaccaagctgtatttcacgactcaagataaaagcctgcgccagttcactgtcttactacttaaccttgacagagaatataatacttggtgcacctccacttgacttacatcacaccgtgctgagacactaaatgtgaacaccgcttgaattatacgtgcattctgtgtaaaa

SEQ ID NO: 265902 - DNA, 479 bp, Glycine max
  unsure (1)..(479): unsure at all n locations
ttaagtgacctgcggcatgcaagctntgtacaagtctaagtgcaatagagtacttgttntagtgctattttccctcctaactgcctattttgcatctttcaaatatataaaatgaaatgactagttcttaatgtaatatttgtaatacataaaccaaaaatctctacagcctttgagaaattgggtattgttttttacaaattatttatttctggtagtttaacttcttgtttgattaatatgccaggaagattatagtaggcttagacccttaagctatcaaggagctgatgtatttatactttccttttctctcataagcgctagctatgaaaatattgcagagaaggtttggttctttcattcaattaatatggatatattttaaatcaatttctgcacttaatatgatataactgattaagctattcttcttttggtttcttctttccctagatccttgaactaaggcattatgc

SEQ ID NO: 265903 - DNA, 340 bp, Glycine max
agatacccatgctgacactgacattcctataagaccaagtttcccaccaacccaacaatgtcattactcagccaataacaacccttctcattacccaccacccagtcatccacaaaggccatccgtaaaatcaaccacaaagcctacctaccgcacttccaatgacaaacaccacctttagcataaaccaaaacacccgccaagaaatgagtcttgcagtgaaaaaataacctgtagaattcacccaaattccggtgtcctatgttgacttgctcccatgtccactcgataatgcagtggtagccataaaccctgctaggtctgctcaatctccattttt

SEQ ID NO: 265904 - DNA, 300 bp, Glycine max
atctttctattcaaggaaaagctaagcctagcagggactcatgagcaaaagctacaggacaagcatgcttatgtatcagacctgtcagcggaaatggaatcatgggaaagggtgatcgattctttgcacagataagcaatgatgtggttggacaggtttcgctttatttttaatggaagtcaagagctttcccgactgttaaccaaagccaaggcattggcgaatgtgtactccactcccaatgacgtttacgggctcctcaatatatgctaacacatgattgatctaatggcccacata

SEQ ID NO: 265905 - DNA, 408 bp, Glycine max
cttaaatctagctagctcctcacgccaagctcgaatattgttgtgttcttgggaccttcaccgagtgacctgacaatctttcttgtcttatggacaagttggcagtgggggcagtaaaattcttgctataaaccttggatgcgactgtgatcgtatacccatatcagctagatctggacgaatattatagccatccttcgtcttaccttgaatgataatgatcgtcccaatcacactgtcacaaacatttttcttcacatgcataacatcaatacattgtctaacgataatatcagacctgtcctgaagatctgagaaattgaacctctcttcacatattcatctctgacttttatcctccctttgggtcttcacaaatatactattaagaccttgaacccgctgata

SEQ ID NO: 265906 - DNA, 452 bp, Glycine max
acctgcaggctgcaagcttccatcaacatgggagcaaatcatttctttctgtttaagaaaagggtctatcaagtcaaaattaaaagcctagaggtggcccgtgtgcaaaaattgaggcaattgatgggacagctccaacatcaagcctttcgcaagacctatgggaagattcggtatctagctatgatagagatctcgatggaggccattgcattgctcacttagtattatgatcagcccctaaggtgcttcacatttggggactttcagctagtaccgactgtggaagagtttgaagaaatcttgggatgtccgctaggaggaaggaagctatatctcttttcagggttctatccctccatggcaagaataaccaaggtaaaggtagttagaatctgtagaagcaaagctttaagaattatgttgatgatgccaaggagatataaagatca

SEQ ID NO: 265907 - DNA, 421 bp, Glycine max
taactcatccaaacatggcaagtgcaacaagctttcatctttattcttcacaactaactatcatgaagcagataactaacaaaactacccatcatatctcccaataccccatacccacgaaaatcaaaggagaaagaagtcccccaaacctgaaatttcaaatcactcgttaccgccttacgactccgaaaatgccatcctttcgcgaattggagcataaatgggcaccaaaggtcgaagctttgtttggagcttcaatggagaatgaaggagaatagaatggcatcgtgagagagagagagagagcttctgaatttttttcttggctgagtgacgagagagaatataactttttggttttaaataaaaaggggtttctctttttctattattatatttaagcaatgccacatgtctacat

SEQ ID NO: 265908 - DNA, 67 bp, Glycine max
aacgcagccccagggaactcgagacaacaaacaacaccagcacaagggcaaagccccaaaggaacct

SEQ ID NO: 265909 - DNA, 370 bp, Glycine max
  unsure (1)..(370): unsure at all n locations
ttgttacacaagtggccgtatatatctatttaatgagggttggattaagatatgacanactattttcccaattaaaattctatttcaatttcaatgcaagttgccagttcccttaaaaatgaactctttaatcatgatttaaatagaacaatctgaatacaaatgtaaatcaataataaataaatgagtttaaaggaagagaaagggcaaactcacattgatactgggtctggcacacccttgtgcctattttcagtccccaagcaacccgcttgagagtaccactatcatgtaaaatcctttttcaaggtctgaacacacaaagacaatccttgctttgtgttcaaattatcttacaaaaagagacccc

SEQ ID NO: 265910 - DNA, 447 bp, Glycine max
agcttgcctaattaacttgtatttgagagttaatgattattaaacacacaaaatggaagtactaagtatttattacctatacttaacaaaaaatacttacaacactacaaaataaccataaactggggaagtttgatacaatttacacaggttttatacatacaagttagtcgtattcatcgactaacaatcgctcagtggcaagttttgctatatgagtttgacatcgtctatgtcacccaaaaggtgataaagggaagtgactaggcagactatttcgctcagcagcctctcaatgattactagcccatgcatctagagtttttggatgaagacattatggccttgttcgaagagaagtcagaggataaggacagggctaaatggatcgtgtggttcgatggcacatccaatgcattaagccacggtgttggggcggctctggtc

SEQ ID NO: 265911 - DNA, 347 bp, Glycine max
tgattgacgtggggtggctaacattcacataatatggctctaatgtgaagaccaatttgttcaccaatcatgggagaccagcggtgaatgcgataggggcgtgcggactatatatgcctaagcaaatgatagacatagttacctcaagaaggtttatctttgaagctttgcaagaggcgggcatggtttcctttgatgggcctaaaggggacttctgtttgatgcatttgggtgcatcgcatgacatggagacatgttcgacggcggaggagctattacaacaactgatggaccaaggctggtttgagatcggtgaatggaacaagggagaacaacatgtgtgcatg

SEQ ID NO: 265912 - DNA, 412 bp, Glycine max
  unsure (1)..(412): unsure at all n locations
gctcgaccattgtcgataagtacctttgcgacaacgtggtccatacatctcaccggcacatgtagagccttgttgtgtcctctcccctcaacgggaatctcttcttccgcaaacgcgatataattgttggtggttatatgattaacgatgccttcgaaaccctccactgagatatcatgtgctacatgggcatcgttaaggaccttcatcaacagcgcacgatgaggctcggagtttatgagtagttcaagcaaagagatccttgctggagttttattcagttgctcgactaccttaaactcgctttgttggatgaggcggaggaactcatgggcctcttccaaagtcactggttttctctgaagtccctctttnttttcggcccctcttaccactggaggatctacttttt

SEQ ID NO: 265913 - DNA, 441 bp, Glycine max
  unsure (1)..(441): unsure at all n locations
ntanaanaagaacanaatggatgatatatataaattcatataattaattagacatattagagattcaagttggtgaacctgtagatgggcagtacgcaggtctcctccacaaaagctacaatctactaagcaagcatctgcagaatagcagtttcaaacaaactaacttcacttacaagtatactgtttaatacatcaacacaaacaaatgtatgttgcacttctcattacgtttcagtgtaaccaagataataacatggattttgcaaaccaaatttaaatattatgctgaagcctgaaaaatagaccgtaacatcaaaattgggcttgtttagaacactggatttatttactgttcgttaacaatacaggatatgaatgcagactatattgtcacattattattaatattgtatcctatcttgttcttaagttaattaa

SEQ ID NO: 265914 - DNA, 404 bp, Glycine max
tactagacagaagcgggcattcccagtgctctttgagcccatagccgaattcgccctgccatcaacgtcagaactgaaacccaagcttggtgtcggatccgggtcgggtccagaaccagaaattaggagagcgggtttgaaagctgaaatatgatacttcaccacctttagggtctgtcaaggaagcggtgagcaagataggcctccatcaagtgggaatgtggatgcatgaatgcatcggtcgggcatactttgctcaattagagaggacagggtttcttgctatttccttcatcgtctaaaaatgttggtaaataaatgttaattcatattagggatgagttcctttatgagaatctagggaatagccatatataatacatctaatgattatgttgcgatac

SEQ ID NO: 265915 - DNA, 325 bp, Glycine max
  unsure (1)..(325): unsure at all n locations
cctngtaccacatcgcagctcacagtctttattatttttatccttcccaacccttgtgttgggactacaaggcacttatgatacacgccgatcatcccattgctgcttgcccgaagccatctgtactttcttcacgccgcatccaatgccctgcgaacaccttggtgtaccctcgcgtagggagcactgaaacctcgcgcgatgaaagcgcggatgcttttctttgatggcactcctctcatgggacatacttcgcatgaaaatagaatacagattctttcttgcttatatcgagggaaccatttaactgacgcccgtccatgct

SEQ ID NO: 265916 - DNA, 366 bp, Glycine max
  unsure (1)..(366): unsure at all n locations
ctttgngngggatgcacagtgagatattttttctcatatttttataganaggtggggcactgcaccaattttagtgttacctgacctgagttgaaccatatgatgcgtattgtgatgcgcccaatacggatttgggaggagtgcttatgccactggaccaagcataggtctatgcttgctgacagctcatgattcgtgataggaactatcctatgcacgatctcgagttaacgagcgtaatttttgcttctttagctttagaggccttatctttatggatctaaattcgaggtgtggaatgaccatatgatccttatatacctgtgtgataacagagaacttatcatcatacagacgagatggttt

SEQ ID NO: 265917 - DNA, 294 bp, Glycine max
tggttatggcaccagttaccgtgctcaaagaactactgttggaaaacggattgaatataatgctaatgaccactatctgttatatctattctgggctgtgcgctgaaagctatgattaagaacacgaaaatagttagtgtccattatgtgcgcacaactagacagtgaagctacttattcgtcttaaaaaaatcacttcttcttgtgttcactttcccacttataatagaaactggaagcaactctttgtatgtaatcatcttgatattactaaaactaatttaatatatgatt

SEQ ID NO: 265918 - DNA, 456 bp, Glycine max
  unsure (1)..(456): unsure at all n locations
agcttntccgaaaggcatggttatttctatttttctgaaanatctaaaaatattgccagatgacgatctttttctttcttggaaggtaccacaggatatggtacttccactccttcatccacaactttttcactcctactcttccttgcattcttattatttttttcatctttttcatttttttcattatctatatattactctactttttttttttctttttcttcgaccttcaattctttattcttgaccattatttgttcctctttttcttgattactttcacctctcacctcatttttcttgccatcactacctttcttgttaacagttttcttcttatgcacaacactattctaatcctcagcctccacaaaccttttactccttgtcatcacaactttgcattcctcattggcattctgttatgtattttccacaaaactgttggatgac

SEQ ID NO: 265919 - DNA, 363 bp, Glycine max
ttatcccccttttatggctcttctgaaaagcaaccataagtcttgggatgaatatctctctcatgtagaatctgcctacaacagggggggttcattgaaccaccaagcaataccctcttgaggttgtctatgggttcaatcccctaacatcgttatacctcattcccctcccactggacacttcttgtatacataaaaaaagggaatcttggtgagagtttgtaaagaagttgcatgacacggttaataaccaaatatataaccaaacaacggtgtattcaactaaaggcaacacacgaagacaaaaactagttcttaatgagggtgactgggtttggctccatcttacgatcgatatattcc

SEQ ID NO: 265920 - DNA, 470 bp, Glycine max
  unsure (1)..(470): unsure at all n locations
gtcacctgcggcatgcaagctntaaanaccctgctatctttgngatttttatttctgatgttattggggnctccaagttcagtgttcatttttttatatgtttcattcttgcagttcctgtcagtagctcaaaataagttgaagtctctcactatggctagccaacctcgactccaggttgttcaattgtatggagtattggtaatatgtactcggtgtgtttttgtgtacgcatgtgtataactgaattctatgaatgaaataatttggtgcaggtcttatctgccaccaaaaacaaaatttctactcttaagggtttcccatatttaccggttctggaggttagtaggaaaccatctttatttggcctaacctaacttagtgatcagacatcatctcacttttattctagtagactttctattggacatagttcaccattttgtggtattggctgataaattatctta

SEQ ID NO: 265921 - DNA, 440 bp, Glycine max
gtgtgtaaaactgctcgcccatcgattgaaatggactgtgaaacctttctcaaaaccccttatccaagaccacagtttgaatgtcgcctcttcaaacaatgcattatcattgaaagtggcattatagatcactatactggttttaagcttccaaatggaccacgtttatgctaaccaccaatattgccatctgttcatccttactccatcaagttgaacacccaaacgttgaatgaaatgctgctttgggcttaatgggaaagcacctttaatgtgcagccatgtcagagtgtcccaccaaatgggttgtatcttgctgcaattagttgatacctaatagtgcactcctataattatatgaaaatctattgtgacccaccctatgttcttgccctatttgtgaccctcttatacacatctttgatagctcatatataggt

SEQ ID NO: 265922 - DNA, 472 bp, Glycine max
  unsure (1)..(472): unsure at all n locations
tcctttagtcacctgcggcatgcaagcttntctatattgagcaccgcgcagtatatattcatcggactcaanatgaaagaacagagcaagaactctttactcgtttaagtggtttcccttgaattctccactcanaatcatgttgaattcatgtccaccgagtgtcaagtgctctatgttgggtgtaagctacgaataaaaaccaccaatgaagaaaaagcaggttagggcaggtatagatccacctctttttatataattgaaataatgaactttcatgctaaaataagtctaataattaatgacaaattaaccaattctattaaataggtgcaaacaagtcaatttaaaagaaatcagttcacttattaaccaaaaaagaataatagacgaaccaggctagctatttataaggtggaaaaggataccctaaaaagaataaggtggagaaaggatattcacaccgtatgtc

SEQ ID NO: 265923 - DNA, 447 bp, Glycine max
tgactggttcaacttaagtccatgaagataagcagatgtgatgaattagatgaaatagtacgcactgagggaaatgaagaagcagagcatattgtgtttggctaattgatactataaacttgagactaaaagcgaaagttttcagttcaagaagtgtgaattcaaattcccgtcattggaatttttgattgtgagagaatgcccatggatggaaagattcgcggagggtggcgcacgagcaccaaagttgcaaaacatagttactgcttatgaagttggaaaagaggaaaccaaatggcatggggaaggagactctaatgccaccatacaaaatgttgtggaagatcaagtacttattcattcttaataacgtaatgttttatctataattgtaagtctctgtaatattttaaaatattcatttataatccctcacgccaaaattaa

SEQ ID NO: 265924 - DNA, 440 bp, Glycine max
  unsure (1)..(440): unsure at all n locations
agcttgtgcaaatctagtttctcccgcattttatctctagcaagcattgtatgttggtctcgtcctttgtcgcgggaagccggaaggtccatatcaccttcttaattgtacacatggggcactgcgcccccaaatgcgcaagtaagaagagataattttccgggctctcgtgtccgtaaaatgcattcatatcatgcatcgcataagcatctcttcataacatcataatggacatatcctgcatttgtccgttatcatattccggcctcacattatgcatgagtcatggcatcatcatgcatatgcgttcaacaaactttctgatctgcaaaattgcataccatgttgtttcatgtttgctcatccttgcgttctcctctacaaaacaaaaacaanaaaggggaagcgtgaaacttacactacattcttagttgcatgtg

SEQ ID NO: 265925 - DNA, 391 bp, Glycine max
tacgtgacctataaatactcagcttctttccaagctactctaggtggtgaatctccttcttccatggcgtataccctaatggatggagcctcctctcacctcttatgctttgtcttgcggtgcatatccatggtggaaaaccaccattataggacctcattgaagctcaaagatccatcctccatttaagctccacaagcatacctccttctagtgataattcagagcacaagagcttcaagtaggggctccttaaacctccattaattatttgctttaccttctcttatattgagtgttattcattgatctccatgtatcacctcacatgttttgtgctaaatgttgttaacatgattctttagagatatcaccgattaacgtgttataa

SEQ ID NO: 265926 - DNA, 485 bp, Glycine max
ctcgaccggatcttagcaccgcggctgcagcttatctactatatgccttttttattaaatatctagcaaataaaatggaatatgaatttatcaaagacctcaacacagatcatgatgattggtttctaaaagtgtgtattgttcgattgtggaatatttataacaagaaagatgagcaacacccaatgttattggaaatgatgttgctagatgaaaatgtaactaataacgaatgtcgaattgctcaaaaacaaataaaattaggaaattttgtagcacatgattaacctcagtcgaactcaaaaatatgattcaatatggttcctacgttcattcacttataaacacaaagggggaattttatcgaatagtttgtgagcgattacaaaggaatgcgaaaacacaaaaacaaaattcaagatacaaaacaaaatacaattcaagattaaaagcatcaatccaattcaccaaaccaatacaaatag

SEQ ID NO: 265927 - DNA, 452 bp, Glycine max
ctgaagaagcgtcaaagcaggaagtatgggtcaaggcaatggaagaagaaatacagatgatcgagaaaaacaacacatgggagttagtaaatcattcccatggaaaagatatcattgggtttaagtgggtctataagacaaagctcaaccctgatggcaccatacagaaacacaaggcgaggctagtagctaagggttactcacagcaacccggaattgactacaatgagacatttgcaccagtagctcatcttgataccataagaactctaatagctcttgcgtcacaaaaaggatggagtatccatcaactagaaaagcaaagtgttaagactaagaaaagcactctacggtttgaagcaagcacctcgagcatggtataacagaatcgatcagtatttcatggatcgagaattcaggaggagcaagagtgagcctacactgtacatcat

SEQ ID NO: 265928 - DNA, 396 bp, Glycine max
tagtgccacatcccttaattctcacgcaacatattttgattgtgacttttcgaccaaactcaatgaatcgactgatgcttatgtcttgacctacaccagttcactaactagaagatacatccgctggccgaacgttgcactctactttcagtttagtactaccaaaatcacatgataagcctgtgcgtctaaaacgaacaactctaggtgccttactttggccgaccaaatagagaagcctgatctccggtacctactgcggaaaaccttatatagagacgaacgagaatccgttacacatctttactgacagatgtgctgaaagacactagacactatataccaagcagaattagagagagaagacgctctcatcggtagacgaaaattatgaag

SEQ ID NO: 265929 - DNA, 410 bp, Glycine max
accgaatccaccatgaccaaacctcatctttccatgcaagttcatgtataatataattgaaaaattagaaaaacaaggtttatcagctgattatcatgatttgccacacaccatgcattctgcgcataattcaggatgaatatgaacaatactatggtgcaagggattggagaaaatgcgtaccgcgatattcttgtctgctactattggtgatattcacttgagttcccaatgatgtctctaaggagcagtatactctctctatacatagcatactgtagattgaaacagcaccaatctacacctgcagcatatgtgacaaactcagggagttctcctttgtgattacctatctctcatcttcttccggtcgttgataccaaaatgtgaccatctttattgatgcatat

SEQ ID NO: 265930 - DNA, 421 bp, Glycine max
ttcagtcatctcacccgaggaagacgaaaggctcctgttctttaatgcctcacgaggtaagaacatattagtaaatcttagataatccactagtccattgtcaaagaatcggtcggataaacttggcaaacttttggcattcacatttgatgacaatttatactaatgccatatatttatagatacaaagagagagatatagagagagagaactaccctgtgacttactatatgctctaccattctgatctcttgcacatcggcattcttcttcacgcttatggatactcaaaggatgcaattatatatgtatctggaggagaagtctctgggggtcaaagaacattgaatcctcttcatgctttgttggaaaatgtcattgatataactactcttatcactccatgggtgatgagtatgc

SEQ ID NO: 265931 - DNA, 448 bp, Glycine max
agcttctaaattctttgtattcaaatatttatatagtagaagaaggcacaaattaagtaactcctatttctatccccatgtttccctttcagaaccaaataaattacaaattacataaacgcacaagctaattgaatgaaaaatcgaacaaagctgatgataaatgcgtaaatagatatctttgcagattcctgaacttcttcattagttgtgatattaatgctatctgtgtgtattaaaggaagtagctgatagagaagttttctttaaagaaatagacacctgtaacctattaggaaaactatataagaatagaagtataaagtataaattttaaattttaaaaatatatgaaaatcataaaataaatattttatagattgataatgtaaagttattctcaaatgtgaaaaaataaatcaaacaatctcgtgtcctatattgaata

SEQ ID NO: 265932 - DNA, 391 bp, Glycine max
  unsure (1)..(391): unsure at all n locations
tgatttgtaagttgattttagctgtattgtcactttggttattantcaattcattcaaggaaaattctaacgaaaaatgtccgattgattgttttgattattttattcaaagatattttgattattttcttattattttcccttttttatttaaccgagattacgacgttaacgatcggttggattttattttaacagtggttaaatgagattacaactcaaatgatcggttgaaattcattttatcatttattaggtgagaaacgactcaaataaacagttaaagcacgttaaaagggggtacggaaaacaaacaaaatgaaaatataagttcgcgaaacaagtgtggaccactaagggtgcattgaatgaatttgaagattcgatttca

SEQ ID NO: 265933 - DNA, 406 bp, Glycine max
  unsure (1)..(406): unsure at all n locations
tcaaccgcagcaagacatgatttatatacgatcgaagatctttatccttatttcatcttaaactccttctaagtgttgcagaggctctcatgcgatttgccgaagggaaagcttctgctaaagctaagactgttgaatggatacgtaaatattaatttgagagggtagggaatccgaagtttgaacatacaagttctaataattgaatagttacaatatgcatattctttatttatattttctattccataacaattaatattgtataaggaaaataattngtttcatctgcctttgacttatactgtatcatgctctttaattgtatacttgtagattgatgaacaatttatttcttttggttgcttctgttcttgtatctaatntacttatatagtaatatgat

SEQ ID NO: 265934 - DNA, 428 bp, Glycine max
  unsure (1)..(428): unsure at all n locations
actgctaatgtgatctgacaaagtaaccatgcatnctntttgaataatattcgcagatatttaatgtgtacttcatagcataggactcaaaccatcatctctcaccactttctgattctctaattacaaaatatcacagcaccggaaaaaactaacaaccatgctagagatttctttttttaatcgaatgtacctttttaaaataaaataacagagaaaggacagtgatatcaatccctaaatgacatgcatggctcaaagaaaagtatgtgttacatttacaggttgagaaatactagcaatccattttggtcctcatttgtaatacaccttctatcattatttaaaatttatgtgagaatcaaaaatatttgggatattataacctatttaattatttttattccataatctaaactttttaaata

SEQ ID NO: 265935 - DNA, 470 bp, Glycine max
  unsure (1)..(470): unsure at all n locations
atcctcttagtcacctgcgggctgcaagctttataagngaattcttgcgcagctttcttcctaagaatactctcatgaggtggcggttgagccatgttcacagggtgaaaattagtcgtcgaatgctcttattccgaatattcgcaaacaccaccaacattatgctcataatgatcaggatgctcataatgctcgaaatgcacaaaaatgaccaggatgctcactatgcctaaattatctatgaaaggttctatctatttcatgatcaaatggtagtaaatcaccatgattgcccctagtcatgcactatatgcaacaaataatgcgttttttaactcgcacctcacaaggcggtaaaactataactatactcacacgatctccaaataagctgatatgttgtgaggaataccctcatctcttgacaagatggcacattacaattctcactcatattcaaaggcttacta

SEQ ID NO: 265936 - DNA, 409 bp, Glycine max
  unsure (1)..(409): unsure at all n locations
tcatgatgatacatctagntgattcacgtctttctgcttatgacacanctgatgaataattgcccactgtatgacttcaagatcaagccaccttgttcgagatctcgttttttttcatgtgccgtgacatgacatcaacaacatcctgtacctcatatatgtttggtttgaggatccaagagaccatattttcctgcttctatgcaagagcttcatcttactcaacataggaagcattcatctgattgtccttctgaccctttcttacaagagttggtgacgacatagaccatccaaaatatgctttatcaacctgagacactggcctcctatcatatattgcctatttccttgggccgatggctactgacattgaccgaactcatatccattcttctgacttgttgcc

SEQ ID NO: 265937 - DNA, 449 bp, Glycine max
  unsure (1)..(449): unsure at all n locations
agcttgagaattgtagttctttntggaattntaacaaataatataaaataccaaatgagcatcaaacatattaagtcatattatcgagagaagagtttaagaaatacctagatccatggagttcgatcaaacaaacacagttgtttaccttcacaactttgcatgaaaggttttttatgtgagacccacactgtttttaaagatttctttggtatttcaatccgatcagattatggaagtttaatataacttaagttcccatttctctttctttctcttcatttcattgatattttgacttcaccaaatagatcctttgagtgttaaatatatcattgtgattcattttagaacagttctttgatatatcattgctattgcattgccaaaaccttacattnttctatgaataaattttcaaacaaataaaacaaagcagggaaacaaca

SEQ ID NO: 265938 - DNA, 439 bp, Glycine max
  unsure (1)..(439): unsure at all n locations
gtgcgcacgtttgttaactaactctccatctttntatgacaactaattaacttatgtatgctgtttctttgcaaaattgattgatataagaatactttgaatattctttgtaaaaaataaaaaatattttaatatttttctctaattttattgatcttcttacatattaaataaaaagtatcacatttttattgtaaataataaatatataatttttatttcatatttttataaaatattaaaaaaaataaaaaagacaatgaaaagacaacatttctcttatggctaccgtttaacgttttatgagatagataattaatttttctttttatatattttttgttgaaatgtcttatctagttttaattatacacttcaataatctaaccagcttgtcttgcacgcaatatattacgaaaaatgtgatcaagtttttctt

SEQ ID NO: 265939 - DNA, 280 bp, Glycine max
gacatatcctccatggagtcttgatccttaatgaggtggtgcgggaagccattatagaccccaagccagtcctgatattgcaagtggactttgaatagcctatgtctccgtgtcttggtccttcttggattatatgtagcttacattgggtttctgccaatagtggagaggatggatatcagcttgttttcattcagcaaccatatcaagttctgattaatggtagcccatctcatgagttcaacccctctataagtttgaggcaaggaggtcctttaac

SEQ ID NO: 265940 - DNA, 438 bp, Glycine max
gaccaaaactaactttagtacatcaattacttggcaagattattttttttccaaaactgacccatccccagtgtatgttgcactaaatgtggcagaagcagaatatcacaacagaactataatgatgctatttatatgcctgaaatattgtatctcacctgcccacatgacaacaccaccagcattctcgattctcttccgctcatcacttctattgggtttatgatcctcaaagagagcatttgctgccaaaataaaataaattaattcaagataccaatcttatttccaaaatgtattcaaatggaactgtaggagaaaatttatcatatgaccagacaaggactcttgtctgaaatgctgtatcttccacatgatctctgtatttacattatcaagcagctttgtcccaacatcacatcattaagatataaacac

SEQ ID NO: 265941 - DNA, 481 bp, Glycine max
  unsure (1)..(481): unsure at all n locations
gtcacctgcggcatgcaagctngctcataactaacaaagtttattttgttatattgattcattaaaagccaatctagctgaactggaatcacatcatagcaataattatattgaggaagagttacattcttggaattacttgttttcttgtcctttagaaggttgaagatgtttctatattcatcttgatttttaatttataacacacagcaaataaatatgttgacatcatgtggcgctaaggtagtaaaaaagttatctaaaaagttacctcccatacaagaagcaccaaagagttatactccatatatcaagtacaccaaacttcaatttaaggtatggaaacagttaaaatttgagaactttgattctttcatctatatacaactcttaaatgtttcattgagaattgaattaacatattcaatagacaaaacataggttatttctatttccatagtaaatatcaaacaatgggtca

SEQ ID NO: 265942 - DNA, 429 bp, Glycine max
actttgaccatgcttctactcctggaactggttttgcttgctttccttatttcttgtcctcctgagatgaaaaatggtggcatcgatccaaaccacaaatcaaattcaaattgggggttttataataaggtgttattggtgaaatttactattttcatttctgaaattcgaccaatgtttataaaataagtgtcataggagacattaggtttaattatatttaaatattgttattgtcgttcatgaacaaaaaagcaaaaaaataaaaataaaattagtaaatctacatcggttattccaaaaaccgatgtagtatccgaacaattctgcatcggttacaaccacaatcgatgtagaattctttatcaaggggtatccttctacgacgtttgtcgccaaaacccaatgtagtatcatgtccattctaca

SEQ ID NO: 265943 - DNA, 412 bp, Glycine max
  unsure (1)..(412): unsure at all n locations
tatggggggcggcaaaagagcataaaccacagagtcttgcgacaggtagagatttctgattcaaggccagctgggttaccaggttaaccaatgcatttagtttaccctcaagcttcttagttncagctaatgaagatgaattcgtggctacttcatgcactcctctaatgacaataacatcatttctggcactaaactgttgggagttggaaaccatcttctcaattaaattcctggcttcagcaggggtcatgtctccaaggactccaccactggcagcatctatcatacttctctccatgttactgagtccttcattaaaatattggagaataagctgctcaaaaatctggnggtaaggcaactgacgcatagtcttttaaatctgctccagtattcatataggctttct

SEQ ID NO: 265944 - DNA, 424 bp, Glycine max
cgtacatatcaatctcacacacaggttaagtgcctcaccatgttgtgtataagttcctaacacgtagcacattaattaaaactagtagtcatattacaggttcaaattcttggatttgataacaagtgactgaagatgtaacctatcattggtagtagcagcaatagattcctcatctcatttttccttggaaacagatacaaccatattagattttctttcttcttccattttctgcaattccatctcatccaaataatgttgctcaaccaaatgtttacttgaaaaggtcaacatccaaggattagatatgtctacaaatatactaacaaactctgttcttgaaaacaaagatatacattaatatcaacaagtataggctcataccattcaatgatgcagttatttaccaaataccctcttg

SEQ ID NO: 265945 - DNA, 419 bp, Glycine max
  unsure (1)..(419): unsure at all n locations
agcttcaatcgtttatataagccgttttctcacctaataaatgctaaaatgaatttcaaccgatcattngtgttgtaatgccatttaatcaatattaaaacaaaatctaaccgatcgttcatactgtaacctcagttaaaccaaaaaaagtagaataataataaaataatcaaaatatcttgaaaaaaaaataataataaaataataaaaaaaatcaatcggacgttcttctttgaaagtttccttgaattaattgactaataacccaagtgaaaccaaggctaaagtcaactcacaaaccaagctttgtccgcaaaaaatcactcaagacaattttaagggccaatgccttaaaacgggcctctttgcttttattggttaaaatggaccattcaaagcataaaatcaacacataactt

SEQ ID NO: 265946 - DNA, 479 bp, Glycine max
gatcttaagtcacctgcagctgcagcttcaaatagaacactaatcttgttttatatcgatgaatgatgaagaacggacgaagaacggtgaagaatgttcacgaaattggtaacggaaacatcacggaagcgttacggaagcgccttaaccttgattttcaccttctttcttcttctcctcactaattttaagtgaaatatgaataccaagggtgatgaaccccttcccctcagccccccacacccttttatagccaaaataggggaagagcttgccacccagctcgcccaggtgagctggttgcttcgtgttgaagcttcctgatgggcctaaatgggcccagggctgaagaacaccccctaaattgatcttttcaccctcattcttgagttttttgctcatttccttccgaaacatcgcgaaatcttcaggatcgtgcgataattggctgtatgcagctcaacgtgactggcaaaaat

SEQ ID NO: 265947 - DNA, 430 bp, Glycine max
  unsure (1)..(430): unsure at all n locations
tttcgcatagcttacggtaaaatctgagacctatccngttgttatgtctctacagaggccattgcctccctcgcccagtattatgatcagtcgttgaggtgcttcacctttggggacttccagctatcacccatggtggaagaatttgaagagatcctatgatgccctctatgggggaggaaaccgtacctcttcacagggttctatccctcattagctagaatttccaagatagtccaaatctcggcgtaggaattagaccacaggaagcaagtcgaaaatggggtggttggaataccaagaaaatatctggaggtaaaagcaagaatcttggcagataaaggcgagcgggtcccgtttatagatattctcgcactgttgattctagggggagtactttcttcgaacgtggatgggttggtgggcctgg

SEQ ID NO: 265948 - DNA, 362 bp, Glycine max
aacgttccagaagcgccgcggcttatattatcttcacggaaacaatttttccaagcaagttcggaagagagagaattgcctaaggggctgaaccccttactttttcacttcctcccctatttatatcaaaataggggaggtggttgccgtccagctcgcccaggcgagcaaggtttgttcctccataagcaaccgccttctggaggaatattccagagggcccaagtgggcctgggtgctatttgcacccccatttgtactaagcacacccccctctgctgtttcttggtgattccattttcgcaaagttacagaaacttaacaatttcgaaacgatacttgttttctttctcgaatgttac

SEQ ID NO: 265949 - DNA, 311 bp, Glycine max
cccagtgaatccaatcatccaacattttcacattagaacaccaaatggcatagattactagcataacaatcttaaaaaggtcaaagaaaaggcctaaggtgattatggaagctaccaagttataaacttaaagttacataacttgtgaagtctataactcgactggggctactctagactgtagatcccttctataaagaataacaatatcataatgacatgctataacatttacaaacattaagcaaaataaatctaatttacaaacttaataaccaatctatatgatacactaaaaaactaccgagtat

SEQ ID NO: 265950 - DNA, 303 bp, Glycine max
agcttctaacatacaggactcaaatcttcttgataactatgaaagccctcttgagcgttgaatgccttccgttgatttgagactcaatactaaccttataagacactccgtgatccttccgtacccttactgaagtgtggagagatggatacgtttgggagatgagcgggggggagtctgtttcataggataaaacgttcgcggctatgctaatgatgtatagacgccatacttgaggacactgatatagggtaatgatcacatgctgagagagatctgtttgtcaaagctcccagagtgaca

SEQ ID NO: 265951 - DNA, 298 bp, Glycine max
tgtctctacgtgtgttcgacactgttacgatcttgctatgtttatcgccatgcacctatatgagacctgcctaaacatggtcgacgaacatacaatcgtggacgagtttgctcaattactctctgaagaagaggctatatgaagggtgatcaactctctacaccagagaggcaaccacgtttgatggagaggggtgatgattaccttgttcgagaggcataaaccatcccgtttgttcatcaacgaccgggtgatggaggactcctactccgccgccgaagaaagccctgggcttctc

SEQ ID NO: 265952 - DNA, 450 bp, Glycine max
  unsure (1)..(450): unsure at all n locations
agcttgtangattatggtgtacccatcacatgtggtactaggtggtggtcgggcgatggtgcaaaacaattcttcacatccacaaatcacatataaacccaccatcccctgttgcccaccttcaactgagctcacgtactcccacgtagcccttatcctcgtttctctcaacaccgggtccccatcaaccctcccaagcttccacaacatccaagtaattcaacattcaatcatcacaaactaacacagccaagaaaacagggcaaaggcagaaaactctgcccaaaacacaaaccaatatcacagcttttcacattcaaaaaccccagtaacattctcttcgttccagttcgttaaccgttggatcgactcgaaaatttactggaagtctctagtacataagtctacattttgaccgttggatctgtangaaatgtcagaaacccatat

SEQ ID NO: 265953 - DNA, 398 bp, Glycine max
tctttatatttgtcttgaaaatacatatattgttacttttatttcttcatggtataactcttatttcatattaaaaataagtggatttattaaaaatattcaaatcaaaagaatatgctatgttatattatattgtaattataataatataataaagctgtctagggattgattattttaaaggttatattcttaaaaaccaaaccaaaggttatatttctttttgctcatttaaataattcatttgttactttcttgaatcttgatgaattgaaggttgttcagatgaatcagacatgtaatccaatcacaaaaagtaaatgttgtagaatataaagaaaacaactactgcactaaaaatgtaaatcaatttggatatagatgttttcttcgtgtct

SEQ ID NO: 265954 - DNA, 437 bp, Glycine max
  unsure (1)..(437): unsure at all n locations
agcttccttggggccatttcctgcgaaagccaacattnggaagttagttntacaagataatgcttatcttaacgcaaaaaatgtcatgctaatccctctgatttttgaacgaactcatgtaatctatttatgcacacgcgtacgtgtggaatatcctaccatttatatcaacatagaggccatccaacacattctaattgtcacacacatatatgcatttgaaaagaacatacattcttacgctcaaggcattgcgtcaaaattcacacctaatttatatcctaaacatttgctattacaaactacctacatatatttgaaatatatatcatacaaatttttattgtttcactcacatttattcatattggcaagctatttacattatgcacacacttgcattcaaaagggaattccgtgctatcatacattcattt

SEQ ID NO: 265955 - DNA, 430 bp, Glycine max
tgaactaaagcaaatattgagtgtgaattgttttctgtactattaaactatttgaacaaaagcaaaatattcaaaactataaagtgtgacaactatcaagttaaaagcgttggggagtgtcctactaaatttctcttgctgtataaaatgtgttttttctctatttaacgttatcctagtgttcttacactgagaaattactcaaaccatgattcctcacatgaatgagcctaactctctttagcctttgttcttgattcctcaacaaacttgttctaaaagagttgcactaagcctacagtgtaaaatggactagatcactacactccattcctagacatacagatttctagcttgctctatcaagttctaagaatttaaagcattgtccaatactaataagcctaactacacatacaaatgggtgatc

SEQ ID NO: 265956 - DNA, 461 bp, Glycine max
  unsure (1)..(461): unsure at all n locations
gcttataagaacaaaatttcctcaatcatatccaaatacgcatgcgaattatgaagcatcaacaagaatcaagccaaggctattgtgcaagcaatcaatgggggcaaaacacaccaaatgattatgatgatggatggctcaaattctcacaaaggtaaactcatcacttttaaattgagctttcaaaactatcatgacatgtagaggagaatcaaggatttcaagtcacaaaatgtcaaaaacttttattttcaaaacaattacccatttcttgaacatatcctataattcaaagaanaacatgcaaagttgtacatgcgcacagaattgacccaaaatattaaactaaaagtccgacgaaactaatcaacattaacaaattagcacaaataacaaattaacaaaaccaacaaaactaacaaaaaccaaagaacacttccccccatacttaaacaacacat

SEQ ID NO: 265957 - DNA, 452 bp, Glycine max
tgtttaccccatgttgatattgcttacaatagagctggtcataactccactaattgctctccttttgaagttcgttatggttttaacccactaactcctcttgatcttttgcctatgcctaatgtttctgtttttaagcataaagaaggtcaagcaaaggcggactatgtgaagaagcttcatgagagagtcaaagatcaaattgagaggaaaaataaaagctatgctaaacaagccaacaaagggagaaagaaggttgtcttcgaacccggagattgggtttgggtgcacatgagaaaagaaaggtttccggaacaaaggaaatcaaagcttcaaccaaggggagatggaccatttcaagtgcttgaaagatcaatgacaatgcttacaaaatggagaatccgatttgaggacaaatccttctcaagagggagagaatgatgaggacatga

SEQ ID NO: 265958 - DNA, 461 bp, Glycine max
  unsure (1)..(461): unsure at all n locations
gcttatgnctctctctctttcgctcatttagttattcttgagcattacttgctttactctccttacacatattcatatntgagtggcggcatcctttattttacaggtccccccttctatcaaaggcaactctcctagccgacgtgtgaagttcggaaccccacccaaccacgtccatcctgacgtttcacgattttgaattgtggtaagaacaatttatatcttggaatgtctttctagatattcactcttcctgtcactattaaaatgagatttttaataaaaaataaataaacctataagcatttataaaaacaatgaaaactaaaaataaaatctacttatttcaaactaaaattagtttatacataaatgaaaatcagctctttggagaagtaactataagagatgttctaaagacaaaagctaactgtaacttatgcatacattatttttttact

SEQ ID NO: 265959 - DNA, 302 bp, Glycine max
gctgatgatgtcattgcaaacttccctgacgatgaaaagctgtcatggatgctacttgtggatggatgatctctggtacaaatcttgggtaacggaatacttgactatgcacataaaatgaatgttaatgttgaccaactagttcttgtgtggcaagatgtgcctttgttatataaccaacttccctatcaagtgcttatactgatgactggccccgagaatgaaaccatgctattaaacatcatgaaggagtttcttaagtgtcatcatttgtcaccagttagaccttatcacatagcata

SEQ ID NO: 265960 - DNA, 318 bp, Glycine max
  unsure (1)..(318): unsure at all n locations
ttttcactaaggagtctggaaaggatcacggtacggaagggaattggaattggatggagaaacctaaggctcatcataccataatatagcttccgagagtgagagaaattgagagagaatctaaagagataacaatggagtccaaagcctattcattgcttatataggctctcagaacaactgtaactaactgntaacagttaacagttaatacctacactaaccaacctaacagattcactaactgatttcagctgaataacctggtatttacatatataccctaatacaattaatgttatccaacacccgatgctc

SEQ ID NO: 265961 - DNA, 439 bp, Glycine max
gacacaaaaactcagctggttatagtaaattgtcccaaatctggaggaagaattatctttgttaatttgttccacacttggggaagatactgggtaagaattgaaatggtcaaataaatagcatacacacactatttttgtatatacacatactatatttgcatatatgtgttaaaaaaactaattatggattaatttaataagagtgtatgctgtaattccatgaataaaagttgagtgcctaaataaaaggcaagtatggggtaggaatgaatgaaaaagtgatggcttatctatggatgaatgctctcctaaaacctaagcttttgaatcctatataaaacatgatttgttggctgcctaaccccattacaagccctaaaaggccttctgattcattttgtgttgtcattgctgcacgatatgagatgaaatgcaa

SEQ ID NO: 265962 - DNA, 465 bp, Glycine max
  unsure (1)..(465): unsure at all n locations
agcttcaatatgtatcagaacaacaaagtatttgtttgtttgctgngntttgaaaaggctttgtaagtaaatcaaggttatataatatatactggtttgggtgtcattgataatagagcttttatatcttaaaacattttgttgggtgaacattccaaatcataaaacttttattccaagtgtggggattggaacccctaatggtacctttagaagtccaaatgcaattgccaacttctcactatgccataaaagaagttgttctttcagctcctctcttgcatcatgcaacacaaattcaagatcaggagcataaccagccagcttcattttcttctccaagtcttttagtttacatctatagaaaagccaatttggggtgcaatggtgtgcttgatctaaactcatgcaccacactgtttatttctatccaactatatccaggtatcttcactacattatttt

SEQ ID NO: 265963 - DNA, 396 bp, Glycine max
catcactttacttgaatcatttgtgagtttcagtaccccatttggctctatttctgcaaccccatcaagggtcatgttgtttgcttccagaccctcgaatccaacatataagagctggtttggctgagatgaaactgggatcagaaagaacaccaacaaaggcatgagcttgaggagcatgttgagtttggtggccatgatgcaagatatggaaaatcaaagactttgaatgattacaagggtttgaactttgagccctgacggttcaaaacattaattgctatgaacagatagaatgtgttgtgagttaaaaggtggcataataataataataaaaaaggtcacactgacgctctgctcatatttgaaggatttggtgaagatggaattgatggg

SEQ ID NO: 265964 - DNA, 347 bp, Glycine max
agcccttttccatccaacaactttaaaccactgaaattgtgttggaccagaaattatatagaagtgggcagtaactgctccttcaaaagggtgttaataaaatcttcatcattacggagacccttaactaaaagatgtgacagagaaattaggtgttggaatagcaaacctaactcttgtctagacatagctgatagtactcgaacatcaacgtaaagtgatcgtaaaccggaaggaaaacaccttggggacaatctagcttcggaatccaaatgttcaagggcggtgagatcaatctgatctggcagtgatctaagtttctcacaatcagtgacaataaaacaact

SEQ ID NO: 265965 - DNA, 367 bp, Glycine max
  unsure (1)..(367): unsure at all n locations
actaagctctgtggtaagtggatactttcagttaacacatggcctttatctgtgntctttctcatgcattcattccatattgagagattcatgcatgaaccattgcttactgctattcgttctctcacagatcaaagatcacactctcaccgggttatggctaacgtgttgcttcacaaccaacctgacaaaccaactaacattttcagtcatgatacatattccatgtgctttatcttctaacgactgcatgctcattcagagcatatgatctatgcattccaattcactcacatcatacaattgaaccattccaatcattcatcaaacactgaggtcgaatatcaaacacgaacccctgaataat

SEQ ID NO: 265966 - DNA, 419 bp, Glycine max
cattgccattaccaaaggacacatgaatataactgcagagttgaagacttatggaacatacctaacccaatggtaatactatccacactctacacagtaactgaaaggagctaatagtgaaataatgagtcagtgatctatatatcctgaacacataacagccttgtctaaataacataaagctgcttatgttttcttgtttggctcaaagacatatttgatgagtgattccttgatggaaagcaattctgggaattccgtcttcaatctggatgcatccatctcgttgttgcttcgaagagcaacgatcaccttcgcttgctctcaagggtgaagttagcccacttgtaagtggggtcaatgtaatccctgtacatctcaaagatctcattgtggctcacaacccctggatttgtgaa

SEQ ID NO: 265967 - DNA, 296 bp, Glycine max
ggggaataaacaagaacatgcattcactgcacttattgaaaaattgatgcatgcaccaattcttgcattacctaattttgacaaatcctttggaaataaatgtgatgcgtttggggttgggataatggctgtcttaatgcaagagggacatcccattgactactttagtgaaaaactgaatgggtttgtccttaattattcaacatatgacaaggagttgtatgtgttggtaaaggcattaaaaaattggcaacattatcttctacccaaacaatttgtcatatatagtgaccatg

SEQ ID NO: 265968 - DNA, 373 bp, Glycine max
  unsure (1)..(373): unsure at all n locations
agctntatagatgggagcgcatgatgcttttatcttgcgctgtgagcggtgagggcgaaaggcttgtgtatgtacaagcatggccttgatcgtgtcctcatttatacattccattctgaaattctcagattcgcgcacagactattactcacacctacgcgtcaatcacgatttatggtcacactctcaccgatctttggggcaagcttttctttcacaatcaaactctactgacgaacaatcctaaatgcaagatcactttcttgatctttctttgtgtaacatacacattttctcatcttcgtgaacggaaacacgcatctcatcttaagcatgcatggcatagataacacagtcatactccctatttcgc

SEQ ID NO: 265969 - DNA, 382 bp, Glycine max
ctataaaactaagcttcttagaaaagtacaaacctatctacccactctccttttttaactatattaactgacctacaaacaattacggatgagaataacgctactgataatcaaacatgcaacatatttactaagaatatatatatcagggtggtacacatggtatacttgagaccgttttgtccgcctcaatttgagtattcccagaacaatgcctttctattgactacaacctaagctataacggtcgccaatgataagcacttagttgtgagatcaatatatctatacatgttgtatttgaagagttcgtaatcctttctgaactgggaacagaagaatattgataagtaacatgccgcccatctgaaatatactcaac

SEQ ID NO: 265970 - DNA, 447 bp, Glycine max
  unsure (1)..(447): unsure at all n locations
agcttgtttctacgattcctattaatgatatcttaaatttattatgcataatgtctctatggcacattaaaactacaacatctatacccatattaattaagggtttgatgactacttgtacacaactgatgtgtaggtatttgtacttacggctgtgttcataaattaaattttttgagagtaaatgaaattcttttcttatatcttattccagagaaatatgattatgtaatcaaaattatctttgattccttttataagtgtattctaatacttccccatgtaatgtaatagatatagtttataagtgtatcctcatacttccacacacacatatatatatatatatatatatatatatatatatatatatatatgtgtgggtgtgtgtgtctgggaccggcctgatgtaaaaattanttaattatgaatattacccggcaacgt

SEQ ID NO: 265971 - DNA, 452 bp, Glycine max
  unsure (1)..(452): unsure at all n locations
gtggtgggaatattctntctaagttacacaacatcacatgtatgttattttccatatcccttagttgttcaacatttaatgttggtgaagttagttctctgaaaaattggctaagttcaacaagtggcttccaaataggttttagtaatgagtcgaatgcaattggaagcaaccattgcatgaaaacatgacaatcatgatttttcattccatgaatttttcccttgttaagatccacacatcgacctaaattgaaggcatagccatctggtaactttagttcttcgacccatttaagaacaacgactctgtgggatttggtcattgcataagctgcctttggtttaagaaacttgccacaaccaacatgtaccaactcaagctccttccaattacatatttctgctaaatctattcgagcatcgngtgtatccttacttttgtcattgatg

SEQ ID NO: 265972 - DNA, 421 bp, Glycine max
agcttccatcaacaactttagcataaaattgtttattcgctgaagaagcaatcgagctcctgagaatcatccaacagagcgagttcaagatgattgaacaactaaacaaaaccccaactaggattttgaactccaaacctcatcgagcattattagtcaagattttgaatgaagcccacatagcacaagacatatcggtggagggtttcggaggtataatcaacaacatcatgaccaacaactacctcacattcaccgatgaggaaatacccgtcgagggcaggggacacaacagagccttacacgtatttgtcaaatgtttggaccacatagtggccaaagtgcttattgacaatggctcttcccttaatgtcatgcccaagggctaattggacaagttgtcttttaatgcatcacacct

SEQ ID NO: 265973 - DNA, 430 bp, Glycine max
atgaggaagtgtagaatggtgaaacttcttgcttttattcgttgaccacagagtggtacctggagatatgtcgcgggggtcaagagaccttgtggacgtcaggtggggtgctattgcccaaaaccaatcttgaccaatcccgaaccaacccgggcatagtcagtcagtgagaacctgtgatgtacttaaacaggcgagctcctggcagtcaacagataaaaggaacaaagaccacaaagcatggaggcttgtgtggtggctggccagctatgaactttgattgatatatgggttatggcctctggtaatcaattatcaagggtgggcaatcgattacaaggcttaaaaatgaagacaagaggctaagatggtctctggtaatccattaaccaagtgtgtaatcgattaccaagcttgtaaagaagtcagg

SEQ ID NO: 265974 - DNA, 459 bp, Glycine max
  unsure (1)..(459): unsure at all n locations
agcttgtgatgagcataattatattggttaatttggattancttcttactcaggagggtcttgcattggttattctgggaaggtttgcttcaaaggttcaagaaatgtgactatggttgcctctacaatgagatcaaatgagcaagcatgtgatccgattaaagtgcttgtaacattgtccctccttggtttctcaatgctgatagcttcattttttcgctcaatgttttcaagagctcttgatcttgctggggtatatgccaattgttttctctttggcattattcctcctgtgatggcttacatgcaacaatccaagaagaaaataaggtatgttaagctattgcttgtccacttaacaaaattaagcattctacacacagaaatagcattctttcgctcttatgagagtacttaccatcatgatgttagtcaatatgccatatatcatgtttgatg

SEQ ID NO: 265975 - DNA, 402 bp, Glycine max
  unsure (1)..(402): unsure at all n locations
tattaatgcttntattcaaatatatatatatatatatattttttatatatatatatatatatatataaccacctttgtgaaaaaactatccaagcccatgtctcctgaattccttgcatattctcctaactcaacgtcaccacctcattggccttggtcacgtggaatttcaaatgattcctgagtaaagaaaaaaatagatcatcaaattaatatatatggttcaactttaacactgatgttgctatctgcacgttcttggtaaactagccacacaagttattgctatccaagcacaatattctacataccacataagcacatactaatcttagatgcatgtaaaattcaaacagtaacagaacaaataatctttttcaaatttttatatgatctcactac

SEQ ID NO: 265976 - DNA, 409 bp, Glycine max
  unsure (1)..(409): unsure at all n locations
agcttatatttgaatggtaatctacattattgagaggagaaatacatatattaattgcatgtacaaatatgtgaattagttgtgagcatgtttttatagctttgcacgtgaatgattacatcgatatatgtatatttgtgtgttttatttaagtataatggtgaaggttgtattgttcatatcataaattgataattntgaattatatgatagatacctccatttgggatgaggaagagattctggataccttcatctatgatagggaaggcaatgagatgtcattgattggaatatgagctcatagacttattgaagaatctgagatccacaccagttntgagaactaaagagttgagtctagtaattatgggaatcactaagttatgtttgtgatgattgtttgttc

SEQ ID NO: 265977 - DNA, 443 bp, Glycine max
tcttttggaccttgaacaagcaattaacttctctttattaccatgctatgtgctcgcgactggtctctttcttcccttcgcaacttgagttcactattgctaccccatatagctccgcgaaatttgttccagcaatactcttccttgcgagccctcttggtctcttgttcaagggcttttgcggtaattgcattctcttcccgtaacccggcacactccttccgaacgtgtgtagcggccaacttgaacttctccttggcaagttttgcctttcctaactcgcttttgagagcttggacttcttcgtcctcttccggtgcttcataactctcttcgctgacgacttttaacttggcgagccaatctaaacctcgtatatgaactttcaggcattcgtggtacccaccaatgatgccattacgaatgcctctaagctcttgatc

SEQ ID NO: 265978 - DNA, 453 bp, Glycine max
  unsure (1)..(453): unsure at all n locations
agcttgtcccaatcttatttatttgcctgtgattngaagcttattaactcaatgaattgttcattatatactatatggaattgggttggcacgcacctaattaatgcatgaatcatattagattaacacatatcagctattaataaaggccatcaatacatgttttaccagcaatttccaatttccttaaagacatattagaaccaaagtgggcccgagtcactgacaaactgatattaaaaatcaccggggaagaaaaggtttgttacatatatagctattaataaaaattaaacctaccaacgagtaatcaatgttttttcacattaagtattatctttagttattttacgtagatcaaacatttaatgtgtagaataatagagtgatagttttattaaattaatcttatttaattgatgataaaaacgcatttaatactaanataacttt

SEQ ID NO: 265979 - DNA, 392 bp, Glycine max
tgagagacacatatgtgtaagaggatgccatcctatcttttatcatctcttctgctacgctcaacaatgtaattggctacagcgtcatagcatgggtgcatgagcgagggacaaactcattcctgtcggtcatttatcattcttaacccacgagacattttagttcacatcatgtatataacatgaaataaggcaataatgatgtcagatcagagtctttcttaggatatgcatgcaactgcattcgggctccagttcctgcattgtatgaaacctaaatgcatgatcaaatacaattgtcaagtgcaatgcaaatcagaagggataaacacgtatgagcatcgtttcagttcattgctcaatccactacgggattgtgactcaatatgtgc

SEQ ID NO: 265980 - DNA, 428 bp, Glycine max
  unsure (1)..(428): unsure at all n locations
agcttcagaacaccggcctgcccccaaattatgttataganaatatctacaagtgtgatgaggctctagatatacatttccagcatcaacactactcacaacaaaagccttatccctccaggtgaagttggcaacacgaatgagacaacgccaatgctctaaactacattcttatatcgaaaagtttccatcaccacagtaacaatgctaggtgtatctagtttaattctcaaacttcatatatctctaaaatcacacacacagcaaaaattgctggctcctgcttaccagagcagagttaaagaatccgccagaccgcttatctggggaaccaaactccaccttattgtccaacatcttctcatagggggttctgatatcactaggccttgtggtgggtaaactatcctctagttggagaacacttt

SEQ ID NO: 265981 - DNA, 375 bp, Glycine max
gctggttatgggagacggaatttcgttcaaaatgaaaatggcaataacttttaactcagatgatcgattgaggcccggaacatatcgagacgcttgatattgtataccgaagctttgagcgaattcatacgaccatatcttttgactcggatatgcgattgagtcatttgataatgcgagacagctcataattgtatacagaagctgtaagcaaattctaatgacaacaacttttgactcggatgtccgattgagccattttatgatttgagacactcacaaataagtgcagaaactgttaccgaattcaaatgacaataactttttactgtgatgtccgattgagtgccgtaatatatctagacgcttaaaatt

SEQ ID NO: 265982 - DNA, 467 bp, Glycine max
  unsure (1)..(467): unsure at all n locations
agcttgtaggattatggggtacccatattatgtttgtttaggtggcggncgggcgaaggagcacaacaagttttccacattcacaaatcgcgcataaacccaccatcccctgttgcccacctccaactgagctcacgtactcccacgtagcccatatcctcgtttttctcaaccccgggtccccatcaatcctcccaagcttccccaacatccaggtaattcatcatccaaatcatcacaaactaacaaaccaagcaaaacagggcaaaggcagaaaactctgccccaaactcaaaccaaaatcacagctttttctcacttaaagaccccagtaacatttcctttgttccaattcgttaaccgttggatcgacttgaataatttactggaagtctctagtacataagtctacattctgaccggtgggattcactagcaaacatccagaactcattctcaactactct

SEQ ID NO: 265983 - DNA, 435 bp, Glycine max
taaaactaagctttacccctaatttccacaattgggtaattggcttttaactctatatttccttctatgaatgatgctctcctacaacctaatacaaggtagaatgagataaactgtacaggctcaaggtttaatcaaacaatcatactttcaactcaaaatgggtgcaagggataattcaatcatgcacaaggtaagctttttaactaaatggctatcttcaatcaaaatatggccttcatcatcttcaatttcacgcattgattccatactcaaaaattcatgcaaaaatcattactcaatgttagtcgttctctcacaattaaagatcccactctctctgggtgtggctaatgagtaccttcacaatcaaactgactaacattttcagtcatgatcctaatccatgttatttttcttctaatcactgcacac

SEQ ID NO: 265984 - DNA, 321 bp, Glycine max
caaagaggagaagagaagtggcgccgatagtcgatcgacgaaacatagcaaacttgactctgcgaagtgcgcctcagaagattcctatcgtcagatatgacgagtgaacacatgattctattgataaactatgtcactaactagaagaaattcctcatcatggcatcttaatacaagacgaatattttatggataaacccaaagcgtctgagcatattcgtactatatgacaaacgcatgttagaatatcacaagaaaatgcgcatagcgacttatcataggcccattatatgccaccaaaatgaaaagagcgactctatc

SEQ ID NO: 265985 - DNA, 378 bp, Glycine max
  unsure (1)..(378): unsure at all n locations
gctagcttaattgacatgccacacacacttatagttattcaaaaaaaaagggcataattctctttcaaaaactaggaactcacctctttgcaactaagagacacactgtcttgccaaaattttgaacctgggtcaaagaaatttctctagattcctgaagacaaaataaaggttataccattttataaaaacaacaatcagttttagaaagtacaagttgattttcaacaattcatcaagggaagccaatccactagaatatcaaattccctacagcatagtttcaatcatactgaacagtcggagatccanatagaaatttgatacaaaaaccaagctgttttaaattgctgaaaatacacatacaatataatgata

SEQ ID NO: 265986 - DNA, 434 bp, Glycine max
atggtcaataacatattatataccttcatggtttgtataaatgccatgctgattcccatattgcctgatgtatgctctatcaaagatgtctgcaacataaaataagttaactatgagcatctacatgtgaataactaagcaaaatagttgccatatatcaaatcagctaacctttccaggagttatcagattcttttcctcagcatgtgtgatcattgcatatgctggtctgtgaaatcaaaagaaaataactacagtagtcctgtattaatttgagttttgattatcattaagaatagcatgaaacctaatcaaatgcatagtatgaacaaaaggaaagtcaaataagaatggaaataaagaggaattgacctgtctctgatgctggcagaaggttgcatcatctcttgcttgacagcaacataagctccaca

SEQ ID NO: 265987 - DNA, 417 bp, Glycine max
  unsure (1)..(417): unsure at all n locations
tgagagccacactaaagggtttagcaagacattttcccacaacaatcgtgaccggaagggagaataactagaagatttattattattattattatatgatctttacctacagttgaagatgatatatacatattaaagacttttacctacacactatacatagtaggtaaaacctatagtgacagacaattagccgccattatacgcccctcaaagttgacagaagaaacgtctgtaggacaaagtctatcatacatttacctacggattntttatttataatgacagnttttgtccgaggtatagatcatttttctcgtagtggaaaaggtaaaatgcgacatatataaagtttaatgcttgtttggaaaacatgtaatctgcttaaacaagtgtcaattacaatttttgataaaa

SEQ ID NO: 265988 - DNA, 429 bp, Glycine max
  unsure (1)..(429): unsure at all n locations
tgttctcatagtttgttgataattcatgtttgtgaattctgttttatgcaattccaatcattaaatttcactttataaacagttaaatttgttcgatctgttatttgaataataaatgttacattaatttgaacataagactaaaatggaatattttaaaaaatattagatacaataaaaagattgattttaaatttggaaaactaaaaataaatttaatataaatttgagaaactaagaaataattttaaaaaaatatatgatatgcatgatctttaanattttgtaacataaaatggcagcgcaaacaatgataatatgaattaagccttacttatgatcagtggtaaagtcatcaatttggccggtacaagtgacaaatgtgaagattgcccagtacacaacaacagggatctcatgcaaagtttc

SEQ ID NO: 265989 - DNA, 383 bp, Glycine max
  unsure (1)..(383): unsure at all n locations
cgacagagcccgggcatatattcagacgctcaacattgaatgttgaacctctgaaccaattcaaacgaatataactntttactcggatgtctgattgaggcccgcaatatatcgagacgctcgaaattgaatgttgaagctctgagccaattcaaacgacaataacattttactcggatgtctgactgaggcccgtaatatatcgagacgctcgaaattgaatgtggaagctctgagccaattcaaacgacaataacttcttactcggatgtctgagtgacgcccggaatatatcgacacgctcgaatttgaatgtgaagccctgagcacattcaaacgaaatgaacttttactctgatatttgattaacgcctgtatatatc

SEQ ID NO: 265990 - DNA, 350 bp, Glycine max
tttttataactcaacgccatcaacccagggaattaaaacaaacttaatggctgagtgaacagaaactgtggcaaccataaggcacccccaacagccaacaagtcagccaccatttgggctcccaaaaggcggatgcctatgttgccaattgggcccttattacaacttgaactaaagccctgttagttgagtaacccaacacatatgtttggtcaaccaaccacacaaggattgggccattatttagacaaactaaacactctaaaaccgaaataaagtggtgccatttagaccgcctccatttgggtcatgaaacaacccacaaccttggactatcatccttgaaactt

SEQ ID NO: 265991 - DNA, 463 bp, Glycine max
  unsure (1)..(463): unsure at all n locations
agcttcattagatggngcatcttcagtattctcttctcttatggaagaacgatatgcacttcttgcattgtatatattgttgatggtcgcacaactattggcattgtgctccttcagagtcagcaaaatgtgtcttggtttgaccattgacttcatcatatcaacaataagtgtcttttcagctttagtcaatcgcccgacatatggatgtccaactaatgacttggctaattcatgattatgaatctcacaaatcaacttcaccatccagccttgtcctccaaccactggcttgccaagaagcttgaagggacacccacatttcctaatcccaatgtctcttctaacaaattctttcttcttacacctatactcgccactcctttcacagacaattaacacaaacaaaagccttcctctactacctgtgtttgtgtcagacctttcaatcacttgcacaaat

SEQ ID NO: 265992 - DNA, 412 bp, Glycine max
  unsure (1)..(412): unsure at all n locations
cttgtgtaatcgattacactaatttggcaatcgattatctttgtttgtttctgaataaatcaaaagatataactcttcataaggttttttgactttttcaaattggttttaagtttttctaaaagttataactcttctaaatggtcctcttggccagacatgaagagtctataaaagcaaggctttgatttgcttttcaatacactnttttacacttattcaatcaatcctttacaagccttgaatctctttgaacttcttcttcttctttgtaccaaaaactttctgaagttttctggttttctaaaccttgaaaaattgtgctattcatcctcttcattctcttctccctttgccaaaaagaattcgccaaggactataccgcctgaattcttttgtgtatctcttctcc

SEQ ID NO: 265993 - DNA, 455 bp, Glycine max
ggatccttaagtcacctgcggcatgcaagcttgtaatcgattacacgcattctgttttctttaccagaagagtttttcagaaaacattctcaacagtcacatctttttgtgtggttcttgaatggctatcataggcctatatatatgtgacttgagacacgaatttgacaagagtttttcagaacaaaaaggtcttatcctcttaaaaagcaaaattgttttatcctcttacaaattccttggccaaattatttgtgattcaataaggaattatttgagtgctcaaattgttcaatctatctctttcaagagagatttcttcttttcttcttgttcattctgaaaagggattaagagaccgagagtctcttgttgtgaaagaattctaaacacaaaggaagggttggtcttgtgtgtttagaacttggtaaaggaattaccagatagtggaactc

SEQ ID NO: 265994 - DNA, 447 bp, Glycine max
taatttcttgatatgcttgatactacaaatcatcaatttttgttctctctttcaattctttggttacttgtaaaaaaattcgttacactattatgcaagttttgagatttcaagttagatttgaaagataattttcttgcagtaggtcaaactcctatataattttatgtacttttcattttcatgattgaatggtctgaaataaaataataggtggctcaaaagaaaataaaagttaaaagaaaaatatcttctaagatgggttagatgtgaaaaccgtcttagaaaatgacacattctaagacggttctgacgtctaacccgtcgttgaatgttcaacattctaagaccagtgggggaactgtcgtcatagatactttgatgttctacgatgctcgctacaacgatggtcaacaactgactttgaatattagaaataatcgacgt

SEQ ID NO: 265995 - DNA, 445 bp, Glycine max
  unsure (1)..(445): unsure at all n locations
acctgaggctgcagctggatagtgctataggggtatcctcatgtntaattttccgccatcattaataatgcattcccctacaacaactcacggaataagaggattatgaatagcattgttaatcaattggggatagatgaatcccaaactgaattgggaaagcaaaacatgctctatcaatgaaaactaagacactcatgagagctcaagctcaagtccccattactatgccttcattcctaacctatgataaatgagatattgtgcatgggtcatgagaatgcattattaatgataagatagttactaccatggatgagatcaactttgttaggggaggaaacaattcttataatcaataacagattaatttcatcaaggataaggcttctagcatagtctggaatgcttatgcctcacccatgcaaatcaaggcaagacagat

SEQ ID NO: 265996 - DNA, 385 bp, Glycine max
acaaatactcacacaacaagacaatgatgcgaggatcaaacatacgtattactcttaaaaaatcaatctcaatcctctcatagtaataaaaagaacatgtttattcatgaacaacatatcaactgacatacaatcatctagaaattatagcaacacacacacacccacccacgcatgcacgcacgctcacacactcacacacactaaccccccttatgtaacatccctgatttttgaattcttatcatctttcacactatgacactttaccacacacacacacacacacacacacattctataaattttgaagacaacaacatattcaaggaagtttaccaacaagaataggattcaagaagtggataaaccccccttatgtaac

SEQ ID NO: 265997 - DNA, 430 bp, Glycine max
  unsure (1)..(430): unsure at all n locations
agcttcatcctcatcaaggntatagatgttgttttggttaacgtaatctcaatgttntccagtcgggtagttgtattctccaacaaactatgaacttcagttgagtgctcttgatggaggtgcaacataacatccatcttctgaatcataagtgaatcaaaaggactccattgatgtgtaggctcttattgagcttcagcttcagcatcttcttccatctgttcaaagtttccaactgctggctctccagccattatccattcatgatcaacaaacctcattccaagcttcttgagatgcctttcagtaatttcactcgacgctttggtaatatcacaatctcattaagacatcaacattgaagtagtcaatgaatcttgaggcangtacaacatatgtgtcacaacgtgggccacgatgggatgacaaa

SEQ ID NO: 265998 - DNA, 437 bp, Glycine max
ttaaccgtttatttaagccatcttctcacgtttttttgtctaaatgaatttcaaccaatcatttgtgttgtaatgtcatttaatcaatgttaaaacaaaatctaaccgatcgttcacgctataacctcggttaaacaaaaaaaggtaaaataataataaaataatcaaaaaaatcaatcggacgtttttctttgaaagtttccttgaattaattgactaataacccaagtgaaaccaaggctaaaatcaactcacaaatcaagcttgtccgcaaaaaatcactcaagaccgttttaaggtccaacgccttataaacggcctctttgcttatattggttaaaatggaccattcaaagcataaaatcaacatataaatttatcgcttttgcaagaactacgtatgtatgattttctcatcacaattgaggatacgtatg

SEQ ID NO: 265999 - DNA, 436 bp, Glycine max
  unsure (1)..(436): unsure at all n locations
agcttatttcttgcagatagtttgntgtgttaatggngntatcaatgattattgacaagattcatctttaaatttaagggcaagatcacaataagtaagttgaaaaaatgtgtattaaagcaaaccattatttataatagaatcgtatcttttgggtgtgtattaaaaatgtgcaaaaacaataagtaagttgaaaaaaaaggtttgctaactaaatcacaacttcattgctttcttgatagctttgtgaatattgaatcttaaaaaatctccacatcaagtctcaagtcttgttgaaaggtctcaagtctctaccatataaaatctctactacataatttgaggacatcttanactatgagttactccattcttgttgagaggtctcaagtctctaccatataaatagtacacgtccacaattcctagcaaatat

SEQ ID NO: 266000 - DNA, 427 bp, Glycine max
aacttaaatactaagcttggaaacggcaactaatggtctgttttttcatgttgcagacaaattacaatcatgtcgagatgatccgaatgactacttgtgctgctacttgtgtgcgctattcattccaggctccggcctctaatgagccaagtctgcttgagaattactgaatctgaagatttgtgtgagaataaacgttgtgtttcattttatatttgaattgctttggctgtctgtctctgacataggtttgctgtaaaatgcctccctgtaagacatttgcctgtttctcttggacaaaaatattccagtgttctgttattgcatattacaaactacatagtattatcacgatatgtgatttaatggttgatggttttctgacattcagaaattcatgacccagtctgaccattggccaactgat

SEQ ID NO: 266001 - DNA, 449 bp, Glycine max
  unsure (1)..(449): unsure at all n locations
agctntcctcgggccattcctgcgaaggtatacattnggaaagntagtttacaagaaatataacaatcattacaaacaagggccaaacaacacttctcatggcacgagtgtcaacatgcactttataaaataatcatattggggtcgtgctattttatgacacatacgtatttgcacacataaaaattttgtatgaagcattttacgacacctatccatgtacatatttttttgacaaaccttttcatgctacatcctatatatatacacacattttttttttttggaaggcttcttttgttacctactcacaaatacacatattttgaaaaacacttttacgctacccatccaacactttgtaaggcacttcatgctatatatattcatattatgcaaggcattntcatactatatatattcatattttgcaaggcattttattcaac

SEQ ID NO: 266002 - DNA, 424 bp, Glycine max
  unsure (1)..(424): unsure at all n locations
cgtacactcatggaacacagttntcactgcattcatcattgctagggctctgccagtcacaataactacagggagatgatcgtgtcttaaaaatagacctcgaaaccattccaaagaccatacaacattattaacatgttcaccctccaaatatgcaaatccagtagagaatgtcatccccgttggtgtcaccccaacaatgtcaagtagtggaagtctgtacctatatgttttgtacgtattgtctatcaaaaacaccaaataacatgcattgcataacttcattgcataagggtgacaccaaaatagatcatgtaccacaaattcatcctttaatctatgctaatgaatatattgatcacggtcaataagcttcatgttgcatttcggtatcacttcctctaatggaagaacagtatgcaca

SEQ ID NO: 266003 - DNA, 437 bp, Glycine max
  unsure (1)..(437): unsure at all n locations
agcttcataccaaggcaactcaaaatctatgtatgttagacgccttcatatactggattgtcaaggtttgagaagtgacaatgagaatggggtacaattagagcacactctctcctcacacaagtctataaccttaacctaaactagctcgaactggtttttcacctaaaattccaccgcatcaaaatttgactcctcaacacctaattttaccctagaaatgagctttgccctcactctggtctttagtttctctctcttgcacagaccaagctttctcatacgtcctaattgacatttcagactaggactaactcactttaacctccaatttctactgaatacagatttagcctttcacaccctagaagcatcacactttgacactcatatcactacattctcactatctaaccctaggnttactctacccttca

SEQ ID NO: 266004 - DNA, 427 bp, Glycine max
ggaccttgaaactcagctttggctaaatacacctgaaagtcctaacctaatcctttcattaaccgtgtcgaacatttcctctagctttctattaatcttcatcattgacctacccatttcattccaactatattgaccttcatgtgaatgagagtatacacgttttgatgatgctcatacaacataacggcttatagtctaacaggtactgtatgttctatttcacgatgaggagttccccaccgagatcgatcaggcttagttttatttgttaaaagaatcacacattggttaacaatgttcggactcacagcttgatgttcaaacgtttatataacgctctactgtgcgccacatcactacaaacatatgtgttgttgcactagcaatcgattaccatgtatgtgaaacaattaccagatacgga

SEQ ID NO: 266005 - DNA, 259 bp, Glycine max
aactcccaagaacccattacaccaaaattccttaagaatgagatacccctaaacacatgacaaagcacggatctgaatatatagaaaagctcatccttatcgaggggagccaccccagaatcaagaaaatatccacaaaagagtgaaggagcaacgaaaagaaaccaagaacaatattaaaaggaataaagtgcgaaccatcccactcaaagaacgaatgctttgacaacctcaatggatgcagacaaaaaaaacagaa

SEQ ID NO: 266006 - DNA, 383 bp, Glycine max
ctaagctttctctggtggcacgaccaaaacgtcaagattctttttcagacaaatagttggtagaagtgcagcgtaatgtccaacaagaattgattgctgagtatctctcagagaggatgatcgattataacctgccattattcccgccacatcatggaaaaagacgcccaccaatgaactgggaggaaaaaggaatattacagttaaaaaatatgaatcatacactagcacatttttcaacaaaatgggctctatggaacatgctttaatcatgaatggttttaaattatacggacaccaaggctaaaatattttaaggtggtgaaattatttcccaaactctttcacccaagattctcaaacttgagtgtttatttgaactc

SEQ ID NO: 266007 - DNA, 268 bp, Glycine max
gaccatttttttgagatttagcccaggggaccgactcaataaggggcacgggatggggttatgttaatgggatgtggaagtattgaccatgccgatcgccctgtccactatacggacccctatcctcactgaatgaaaacggaaagcatcttctacttattgtgcacaagggactaaattgccggggcagaacctggacgcgtgggggttgccaacaactgacatctaccctccgtctgtagtcatgaaccggctcctaaaggactct

SEQ ID NO: 266008 - DNA, 339 bp, Glycine max
atctattctctctcttacctctacattccgctggcatccatctttcaagaagcaaaggattccattgacgacagaatatcctagttactacatagctccaattggagcttacatcataaatgctgaagaattaatcatactgtctagcccaacatgcatcacaactttgacaaattgtggttgccaaaatatgaagagaatgattcttctgcttgctactatgttagaacaaataaaactatggagtattgataccaaaaatatacctgctaacctggattgatgctagcagcatccatttcactatcgaacttggttaaagggaggctatttgagaaa

SEQ ID NO: 266009 - DNA, 328 bp, Glycine max
tcagactgatcaacacttgcacagtggccaaagatgcatgggagatcctgaaaatcactcatgaaggaacctccaaagtgaaaatgtccagattgcaactgttggctacaaaattcgaaaatctgaagatgaaggaggaagaatgtattcatgacttccacatgaacattcttgaaattgccaatgcttgcactgccttgggagagaagatgacagatgaaaagctggtgagaaagatcctcagatccttgcctaagagatttgacatgaaagtcactgcaatagaggaggcccaagacatttgcaacatgagagtagatgaactcat

SEQ ID NO: 266010 - DNA, 433 bp, Glycine max
  unsure (1)..(433): unsure at all n locations
tctatcaatctaatggctaanaggaaaaaatgataatataatattactttttattaatagatataattagtattgaatttaaaaataaaagaatgactatacattgtgtaaaaagttttactttatcatctagtcacaacctattattgttgacttttataataattactttaaaagtcatattaataataaattattattagatgacaatacaaaatacttttatattgttagtgcatgactattaaattctttaaaaattatttcattctttgttttaatatcatcaaatacataattaattaaatttgtaacattggattatgtcaatggctatgtacttgctaatataattaaactaactactaataattaagtcatttgaatctaattagataagatcaaaactattataaaattcaattatctatca

SEQ ID NO: 266011 - DNA, 327 bp, Glycine max
  unsure (1)..(327): unsure at all n locations
cttgcttctatgacacatgctaagctatttgggaaattaagggaatacgaaatggactaaataataatggttgaggaagaagaaatagacaaacagattaagggcttggccttgaaaaccaccattctgttaagcgatgatagtaaaaatgacaatgcaaaagggttagatgctaaaaatctaaattttcttgtaaaatggttagacaaatttctcaagaagaagaaaaagaattttgatgatagaacctttcaataaaaaaagaacttcaagaagagtgaaccctcttcctcctctggctttacatgctntgagtgctacaaaaca

SEQ ID NO: 266012 - DNA, 445 bp, Glycine max
  unsure (1)..(445): unsure at all n locations
taaaactaagcttgattttcaccaccgccgccaccatcatcttagaattatattttaatattattaggactttgattttcagccttgtattttggctatattattatggtatttgaacaatttactatttccttatctgcatggtatggatgaacaagtatgttatttgactatgtggatttcatagttaatctatttatgattgttgcttcatgggtcttacttcatgatttgattgatggtttttcatgaatgttgtatgaatgttaagttatatttgcatacttaaattttgatacgcactttggctttttgttgatgccaaagggggagagaaatgggattaaatcaagaactcacaagaagtaataattttaatttaaaataagcacaaattcanaaacaaagggggagaatttatgaaaatgatcgactatgaaaaagt

SEQ ID NO: 266013 - DNA, 436 bp, Glycine max
agcttcctaatcagagggtatggataatctatccaaaacatcaagcacatgcctcattatgggtctcttttctgggctgctatggacacaagcaattgcaatcttcaaaactgcaatgatctcctcttccttatctgcatcttcagctaaataaagatctaatacatctgagagtggcttcttctcatcaatgcagcactgaatccattgaacaaggtccatttctgagttaccaacttggacaataggcaatcttcctgtaatcaattctagcaggatcaccccatatgagtaaacatcccacttctgtgatggcttcaccactttcagtgtttctggagcttgataaccatttcccacaatactagttgtaacttctgtggataaactcctctgtctttcttgcgatttctccgcagcaactctgttggattga

SEQ ID NO: 266014 - DNA, 303 bp, Glycine max
tccgctcctgagtatgacagtcaccgctttatgagcgctgtacaccatcatcgcttcgaggccatcaagggatggttgtttctctgggagcgacgcgttcatctcatggacgacgagtatactgatttccaagaggagataaggcgccggcggtggacatcactggttacccccatggccaagttcgatccagaaatagtccttgagttttatgccaatgcttggccaacagatgagggcgtgcgtgacatgaggtcctgtgtaaggggtcagtggatcccgtttgatgccgacgctatcggc

SEQ ID NO: 266015 - DNA, 433 bp, Glycine max
  unsure (1)..(433): unsure at all n locations
agctngcaataataaaatagcacagcaatctggaagctataatagagaaatggtccaattcaagtccagctcaatctaaaattgcatacaggcatatctaagcaacaaccaataggtatcaccaaaatttcgatagaccttgcaaaaattacaataagaaattataaaatttaactatatctgccttatcttaataacaaaatgcctaaagatgtgaagctacaatggccctccatatgcatatccaaatgatataaggctataaaagaattactaagacatgcaacattgaattcttagcatttgataaggatttatgagattaatgtttctaaatttttcatctatttttttagagaaatttaaccttttgtctattagagcattactcttatattgtcagtaatatataatggatagctcaacataagtc

SEQ ID NO: 266016 - DNA, 449 bp, Glycine max
  unsure (1)..(449): unsure at all n locations
ctaagctttaatcatatcagaagatgctatgtgccttttaccttttccttaangatcatggatctatcaatctaagtcataggataaaatcaattctaaggatgtttaattaaagattaactaatttatcgaagattagtcaaacagtttgatcatgtaatttggtgcaaaacattttctacctagatctaccaattacatgcagataatcactactatgcaattgattgagtattataatgaccgattccaaataaacattaaaataaggaagaaaattaattaacataaaataatgagaaattccattaaaaagatagagagaagtacaaatgaacagttacatcataaacctcggactaatgagactagtcactaatgatcagagttaaactaacaatcctataaaaagtaaacatagacatatcaatangccagaacaatgatca

SEQ ID NO: 266017 - DNA, 424 bp, Glycine max
  unsure (1)..(424): unsure at all n locations
agctttcatatcaacagtcccttttctctttactgagatgaaatcaccatttccaatttttactttggaaacaatgtgtttgtcaagttttttaaagaggttcaggtcattggtcatatggtttatgcagccgctttctattaaccatgaatcactggaactattgcttgtggcaaagcatgttgcaacaaagagttgctcatcttctcgttcctccgcaaccacctttgcttcctctgatttggacttgcatattcgctctacatgtcccatattgccacattttctgcatttgacatctggcctccaccaacattttctttcaggatgatttgtctntttgcaatgcggacaaggaggaaaggtctcaccttactgcttgttggagccttcttggtttttgttcctacatttggtggtcttc

SEQ ID NO: 266018 - DNA, 447 bp, Glycine max
cttgaaatatgacgggtggcaaatatcgtcttctgcattagatgatgagattcttttctctattgcaatattgtttttatatgttttcaattggtacatatctattattttgattgtatttataatacaaataaaagaatattttgagttcaaatagaaaaatataaaaaatactaatacatggaatcaatactcataaaattgtgttaaggaattatgaattagagtgaatttttatgtaaaatatttaaatttatatgatattaaaaatttaataacattaagattaagagttgagttaaaccatcaatgtattcaccacaaattactcttagtgaatgtgtacgtattcaccacaaattgctaactgtatattattaaaaacaattaaattctattattaaaattcttcgggtatatgtttataattattaataatggagtata

SEQ ID NO: 266019 - DNA, 411 bp, Glycine max
  unsure (1)..(411): unsure at all n locations
agctnttcgtctacagaatgcataatgtttatcggataaccactcgggtatttccgcccgtcagcgtgactcaaaagtcagtatgacagatcttttgagcacggtagatgacgtaaatcaccgcgtgtaaacgggcttgttggccgcgattgacgaatggcgcagaagacgacgttagtctctacgtgctatcaggcttttcgtcttacagacaggaaaaagtttatacggataaccactcgggtattttcgcccgtcagcgtgactcaaaagtcagtatgacagatcttgtgagcgcggaagataacgtaaatctccacgtgtcaacgggcttgtcggccgcgattggcgaatggcgcataaaacgacgttagtctctgtgtgctatcaagcttttcgtcttacatacaa

SEQ ID NO: 266020 - DNA, 395 bp, Glycine max
ggataacacgcagagacttatttcgtcttctgcgaccttcgtcaatctctgccgacaagcccgttgacacatggagatttacgttatcttccgcgctcacaagatctgtcatactgacttttgagtcacgctgacgggcgtaaatacctgagtggttattcgtataaactttttgctgtctgtaagacgaaaagcctgataacacgcatagactaacgtcgtcttctgcgaccttcgtcaatcgcggccgacaagccgttgacacatggagatttacgttatcttccgcgctcacaagatctgtcatactgacttttgagtaacgcctgcgggcggaaataccccagtggttattcgtataaactctttagctgtctgtaagacgaaaagcctga

SEQ ID NO: 266021 - DNA, 462 bp, Glycine max
agcttatatttgaatggaaatctacataattgagaggagaaatacatatattaattgcatgtacaaatatgtgaattagttgtgagcatgtttttatagctttgcacgtgaatgattacatcgatatatgtatatttgtgtgttttatttaagtataatggtgaaggttgtattgttcatatcataaattgataattttgaattatatgatagatacctccatttgggatgaggaagagattctggataccttcatctatgatagggaaggcaatgagatgtcattgattggaatatgagctcatagacttattgaagaatctgagatccacaccagttttgagaactaaagagttgagtctagtaattatgggaatcactaagttatgtttgtgatgattgtttgttcaagaattgaatgcagtgaggtgttgttggttatttactggaatgtttttttgt

SEQ ID NO: 266022 - DNA, 446 bp, Glycine max
tcttttggaccttgaacaagcaattaactcctcttttataaccatgctatgtgctcgcgactggtctctttcttcccttcgcaacttgagttcactattgctaccccatagagctccgcgaaatttgttccagcaatactcttccttgcgagccctcttggtctcttgttcaagggcttttgcggtaattgcattctcttcccgtaacccggcacactccttccgaacgtgtgtagcggccaacttgaacttctccttggcaagttttgcctttcctaactcgcttttgagagcttggacttcttcgtcctcttccggtgcttcaaaactctcttcgctgacgacttttaacttggcgagccaatctaaacctcgtatatgaactttcagccattcgtggtacccaccaatgatgccattacgaatgcctctaagctcttgatctt

SEQ ID NO: 266023 - DNA, 451 bp, Glycine max
  unsure (1)..(451): unsure at all n locations
agcttgtcatcgtgagacatcagaggctattattntaataaatgtgggtaggaaaaattcaccaaattgatagagaaaaatctaaaatcatacatcttaggcaaataaggcatgctagcccccaacattattgcattttgattccatctttggacattgtgattttgaaaattagaaaacccaaagtttattagggcatttcatcaaacatacaactcccaactgatctggcaaaagaaatagtgagtagaaaatggaacttgcagacaaaaaacaaataaaagaaagatgattttctctttatcattcgcagaanagaaaaattgaggaaacacactgcaaacaaatgtttagatttccttatgtgacattatanctaactagtgaaaattagcagttaatttaaagttaatagagatgcagaatgtaataatttaaaaaggaatatgcg

SEQ ID NO: 266024 - DNA, 435 bp, Glycine max
cgtggattttatggattgagggcttgtctttgtttgtgtttatgttcgagtctgcgtttgaggtttgtgttttggaaaaaaaactcgaagaaaaagctttgggtttaagtgtatgtttctcttcatagagtttggccaacgaaattgttctgaggagtcatgtatgtgattgtgcaatgacatcccttctgatatcaggttttaatcctcccacaaagcaatccaatagagcttcttgtgtaattccttgtactcgattagctaaagccgtgaactgcacgtaatatgactgaactgaaccaatttgatcgagtttaaacaactgagatctatgacattcatactgtgatgggccaaattctgtctctaatgctcgcgtaaaagcaatccatgttttgtatgatttttacgagcatcatttgtgacaggccaacc

SEQ ID NO: 266025 - DNA, 449 bp, Glycine max
  unsure (1)..(449): unsure at all n locations
agcttatcaaatattacatcatccttcatacttctgactaagctctggtatagccactccatcccttcttccacaatctcaaccacccaagcctttcatgcctcttttccagcactcatgccttttaattgtttaggtctctattggctttgcacgccactcatcccaactacatctcttgctttctcatgcaagttgttcttgttccttctcgcctctgcatatttaaaacatagaacactaggaacttgcttaagatgagaacctcctacaccattccccactgttcttccagctccgcttgcccacccatatcctttcttaaaatgtggcataattgcatgtaactntgtgtccctaaacataatcgaagtcaattgtgtgtctaataacctatcattcttcaatcgcagataccttacaaaaccatatctataacccatttatct

SEQ ID NO: 266026 - DNA, 447 bp, Glycine max
actaagcttgataactcttaaagataaagagtccaagttgtgtcttgttattgagactaggggtaaggaaagagctattcttctcaagaactttcaagagttggaaaatagacttaaagatcttcaaaaggatcagtaggagctgaatgaacttcatgactatcaaaaagaagaaagatatgatctatggtgagaatgcacacaagcacacaaagattatgaaaacctcaaaataagtaaaataatctttaggtggaatgtgaagaacacaagagatctgtgaaattcttgaatgataaacttttgaagaatcaacaatttgaaggtcaacctcaagatgttgtcaaacttcatgaggaaattagaaccttaaaaactacattagccaaactctgtaatggaaccgataatcttaacaaactgttatgaaactgtagaagttcctca

SEQ ID NO: 266027 - DNA, 412 bp, Glycine max
  unsure (1)..(412): unsure at all n locations
agcttcaagacatttagcatctgcaagtttcatttttctagctctaatcaaccacacatgggccgagccatataccactacagaaattgtagcccaagccaatgaagccacccttctgcacacacacgcctcatttaattgcatatcactcattcacagtattcaaagaagagtgattntgtaggtcatggttttacctatcttattaccattgataagaaagccttgctccacttatacatttattgtctgcctacaaatacacttcccatgctctgaatctatgcacatgtttaataatcttattaactcagaaagttttatccaaattatcctcttatctttcggcttttcttatgttgggctaaggagcagcatgctagttgctttgatcagttaggcctctgtaatt

SEQ ID NO: 266028 - DNA, 240 bp, Glycine max
ctagtcattggtgtataggaagagggaatatcagctactctgagcttggtcttacctgactctggaagattaaacgtctggtcatttgcattccaacagatctttatgatataagctaagtcaatggcgcaccctattgtttcatatgaagtaagggcatcatatcccactcccctcgatctacacaaggctgtgatttaagtcgggaagcctaatcgagaagagtatgactgagcgatc

SEQ ID NO: 266029 - DNA, 381 bp, Glycine max
aaaaaaaaaattctgcttcaaatagaatatttaagtggaaaaggtttcagcggcgaatatgtattaattaattattattttattgatagaaagagagagattaaattaggtggatctaaaaataaataggagaaacgaaaatttttctttcaagaaatcataataattagttagtgataattagttaacgaataaataattaataagacttatcctatttaaagttccacatgttaaaatattcctaacaatatcaggaattaaagtgccatattactcacacaagagtgatgaactgatgattaaaacactttttcccgatgtttcgcggcataataatttgatgaaataataatgaagttcctaaattccttatttaaa

SEQ ID NO: 266030 - DNA, 442 bp, Glycine max
tgtgtagtccaccatcttgtcttagtagaatactggtattgtgtctactatcattgatatcattgttgtctccgtcattgaggtgccacttgagctgccaagtctctccacctttgggcgtattctttgaaagatttgtgcccctttttgcacatgttctgttgttgcatcctatccggaaccatatcaaaaatgtactgatactgcctaacgaaggcaaccattacgtccctccaagagtggactcgagaaagttccagggtagtgtaccaagtaacagctaccccagtaagatactcttggaaagaatgtatcatcaattcctcatcttttgcgtgtgcccccatcttatgataatacatctttagatggttcttggggcaagtaatcccctcgtacttgtcatagtccaacaccttgaacttgggatgggtgaagatat

SEQ ID NO: 266031 - DNA, 251 bp, Glycine max
cacccacctaatcatctgctcccccgaacacaaagttcaagatcaccacaggagccaaagacaaaccgcaaaccgcgagagagttatcgcactcctaactactagagagaaacaggacaacatatagtagccaaacacaacacacttaacatatctcacaatatgacatcaccggcgcacccaaaatgaaatgttcaatcatcaatcccaatacaccagaaccacacactccgatcaagacaaacaaacac

SEQ ID NO: 266032 - DNA, 240 bp, Glycine max
  unsure (1)..(240): unsure at all n locations
ccgagagcaacncgagaaacaggaaaaacttaagaatttcagaaaaagcggctaaaaagagagggggaccaccacaccccaacaacaagcgcacccgcatgccaaaacacacgaaaacaaacgggaaggacgagacaaaacagacgggagaagcaaagggggcgacacacaccgatcagagcacaaagcgcacccccacgccaacaaacacgaaaagacagaagaagggcgaccacgaga

SEQ ID NO: 266033 - DNA, 433 bp, Glycine max
ggatccttaagtcacctgcggctgcaagcttatgggtcctccatgttttgttttttatgaaagcggccaattggtgtcagggtgctaacgtccatgcttggctccttgaagaggctgacactagtctgacttgtgccttttgtccaacttgtgtgagtcgatgtggagcctccttctcttttgtctcactcttttttgacttttcgaacctcaattttgaaccttgacatctcctccatttgaatatatcctttggctcattcgcgtaacttgtccatgctattgggaggtttttagcataaattgtctgtgaacttactaggtcgacaggcaagcaacatggagtgtagtgctatttcagggttaagattcctgatttgacaacaattcagccaaacatatccatgaagattcaaagtgattcatcatccgc

SEQ ID NO: 266034 - DNA, 445 bp, Glycine max
  unsure (1)..(445): unsure at all n locations
tgcttaccatatatctctcaacaacacaaaaaactgatctctgtatttatctatagccattaaataaagttatgactttctaacttttggttgggcgatctactgcagatacattctctctggaccgggagtattttccccctctaccatgctgtcctcccctcaaataaatgaaagagaatgcgttacttacatttatcaattatcaatattctagtntcagttctagcccctacccaacagccccaaaataaataaataaatatgagatagaatcttcaattcattttttggtgaattttactcccaatttttttttcactttttgggaaatttatccctattgttttactttgtggcaaaattcagtcccaacccccaacttttatgcttatgtcagcaagccatatatcagctcaacaacttgaggttaatattacaagtt

SEQ ID NO: 266035 - DNA, 423 bp, Glycine max
agcttcaagctgacagagagatgataattttgtataatctcactcgaagctgtgaagtttcattgataattttttcattcgttcaagcttccttactcgagaatgtctctgaaattactggtttttttaccatatactcgatctgaaatttctgcttaaatgtatgttcttatgaaaatttgttaggcgctaattacaaggattaagcaatatatagtttaagtgcaaggttctaaggccagagtattattttgaaacaataactgttttctcaggactgccttttaaatagtgtagtaccttatacctatgtgagttttcattgataattttttcattcgttcaagcttccttactcgagaatgtctctgaaatactggttttttaccatatactcgatctgaaatttctggttaaatgatg

SEQ ID NO: 266036 - DNA, 430 bp, Glycine max
tctagaaggtggaacattcattgtaataagacaatctaaagtttgagtctgacaaatgtgaggaagatccatgtgtttacaaaaaggtcagtgggagtgcaattattttcttagtgttatatgtagatgacatattactaatgggaaatgacatactaacattgcaaggcccgaagatttggctatcagaacaattctccatgaaggatttgggaggagcagtctatattctaggtataaagatttatagagatagatctaaaagggtgcttggactttcccaatctatgtacattgatactatcttaaagagatataacatggataattccaaatgaggctatttgcctatatgttttggaattactcttattatggagaattgtccaacaactcctaaagaaagataacgcacattgtgtacaccatg

SEQ ID NO: 266037 - DNA, 406 bp, Glycine max
agctaggccaatataatttgatatctcttctctctatataaaagaatttagagaactaatatcatgatgtcaactaaagcttttgagaaacttccgatgatgaagtgtataactttgaaagatcaaatttaatgatttactcttcaataaatcgaataatatgattgtgaaataatttagcttcctaatagtattgtaataaaccaaaaataatcttcagccttaattggtacagaaaataaatagccttttgaatattttttttaaatctaaagttaatactatcaaaatctcaaaactacttgataaccaacaaaatgaatgataatttatgtaataatgcaacgtatttaattatgactactcttaaaggttataacaactatcaaagtattctgatttctac

SEQ ID NO: 266038 - DNA, 451 bp, Glycine max
actcagcttgtaagcagaaaaagatcatgaaatatcaagatttctaggcgtgactagtaaagaatataagctatgaaagtatgaaagaaattaaagtgaaagaaatgtaaactaggcggttcctaagagagtttggatgacctcatttaaggttccttacaaaaaactcactatcctaaggaaaaattgcctaaaattattacacacaaatggaagtatggtgacttattggaggctcccaacttacttccaatgaaagacccttttgtttcaaaatttgaaagcaatgaaggtaagtaaattgtcaattaaaaaattacaaaaaggtcctcaattttggtggttgttatctcttgtgatccactcaatttggagtgcttcttagtccaatagctcttaatgtggttggccccttgcttcttgactcaaattcttaaagggatgacactat

SEQ ID NO: 266039 - DNA, 432 bp, Glycine max
tattcgttgatgacatgcatggaaacaatattatgggttgtgaaaacagagataacaagtgtgctgtaccatgaaatggtgcacgtttggcagtggaatggggatggtcgtgctcctgctggattaatataaaaactgttactatttatcaaaaactctgttgatttcagaacacaaacaattgtctacatatttttatttttaaagaatgtcactactcaagtgctacttttctttaactaagaacagaatttacatcaattcctactgcacccaactagttgtcattgtatagcattaacacctaaaattttccaaacaattaagcatacaaagtcagtattttccgcatggtctataagagcatagtagaaatatttccaaagaaacaagacaattgtgtttaatagcaaatgtaacgccatttacatg

SEQ ID NO: 266040 - DNA, 476 bp, Glycine max
  unsure (1)..(476): unsure at all n locations
ttaagtcacctgcggcatgaagcttaggctgttcaatagcttcagattgttactctataaggcttaggtctatgtgggggncgacagaggagcataaaccacagagtctggcgacaggtacagattttttattcatggccagttgggttaccaggttaaccaaggcatctagtttaccttcaagcttcttagtctcggctgatgaagatgaattcgtggctacttcatgcactcctctaatgacaatagcatcatttctggcactaaattgctgggagttggaagccatcttctcaattaaatttctggcttcaacaggggtcatgtctccaagggctccaccactggtagcatctatcatacttctctccatgttactgagtccttcataaaaatattggaggagaagctgctaaaaaatatggtggtgagggaaactggcacatagttntttaaatctctcccagtattcatat

SEQ ID NO: 266041 - DNA, 345 bp, Glycine max
cataaggtcagtggaagtaagaattgttttcttgtgctaaaacacttgtctttttagaactggatcctggagtagtatcgtctaatgactgatactttgtttattgtccaaaaccttttatttcatgcttttttgcttgtatctcattgagatatatatgaaaatgttagctaaccatgaaaggttaatatataaaatataaatgttcttaacatcaaaatgtagggatttaattgtctggtatagtctaatgtgacttggacgtatccagactttacaacaccgagaaccctaattactatcctgaagccaaccctccatggaagttaacctaaagactttgaa

SEQ ID NO: 266042 - DNA, 315 bp, Glycine max
ttatggaaaattgtggccagaaatttcaagatcttgaaataatacataatttgaatgaattatttgtcgccaacccgatttagttaaaaatataatttaaaattgcggcaaaactcatgaaagtacaaaaggttggattaacttgttagcaaggtagctttatggaatattgaaaccattgagaatctataaggtgcataatttcatatctacgatcattgggtaatcggattctagggaatctcttgatgaagttcgtgataaataagcgctagaatttgaattttgaagtcattttctctcaaaattctctca

SEQ ID NO: 266043 - DNA, 303 bp, Glycine max
actaatcaaaactggagacaaaacacggattctaacttgccactcttggctataaaaggattcttcgagccactaccttgaaccttcttagactgcccgtgaagcgaataacaccccagttatatttgtcaccatgtcactctcggctctataaacaaagcgagcgagtgaatacaaacagagattcgcacactcaaagagtggtaaacaatattctcaaagacacaagataactttactaagcataggacaaaactaattgaaatacataacgtattgtccaatgattattacaaagtataa

SEQ ID NO: 266044 - DNA, 422 bp, Glycine max
  unsure (1)..(422): unsure at all n locations
tgcagcatgcagcagngctgcagccagcaaaaaatattccattaccttaggctattttatttgaacnatnccaacaagctgatgcattatatttcacatccaacgagctattcacatactgccacaaacacattcttaattgagaggcaaagcactgaccttccaaacacgtcagttacaatacacttgctaaatccaatgatggtcaatatcctctagccgcaccttataggaacaagagctctgaataggtaatggatcatataaaaaattgtctcccactcttgacgaacaaaacctgaaatgatgctaatgtgatacatatcatcagcattgaatacaacgcaccgccggcgtaataactagcattctcctaataatataaaagaaccactccaataatatcgaataagctgctggat

SEQ ID NO: 266045 - DNA, 264 bp, Glycine max
cgccataccaaaaaataatgggcccaatgccgacaaaataggggactataccagacacgagctctggagatggcaaccaactacaagaaaggaacaattcgcacaaaggtgctattccttgcgatcggtgatacaattagctcttcatgggaaacaacgtacaggggcaaatggagaatgcacctcctttcccctgtatgaacgtgatctctcttataacaagctacaagggaatatccccaacataatgtttcatctacaaaa

SEQ ID NO: 266046 - DNA, 409 bp, Glycine max
acttatgtggcagggcgggctttcttcttttcttgcctcaaccgcgagctgtgaccaccgctctttacttccgcgaagcttctctttatatccggctgagtggggttatagcctaaaccatactttccacgatttcctttggcatttatcaagctagttatgcccgccgtgtgcttgcctaaacctattccgggttccgaaccggtccccaacataactcgggccatcattactgctgcatcggacaggcaagcttgcccagaaaaggagtccacggaggaaatgcttaccacctcaaaagactggaaagcggttctaatgacttctctgcggcttccacataaggcatagaggatgggcactcaccaagatgcttcctcgcttgaacgatgaccagagcccttccact

SEQ ID NO: 266047 - DNA, 445 bp, Glycine max
  unsure (1)..(445): unsure at all n locations
tactcangcntattctctttctcatgactagcattggcattcctgatatttgcattcttctcccactgatcttcatcaaagattctacacatgttggtcaactgtgcacagatgtgaataccatgataatttaccatcatctttacttctggtcggaggccattgacaaatttcacacacttggacctctccccagcttccccctgataatgaggaaaataccttacaaggttctcaaacttcactgcgtactctgccaccgtcattacttccttgttttagctcaaggaactccatctccttcctattcttcacatcttcttgaaaatacttcttcaaaaaagtttgtctgaaagtccctcatgggacaataacaccacctgctcccttaaacactggtgagtgttctccaacaatactccacctcatctgctagcatgtgagt

SEQ ID NO: 266048 - DNA, 440 bp, Glycine max
  unsure (1)..(440): unsure at all n locations
agcntccaccatcaaataggacaaagaaaatacttatagcccaacaaaagnaaaaaaagagaagatcaagtgacacttttggtattgctcatgaccccaacatataaaaacaagaaacatttctcaaaacaaacagccgctcaataatgagtcaccgaattaggtcaaaatagcgctcttaacattaattacaaaagtaaactatgttacttacgcatcatactgtgatttagcagtgtctttggatgaatgttagcaaaattgattttaaatgacatgaatttgcaaagttgatttaaaatgaaataattatgcaaattaatctgggtaaaatgatgttgaacgaagaattatggttaatgttctatcctaaaaaaaacagttgatgaaaacttgggaaaattgcacataatcaaacaatttaccacaaaataacatct

SEQ ID NO: 266049 - DNA, 392 bp, Glycine max
gcaatcgccagaaaacggccatagcacaattttatgttttatcactcataacgtggtacctctttgtttaataaccacaaataggcgatttagtttttcggcgagatcctaagtattctcgcaagttgtgatccataatgagactaatatttaattcgagacttaatgacactgaaaactcctcatcatccctaaagatgtatttcgcaagaatcaaaatcaaactctctatgtatattcatgcccgtataaaatactttatgggtcattttaagaattgaaatataatgggctaataagtgaaaagcttcttatgctaccaaacaatcatagattactatgcatgacaacattgtgtatttttggtccatttacgttaaaaattaacatat

SEQ ID NO: 266050 - DNA, 441 bp, Glycine max
agcttaaggaacctttgactgtgttcttgtttcatgactggagaaaatggcatactgatactgaaattagaagcaaaacaagggaagagtttaacattaaacatttaaactttcaagctttctttagctaagagttttgtgcttgcacaaaccttgataggtgcagaacacagaaatgggggattcacccatatgttttctgcagggcatgtggaagcactggaaaatgttaaacatttgattcccaatcaatgcaacaagactttttattatttgtaattcatgattataaaagaacaagatcatggtgcaaagcctacttgaagtttgcaggagaaaacactccaatccaatcatctactgtgggtgttggattactatattgcagtgtaacccattctgtatatttgtcctacaacagttgcaagcaggatccatcaa

SEQ ID NO: 266051 - DNA, 419 bp, Glycine max
tcttgtcctgctaaatgcagtttcctgcggattaatggttattattactccacaaatattcaagtccatcaatgaattaaagttgaaattatgtgtgaaattattcagtccatagttgactctatcatcatacatgaccagcatctactataaaagcttatgacccatttttaaccgactaatattacaaaaaataaaattcttaaaacaatctcaattgatattgtgttggccaaagagtaaggccaataaatattaaataatgttacaaaatttaccacaggttgatctagttcccctgcccgacgaacagcattaacaagctccctgttgtattcagtgcacatgctattaacaagtccaatttgaccagctctagcggtacgaccaaccctatgcaaatagtctacagcagaagt

SEQ ID NO: 266052 - DNA, 431 bp, Glycine max
  unsure (1)..(431): unsure at all n locations
agcttgttactcaccaactccacatcatatatatctgattcattcatcnttgggggctctctatcaagcatcttggctgcatgagcccactcctcataggtcaatgcagctctcaccatatttctccaaaatttccgcttatatgcgatattggccctcactttcacactggtgtgaccgtttaacaagaaagcaatcattgtcatcattgccaatatgccctggtttctcggatgcaaccatgacacaatgggtgcccaaaatcccctaaatcttttgaagatattcgacagcacaaaaagtatatgatacctcaattgtgagatagacttgcagaagagaaccctgaaagcaattgttctaccaagaatgctagaagggccaatcgcanaagggtcaacactagccctcttacttatatgatccatcct

SEQ ID NO: 266053 - DNA, 448 bp, Glycine max
tactaaggcttcaataagttttggtaattagtcaaatgcaattggtttcatccgttgcaagaaaacatgacaatcatgacttttcattccatgaattttttccctcgttaagatccacacaccgacctaaattggaggaatagccatctggtaactttagttctttgacccatttaagaacggtgagtctttgggatttggtcattgcataagctgcctttggtttaaagaacttgccacgagggggtgaggtctcaagctccttccaattacatatttcttctaaatctattcgagcattgtgtgtatccttacttttgccattgatgtccatcacaatgttaaagacattcataaacacatttctctctgtgtgcatgacatcaaacatataagctgtgtgttccaatatggtaacaaccaaaatatactttgcttcttccaatta

SEQ ID NO: 266054 - DNA, 405 bp, Glycine max
  unsure (1)..(405): unsure at all n locations
agcttacnaaagctaagcactatctatcttctcctgtggcaaattntgtctaaaacatacataaacacttcctgagcaagtacgagcagttatgcaagtgggaacagcaactttcattatcaaagtaatcaagcacagcggaaattctgcaagttgcaagtcgtctccaggatgtcaagacatctcacatgacatcagctttcttcttctgctccccctgtctccatgctcttactgcagcatcttctatcagctactagtcttttccaagatgtcaagacatctcatgtgacatcacctttcccttggctccatgctcttactgcagcatcttctatcagctactagtagcttacatcagtcatcatcagcagcagcagtcttcccctcaaatcatatacatac

SEQ ID NO: 266055 - DNA, 447 bp, Glycine max
tgtatgtcttcacacgacgagagtaataacctgctatattcttgataataagcagaatcggacgaccaacatcatccagataccgccgaacttgttcacctcgatcgatgaaaggagcggatgatcataaggtatctctgcctgccaccaaacttgctgtccctggatgacaaaaggtgcggaagacgatgttattctctgtatgtcaacaggctcgtgtgcccctggttaacgaaaggtgcggataaccatacagtatccccgcatgtcacctgactacatgggtcacgatgacaaaaggtgcataacacaatgttagtctctgcgcgtcaacgagcgtcgctgcccctggatgacgaaaggtgtggataaccatgcggtacccccgcatgtcactggacttggcatctctagatgacataaggcgcaaaaaacaaccctactctc

SEQ ID NO: 266056 - DNA, 398 bp, Glycine max
ctgagctgcaactgactgagcaaagacaattttgatctaattctatggcaacaaacacccacataaaagggaattaggtaacgcccacctttcacacataatcactcgggaaaacaccacccttccttaataagaagcctaccatgaacctctacgagaaaaaaaggaaaaaggggaccattatctaattctacacactatgtatttttataaaacactgacttgaacgtcaacatctttatgaataccctgccagagttcgactcatagtagatcatcataaaaactgaattccgcttcaaatactttctaaccttaggctatattgctaaacaagtattaccttcacaatcaaatcataaattattgtaagccataatattttctattattctaaa

SEQ ID NO: 266057 - DNA, 452 bp, Glycine max
  unsure (1)..(452): unsure at all n locations
agcttccatgatgnnggatcaagagcattttttctatgggatganctttngcttcctctatctttttgttcggagaattctctctaattctttgttcttcatcttattctccatatatatcctccattgtcttgtggtttggtgcttgttanagtagattcaaaaaaaccataaaccgattaaatcttagatctacacttgttcttgcatttctatggttcaaattttgtagatctactcttgaatcatgtttttgtgtttattctctggtctatcaattttcattcataatattcttgtgctgaacctttagatctaaattttcttccaaaatattgattagaacaaaaaacacaaaaatctaagtgtaaatcacttaatccatgtngtcttaaagtcatcgttaggcatagtaattgcacattatgctctaggttgtgttgaatcttatt

SEQ ID NO: 266058 - DNA, 397 bp, Glycine max
ggacccggtgttgagagtttcgttgatatgggctacgcgggagtacgcgagctcagttggaggtgggcaacacgggatggtgggtttatgcccgcattgtggatgtggaaaacttgttgggcaccatcgcccgaccgtcacctatttccacatgtgatgggttccccataatcctacaagcctgagatgaggaaatgttgaagggtgaaactctctgcttttattgttgaccacagagtggtacctggaaatatgtcgcgggggtcatgagaccttggggacgtcaagtggggtgctattgtccaaaaccaatcttgaccaatcccgacccaacccgggcatattcggtcagtgagaacctgtgatgtacctaagcaggcgagctactggcagtcaa

SEQ ID NO: 266059 - DNA, 431 bp, Glycine max
  unsure (1)..(431): unsure at all n locations
agctngagngacatgctatgatttaaacttcacagatactcagacagctgttgtggccaaggaggccttggaaggacattgcatatatgatggaggtttttgcaagcttcacatttcatattcacgacatactgatctaagtataaaggtaaacaaccaacactaatctgtagagtcgggattgatgttcatttgaataaatgattgaaaaactctgatttgaagatgtcttgtatccaatatgatacaacggtggtcagtcgttattcaagcaaataaagccaatcttaattcatgaatgtacatggttaactgtactcaacttgagatttttgttttgagccttggttttctttcctgaaatgatgttggtttatccttatcatgcactgaaaatcccttctattgaagcttgacanattttatcttgc

SEQ ID NO: 266060 - DNA, 438 bp, Glycine max
  unsure (1)..(438): unsure at all n locations
tgcatttgcggggacttctgaatattaaagaggcagctgtgaaagttccccttgatgaagtagaacctgctagtgagattgttaaacggttttgcactggtgccatgagttatgggtctatatcattggaggcacacacagcattggcaactgctatgaataagattggagggaaatcgaacacaggtttgttttaaaagaaaatatgatcgtgtactgttattggaaaaaatgtcaagtttgtttccaagtgtgtgtgtacgtgtttggtgtttatggaaatgctttttgggacacattgtacttgaaaaccatctcttttcttataatttaattattctagattagtctcctcgnatttcttcttcttattattattaattttttccataggtgagggaggtgagcagccatctcgtatggagcctctttctgatg

SEQ ID NO: 266061 - DNA, 407 bp, Glycine max
agcttgaaccataaatttgtgagagtgtgatcttaaattgtgattgaacgactaggtgtgagtaataatctttgcatgaatctctgaattttagaatgaaatgtataaatgaggacatgatgaaggccatgattgtacatacacaagccttttgaccaaaaagcttaccttgaatgataattgcatcttttgctcccttgtataaagcttattgatttgtcatgaattgaaccttgaactttaaatgattatctcctaataccttgtttagattctaggagagcatatggttcaagacaaatttactctaaattgcggggagaaaatttgaaaagaataataagaaagagggtaagcatcagcacacacaacaaataagttgtatgttaataaaaagaaaaaaaatg

SEQ ID NO: 266062 - DNA, 462 bp, Glycine max
  unsure (1)..(462): unsure at all n locations
taagtcacctgcggctgcagcttgctggggctttatggggatggattttgatctttttgagggcctttaatggggattttccaccatggatatgcagcggaagacaaaggagaagaggtgagaagaggcgccatccactagggaataagccatggaagaaagagctttcccaccaagaatgtgccttggataagaagcttgaagtggatgctttaatggaggaaaagaaagacataagggggagcacgaaattgaaggaataaaagagggagagaagttgaactttgagttgtgtctcacaagactctcattcatcaaagttacaataagttgtacaaatgcttctatntcatagactaggtagctccttgagaagctttcttgagaaaacttccttgagaagctctcttgagacaacttccttgagaagcctctttgagaaaacttccttgataagctaga

SEQ ID NO: 266063 - DNA, 445 bp, Glycine max
  unsure (1)..(445): unsure at all n locations
tgtgtacctcattctctctaactcactcaagacttaattatacatatacttcctttactttcctcactcaaattattacttgaccatcgaagtctttttgtttgcaagtcacccctcctgtcaaaggcacccttccaagctgacgtgtgaagttcgggaccccactcaaccacgttcaccttgacgtgccacggttctagattttggtaagaacatataatatataacaatttcttttgtttttgttcttctctatttattatttctcatgccttcaacacataatctgaaccttagagtcaaatgggtaaaaaccattgttacgaaattctttttttttttttgtgcagcatttgattgctacaaccaatgtgcctgnggacatgtagacattcttaatatatgacaaagaaggagggagaaataagttcatatgaacatattt

SEQ ID NO: 266064 - DNA, 457 bp, Glycine max
  unsure (1)..(457): unsure at all n locations
agcttctnctcaagctaaaaacaatgacatgtatctgatcttttggagaaagaaaatgaaaatgacttttataaaagataagtgcataacttgattttaacttcaattcatttaacctttgtttcttctcctatatgtgctaacagaaacatttatctaaacaggaccatgctctatttactttacgaaacaataaagcatcattacccaacaatatatgtacagcattttctagaatggcattacatgggactatgtataaaaaaatagagatataaaggaatgaaaaagaaaaggtaaaaggaaagtaactacattgcctgaatcaacttcagcaatgatctcctgtattgatttctcatcacccatattatattgctcaagggcagattccaactctatcattgtgatgtacctaaacggaagctacacgagtaaaccaacacctaaatcaatg

SEQ ID NO: 266065 - DNA, 383 bp, Glycine max
cccctactttggaagtgcattacttattacattgagttcacaaaattaatgcttgtctgtatcattatacttgcatgctcacccattataatatatattactcgatgatatcattgacaagttggtggtggagcgtcattatgacatcgtgacaacactaatgcgacagtatgctcttatgagcatttctttgacatgtttgtgcaatgtatgcacgttatggcaatgtttgaagtgcggggcatactatgaaacactgactttaataatcctgcatatgtattatgctctctgagtcttgaaggtatgaataatacattgctggtgtgggatatcaaagaaaataaaatatgtgagtcaatgggcctttaatgattcattga

SEQ ID NO: 266066 - DNA, 385 bp, Glycine max
attatcgaaagatatatgaagaaaagaatcataccacaattcatgaaaatgatctgctgcagcaaacacaaattaacaagttgttttcactttcagtcactatactatacattacaagaggaaggtgatcttacttggaaaatcccatggatcatatttgtagatgtcaatctgtttgatgagttcaattctcagaggcttattctccacctttcgtctcagataaaaccccacaagctcttcatttgttggatggaatctaaacccaagaagcacatcttcatcttctttcttggcatcatcatcatcagaggtatgtaactgggccacactcattattagtctgtgaaagcacttcgataacttttgggtacctcttataacg

SEQ ID NO: 266067 - DNA, 396 bp, Glycine max
tttttgcctgatgaagttggatttatatataatttgataattagtgaacactgtagctatgggaatcaacaaaacacaattgaacttaacgaggttgcttggagctgctcctcatcaacaaaaccactcaaaacttgtgcatgtgaatctgaaaataaatcttttctaattttatcgaaatatatgtctttattaatttacccatttgttaactctggaaaacacgcactcaatcatttgtagacttttggattttgcagtatgttgcgtgaacaattggaacatatggctgaataaatgacactggaaggcttaccaaagtattgtgcgtttctttatttaccatctgatacacatatgtgtcatgcaattataagtgaaactacataaatgcat

SEQ ID NO: 266068 - DNA, 372 bp, Glycine max
  unsure (1)..(372): unsure at all n locations
agcccctaaactntatacaagaaagaatttctgtttcctcttgttagacaagtggcctccaatatcttaagaaggggggggttgaattaagatattacaaactatttcccccataaaaatctatcaaggcataaatcccctcaataatgaacttcntaaatattgattcaaatagaacaatttgaatacgaatatataacaataataaatcaaggagtctaagggaagagaaagtgcaaactcatatttatactggttcggccacacccttgtgcctacgtccagtccccaagcaacccgcttgagagatccactatcctgtacatccctttacaagttctaaacacacaaggacaatccttcctttgtgtt

SEQ ID NO: 266069 - DNA, 405 bp, Glycine max
tatgttgatctcgtaacattctctcataacagagtgacctttattgtttcccttatgatattacttaatgagagtcacttgacatacccattgtgtggcgcatcttgttatgtacttctaagcgcccaatgtgatttttcactgacatggtaccacattgcatataagattgagtctcattataaatgttgcactaacgcttgagaattgcgtttattatgaaattggtgattgttgttatgccttgactcgagtgtgtgattcatgtgtaatgggaatgatgattgaaaaataaattttaaatgataaattgatgaaatgtcatggattgtattaagttaactatggtatgaataattgatcatggatttcgcttatgatttcgttattccgatctatttagaa

SEQ ID NO: 266070 - DNA, 356 bp, Glycine max
acgaacacttaaatactaagcttgtccagcagttagcaagaccgaacaaaaatgctgttatctttctccaggacaaggaaaagctaagcctatcagcgactcatgagcaatagcttcaggacaagtctgctaaggtatcagtcctgcaagcggaataggaagcaagggaaagggtgatccattctttgcacagagaaacaatgatgtggatggacacgtttgcctttattttgaatgggagtcaaaagctttcccgactgttagccaaagccaatgcaatggcgaatgtgtactcgactccctaagaggttcacgggctcctcaattattgctaacacattattgatctaatggcc

SEQ ID NO: 266071 - DNA, 458 bp, Glycine max
  unsure (1)..(458): unsure at all n locations
agcttaccatcataggaagccatggattatatgtttaaggtaggaaaagatgagtggagggagagggagagaaggggcacaaaattttgtgtctcaaatgaggtctgaactttgaagtgtaattctcanatgatcaaagttgaaaaaatgcacacacaagacctttatttatagcctaagtgtcacacaaaattggagggaaatttgaatttctattcaaatttcacttgaatttgaatttgaattggtggaaccgaaatttcactaattatgattagtgaattttagttatggttcagcccactaatctaagatcaagtccaagattctctactaagtgtgcttaggtgtcatgaggcatgtaaagcatgaagaacatgcataaagtgtgactatatgatgtggcaatggggtgcaaatgctcaccctccccttataatggtccaaattaatgggat

SEQ ID NO: 266072 - DNA, 428 bp, Glycine max
  unsure (1)..(428): unsure at all n locations
acttgtcttctgttgaatcatttgtggtggttntgtttgatctcatatatcttggaagggatacttaaggctgttattaagcttcatcatcgccaatggtttgcacaaaattacttgtatctctctatctctatccttcttaatttctcttttgcaccttatgagcgtcaattcaaattgcttattcttcccatcttcatgttttttaatgatataacatttacttaattttttaggaataataacttctatttggcttcaagtcacttttcttagttttggatctcattcatctatagctagcacttgaatttagaaaggatataatttgctttcacaattcttatatcatgtatgtaatcgtggatgtttaagtgagtcttggacatttgttacattccctcaatttccaaatagaataaaaaagc

SEQ ID NO: 266073 - DNA, 361 bp, Glycine max
  unsure (1)..(361): unsure at all n locations
ttttgaaaatngnagnttatgaatttagccccgtttggggtgtgcttttgttttgtttttcaatttgaacaaatcataactagtttttggctttaaattttaagattttttttttcaattttagagagttgccaccaaaatcttataatttaatttaaaagataaatcttctttgttgctttggtcaaacctttaaaattcaccaaagccaagtaccacaaaggtaaaaaaaaaaaactctctgcaaggcttaaccacttgggattacagtaaccaaaagatgaccaacctcaatgatgttgtttcactactacaaaacatagattctacaacagtattcgacgacgattttaccaaaatt

SEQ ID NO: 266074 - DNA, 427 bp, Glycine max
gccaacccatggaagctcctaatatctgccactctcttttgggtgggccattcttggatggacttgatattctcaaggtccacttggaccccatttctaccaactacaaaccctaagaaaactatattatctacacatagagtacacttctctatatttgcataaagggtgtttttcctaaagactaaaagaacttgcctgagatgtcctaatggatcatctaagctcctactgtacactaaaatatcatcaaaataaacaactacaaatctacctatgaaatcccttaagacatgatgcataagcctcataaaggtgcttggtacattagtgagcccaaaaggcatcactatccattcatacaaaccaaacttggtcttgaaagcggttgtccactcatcaccacttgtcattctgatttggtgat

SEQ ID NO: 266075 - DNA, 462 bp, Glycine max
  unsure (1)..(462): unsure at all n locations
tgagctgcaactttaggaaagatngactcttttttttgaatttgaatctcaacgcccaaaggcactggtaatcgattaccacaacattgtaatcgattacagcttttttgaaatcaatcgaaacattgtaaattcatttgaaaactttttcaaatccaatttgctattggtaatcgattacaacaatctggtaatcgattaccacagagtaaaaactctttggtaaagggtttgtcaaaaactcatgtgctattcaaagttttgaaaaaactttttaatacttatcttgattgggtcttttcttcattcttgaatcttgaattcttcttgattcttgaactcttgacttgttcttgattcacttgagttgttctttgatctttgaagcttttgttcatcacctttgtcatcatctcttggttgcattattggtatcatcaaaacacctttgaataacattac

SEQ ID NO: 266076 - DNA, 451 bp, Glycine max
  unsure (1)..(451): unsure at all n locations
ctcaagcttcatgatgaatcaacaatgtatcacaggtgtgttgatgataacaatgttgacaacacaaagatgatgacaaaggtgatgaacataaagctcaaaagatcaaagagcaactcatgtgaatcaagaacaagtcaagaggtcaagaatcaagaagaattcaagactcaagaagaaagtctacaatcaagattcaagattcatgatctcaagaatcaagatcaagattcaagactcaagattcaagaatgaagaaaagactcaatcaagatacagtttaaaaagtttttcaaaactttgaatagcacatgagtttttgacaaaacctttatgaaagaggtnttactctctggtaatcgattaccatattgttgtaatcgattaccagtagcaaaatgatgttgaaaaaagtttcaaactgaatttacaatggtgcaaatattttcaa

SEQ ID NO: 266077 - DNA, 384 bp, Glycine max
  unsure (1)..(384): unsure at all n locations
ggatcttaagcacctgagctgcagcnnncactttcatttgtgnanttgatctccntncggcgcgccaaattgggggaatgtgctcaaatatgtggggcaattttggtttgttttcttgcttgattaagttggattgggagtttgtatgggatggccctaagcctataatgcattttgaaacaatgggacatgccacattgtccccgttctcttgctattgatacctaaacgcgcgcccaccaagtgttcggtaaaatgcctcaatggcattagcgcgtgacttttgaaggaaacaacccatggggcattttggtttcacatatttctattttgtggacatgcattcattccgaaaaggctagagtattgcccacatatatccta

SEQ ID NO: 266078 - DNA, 412 bp, Glycine max
cggacacttaaatactccgcgtgaggaacacccacttaacgacttcagtttattgtctaacaaaccaggcttacgaaacctatactaaccactcctttcacaaccaattatcacaaatgaagtttttgcctctactaccagtgtttatgtcggatctcataatcaccgacacaaatccgttgtcatgagcaactgatcgaactcactgcataacatgatctcaggtaccaaacacctacaacgcaacccagacaattttagtcttcacagggacatgtcatttatcaatgcaataaacaataatgaacattattacctgagaagtattgaacgcatgcgaacattcaacatgttcattcataccacattcttgttcattttgatcatacatatcaaactgcttcagacatta

SEQ ID NO: 266079 - DNA, 439 bp, Glycine max
agcttccatcaatattcttaaagacaaattctattggcctacacttttcaaagatgctcataaccatgcattatcatgcgacagctgtcaacaaaccgacaacatgtctagatgacatgaaatgccagaacatccaagaggtagaagtttttggctgttagggaagtgattttgtttgtcccttaacatcctcatgtggcaaagaatatatcttggtagctgtggactatgtcttgaagtgggtagaagcaattgctagtccaaccaatgatgcaaaggtggtgattaagttcttaaagagaaacatcttcgctaggtttggagtgcctagaatcttgattagtgatggtggtacacacttttgtaatgctcaactctcaaaggtcctccaacactacaatgttcgacacaaagtagtatcaccctatcatccacaatc

SEQ ID NO: 266080 - DNA, 446 bp, Glycine max
cattagtacacttaaaactaacttctcggccttctgcaagcaaactttggaagttagttttaccaagaaatgctacccttaaaacaaatatggcatacaaacccctccaataaatacaaacatcaatgtaaatttagagcatgcttatgcgcatacttctttacgaacgttcacttgcacaagacattctattaactaagaaaaatgcacccatatacaatcaaggcaccttcgttacctatattatttacatgtacttccaaggtgtatttgttacctatatcacacgcatttcctttgctaaatttacatacatgcatactcaaagcactttggctatcaaaaattgcatacgtgcacattctggtatttctaatacccatacatacacaaacttcatgatgaatcttgactatctacacaataaggtgctacatttcatgctc

SEQ ID NO: 266081 - DNA, 317 bp, Glycine max
aataaaatagtcatcaagaagctgaaacatgaaaactctatttatgataattgatgagagtctatgtgtccgtgagatcacctccaaacagagaccatctgcacaaaaatttactgccctcaagtctggagagacaaacttgaaagagaagaaatagaacttatccaagctcttaagtttaatgactaatctgaagcttcacaatactctaagggccacaatgatgaatggcttatgtcaaaaagtcagtgatgtgaaagaaggaaatttacactctcttaaagaagacacaattctgaaaacacaaaggaaacttg

SEQ ID NO: 266082 - DNA, 419 bp, Glycine max
tgcatgcaattactatacttgttttgttcttcgtcgcgaaagtgtctgatgtatgcaattactattctcaaaagaattattggtttaattgacgtttccactacgtggtgatgtgcttgctagtgtctgggtttatggttttgatcatggttattattacctatactatttattttgtcagtggtgtgttaacagttgctaggattggtgatttgtcaataacacaaactacaggttatattagcagacaacatacaacttacatataatataatatataacacttatagtaaggcttggctaggggtagttaataatcatagccctacaagggttagatatctgaatgcatatgtttgaatgaggtttgactctgctatcaagggacaatgacttatctgtggtgatattcataattc

SEQ ID NO: 266083 - DNA, 455 bp, Glycine max
  unsure (1)..(455): unsure at all n locations
agctngaagaagttttggcttttacatgctctctctcccttgagttgcatttgtattgcgggttatctaggctgttgcatcttacaacatttgatatttgtattgcatcatacaacatcatggtttgtgtgaagaatagtttctaagttagaaaaggttcttcagaggcaaaaattctttgtgttatcgcatccgattgcaacaagctgtctgaagcttgagagttgagtcttgtatcggtttaatcgattacagctgtctcataatcgattacaaaatagaattagttacttgttttccaactctcaatcctttctttcgtaggtgctctgaggaaatcttgacttctatggctttctcctagttagtttgagcttcttttagtgtctctcatgttttggatatcgcaataaggtgggtttgcacttcctttgaaatccctaaaaaatgagatg

SEQ ID NO: 266084 - DNA, 448 bp, Glycine max
ttgcgagattcctcacggaatacgttacggaaacagttcggaagcgcctcggcttataatttcttcacggaaacaatttttccaagcaaattcgaaagagagagaagtgcctaatgggctggacactttcttcttgctctcctcccctatttatagcaaaataggggagggggttgccgcccagctcgcccaagcgagctcagctcgcccaggcgagcaaggttgcttcctcctaaagcaaccgccttctggaggaatcttctggagggcccaaatgggcctgtgtgctatttgcacccccatttttactaagtacacccccctctgctatgttttggtgattcttctatcgcaaagttacggatacttacgaatttcgtaacgatacttgttttctgtccgtaatgttacggaaccttgcggattacataatcataccctctttgac

SEQ ID NO: 266085 - DNA, 468 bp, Glycine max
  unsure (1)..(468): unsure at all n locations
naacttatgctgcaaacatctacaacagacctccttaatctcagcagcaaaatcagccacaacagaacaattatgacctctccaacaacaagtataatcccgggtggaggaatcatccaaaccttagatggtcgaatccgtcacaacaacagcagcaacaacaacaaccttattttcaaaatgttgctgacccaagcagaccatacgttcctccaccaatacagcaacaacaacagccccagaaacaacaaacagttgaggctcctccgcaaccctcccttgatgaacttgtgaaataaatgactatgcaaaacatgcagtttcaacaagagaccaaagcctccattcagagcttaactaatcagatgggacaattggctacatagttaaatcaacaacaatcccagaaatatgacagattagccttctaatctgtccataatcccaaaaatgtgagtgtcattacat

SEQ ID NO: 266086 - DNA, 430 bp, Glycine max
atgagagtagccacaataagctacaccggcgttttctgtcttccttaatacggtctagatggcttaaaatcaactagttcatcaattaatagcacactgtaaaagatataaacttaatttaaaggcactatatttacacattgttacaatgtttgtgttcttttgatacacctaaaaaatatttacacacatgctatcacatctttacctactcatcttggtcatgtttgataagtatatagtttatttacttgcttcttaaaaaaaatcttacatgttatttgaagtagtttttttttacataaggaagattataattattattattatgatttcttcttcgtcttcttcttcttccatctattttaaccatgaaactaattatattatttcacttaccaaattcgaagtggccacatctcatggatgt

SEQ ID NO: 266087 - DNA, 191 bp, Glycine max
acaaggcgttcccattgatagtggcactagacaacactatgctgttgataatcatcgaaaaggaccacgtattggctaacaaccaccatagcaatccgatcatcctgactccatcaaagtgaacacgcaagcgttgaaagaaatgccgctttgggcctaatgggaagacacctttaatgtgcacccatgag

SEQ ID NO: 266088 - DNA, 421 bp, Glycine max
atgattgattcatttttgggacttgtaagattcaatttgggcaaaattggatgagggaaagtgtgatttccaaaatctgcactttatgcagaattttgctgtcaaataagtgcagcagaattttggctttgtgtagaaagagttgtgtatttgctggttgtcgaaagagtagtacagagtgggttttggccgttttctagcagatcccaacggtcataatgtagatttatgtgctagagacttccagtaaaattttcgagtcgatccaacggttaatgaattggaacgaggagaatattactgtggtattcgagtgtgaaaagctgtgatgttgggttgtgttttgggcaaagatttctgcctctgccctgttttcttggctatgttagttcatgatgctggggatgtgaattacttggat

SEQ ID NO: 266089 - DNA, 419 bp, Glycine max
gtaacctcatcgtctctcacagactttagatgtgggagccaatccattccttgtgttcggactcttagccacttatgatagccgccgatgatctcattactgcttcccctaagctctctgtcctttcttcacgccgcatcccatgccttgcgaactccttggagtaccctcgcgttgtggtcactgaaacctcgtgcgatgaaaggcgtgatgctttcgtctgatggcattcctctcatgggacatccttcgccgctcttttcacatccccggtcgaacgtgtcatacatggccaaaatggcgacgaccgggctttccttgccatgatgaaaggcgaggaaagcgtcaatcgctgctatgtccactaacccttccatattctgaaagaggacaactccaaagatcaatagcgccaagat

SEQ ID NO: 266090 - DNA, 406 bp, Glycine max
  unsure (1)..(406): unsure at all n locations
agcttaaaaagctcaatatcgtacaatcatatgtaaggcataaaacaatcaactcgcgactaatatcagagtgtgaaacagacaanaaatagttgagtatagctttaggagttaataactcacaactctattggaaatcttttcatataaggctngataatcataaacagtacttgtctggcgaatctcaaatagttntgcctgatgattggtgtaggaggagtggccaaatctaagttccaaggctttagtaaaagtagaccaatctgacagtgggcagttgtgagacgtccatttgaaccagctgagagcctcacctttcatgtttcatgtagaaagaggtcatagataagcattagtccaagggaatatggtagtagagaaaatatcgctcagtctgaaaaat

SEQ ID NO: 266091 - DNA, 430 bp, Glycine max
  unsure (1)..(430): unsure at all n locations
tatccttgcgccttgggtntgngttgtattactgcaatgattatgtggatgacacatgaacatatagtggggatgtttcaagttctcgggtcacccgtgactaaagcaaaagttgatgttgaagatgggataagatcccacctttttttaaactaagatcccactttttgatatgctcttatatatacatatgtgatgaggattctganactggacaaatacaggctaaaggcccaagtggagaatggcgaatgcccaagtggagaatgacaaagcccccgagtggagaacgatgaatgtccaagtggagaatgatgcatgcccagaggtatagacactaagactattaattgttgtaaatgcccagattaatttgaaggcccaagttaaatatggtttctagttataattcttatttattggaattgtg

SEQ ID NO: 266092 - DNA, 428 bp, Glycine max
agctggcttagtgcatgtaagtgacttctggcttagcgccagtcttcttgcttagcctaagggttaaaggcggtgagcttatcaagttcatactcgctcagcgcctttgtacaactcatccttcttcctgattcttctacgcacttagccggaggatagtgcgcttagtggatggctcacccagtgcatggcgtggctcaacgagttcataaattctgcacttcaccaatcttgcccattttgcctgaaattgaaaaggaatgatcattaaatacacaaaattgggatattgagtacctattacttaaattaacaaaaagtaattacaatactaccaaaaacaactataaatgggaggagtcatatacaatttacaacagtttcttacacaaaagttagtcatattgactgactaacaatgacataat

SEQ ID NO: 266093 - DNA, 442 bp, Glycine max
attcttgatgtctctgaaatggcttgacagatggccagcatctacccatatcactcttcctagtaatttttcggaccactgtccagtcatgcttaggttctcatctatagattgtggcccgaaaccattcagaattctaaattgttgtttgtcagatgcctcgttgaattcagtcatgctgctatctgtggatggtctttggccacacccgaatctctcattcgtgtccctgattgagttgaaatctcccaagatacaccacagcccccccaggtgctgcttcttttatctgcctcacagaatcccatagaattcttttattatggatatcgcaaggtgaatagatggtgactatattgacttgctgctcttctctggtccactcccccaccagtagtataaagccatttctagtaacttttctctgaagcctgaaggattt

SEQ ID NO: 266094 - DNA, 456 bp, Glycine max
  unsure (1)..(456): unsure at all n locations
agcttcaggctgctcaattgctccaggttgctgcatggaagggcaaaggtttgtatggtggtcancagaggagcacaaaccacaaacccttgcgacaggtacatatttctgattcaaggccagctgggttaccaagttaaccaatgcatccagtttgccttcaagcttcttattctcagatgatgcagctgagtttgtagctacctcatgcactcctctaatgactatggcatcatttctggcactaaactgctgggagttggaagccatcttctcaattaaatttttggcttcagcaggagtcatgtctccaagggctccaccactggcagcatctatcatacttctctccatattactgagtccttcataaaaatattggagaagaagctgctccgaaatctgatggtgagggcnactggcacataagtttttaaatcgctcccaggacttata

SEQ ID NO: 266095 - DNA, 415 bp, Glycine max
gcttgaagaagttctgaataagttttggcttttacatgcccaactctcttgagtggcatatgtatcggatgttatcttgggtggcgcatcttaatatatttgatatctgtattgcatcatgcatcatcatggtttgttttgagaaaagtttctaagttagaaaagtttcttcaaaggcataaactctctgttttgatcgattacagcctcattgtaattgattacaacaagttgtctaaagcttgtagacttgagtctcgtatcggtttaatcgattacaactatctcataatcgattacattgttgtttgagagaatgactgatttattcacgactctcggctctaattgattaccaagtggattaatcgattacttctctctcattaagtgtttagaggtgaacaagaacact

SEQ ID NO: 266096 - DNA, 460 bp, Glycine max
cgcctgcagcatgcaactttacgaccagctgctttgttcttcttactctgctttatagaactatgctatatatatccataaccttcttctttaatttaatttcagaccttggtgcgtatatgtgtgtgtgttcaagtacgactctgttttaagaatataataaacactgatagtgcaaagaattgtaagaattgatatattgacacagtgttacttaatttcaaaccgtcagccatgttcaacataaggttgtttgattttcaaaataactaccttaaaagtcatacaaaaggatgatttctgattaacagcgtaaattttttacactgactgttcatatatattaaactcttgttctaattaggattgatattgatgttctttctatatttttttagcaatcaatgttatgcggtcctttattgaatgaataacgatactcttattgatattaatataa

SEQ ID NO: 266097 - DNA, 250 bp, Glycine max
cactgcccgggttaagatttcctctcttttgttgcaaaaaactacgattttctttttactcttcagggaagcattaccatttcaaccttgcttgcaggcttcccgcactggcggggataaatgcctaaggaatcttattgggggaggttgtatggatctatgatggatgccctacccaggtggtattcgttagagtcttttctttctatacttgggggtctcggaccaaaagttcaacagtcattcggcg

SEQ ID NO: 266098 - DNA, 366 bp, Glycine max
agctttgcacgtatcagtcaagtgtattgtccatatcgtatccaaagtgctcatcgataatggttccagtttaagcgtgatgcctaagagcactttggagaaattaccattcaatgcctcccacttaaagccgagttcaatggtggttcgtgccttcgacggcacccgccgagaggttaggggagagatcgatctcccagtacagataggccctcacacatgccaagttaccttccaaataatggacattaaccccccctacagctgtctgttggggcgtccgtggatccactcagtgggagttgttttctctacactccaccaaaagttgaaattcgtagtggatgggcatctggtcatcatatc

SEQ ID NO: 266099 - DNA, 432 bp, Glycine max
ctaagcttatgctatgttgtaggcaaaccctttagtgttaagatttcaacgagcgtgtaaaaaatctatcacgcttgacgtgatcacatgcaatcctcttgaacccttaccacccactctgtcatcatgccgagacttatgaatgccaacaggcttagccttctcaatttattctgaacaaaattcaatggcttgttgatgaatgcacctctcatcaatatatgcttctggatgataaagattctttgtgtaccctttcaagatcatcatgtatcgatcatccggttgcatacaccatacatgtagctgaccacaacatttgatttctctgactagatgcacaatgaagtgaatcatgatgtcgaagatagcatgaggaaaatacatatctaactgacacagcataagtgcggtctgattttccatctcatc

SEQ ID NO: 266100 - DNA, 402 bp, Glycine max
  unsure (1)..(402): unsure at all n locations
agcttagtaaatgtttgtcagtggagaaatcttanaatatataagaaacatctcataatatgatgattatattaagagtatcttagatgatctattaggagtggtttatatatttctcagtttactttcttatttgattttattagtattgggagtctagaatgagtgtaaacgaaggtcaatgctttatattttgttgacaccaatatagataattgaacactattcatatatgttttattattttgtatcattctccatttttatactttttgttctttgttattagtttgttataatgagtggaagtggatacaattcaattggtggagatacgattgtgggtggctcgtcttcggttgctagaagtaaaagaaaatacccctgggaataggactgata

SEQ ID NO: 266101 - DNA, 390 bp, Glycine max
  unsure (1)..(390): unsure at all n locations
ggtaatcgattaccatatatgtgtaatcgattacacagggcatattttgaattcaaatattaatagctgttgtaaatcagttttggccactggtaatagattacatcctctggtaatcgattaccagagagtaaatttcttgtagaggactttttaacttaaatctcttggtcaaaccttttgctacttcaattggaattcccttcctatttaatataccctttctaaaactctatagactgtcttgatcatacatcttgaatatctttaattgctttgtcttgaataaagctttgaacgcatgcgatcttttggcatcatcaaaaatnnncttgatcctttgtctacagtatgtgctgcaacaattgcattatcctccaattcgaatac

SEQ ID NO: 266102 - DNA, 450 bp, Glycine max
  unsure (1)..(450): unsure at all n locations
agctntcataagtgaattcatgtgcagttatcttcctaagagtactctcatgaggcggcggttgagccatgttctcagtatgagaattagcagacgaatgctcataatcacaatattcagaatcacccgcaacataatgctcataatgatcaggatgctcataatgctcaatatgcacaaaaatgaccagcatgcacactatgcctaaataatctatgaaaggttctatctatttcaggatcaaagggttgtaaatcaccaggattgcccctagtcatgcactatatgcaacaaataatgtgtttcttaactagcacctaacaagggggtaaaactatagctatactcaaacgatctccaaataagctgatatgttgtgaggaatacactaaaatcatgaaaagatagcacataacatttcaaacaaaaattcgcagcctactatgaaac

SEQ ID NO: 266103 - DNA, 315 bp, Glycine max
tcgagatcaacatttatgtcatgtttcgtgacatcaaatcaacaacattctggactccagatatgtttggtttcgagattcaagagaagatgaattcctgcttcaatacaagagatccagaacactttacaagggcagcattcaagtgattgtcctttctacacccgttttacagatttgttgttgcaaaagaccttcctcaatttgcctttgctacctgagtccttagcctctgtacagatattgccagattacatgtgctgatgtccactgccatcgtccgatctcaatatcttccctttgacatgctgcctt

SEQ ID NO: 266104 - DNA, 437 bp, Glycine max
  unsure (1)..(437): unsure at all n locations
agcttataatatatctttgcgctcnatattaacaacgaaagctcttgagaaattcaaatggtcataactttttacactgaggtccgattcaggcttataatatatcaagtcgctcgaaattaaacatcggaagctctcgagaaattcaaatggtcataacttttcacacggatgtccgattcagcgcatattatgtcgagaggctcgaaactgaacaacggaagctatcgagaaattcaaatgagcataacttttcacactgagctccgattctagcttacaatatattgagacgctcgaaattaaacatcgaaagctctcgagaaattaaaatgggcataactcttcactcggatgtccaattaggcgcattacatatacaaacgctcgaaatgaacacggaagctccgagaaatcaaaggtcatacctttacact

SEQ ID NO: 266105 - DNA, 414 bp, Glycine max
tggttcgaggtacttacccgttgaagatcgatgaacgttttagaacgaatgaagaacgtcgaagaacggctgaaacctttgcgaatttcttcacggataacgctacggaaacgtttcggaagcgcctcggcttattttttcttcacggaaacgatttttccaagcaaattcgaaagagagagaagtgctaaaggggctgaacccttttcttcttcacttcctcccctatttatagcaaaataggggaggtggttgccgcccagctcgcccaggcgagctcatctcgcccaggcgagccaggttgcttcctccagaagcaacagccttctggaggaatattctggagggcccaagtgggcctgggtgctatttgcacccccatttttactaagtacacccccctctgcttttttg

SEQ ID NO: 266106 - DNA, 281 bp, Glycine max
tgaaatctatgcctaaatgcgtgctactatgaaaatatgattacatgcgctaattacaaagattaagccatctataccttaaatgtaacgttctaatgccatatcctcatctctgaaacaataattcgtttctcgggactgccttttaatatgctccccctatacctacctaagagaaattgcctaattatgcctaatggcagatccacacctgacaatggctcttctgcttattgaccaagatattccccagctcgtatcgacaattctctcatatcaca

SEQ ID NO: 266107 - DNA, 456 bp, Glycine max
  unsure (1)..(456): unsure at all n locations
tctctacacgatatgcttattaacctctagaagacatgcataaacttgtcatccaaacaactaattgttcaattactcgtatcattatgtaatcggattgaaatcgataattctcagtatacagaggatggggatagagttattggtagaaattcataccattcacgtatctacatattattaaccatcgaatgttagtgtcacaatgggcatttcgagcaaaaagtgcgggtgctcttacgcttgaagtgttgaagtgtgaatgcccatgaacatttcgattcctatcctagcattaaattcatgcaagtttctatcctattattttctcttacttcttaagccttgtgaagtgtgtcactgggaacaaagtaaaaaaaaacatcgttacgcgtatagaaagtcacttgctgggactattgattctaggtgttctggcagaataccanattctac

SEQ ID NO: 266108 - DNA, 401 bp, Glycine max
  unsure (1)..(401): unsure at all n locations
ctatacaaaagttagtcgtataaatctactgacaaactcccccacatntacagttgtgcttgtcctcgagcaaagaaagaacagttcacttgtcctcaagtgacaaagacagtggccaatcaaaagaaaatggtgtttgattcatcaaggacatcaacgatatgaactgaatatcatggaatgcttaaatcaattacttctcacaagcatgcagttnttcaaagataagagcacaactattagagtcatagctgaaataagcaagtaagcatgacataaatcaaggaaagatcatcaaccaaaaccacacaatcattgttcacttaaactcaagtgttaggcttatccatcataaacaaccacacaagttcaacctttgctttcatctctatcatacaata

SEQ ID NO: 266109 - DNA, 386 bp, Glycine max
  unsure (1)..(386): unsure at all n locations
tgtgccgatcccacatggntgttgcattatcgcagaacaactttatcctgactggtcttcctatgattttacctagtgagagtgacctgatttactagtgcatggtttgtcttgtcatgtactcctaggggtctgacgaggttttttattgacatggtaccacattacatatagggttgagtcttagcgtatatgttgcataacacttgtgtattgatcaatattgattgacttactgatattgttgtttgatccttgagtacgtgaatgttgtgaaaatgaatgagacatgttgtgttgtgatgtgatgttgggcgacaaaatggtgaaatgacgtcgactatgtttaagttaagtttactttaattatatgatatttataccta

SEQ ID NO: 266110 - DNA, 481 bp, Glycine max
  unsure (1)..(481): unsure at all n locations
atagggttttgaaagatgatcatttcatctttttatctaagaaaaaggatcattcttgaggtccaacgccttaaaatgatcacctttcaagtaaaaaagagtcacttgattcacgcataagaaagaactatgtaggtatgatttcctcatcccaattgaggaatacgtagcagtaaagggaaatacccttgtcgacccctaaaagagaaaaaatataaaaagggtataaaggatataaggacgtaaaagggaacataaaaatctaagtcatgtttgcacatttgattataggctgccgtctcttatgacggacgtgtggagtgctaataccttccccatgcgtaaatacaactgccgagccctttacttaaaaagttcgtagatcgcgtcttttctgggttttccgacgtcttcctcanataaacgttggtggcgactccgcgcgtattcctttcgtggaacacgcatcccgcgagtcacg

SEQ ID NO: 266111 - DNA, 348 bp, Glycine max
  unsure (1)..(348): unsure at all n locations
tcttctacagtcatttacgtttctggttcatctacgctactgttcatttacctctctgcttcatgtctcatctgcgttttctgtttgaatccatggaaggctagaatttctggagttgtttccttttgaagacaaagcccaactctcttcgaggtgtcgcttgtaatgtggttccctggcacgtcttccttcaccacttatctcaaacttgtgaatattaatcagtgcacgctctgtgttcgattaattgcctctgancctaacttgcagtcatgcttaatggactaacggcttactggtgtatgtggtgcctaatcaccattgaaaccctaagtgatatttgttatc

SEQ ID NO: 266112 - DNA, 472 bp, Glycine max
  unsure (1)..(472): unsure at all n locations
tcaccaccaagagagtgtcttggataagaagcttacatgattcttctatggaggaagagaatgagagagagaaaganaatggcgtgtgtcataccctaatttcgtccggagacctttgcttgatgacatgtgacctttgtttggtccttgtaaggtgcttggcacccatcattaggcaatttgtgaaattccgagacatgccgaaaaacaaaagaaaatattgatgcacaatccgtaaagtttcgtgacacaccggaaatcaaatggaagcatcgttgcataattagtgaggttccgtaacattccgtaagtcaaaaaggggatgattatgtaatccgcaaggttccgtaacattactganagaaaacaagtatcgttacgaaattcgtaagtttccctaactttacgaagaaagaatcaccataaaaagcagaggaggtgtacttagtaaaaatggtgtgcaaatagcaac

SEQ ID NO: 266113 - DNA, 404 bp, Glycine max
  unsure (1)..(404): unsure at all n locations
tanatggagaagaagacagcgagaatgagaagacagcgtgattgagactaaacatacctangtatggtggcgaaagagaagaaccacagagttgtcacgatgctcgagtgcgacgaaaacgatgctcgagcttagacaaaacgattctcagatgaagaacagacaacttcaaggttaatggacaacaaagagagcaagacagcttatatggcgaagaagacagcgagaaggagaagacagcgtgaaggagacgaaacatacctaggtatggtggcgaaggagaagaagtatagacttatgacgatgctcgagtgcgacgaacacgatgctcagatgcagaacatagaccttcaaggtagacggagattagaagaagaagaagagagcgcgaaacttagatggag

SEQ ID NO: 266114 - DNA, 257 bp, Glycine max
taagcctccacctgacttaattgctgtcatcgcagtcaacaacattaatggcgttgggcctaccgtatggaaagagagaacagcgttaattaaactggacacgttgcacgatatactaacttggagatatttaaaacctattgcttacgaaggatgtgcttgaacttcctgtacaaattctttaaaacgtggagctatgtttacgcgctcttgaaaagtatgcttgagacgagatctttttctttcgctaattcagc

SEQ ID NO: 266115 - DNA, 483 bp, Glycine max
  unsure (1)..(483): unsure at all n locations
ttgaattcattctatgcacccttaagggtacattcttgctttttatgtttttatcttcattcttctactttcgatattctttttcttcgttttaagtgggtttcgactgatcgtttaagctgtaacctcacttaattaatgtttaaatgaatttgaactgatccgttgtgttgtaatctcatttaatcgcctttaaaataaaattcaattgatcgttcatgtcgtaacctcagttaaataaaaaaataaaaaaataagtgtcaaccggacattntactttgaaagtcctctttaatgagttgagaaataaccaagtgaaactaatgctaaaatcaactcacaaatcaagcatttgcccgcaaaaaggtcatttgaaaccatttcaattccaacgccttaatggtcccttttactctatcggtgaaaataactgttaaaagtctaaatcaacactccgcatactttcttactttcgaaaaacta

SEQ ID NO: 266116 - DNA, 286 bp, Glycine max
  unsure (1)..(286): unsure at all n locations
ccccccccagaggnaatatctcgtgacaccaaaaccaacaaagaagggcaaacgaaaggaatattggagcaccgccagaagaagacgacccggcaaggcccaaggaagacgcaaaaagcaacaccaagggcataataagaaaaccccaaacgaccggaaaaggaaaatgaaaaaaacaccgccgagaaagagaaaaagaaaaaggacaaaaggaaaccaaatgccaagcaggcaaaaccaagaaacaaacaacaaaaaaaaaagcacagaaacaaccaaacccaag

SEQ ID NO: 266117 - DNA, 422 bp, Glycine max
tgctaacccatggaagctcctaatatctactacactgtaagttgtggtctattcttggatggcctcgattatctcacggtccacttataccccatttctaccaactacaaaccctaagaaaactatattatctacacaaaaagtacacttctctatatttgcatagagggtgtttttcctaaggactaaaagaacttggctaagatgtcctaagtgatcatctaagctcctactgtacactaaaatatcatcaaaataaacaactacgaatctacctatgaaatcccttaagacatgatgcataagccttataacggtgcttggagcattagtgagcccataaggcatcactagccattcatacaaaccaaacttggtcttgaaagcgcgtgtccactcatcacaccttttcatcctgattt

SEQ ID NO: 266118 - DNA, 500 bp, Glycine max
  unsure (1)..(500): unsure at all n locations
agctagtggagcttctatggaggctggatctttgagcttctattatgttctttaatggtgattntccaccatggagatgcagcagaagacaaaggagaagaggtgagaggaggcgccatccactatggaataagccatggaagaaggagcttcaccaccaagataagccttggataagaagcttggagaggatgcttcaatggaggaaaagaaagagggagagaaagagagaggggcgagcacgatattgaaggaagataaagggagagaatttgaactttgagttgtgtctcacaagactctcattcatcaaagttaccacaagtgttacacatgcttctatttatagactaggtagcttgctcgaaaagctctcttgagaaaactttcttaagacaacttccttgagaagctagagcttaactacacacacctctctcataactaagctcaacctcttgagaagcttccttaagaagaatcctagagaagctagagct

SEQ ID NO: 266119 - DNA, 393 bp, Glycine max
  unsure (1)..(393): unsure at all n locations
cttgcttggagcttcaatggagaatgaagaagaaanaatgtttttttatggagagagagagagttgtctgaaaagtgtggtggctgagtgaagagagagaaaagctttttggttttaaataaaagggatntctctttttctattattgtatntaagcaatgccacatgtctccatttgagtggagcaaaaagggcccactttcccttttgcctgtgacccatactcagccacaaaagtgggaaaaatctgacctttgaaacgctaaaatcctgcctcagtttgcgtgccatttctttggttccagntcctcgcgtttctctgcgttcgtcggagccagatttctaaagcacgcaatatatatatcataacgctcagaatagaaccccgagcgt

SEQ ID NO: 266120 - DNA, 498 bp, Glycine max
  unsure (1)..(498): unsure at all n locations
tgggaaggcaagagcgatttgcatcagtacatgacatatttatgattaaaatattatatgcgactaaatattgtccaacaaactactcaaaagatttataaactatatgtatgactatttgtgcacaactcatctaagcaaggtacaaaatgtagctacactaatcataacttaactcatcagtaactgactagtggcaacaacctgggtacatctaaacaatgtatgcattattgtcctctgaatgaatgacatactaagatcaaattgttaggcataaaggtttatacgttaccttnttatgaaagttcctatcatgataccctgcttcgtggatctgatctggcacctacaaagaatggtaattntcattactttctaactcaactacaaatagaacaaacaagtttgtctatggttataagacaaggatgaatgaatgataagaggctaacctctaataaaaggatatcctaccataactactacacaaacata

SEQ ID NO: 266121 - DNA, 483 bp, Glycine max
  unsure (1)..(483): unsure at all n locations
gaccaaaaactcagctgcccccgctcgcaggcagcaaggagttcctccataattaccgccttctggnagaacttcctggaaggcccaagtgggcctgattactatttgtaccccctgtttactaaatacatccccttgccttttttgctgattctctttccgtaatgttacggaactttacgaatttcgtaaagatacttgttttctttccgtaatgttatggaaccttacaaattacgtaatcatcccttntttggcttccagaatgttacggaacctcacgaattgtgcaacaatgcttccatttgactctcggcatgttacgaaacctcacagattgtgcaacgatgcttccttttgactttcagcatgttacggaactttacggattgcctaacgatgggtgccaagtacctcgaagtggtcaaacgaaggtcgcactccaacacatggatggctcctggatganactaagcatgacag

SEQ ID NO: 266122 - DNA, 533 bp, Glycine max
  unsure (1)..(533): unsure at all n locations
cccccccccccgcctctaaattctctcactggtctcctcccccaagggggnngnttgtgttgatcgtagacnacggaccaaaaactcactaggttggcaatacccccactgagggctcttgtttctgactcccgcgacatatcttcaggtaccactctgnggtcaataaaaaaaagtacgaagactgactctttcactctttctcacatcaagcttgttggattatggggcacccgtcatatgtggtactaagtggcgatcgggcgatggcacatatcatacatgaacacacccatcccagttgcgcacctttaactgagctcacacactcctacgtagcccttatactcgttcctctcagcatcgggtcctcatcaacccctccaagcttccacaatattcaaaccattcaatttcaaatatcatgaaactaccctaaaccaagaaaacagggtagaggcagaaaactatgcgcaaaacacattcacatatcacagctntccttactcatataccccaataacattctctta

SEQ ID NO: 266123 - DNA, 419 bp, Glycine max
  unsure (1)..(419): unsure at all n locations
ntctggatagctctatccatgactagttggaagcttatatatttcttggtgttccacaaccagaatttcagcaccgataaagtcatggacgaagctttgtttcacacttggtcttggatcaactgcatggagaaagatttccatacacattttaatcaatggtctactatcttanatgaggaaatagcctaggggtgttcttttgctgtatgggtatccacctcatagcggtttatcttatgtagttggggctggcagagatctgcctttgtatatttagatatatttcagtacacctagcgctgattcattattaataatatcagatttttgctgtgcaaaaaagaatatacgacaagaccgctcgtactggatttaatactctctctctctctctctctatatatagatatatatac

SEQ ID NO: 266124 - DNA, 435 bp, Glycine max
  unsure (1)..(435): unsure at all n locations
ctcaagcttcagtgcgtacatgacgnngaagattgaagagagagaaggctatgtctcttccgacagtncattcgggtttgaatctcaaagcatcttccttaacacatatttattcatgtaggtttactttcatctcgtgttaatcataactatttgaatgcttatctttcctttaaaaaaaaattcatcacctaagacttcttgacgttagcgtgctctttgtccttataaagggtaagtataatgatattgccatggattctcgagattctatgtctggagtgacttttgatctagaggaagaatctttacaacacacttgggacataactgaagaaaagtgcttcatcttaccactaaaggacatgatgtacgtatactgttttgggacaatctcgagttgtagacatgaaacatacctgagacctatgtcta

SEQ ID NO: 266125 - DNA, 471 bp, Glycine max
  unsure (1)..(471): unsure at all n locations
cgctctgttcaagctatcccaaaatctagaggtgaatctatgatctctatcaaatactatactagatggctcaccatataatctaacaatctcacttatatacagggaggtcaacttctccaaagaaaatctgatattaataggaatgaagtcagcagacttggtcagtctatcaacaataacccagatagaatctaaacctctaagggttctaggtagtcctaccacaaaatccatggaaatactgtctcacttccactaaggtatctctaaagattgtaacttccctgaaggtctctgatgttctatcttagccttctgacagattatgcatgcatacacaaactcactaacctctctcttcatattgagccaccagaacatcatctntaatatctgatacatcttggtagcaccaggatggatgctcaaattactcctatgntccttctctaagatcatcttcctaag

SEQ ID NO: 266126 - DNA, 455 bp, Glycine max
  unsure (1)..(455): unsure at all n locations
ctaagcttgagatgaggaagtgtagagggtgaacttgctgcttttattctttgactcacagagcgagacccggagatatgtcgcggtggtcacgagaccttggggacgtcaggtggggtgctattgtccaaaaccaagcttgaccaatcccgacccaacccgggcatagtcggtcagtgagaacctgtgatgtacctaaacaggcgagctcctggcagtcaacagataaaaggaacaaagaccacaaagcttggaggctggtggaggctggccagctatgaactcgtttgatgtgtgagatatggcctctggtaatcgattaccaaaggtgggtaatcgattacaaggcttataaatgaagacagaaagctaagatggtctctggtaatcgattaccacgggatgtaatcgactaccaggcttgaaaacgaggtcacgaagctaanggagcttct

SEQ ID NO: 266127 - DNA, 453 bp, Glycine max
  unsure (1)..(453): unsure at all n locations
gacttcagtcatcanaagattattaatatgtgaccatggcttgttattgaacaatcaagaaatctatctttcaatcttctctctcaacatcattcaatatctttcaactctttctacagaattttctgattcatttctctttatctttctaaaagttttttttcaaatactttctcttccaagaaaagttctttgttcaaaaacttgtgttattcatctttttcattctcttctccctttgccaaaagaacgaaagactaaccgcctgaattcttttgtgtctctcttctcccttacaaaagattcaaaggactaaccgcctgagaattcttctgattcttcccttccccttaagcaaaagatttcacaggactaaccacctaagatatattctgtttccccttacacagatcaaaggactaaccgcttgagaattctctgtcccaacacatt

SEQ ID NO: 266128 - DNA, 326 bp, Glycine max
catgaagcctatgctgcaacggtatacaacagaggtctgtattatctctactacaataccaactatgagaataatgcacgaattctaaaatgcaacactaatcagaagggtgaatgtgtaacgtcatatagcaattcaattctaatcgagtataacgtatgttatatatattcatattctcccaagagtatacatttcaaatataactttattttcatcaaacgggatgtgtgctcaaactttcaacaccaaagaatataaaaatgactctaagagcccatactcatggaggataacctcgccaaccacaattgacattaaagaaa

SEQ ID NO: 266129 - DNA, 391 bp, Glycine max
tcctacaagatctagctcctcagtagagagcaattcatctcttatggtgaattaagttatctcagtcattaattaaaaaatcaaagagctcataatgttatgtgtatatgcataacaaatcatgaacatgttcaaatatcaataattgattttcttgctaataactaagagaaaccaaagaagctataatgttggtttggtgattaaaggaagaaatgaagtgagagaactcacaaactaataactaacatttgccaaaataacagataatatatctaagagaagccacatacattcctacattcacacaaagtgcttttgggtaatgcaaatctagactcaatctcaattacaaactaaaggataacaaagcaactatcacgtcaaatca

SEQ ID NO: 266130 - DNA, 356 bp, Glycine max
  unsure (1)..(356): unsure at all n locations
ctcaagctctgtgtaatcgattacactaatttggtaagcgcatacttgtgtactgcctctgataaatcaaaagacgtaagtcttcataaaggattttgactttctcacattggtcntaagctcttctaaaagttataactcttctgaatggtcttgttgaccacacatggaaagtctataaaagcacggctttgctttgcatttcaaaaaaatctttaacacttatttcatacaatcctttacaagccttgaatctctttgaaacttcttcttcttctttgtaccaaaagctttctgaagctttctggttatctaaactatgaaaactcgngctcatcatccttttcattatcttc

SEQ ID NO: 266131 - DNA, 466 bp, Glycine max
  unsure (1)..(466): unsure at all n locations
taacaacttatataaagnntttaaagagaatcatatgccttatatgtggcgtatgaattatagcatacatttaataaaatcatctatatgagtgtcaagtgggaccacttgtatgaaatcctggcgaggtctctataacactcatgaatacacttataacctataaatgcaaatcaacaagaattgtgggggtgtaatgtgattgatagaccactaatacacaacaagtgttgtgggttcaatagtttggtatactcactacactgagtgttaagtcctattacgttaggtctgagtcaaatgcttgctacaccatgtccaacgcattacatcctatatgagaacctaagaattcttttctttcttcttttcgaacagctttaaccttttaaaataagtggcggattgatgtatactttgattaacaactaaatatttacaaagttaaaatctataataattatgc

SEQ ID NO: 266132 - DNA, 499 bp, Glycine max
  unsure (1)..(499): unsure at all n locations
aactcaagcttcggtgaaatgaagngatgaaagcaccactgcaaatgaatcataccttatatgtaatcaagactattggatttctaacgaaagaaaacggagaaaactaagcatagccaaaataagctaagccacatcattcgtgtaaagagtacgaatttctttgtgtaccataaagcattttccacaacaaaaataatagatgattgatattaaaatatttaaaaattcaaattaaaatccaataaccattaaatctctaagagattcaccaaagaatcatgtcctacaatatctcaattatcatttacccatcgccatcaccataaatggtaccacctccacctccgccaatggtggtggtggcaacaacagtgtggacgacgaccatcaaagtggtggttgttgatgatggtggtagtgacgattaatgatgacggtgataacaataatcatggtggtggttgcacggtggacatggtggtgacacaacgataac

SEQ ID NO: 266133 - DNA, 456 bp, Glycine max
  unsure (1)..(456): unsure at all n locations
cttgagggctctcaccaagttccttgccaacactgttcattcttatcaatgtttagacttgtagaaagggcataatagaaaaaggaactggtataatcttgtaaattttttatgttttcctctacctttcaaagtattagtaatttctatttttgacttacatnttgccattaaggatgttggttattggtataacagtaattgattgatcattttcatttctattcatattgaatcaatttggttgcaatggatgttttgattactaattangttacctgttaatcttgcgaaattgacaaggcactactagaaaaaagacaatctacatcgattatacgagaccatcaacatcgatttacgaccgtcgtcatagaagacgtcgtcaaaagtggtcacgtattctatgacagttgtcaaagaccatcttagaatgctcagcattcaacatcgatc

SEQ ID NO: 266134 - DNA, 486 bp, Glycine max
  unsure (1)..(486): unsure at all n locations
aggttcgaggtacttacccgttgaagatcgaagaacgatgattaacgaatgaagaacgtcgaagaacggttgaaatctttgcgaaattcctcacggaaaacgttacggaaacgtttcggaagcgcctcggcttagattntcttcacggaaacaattgttccaagcaaattctaaagagagagaagtgcctaaggggctgaaccccttccttcttcacttcctcccctatttatagcacaataggggaggtggttgccgcccagctcgcccaggcgagcagggttgcttcctccacaagcaaccgccttctggaggaatattccagagggcccaagtgggcctgggtgctattngcaccctcatctttactaagtacaccaccctctgctgtttcttggtgattctttttcgtaaagtacggaaacttacgaatttcgaacgatacttgtttctttcgtaatgtacggaaccttgcggatacataat

SEQ ID NO: 266135 - DNA, 493 bp, Glycine max
  unsure (1)..(493): unsure at all n locations
ctgattgagaatagtttggtctttctggaaagataagaggaagctctgttattgtctctatctaaagcttgagctgatttgaaggtttaaggagtcagactaaagctaaaaagtctcggtcttgcgctntgaattggtgttttgcatatgcgtttgaaagattagaaagaagcaaacaaatgttaagctatgataagcatttaagacttcattaatgctttgtgtctgagatctattctgctgagaatgtctagaaatttnttttctaagaattttcgaagtccaagaaagtaagaggatattcaagtcttataagaacaacatctttcttcatctcanaaaacgtggtctacacctggtgtgattagaactgttctaagcgaaaacatggtgacctttgctgaagtgtggttcaagacaggtaaagagagtggcgcttcaacatggagagaatgtgcattacatgctcacatttaatgcaccaatgaataca

SEQ ID NO: 266136 - DNA, 505 bp, Glycine max
  unsure (1)..(505): unsure at all n locations
tactcaagcttgcacttgaggagggaaggatattngcaagtaatgaacaactgtcttatattattgtccttcagaatttactagctctttgtgctaatatgtaaatataaatagtataaggctatggcgtaaaaacatggtctatatttacttctaagattgttaggggtaaaaaagaccatgtccataagccatagccttatactatttatatttacatataaatatcaaagaaaatcaatatcaaagaaaacatggatgaggtcctaaggatgccatgtacatgtgtatttctgaagatatagtatttatattccatcaagcatacattgactggtgattacatgtaatagactgtntataacatggttgccccanatcacaattaagaagcacaactaccaatctttccgagtccttaggttaattgtcttgactcttctgtggtgaggttctgttaataaattatactgttgtcttcctacagatactatgactgatcttc

SEQ ID NO: 266137 - DNA, 449 bp, Glycine max
tgtatttaacaatacttgtacttaatataagagagttgtatttctttattaatatatatgtgaggggcagagggtgtcacagctatttacatttatatgagttcaatacaaagtgatataattcaatgagcccattagactgccaatagaaaattgatatgagcttaatgagcgaaaaccagtgtggcctattagggaataatgagaatcctaataggttaaaacctaaggcatgattatggctcccaagataccaaatctagaaatagtttctcctctctccatctgtagagaaaacgaatgtcccataagaaagaaggtgattcggttgacgaagatcatcaaactaattattcgcgaccgcggtaagattccgctgcgctgtgatcaagctctatggatcaaagtattccttacacctcctgatatctgacgaatgtgtatgatgc

SEQ ID NO: 266138 - DNA, 295 bp, Glycine max
  unsure (1)..(295): unsure at all n locations
gcggattnggtcttcgctggcgaaatgatcgaagtagggttaattaatatngcaaatctgatcatcatgctggtgataaatgcaaaaaaaaatattggggccagtgaagagggtgagaataagggacaaacccatgctgtgactgccattcctatacagccaagttttccaccaacccaacaatgtcattactcaaccaataacaaaccttcttcttacccaccacccagttatccataaaggccatccctatatcaaccacaaaggctgtctaccgcacttncaatgatgaaca

SEQ ID NO: 266139 - DNA, 466 bp, Glycine max
  unsure (1)..(466): unsure at all n locations
tccaaacagctatgttgaagaagttccaaatgccatatggtatttctatatatatattccttattcaaaaccaaccaaggttcatgatcagattcaactttatggtgatgctaaagaccttgatgatttttgtttgaaggtaagagaaagtagaaaccttcattctgttgaccattagcaatgcattttttatcgtcctatttttcatgatctttctctgaagttgatgtataattntgatgctataatctttttaggctcaacttgtgaactacatacaatatagagctcttctggagggatggacttctcgcatgtggagtaaatatacaggtgtattgatatggaagacacacaatccttggactggtctgagaggtcaattntatgatcatctacttgatcaaacggcaggcttctatggttgttggtgtgctgcacaaccagttcatgtacagcttaatct

SEQ ID NO: 266140 - DNA, 348 bp, Glycine max
ccataaaaccccccgtgtaatacctcaaacgaaaagagaatttttgcgaaaccctacagatgaggactcccgctcacaacaccttcaaacagtacacaataaaccgcctaaagcatgcatgcagacttcaaacggggccggaaaccgctcaaaaggacattctaaacggcattaaacacaccgctacaagctctcttaaactcccaaaagaattccgacaacgcgcagaacaccgtcaaacggaacagaaaacaccttacaaccatgtcaacacatataataaacgcgacactactaccttacgacccgacacaccatgcatcacgccatggatccgcgcctaaaagt

SEQ ID NO: 266141 - DNA, 383 bp, Glycine max
cactgaggaggacaaggctgattgcacaatgttcttttttattgtggggtgcttaaggcttgtgtgccacacaagacctgacatttcatataatgtgggagtggtgagtatgctcatgagtgatcctacaaaatctcacttgggtgtagccaaaaggacactgaggtatttataaagcactgctagttctggaattctattcccatatcaaaaagagaagttgtgtctacaacttgtagcctattcagactctgattggtgtggggacaaggtggatatgaggagtacaatgggctatgtattctctctttctgggagttcaatctgctggtgctcacagaagcaagatgtgatagctctttccacatgtgaagcagaatata

SEQ ID NO: 266142 - DNA, 495 bp, Glycine max
  unsure (1)..(495): unsure at all n locations
gtactatgcagagaatatccaaggaagagaccttcatctgtcttttttcaaactttcctaaattatcttttgcattattcaatacaaaacatttacaaccaaagatatgaagatgtgagatgtttggttttctgccattgaacaattcatatggagttttctttaagatgggtcttattaaagccctatttaaaatgtagcatgcagtgttaacgacttcagcccaaaaatattctggaagaggtgtatcatttaataaagttctagcaatctcttccaaagatctatntttcctttcaacaacaccatnttgttgaggggttcttggtgcagaaaagttatgctcaatcccatgcttatcacanaataattcacattctctattttcaaactcacccccatgatcactcctaatagatataatcttgagaattttcttattttgaatgatatttgcaagttttctanatgcttcgaatgcatcattcttatgag

SEQ ID NO: 266143 - DNA, 351 bp, Glycine max
  unsure (1)..(351): unsure at all n locations
tctacagnngccaannnnctcaagaatgacaccaccataactgttttttcacanaagcatcttttcaagcttctgaagcttaccaatctctcttggcaggaagccagagagaccattctcatacaaaaacaagntcacaagctctgaacagcttcctatttcaggaggaatctcaccagagagcatagtactataaatagacaaggtctgaagcatgcttaacttacccagtgaagcaggcaatgaaccagatattttagtgtcagcaagacctaacactgacaaattcctgcaatctccaagttcatctggaatcttccccacaatgccactgttccctcctgctcttat

SEQ ID NO: 266144 - DNA, 271 bp, Glycine max
tattatggaagaacccataactatacgcgccggaagggatccatatcgcaccatattcaaaactataactatgtgtgatcaatacgagacgcatgaacagatgacagctcacatgatggctctgaaagaacacatggtctccatgatggaggccatgtgaattattaaacagctcatagagaagaacgcggacaccgccgacgttgtcagttcggctgtcgaacatacccgactatcttgggactactcacacatctccctcacacacagt

SEQ ID NO: 266145 - DNA, 469 bp, Glycine max
  unsure (1)..(469): unsure at all n locations
tccctcagccaaatagaatccatctttgtttcttttcccacaactctcgtaaacgggagagaaatgttcatctaatgcatacaagtccctaatattatcaaatcctaaaatttgagctcctaaggagcaaaacaatgtatgtctcctagagagggcatcagctaccacatttgttnttccctttttcgtattgataacatatggaaattgctctaggtactctacccattttgcatgcctcttgtgtaacttgctntgccctctaatgtacttaagtgattgatgatcactatgaatgacaaattccttggaaacaaagtaatgttcccaagtttggagggctcttattaaggcataaatctctttatcataagtggngtagtcgaaggtggcactatgaagttttcactaaataagcatatggtgccaccttgtacataaagctcaactccactccaagcatacattt

SEQ ID NO: 266146 - DNA, 481 bp, Glycine max
  unsure (1)..(481): unsure at all n locations
tcacatatgtgaagttctagctagcacactagaattattatctttttttttaagctcctttacctctgcctggtagcggctggggtagagtacgcttatgtgacagggtagcagacattgataagctaatttatggtcttgggttgcagatgagtgatttcagcgataagctaatgataaagtttctgtggggatggaactgtgtttagatgttctaaaggtatttctagaataaaggttaacattcataagacctacaccttgccgacaagatgaaaatggttatggcgaggcacacttgctgaaagaattttaagtgtcatgaattggtggctctagctatctgctcggagccaactatgtaattggagttttgtgatgtactattattcatcacattagtaccattgtctgcaacgtttcagtttagagtggaggatgctgacagcatgtgntatgactatgtactatgcgtgatata

SEQ ID NO: 266147 - DNA, 483 bp, Glycine max
  unsure (1)..(483): unsure at all n locations
tgactaagttattatacttcatattatttattcccncttctaggggttttcaagtacttcatatgaattagttaagtatgtgatcaaggaatagctctatgtatggattccttgagccatagtccatatagaaattaaggaaatcacaacttgtaactgagggttatattaaaaaatggatgtataattcacagagatatgtctacctagaagccttcttgaatgcgtaagtaaaacttaacaaatatctttaaataatatacgcattataataatttaatgttctccgatgcaatggacattcgcaactggtggttatatgtcctaaagacaatgttgtcgcctagttctgttcctagcacaataagctcgacaattacttcaaaggaataattaacaggtcaatattaatgtgtaacacatctactttatcattaggattatacgtaaatgttttaatcgcacaatatacatgcatatttc

SEQ ID NO: 266148 - DNA, 503 bp, Glycine max
ggccttaaactaagcttaagtgtctcttgtaaacacaactgcagtacagtttttttcaactatccggtagtgatgacaatagaatcaatgccttcacctcatcctcaaatttaatctacactgattccaactgggcaagaatagtattaaattcattaatatgatcagttacagagataccttctcccatcttgaggttgaacaacctacgcatcaagtatactttgttggttgccaatggcttctcgtacatatctaataatgccttcattaagcctacagcagtcttctcgtttatgatgttgaacgcgacgttcttggctaatgtcaatctgatcacgctaagagcctaagagcctatctgatctagcaagtccattcttcttgcttcatgtcgtatggcttaacccctgataagggctgatacaacttcttctaatatagataatcctctatttgcatcttccagaagctgaaatctctggcatcgaacttctcgatct

SEQ ID NO: 266149 - DNA, 429 bp, Glycine max
  unsure (1)..(429): unsure at all n locations
gggagccatacaaacgaccataactttgtactcggatgttttattgaagctcgtaatatatcgagacgctcgaaattgaatgttgaagctctgagccaatataaacgacaatgaccttntactcggatgtttgattgagtcccgtaacatatcgagacactcgaaattgaatgttgaacctctgtgcatattcaaacgacaataacattttactcagatgtctgattgagtcccgtaacttatcgagacgctcgaaattgaacgttgaagctctgagccaatacaaacgacacataacttttactcggatgtctgattgaggctcgtaacatatcgagacgctcgaaattgaatgttgaacctctgagctaattcaaacgacaataacattctactcggatgtctgattgagtcccgtaacatctcgag

SEQ ID NO: 266150 - DNA, 318 bp, Glycine max
ctcagcttatatatatcgccacgctcgaacataaagatgaggagctctctatatattcaattcgccataattttccacacggatgtccgagtctggcgcattataagtcgacaggctcggacctgaacaacagaagctcttaccatattcaactggtataagctttcgcacggaagttccaagcatgccaatcacatatgcacacgcctcaaactgaacgacggaagcttctgaacaattgaaatggtcataacctttcactcgtaagtcaaatcaggcggatacctatagtacactctagacatacaacggaaactc

SEQ ID NO: 266151 - DNA, 244 bp, Glycine max
taggcttaaatttcaacatgataccaaatttacaatttataagagttatttggacgatcatagcacatgttaacaattcaagtgaacatacatatagtatctaccatgtttaaagtaataattcagataacaggtaaattttatatttactggaacattaacatctgtacatctaagttctacatttgattaataaataaatacatttgaggatgtaccctgggatgaaacatgttaaaaattc

SEQ ID NO: 266152 - DNA, 393 bp, Glycine max
aataaaagagggaaagaagtggaactctgaagtgtatatcataacacttccattcatcaaagtacaataagagtacacatgcgtctattgatagactagggagcttccttgagaagcggtctagagaaaacctccttgagaagctgccttgagaaaactcccttgagaagccagagcttagctacacaccataactaagctcacctgcttgagaagctcccttaagaagactcctaaagaagctaaagcttagctacacacacctctctaatagctaagtccacccgcttgagaagagaagctagagcttagctacacaccccttataagagctaagcccaccctcatgacgaaaaacatgacaatacaacacacaagctcctactacaaaga

SEQ ID NO: 266153 - DNA, 426 bp, Glycine max
  unsure (1)..(426): unsure at all n locations
cgatagaatatactgatccaaatatgatggatgtgtatctctattattgagtatttaacagtagttcgtccattttcacatattctttctcatccagattggtgtgcgtatcttgactctattaaccggggcaatttaagattgttcagctggaagcataatcaaaatatagtttttacatacctgatacaacgaatccatgccaccgtatattttctcatattatgatattattatccacaagaataacttgttccatctatttttagaaggaagaaattttgcattatgctgtactagcgtatctcatttctccttagttgatntggtatcatattagctagccatgttggcacacaatgtgaggatgagaccccatttacacctgtatgaacaccctggatatcctttacagatctgtgattc

SEQ ID NO: 266154 - DNA, 401 bp, Glycine max
  unsure (1)..(401): unsure at all n locations
atcaatgcttgtgatacttctgtataaatgccatattgaatgactgcatttctacctgctacaaccatattttctttgtgccataaatctgttatctgtgacagcaagcttcttgttaactaaaaggtttaattacattttttaccctaattttaattgattgtcactagcactacaaacagtntttggtcatcacagagaataatttttgctcaaattttagtttaatatctgtcttctgttgaaaaaggacgaanaatatgatgtttatgttatagcggactanactagagtcattttttataccacaagcaaataaagcaatccagtcaaatatcatatggagtaaccatgattaacacgtatacggtataccaactctctttgacttgcaacctttc

SEQ ID NO: 266155 - DNA, 444 bp, Glycine max
ttgtatggtagaaggtgtaggacacccctatgttggttagagcactgataaagcctcaccttaagaccggaagaggtacaacagaccaccgagaaagtcaagttaatccaggaaaggatgatgactgctcacagtagacagaaaagttatcatgataagaggaggaaagatctggaattcgaggttggtgatcatgtattcttgagagtcactccgtggactggtgttggtcgagcattgaaatcccaaaaactcacaccttgctttatcagtcatttccaaattcttaagagacttggccctgtggcatacaaatggcattacccccgtctctctctaatcttcataatgtttgtcatgtgtgtcaactctataagtatatccgtgatccatcccatgtgattgaattgatgatgtcaagtgacgagaattgactatgaacat

SEQ ID NO: 266156 - DNA, 495 bp, Glycine max
  unsure (1)..(495): unsure at all n locations
ggagttngactcgtccggttcatttatacatacatgatactcttttctcttatcaaatctcttactgaagaatctctaagtgtatatatttagtatttgtagacatttttatgctagaagatgaagtttaaatagaaacgtatttagcataagaatctttggacatgaaagttatgtaattaagattcttgatagaagtacaatttttggtttcctagcgtgtccttccacctaggacgcactaaaggacctctcttaatagtgtttgttctgcacaaccacacatatatcttggaatcaaacccaagatcacatgcttaaagagtttgcgccccttccacttggaccaactcatgtcgggagaactgcaatttattacagtatgaagacatactgataataataataataataatacatactagtattattatctatagtactactatgatctatctatactcctcttattataanaaaggtcattctctctct

SEQ ID NO: 266157 - DNA, 487 bp, Glycine max
  unsure (1)..(487): unsure at all n locations
agtagaattatggagtactcatcacatgagagactaggcggcggtcttgcgatggtgcacaacaagctntccacatccacaatgcgcgcataaacccaccatcccctgttgcccacctccatctgagctcacgtactcccacgtagcccatatcctcgtttctctcaacaccgggtccccatcaatcctctcaagcttccacaacatccaagcaaaacaacattcaaacagcacaagctatcacagccaagcaaaacagagcataggcagaaaactctgctcaacacatcaaccaaaatcacagctnttctcacttaaagaccccagtaacaattccttcgatccaattcgttaaccggtggatcgactccaaaattctactggaagtctatagtgtataagcctacattgtgaccgttgggatctactagcacacatccagaactcattctgcactatactntccacagtcaaccacacacaagca

SEQ ID NO: 266158 - DNA, 373 bp, Glycine max
  unsure (1)..(373): unsure at all n locations
taagctccantatttctgccactctctcaatttcttcgagagcaacgatatattgttcacctattccaacccaccacaccatgaaaggaagagattatttcagactgcttaagttcatcaacatcagcagcatatacattaggcatgacataatcatgtagcttacctttctggctatataatagctggtcatgaacactctgtaatacagcttagcttcaaacataatcaccatgtttcagctcttgagaacaaacaaaggctattctggaccatatggtgagataactagagtgttcttctcttgacccggcttgagaatcttaatggggatactagatcctcagaagtccatccatattaatatcctttc

SEQ ID NO: 266159 - DNA, 213 bp, Glycine max
acaccgacatggcggctgatagaacccacacgccaaacatcagcctgaaggagcatgaatcttttaaagagtattcctagcaacggagggacctagcatcccaagtatccacccccatgacagagagagaaatgataaccatgatagtagacacactgccagtgctctactatgaaaatatggtgggttatatgccctctagcttcgcacatt

SEQ ID NO: 266160 - DNA, 268 bp, Glycine max
atcatttcttagggattagaacatagtatgattaagtttttgacgcttactcaaaaagaagactgagataacatctgggtttccttacagatgatactactcgacattaacaggggctattctaattaccagcggtactatcgatagctaacatcggggtggaaaaaccgatgatgacatagaagtagtaacatcaggtctggaaaaaccgatgataacgaatcgatagtaacatcagatgaaagataatccatgatatctacttgat

SEQ ID NO: 266161 - DNA, 457 bp, Glycine max
  unsure (1)..(457): unsure at all n locations
ntctacgctgccagntaacaaggtatgagctctaccttagttttgtgctcttcttattaagnttttaatcagagcggtggcaatgtccgaaggttcttatcaaattattgggtcattttgtccacttggctaaccatataaaagtatcaataagaattgtaatgtggggtttcattttgttgtggtagttgattgtgctttacgtggctctcaagcttgacgagagttacatgccgagcaaagtttccatccttgcccgtgatggttttcacaacttgaacgtaaatttttattttattggtttgggtctgattgggatgattatgcttaattatttggtgttgactttgggaacatttttaagagattaagaccgcggaactcgagaagccaactgggtagggttatctatcctttgctggagcttatcctanagaagcacagagttctttctgta

SEQ ID NO: 266162 - DNA, 388 bp, Glycine max
acctatatatactcagcttatagaaaaaaagcgaataagcaagaatggaagaatttctatccactaagctcttgtccaccagcttggttgtgctcacactaacatgaccgtgctaacagcaattagttaaaggagttaatttgaccaattgagaaccaccatcataccacttttagcatgagctacaatctgcatcgtttcacttaccagtgaagcacgactatgctcattctcataatgactctgctttaacttggggagacttcatttatgagagacacaaatcatgctacttctcaccgtgtgtctacgaaaggagcatgaccacgctaaatctcagcacgattatactaaatctgaatctcgaattgtgccacacctctagcac

SEQ ID NO: 266163 - DNA, 477 bp, Glycine max
  unsure (1)..(477): unsure at all n locations
agtagggttaaagtctcacgagtgtcacgtgctcatgcaacatttgttagccctggctatacgagacatcttaccaaacaaagtcaggttagccataactcgcctgtgctttttcttccatgccatatgtagcaaagtcgttgatcctgtcaagtttgatgagctggaaaatgaggtcgcaattatattgtgccagttggagatgtattntccccctgctttctgtgatatcatgattcacttaattgtgcatctggtcagagaaatcaaatgttgtggtcctatttatttgcagtggatgtacctgtgtgagcgatacatgaagatcttaaaagagtatacaaagaatctatatcatctagaagcatctattgttgagaggtacattgtagaagaagtcattgaattctgttcagaatacattgagaaagctatacctataggccattctaagtctcagcatgatgacatagtggg

SEQ ID NO: 266164 - DNA, 484 bp, Glycine max
  unsure (1)..(484): unsure at all n locations
tactcaagcttaaggaacatcatganattccttctgcacgtttcctatgatcttttacgaaaccgatcaanaacttgttcaacattaaatgttcttcttgatcttggatacatttaaatgaactctttaatatctttggtttgtattttcttcttgattaatcgctatagtttatagcaccaagtccagcccacaatgtagatttcacaataatgtaaaaaaattaaaacttcaacctcccccttttctccccaactagtcctgcattccttcttgtagttatactgatagaacgctaattgataaaagtgataaaaaataatattgaacactgaaatcacacagattacagcaatacacttgctgtcccagagacaatagtctcatacagagagcattctagaaccacacattacaaataacttcacgttgcctaattacacaaccaacaatcagatttatactccttaatacataactacca

SEQ ID NO: 266165 - DNA, 369 bp, Glycine max
gcttatcaggaatctcgcgctaagcgcacgatcatcatcatactcgttaagcttataaggaagatgagggcgaagtcacgtgaatttacagctatcttacgctcatacaaagagcttgaagccggaagagaacaacccactaagcatcttgcataaaggaaagcatctttctataaccagtgtcctcttctcttcctttatccatccaatttcgtcttctatccacattaaaccctaaagtataaaagtctctcatgaatatgagaagctgaaacccactattggaagtctagcacgtcaatctcttgtaaaggaactcttccttactatctatctaatgcaattgcaatcattattgttcctctctct

SEQ ID NO: 266166 - DNA, 351 bp, Glycine max
acactccccctcgaaagagatagttacccgcggcttattcgctacgatcatctattatcaattatcgggtacccactcagtggaaacagatatcccttgtgctaaagaattgtctgaatcttcatcgtattggaaatgaaaaaatctattaatatcgatgccgagcactagctacaaggacctgaaacttttatcgcatgctagcgttccattacgaagcgatgaaccagagctaccttctggatggacccccctacatatatagtagaaatggccatgaagacttaaacggcatgccgggatgaacttatcatgaatgttcacatatcacttccgctgcccttacgtctt

SEQ ID NO: 266167 - DNA, 252 bp, Glycine max
agagggcatttaactagaatgcgcattaccgctcatgcggaagggatattgttcttcattatccatggtctcacattattgcggcttatggatgcaagagcctgaactactgccagtatacacatagtgaacacgaccaggagcacatattacaagcttactcctcactacggagggctcttgggaatgaacatgctgtgactgcttcccccgacacaaggacacttatacctgacccaactacagattgtg

SEQ ID NO: 266168 - DNA, 438 bp, Glycine max
  unsure (1)..(438): unsure at all n locations
cttgtgtgaaaggatgcgactcttaacatgagaatccgaatttcaacgctcanaggcactggtaatcgattaccaaaacattgtaatcgattacaactttctgaaaataattggaacgctcgaaattcaatttgaaaactttttcaaaacaattttgctactggtaattgattacaacaatctggtaatcgattaccagagagtaaaaactctctggtaaaaggttttgtcaaaaactcatgtgctattcaaagctntgaaaaacttcttaatacttatcttgattgagtcttctcttcattcttgaatcttgagtcttgaatcttgatcttgactcttgagattatgaaccttgaatcttgattcttgactctagtctttcttcttgagtctagaattcttcttgattcttatcttgaactctcgacttggtcttca

SEQ ID NO: 266169 - DNA, 466 bp, Glycine max
  unsure (1)..(466): unsure at all n locations
taagccttagtctttctggntcaagatgtcagatagctattttttacttttttttcttctgaaaatgttagattgttaattctttcggcatccatgtaattatgtgggtaattttgttactaatcctattatttatttgggattaagtaattgtataaacggacttccgcttttttaaaataattaataaatagacttcacttatgggattataagataggagaaaaatatttaaggttatgagttctgtgtaaagaacaatagtattttgtatgattgaaaaagttagaacttgatacaaaatttagggaacttanaagagatttttattaagctatatcttgctttagagggtgtacaataattttatattgatctcacaattagattcagcctttgcgtggagaatacttttgaacctcgaaaaatttgcgttcttgtcttaactttctgttctttttattct

SEQ ID NO: 266170 - DNA, 307 bp, Glycine max
attgcatatataaccactgcacacctcactaggcggcgtacactaatcctatgacttgcaaccatcgattatatgatgggaacattggctcatactcttggatattgcatataggctgccacaagcgaaggactgcttcaatggctactgctattttgtcatatgtgggacatcctctgagatctaatgatgagaacatgcatcaatagacaattaatgcacttgcacccctgaacgtgaggtgttgtgctcttttctaccagtgtacaatgccaacgtatattctctactgaggtcctctactaca

SEQ ID NO: 266171 - DNA, 488 bp, Glycine max
  unsure (1)..(488): unsure at all n locations
tgccgaccacaaagctntgtcttttccatagagctttagtctctgcctcctaaaccttgccacagaaaaagaaagaataaagaaaaaaaaaatctttgttccctgcctcacgcgggcattgctcataagtcatgggttcctgtacaataactattctttaatgaacatgtttttctttctcttangattattacgaataataaagaacaaatttagcaggttcaaattacagtactacccgtgttcattntgtgattgtaaaaaaattgaattcacatctgaattttgaaataaatatgattgattagtatttgtttttcagatcgattcactatttactttattagaaatattttaacaaattctgatgattgattgatnttttttcttcttttgagtaccatagtgaagaattagtcaagtgttctttggctagattctgtattccaaagacagcattgcttacatgactncgacaacaataataa

SEQ ID NO: 266172 - DNA, 225 bp, Glycine max
  unsure (1)..(225): unsure at all n locations
tannaaaacaagaaatgaattganagtctcggattcgaacacttacctgttgaagaacgaagaacggatgaagaacggtgaagaacagatgacaaccttcgcgaaatcactcacggaaacgttacggaagcgcctcggcttggattntcttcacggaaacaattttcctaagcatattcgaaagagagagaagtgcctaaggggctgaactcttttctacttcac

SEQ ID NO: 266173 - DNA, 344 bp, Glycine max
ttcattagtgaaactaagagcatccatctgcctaagagtactctcatgatgcggagggtgagccatgttctcagtataaaaattagtagtggaatgctcaaaatcagaatattcagaatcgtcttcaacagaatcctcaaaatgctcacaacgctcaaaatgcacaaagtgaccacgatgcacactatgcctaactaatctatgagatgttctatctatttcaggatcaaagggttgctaatcacctgcactgcccctactcatgcactatatgcactatataatgtgtttctcaacaagcacctaacaaggaggtaaaactacagctatactcaaacgatctc

SEQ ID NO: 266174 - DNA, 480 bp, Glycine max
tatggtacaatctgcgacttagccatgggagaagactgcacatatgtcattgcctccctcgcccaatactatgatcaaccgatgaggtgcttcacctttggggacttccagctatcacctatggtagaagaatttgaagagatcctgtgatgccctctacggggatggaaaccctacctcttctcaggggtctatccctcatagtccaaatctcggagcatgaattataccacaagaagcaagtcacaaatagggtggttggaataccgagaaaatatttggaggcaaaagcaagaatcttggcaggtaaaggcgagtgggccccgctcattgatattctcgcactgctgattttcggaggagtcctctttccgaatgtggatgggttggcggacctggcagtgatctgacacttttctcagctatcataaccaccacggaacgcccagttgtcgctatgctagccgacctatatgacac

SEQ ID NO: 266175 - DNA, 443 bp, Glycine max
  unsure (1)..(443): unsure at all n locations
ttacctctagttcatctggtaaggtgtcgaaacattacataaagggagaacggatngtaacctcaatatttgcaaatcccaatggtgaggatgtgacgaaatgcattctgaacctggtgttcaaatttcatagtgatctaatggttaacaagtctgggatcgtacttttactagaacaagttttgcgtatgaggaaaaatagagctacgtcctaaagacatttctctcaccatagacattatgtcacaaatcctaacggtgagaatttgcagaaaatgcttttcgcacttgatgttcaaatttcacgacgatccaacgactaacgagtccaggatcatagttctattgagatatgtctgggtgtacgcgagacacatagagctacgtgcgagagacacttttctaccagacacattattttgcatatcccaatggtaaggata

SEQ ID NO: 266176 - DNA, 408 bp, Glycine max
  unsure (1)..(408): unsure at all n locations
tagcccaataacactcctaacatcaatagtaatattaatattctaactcccctcncctacaccaaagttcacttatcatcacgcttgttacaaagtattataatgtcgcaatatctttaatgtatctcacattattgctatgatcatattgcaaggtgtgagagttgagcatcacaatgaaagcttggcattctaatgtagggtttattacgccttaaccttgagttctccaactacaatggcttgcttttgtggtgtacttctccccacagtcttaataatcggtattagagcttcttaccatgtctctatgctgcaaatgagcgctgcaagtggtggtgcttgcattgtactgtttgtctaggactacgtccaaatgctaactcacaaccaacctctatgagcgtg

SEQ ID NO: 266177 - DNA, 340 bp, Glycine max
tctctataccacaggtactcttaaagcgtagtagatacattatcttgcctatagtacctcgctcttcataagatatttcacgtactttatgataaataaattaacttataagtgattaactcttttttcttgttaagatcatcctcactaatttattttaaatttatttttacactcttattcaacttataaatcattcttcttattttaacattcttctacttatgatttaatttctagttatcatgaaacatagaattctaccttttgtaagtattctgtttaatgctgaactatttatcctaataaattaatacatagtttcttatttataacattc

SEQ ID NO: 266178 - DNA, 306 bp, Glycine max
  unsure (1)..(306): unsure at all n locations
cttanattataaagcaaggatatatgtgtcactgtatctttttcttcaactcttatattagaaagaatatgaacttttcaactcttgcttttattttttttatataaaatgataatgatttgttatgacgcataaatacaaagagctaacattgatttacgcagagttagattaagcacattttagtaatgctacaacagtacaactacagaccacatatcactattacgataagactcctatcctatccctatattaaataaggaaataagccttatatagcattacattaattactcttcaatg

SEQ ID NO: 266179 - DNA, 482 bp, Glycine max
  unsure (1)..(482): unsure at all n locations
cttgctcgngagctcccatcgagacagtggagcatgctcattctgaatcggctctgcgttgcacttgacatcaacactgagctccttcattcgcgtgttatctgccatggcttaatgaaagcaccaatgaaagggaaatactggaaattatagaatgtactcgtcttattctccgactgaaaatgagaagcaacctctaagagtatagtgtgtacaattagaaggaccgagttcaatagtctcacagagaaaaacataaagaaagagaaatgttcacacattaccaccgcgccctcactacacattctctcccctctaaataccactattagttgcgtacataatccacccacctagagttgggttttctctctctcacactctttctgttacccatagtggatatggtagaattgacacatattctcctctgctgagctgctcaattgagcattctttcttctagaagctttctttatctg

SEQ ID NO: 266180 - DNA, 447 bp, Glycine max
cagcttcttatccaaggctcatcttggtggtgaagctccttttttcatggcttattccctagaggatggcgcctcctctcacctcttctcctttgtcttctgctgcatctccatagtggaaaatcaccattaaaggacctcattgaagctcaaagatccagcctccatagaagctccacaagcaagcttccatcagagaggccctgacagactcctcaaagtctaggccttcggggtaaatacactcaatttgagtgctcctttaagtctatgtctatccacatggttggagcattctcacaaaatagagagacctcgattggtctccctataatttcacttaatgagagtgacctgacttacccattgtgaggccagtcttgtcatgtactcctaggtgtccaacgagatttttccactgacaatgataccacattgcatgtaggc

SEQ ID NO: 266181 - DNA, 454 bp, Glycine max
tatggacaatagaaagctgcttggctagaatcttctttcttatataaaagtcatcaatttgcaggtgttatgtgtggctgtgaaaaactggattgtgtgcgatagagaaagcactctgattatcacaaaagataacaggagtggtaaatggaacttgtaattctgtcaacaaggaatgaatccaagtcaattcagtggaagtctgagctatgttgcgatactcagcttctgtactagacctgcagtaaccttttgcttgcaagaccaccaaaatattaaatttggaccaagaaaaatagcagtccctgaggtagagcacctgtcatccacatctaatgcccagtcagcatcacagaatgctcgaatagcagagggctttgtaacagaagtgggttgaagaagcagaccattaaacaaggtgcccttacataccttaatattcttgtaccattgt

SEQ ID NO: 266182 - DNA, 142 bp, Glycine max
taagatgccactctagggggaggaaaccatactctctacacagggtacgatccctcattagctagaatttcacagatagtccgaatctcgcgcaggaattacaccacacgaagcaagttaaactggggtggacggaataccg

SEQ ID NO: 266183 - DNA, 422 bp, Glycine max
  unsure (1)..(422): unsure at all n locations
gctntgcatccatgttgcgaaatccgaattttataggcgcanaatgaccataatttgtctctgcgcgtttatcactcgacttgctgctcctgaatgacaaagggcggtaaatgacgataatttgtctctgcgcatttatcactcatcgagtcttacagatagcaaaagcatgtggatgaccataattttctcctcatgtcatcgggcccgccgcctctggatgacaaaggtaaaaaagtgcaggaccaaatggttccccgcatgtcatcgggcccgccgcctctggatgacaaaaggtgaaaaagtgcgggaccaaatggttctccgcatgtcatcnggcccgccgtctctggatgacaaaagtaaaaaaagtgcgggaacaaatggttccccgtatgtcatcgggcccgccgcctctggat

SEQ ID NO: 266184 - DNA, 440 bp, Glycine max
  unsure (1)..(440): unsure at all n locations
ctatnaacaccctaaataaggaagaagaaggaagtgatatttataatatntgacaactttctaaattgtgcatcaaagtctagtctacgtgtcacaatctgggacaatttgtcatgttgaataatctatgtggcattaaaattgccaacaatgcacctcactaacaacgttacttttaaacttaacgacaaggactattttgcanaacttatgcaaagataggaactatttttaaaatttcaaaaagatagggactaatttgcagaaggggtcaaaagtcaggaatcaaaatgcttattcactctatatgtatatggnagagtgtcatatcccacacttctgacctcaacatggatcgagcctgcctgatctacgaactcatcatgaaggtggacatgtatgtgggcagtatgatatcattgcagatacacagatcaccc

SEQ ID NO: 266185 - DNA, 460 bp, Glycine max
tcttagtttcagatgatgcagatgggtttgtagctacctctttcactcctctaatgactatggcatcatttctggcactaaactgctgggagttggaggccatcttctcaattaaatttctggcttcagcaggagtcatgtcttcaagggctccaccactggcagcatctatcatacttctctccatattactgagtccttcataaaaatattggagaagaagctgttctgaaatctgatggtgggggcaactggcacatagtttcttaaatctctcccagtactcatacaggctctctccactgagttgtctaatccctgagatatccttcctgatggctgtggtcctggaagcacggaaaaatttttctaagaatactctcttaaggtcatcccagctcgtgatggaccttggagcaaggtaatacagccaatcctttgccactccctctaatgaatg

SEQ ID NO: 266186 - DNA, 448 bp, Glycine max
tcaccggatgacgccgatcgaacatttcctaaccgacgttatgcaaatttcgttcagggattgaattgaaaactcgttaggcgacatctgtcgtgaagtagcgaccgatatttttcagccgacattgcacaattctttttagaatagctcgctggtcgataatggtctttttacggcagagtaagatttcttggtttggtgttgcataaaaaagttacaatgtacttcggctaggtttttcgtgcgagttcaaccgacattttgtttcggccaggaaaacattatcccacctctgcaaaaaaaaaatatttgctaaccgtcttcatgcatatttcattcaccgattgaatagacaactctatagccgacaacggtcgagatatactcccgactggtattttcacccggtatgcgcattttttataaaaaacgctcgctggcagatatg

SEQ ID NO: 266187 - DNA, 450 bp, Glycine max
  unsure (1)..(450): unsure at all n locations
tacccctatgacaaanaacatgataataccacaaaaagttcttactacaaagactactcaaaatgccccgaaatacaaggctaaaaccctatactactagaatggccaaaatacaaggcccaaacgaaggaaaaacctattctaatatttacaaagataagcgggctcatacttagcccatgggctcgcaatctaccctaaggctcatgagaaccctagggccttcccttggatctctagcccaatctacttggagtctgctacccaatgcccttgcgggataggattgcatcattccctccaccttggaaaggatttgacctcaaatcccgaggttcttcatactttgggctccttccctcaacacctataaaaagaacaaaaacatatgtattagtgatgtttggtatgttgaagtaaggtaaggtctgaaaacccatttcctgtgca

SEQ ID NO: 266188 - DNA, 381 bp, Glycine max
  unsure (1)..(381): unsure at all n locations
agcttgcctcanagaggtccaggatagacaaggcggccgatagaactanttccgccccggagtacgacagtcaccgctttatgagcgttgtacaccaccagtgtttccaagccatcaagggatggtcgtttctccgagagcgacgcgtccagctcagggaggacgagtatactgatttccaggaggaaatatggcgccggcggtgggcaccactggttactcccatggccaagtttgatccagaaatagtccttgagttttacgccaatgcttggccaacagaggagggcgtgcgtgacatgagatcctgtgttaggggtcagtggatcccgttcgatgccgacgctatcagccagcttctgggatatccgatggtgttgg

SEQ ID NO: 266189 - DNA, 474 bp, Glycine max
tcggaagaaagtgatgaggtacaagccctaaaggcagagcttgaataagcccgagtagtcgaagagaagttcaagtccatagccatcaaagtctgaaaagagtatgatgaactaagggacgtcaatatggccaccgctgaagccttggaacgagaaaccaagaaggcccgaatggaagaacacgtgccagcaaagttttgaggggctttatagggcagcaatagtaagctcaagctccgaagaggtgaaaggaatcatcacgggtcaaaggcatgatcttgaaggacgagctaaaggcttaccttatgtcgaaaagaaatttgtcccaacagttaagcgagactgaagggaatatgtgggccgtcatcgatgagtgcaaagagaagctaaatctatcggcgactcacgagcaaaggctagaggatgagtacgccaagatatcagcagaaagcgaagcaagggagagggtaattg

SEQ ID NO: 266190 - DNA, 428 bp, Glycine max
  unsure (1)..(428): unsure at all n locations
agcttgctctaaattacatagatgtttgtatttaaggtaggagtgnatgccatctttgtataagggtagcatttcttggttaaaactaactttccaaatgtttgcctttccaggaatggccccgaggaaacttgcctcaaataggtccaagaaggacaaggcgggcgaaggaactagtttccgctcggagtacgacagtcaccgctttatgagtgcttgacaccagcagcgcttcgaggccatcaagggatggttgttttccgggagcgacgcctccagcttagggatgacgagtatactgatttccaggaggaaatatggcaccggcggtggacatcactggttactcccatggtcaagttcgatccagaaatagtccttgagttttatgccaatgctttgccaacagaggagggcgtgcgtgacat

SEQ ID NO: 266191 - DNA, 474 bp, Glycine max
  unsure (1)..(474): unsure at all n locations
ctttntagtttttgaaaagagcttatcccttactttaaccaaaatgatgantttgttctttatatactctataattagtaaagttaatccctcacactaatatttcaactttcataaaaggatggatttcgattattataaaaaataaatcttatttttaaaataaggaaaattaaactaatcttatggggaataaactaaaagaactaaaatacactttaccctcttatatttgctgtatacttatacgcatcttatttacgagcaaagagcaatttataattatacgaaatagtatgactgatgtacgatttgtaggtacaaatttttaataattaaataaataataagatgttcaacaaaaataataaaatatctggcagagacattgttgtcggctcacaagtcgatcttactgtatccttccttttgaagaagtttgtactattttcatcactattcctctctttcctt

SEQ ID NO: 266192 - DNA, 403 bp, Glycine max
gatctccagtgactgcagcagcaacctggaggattgatggggacccgtgtttatatattctatgttatgggctacgcgggagtcctctaagctaaccttgaggtgcgcaacaggggatggtggctttatgcgctcatcgtggacgttgaaagacttgttgtgcaccatcgcccgtccgccacctattaccacatgtgatgggaaccccttaatcctaccaactcgagatgagaaacggacgaccggagaatacttctgcttttattgttgaccacagagtggatcctgtagatacgccccggcggtcacgagaccttggggactactggtggcgtgcttttgcccagaacaagcttgccaatctcgacctaccggtatatttggtagtgacaatctgcgatgc

SEQ ID NO: 266193 - DNA, 380 bp, Glycine max
  unsure (1)..(380): unsure at all n locations
tcccttcttgtgtcagaaactatcattctctgcttttaatctcctttattgctagggtttctctgtaatggctgactaaacaccctacttgtggatttctaatgaacaactaatgtaaatacctaatatctaattgattatgttttctgtgttcaatgcttccttcaatgctagatgtttgcatgcttttggtctgatcacccacttgtgtgcacagttaggtgactttagcattatgaaatgtactgtngccttataacttgattgaagtatgatcgaaacttaatcttacatgagggacctgctggttaagttatggttttaattatgttgttgcaataatgttgattagcttacgcctagtcttacatgacggatct

SEQ ID NO: 266194 - DNA, 419 bp, Glycine max
agcttaaggaagagaataagagggaaagcactttgatgcacattagaaccaacagaagagccgttgttgagaaaacgcccgagagaagagagacgagacaaataccggaaggaagacaagcagaataagaagattccgagagcagagggttgagtttacgacttgaaattggtcaggtaaattaagtttgaggacaaaaagagaaattacggattcagcatcgtgtagattggtttttgaaatggtgctacagatttgtgaaattacgggcaacattgatagataaaaatgctcggggatggaaattattgagatgagatttaagcgggcttcggcttccgcttctaaatcatgttacttgctattactacaaatgtataggtcagttaatagataattttttttttcgtgttgttatt

SEQ ID NO: 266195 - DNA, 363 bp, Glycine max
ctcgatggtggaaagcaatgaagaatgtgttcccaatgatttgacatctcgaaataacacaggttcttttgtttacggatttatagacctcttcagtggatgtggagaaacatggagctggagttttggaatggatgaaactgcactaaaaagttcttatctttctccatctaaggtagatgcctcacaaccactggagaagaaatctgtaagtcacgaaacaccattataatgcacgaacttgctgccaaattaaatactggcggacaagatagtgaacacaccaccatatgttaatctttccttttctaagaaaatctttggtggaggattttgtaggaaccaaatctgagggtgaaaaaa

SEQ ID NO: 266196 - DNA, 391 bp, Glycine max
  unsure (1)..(391): unsure at all n locations
agctatttctaacgacccgattcgtcgctatcttgttccacactataatattagataatgtgaatatttttatataacgaactcccttacatttcgcttatgacattataagtgattctgacacatcataaatatttcctacatcacgcaactacttaagtgaatatgcgtaattacatagaaacaacaatccggtacattctcatagcgacaataaaagattgtgcatatatataatgaaaatgtcagttttacatttatagctcaacaaaataaaacttaaaaaccagctacggtggagttgattaaatacacaactctttctcaaataacgcccaccgtattacggtggatcggtggctcctcacantaatcttactccctacaccgt

SEQ ID NO: 266197 - DNA, 432 bp, Glycine max
cttagaccaaagcaatttagaatctaagtatctaaaacccttcattttagtggattttcaaggtttgagacgtgaaaatgagaatggggtaaatctggagcaaactctcacctctaacaagtctatatcatcaatctaaacttgctcaaactggtttttatgacaaaaattctaccgaatcaaaatgtgactcctcaacacccaattttaccctagaaatggctcttgccttcactgtggtcatttgattttctctcttgcacaacccatgctttctcataagtcctaaatgaaatttcaactaagattaactccctttaaccttcaaaaaccactaagatcagatttggccttccaactctcaaagcatcactctatttccactcataacacatacattctcactttctaaccctatgttaactctaccct

SEQ ID NO: 266198 - DNA, 376 bp, Glycine max
  unsure (1)..(376): unsure at all n locations
ggatgtcaatgtaaatagtatcagacacagtgacactaatggcgtcngaggccatgcgcacactgttaccgacatgggtggtaacattgagatggagccttagggagtcatggacgccctggctctctgaacaaggttggggaatgtggcaaatctggagatggcgatgagaaaaaagtgtgtggaactaaagaagctccacctttacttgaggtggaggttggaagagagtgtaacgcaggttgaacgagaacaatctgtgatgggcttgatttccttgtagagctgtgctcccaatgttaacatcctctatatgatggctagtcgacaaaccgctgtcaaaaatacaaggaatgcattatgtgagattacatgc

SEQ ID NO: 266199 - DNA, 428 bp, Glycine max
agctagcaaaaagtgtcatttcatcaagattggactccacactaggtgctcctaaatcacatgaaggttggaacaatgggaaaaataaaaacaattatggatcaagttttgtaaattccgtaaataatcataacaggtcctcttctatacaatgccatagtgagtaatacacaacatgatttgaattctataaaaaataaagaggcttgcatcatctaatataacaaaaagtgatgaagagaagacataaagtgttgtgttttaagtgtggagaaaagattaatcctttgcatcaatgtgtatacaaacaatttaaattggttattttgagatatgatgaaaccctaaataaagatgaataagtaattatactactaaagtggataaaatactgaggaagagccaaatttctgcattcagcgcgcctt

SEQ ID NO: 266200 - DNA, 483 bp, Glycine max
  unsure (1)..(483): unsure at all n locations
acctataaaactcagcttctcaggaagttntctcaagaaagcttctcaagaaagctacctagtctataaatagaagcatgtgtaacacttgttgtaactttgatgaatgagagtcttgtgagacacaactcaaagttcaacttctctccctttttcttccttcaatttcgtcctcccccctctctctttctctccttgtttcttttcctccattgaagcatcctctccaagcttcttatccaaggctcatcttggtggtgaagctccttcttccatggcttattccttaatggatggcgcctcctctcacctcttttcctttgtcttccgctgcatctccatggtggaaaatcatcattaaaggaccccattgaagctcacagatttagcctccatagaagtcccacaagcatgcttccatcaataagcctatagaattcaccccaattccagtgttctatgctaactcgctcccatatctac

SEQ ID NO: 266201 - DNA, 386 bp, Glycine max
  unsure (1)..(386): unsure at all n locations
agctatgagcaaattcacatgatcataaccttttacttgnaagtctgatcgagtctcgtaatatattgagaggctcgaacttgaatgcccaagctcaaagcaaattcaaacgacattaactttttactcggatgtccgaatgagccccgtaagatatcaaaacgctcaaattggatgttgaagctttgagcaaattcaaacaacaatcacttttttactcggatgtctgactgattcccgtaatatgtcaagacgctcgaaattgaagaccgaagctttgagcaaattccaacgacaataactttttactcagatgtctgactgagtcccatatatatcatgacgctcataattgattatctaagctctaagcatattcaaacgac

SEQ ID NO: 266202 - DNA, 332 bp, Glycine max
  unsure (1)..(332): unsure at all n locations
gtggcaacccaaggttacccccaacagcaaacaagtcagccaccatttggtctcccaaaaaagttgatgcctatgttgccaattgggcccttatacaacttgaactaaacctaactaaagcccttttagttgataaagccaaaacatatttttggaggnncaaccttacaaggattgggccattatttagacaaactaaacactctaaaattgaaacaaagtggtgtcatttagtcctcctccatttgggccatgatacaactgacaaccttggacttttctccttgaaacttgcgcttgtattcaaatagtatggacaacacttgttgaaa

SEQ ID NO: 266203 - DNA, 310 bp, Glycine max
gtataagtccagtgtatatactagtttacaacgctcagacaattcatttagaaaaatcaatctttacttaccaacgattttcaccacatcccgaggcacagatgaagtgtgtgatcacgttggtagaactacaacaagtactgatacactctacaaggcgacaatttatacataacaataagcatgcgtgggtctggattctgtgaaatcctcatacatttcagtgtgagaacatggtaatgaacaaaaccctgttctctaaatgatgagctttttatttacagtaatacaatattcatctgccttccct

SEQ ID NO: 266204 - DNA, 461 bp, Glycine max
  unsure (1)..(461): unsure at all n locations
acactatnaatactaagcttacacaatttatttctctcaaactggaacacctcaacatattttgttgnggagaggaaaaatagatctcttgaagaagaagctaaaactcttctaaatgaaacaaagctaccaaagtacttttaagttgatgttgtgagtactatatgctatactttcaactcttataagacatattttagagaaaactccttatgagctttacgaaggacgaaaacaaaatatttctcatttaacggtatttggatgtatagatgctttgttttaaacaatagaaaggaatctctttttaactagatgattgagatgatgcatgtttacatgcgtagccctacgatgccatagccaaaaatcatcaatcttgcttaccaaactactaagttcatgaaatgatgcatgttcactgttaagcatgtagatattacctatttttatacttatat

SEQ ID NO: 266205 - DNA, 460 bp, Glycine max
tgaaggtgtgtaacccaccatgttccataatagaacactagtaatatgcctactatcattgttattatttctttctttgtcattaagggaaacacttgggctgccagatccctccacctttgggcgtattctttaaaagatccgtgccccctttttgcacatgttctgtagttgcatcctatccgaagacattatattgacactgcctaacgaaggcaaccattaggtccttccaagaatggactcgggaaaggttccaagttagtgtaccaggtaacagctaccccagtaagactttcttggaagtaatttatcagcaattcctcatcttttgcgtatgcccctatcttccgacaatacatctttagatggtcctttgggcaagtagtccccttgtacttgtcaaacgtcagcaccttgaacttgggagggggtgatgatattgcgtactacgaacaac

SEQ ID NO: 266206 - DNA, 438 bp, Glycine max
  unsure (1)..(438): unsure at all n locations
agcttgcctcaaagaggtccaggaaggacaatgcggcctaaggaactanttccgccccggagtacgacagtcaccgctttatgagcgttgtacaccagcagcgcttcgaagccatcaagggatggtcgtttctccgggagcgacgcgtccagcttagggacgacgagtatactgatttccaggaggaaatatggcgccggcggtgggcaccactggttactcccatggccaagtttgatccacaaatagtccttgagttttatgccaatgcttggccaacagaggagggcgtgcgtgacatgagatcctgtgttaggggtcagtggatcccgttcgatgccgacgctatcagccagctcctgtgatatccgatggtattggaagagggccaagaatgcgagtatggccagaggaagaaccggtctgatgggttcgatg

SEQ ID NO: 266207 - DNA, 485 bp, Glycine max
  unsure (1)..(485): unsure at all n locations
gaccttagatactcagcttcaaatcaaaactaaccagtcgaaggacgatgaacgatgattaacggacgaagaatggcaaagaacattcacggttntggttacggaagcattatggaagcaccttggccctgattttcttcttctttctccttcttttcactaattttaagtgaaatatgcttccccagggtgttgaaccccttctttcagcctcccacacccttttatagccaaaataggggaggagcttgccgcccagctcgcccaggcaagctggtggcttaagcctgaagtaacatactcgcccaggcgagctggttgcttcatgtataagcttcctgatgggcctagctgggcccagggctgaagaacaccccctaaattgattagctcacccccattttgagttttggcttttttccttccgaaacgtcgcgaaatcttacggatcgcgttggcattagctctaagcaactcaacgtgac

SEQ ID NO: 266208 - DNA, 447 bp, Glycine max
  unsure (1)..(447): unsure at all n locations
gcttcaagaattatggccttatctaacttcttgttttttcgaggaaattctataaatagacctcctatctttaatggagtgggttaccactactggaaaacccgcatgcaaatctttatagaggcaatagatttaaatatttgggaagccataaaacaaggaccttatgtttccctctataatagccggaagtgcacaatagaaaaacctanagcaaactggactgaggaagaaagaaaattattacaatataatttaaaggccaaaaatattattacatctaccctaggaatagatgaatactctagggtttcaaaatgtaaaagtgctaaggatatgtgggatacactacaagtaacacatgaaggcacaacagatgttaaaagatctaggataaacactttaactcgtgaatatgaactctttaggatgaatatacatgaaagt

SEQ ID NO: 266209 - DNA, 446 bp, Glycine max
  unsure (1)..(446): unsure at all n locations
aactaattataataataataatatctttattntatcaaatcttatcttatccagattgtattctatctagattntattttatcccgattttattccatctagattttatttcgtctagattttatttcatccaatcttatcttatcttggccagattttattttatttcgtttatgggcttggacttaaaatagatttgtaagctttggggctgaagacctatataatagcaccaaggttttagtttagagagttttttttttcggaaaggagaataattctaggattttagaattctagtttttattactgttcatgcacactgttcacgtagaataaaattcgttttctacaatttcgtttcggcttcaatctacaatttcgtttctactgattaatggaaggctaagtctccagcattgttttctcttgaagatcaaacacaa

SEQ ID NO: 266210 - DNA, 446 bp, Glycine max
  unsure (1)..(446): unsure at all n locations
agcttgaagtngactaatttatctattagagctattattttgtttttgatcngacctaatatgaaagttatctatttgactggttatataaaataccaatatgcatgttaacaaacccataagccgaaataggctaaccggcctaaataatccataagggcttatttactaactcatttaatattttgtaaagttacatagataataataaagacttaattataaaaatagtcttcttatttttttccaacttactaaattagtctcattatattttaattcactattagagtctttttccaaattgattattcgtgtcctcagaacaaaatttagacgttgacgattaagaggaaacagtgaccaccatgtgtcattatctaattggttggtagaatgatgaatgaaaattaatgatcaatagaagtcaaagttcttttgttaac

SEQ ID NO: 266211 - DNA, 451 bp, Glycine max
  unsure (1)..(451): unsure at all n locations
gtgagacctgtcctncaggaattctgtagtcaacatatgtaacaaagttggtttacgtatccaacaattattataaaaaatgaacactgacaaatgagagtgacttacaatcctatatgcaatttcctttgctgcctcagacatcatttgaccatattttttttgtgcaggccatctttcacttcacgtgtcgtccaatgggagatggaggatcaataattgtcttagtgctcccggatttggctgtttcctccaatcgtttctttttcttgtcctccatcaaatnttcttcgagatattcataacccccaagagacaacacgcgaggagcagtgtattgtttttgaatggcctgcgccttcttttgaacctccttgaacaatacacattagcttatcttgatatctttgacaagaatcagaagtatacagtgtaaaacaatataaattat

SEQ ID NO: 266212 - DNA, 484 bp, Glycine max
ctataaaactcacgcttccacatccaagtatacaacagacagacagcatttattatcacagccacacgaaacagggcatgggtagataactctgccgaaacaccaaccaaaatcacagcttttctcactaaaagaccccagtaacaattcctttgaaccaatacgttaacccgtggagcgactccaaaaatttactggaagtcaatccgtacttaagcctacatagtgaccgttgggatctactagcacacatccagaactcattctgtactactcttaccacaggccaccacacacaagcatatatctgcacaaagcccaaattctgctgcacccatttgacagcaaaatgttgcataagtgcagattcagaaaatcacacttcctctcatccgatcttgcccaaatcaatcctacaagtcccaaatcatgtaacaatcatgtctaaaccaaagtcaagctttaacgcacaacaacacagaac

SEQ ID NO: 266213 - DNA, 430 bp, Glycine max
  unsure (1)..(430): unsure at all n locations
agctagcacatgcagacacacaccacccttatctatgccagtgagaatcagnatataaaagttggacagctgaagattaagaagcatcctggtgtacgcaatgggagtaacattattgaatactccagactgattacccataaccaacgagcctgaagctccagcttgatcagctgaaggtcaacagtaagaaaaaactcctccaaaagtagcattggtctgagagatcattgagagctcacttcttcccaaccccataagccctgaggctcctccaaagagacctttggaggtccttccacaaccaaacacaaaatgactcagctgaaggcctcgcaaacccagcttctcaatccccagctgcgcactaggatatgatccatcaccatagataaccacatagtcacaagtcgcagatgttgatggaaca

SEQ ID NO: 266214 - DNA, 459 bp, Glycine max
  unsure (1)..(459): unsure at all n locations
tgttacaccttgtcctttaataaagaagacattgcgctattttgtgttatagtatcatacttatatatgacgtataaaaacactcttagatccaaactcacataagtattaacttaaataatgtcagagactaaattgatggatatttaatttcaatgattacttaaacaaatttattaacttaagaattattcaatagagcgtaattgtttgaagagcaaattagtagtttaatctaaaatgagattaatccactaactcacgaaccaacctattcagtcgcgttagacttatagaaaaaataaatcatggctaatattctcttgtagagacaatgtggcagtccaagtgccttataaggctcaactcacttagtttttctttataaaaaaatgggggagtacctatttanccccttttattgtcactaatacaacgtgggacacgacgggacggtga

SEQ ID NO: 266215 - DNA, 437 bp, Glycine max
  unsure (1)..(437): unsure at all n locations
agctntaatgtgttctcccttgtataactttttactgcaataacagnngcagcccaactatccggtaatgatgacaatagaatcaatgccttcacctcatcctcaaatttaatctgcactgactccaactgggcaagaatagtattaaattcattaatgtgatcagttacagagttaccttctcccatcttgaggttgaacagctggcgcatcaagtatactttgttggctacagatggcttctcgtacatatctgataacgccttcattaagcctgcagtagtcttttcgtaacaatgttgaacgcgacgttcttggctaatgtcaatctgatcatgccaagagcctgtcgatctaacaacttccattcttcttgcctcatgtcgtctggcttatcccctgataagggttgatacaacttcttttgaatagataat

SEQ ID NO: 266216 - DNA, 465 bp, Glycine max
  unsure (1)..(465): unsure at all n locations
ntacttatctcctaaccgaactctagactatgtaaggtttcttttcctccggaggttaagacaaaaaaaatggattgaatgaagtagatgatactccctagtccattataattgtcttgtaagaaaaaaaaaattagtcccaaaataattattattttagttttttaatataacattaattatatttttttcacttatatctcttataaaattaatggtgaacaacaaaatctatacataaattaatgataatataaggatagttttgtaaaattaagagtctctttagtttatttattattttttcttcatcagtgtattttgggacagaggagatatcttggaaagtgtgattctagaaacgaagtaaccatgacacaataaatggattgaagagttacatgttatgtcactatcatatttaagctacaagttgtgtccgaataccagaaatctataaatcac

SEQ ID NO: 266217 - DNA, 415 bp, Glycine max
gacctcagagtcgacctgcggcagcaagcttctttccttatgggaatggtgttctatattaatttgttgtccacagaatacttacacatagcttccatgtgtattaatggccctttttttttcttaaagacatagataggtggataaggaactttatatggagcggagctgttgaaattaagaaaaatgtgatcgcttcttggcatattgtttctaagccttttgaggaaaggggtcttgggctattatccgtttatgctattaatagggcaaccatgttaatgttaggatgggacatgctctcctccaatattccttggggtaacttgctacagggaagagttaataagaacaatcaggttatgaattctcttctttatggattggtgtcaaatctccattggcacgggaatgg

SEQ ID NO: 266218 - DNA, 458 bp, Glycine max
  unsure (1)..(458): unsure at all n locations
ntagcgaacattcaactntagttgagataaagttttttttgcgtgaatttatactatgtacataattcaattatgcttcttcctaagataattaatcttgagtgaaatctcatttagttattcgtgtgattgattttttgtgaccaacatctattgattgttgatatttaattgagaacaatttggactatgtagaatttatactgtgaacttgcattgtgtaaattcgcgttgtacatagttactctatgtaagactaacaatgtgtaaggttagatttaatgactcttccctagataattatcacaaggatcaaggtcaattacctagaggattgccatttacgaataaagtgatattttcatatctgccctaattctactttatcctttctaagcacaagactcacaagtcattgtagccatatatgaaatttcttggatagctatgtttgggcc

SEQ ID NO: 266219 - DNA, 416 bp, Glycine max
  unsure (1)..(416): unsure at all n locations
agcttgttcctatgnttttataacacatatatttaagcaacattgcaagaatttttaacttcacatttagacaatgcccacatacttctcatctcttggaatggttaattttggttaatctcatgtataatttactcaaatcttgtttgatggtaagggtgtattttgaattttcatttacacaacacaatacatattggtgatgtaggacattgtgaatatttagttcaaagagacgctctaccattcatggtcataggagaatggtttagagcatatatttggctatggatgctcaagagtttgaaggctattattagaatttggacttacggcctaatcaatcccatacaatcatcttgaactctgaaggtgaggactgccaagcttaatgaggacatttattatttattcaa

SEQ ID NO: 266220 - DNA, 403 bp, Glycine max
  unsure (1)..(403): unsure at all n locations
tatcaacttctgccagtggatacaaatatgtatttaccatatttataaaatatcaccaggcagagcactagcctaatctgtttttcgcagatacaaacaacttaattcaaagaacaagcatctataattggactcgaaccatccaattacatacatttaaaggattnttaacaagattcatttcttaccagcatggctatttcaccgtctatcatccacaagtctgcttccttttctggatgcggatttctagaaaggtcataagaaagagacagttttcttatatcatcaagaagcaaccttagttccctctctttcttttcaggatgatttttcaagtccacctcttcacaccatcaggtccacctcatctgcttttttcgacattcatcatttcatgaaa

SEQ ID NO: 266221 - DNA, 322 bp, Glycine max
  unsure (1)..(322): unsure at all n locations
aggcttatggtgaatcatttgtgattcaattgtgtcttgatgataacactgatgatgacgaaggtgatgaccaaaagctcaaagatcaatctagaacaattccagagttctagataagaatcttgaagaattccggactcacgaagagagtctagagaccagaatcatgattcaagattcaagactcacgattcaagaatgaagagaagactcactccagataagtattaaaaagttttttcaaaactttgaatagcacatgaggttgcgacaaaaccttttaccaaagaggtnttactctctggtaatcgagtaccatatt

SEQ ID NO: 266222 - DNA, 459 bp, Glycine max
  unsure (1)..(459): unsure at all n locations
ttatgtngcatanatctcatttagtactatgcatgttttagaaacagatcctgcatggtaatggtgcacagttaattggtgcctgactacttgaaaggggtattctatgaacaggaaacatgacaatccctgtgtatgactttagggatttagccccccttaatggaatatggttttagggtgtattttttattttggccttacactttttacactctattttaattcaaaaatttcctttaaaccaaatacacacttattatttctattatatttctattttcttcctctaaaccaaatacacacttattatttcctttctcccttcttggaccgcaagtgagaccccttaagcaccactctagtagtgaacttctcctatgcgcctagcaaggtacaatagcacaaaaaaatattggatacatgattagttttgatttggtctgttggcggcagttg

SEQ ID NO: 266223 - DNA, 409 bp, Glycine max
ttcttctcatcaatgaatggcaacttgtcaacaccctgaaagatttccaacagtaaccttaatcccccttcattataaagtgttaataaaacattaaaacacacacacaaaccacaatacaaaaactatattacctgccatgcaaatcgttttccattcatatcaatctcaaaatctgtcaaaaagtgatacaagtaattctagacactctataagatatagcaaaatatgtcaataacagacaagtgatctcaccagcagggtagaattgaagaataggtgatgaaggatcaatcatcaaatccctatatttttcaggaagtgcacttgaactgtaacaagaacttaaccagcatcagcacaggatgcatgatataatagatctgaggacaggagagatgaaaaaacc

SEQ ID NO: 266224 - DNA, 447 bp, Glycine max
taaaagacatgcgcagatttcttctctccacggtctatccttcactatattttaaagtgcaaaaactatataaatttaattggtttttaaaaaatacaaatgaagcagcaacttcacagcacaattgaggatagcatgaaagcaacctattatgaaagacaagtcgtttctttaaattgacactgcacgatcaatctatgataactattgagataaatatatccaaagagtgcatagagacatatatatgagcgatgagttgtgtgctttatgctcattagggctttgcataaaagaagatcgcagttatttgtaaaaacaagcagagtatacgaaaattgacaaaaatgggctctgatgagatgcatgaagggattgataaaagtaaaacatgttattgccctacggaacggagaaaatggatagagaggaagacagtacggaatc

SEQ ID NO: 266225 - DNA, 372 bp, Glycine max
cagcttctaactaccgggagaatgagtctcacaacaaggaatactatatcgagaagtaatgccggtgaaatcagttttgaagagattttcattttttttaaactggaaacagatacagtcctttacattgtactagaaaagacaaagaaaatggcattatgagaattggaaataaatataataaaaaaaaacggcttatgtatttcatacacactttcaatttatattagaattgaaattggaactatacaatcattatattatggaggcagaatactacacgtaatggattaaaaaggtaggtgggacaactgcccccactctcttaaaggtggatccgtcccttatttcatgttcaagtggctcgggaga

SEQ ID NO: 266226 - DNA, 443 bp, Glycine max
  unsure (1)..(443): unsure at all n locations
ataattttcctaaattgagttatatatttccccctttatgcnagccctgccctcaaaacggtccccgggcccttatttcttaagctttgtgtgtctgcggtactctgtaaatatatatntgaatgttgtattcaagcctanaagggttacaagggtttcattctatgtaatttnttcccccatgcaacaagactaagagatgattaatcttatgctaaatttaaatctattgcgaccaatgttttatgctcctaagactaaaatccggattcgggtcttgttagtttgtttaaaagatttgataagtgtttgtttttgtgagttcattccatatagtccgtgtttgcgcattgtggcanaaaacttcatattagagatggcaagtgatgtatccccttgcccttcccctagatatgcttgactttcacgctgtccgaagatgt

SEQ ID NO: 266227 - DNA, 465 bp, Glycine max
  unsure (1)..(465): unsure at all n locations
agtcacctgcggcatgcaagcttctgcatgtctaaggttttctagagatataaagatttatgttccagagagtttgagagattttgtggtgtgaagacctgtaaagaatcgagctttaagaggaagtcgtcctgagaacttgagatgagtctgtgagtgattgtgaggttctagaggtggaggtgacatccccaccacttgtatttcttcaatccttcattnttctcttctctttgttngaaaggaagctctccagttatggagagctaaatcctctgttggttcttccttgtaggtacttgatgtaaatacctgtatatctatttaatgatgttttgcgtgttcactgtactatcaaaacttcattctaccatgcttttgccttgatcatgtagattcatgtgtttttaggatcattcaacagtggaaactgatttgattcttataacttgatatgacggggcc

SEQ ID NO: 266228 - DNA, 454 bp, Glycine max
cattctctccctttctcaagcagatacttaatatttcttgacatcatcaaaatcttcatgagtgacattctccaccctattgatgaagacaaccacctgtagggtaggagcaacaacacaaaaaacatacctatctgcatatagatcactcccctttggctgtgcaatgatttattatatgagacaggtgaagatttcatatttttcatatgtaaacaaattgtctcataaacaagatttcatatttttcatatgtaaacaaattgtctcataaacaatagataatttttcttactattctatcttttatctttctctccccctttgtcaacatcaaaaacaaatcatgaatagagaggagaaagatgttaccacttgctgcaatgtatgagaatcaagtgataccaaaagacaatataacaatcattcagtattactcatgcaaaaacaagta

SEQ ID NO: 266229 - DNA, 420 bp, Glycine max
tgctggcttcgcgcgggctttcacgctaatcgcaccttgggcttcttcggggccctttttgcactaaacctgaggtcgttgctaagcgcggtgcgtgctaaacctggattgcgcgctaagctatttgtccaattcttccaacttttcttcaaggctatctcttccaagtgttgcatcaattctcctttaaagcacttgaaatattctactttggacttctactcataaaaaattgcaaaaatgaagaatatgtaatcattattagccaaagatgacaatcaaattaactcagatttcacaattatcattgtggaacatgtaagttagtttggtgctgaacttacctcagcttatcaacaagctgctttcaggattcttcaatacatcaaaggttctcgaggtgcacggatctttctttct

SEQ ID NO: 266230 - DNA, 369 bp, Glycine max
tactaagcttctaaggaggtgagcttacttatgagaggtgtgtgtgtatttaagctctagcttctcaaggaagttctctcaaagaagcttctcaaggaagttctctcaagaaagcttctcaaggaagctacctagtctataaatagaagcatgtgtaacacttgttgtaactttgatgaatgagagtcttgcgagacatactctaaagatccacttctttccctcttttattccttaaatttcgtgctccccccctctctctttctctccctactttttttacttcattgaagcatcctttctagctatctatgcaacgctcatcttggtggtgaagctcctctctccatggctgattccctagtggat

SEQ ID NO: 266231 - DNA, 444 bp, Glycine max
agctataaaaaagatattcctctaaatactattttaactgaaatacatttatattgtataaagtatacaatgaaatcatatttccaatatgtttctatttttttattttttacaaagaagttgtaactaattgtagataaagttgatttttttaaactaaacaagttaatggtgatataaatttattttttaaaattaaaattaaaataaacctttattaatagtaatcataatcataattcagttacaattaaaaagagtaacctgtgttgtcattaaatttatatcataataaattcaattattattaaaaatgtaagctatatcataattaaataattaaagaaaaaacatataattgagtagtaattctgttatgtatctggtttagatacacaaacacaatattatttcattgtgtatctacactctaatacatgatga

SEQ ID NO: 266232 - DNA, 465 bp, Glycine max
  unsure (1)..(465): unsure at all n locations
tccaagaaggggaacgtcattcctctcttccgctgcatatttttcgatcacctcactccggtgcttgcgtaccggtgcctggttaaggaggacgagagagatgctccgagttttctctttgaatcggtcgagccaggccaaatttctagcatcgtgagaacgctttctatttttggttttgtttgagaatgtgttggtttgtgtactgatttatgcgttgactgtaatcagggacggtacagtgtggttggagcacagccgtgtatggaaattgtggcgaaagagaacgtggttactattatggaccacgtggaagggcgcaggagtgaggaaattgtagaggatcctctggtgattcctcgtacgatcttggagaagtggacgcctcaactcttagatgaactttctgaagcgttttgtggcatgtgacactgactcctaatnctaattctcgcttctttatca

SEQ ID NO: 266233 - DNA, 364 bp, Glycine max
acaataacatgattataaaaaaataactatatcaacttacatagaaaaaacatagaaaattataactacttagacctaaatatataaatattataatggatttatcatttcaacaaacacaacaaatgaaaggattgttctcaaactgtctatattttcattatccacatatgaaattgtttttatatgtctactaatcaactgcaataattacaatgtagttgcttagacagaaattcccactagctgtcatttacaggttaaagcgcaaaaaacattgatattatataattacaatgtgtatcagaatagaattcagttatcatgccccgaatgtgcaattatctatacattattaagcaat

SEQ ID NO: 266234 - DNA, 467 bp, Glycine max
  unsure (1)..(467): unsure at all n locations
acggacctataatctcagcttctcagatgcaatggaccctgaagctgctaaagaatatgtcatgaaacaagagcgtcacagggctgaggtatatcatcatccctgagaaataagagatcaagacaattttcttaacatatgctgcntactgatatatcttgtatcttcatgattaaaatggaaaaattatttctattaatccttctctcacttcccaacttgctacaggaacgcatgacgctgaaacacaaaaaccataatccgtgggctgcacgtattatccagcgtggtttacataaccaagatgaaggaactcgtgctgccatacatgaacaacttcaaaggcatgctgaattgactagaataatgaagtctatgaatggtagcagcagtagcagtgaagatagcagtgatgaggatgaggatgacaactctgctggttctgatcatgatagggattacaagat

SEQ ID NO: 266235 - DNA, 435 bp, Glycine max
  unsure (1)..(435): unsure at all n locations
agcttccattgttcaatttcgagcgtctcttatcttatgcgcctgaatctgacctccgtgtgaaaagttatgaccatttgaatntctcgagagcttccgttgttcaattntgagtgtcttgatatattatacgcctgaatcggacctccgagtgaaacattatgaccatttaaatttttcgagagcttccgttgttcaatttcgagcgtctctatatgtgatgcgcctaaatctgacctccgtgagaaaagttatgaccatttgaatttctcgagagcttccgttgttcaatttcgagcgtctcgatatcttatgcgcctgaatcagaccttcgagtgaaaagttatgaccatttgaatatctcaagaacttccattgctcaatttcgagcgtctcgatatattatgcgcctgaatccgacctccgtgtgaaaag

SEQ ID NO: 266236 - DNA, 436 bp, Glycine max
tataagcaattcaaatggtcataactgttcactcggatgtcttattaaggcgcataatatatcgagacgtgcgaaattgaacaatggaaactcttgagcaattcaaatgatcataacttttcacaaggatgtccgattcaagcacataatatatcgagacgctcgaaattgaaccacggaagctctcgagaaattccaatggtcctaacttttaactcggatgtccgattcaggcgcataatatatcgagacgctcgaaattgaacaatggaagctcttgagcaattcaagtggtcataacttttcactcggatgtccgattcacgcgcataatatatcgagacgttcgaaattgaacaatggaagctcttgagaaattcaaatgatcataactgttaactaggatgtccgattcatgcgcataatatatcgagac

SEQ ID NO: 266237 - DNA, 437 bp, Glycine max
  unsure (1)..(437): unsure at all n locations
agcttccagagcttatttgatgatgccatatacttangtcaagaatcaagattcaagcgagttttaagaatcaaagatacattcaaacaatattaaagaaatcaataggattcaggtgaagattcaagagaagactcaagatatgcaagaacctcaagaaaagcatcaagataagtataaaaagaatttttcaaagaaaagattgaatagcacaatttgtccgatagaattgttcaaagaaaaatcttttaccaaagtttttactctctggtaattgattaccagaagcccagaacagttttataactggtttacaaagtagtaatcgattaccaatgttttcgaacgttgaaattcaaatttcaagagtcacaacttgtgatagaatattttcaaacttgtgtaatcgattacacaacattggtaatcgattacca

SEQ ID NO: 266238 - DNA, 447 bp, Glycine max
  unsure (1)..(447): unsure at all n locations
taacaaggcatttttatagttggagcttgagctttttatctaataaggctttntaaaaagcttgagctgggcctttatagtaaacaagccaagtcgagtcaagccttacataagccgagccaaaggccctcgacaagctgctcggctcatttccacccctatatggcaccataatatcanatcatganaaaaaaatgatgaaaaataanaactatccacacatatagatacaaattataacatgtctaagtataatcataaaatctaatagaatgtcaaaaaatacctaaattagcatattagagataaaagtaatttagttagttactagacgttattggataagttagttgttactcaagtatagttattagaagtaattgagaaattagtgtcagtactcagttagtatttttatctttgataatacatcaacttatatacttg

SEQ ID NO: 266239 - DNA, 404 bp, Glycine max
  unsure (1)..(404): unsure at all n locations
agcttctatccttcatgggattggtgttgctaattaagttcgttgtccacagtatacttacacatagtttccatgtgtattaatggcccttttcttttcttaaagacatagataggcggataaggaantttatatggagcggagctgttgaaattaaaaaaaatgtgattgtttcttggcatattgtttctaagccttttgaggaaggtggccttgggctatagtccgtttatgctattaatagggcaaccatgttaaagttaggatgggacatgctctcctccaattttccttgaggtaactngctacacggaagagttaataaaaaataatcacgttatgaatcctcttctttatggatctggatcaaattctccattggcacggtaatggacaatgctact

SEQ ID NO: 266240 - DNA, 462 bp, Glycine max
ctagccgaaattcaactttagttgagatcaaagttttttttgtgtgaatctatactatgtagataatttaattatgctttttcctaagataattaatcttgagtgaaatctcatttagttattcgtgtgattgattttttgtgaccaacatctattgattgttgatatttaattgagaacaatttggactatgtagaatttatactgtgaacttgcattgtgtaaattcgcgttgtacatagttactctatgtaagactaacaatgtgtaaggttagatttaatgactcttccctagataattagcacaaggatcaaggtcaattacctagaggattgccatttacgattaaagtgatatttccatttttgccctaattctactttagcctttttaagcagaagattcaaaagtcattctagccatacagtgaaattcttggatagctatgtttgggcaccc

SEQ ID NO: 266241 - DNA, 424 bp, Glycine max
  unsure (1)..(424): unsure at all n locations
agcttacctcaagaccttgtcattggacctttcaactcatgaagtatttttaggtccttatgctctttggataaccctctatcagttgaagcttgttggaatattttgaggtttcactaggaagccaaaggttctaattacggtggttaaaaaaaaattaatgttgtcgttattttagagactaaaatgacatgttgaattattaaattaattgatgcttgtaatttgaagaactaatttgatgtattaccatgcttatctctttgtagttttgtaaattttcaatggtttgaaaacactaaagcaatacttgaattgtgtttcgttttattntaatattttgagaagaagacacgtaaaacaagataaagaaaagaacataaaagtcctttttgtaactgatctgaantatttttatctatat

SEQ ID NO: 266242 - DNA, 432 bp, Glycine max
  unsure (1)..(432): unsure at all n locations
tcaactcttaaagtaccaccctaacaccccttccaaggaccactccctaactgtaaaccccatgtgtctctcttgacctttttaaacaccccattnttttcttaaaagaaattaaaaaggattatatttaaaaataaatagagttttagaaaaataatgaagattttggaattaaataaataaagaggcaaataaaataaatatatgttcttaaaaaatgttttatttattcatttgataggtagtaaaatagagtttatttttataaaatgataaaatcactaccacaaacatggtcttcaacgatgcaagttttattatggttgtacaaaaactgatgtcataagtaaagtggtagcattnttgtaaataactggaaattttcaaagaggattttatcataatcttctttgaaaatgaattacgacatcg

SEQ ID NO: 266243 - DNA, 333 bp, Glycine max
  unsure (1)..(333): unsure at all n locations
ggctgcagcttctccccaatttctataatagggggagaaatgaagtanaaaagggttcagccccttatgcacttctctctctttcgaatttgcttaggaaaattgtttccgtgaagaaaatccaagccgaggcgcttccgtaacgtttccgtaacgtttccgtgagtgatttcgcaaaggttttcgaccgttcttcgacgttcttcattcgttcttcaccattcttcagtcttcaacgggtaagtacctcaaaccaagcttttcgattcattctatgtacccgtggtgggccacatttggtttcatgtatttttattctcgttncatttactt

SEQ ID NO: 266244 - DNA, 427 bp, Glycine max
  unsure (1)..(427): unsure at all n locations
tgaccaatcccgacccaacccgggcatagtcagtcattgataacctgtgacnnacctaaacaggcgagctcctggcattcaaccgataatagaacaaagaccacaaagcatggaagcttgtgtggtggctggccaactatggatcttgagtgatatctggaataaggcctctggtattcaattaccaaaggtgtgtaatccattacaaggcttaaaaatgaagacatgaagtaaagatggtctctggtaatcgattaccaagggtgtgtaatcgattaccacgccttaaaagggggacatgaagttgatatggcctctggtaatccaataccaaggggtgtaatcgattacaatgcttatacagggagacagtatgttgaggaggcctctggtaatctattaccactattgtgtaatcaattacaca

SEQ ID NO: 266245 - DNA, 446 bp, Glycine max
  unsure (1)..(446): unsure at all n locations
agctngngcttggttcgaccccataattcatggaatataatatttgattctcaatacttcgacaacctatcatagagatgaatgattagggcatacttatgctatgcatgacaaatgtaattatgagattgacatgagacgcttgaagaaaccccttttcctagttaacaatgcattatgtaccatgttcatgtgatttgaaatcatttttcaagagaaatgaatgtataatctcaacatggtctatttatagctatcatcatggtacccaacacatgtaactaaaaatgtggtgtaaacattcatgcttcattgtgacttactttcggtctttgtttcagaggaaaatgcaaggatcatgcatgagtgaaataaacatgcgaatgatgagaatataatgtatgcagttggtacaacaaaagcgtgctgaatgaacatgatgataa

SEQ ID NO: 266246 - DNA, 440 bp, Glycine max
catacaagcttgtgcataccatatgactcctacaattctgtcttatcatgcatgtaactggcttatacgacatcgcacgtattggattcttacggaaaaacaccgtaactcaacacgcctagaggagatcctatcgcacctgacacatatctagaacgatgggcgacgaagaggacacgcacgaacagatgaagacctacatgtaggttctgacaaaacaaaaggccttcatgatgaaggccatggtaatgatgaagctactcatagagaagaactgggtcaccgacgccgatgacagatcggatagcgaatacagacccaactctctgggcaactacacaccacccttcctcaaacatagtatgatggcgaagggacacactgcggcacgatggcaggcctaatctgagatagaaacgagcgtgtgccccttatggatt

SEQ ID NO: 266247 - DNA, 449 bp, Glycine max
  unsure (1)..(449): unsure at all n locations
ctatanatactcaagcttcaactgaattacaacgttccaatagatgacaaaatggttaatctatacaattatttggtactcgaggaccagtatgtttgaacgttgaaattcaaattcaattatgatgagccacatcctttcacaaaaatgctttgtgtaatcgattacaatgatttggtaatcgattaccaatgatgggctttgaataaaaatcaaaagatgtaactcttccaatggntttcaagtatttctaaaggttataactcttctaatggctctcttgaccaaacatgaagaatctataaaagcaagaccttgactgtcattctagaaaaattcatatcaattattacaacttttccaaataacttttgatcatctctttgaacttgtacttcatcttcttcgcttgccaaaagctttataaagtgttctggtctcctaaacct

SEQ ID NO: 266248 - DNA, 388 bp, Glycine max
actacagcttattgcctatacttaacagagaatacatataacactacaaaatagccataaattgagaagagttgatacaatttatacaggttttatacacaaaagatagttcgtttcaccgactaacaatgggctaatgacatgggaacaaaatgaacaacagaacaactataaatataggaattgatgggagaaagaaggatgcgtctatgcctatgaataaagatccatatatcatggatggagttgcaatgtgcacatgatgactggaccggattcgacttgacgcacaagtacattacataacattgtaaacaagatctgggatagaaactgaacattttaaaactcattaaataacaaagatgcaagtggttatttcaataac

SEQ ID NO: 266249 - DNA, 338 bp, Glycine max
tctctactgctattgtctatttggatggagaatgcccgaataaccgctcgctgggctccacaacggtttccaggtctgttcctcagatgtgatgcactccctggagtcattgttaccaacagagatctaacattgatgaatgctgtgaaaactatatctcctgaggctaccaaatttgagtgtcaccttcacatcgactataatgtgaagacaaagtgaaaaaccctagttgtcaaaaaaatgcacgggattattgatgaggagtttggcggattgtccttttgagcaaccgttcgatggagtgccttaagaagatcgaaattgcgtgctcccatgac

SEQ ID NO: 266250 - DNA, 367 bp, Glycine max
ccaaacttgatcggtgagcatttgaccaagagctcccgagcctgatcgctatcacatctactctcttaaatatagttgaattctagtattaggcaaaatggacatatgcattgtctacacttcgaaacccgaagtctaatgcgtgaggagcatattatacactacaacattcatactagtcataacctaatagcttacgcttttaggatacgttgtccttgataatcacattaccaaaatctattacagttaaactaatttatatatccattctatgatagatttgggaactccgccataataaatcctagtttgagcaagtatatttacattactcattgtgcctaagttagagaaaccctactag

SEQ ID NO: 266251 - DNA, 440 bp, Glycine max
agcttgcgttgtaagcgatatttatgatttgtttgaaccgatctctactaaaaacaaagctataaagaataaagtttggaccaattggaaataggcatgactgaaatcacattgcatgtaatttccatgctacttatccatattgacctatggcattcaaagtattgatgtggtggacattggggtctttgtacatttgttgtaaagatgaatgacacagtgattccattattgatacatgaaatggaccatgttgttaacgtggaaatctaaaggtaaataacatacacacccacacttaaggatttttgatataatcgtgacaatatgcagcacaagtgggagatcgtcggaattctctatcccaatacttaatgtgtgttaatattataagacacttatattaactatttatcatctgtgagtgttattgtatgcga

SEQ ID NO: 266252 - DNA, 424 bp, Glycine max
tcgaaataaattatgagtggcgccgctgtccaccttcttaggatgggattctcattagtcgtggctcagactttcatcttttggggtttctgaccagcctccaccacaatgctcctgagaaacatcaaattgcactctgcctcatcctcctccttgttggtttgttcttcaacaaccaccatgtttgtctcacctttctcacttcctcctcgtcaagaaatatgacatgcaattgacgatctcaatattggtggttaggatggaatggattaccacatttgtaacacaagcccttcctcttacgtttagactattccttatatgaaagatggatctgtgtgtgtgacccgactcatacacaatatgaagacctgatgggcccgttctggtgtttggcccactatattgctttctctcaccctca

SEQ ID NO: 266253 - DNA, 447 bp, Glycine max
  unsure (1)..(447): unsure at all n locations
taagtcatacataattatcaaatacaaggcgcacggnttattcttttactacatacaagacatctttaatgtgtgttataaacttactacgcaataagaacacttaaacagattaataactaattaatgattaaaaacaggctaataaccctacttataactaaagccttactgaacaagttattgaacaaataataatttttctttttaaaaataaaaccaaacacacttctagaagataaaacgtgatatgaatgaacccgttacgtagatatttttcatagccttcaattaaataacccgctgggaatattctaaacactatttaaaaaatgattgtatttataggatgagaggacctgcaattctgcaaaatgacattgtagggatacgcatgactcctgcatatggttgcatcgggtggaatactggtgactatgggagctc

SEQ ID NO: 266254 - DNA, 438 bp, Glycine max
  unsure (1)..(438): unsure at all n locations
ncagctngctattatgagttataatttatgatttttttatnccatctttacaggctatttaatgatttgacaatcaatcatactggtaagcatgcacttaatttcctttgatctttaacatgcttaagggacatcactaatatctaaaaacatgcttacacttaacatggttcagttcagtgtataaatatccataacaaggggcggatgtcaaactttccaatctatctgtgtgaggatattttaaaaataacaaaggcgggatgacaccatagattatcgctggagaattgtttaaaaaaaatatcttaagttcatactgatcataaaaatgacatgtttcgacattttacaagacataactcgcaatttataagctaagatgcatgcactactaaaaatactgttctttatgacagggtatctaagtcggttata

SEQ ID NO: 266255 - DNA, 443 bp, Glycine max
  unsure (1)..(443): unsure at all n locations
cggacatcaaaantcatgcctagaaactgaatatttatactaccgactaaccagaatcccggagaattgtatgtaatgtacacacatcacacaatcatacaccgatatgcccaaatagagttattgcaagcgaagtctgtatacaggatcgggattaattatatgcaacatacacataatacaaatatcagaagaagcaacagcagatgccaaggcacacatgctaatgaagttgaactacaatgcattacctcaaggaacttaacacttgatttgtgagacctgactgtatccacggccacatatcacggagcttcgcacggatgcaatttatcaagtacagaacttcattatacaccgattgctgtagctctacctgaccattggctacctcactttgctccctagtgatatgtaaaacaataattgaaccaatcacctca

SEQ ID NO: 266256 - DNA, 440 bp, Glycine max
  unsure (1)..(440): unsure at all n locations
agcttccctgtgaggcctgctcttccaatttatcttgcagtcaacagatgaaaaaaatttggtttccgacctattattattataacaaatgaccattgatataaaaaatgtcacttacaatcctatctacaatttcttttgttgcctcatacgtcatttgaccagattttttcgtgcgaaccatcttccacttcacatgtcatctaatgagaggtggctgatcaacaattgtgccagtgctcccagattgggctacttcctccaatcgtttctttttcttatcctctatcaacttttcttttagaaaatcataacccccacgagacaacacgtgaagggtagtgttntgtttatggatgacctgcgccttctttaaaacatcctgtaacaattacacattaggctaagttaatacacttgacaataatgcacataaatgg

SEQ ID NO: 266257 - DNA, 470 bp, Glycine max
ctcagcttgaggattatggggtacccatcacatgtggtactatgtgtgtgtcgggcgatggtgcacaacaagttttccacatccacaatgcgcgcataaacccaccatcccctgttgcccacctccaactgagctcacgtactcccacgtagcccatatcctcgtttctctcaataccgggtccccatcaatcctcccaagcttccacaacatccaagcaaaacaacattcaaacagcacaagctatcacagccaagcaaaacagagcaaaggcagaaaactctgctcaacacatcaaccaaaatcacagcttttctcacttaaagaccccagtaacaattccttcgatccaattcgttaaccattggatcgactccaaaattttactggaagtctctagtacataagcctacattgtgaccgttgggatctactagcaaacatccataactcattctgcactagacttt

SEQ ID NO: 266258 - DNA, 413 bp, Glycine max
  unsure (1)..(413): unsure at all n locations
ggcagcaagcttcactcganaaactatggaagataacttgatgctggagagaacatattttcttcatcctttaccattatctttcacaaaaatactcatttcctatttgtagaaagtcctccttgttaatggagggctatgaacttcattgttagggggttattctactgagcactcttaatgtaaactcctaactatctatttaatgttattttctagagttctctgctactatctacatttattttacatgcttatagcttgatcatccatctgtatgtttagttaggcttttgagtgttggaaaatgcttaaaatccttagaactcgatcgagcagctagaggcctgtgtatctaggaataaaatgcatgaatctagtattttttgtactgcgtgtattgcaactctttt

SEQ ID NO: 266259 - DNA, 354 bp, Glycine max
gacggactataccaagctctaggaacgcaggacggagattatatctatatataggctcgctaagggtagagagaggaagactagagattcggatcaagtcaagcgtgttaaggatgaagaaagcaaagtcttactgcatgaaaaagatatcaaggaaaggcggaaggcgtatttccacaacctatttaatgatggacatggatatgactctagcagtctatacacaagagaagaggaccggaactataagtactatcgtcggattcagaaacaggaagctaaggaagcgtcgaaaagaatgagtcatggtaaggcggcggtgcccaacaacatacctattgaactgcggaaaac

SEQ ID NO: 266260 - DNA, 303 bp, Glycine max
ttagataataaattaatactgttctaaagcacatccggccactgtatactattatatttactgatagaaaaagtacaacatcatactgcgtggagtgaaaaaaggaggtctgcttctccaaacactgtggtaagggaccccactacctggaaacttaacgacaggcggaagaaggcacgacacttcacctttttataaccagcaaagagtgatgcttaccacaatatcaacgaaacacaaccaaatcaaatgcttagatttgaattcaaacttgacgtaagtggacgccccacacacaacggc

SEQ ID NO: 266261 - DNA, 391 bp, Glycine max
taaccaaagagtattctttgagaaagtgttatcactcatttatctttcaagaaccaagcctttccaccgacgacccacgcctcaccatctcctttgcattgtggggacatccgccgaggataatcctactattaatgcatagtttgaaaattttaatattttcaaataatcaaaaggagcgtcgaaactttagctaaatctaacatagtttgaaataatctaaaaagtaaaaaaagatgttctaccaccaactgagagttaaaattctaattttgcttaagtgattaagtgaatcgtgaaaacgagaaaagaagagacgatctcactcttaattactaactctgataataggagtaccttattttttaatttaaaaatatattaataaaat

SEQ ID NO: 266262 - DNA, 463 bp, Glycine max
  unsure (1)..(463): unsure at all n locations
tagagtttaatgataaccaaactttcaagaaccaattcatatgttatctaaacttaactattaatgattactttgaaacatgccttaaaaaacaagagttgattcacaagcataaagaaaggtgtgaagtagtggcctacaatatagaagctttctagatatagattctacaaaatcataaataggactactagaaggagaactaattagaaacatgaatgtcaatcatatttattttcttgatcaaaatgtaaatattaaaagttttctatgataaaaaaaaaaacatgatattaaggataactttagtcaatgggtagataccaaaagttatacatgactagaggaccgatnatcaaaagatgcatggcataacaaaagaatgaagactaaatagtctgctatttagaagtacacacaataaagataaagcgaagagaagaatgaacaaacatttcaacta

SEQ ID NO: 266263 - DNA, 441 bp, Glycine max
agcttcagcctgatcgctaagcgacagcttatccgtggctaagcgggacctattgtcgccaaccgcaattccttatggccttaattgaggtccatgacgctaagcgccagtcatggcagctaagcaagcttctttgcgacaatatgagtgctaagcgagtacctctcagctaagcgcgtgctcctctgtacttaagatgcatcattttagctaagctggccagagccaggcttagcgagaattgcagcttttctaatacagacctcgctaagcggacttactctcgcgctaagtcgagtttctgttcaaaaaataaataaataaaatactttttttgttttagaatttgaaacgtcggctaagcgcacatgttcactaagcgagcctagttgagaaaccaaacgtctctcttgctcgcttagcgcaacggtccactaagcg

SEQ ID NO: 266264 - DNA, 470 bp, Glycine max
ggaagaggatgctctaatggaggataagaaagagagaatggtggagcacgatattgaaggaataaaagagggaaagaagtggaactctgaagtgtatatcataagactttcattcatcaaagttacaataagtgttacacatgcttctatttatagactaggtagcttcctttagaagctttcttgagaaaacttccttgagaagcttctttgagaaaacttccttgagaagctagagcttagctacacatcataactaagctcacctccttgagaagcttccttaagaagattcctaaagaagctaaagcttagctacacacacctctctaatagctaagttcacctccttgagatgagaagctagagcttagctacacaccccttataatagctaagctcacccccatgacaaaaaacatgaaaatacaaaagaaaagttcttactacgaagactactcaaaatgccc

SEQ ID NO: 266265 - DNA, 445 bp, Glycine max
  unsure (1)..(445): unsure at all n locations
agcttctagccaaatagacttaccttgacttaattcctttgatagcccttttgagccttgtttccctttccttgttttgaagctcactacaagccttaagtgaanaaccatgatatcaccatatccttaaggaattttggagctttggaattgttttgggaataagtgcgggggtttttgtttcattggataacatgttttgttggccatgcttcatgatatattttgagccatacttgatgtacattgcatattggttaaatgttggacatgctgaatatgatgttgtttctcaaaggctacagaaaaaataattataaaaaaaaaatcgaaaaagaaaaagaaaagcagtaaagttgagtgaataagatcttaaatgacaaaagaatgatgagactcatggttctactctttatgttaaaatttatctttacttctttttatt

SEQ ID NO: 266266 - DNA, 369 bp, Glycine max
  unsure (1)..(369): unsure at all n locations
aggggctttccttttgacctgatctgtttcatggagctaactcttgctgacggttgatgtccaatttcatagcacttcctttgtggactggtgaatgttgtnttattgagttttaagattaaatgagtctttgggtgtcaaaacttagggttaccttaatttacttaaatcggagtttttagcaaaaatttgaacaaaccagtcaggattttctaggattaatctgcatgaaattaaatggggtatggctgttggactctttgtaattttacttcaaagagttgtaaaggaaatatacgacattaaattataaaactgtttaaacctaaaatttgaacagttagaggacttgcaacagcacacttgtct

SEQ ID NO: 266267 - DNA, 434 bp, Glycine max
agcttgtctccctaaaggagaaaggaagcttgtctcctttttcttctctttgctgcgaggatgggtttctttttgtggctacattgtggatccttagggtttgaaggtggaaagaggttctatctctatcaatggaggccgacgcagataacaacgatctgaataaggaagagaacaacattgataacaacaacatcatcaacagcaacaacaacagtgaaagcgacaacaaaattatgaattctagcgagggtctgagctagcccaagcgtcaaatgaagatgtcgtttcagcttgaaatgctcgacaaagcttatgtgggttcgttatcgtcaaccttctttattctatttttcttcttgttcaatttctacggctttctattgctcattttttcttggccaacttgttggtttggttatttctcactggcg

SEQ ID NO: 266268 - DNA, 385 bp, Glycine max
ctcagcttctaaggaggtgagcttagttatgagaggggtgtgtgtatctaagctctagcttctcaaggaagatgtctcacagaagcttctcaaggaagttttctcaagaaagcttctcaaggaagctacctagtctataaatagaagcatgtgtaacacttgttgtaactttgatgaatgagagtcttgtgagacacaactcaaagttcaacttctctccctttttcttacttcaatttcgtgctccccctccctctttctctccctctttcttttcctccattgaagcatcctctccaagcttcttatccaaggctcatcttggtggtgaagctccttcttccatggcttattccttaatggatggcgcctcctcttacctcct

SEQ ID NO: 266269 - DNA, 440 bp, Glycine max
  unsure (1)..(440): unsure at all n locations
agcttgagcttaactacacatacctctctaatagctaagctcacctccttgagatgagaagctagagcttagctacacacccnctataatagctaagctcacccccatgacaaaaaacatgaaaatacaaaaaaaagtccttactacaaagactacttaaaatgccccaaaagacaaggctaaaaccctatactactagaatggccaaaatacaaggcccagacgaaggagatacctattctaatatttacaaagataagcgggctcatacttagcccatgggctcgaaatctaccctaaggctcatgagaaccctagggtctttccttggatctctagcccaatctacttggagtcttctacccaatgcccttgcggagtatgattgcatcaatgagggttgaaacaggagaccctttgggtcattactcttcgcttag

SEQ ID NO: 266270 - DNA, 467 bp, Glycine max
  unsure (1)..(467): unsure at all n locations
agacacctgaggcatgcaagctngatccttaggagttgaacaggacttgagcataagttgtttaagaaccatagcaacctgaataagaattcttgatcgtcaaatatgaaataaattcagctagcatgcagtcaccataggccacctcatgattccatgcactaaattgtacattgagaagattatttggtggttaaggatgacagtagtcaaatcacttgcgacactagttctgataatcaactaagaatttgatagcgtccttttttttaatcagcaagaaattggtatagagtagcaacatcttgtaagagatactggtgcgtaccttttttttagaaggaatactatatgcgcacctaagaattatgccggagaccctacatatttgtgtatggtgtaacctatacaatttatgcagatgtcctgaattgacacacggatgatccttattaacccacgccttt

SEQ ID NO: 266271 - DNA, 468 bp, Glycine max
  unsure (1)..(468): unsure at all n locations
tactcagcttagcttttaaggaagctttctcaaagaagcttctcaatgtttttttctcaagaaagctnctcaaggaagctacctagtctataaatagaagcatgtgtaacacttgttgcaactttgatgaatgagagtcttgtgagacacaactcaaagttcaacttctctccctcttttattccttcaatttcgcgctccccccttctctctttcttttcctccattaaagcatcctcttcaagcttcttatccaaggcaattcttagtggtgaagctccttcttcctcggcttattccctagtggatggcgcctcccctctcctattctccttttccttccgttgcatctccatggtgtaaaatcaccattgaaggacctcattgtagctcaaagatccagcctctatagaagctccacaagaaagctgtcatcatttctgcgcccactccttacagatgctcact

SEQ ID NO: 266272 - DNA, 195 bp, Glycine max
cacaaaccacaaacccttgcgaaggtacaaattactatatgaaggtcagctggtctaccaacattacagcgcatccagaatggcatcaaacttgttaataataaatgatgcatatgagtgtgtagctacctcaagcactcaactaatgactaaagggtaattcctggcgctaaacatgctgggaattggaggcca

SEQ ID NO: 266273 - DNA, 392 bp, Glycine max
ctctgctgaatcaaacatacggacaagaagcagcacagcattatatatcaaccacattgatcgagaccttacgtttctactaatgaaatcatactgctagcaattaactatactataagtgatcaacctacaaggttatgagaactcatgagaaatgaaatcaatatacattactgaaaaatatccacacatattagccagaacttgtcaacaaatacagaagagttttgctttagagtctagaattctttttatcataattttatattttttaataatttatctattacatacgatgaataaagctcgatagaaaattttcaagaaaataacagcacggtatgtcatacttttcttacatcaaccatatatcgttcgctagaattatccta

SEQ ID NO: 266274 - DNA, 441 bp, Glycine max
cgcttgtgaaattattctcaatcaagttcttgtgaaaatatttaaagtggaatggtgtgataaaaatactgagataatgtcgaaagcgtgcatataagaggtgaatgctggatataaacctcatatacaacagtgggaatagagaaatatttttagtataaaattgaaaatgtgaactccctggaccaaccctttctatttaccattagatgatgatctgtccaagttgcttaaaaagtttccagaagttcttggatgtaatttggaggaagagtagaaaggtaatgtaaagatcctggaggagcagagttgtattaagggaaattctcttaggaaacttctccttataaatccaaaattattgggttacaatgatgattgtaagggagactatattgcacaatgcactagatgtcgggctcgcttctagatgatagaatg

SEQ ID NO: 266275 - DNA, 313 bp, Glycine max
cctattatactcagcttctggtcagaataacagctcccacatgagaaattacatactccaaaatttaataactactctagctctacacgaagaactaaattctgggtcttcttacgattggttaaatcagaaaatcacaccattattgatgttgagcggcatcttattttgctgccattacggtgagaaaccttgaaatatgatatctgctctcatgacttgtattcttgggttcagattgtctccagttactggatttctccagtatgatactaaataacacaatgagtgtgtactgaagaggaattcaatc

SEQ ID NO: 266276 - DNA, 427 bp, Glycine max
agctttcataagtgaaatcttgtgcagccttttcccttagagtcctctcatgaggtggagtttgagccatattttcagaatgttcaaaatcagaatgctcaaaattataatgctcaaaatcaggatgttcaaaatcaccaaccactgaatgctcaggctcaccaataacagaatgctcaagatgcttgaaaaggtgcaaaatgtttaggataatcaagatgcacactatgcctaactaatctatgaaatgtcctatttatttcaggatcaaaggattgtaagtcacttggatttcctttagtcatgcactatgtgtagcagttcatgtgtttctcacacagggcaacagaggtgggataaaactacagctatactcaaacaatatccacatgagctgaaatgttgagagcaacaccctaaactcatg

SEQ ID NO: 266277 - DNA, 462 bp, Glycine max
ctttgctacaacctttttctcccccttgggcaacatctaattttcttagaactcggaaatcaacacagttataacaatggagtagcaagatataagtatcagagtattaaatccaataagccaaactcataatcaaggaaataatcaaaccagaattcaaataacataaaatgtcaacaaccacaaaatatccaagactgaaacacaagagaaataagcaaagtacttagcataataatgtaaattctaagaaactaaaagccaaaatacacggcttataaaagataaataagcagaatctaaaatctaagaagacggaggaggtggtggaagatcaaaactctgacgaatgtatccgacatcctcttcaagctgtgtaagacgaatgtcctataccggcaagcgtgaatctaacgagtcaaagcggtcaccaacatacgaacgaagaccccgtaattcgga

SEQ ID NO: 266278 - DNA, 443 bp, Glycine max
  unsure (1)..(443): unsure at all n locations
tacatgagagnaattcgtattggtttgtttaattattattctgtgctaaaaagtccacaagaagattccacacaaaataatcttggagtgatgattctcattacatcagaatttagcaaattacctataaatccaggttgatgctcaaaaatcatgatcttcaattctatattacaagcaaaattgactaagacatcaatatatctatcgcattctcgataaatatgaacaatcatgacattacttggttgcattaaagaacgaattgtcctaacaacccttatccgaacacttttaccccctccctttaagttaagcctcctttccaagtcacaaaatcacgcaagaatgaaataataagtgaggaagataaagtgataaaagatttttgccttttgggaatggccattgcccattggtgggatgagacacatgagccattt

SEQ ID NO: 266279 - DNA, 265 bp, Glycine max
caacaactagacatatcaaccccacaagaactagcttttttcacacagaccgactcggcgaatactatcaactcccgaccctatctctcctgcgaatcatctgccatatcggcgactgaaacggagtaagcgccgaatcaaacaaatgaagagcatcctccccgacacatacgggagaaatcatcttccagcggcgacattacacctgccgaacaaacaactccctccgtggaacctcacgaaagacgtctaccgcagattccac

SEQ ID NO: 266280 - DNA, 445 bp, Glycine max
  unsure (1)..(445): unsure at all n locations
agcttgagaaacatatatctgaaggaaaatggctctttgtanaaaataacatgatcagtttgtgtgtcatcattcaacctctctactagggcccaatcgatttactttaaaaactacaataaagaagacaagggatactaaataaggcttacattattgaacattacttaatctggtttctttggtctcttccatgatttataagtttgaaattgttaaggaagacaacataagtttagaacaaaatgctaaatcatgttcttcattgagttttatgcaatattttgaatttcttttcatctcgatcttaatgagaaatggtctacgaattactcatgatttatcccaagtattacaaagaatttatcaagatattgtaaatgctatgaaattagttacgacatctaaatggaggttacacactatgatggctagnggtggtatt

SEQ ID NO: 266281 - DNA, 401 bp, Glycine max
gtgctgacaggatgtaaccagaagaaaggcatatattttgaagaaattctctcaccggtggtgaagacttggaggttgattactaattcttagtttagagcaattctcggtcctacgtgcaaaacaagacttggaggttgagcaccttgatgtcaaacaccattcttacatggagactttaaggaagaaatttatatggagctaccaaaaagaatttgtagaactatggaaagaacacttagtgtgccgcctgaagaaaattttggatcctgcaaattaatcccatgaaaacttacttatattttgaacccatctattctgcactctttggacaaaaatgtgcccgctctacaactttaggagtaaaaataattatttattcttttttgtggttgatactt

SEQ ID NO: 266282 - DNA, 446 bp, Glycine max
agcttcacaaaattcttattcaatgcaattctatcctttgcatcaaaaatacttgatctagaacaataatttaaaaaacaggttaacagaccaatcactaacaagaaaatgaataatgtcaagttgtcaacttaaaaaaggcaattgtgttcaataactttacagctggtaacataatttatacctgttatcaccaacaaagtcggtggagaccacatcatcttcagtgtaaccaagaattcccttcaacttgccctctgattcctccctgagaaagacaacattatataagacaatacaattgagaaggaccaatcccacaatggaggcctctattaataacaagtaatgaaaatttgctttaagacccaataatacacaacatatatcattagaggagaatcaaagaattctgtcattacttgatagcatatttaatttcatca

SEQ ID NO: 266283 - DNA, 395 bp, Glycine max
acctgagagcattacagctacaaactcggtacaagcaagtatataggtctctcatcctattagttacagcttatcacaacaagatatcattttctgcatgataaccaacctgcagtaatcactcttcctctcataaagaccacgtccaacatagtatcgttcctgaattaaattattaaaaagacatatataccaagttatttccaaaagtgaaataagttgaaataacaaggacacaattaaatagtaaaaataactcacttgataaatccacttaaaaaactgaaagaaaaactgatcagacatttccgaaagtgcatgacaagctgaaaatacgagcaacagtgcaaggaatagacgtatagcatcatacacaccaagcacaagaatgtata

SEQ ID NO: 266284 - DNA, 420 bp, Glycine max
acacataaatctcagctgtaagatcaagagactatatgactgccttatctctctatagtttggatttgacatcatatcccacactagagcgcacaagtttcgtgtgttaaacgtgctatgcttgatgaatacaagcttgcacattctgacttctcacaaatgaaatcaagagcccgaatctaaggtgagtacaaataatatttacaatgagtcacgatatattatttttccaaaacagtggttcatactcattactgagacaaaaaaaatgaagctctcatatatttcagcacatgtagtgaaggaatcaatcaacagcttcgtcatcaagaaacttgtggcttcgtcatcagtaacttcactgtataaagaaaccatgtaacaaattatgatcaaatcaatagaacaacatcatatgaa

SEQ ID NO: 266285 - DNA, 461 bp, Glycine max
  unsure (1)..(461): unsure at all n locations
tgttcggcacactcagaatttacattgttagctcctttcataaatgaaaattaattactatgttgtttgtttcctcaaccaaacaacagatgatttttttttctattttcacttttctatttcccacctgtttaaacaagtataaccttgagctttgttacaactttcaagtgtcattatctgaccataccttttcccattcaaattctccactactcaactatagatcttaatgttttaattattgtaccggatcagtcttgacatattttattatatcaatgtttcttgtggacggaagttataatattttagtttcatatttaattgatctccttaaccttttcctaaagcctgttctaatggcccatattataattgatcttctacagcttacanaaataattatcttcttgcacccattgaaaactgtactatatgctaatagatctttatctttc

SEQ ID NO: 266286 - DNA, 437 bp, Glycine max
  unsure (1)..(437): unsure at all n locations
attgtctcacgtattcaaatctggcgatcggaagtgctcttgtcacaatgtcaacactctgactctctgtattgcaccaactccacttctccttccctttgaactcctcttacaagaaaaagctctaccttgaaacgcttagctttgccatgaaacactggatcattagcaattgaaattacatcctagatcgccacaaaaatcggggcgccttcttcatgttacatatgcaaatctgtcataatattcctgatccaaagagcttgattcactgcagcaacaacagctacatactctgcttctacagttgattgagctataacttctatgcttattagaacaccacgagaagactccagaaccaaaggaaaaccagaaccagagatgcttntcagtgatcaatacaactgacccacgctctatcaaaaatctatgga

SEQ ID NO: 266287 - DNA, 445 bp, Glycine max
agcttaacaaacttagaaatcaagtgatcattaattccgaaatatagggggagtaaacgcacattttatctatatacaattgtttgttgcttgcttgaatcttgatttcacgtattgtattgtcatcatcaaaaagggggagattgtagattcaattgcctttggtgttttgatgatgatcatgatgatatgatgcaattgatgcaaatgggcttttcaagattaaattcaagacaatacttcaagattacaagtcacaacatcaagatgatcactagtatattaggaagggaattcctaattgaattagcaaaaggtttggccaagtaatttaaattaaaaaaagtgtctttcaaaggatttactctctggtaatcgattaccagaggatgtaatcgattaccagtggccaaatatgtttataacagctactagaaattgaatt

SEQ ID NO: 266288 - DNA, 462 bp, Glycine max
  unsure (1)..(462): unsure at all n locations
aactgatgcttggtaacttggaacccagctggtcttgaatcanaaatctgtacctgtcacaagggtttgtggtttgtgctcctctgctgaccaccatacagacctttgttcttccatgcagcaacctggagcaattgagcagcctgaagcttatcctgcaaatatttacaatagacctcctcaacctcagcagcaaaatcaaccacagcagaacaattatgacctctccagcaacagatacaaccctggatggaggaatcaccctaacctcagatggtccagccctcaggaacaacaacaacagcctgctccttccttccaaaatgctgctggcccaagcagaccatacattcctccaccaatccaacaatagcaacaaccccagaaacagccaacagttgaggcccctccacaaccttccctcgaagagcttgtgaggcaaatgactatgcaaaacatgcg

SEQ ID NO: 266289 - DNA, 438 bp, Glycine max
  unsure (1)..(438): unsure at all n locations
agcttttactcgaggaggtgctctaggcccagttaatatagcctattctggggtttatcagtggtggtatacaatcggtttacgtactaatggggatctttatactggagctctttttctattatttctttctactatatctttaatagccgggtggttacacttgcaaccaaaatggaaaccaagcgtttcgtggtttaaaaatgccgaatcccgcctcaatcatcatttgtcaggattattcggagtcagttccttggcttggacagggcatttagtccatgttgctattccgggatccaggggggaatacgttcgatggaataatttattaagtatattgcctcaccccgaaggattaggtccattnttcacaggtcagtggaatctttatgctcaaaaccccgattccaatagtcatatatttggtacccctca

SEQ ID NO: 266290 - DNA, 444 bp, Glycine max
agcttggtggataactgtattggaatctgatctatattgttctcctagaacgtaatcagctatgtactctccgcaagctgcaggaacagtttgccacttgactacgatgtttgcttccacgccaagcctccaactggcacatgccacctcattgctgttttgcccaccaaacccagttttcatttggagagggaacttctggtaatctgagccatggcattcatatgctaccaaaactggagcaacaaacaaaacaagcactttcattttcatcttattgcttctagctatcacaaacaacttgtgcctcttccaagtgcaggcttttgctctttaaatagccaataccccaacatctacactctggaggataacagaataatcgaactactctcgttttttgttattagcgactattcccgtatcttatccttttcagaaata

SEQ ID NO: 266291 - DNA, 396 bp, Glycine max
gggagaatgtgaatgtatgaatatatgaatcttgatgatgccaaagaagaataaaacaaggcctcttcaaaggataagcatttgcttcaagattaattcaagattgcttcaacaaacaaagtcttgtttcaagattcactaaagatcaagccttgcctgaaaataaagggtttcaaagtcatgcaaggctctggtaatcgattaccagaacggaataatgaaaatgactcgttgaaaagggttttgaatctgaactttgaacatgtaatcgattactatatggctataatcgaataccatcaacgaaacttccgaaattgaaattcaaaagtcatgacccttcaaattatatatgtgtaatctattacacaaacatctgaatcgattactaccgga

SEQ ID NO: 266292 - DNA, 478 bp, Glycine max
atcctcagagacacctgaggcatgcaagctttcatcatcttatttagagtagaattgctgtcggatatcaaagagatagaatatatgcagagaacgagaaagcgatacatcgaaaagtaatatgataaaaaaagattacaaaatataaaataagaagactgttaggatcacactctttattatttgtagtaatttattaaaaaatacaaaatcaaaagatttattaaatatgatataaaatcttaaaacctgatgattcttaataaattttagaaaaatatattaaagaatatgtccaacatttctcataaaataaaaaaaaatgaaaaatgagatgaaaaaaataatgttatgattaaaagtataatggttgtgtattgaccatatatttgtataatattgtcattcaattataaattatcatttatgattgttaaatgaattattcaatctagaagtcattaaatttattatatat

SEQ ID NO: 266293 - DNA, 421 bp, Glycine max
  unsure (1)..(421): unsure at all n locations
actgccgacaacagcgtcaacgaattcttgcaccccggatacaaaggtttctttgaatcagtttgtaatgtatcatacataggggcatgtgcttgctgaaaagactcttgtccaaggtcacgaatcatatcctccaagcgatcttccatttctacatcaaacggttcggattgttgcccactctgcatgtctgtcatttcaccatgccatatccacgtcgtataattcctcttaattccatcacacaacagatgctctcgtatgtcatccagtatttgtcgtcttccattcaaacaatggatgcaaggacaataatattctccatcttcatccggttgacctctttctgaagcaaattgtaagaattgctcgacgccttcctcatattctgggctgatgcgactntcattcatccaacttc

SEQ ID NO: 266294 - DNA, 436 bp, Glycine max
  unsure (1)..(436): unsure at all n locations
gcagctntaaagtaggacttaagatatttgttaactgatgaagaanaaatgtcacgagaaagttatagtaaaagacaaaacaaagacattcctttataggccaagtcacacaactagagttgatagataaaatcttaatagccaatcagcaagggagaaaattaaagagccatcaatgaatgataactacaattcaagagatagttacgccaagaataataatggacatcatcaataagatatggttaagattttctacagaaaatagtacaaagcaaagcaaaataattgttcaacaaaccacaaaagtaaaaccaatgctcaaagcaggaataagtgtttgaaaaacacaantttgtacaatacatgtaaaaccaacataccgaccctttaaaaccctctaaggttggcatcaacattagaagcacccacaacc

SEQ ID NO: 266295 - DNA, 449 bp, Glycine max
taagtttctctacacacgaataagatataaatgatatggttgcaccacaatcgaataacacacgtaagggaatcctacttatgagacatttaccttggattagatctttggatttcgaagcttcaacactgttaagagtaaatagcttttatgtggcctttgggcgttcctcttctgcctacaattgaagcagatcctgtcgttatcaatacaatttgaggagacgtggtttggcttaccacacctaaaacaaaagatctatgttgagaaagtagtgggtttgctaccactaccactatcaaaccgataacagtagtgggtttgttaccatgctacttaagaggggtcgcgtacggactttcctgattataagatccattctttgtattcttcattgggcttgtactcctataatacgccggcttgtcttgtgagacctcaattctaat

SEQ ID NO: 266296 - DNA, 438 bp, Glycine max
  unsure (1)..(438): unsure at all n locations
agctngtgctcgttntatttaaattcctatgatcatgagcaactaggtgtgtcctacctatgaaagtgatcaaataacaagcatagattcagaaggtactaggttgcctcctagtaacgcttctttaacgtctttagctggacgccttatgacttgtcggtcactgacctagtactttgcttacctttggctttggacttggtagcccgctggtcggccatgtgttgtaggcaacgctctaacctttttgcggatgagctgaggtgaactctaaaggtggtggcggtgtgtctattgcccgttaccggccatcccaatgctgctgtggtgtttcgccctgcgcctgcctgngggcgcagtacttcttgatgaaagctcgattggtagggggggtctgatgactntgctgggggcgatagacactccgtagaactgaca

SEQ ID NO: 266297 - DNA, 428 bp, Glycine max
taggttctaggagagcattcatccatagaataaccttcactttttcattcattccttccccatacttgcccctttgtttcttaggcacttagcttccatacctgaaattatagcatacacacttattaactttatttatacttacaatttttttaatcacaaaaatagaaacagtgtatatatactactttctttaaccatttcaatccttaccaagtgcctccccgaaatttgggacaaattttccttgaaccatcttctgtggatgatgctctcctacaacctaaaataaggtagcaaaagatacaactgaataggctcaaggtttaatcaatcaatcaattcattcagctcaaactgggtgcaagggataattcattcaatcacaacgttagatttttggctaagtagttattcataatcaaact

SEQ ID NO: 266298 - DNA, 438 bp, Glycine max
  unsure (1)..(438): unsure at all n locations
agcttgtagattactgcataatcctggttatttcgacagatgagtctgaatgaaatgtttcagaatcacaacctgttgagtcttgagactggtatattctagctctgcatagtagacagaaacaaaaagtcactccggtaaagaccagaaactgatatctcaatagtcaattgtgtcaaagtataaattatacttagttttccagagaaaaatctgtggaccatctgaatccaaatttactaactaataaatggaacctccaatacaactacatcattaaagaattctgctggacaatattctgtaaaaatccattaacttaattgatatactcactcataattgtgctatcttgttcgatggttggtaattttttcaaattgggatgttggtttccattatatctnttgcaaanatntgagcattacaaaataaaat

SEQ ID NO: 266299 - DNA, 388 bp, Glycine max
tgtacacacgggcacacaaggatgccacctagagtagacatagtagaactagaagcctattatcgcaattagctacgtgtagtattatatggttaattgccacattctatgcctccacgcataattaattattgtatctagggatcagactatatggtcaaccaatcaaacattaatggtcacttcccatttgtaatattacgtatcatgaggcttgcacgtggataattttatggataaaacttagatataattatttaaatgtgttttggtaaacaagtgtgtttggatctacttttaacactatggttcaagctaaacttacctcatatttgaaggggaaaaaagaagtggaagttactaactaaatagtaactttcaacttgac

SEQ ID NO: 266300 - DNA, 444 bp, Glycine max
  unsure (1)..(444): unsure at all n locations
cagctnttccattaatggagcaccatatactcttcattnactgcattcaatctatgctgctaatccaatttgaactccatgtctaggatagagttccaccattcaactttttaacatacagccaacaactcaattgtcctataatctggcagaatgctaatccattacaaatcacttacatgccaatggtaagaatatcaaaaagaaaaaaaatctttattcccctcttttcttcccctaattttgaggggaacaaaatatttgatgctggtgaagatgccatattcaggatatttaaccccttctgatgcatgtctcaaatctcatcccttgtatatcactttcaactgtattactgcttctagtacaagaatntatattattaatccactggtaacaagttatctcttatctaagtctaacacagtctgaggagtgtagata

SEQ ID NO: 266301 - DNA, 452 bp, Glycine max
  unsure (1)..(452): unsure at all n locations
tgccaactaanaccctagaatcctaggctgcgcccttctgcttggaactcgccagtttgactggctactccccatgcatggagaaatcgccaatggggctggcgagttcagttcggacactgcaaactcgccaatggaactggcggtttgcttctgcatgcatgccctttacgtcgaaaacagatccctgcaagaaaaactttgaaaacaaccccattcgacgaaatagtctgtaaaagtaccccaaaagggcaatttgcctgcatatgccattgtggacgaccatgattaaacaaccatcaccagaatgacccttactaacctctctgatcaaaacttctttacttttgtgtctgctttgggctacgtatcaaagcgtagggcaatcagtntctatatttatttttcttggagataaatagtttcatgttcaccctcgggtcttatatatc

SEQ ID NO: 266302 - DNA, 442 bp, Glycine max
  unsure (1)..(442): unsure at all n locations
agctntcctgtgaggcctgctcttccaaggaatcttgcagtcaacagatgaaaaaaatgtggtttccgacctattattattataacaaatgaccattgatataaaaaatgtcacttacaatcctatctacaatttcttttgttgcctcatacgtcatttgaccagattttttcgtgcgaaccatcttccacttcacatgtcatctaatgagaggtggctgatcaacaattgtgccagtgctcccagattgggctacttcctccaatcgtttctttttcttatcctctatcaacttttcttttagaaaatcataacccccacgagacaacacgtgaagggtagtgttttgtttatggatgacctgcgccttcttttaaacatcctgtaacaattacacattaggctaagttaatacacttgacaataatgcacaaaaatggag

SEQ ID NO: 266303 - DNA, 465 bp, Glycine max
tgtaggattatggggtacccatcacatgtggtactaggtggcggtcgggcgatggtgcacaacaagttttccacatccacaatgcgcgcataaacccaccatcccctgttgcccacctccaactgagctcacgtactcccacgtagcccatatcctcgtttctctcaataccgggtccccatcaatcctcccaagcttccacaacatccaagcaaaacaacattcaaacagcacaagctatcacagccaagcaaaacagagcaaaggcagaaaactctgctcaacacatcaaccaaaatcacagcttttctcacttaaagaccccagtaacaattccttcgatccaattcgttaaccattggatccgactccaaaatttactggaagtctctagtacataagcctacattgtgaccgttgggatctactagcaaacatccataactcattctgcactagactttc

SEQ ID NO: 266304 - DNA, 319 bp, Glycine max
  unsure (1)..(319): unsure at all n locations
agctncatgatgaatcattattgattcaatgaagtnttgatgatgacaaaggtgatgacaaaaagctcatagataaagaacaattcatgataacaaagatgatgatcccaagaatcaaagaatgagttcaagattggatcaagaacacttcaaagttcaaaaggaaatttgatttcaagaatcaagaatcatgtttcaagattcaagttccaagaaccaagatcaagattcaagactaaagattctagaatcaagagaagactcagtcaagataagtatcaaaaaggtttttccaaaactgagtagcacatgaattttt

SEQ ID NO: 266305 - DNA, 438 bp, Glycine max
  unsure (1)..(438): unsure at all n locations
ctcaagaatttggatttcatgttgaaggttgatagtttgttctgtttcttgctttctatatgccaccaatagcattatagccatatgacctatgattttttgcaaaacttccagcagagtaacttcaagataataaaagttcccaactcaatctactcaatacgctactatccaatgaatcaagctgggagatgatgaatgattatgcagacatctgtatgttcagtaagacaaattaattcatcacggatcagtagtttcttaaataaatgaatgcaacatgtttattaatgtatcaatattttcttgattaatttaattagtttaaataattctgtatagcctatgttatttctcttctctctgactntcccctctttcacatcatgaacaggtataagatatgtaaactagtttaacttctttgattgtaataaa

SEQ ID NO: 266306 - DNA, 426 bp, Glycine max
  unsure (1)..(426): unsure at all n locations
ntgagcannataaatgacaatagcgttttactcggatgtcttattgtgtcccgcagtatatcgagatgctcgaaattcagaacagaagctctgagcaaaatcaaatgacaataaagttttacccgtactatatcgagaccctcataattcagaacagaagccttgagcaaaatcaatctacaataactttttcctcggctgtccgattgtctccctatgtatgtcgacacgctcgaaattaaaaatagaagctctgagcaaaatctaacgacaataacgttttactcaaatgtccgattgtgacccgaagtatatcgagacgctcgaatttcagaacggaagctcggagcaaaatcaaacgacaaagaacttttactcggatgtccgattgtgtcccgtagtatattcgagatgctcgaaatttag

SEQ ID NO: 266307 - DNA, 347 bp, Glycine max
tgtatttgcttgacactcgaaaattattgtaattttttttggggctcctaaaatcaaaatctggattcacaaaatagacctcgtaaagctaaggcgttcttgaccttttttttatcctatctttagaaagaacaaaaattcaggataacaaacattcttagattttcgcttacattcaacccatagctgttgataaaactagaatagatttttttgtttctactacacgagcccatatcctcgcgttttatcaatctctattctaatcacccgtcaagctgatattatgggccagatgaccgaaatccgtaggtccatttgaacgaataatacagggtttccatatt

SEQ ID NO: 266308 - DNA, 237 bp, Glycine max
cgcatccgcactgttatggtgtcgcctaagcaaaacggacatccttgcggacttagtaacacttaggcctgattactccatgcctgactaaatagaagctactgcaattgcccgaaaatagaatggaggcatactcctgggaagacctttcgaactcacgacataaagttttgggactatgctccaatatccgacccggagcacttatccctttgaactctaggatatgatactcat

SEQ ID NO: 266309 - DNA, 291 bp, Glycine max
aaaattgctatattttacactttaactcgtatcattatttataatacgattaaggtctacactatggagaaccactttactggtagattgatccgcaatgacagttattactttaacgtttaaaaaacttatagcattatccatcccattttccaaaagttcaattatgtggatttggtcgcccattctccttttgtacatctgacctattgtgaccataagtattatttcttatcaccatgtgggttatttatgattgaacccccctaattgagttgattataaaccctt

SEQ ID NO: 266310 - DNA, 442 bp, Glycine max
  unsure (1)..(442): unsure at all n locations
agcttcatggagaatcaaaggtgattcattggttgtttgatgataacaatgatgataacaaaagatgatgacaaaggtgatgacaaaaagctcacagatcaatcaaagagcaactcaagtgaatcaagaacaattcaagagttccagataagaatcaagaagaattcacgactcaagaagaaagtttagagtcaagaatcaagattcaaggttcaagatctcaagaatcaagatcaagattcaagaatcagaagaaggcttaatcaagataaggatgaaaaagtttttctcaaacattgaatagcacatggttnttctcanaacatgtttaccaaagagtntttactctctgataatcgattaccatattgttgtaatcgattaccagtaacaaaatggatttgaaaaagttttgaattgaatttaaaacgttcccattaat

SEQ ID NO: 266311 - DNA, 339 bp, Glycine max
tctgagcagtagatgttcagcagtggagacatgtagtttttggtcaacatctggtccatttgaatcccctgaatttggtttcttgccaagtgaaaattctactggtgatgtaagaatcacacggtattgagatgtgttgttagtatgcaggtttgccccactactcccctatggtattgtgtctgttgccataggtcagggtttagattggcaccaaaaccactttttagaatgtcttcatttcatatagattcagactctttcactaaatcctccactcaagcagtatccttcaaaccattctgtcccttttgtgggatactgctacggagaaaacaa

SEQ ID NO: 266312 - DNA, 450 bp, Glycine max
ctaagtcacctgagctgcagctttgtccgttttaattttcttttgctctaaatgctggccgatactttcatatcggcgtaattatggtgcaagctgtaacaggtgtggcgtatggagtctgggataaaaataatgcatggccatataaaaaagaaagggaagcttcagaagagctttattttggcctgaaaactgcacaaggtcttctagaatttaagtgccaaaacaaactccacaagcaaaaatgggttgatggaatagaatttttacttcgtagggtcaactctgtcgaagcaacagagcattctctagaattttaagtattagtaccagtacatgatttgtttggattgtatatgccgataggatttagaagagtgaaacataaaaaattttgtcaaacagatgctacctctacattacataagcaaagaaacaatactgttcact

SEQ ID NO: 266313 - DNA, 434 bp, Glycine max
  unsure (1)..(434): unsure at all n locations
attatgtccgctggtttctaaaggcctctcccacttagttggatgggaatctgggtatgatggattggtccatgaaattgacatggcatcgatgaagtcggttactgattctgcggtacgcagagcttggttttgtgccctcttctgtctccactgctcactggcaaactcatattcaaaattcacagtataaaaggctgtctgaaaataaataaataaaattaagaccacctacaaatcagtaccaatgttgntgtataaaattgatacatttaagttaggtatactattataagaaaatatgtattagttatatactgattcatttacacacacatgggcacacgaaggattaacttacaattatgtatcacttcaatttttacgttaannatgaacaactatcaatatataattaacggatatgtattgcg

SEQ ID NO: 266314 - DNA, 410 bp, Glycine max
gtttattcagaaaaattagagtctatctcttttactctagcgagagtgattctcctaagttcttgagtaattcaagaacaccctggctatatcaaaggtctatcacatcccttgtgtgttgccctcgccggaaagagtgcttctttccttccaccatttcatcttcaaccttgttctttcaaaccacaattccagagaatccaattctgccagaattatctcgtgaccataactctcgttttactcattcagattaagtgattcttgatcctaaattgaaattcaagacgagagcttttccctcatttcggaatcacctcatatggagccctgtatctcgagtatagcgatttctatatttctgtccaatcaccacttaacctacgctcttaccatctcattcatccatt

SEQ ID NO: 266315 - DNA, 454 bp, Glycine max
  unsure (1)..(454): unsure at all n locations
tgactcaagtattcaaatttggttttngttagtgcctcggacagaatgtcagcactntgattctctggtttgcagtacagtaacttcacttctccttccctttgaacttctcttagaagaaaaagctttatcttgaagcgcttagttttgccatgaaacactggatcattagcaattgagatcgcagcctggttgcccacaaaaatatgcgcgctttcttcttgtttcatatgcaaatttgacatatttttcctgatccaaagagcttgaatcactgcagcaacaacagctacatactctgcttctgcagttgatcgagctacaacttcttgctttttagaacacacagaaaagactccacaaccaagggaaaaacagtcaccagaggtggttctcatgtcatcaatacaacctgcccagtcactatcacaatatccatgaagcttataattat

SEQ ID NO: 266316 - DNA, 420 bp, Glycine max
  unsure (1)..(420): unsure at all n locations
ttngagtcagcctgtaaatcatgagcattgtttggtcttattgtaaaggatataaacaactttagattcttcaagacatgaaattctaaacaaataataggtacactagcataaaagtatataacaaggtagcgaacaaattaccttattcatntcattataattcctgtcagaatgaccatactttgactgtccaagatangcttggtcctgacctttaaatactcccaagggttgatggggcataggctgtgaatttatgaacatgttgtttccaattccataaggttccactttaacacccagatcccccatcgngtgatactgaaatttacgagatacaggaggtcttcgatttccctgaccaataactttggattatgaaaatcatngccatcaaaactactattntctctcata

SEQ ID NO: 266317 - DNA, 446 bp, Glycine max
  unsure (1)..(446): unsure at all n locations
agcttatcaaaatcatcgatgatttcattttgttataatcgaaagactttttttatatatataatacattaaggttgtaattctaatttgatacaaattatttaagtccttatggaaaaaaattcgtttgaaaaagaagatgataaattccaccatctaaattaaatctagttgaattagtttggttaattagttatttttactttaaatctcaatctaaaatttggttcaagttttgaatttatccttttaaatctgaactaactagatgacctagtaatactattctaaattaatatattgtacactctggtacttanatttttcctctattcttttcttcttcattcatttcgatgttgtaatgattttatctaattaccaagtgtctttttttagaaggatgctcaaagcgccttaatttatcatatttatatttatgtttc

SEQ ID NO: 266318 - DNA, 367 bp, Glycine max
  unsure (1)..(367): unsure at all n locations
aagactctagggcacctgatggatcaccanattcctgcaccaagcaagcacctaggacagaaatttctagatcattggctgactatccttatggccaaagttaatgattggggaccccaacctttcaaggttctggattctcggcttttagacatttcctttataagaaggtggcatgattggtggtcatctacctaacaaagcggatgggggggctatgttctcaaagaaaaaataaaacgactcataaatacgatgaagatatgaaataacgagaattgtggggacacatataagaaggtaaagcagatccagcatgagttaaacaatcttgaagaggtgacaatggataggcaattatcatccc

SEQ ID NO: 266319 - DNA, 161 bp, Glycine max
ggaccaccacctggcggcttagcctatatccgaagaaccaaatgtcccaaacattcttctaccaaccagctgaaccctgggcttgatgggcacgaaccggaaaaaggggatttcatcagggccttatggagcaacgctaaggagacgataaaaaccaccct

SEQ ID NO: 266320 - DNA, 419 bp, Glycine max
  unsure (1)..(419): unsure at all n locations
agcttacataananaaatgattcttattactttttatcacgacaaatgagaattatataaatttaaagtgagatcaaaacatataacaaaacttgatctacacttagctaaaaagcttacataaaaaaatgccacgcaagctggtaaatactactgaactacatttgaaataatcaaaactactaggcaggaggaacatttgaattcacttcgttttcttctaactactctactcgccatttttcatatccttatctatgtcaaacaactttgtgtcaaccccaaggactaacactagtgcttgacacacaaccttccaaaagccctcacagtgggcgaggacaatatatttctttgccttgagcaactaagcatccaaactatctttggttgaaatactctcacgcaaatgagcactt

SEQ ID NO: 266321 - DNA, 423 bp, Glycine max
tattgtttagtagtgcgataattttattaaataaaatattcataaagtgcgtataaatagagataatctgaaaaatcagtcatgatatccgcaatgaatttaaaataaaattatatatgtatatatatactccaataaaaatcatattaaactcaccatttaggacattttgaataaataaaatatttacataaagtctactttattaaattaattatttgtgtgattctacaaaaaacagtctacttttatataaatgttatacataatttacaatttatttgaccaatatttatttttattatctttatttttattatttaaaatataaccaaccactatttctcttatttttttctaatgggttaccaattgttcatgtacaagcatttcaataaaggcaatctcttattattattatta

SEQ ID NO: 266322 - DNA, 457 bp, Glycine max
  unsure (1)..(457): unsure at all n locations
agcttgatatcacaccacaatatgggatatcacaccacaatatgggacgcagtcactcgcaagtcctgcctcatgcatttttttaagataagatttggaatgcgccgcttcgagaaccatnttccttgccggagtatgcatacaagagggtacggtaactcacaacatctggctaaaggaaggcctctttcatccttgcaagatgtttagctgccaagtagaccttattattcttaatataaagagaaatgaggatgttatatgtcctagtgtcgggtaggcaccaaactctcccattttcggaaacagaaaacaaccttgtcgtaaatgtccacagttttccatacaagtgaatcatctgcggtatgtttaagtattgagtgcaactgtattcaaggccctgccttgtttgatcatcctagcaaaagtttcacatgctgcgcgaaattgaccaccc

SEQ ID NO: 266323 - DNA, 292 bp, Glycine max
  unsure (1)..(292): unsure at all n locations
atatttaattaatttaaattaaataattatatttaaaattattgaattaataacttagtacataataatttattaaaagatgattggcttaacgaggattctaaatttatctgtctcttattanattttccacacgtgcccttgttcccattctttatgtagcggaagagtatttattggaaagtcgaaagaaaacataaggcaatggattgggtatgagatggtgaaatccgggaataagaatatggaatcaaccgcaaaagttcacccttccaatgatcctgaactcgat

SEQ ID NO: 266324 - DNA, 455 bp, Glycine max
  unsure (1)..(455): unsure at all n locations
ggctgcaacttctccccattttcttatattttggagaagtgaagtgaanaagggttcagccccttaggcacttctctctctttcgaatttgcttggaaaaatagtttccgtgaagaaaatccaagctgaggcgctttcgaaatgtttccgtaatgtttccgtgaggaatttcgcgaaggtttcaaccgttcttcgacgttcttcatcgttcttcgatcttcaacgggtaagtacctcgaaccaagcttttcgattcattctatgtacccgtggtggtccacattgtgtttcgggtatttttattctcgtttcatttactttttatacccccttttgacgtgcttaagccattttatttaagtcatttctcgcctacacctaaaataaaataaatttccatcgatcgtttgaattggattatccgttaacttcngctaaaatgaattccgaccgtc

SEQ ID NO: 266325 - DNA, 433 bp, Glycine max
ctgaaagctttttgagatatcttcctgagaagctagagcttaactacacacacccttctaataactaagctcacctccttgagaagctttcttgagaagatcctaaagaagttagagcctagctacatacacctatctaatagctaagctcaccttcttgagatgagaagttagagcttaactacacacaaccccaataatagctaaactcacccccatgccaaaatacatgaaaatacaaaaaagtccctactacaaagactactcaaaatgcccttgaatacaagactaaaaccctatactactagaatgggcaaaatacaaggcccaatagaaggaataacctattcaatatttaccaaaatagtggatccacttgggccatggctcaaaactacctgaggtctgagaccccgcgctttttacactctac

SEQ ID NO: 266326 - DNA, 486 bp, Glycine max
  unsure (1)..(486): unsure at all n locations
tctgagtcacctgcggcatgcaagcttcatgatgatgaatcatgttgattcttgttgttttataatgacaaagatgatgacaaanagcccaaagaatgatttcaagaaagagtcaacaagttcaagatcaagtttaatttcaagtttcatgagaagaaatcaagaagatttaagaatcatgagaagattgatttcaagattcaagagaagatgaattcaagattcaagagaagaaatcaagaagactacacaagggaagtattgaaaatatttttcaaaaaacaacatagcacagttttgtttttcaaaagagtttttctcanaattttctaagttaccagagtttttactctctggtaatcgattatcagtttcctgtaatcgactaccaatggcaaagtttgatttcaaaagttttcaactgaattcgcaaagttccaattgatttcaaaatggtgtaatcgatcacaagatattggtaatcga

SEQ ID NO: 266327 - DNA, 418 bp, Glycine max
cggccttgaacctgcttgcagaaaagagtcagagtcatgctgtgagatgttgaatattgtaaaaggtgtgttgaaaagcaaatcaaagccttgctttatagactcttcatgtctagtctagacaaccatttagaagagttataacttttagaaaaacataaagccaatttgaaaagtcaaaaccctttgaaaggtacatcttttgattattcagaacaaacactgcaatcgttaccaaataatgtatcgatcacaaggctttatgtaaaagatggactttccattcgaattgaatttaacggtcaaggactggtatcgatacccaacattggatcgattacagcttttgaattattggacggtgaattcaattggaacttttcaaacatttgctctggtatcatacacaattggtatc

SEQ ID NO: 266328 - DNA, 243 bp, Glycine max
acaaaactctcattcatcaaaagtacgacaagtgttacacatgcttctatttatagacctaagtagcttccctgagaagctttcttgagaaaacttccttgaaaagcttctcttagagaacttcctttgaaagctagagcttaactacacacacccctctcataactaagctcacctccttgagatgcttccttacaaagatccctaaagaagctagagcttaactacacatacctctctaat

SEQ ID NO: 266329 - DNA, 192 bp, Glycine max
tgtgcctctagtgcacgacattcctacaaccctacatgtaatcacgcaaatattctagccttatgcaattgctgattatgtccctgtcgggtatctttttcgcgccttttgcatgaatcatctaaatgtactgaggcctggtgtgttgggggtgctatcaatgcccaccaatgcaaatataccttgtcttaa

SEQ ID NO: 266330 - DNA, 426 bp, Glycine max
  unsure (1)..(426): unsure at all n locations
agctngngctatttattcttttcatctcttctctctttgccaaaaagaattcgccaaggactaaccgcctgaattcttttgtgtctcccttctcccttggcaaagaattcaaaatgacacagtctgagaattcttttgattcttccctttcccttatacaaaagttttcaaaggactaaccgcctgagaattcttttgtatccccattcacaaagtatcaaaggtttaaccacctgagatctttgtctgaacacattggagggtacatcctttgtggtacaagtagagggtacatctacttaggttgttgactgagaacaagagagggtacatctcttgtggatcagttctagtggagggtacatccattaggttcacagagaacaaggaagggtacatcccttgtggatctttgcttgaaaagga

SEQ ID NO: 266331 - DNA, 376 bp, Glycine max
  unsure (1)..(376): unsure at all n locations
gacttcgccggcagaaagatcaaagcattgttgaaaagaggcttatntaatcatcccacttggacgaatgagaaaactggggccaatgaagagggtgagaatgatggagaaactcatgccgtgactgccattcctattcagccaaatttcccaccaacccaacaatgtcattactcagccaataacaaagccttctcttacccaccggccagttatccacaaaggcccatcctaaatcaaccacaaagtctgtctaccgcactttcaatgacgaacatcacctttagcacaatccaaaaacaccaaccaagaaaatgattntgcagtgagaaagcttgagaattcactccaaatncagtggcttatgctgacttgc

SEQ ID NO: 266332 - DNA, 413 bp, Glycine max
caagcgacctgaggcatgaagcttgttcttaaccaaagacttattctgtatgttttgctggcggaacacgagactgtcgagaagaagaaacaaagattgaagaccgttctgagacccattaattatatcaacaactacaacgcaaaacaaaacaacatgggatacctgaacgaccagatagagtatcatagaaaacaagttcagcattacaaggaagtctcactatggagccaaacattggacaaaaccgttgggatcatggctaaggtggattgcattgtctacgctagaatatgttccgtttttggaggctacattttctattgcaactgctatgaaatcaatgatgacaacaacatcaacatcatttgctgatgcctcttggaacaccgcgagttgtacaagacaattat

SEQ ID NO: 266333 - DNA, 406 bp, Glycine max
ggaccttaagcgactgggctgcagcttccattcttggagtttatttttgtattgactgcatctggaggatctacatatgttccttaatcatttcctttggaattttgttcatgaattatcatatgttctatagaatctcgcaatgccatctagcatattctttcttgacaatatagcattagattcatcaaaggtaacatgaatggattcctcgatattcatagatctcttattatataccctatatgctttgctctggaatgaatatccaagaaaaatgccttcatcagattttgcatcgaattttcctagattatctttaccattattaagtacaacgcacttgcaaccaaaaacatgtatatgagagatattaggttttctaccattaaataactcatatggg

SEQ ID NO: 266334 - DNA, 190 bp, Glycine max
ctatctacaataaccagcagctattaatctaaataacaatacaatcctcagtattatccataaatcctacctgttgaaagagaatgtaatatactggggaactgtggctaacgctacttagaactccttaaacatccactcaatggagctgaacttcaatatatatggttgttcgaaatattctttgttg

SEQ ID NO: 266335 - DNA, 341 bp, Glycine max
taagaaccgaaacattttcagtggtttggattatatcattaactacctttgaacataataacgtggggtatattgttctctgtatttcgaaagaaaaatgattaacaccctaatttgcatgcattggaagacataaaagagacttctatgaaaaaatgaaagaaagaaagtgatatattacgaattgggaagaaactttgagtttataggaaagacaatgaaaaaaatgcctgtttttaaaaatcatttaccaatgtgcttcgaatctccatttaattgtgttaaaaggagagacctttttacaaaaaaatatattcccgttgatttgatggcatattttt

SEQ ID NO: 266336 - DNA, 350 bp, Glycine max
  unsure (1)..(350): unsure at all n locations
agctttctctctctcaaagcagatatgttttcttccaccaccacctccaatcttcgtctttcacacagagagagatactgtgtgtgaaacagtnttggttcatggaatcctttttttcttttacacaattccacacatcttattcttgggatatgatataattaaactcccttccctctcaatatataactttccttttttaaattaataatttttggtttaaaaaaccgccactcataatccggatggattttgggttgggcaagtttgaaacaaattttgggctttctgtggtaatgtggtggctatggattaagactcatgttgagtggcgttcatggcggaattgt

SEQ ID NO: 266337 - DNA, 467 bp, Glycine max
  unsure (1)..(467): unsure at all n locations
ggacctataaaactaagctgcttaaaatnttgaaaantattgctattattattatttcattattattccaatttcataattcttgattcacggtattatccaggccattaccaccatcaatcacatgttgaacccagtgtacctccagtgcatgtttctggatatatgccccaacgtcatcaatcacatgcacaatctatntatcaatcaacgagcttctctggatatatgcctcaaggatgtatgaacaaagttntcaaacatgaggattctcattatatatgcctgaatactcatttcaagttcattttatctcaaatgttntttaaggactctcacaaagggttggtatcactttcaacacttcgtcatctgcatacaacccaccaccattgagcccttgttatcgtctatcattatctactcagatgcatgacatatatcatgaggatgangaagaagatgat

SEQ ID NO: 266338 - DNA, 250 bp, Glycine max
  unsure (1)..(250): unsure at all n locations
actcaactaagttccagggtcgggctttcaatcgcagatttttttatctgcccaangaatgcataagcgatgctcggacacacagtgaccaagtacttctctctgctatacataatgccaagctctggatatatctaataacaagtatttccataaattacggtttcaacataataagcctctctgttttcaagaaaacaggtcgacctaatgataacagagaatagatacttaaacttatcagagattt

SEQ ID NO: 266339 - DNA, 453 bp, Glycine max
  unsure (1)..(453): unsure at all n locations
agcttgagaggactttatgagattgatgttttgatgaggaaggagaaaaagaaggaggaacatcattagaaaaagaaagaaagatagagcctttgagagaaatgagatattttctatttgtatacttgttaccctcaaccattctcacttaagcgccacaaaaaacttgcttaggcacatgtgaaactgcatataagccacgactcgcttaagttagaatcttccctcgcttaagcaacaatgtggctagcatgaatctctcatttgccactcaattctcactaggataaacaacctataaggttatcgagacaaatccaaaccaccccatagataagtcacatactntattacttaagggttttaaatcctcaaaattaaagttaatttctctggcattttaaatcaaacactcaatccattatgagaaatattggtacaatggacactcca

SEQ ID NO: 266340 - DNA, 428 bp, Glycine max
  unsure (1)..(428): unsure at all n locations
tatagaatgaatgtctcaactctgcattcaagtgagatatcttaaaagatttgaatgaagcccatttgtgtgataaattcagtgcttccctatgaagatatcaaccttgctaagctgcaaagacatcatgaaagccttacatagaagatttatcaaatgctacaatgagcatacaacatcataatgtagntgtactagagtcaacattagaatggtataattgaggactctgagaatgagaacatcaaaatgatactttgattagataccaaaatcaagacaagagatgatgtagtcctaccccgcaagggcattggatagaagactccaagtagattgtgctagagatccaagggaaggccctanggttctcatgagccttatggtaaattctgagcccatggactaagtatgagcccgcttatctt

SEQ ID NO: 266341 - DNA, 323 bp, Glycine max
gtgcgatgaaatttaatcgccaaagaagtatatctagaaatattatgacataatatattataagactcttaatgtataataattaatgctagcatatgaccttaaaatactaataaaagatcataagggtgcgttgttctaacataacgagtatgggctcacaggctcaagtatgttatatgtaattggattaaatagctgaaagaataatctttttatccacaataattatacttgcctatctatatatatgaggggagatatcaaatcattctaagattaactgctttaagttattcttcatttttactatttatcttatt

SEQ ID NO: 266342 - DNA, 454 bp, Glycine max
agcttatgctgcaaacatctacaacagatcttctcaacctcagcagcaaaatcaaccacaatagaacaattatgacctctccagcaacaggtacaatcatgggtggaggaatcatcctaaccttagatggtcgaatccttcacaacagccgcaacaacaaccttattttcaaaatgttgctggcccaagcagaccatacgttcgtccaccaatccagcagcaacaacagcaacagccgcagaaacagcaaacagttgaggctcctccgtaaccttcccttgaagaacttgtgaggcaaatgactatgcaaaacatgcagtttcaacaagagaccagagcttccattcagagcttaactaatcagatgggacaattggctacacagttaaatcaacaacagttccagaattttgacaaattgccttctcaatctgtccagaaatcccaaaatgtg

SEQ ID NO: 266343 - DNA, 467 bp, Glycine max
tttagcaagggagaacactcttgatgcataagcttcaattctcgatctaaatttaaaaaaaggaaaagaaagacaaagtccttatataaattagggtaaggtaaaacgcataaagcatggtaacacaatgaaggcatatgatagcatatatggccacaaagaatagtaatgctttggtttttagaataaggatgtttttctctcactacctgatttttctatccctttccacgtttccctacccctcctaatctttgttatcttattactagtgctgtttaaattcctgcattttgtatctgtattaaatattacgtttcaattttgccaaagaatacaaagtaccactcattttataataattgaacgagaaagggtgtgtttggattgcaagcatggttaacggaatctacgttgaactcaatccattattcacaactgaatccgacgtgaatgtaacttattcg

SEQ ID NO: 266344 - DNA, 345 bp, Glycine max
ctcctcccttgagctcaaactccttaatgctcctcgatcaacatgaaacaaggatgagtttcaggacattccttaataagctcgatggtacttttggaatctgactcaactatgaactccttgaatacatgactcttatcaagctacaagccaaaaaaaattgcccaaagtttaactgccaaaacagaacagtaaccaatatctacatcaaaggagaataaaactgatccaatgtgaccactaagggctcctccaactgctgcctttctcgaagctatatgaacaattgcatcatatgtcaatttgaactggtttgttggaggagggaatcacttaatgctaaag

SEQ ID NO: 266345 - DNA, 406 bp, Glycine max
  unsure (1)..(406): unsure at all n locations
cgtgtgattgagaggctcgagattgatgctgctganattaacaagaggtcattcaagtatgcctgggtgcttgacaagctcaaggctgagcgcgatagaagaattaccatcgatattgctttgtggaagtttgaaaccaccaagtactactgcacagtcatcgatgccctcggacatcttgactttatcaagaacatgattactggtacctcccaggctgattgtgctgtccttatcattgactccaccactggtggttntgaagctggtatttctaaggatggacagactcgtgagcatgctcttcttgctttcacccttggtgtgaagcagatgatctgctgctgtaacaaagtataataaatctaagctttctttgctaaaatgaatggattgatgagaattt

SEQ ID NO: 266346 - DNA, 392 bp, Glycine max
  unsure (1)..(392): unsure at all n locations
acccagcttatcagatgttgcatttcggtatcagcccctctattgttgaacgatatgcttttctgcatngaagattcgcttgatcggtgtgcaactgatggcaatgtgctcctttcacgctagcaagatgttttctggtttccgcatcgaccttgtcattatcagcaataattatctttccatcctagtcaatccccagcgtatggatggccaactaacgacttggccaacttcatgattgtgaatcccacagatcaacttcaccatccaacctttcccctccatgcactggtttcccacgaagcctgaaaggacaaccacacttcctactcccagtgtcttttctaacgaattctttattcctacacttgtacataccactcctttcacac

SEQ ID NO: 266347 - DNA, 471 bp, Glycine max
  unsure (1)..(471): unsure at all n locations
agtcacctgcggcatgcaagctntctngcaatactgataatgtaggttgcgttcatctttatctctnggnctgcaggaagcatgtaatacaaaagttataggaatgtaaaccaagataaaggcaaaagtgaggaatgtcctcacaaggccacaacaatattttagatcattccatgtggcagacagagataacctcagctagagacaatttcatgatttacattaatcaatcaagtcaagaacacgatatattgcagaagactaaaacagcttattttatctgccaatcaaacttttccaatctagatgtgtgccactcagttacagtaaataattcaaggttaagtgttgatccactcctatatattaagttagatcatacagtggttttaatcatgaagtatgactgtaggtttgacaagtgatgaaagttttcatatttaataattcagaacagccattcctatcata

SEQ ID NO: 266348 - DNA, 455 bp, Glycine max
  unsure (1)..(455): unsure at all n locations
tggatggatcaagttcaacgtttatccttcatcaaggtatatgagaatatctaggatctggtgatgatagaagaggccgntgaagtcatcacatctctcgctcaatactatgaccaatcactcaaatgtttcacttttggggactttcagttagcgccaaccatagaggagcttgaaggggtcttatgatgcccactgggggtaaggaagccataccttttttctggattctatcattctatggcaagaatataaaaagtggtcaacatctcggaacaagagctagaccgagtgaagcagaatatgaatgatgtggcaaggataccaaggaagcactttgaggagaagaagggagctctggctagccaaggagagtgagcaacattcatcgacgtattagctctgctagtgtctgggatggtactattcctgaatatagacgggttggtggatct

SEQ ID NO: 266349 - DNA, 225 bp, Glycine max
tgaggctgtgcctatgagataaaggatcgacaccgcagaacgttggaggggcctgggtgaaatgggaattcttttcaattgaatggctatgggctactgccctcatggcgaatgactacttgtcctaaccgcaagaaaaacccttactgaagatcgctatctgaggaaaaataagggtgagggagtctgacacagggcagggggtaccgtgactgacctggtcaa

SEQ ID NO: 266350 - DNA, 349 bp, Glycine max
ctgtggtggaataagatcctctctcagaacaatattactttatcggattgaagcttggggaattctcttttggtgcatccctaactgccttttataatggagaatagatatgtcatacacaaaccggaatagtcgatgcgataaatttaattaatacgtaacgttgattaaatataatagaccgaactaataccatatgagatggtgtgaaaagatcaaaatctacggacaaaaccagactctttcaagtgcatgtcttatggtggtggaaaattatttacaactacacttcctaaccgtaaaattccatgatgtcagtaacattcttaatgtaaagtatgattcataa

SEQ ID NO: 266351 - DNA, 385 bp, Glycine max
  unsure (1)..(385): unsure at all n locations
ccaagcaccgagctgcgctaccaaaaaagacctcaatttttgattttcatcggataaatttgctcattggatcatttgttgtcaagggattcacaaccatcttgtcttagtaaacttgatctcacgtttgaaagaagaactgccttatttctatgtctttacccttacgatcttatgcttctcttgactctgcatgcttttaactntttcntttttactatatactgatgactgcaccttcaatagtttactaacggttaatttcttcccattactcttattaaggttcaccttccatttcaggagcaggaattaatcaactcaacatgtctcattcccacttaattagcaaagctttctgaattaacaaaaggtcaagggacta

SEQ ID NO: 266352 - DNA, 373 bp, Glycine max
tctggctcatcaattccagcctttacttcagaaactctctgttttctttgctcttcagacaagttaatgactaaaaactataatggaatatgcattactccacaataaatcataagaatcaatgtttactccatcccaataaaggctttcaatagtttgtcatttgtgtagttcactacttaaagaattaagacattcttacatgaatattgttaaatccataagaattgatagagagccaaatacttgtgtctcacaaaatgagtattagaattcactttattctatgatgattgcattagaatgcttctcccacccactcaactaacaaaagataacaaaaacaaggtgggcatcaaacataatgggagaa

SEQ ID NO: 266353 - DNA, 131 bp, Glycine max
ctctccacagtaatcatccatccatagcaaagaaggagtgggggctctacacttcactcggcggaggagcttgcggctccaccataagtaactctagttgatatcttgcgcgaccgtgcccatgatggcta

SEQ ID NO: 266354 - DNA, 462 bp, Glycine max
  unsure (1)..(462): unsure at all n locations
tggtgctatactaaccgctacctttactttgagaatttttttctcttgcgcccattgaatcggatgccataattgcgaatgctatattattcacaagaatttatcatgtgtataatcacgaagcacgttctacattcataccgtgaaagccaaagtggtaattgaacaaaatctaccaaactttgcttctttttgatgaaaatactcataccatacaggatcgtagatctttttgttgtctgccccgatttccttgttctagttacacaactttctgaaatggtcatatttattcatacatgcagtcaatagtttaagagtgttcataatattattgaatcagtaatcgcctctattcatgaatagtcaatttattgacttgtatacatttaaaatgcattaatgatattcttttattaattagcttctactctaacagcgcatgaattanattcaatttta

SEQ ID NO: 266355 - DNA, 456 bp, Glycine max
  unsure (1)..(456): unsure at all n locations
agcttaacttggccagaatatctttctcttctctttttatagagatnggtctaatgtggcttctcagatccccatttcagattcttcttaggttcaaggacaacttttattttaaccggtgttatgaatataaagcatctcctaattttaccaatgattaatttctatcaaagaattgatccatcacttttaatagaatttcaaagacacctttctagaaacaaataattaaaaaaatataatacagaatgtggaagtcatcgactcattgatattgcaattttaaaactcccctggatcatgccattgtatcatttctaaatacaatgttgtgatgcaaacaccaatttactgtgctagggaagattcttgatattgacatactttataggggaaaacattcactcctcaagcctctatctttacgctaacaaaaaaatgctatcttctaatttc

SEQ ID NO: 266356 - DNA, 415 bp, Glycine max
  unsure (1)..(415): unsure at all n locations
gccaaaaccccttcaaaaatctaatttcaagcttaaataggtgggatggcccgtgctcgtgcacttagcgcaaaactgaatggcttagcgcgcataagtggattntggcttaacgcgcttctctcacttatcgaatgaactgaaacggtgcgcttgacgacctggagcggtgcgcttagtgaacttgacagctcatcttcttctgaattcttccttacgcttagccactgagtgtcgcgcttagcgagtgcttgctaagccaaaagaatggcttatcgagaagatgaaaacaacactnttgccaatttggctaaataacctgaaattgggagacatttatttttaacacacacaccaaagggttattatctattaccttatttaataaaaagacttatatattacaaaccactat

SEQ ID NO: 266357 - DNA, 424 bp, Glycine max
agctttaagctcgatagctacaattactttctattccccacatagagaacgtccaaggtgctgtcatgaccttcaaaggcatgggcagagcattgacgttatcggcgaaggcctggcacttgtggcactttctcacatggatacaacaatttgtttccatagtgagccattaataccctgccctcaaaatcttctgggccatggcgtgttcgttggcatgtgtcctaaaggatccctcatgcacttccactagcatctgctcagcctccctggcatccacacatcagagcaaaaccatatcatggtccttcttgtacaggatattttcacttaggaaaaagccagttgccaaccttcacacagtctcttgcattattggaggccttgtgggtatccttgatcctatgtatcgctgattcgaaga

SEQ ID NO: 266358 - DNA, 430 bp, Glycine max
  unsure (1)..(430): unsure at all n locations
ggaccttgaaactagcttaaaatgtttggctttttgccactcttttgtggattngtttggcgttactgattgtgcatcttatcatttgatattattttgctatgcatcatataagtgcgtgagtggaaaaaatttctagttagaaaaattcttcgaagcaaaacttctgtttaatcgatacagagctatcataatcaattacaacaattgttgaagcttatgagtaagtcttgatcggttaatcggtacgatagactttaattgattacactgttgttgaacaatgattgattttttatgagtctctgctttactcgattaccagatggataattgacacttctctctngttaagttgtcagagaccaacaagacacgctaatcatacctaggcatctatttgatacattctcttgatgatgtccaatgt

SEQ ID NO: 266359 - DNA, 465 bp, Glycine max
  unsure (1)..(465): unsure at all n locations
ttatagatccatacgacaaggattcttatcttgtcccttcttttcagtgcgccgcggtattcagaccaagagttcacntcccatcttatctcaatcacctattatttgaattccttcctatccactatatgcatatctatttgtcttggcgacgtacatttgtatacaatgaccaccagaattaactctatacgtctgaaaaattatgtagctacttatattgtgtcttaaaaaatatctctcattgaccgacagttatacaagtagaaagagaaactctagtgacactcttaacatttcttttaagacatttttatgattgattataatttattggaaatcattaattttgataagcactccttctcattgaataattctctttcctgacttaatgtaaatgagaatcagaatccatcataattgatgatttcaacaaattatattaattatagaaagagtgta

SEQ ID NO: 266360 - DNA, 238 bp, Glycine max
acaccagccggaccgggagaaaaaaccacaacaaaaggacggaccagcctgagggccccagcagatccgaacgccgacggaaaaacgcaacacgccggagacaccacgccaccggcaggactaagggacacaacgcgaacacgagacatggccgaggccagccagggcaaaggaccgcccaatacccgggacaaaccccactcaaaaaggggcagcggccccacccacacaacccaaa

SEQ ID NO: 266361 - DNA, 328 bp, Glycine max
cactattttttggggaagtcataggtaatgcaaagctgtgatgccattttaaagccagagatggttctggcctgaaataattgtgctaagaccactttgagcaatggggaatctgaggagtgagttgaattgctgctattcctaaattggccatgcttattttcccttctgttaccaaggttgccaataggatcaatccgagaatgaaggtggggtgggagcctataattaggaaattggaccctaagttggacaaatcacaccacagaagcatctctatgggtggcagaatcaccctaattaatgatttctcatcactatggccttg

SEQ ID NO: 266362 - DNA, 449 bp, Glycine max
  unsure (1)..(449): unsure at all n locations
agcttgttaagtcatggaagcctcaaatttttcttatacttcgnggagngggccactcaggaatgacctttattcacttagggttcttgggaatcccttgatcactatttaaaatattaagaaaagtaatgcaataaaacatacatttttcagtattttcatgttgattattcctaccaaaaagtatggcaaacctaaggtgtcccatatgagtacctaagtttgtattgaaactaaaaataagaataaacctacctaatgagtccctatgtgcacaaatcatgaagatgttggatgcacgagtgattttacaaaagagggttacaccactcaaaacattcatcataccacctattttagggattttgtgcctaataatacctattttggacaccaataaagcacaaggatttaagctcttgtgaaccaaacccttatcttacaactcc

SEQ ID NO: 266363 - DNA, 457 bp, Glycine max
tgaagctcaaggtagagcttgaagaagttttggctatttcatgcccaactcctgtgagtggcacttgtattggttgatgcatcttcatatatttgatatctatcttgcattatgcatcatcatggttattatgaacaaaagtctctaagctaggaaaatatcttcaaacgcaaaaactctctatttttaatagattacaaaagtgtcgtaatcgactacaacacagtgtctgaagcttaaagagttaagcctcatattagtttaatcgattatgatactattgtaattgattacattatttgttgagacaatgactaatatattcaagagcctctactttaatcgattaccaggcggattaatcgattacttgtctcttgtttgagtgtttataggagaacaagaatacttttatccgttacctagagcattgactcgactacattgttcttgagtt

SEQ ID NO: 266364 - DNA, 356 bp, Glycine max
cagagagtttatgcattgaagaggtttctaactttagaaacaatcttcctatctctacatgatgatgcatgatgtacatatggatagattaagattaagatgcaacattcaatacaaatgtcgctcaatgagttaggcatgtaacaagacaaaactcttcaaactttaaagcttattcgtcatgttgccccccatactttaacactaccaagtgaactcttgatgtaatgttaataatttctcaccatttatagttattccaactattaccttcaccaaccaatctactctaaccatgagttctcgtgggagaaactctagccacttatttcactcctaatccctagaaatctaac

SEQ ID NO: 266365 - DNA, 392 bp, Glycine max
  unsure (1)..(392): unsure at all n locations
tcattatctattngagnttaatatttatgcactaactgtcatccaactacagancaccgnntgaattactttaagataattattgtaaaaagaataatagttatacactgacagagtgaagaggtttacaccgtcattcaatcacaacctatcatgcatgggtagattgttgacctttgcgataagtactttaaagtaatatcaatggtgattgtgattgcatgtaatgtaaactatttacaccggcatatatagctaactcttatttaaagtcacaaacttccatcatggtangattggatgactttttcactgtagtgctaccctttatcttattttcttaggttaaggattactattactatgaacccgtggaaacattaaataagctt

SEQ ID NO: 266366 - DNA, 416 bp, Glycine max
tgctgggagatctacgactcacctaagtgagatttcgatgttcagttattttaagatatctcaccctacaatcgatagcgccaaaaggtttatgacaatagtgggaagagtgttctcatacagttgataagtctattgctgggacatttaatggagtacatttgaccacccatgaagtttgatggttcacaaatttagtgtgagcatgtcattgatatgacaatcattgcggcaggactaatagcttgtgaatataatgactgtgaataagaactctcttgttcagttattctaacctattccatctgagtttggccgttcaaatgactataaaccctgaagataatggatgtcatgaatgacagatgttagtcagagaaagagcttagaataagaagcactcattatttgtagca

SEQ ID NO: 266367 - DNA, 324 bp, Glycine max
  unsure (1)..(324): unsure at all n locations
actgctgctgtgcagaccaacatggtgtatgaccgaatcatcactttgtaagcttatcattccttgcacgtgcttgggggcattcatgtaactgctaaaatgaattgtcaagtttgtgccgggaaacatgttgtaggaccaaatcaatctctaatattgtagcatgaatgcttgttgctntctatcatctgacataattgcgacaacggaaatatttatgggcattacttgaatttttttataagtcagtntatattattgctaaaataagcataaggaaattttttgttgttgtgaaaacagtggaagccaccgtctatatca

SEQ ID NO: 266368 - DNA, 469 bp, Glycine max
  unsure (1)..(469): unsure at all n locations
ccagcttctgccgagnccctaccgcagttggcgggcttactgtgcaatgtttttagaaacgaaatggtttctagtcatacagtatagtaatatgtccatcacaacaattcatgcaatgtggaaaatacttctgacggcgtatctgtatatgaaaaacatttaagaaaatatacgtcaattaattaaataatatgcgtgaactgttataaatatatcgaaactaaggttgattcccgctaatattataataattccatcatatcctgtccaacacacgccctatggtattatcgttcacgtagtttacttgaaattgaagcatagactcgcgttcggtgggcgatcaagacattaattaatttgcttaactcattctggttgacaattacccctctgttttgaacatttcaagtcgttcgcaactgataatggtgagaaacatctacttgtacatctgtttccttacaag

SEQ ID NO: 266369 - DNA, 379 bp, Glycine max
  unsure (1)..(379): unsure at all n locations
caaggatccacttgaaggacttggaggacctatgacaagggctagagcaaggaaagccaaggaagctcttcacaagtgctgtccatactgtttgaatacaagcccaaagtttcaaaggagaaaaagtcccaaggttgngagtttgtatcactggcccaaagtggagggaggactaaatgacacccactttgtttcaatattagaggtgtttagtttgtctaaataatggcccaatccttgtaaagatggctgaccaaaaatatgttttgggttaatcaactaaaacggctttagttagttntagttcaagtggtcataacttttcacagggaggtccgattaaggctcataatatatcgagacgttcgaattgaacaac

SEQ ID NO: 266370 - DNA, 432 bp, Glycine max
  unsure (1)..(432): unsure at all n locations
tctatctttcaatttctagcgtctcgatatattatgctgctctgaatcggacctctgcgngacaagttatgaccatttgaatatctcgagagctttcactggtcaatttcgagtgtgtccatatgggatgcttctgaatcggacatccaagtgcgaaggtattgaaccctttaatttctcgagagcttccgttgttcaatttcaagcatctcgatatattaatcgcctgaattgtacatcccactgaaaaggtatgaccatttgaaatattggagagctttcgttggtcaatttcgagcgcctcgatatgtgatgcgcctgaattggacctcccggtgaaacgctttgaccatttgaatttctcgagggcttccggtgttcaataccaacgtctcgaatatatgcgcctgaattggacctcctgtgaaaggt

SEQ ID NO: 266371 - DNA, 391 bp, Glycine max
  unsure (1)..(391): unsure at all n locations
gacacaacaccgacgcaacaatatatnaaggttcaaaggaaactttgacatatgtattctcttaaataattaaaactatttaaaattattataattctacttaaaactaattctatagcttattaagtccgaaaataattgatgaagctattatagctgattttagataatacttatttaatactaatttttaatactaatactaattttagttaatacttatctaacactaatttttaagtgataataaaatcaacttaattattcaacctttattgagatattatttatcttaagcaatatctaatcaattgagttttagatatctgtttatccctgaagcaacatagatcatgccaccaccctgatcaccatcaccatcgatcgccac

SEQ ID NO: 266372 - DNA, 388 bp, Glycine max
  unsure (1)..(388): unsure at all n locations
acacttaaaactctgcttaagagctcgccnancacatatctagcttattgattttaacaccnggcatggaaaagtgtactctcaaaccaggaggtgatctacataaacttcttttgtattagtgattacaaatgcctttttaccgcatttgtatagtctcctttagggagcaccaatgacctaacatcatattggttcatttgagaaaggagcctagttttcgaaactatatcttcctatatgagaacctttaccacaactttgcatgttctcacaacttaactgctcatcagcttgttgtgaaccccatttacacttactccttctttcttgggattccccttaagncggacttctgggactcttacccctattaagttacattact

SEQ ID NO: 266373 - DNA, 454 bp, Glycine max
  unsure (1)..(454): unsure at all n locations
agcttgaggagctncttgaatcgtttattatcattaataatgtgaccgaagctataaaaatgtcaaagaactgtataaaagtgttggagctttgtgtcaagtgcaacaatcacatttctgaaggccagttntatcctgcactgaaaactgtggatttacttgagaaatgttacattcagaatattcctgccagggctctcaaaaaggtgatagagaaaaaaataccttccataaaattgcacattgagaagaaagtatgcagtcaagttaatgaatggatggtccaaataaggagttcttgtaaaaaaattgggcaaacggcgattggtcgtgctgcacaagttcgccagagggatgaggaaatgctggaaaggaaaagaaaggctgagggattaaacatttcagaagttgatgatcaagcttaataattggtggttgaagaagatgaggattc

SEQ ID NO: 266374 - DNA, 459 bp, Glycine max
  unsure (1)..(459): unsure at all n locations
nttaacaaagcctagtttcaacttgtattcgtcaatttttttataccatgctctcggatcttgcttcaagccgtacagtgccttctttaatagatacaccttgtcttcatctccttttgcagcaaagccttcaggtttctcaaaataaatttcttcatttaggaagtcatttaagaaggctgacttgacatcaagctgatctatncttccattgctttgtgctgcaatagctagtaacattctgattgtatctagtcttgcaactggagcaaatagtatcaaaataatttactccaaaagcttgagcatacccttttaccattaaccttgctttatatttggtaattgagtcatttgcattctctttttttctgaacacccactttactccaattaacttctaatgttatgtctttaactaactcacaagtctgatttttttttcatcatagcaagctc

SEQ ID NO: 266375 - DNA, 449 bp, Glycine max
  unsure (1)..(449): unsure at all n locations
agctntagcatggcctccgtgatttatattcattgatcttttaaggtcgataggtcggccttcatctgttcttgcactccctcttcattatccatttttctggatcgagtgttataggggtgcctctgcactttcttagttattgtgagttccctaaagaaacaaacaattgtgagtatgccacaaaaacatgaatatgctaatgaatgatcggagcacttggatccacctcaagatttttagataacgtgatgagtttcagaacttctcgttttataaaaaggaacaaagcttttatctagccaagatcatacaaaagtgttacaacagaacctaacggtttctaattatatgggccatcaaatctatcatgtgttgacagtagctgattagcccgtgaatttcctaggggctgtacacacttcacgatggccttgcttggctaaagt

SEQ ID NO: 266376 - DNA, 368 bp, Glycine max
taccagaagcgccaatcaccggatcttgctgctggcgattttgtccgagctatcacgagtaaagatcgtgtacccactcattaatacaactagcttattgctagcaaagtcgagacatattcatagttctgatgctttcaatgataatttccttattatggtaatgcttcttctgatgatgagatggctcttgatctgaggatgaatcttctccaccccacaaaggatcctgcagtgcaagattgagcaaagttgaccaaaaacagtcatctgtgcccatttttttacaaaggagtacactttttccaacggatacgaccttctaatgagactgcattccctactagcaatgtgttgattgatatttt

SEQ ID NO: 266377 - DNA, 462 bp, Glycine max
  unsure (1)..(462): unsure at all n locations
accttaagncacctgggctgcagcttgatggtgtcagaaaattccttgtttgtcatcatcaaaagggggagaaggtgaatgtatgtatacatgattttgatgatgtcaaagaagaatctaacaaggctgcttcaaatgataagcatttgcttcaagaataattcaagattgcttcaacaaacaaagccttgtttcaagattcactaaagaccaagccttgccttaaaacaatgtgctttcaagacatgcaaggctctggtaatcgattaccaggaagtgtaatcgattaccagaagacagggttgagaaatagctgttgaaaaaggttttgaatttgaatcttcaacatgtaatcgattaccatatgtctgtaatcgattaccagcaacgaaactctggaaattcaaattcaaaagtcataaaccttcaaattataactgtgtaatcgattacacaaacatt

SEQ ID NO: 266378 - DNA, 331 bp, Glycine max
  unsure (1)..(331): unsure at all n locations
tntatgtgcaagtaataaaaagttctcctagtgtagcctttttacgtatgcacatacattgcgtgctgaaccacgttaaactgtgtgtctttttctttcttccctttatttctttctcttcttttattgctctatactaacatgtctttctcatcctctcacgaacacatctttgcttattcaacttccaccggaatgtgagtgtaagccattggtctgtttgctcaagcaacctgcgcttctgagtgttgacttccaagaccgttcaatcagagattactcatcttgcacgttggtggtggtgtcgtaaaacgacgagtaatgtaaaaat

SEQ ID NO: 266379 - DNA, 179 bp, Glycine max
  unsure (1)..(179): unsure at all n locations
tgaagagtgtggagccgcgggatttgatatatcgatcctangtcgattaccacaggatgtaccctgcttgcgtgcgtgacaatgatggcgacagtgggacgtgtgtgaggaggatagtgccccaattgccatcactgatgagcatgcttcaccaagatgctagcttctgctcaacctgt

SEQ ID NO: 266380 - DNA, 445 bp, Glycine max
ctttagagtagcattattttcttttgttctgaatcatatatcacattcatttgtttaatatattaggtcataaaccaatcttatttatcatatatgaacgcattgatttaataaatttatataacaatatttgcaaattttataattaaataaattgttcatttacacgtgaatatatcaaaatctatattattatattaacgatttgcatcacagctcatatctttatcatcaaaatctatttcaaaataacaataataatgaaatcgatctaagttattcgaaaagagaaaatataacaagtgaatgacaaagttaaaagaactaatatatgcacatgtttatacctggtttgaactaaagcaactgattgtttcaagatggatgctgccatcattaaggaaaggaaatacatctttgggaaagagggaggggtgttgataaa

SEQ ID NO: 266381 - DNA, 413 bp, Glycine max
  unsure (1)..(413): unsure at all n locations
tatagttattgtgagggagaataaaacattccgaaaacatttgtacctttcaaggaacgaagaattctttttgcggcttttagatgacgagaggtacgagcctccataaagcgacacacaactcccaccgcatatagaatatcgggccttgtattggtagataccttaaactccccacaagactcttgaagatcgtggagtctaccttctctccttcatcaaactttgataacttcaagccaccttccataggtgtgttcacgggattgcaatcaagcatattaaaattcttcaacacttcttttgtgtacctttcttgtgagacanagataccattcttcgtttgcttcacttccattnccaagtaatatgacatgagtcccatatctgtcatatcaaattcacgagacatg

SEQ ID NO: 266382 - DNA, 452 bp, Glycine max
agcttataagaacaaaattgccttaattatttccaaatatgcatgtgaattaggacgcatcaacaagaatcaagccaaggctattgtgcaagcaatcaatggggcaaaacacaccaaatgattataatgatggatggctcaaattctcacaaaggtaaaatcatcactttcaaattgagctttcaaaactatcatgacatgtagagaagaatcaaggatttcaagtcacaaaatgtcaagaacttttattttcaaaacaattacccatttcttgaacatatcctataattcaaagaaaaacatgcaaagtcgtacgtgcacacgaaattgacccaaaatattaaactgaaaatccgacgaaactaacaacattaacaaattaacacaactaacaaattaacaaaaccaacaaaactagcaaaaccaaagaacactccccccccccatactta

SEQ ID NO: 266383 - DNA, 470 bp, Glycine max
  unsure (1)..(470): unsure at all n locations
tgaaatgaggaagtgtggaagggtgagacttcctacttttattcgttgaccacagagtggtacctggagatatgtcgcaggggttaggagaccttggggacgtcaagtggtgtgctattgcccaaaaccaagcttgaccaatcccgacccaacccgggcatagtcagtcagtgagaacctgtgatgtacctaaacaggcgagctcctggcagtcaaccgataaaagaacaaagaccacaaagcagggaggcttgtgtggtggctggccagctgtgaatcttgtgtgatatatgggatatggcctctggtaatcgattactaaaggtgggtaatcgattacaaggcttaaaagtgaagacaggaagctaagatggcctctagtaatcgattaccaanggagtgtaatcgantaccaggctttgaaacgagatcaggaagctagganggcttctggtaatcgattatcaacg

SEQ ID NO: 266384 - DNA, 377 bp, Glycine max
  unsure (1)..(377): unsure at all n locations
actcagtntacactccaatttcgattaacctccaatttggctttacaaaaccctcaaaatcttacacttttccacccacatcactaccattctcacatttaaccctaggttaactctccccattatctctactagttntctatcaacaatttcagcatacaaatatcacaaagcatcatcataaaaccctaaaacagaatgggtagctttactcacatcaaacatgtcaagtttagcatgatttcaacagactccttcacaaatgactaccctaaggcaataacctagtagaactactcatcatatcttccaaaaacccaacacccacgaatttcatgtgagaagaagtccacccatacctataattcgaagcttca

SEQ ID NO: 266385 - DNA, 475 bp, Glycine max
  unsure (1)..(475): unsure at all n locations
cctcagcttaagcctgaacgttatgcgacatcttattccgggctaattgggatctatggttttccagcgcaattccttacgggcctaattggaggccatgacgcctaacgccaatcatggcagcttagcgagattctttgcaccaatatgaacgcttagcgaagtcctctcagctaagcgcgtgctcctttggacttaagatgccatcatttatctacattggctagggccaggcttagcgagagttgcagcttttctaatctgcaggtctcgctaagcggacgtactcttgtgctatgccgagtttctggtcanaaaaaaaattcaaatttgaaacgtctgctaagcgcacgtgttcgcttaatgagcctgggtgagaaaccaatgttctctgctcgctagcgcacggtccgctagcaaggtatcgaaaactacttaagtgagtgaacagcagtacactatatttccaaataca

SEQ ID NO: 266386 - DNA, 234 bp, Glycine max
ccaagggaaggaaaatttaagaatacaccttgagagcacaatagaggaaaagcattccacttttacgtcacggcaagtgaaacctatataaatttctctggcactttattgactgtgagtggtttttactaatagatcactcgatctatcgactcacaacaccctaacttatttcttgtgtcaaggagaatcttaaagtcaacaactatgacgatacaacggtccctgataaat

SEQ ID NO: 266387 - DNA, 409 bp, Glycine max
ccggcacgaaaaccctatgaaagattctatgcacaacgcatctcctcaactaaaaccgccaagaatcttttttacattcaaatactaccccctacattggctccaacaccaaccaattaactctatcaaccatcaagagcatccaagccacccaggggcggaactagagaacaaagttcagggagacgacaaaactaacacatgattatgtaacggagacatgataaagaaagtcgcaatattaaacttaacatgctaaaagctgagggggacaaaattctctattttaggtgcaggtactaatgaatcgtgaacttttaggagggacggatgcccctctgagatgattgagctccgccttgaagccaccatctctcgccgatccaccacaggaaggcaaactaaacga

SEQ ID NO: 266388 - DNA, 420 bp, Glycine max
  unsure (1)..(420): unsure at all n locations
actcaagcttaatcagcgttaaacagatgtgtcattaacctctatatagatctcgaatngctcggtcgcacaatttgggagcatntttttacttcatccatagatatatggtaagtaccgcgcgctatatttgatcaagattcaggtgactgcatatcgccttgttctccgagtgcatacttgaaccggggcaaaatcatgtgacctgtttcattctgtgcacttggagaccaatgtgaaatgctgccgaaatgtaatcaaactaaccatatcgtacttaacttggacatatgaatgacttataaacaagtatctgaatgggatatgaccacaccttcttatgaagacagtgaagatatcatgcctatacgataacatacctagcattccagaacaccaccatggatcacagttggatta

SEQ ID NO: 266389 - DNA, 312 bp, Glycine max
agcttataataccaaatatacgataatgttatcgggccaaaggcaagcggtccagtcttgcgccaatttgatcatattgttccattaggtgcctcggatttgctaaaaaggtagcaattgcggcaaattcacttgccgcatctttatcatcattttatttcaaggcgcaggaacaaataatattgacaacgtgtgcttaaattaccacaccagctggatattattgtctttgcaaaatgctatccactctgcacccggtgatttatcagttattatgtaattaatatgactaaaatcagctaactggacaaa

SEQ ID NO: 266390 - DNA, 312 bp, Glycine max
  unsure (1)..(312): unsure at all n locations
ntngtccagttagctggatttagtcatattaattacatattaactgataaatcaccgggtgcagagtggatagcattttgcaaagacaataatatccagctggtgtggtaatttaagcacacgttgtcaatattatntgttcctgcgccttgaaataaaatgatgataaagatgcggcaagtgaatttgccgcaattgctacctttttagcaaatccgaggcacctaatggaacaatatgatcaaattggcgcaagactggaccgcttgcctttggcccggtttcattatcgtatatttggtattataagct

SEQ ID NO: 266391 - DNA, 308 bp, Glycine max
atttttaaccagcgattagcgagagaaattactattaaaggcattgcccttataagcatggttgggtaacgaattaacgccaggatgaaaagctccaccattggctttttaaacagatgtgatccgatgttcttctccaactggttcttatatctcttcattaacaaaactacttattcatacacgttaataatacaataatgacccctacgatatttagtgagaacaactatgaaattttggcaacaccacggaccttttttttctgggaacgtcatattatatgcaccttttcctattgacccttt

SEQ ID NO: 266392 - DNA, 441 bp, Glycine max
ttaagtcacctgcggctgcaagctaaccctagagggatggctcttttatgtttggagaggtcaataacaatgcctatatgttggacctcccagaagagtatggagtcagcaccacttttaacatttctaatttaactccttttgcaggtggagctaatattgaggaggaggaactaacagatctgaggtcaaatcctcttcaaggggaaggggatgatgcaatcctccctaggaagggaccaatcactagaaccatgagcatgaggctccaagaagattgggctatagctgctgaagaaggccctagggttctcatgaaccttagagtagatttctgagcccatgggccaaggttgggtccaattatctttgacatattagactaggatgtcattatatttggcccttgcaatttaggctccatattgtaggagggtaccc

SEQ ID NO: 266393 - DNA, 402 bp, Glycine max
  unsure (1)..(402): unsure at all n locations
gtgggacttctgtgtttgngaacctcttcttcctcatgtgttcccaaacccaatcacctggntcaagcacgactttctttctgcttttggtggcttggcttgcatagctcgcatatttcttttcaatttgagccctcacttgctcatgccaacttctcacatactcagctgtagcctgtgcatccttatgcttaaacatagcaatgttaggcatacgcaacaaatcaagaggagtcacaggattaaatccatacactatctcaaatggtgaacaattaattgtgctatggacagcccgattataagcaaactcaacatgaggcaaacaggcttcccaagatttaagaattttctttataacagtcctaagcagtgtgcctaaagtcctattgactacctcag

SEQ ID NO: 266394 - DNA, 448 bp, Glycine max
  unsure (1)..(448): unsure at all n locations
agctntacagcaaatgccactctattcctaattctngaaggatatgttaacaaggaaacataagtatattcactaggaaaacatcgtagtggaaggaaattgtagtgttgtgattcaaaagatcctttcacccaagcataaagaccctaggagtgtaactattccttgttcaattggagaagtcattgtgggaaaggctcttattgacctgcgagccagcattaatttaatgccactctccatgtgcaaaaggttgggagagttggagatcatgcccactaggatgactttacaacttgttgaccgctctattgctagaccatatggagtaattgaagatgtgtcggttagagtgaaactatttatcttcccgagagactttgtagtaatggatatctatgaagatactaacattcctataatatggggaagtccactcatgttaact

SEQ ID NO: 266395 - DNA, 464 bp, Glycine max
  unsure (1)..(464): unsure at all n locations
taaagtatgcctgagtcattcatccctatgagatgttgttgaagtattggcgattagaattgccattccttggattatagggntgaaccaagcttatgcttttacaaaaaggttcatcaagtcaagttgaaatatggaagtaaccgtcttgcaaaattggggcaaaagatgaattgagtcacatcactgcttcgtctactgccaaacatatttaggattggtgatatccttgttacttccagtttcaccttgacaaagatgtcatggaccatgttgaaaatctaaattgattcaaccccatatccagtttcaccttcgcatgcatccatgcttttcattggttgcattgctcattgcattctttccttgaanaattaaataaaatacaatataatgaacttaatcattgttatcaaaaagaaaaggacacgctttacggtgcccttaccgaactcgtgctagag

SEQ ID NO: 266396 - DNA, 474 bp, Glycine max
tgcggcatgcaagctacaagaattatggcctcatcaaactattttttttccagggaaattctataaatagacctcccatctttaatggagtgggttaccactactggaaaacccgcatgcaaatctttatagaggcaatagatttaaatatttgggaagccatagaaaaaggaccttatgttccctctatagtggccggaagggcaacaattgaaaacctatagcaaattggactgaggaagaaagaagattagtacaatataatttaaaggccaaaaatattattacatctgccctaggaatagatgaatactttagggtttcaaattgtaaaagtgctaaggatatgtgggatacactacaagtaacacatgaaggcacaacagatgttaaaagatctaggataaacactttaactcgtgaatatgaactgtttaggatgaatgtaaatgacagtatacacgacatgcaaaa

SEQ ID NO: 266397 - DNA, 346 bp, Glycine max
  unsure (1)..(346): unsure at all n locations
gccttcaacaaccaagnctaacaataggggggcccaaggatccccttgtctcaaacctctttgaggcttaaattcagaggttgggcttccattcactagaataaatatataagcctgtgtgaggaaccccctattccattcaatccatctatcatggaaccccattcttctcatcatataaaataggaattgccaagacactaaatcatacgctttntcgaaatccactttaaacaccaagcaaaacctcttaaacacctagcctcctcaactaccttattagcaaccagaacaccattggagcactatttacccttcacaaggacacactcacacacacacacac

SEQ ID NO: 266398 - DNA, 388 bp, Glycine max
  unsure (1)..(388): unsure at all n locations
aaggagagcattttcggggtcgngaagtgcgtggctaccaatgggacttctaaaattcaggtttgggtggacttctttctctcttaaatttcgtgggtatggggttttgggagatatgaagggtagtttttgtacgtttctgcttcatgatgggtatttgggaagacttcttgtgaaagcttgttgaaattgccatgtttggatgagttaaacacacccattctgttttaaggtttttggaagaatgttgtgatgttatatgctgaattgctgatggaaatttgtagagacaagggtgaactaacctaggttaaaagtgaaatggatgtatgagtgaaaaaagtggactttgaggttggacgctagtctgattctgtggaaatggggt

SEQ ID NO: 266399 - DNA, 417 bp, Glycine max
  unsure (1)..(417): unsure at all n locations
ntccatgaagaagtttgcaggtataggaatttgaatctctacggattcaacctatccatgttaggaaagcagggttggaatttgattaataacccacatactacaatttataaaattctcaaaaataaatattatccaaatgttggattctatgatggccaactagggcataaaccanactatacgttgtatagtatttttgcttcacatatattggtcgaggaaagcatttagtgcaaaaaaagtgatggtagatctataaacgtttggactcaaccttgggttcgagcatcaacaagcccatatatcacttcatcaaccctgctcgatcttgatgatctcaaagtcagttcactcatcgacaaccaacaatgatgttggcgtcaagatgtgctacaacaaattttcaatgacaac

SEQ ID NO: 266400 - DNA, 451 bp, Glycine max
  unsure (1)..(451): unsure at all n locations
agctngcatccactataagagaaagaactatttttttttttctttgactgacaatgttagacagtttgcagattgatcgagaagcttttgatttgttggcagcccaacctcattacaaacctagaaagtccttcggattcattttgtgtgtttatttctggatggcatgagatgatatgcaaaagttgggacttcttgtagttgtttataatggaatgatcctaaacacttgagcttgagtgaaacaacgactgtgaggctttggttgatgattctttccttgatatctgccattctcactaacttattttagttgtgactctaatgcatatgttcctatcattgaaaagctgcatgtttgcgaaaagcaattgattgaagtatttcatgataatcacttcttatgaatgaatttctctgtgaaacacacactatttggattgaccactgt

SEQ ID NO: 266401 - DNA, 389 bp, Glycine max
gacgattgtgcagttgactctccacatccacaaatcacacatgaatgcagtatccccagttgcccaccttcgactgagctcacgtactcccacgtagccccttatcctcgttcctctcaacaccgggttcccatcaatccctccaagctttcacagcatgcaagcaattcaacattcaaacatcatgaactatcataaaccaagaaacagggcagaggcagaatactctgccgaaaacacattccaataccacaactttctctactaaaaccccagaacatttcttcgtctgaatcgtaccggtggtcactcgaaatttactgaggccttagacataaacacattcaccgggggatggtgaatatcaaaacaatatgtgcacctttcga

SEQ ID NO: 266402 - DNA, 149 bp, Glycine max
gggacaaaacaccatcttaaagaaccacacggggggaagccgaacaggcaacccaaaccagggcgagacacagccgccaaacccggccccggaggggaacaaaggcacaaggacacaaggcagacgcacgaaagaaccgacaaaccagg

SEQ ID NO: 266403 - DNA, 449 bp, Glycine max
  unsure (1)..(449): unsure at all n locations
gcttctcagcttagattgtccctttttctctagaggatttcaggggtttgacatttatcatatactttgcctcagaagtaatcccaaaggatcatgagttatgcccacctgtgcaggtgagttgattaagggaaaaataggagaccaagggtgttcatttcttgcacacttgcttccagatccatacactnttcacattacctccttggttagacaactttattctttgtatcaagttacagccaagcacaaactaaaacttatagtggaaaaaaattaatgggacataatgacttgggaaataaagctaatacattattacttctcgttttcttattcttatctattctttgggctattgccatagaaaaatgtaaggctttgcaagttacaacaactaagccttttcccactaacactaagcttagcaaattatttgtagagaagtt

SEQ ID NO: 266404 - DNA, 473 bp, Glycine max
  unsure (1)..(473): unsure at all n locations
ggaagatgatgctntaatggaggttaagaaagagagaaattgggggggggcacgaaattgaaggaataaaagagggagagaaatggaactttgaagtgtgtttcataagactttcattcatcaaaggtagaacaaatgttacacatgcttctgtttatagcctaggtagcttccttgagaagcttttctgagaaaacttcattgagaagcttctttgagaaaacttccttgagaagcttctttgagaaaaacttcttgagaagctagagcttagctacatacatccctctaaaagctaagttcacctctttgagaagcttccttgagaagctagagcttatctacacacacctctctaatatctaagctcacctctttgagatgagaagctagagcttagctacacaccccctattatatctaagctcaccctcatgaccaaatacatgataatacaataaagtcctactcca

SEQ ID NO: 266405 - DNA, 372 bp, Glycine max
aacaactgaagcaactatgagtctatgtgtgcgtggatgcatgactaaaaggatgctcttgccctactttgattttagcttacacatgttatcacactgaataaaacaacttttaaactgatgctatcaaactatgacactacctcactgaagcggaaatagctatcaaactgagcaatgatctgatcagacctatgcatcaaactaagcaagcataacagtagtgacgtataaaccataaaacataaacgtatttgaagaagaagagaggaacaaatctactctgatgcatctcaagtttataattcagttctgcacactatgaactgttacatatagttgttaaatatgagagttttgatactcctcatt

SEQ ID NO: 266406 - DNA, 465 bp, Glycine max
  unsure (1)..(465): unsure at all n locations
tctgctccttcacctccttctatatcgtctgcttaagtttatttagcttcctcggcggccgaagntagggcaccgttcgccttagccaactttatcaacgctcctccgtctactcactactcacaaaatggtattctatgacgtaagatttacgacgattgtataacaaccgaagtcgttagtcaagcggtgacatcttcgtaaatactggtaaaatttaaagatggttttgataatacccatcttgaaagtgcattatgcatctgctcttgtagaaccgacacataatgcgagagggaatgtgaatcggctctctcagtccttattattattgcgctctcccttagatctggaaactaanaccctaaattccttctcgctctctctgttcgcgccatcatcaccatttctttcattctctgccaacattcaaaacccctaacaacgcactcttttatccttcat

SEQ ID NO: 266407 - DNA, 358 bp, Glycine max
gcgacatgcgaggaggatctcccgagcacactggattcggcacgaccatgccctcctgagctccagctgtgaaatcggcgagcggaggaacgcccccgtattacgcatcgagcataatgaaaacacttacggctttaaaagctctatagctgggcctaagttttagaggatcccctattggtaaggccttgagacttcggaccatgacacaatacaacagggatcttccttcacctgatcctggccactacccattcccattcagtagcatgaggacatcttgtgctgaaacggaacaaccgatgacgagtcctccgcaggaactaatacactggacaccgctaactgtctcgagcag

SEQ ID NO: 266408 - DNA, 331 bp, Glycine max
catcaaactaagctgctacccatgagctctatatttcccactcttgtgggtttttctggaggcctagtttttcgggtccattggaccccattcttactaattacaaaacctataaaaactatattattcacactaaaggtacactctctctatattttgcatagagggtgtttttcctaatgactgataaaaggtgcctaagatgtcctaagtgataatctaggctcctactgtgctctataatatcattcaaatacaaaacatacaaactacctatgaaatcccttaagacatgatgcataagcctcataaaagtgcttggcgcattact

SEQ ID NO: 266409 - DNA, 448 bp, Glycine max
ttaagtcacctgcggcatgcaagctttgcacatggaggttaagttaatttggtttggagcgctccaacatgatgactcacaagtatggcataaaccctggtatagatcattattcttgaatggttgatcttcttggccgtaaaagacatctcaaaaaaactttaaacattattaaaagtttgccttttgaacctgactctcggaatacggagtgccttgctctctgcttgcaaactttatggtaagatggagatgggcaagtatgtgtctgaacagctatatgaattggagccccaagtggcagatccatacgtggagatggctaacatatatgcatcacttgaaatgtggtaaggagttgcagcttttagaagatatatgaaatatcttcaagtcaggaaatctctcgtcaaagtttattcagttatgtaaacctactattttacag

SEQ ID NO: 266410 - DNA, 468 bp, Glycine max
  unsure (1)..(468): unsure at all n locations
ggtgggagatcgatntaattcattatgttctacaaacatatatatgatcttgttcaattggaataaaaatgtgactcgaatttcacgaactataagagtggttattgtgggtacgacttgggtctgaaggatataatacatcccgcagaaggaggcgagtatgttctcaaaggttctgaactcctcgaaggatgctcctggaattattattaattttttctttctttctcgtcttaaagattattacagttctaaaagtacaatctaattattaaattaagaagcagagagatttaatgtgagaaacaagcagcagggaattcatcaacaggcagaggcaaattacaattacagttacgattcgaggagtaaggcgttgggtgtgtgcaacaagcatcagcagcagagagagagtgaatagttcgatgaataccacgagccagaaaaggagtatgaggagggagagaa

SEQ ID NO: 266411 - DNA, 330 bp, Glycine max
cttcttaaatggaagtccgattcacgcgcgtaatatatccagaaacttgaaattgaaaaacggaagttgtcgagaaattcaaatggtcataacttatcacacgaatgttcgattcaggcgcataatttattcgatactctcgaatttgaacaatggaagctctcgagaaattcaaatggtcttaacttttcaaatggacatccgattcatgcgcataatatatcgagacgcttgacattgaacaaccgaagctctcgataaattcatatgggcataactttttccaaacgaagaccgattcctgcggattatatatcgaaaagctctaaa

SEQ ID NO: 266412 - DNA, 436 bp, Glycine max
  unsure (1)..(436): unsure at all n locations
gcttgaaattgaacttcngaagctctcgatttacttacattgtctaacccatcacacagacgttctattcaggcgcattatatatctatacgctctatattgaacaacgtatggtgtcgagaaattctaatggtcataacttgtcacacggaagttcattcctgtgcataatatatccagaccttcaaattgtacatcgaagctctcggagatatcaatgggcattacttctccaccgaatcctattctgcgcataatatatcgatagcctgaaattgagcacggaactctcaaaaactcaatggtatacctatccacggacgtcgattcagcgataaattactagaagttgaaattgacatcgatagctttcgaatactacaatgtctaactttgtacacggaatcccattcagggcatatttatcagacgctca

SEQ ID NO: 266413 - DNA, 449 bp, Glycine max
agcttccacatagcccatgttaccgccattcaccaatacctccacctcttgccccttaatctctttgtctgtatgaagatatgctggagaaaatgttgtgtatgcctgagggggaaagcacatttaatattcaaccaagacatcgattcccaccaaattggttggatcatgatgcagtggaagaacagatgagatacctcctccttagcacctctgcaaaaagggcaacgcatatcctgaatctgcatttggctcctgtgcagattcttctttgttggtaatttgtcccttaacagacgccaagcaaaaaccgcaatcttactagcgaattttatcttccataattccttacaccattcctcttgttgacctcctgcagtagcttcccaaatcagaatatatgcactgcgtgtcgaattattttttgactgaactcctaccattcccac

SEQ ID NO: 266414 - DNA, 469 bp, Glycine max
  unsure (1)..(469): unsure at all n locations
tgtntaagaagattcctaaagaagctagagcttagctatttatacctctctaatagctaagctcaccttcttgagatgagaagctagagcttagctacacaccctctataataactaagctcacccccatgacaaaaaaaacatgaaaatacaaaaaaaaagtccttactacaaagactactcataatgccccgaaatacaaggctaataccctatactattagaatggccaaaatacaaggcccaaacgaagaaaatacctattctaatatttacaaagataagcgggtcatgcttagcccatgggctcgatatctaccctaacgctcatgagaaccttanggcctttccttggatctctagcccaatctacttggagtcttctacccaatgcccttgcgggataggattgcatcaaaatctataatgtcattatattatattctcttaatatctctatctgccatta

SEQ ID NO: 266415 - DNA, 325 bp, Glycine max
  unsure (1)..(325): unsure at all n locations
taaaactcatcggtctctttcattcattttattgcattggtattgcaggcttttggtccttggttggagatgccatataggaattggaaggaagatcggaccatcccttgaaaatttgagtaagaagcaggggccaccaccttaatagctaataactaagaagcactccaattgagtgaatcccanaagagaacaaccaccaaattgggacgtttgaatttttaatttgaattacttacctcatgcttcaagtttgaacaaaaggcctttcattgaagtgtgttgaagcctccaatagtaccaaactcacttggtgtataattta

SEQ ID NO: 266416 - DNA, 156 bp, Glycine max
cttggacgcaataagtgcacgttctcattttccaacaacggacgccgcacgggactgtcacacactgtcgcatattacagaaaaaaatgtccataaattattaatgtttctagacctcacaacaactttacttccgtctttagatggagtacactc

SEQ ID NO: 266417 - DNA, 388 bp, Glycine max
ctaaattgaggaagtatgctcaaatatataaggcaatattggtttggtttcttgcttgaataaggtgaattaggggtttgtatgggatggccctatgcctatattgcattttgaaacaatgggacatgccacatttgccccgttctcttgctattgaacccctaacccgcgcccaccaagtggttcaagaaatgccttaatggattaacgccgtacatttggaggaaacaacccatggggcattttgggttggacacatttcttttttttggaatatgattcattcctgaaaaagctaaataattggccgcatatttctaaggctaaacttaaatttttccaaaaaacacaaaggatgtgctattggtaaggtcccttttggcagcat

SEQ ID NO: 266418 - DNA, 388 bp, Glycine max
  unsure (1)..(388): unsure at all n locations
ttctttcttggcttattctctattggatggngcctcccttctcatcttcttctttgcctctccgtgcatctccatggggtaaaatcaccattggaagacctcattgaagctcaaagatccaacctccatagaagctccacaagcaagcttccatcaagcagggtttagcatttcaagagacaccatagaacacatgagcattgtttagtagagaatatccttataacatcagacacctaataagaagaccaacgtgttggctacttgtctttacacatcattactcatgtaatttcccttttaatagtagttacatacatattcatagtcacacatatcttttcatactagagacctattcattgaatatagctttacgaagtaacat

SEQ ID NO: 266419 - DNA, 443 bp, Glycine max
  unsure (1)..(443): unsure at all n locations
acctgacgctcgcagcttattagttgtgcatttagtatttctgttcttataaanaacaaatgcatatcttgtattgcatacttgcttcattgctgtacaactgctgacattgtgctccttcaagttagaagaatattacttggtttgaccatttactgtgtcatatcaccaataataatcttctcattcttaatcattcgaccaacatatggatgtccaactagggacttaaccactgcatgattatgactcccacatatttacttctccatccattcttcacctcccaacatttggttggctcacagcttaaagggacacccacattttctactgctagtaactattcgaactaaattttcctattcgccctatacttttcactcctctcacaactaatcctaacatatgaggtccttcctctattccaatatatgtgtatg

SEQ ID NO: 266420 - DNA, 345 bp, Glycine max
gtcttacctgataggcaaatgagaatttttttataagtcctcggccgaaaagacccttgacatcttttgggaagggtacaggtgacgaccgttagtcattgcttgctatcgtgctatgagtcttaccggattgcaatgagactgtttcatagtctcggcaatagatgctgacatctcccggaacagagcatgtgatgatgttagtcactggtttggtatcgtgccttaagtcttactgatagcaaatgagatcttttcgtagtctcagcctgaagacactgatatctccgagaaaggtgtacgtgaagatgttagccactgcttgctctcttgctttgattctta

SEQ ID NO: 266421 - DNA, 227 bp, Glycine max
gcaaactctcacctcacaccagtccataacaatcatttagacttggtcaaactggatttacacctaaaatctctctcgaataaatacttgcaccttaacacccaaaattgccctataaatggcttcttgtgcacttgggcattatttttctttcttcacaggccaagctatctcatatgtctaaatgacttgtcagctagtattaactactttaacctccatttacc

SEQ ID NO: 266422 - DNA, 456 bp, Glycine max
tgcggcatgcagctatagaagtcgagcgccatgtttatctttcactcgcccagcgtgagagtgatatcctccacacgtatatatactctttaaaaaaccacgcattacaacgtatttataaagaaactatgagtttaattcctctgacatatatcaccaatttatccactcgaacatcaataatataactcttgaataaatacattcacaatatagcaaataactgatttattcactacaaaaaataattgtacgtactcggataaataagacatgacttagtattatgaacgttcagaagatagaataaatgtcacataaatcatagcatgtgatgactgaaacacctattacaacatctccgtggatattctgctgcctattagtatcattaaacgcctgtctaaatatgacaaattgaaagagggtaaagcatcttaaagatcgcgtataaaa

SEQ ID NO: 266423 - DNA, 426 bp, Glycine max
  unsure (1)..(426): unsure at all n locations
accttagatactcaactaccctatagactaattttgtggtggggatttatctggncggaaggacctcatggtacttggttaatgttcaaatgttgaaacccaaaatggtggaataatgggaagttaagaaatgccccattcatttttttttatttaaaaaactttttattctaaaaataaaatttaatacaagttagggcaattctttttttatctaacattacttcctcctgcttcactacattcaaatttaagacggttctcccaccagttagtgggtttttttttttttaaaaataaacaaaaatgagaaattaatcatttcttaccaactaaatatctaaatttctttatttcatcaaaaatatcactttttgattgttttattaatggtccaaccaagttattcataaatttatgctaata

SEQ ID NO: 266424 - DNA, 419 bp, Glycine max
agcttctgttggatcgagtggcctcagattaatttagaagggggggttgaattaattattcctaaacctttactaattaaaaaattactcttctaaggcttttacttatgttgttaagagagtatggagtagaagagaaacttaacagaaagtaaaagcggaaattaaatgcccagcggaaagtaaaagagtagggatgaaggaaacaaacacacaagagtttttatactggtttggcaacaacccgtgcctacatccagtccccaagcgacctgcggtccttgagatatctttcaaccttgtaaaaatccatctacaagcaaagatccacaagggatgtaccctcccttgtctctttgacctagggatgaccctcactaaactgaccacagagatgaccctctttgtctcagcaaacc

SEQ ID NO: 266425 - DNA, 416 bp, Glycine max
  unsure (1)..(416): unsure at all n locations
tgtagccattagataacaaagaacatgtgattagaagtatgactgaaaatgttagctagttcgtccaaatcgattgtgaaggaatgcattgaccgtatcctgatgagagtgtgatccttaaattttgagagaaacgactatcatttaatactgatttttgcataaatctctgaagtatggattgaatgcaagaattgacgatgatgaacgccatgtttgattgtgatagccacttagccaaatagctgaccacgtgcttgaatgatttatctcttgcacccagtttgagctaaatgaattattgattgattgaaccttgagcctatacagtgttatctctcgataacttntcttaggttgtacgagagcatcatccataaaaatcttggttaaaacaaaattgtcgtaaattgggg

SEQ ID NO: 266426 - DNA, 470 bp, Glycine max
  unsure (1)..(470): unsure at all n locations
cttaagtcaccgccgctgcagctntagactcagtcgtgaacttctgtcttatcaatattgacagacaggttgttacattaaattaagaagaaccatttgtattatatctgacattaattacaatattgcacaaagaataaattgaaatgggaacaaagtcatgatgaaccaaaagagcaacaattatgtctatctctgatttcaatcttctcttagcagtcgcaggtaacccaatgaagttccatgatcttgttgtgtgcagtcggcgatactggttttgaaacaattatgtcactctctgatttcagctagtatgaagtttgaagcagttgaccctgacactaaaggcattaaattgaaatttaatatgttttggacaggtaccagtagcacacaggttacatgctcctagtgcctgagtatcaattccagccatcccagctgaatttagttgtaactcaagattcagc

SEQ ID NO: 266427 - DNA, 475 bp, Glycine max
  unsure (1)..(475): unsure at all n locations
tttcaatgggtaaaaggctcacattcactntcttctatatcatattcaaacttgtccaaattaataataaagtcatatcgactcaaagaaaatcctattagtctcatacaattaatatagaacctatatcctaatgtcacatcctatcagagcgtggtgttcccgtgtcctctagcatgaagttcttcatagtcattcacctattcatctgctcccccgaacacaaagttcatgatcatcacaggatccaaacacaaacagcaaaccgggagtgagttatcacattgctaactactagagagaaacaacacaacatatagtagccaaatacaatttacttagcatatttcacattagttcatcactgtgtcattcatcaatcacacctttcaatcataatcattatacacaggaatcacacactccgatcaagacattatacaccataatttcataatacacaattagcaagcat

SEQ ID NO: 266428 - DNA, 367 bp, Glycine max
  unsure (1)..(367): unsure at all n locations
ttaaaactcagctttacaagaggcttactctcttttantcgatcactatattattgtatttgnatgaccagtagcacaagttctgttttcataatgctctcaaactgaatttacaacgtttcaattaatctcaaaatggtgtgactgattacaagactttggtaatcaattgccagtgtgtctgaatggtgaaattcaaactcaattgtgaagagtcacatctcttcacaataattgctctgtggaatcgattacaatgatctggcaatcgattacccgtgatcagtcttgtatataaatcacaagatgtaactctcccaatggttttcaagttctactacaagttataactcttctaatgggtttc

SEQ ID NO: 266429 - DNA, 470 bp, Glycine max
  unsure (1)..(470): unsure at all n locations
ntagacaacttgttgttatcgattacgtatatcttcgttttcattaaaatagagagtttntgctccggaagaaactttttctaacttaaaaagttttcttctcactaaccatgatgatgaataatactatgatgcaacacacaaaataacaaccaatacaaatgccactcatgggagttaggcatgtaacaggtaaaacatcttcaataacttcttcaagctttccttgagagattgttcacaatgttgctcatgtcatgtcgctccctctatctctaataactagtgctccccattaagacacattgggtctcaaaaacggcgtatccaacaattcttctaaccatttcttaagctcggctaactctatnagagacatcctatcaggggctatgaatatgggctcagcattgggtacaggggctatggaaaattctatctctctcttacgtggaacattggatatatcc

SEQ ID NO: 266430 - DNA, 429 bp, Glycine max
  unsure (1)..(429): unsure at all n locations
ctattgtggtgagcttggtcctgactcatcttctccttgaagtggcatctcccatcacctttcctccttctccattttggttccattgatcttcaagaagcaaaggacttcattgatgaagaagatccaaggcctacaagctcaacatggagctacatcatgtggtatcagagcatcttcatctaggtgatgttcttttgcttcctctatctttttgtttggacaattcactttaattccttgttcttcatcttcttctccatgtatctcctccattgcttgaggtttggttctgtntagagtagattcaaaaataaaatacaccgatttaatcttagatctacacttggtctcgcatttctatggttcaaatttaatagatctattcttgaatcatggtttaatggtgattttaggttctatcatttt

SEQ ID NO: 266431 - DNA, 379 bp, Glycine max
ctccgaaaaatcaaagaggactctcaagggtttgcttttcaaatggtttaaagttttctcaaaggtataactcttctaaatggtctctttgatcagacatgaagagtctataatagcaacgctttggtttgcattttcattaattcattctatcaatcaatcctttccaattcattcaatcttgaataccttgtccaatcaatctcttacaatcctttacaagccttcaatctctttgacttcttcttctctttgaccaaaagctttctgaagtctctgggtctccaaccttgagaactgcatattctctttcattctctctgctttgccaaagaatcccaagactaccactgaatttttggtcctctctccttttcaa

SEQ ID NO: 266432 - DNA, 357 bp, Glycine max
  unsure (1)..(357): unsure at all n locations
agtcttttggagtagaaacatgggaccttctcatnttatntcagaaagtcgaatctaggcaagatctgagagaccatacaagtttcctagcggtttctaattatatgggccattaagtctatcatatgctgacaatagccgagaagcccatgaatttcttcgggggcggagtaggtgtccgccattgccttggccttggctaacaatcggggaagttcttgactcccgttcaaggtaaaagcaaaccgcgccatccacatggtttcctcttggtgtaaagagtcgaacgccctttctctagactacttttcgacatatacttgggcatactcgttcgcgaccctatgctcgtgggcc

SEQ ID NO: 266433 - DNA, 490 bp, Glycine max
  unsure (1)..(490): unsure at all n locations
ccggaccttaagtcacctgcggcatgcaagcttttgtaggtgaaatcangtgtagcttatttccttagagtcctctcacggagtggagggtgtgccatgttctcagaatattcaaaatcagaatgttcaagattataatgctcaaaatcaccaatatcagaatgctcaggatgctcaaaaggtactaaatgatgtctaactaatctatgaaatgtcctatctatctcaggatcaaagggttgtaagtcagatggatttcctctagtcatacactaaatttagcatgcacaactagttgccttcttatgcaagtaacaatgtaggttngaactacaactaccattaaatgatatccaaatgacttgaaatctttgagcaaccttataaactgatgagaaaatagcagaaaaaatttcaaatgaaaattcgaagtctaactatataagctaaaaatgataagttaagaaaaataagagaataatactcataa

SEQ ID NO: 266434 - DNA, 334 bp, Glycine max
ctatgctgccagttaacaaggtatgagctctaccttatgttgttgctcttcttattaagttcttaatcagtgacgtggcatctgccgaatgttcttatcaaattattgggtcattctgtccacttggcttaccatataaaagtatcaataaaaattgtaatgcggggttccattctgttgaggcaactgattgtgccttacgtggtcttcaagcttgacgagaattacacgccgagcaaagtttccatccgtgccggtgatggttttcacaacttgaaggtaaaattttaatttaatcggttgggtttgattgggatgattatgcttaattatt

SEQ ID NO: 266435 - DNA, 443 bp, Glycine max
  unsure (1)..(443): unsure at all n locations
agctngaaatttgatcttatgactttaattgtttcttatatgcggggtcgatttccctagggattgtttgatattgagtttcaaaagcttgggggtggatcgaatacaatggcatgatggtctggtggggttaaggttgcggggaatgggcacaatctcttatgtgaggtagtggcagagaagaaaaagatacttactatacaaatgtaacaatttagaggttgatactcactaaacaaattgatcaaatagttggtgagcagtgggtaaatggtttgaaatatattactggtgttagttgggtagcatagtactatttatctcattagattgtcactcaaattctacactatgtgtagcattggtccttgcgtagttaggttgtgttgattacataacattattttggtttgaaatgctaagaacattgactatgctattat

SEQ ID NO: 266436 - DNA, 218 bp, Glycine max
atatgcctttgtgcgtcattacagtacagaacacaatagtatagtgtcttgaaatggaaaatattttaacggactttctcatgcatgtgtcctgattaaacgtactgcgattgagatagaactgctatagtgttagttctcttaatataacatacagaatatatttgagttaggatttaccactgaagagcagacttgtcctccatttcttgaaggat

SEQ ID NO: 266437 - DNA, 460 bp, Glycine max
  unsure (1)..(460): unsure at all n locations
agcttggagaagatgcttcaatggaggataagaatgagggagagaaagagagaggggggagcacgaaattgaaggaataaaagaggtatagaagtggaactttgaagtatgtctcacaagactctcattcatcaaagttacaacaagtgttacacatgcttctatttatagactaggtagcttccttgagaagctttcttgagaaaacttccttgagaagcttctttgagaaaacttccttgagaagctagagcttagctacacacacccctctcataactaagctcacctccttgagaagcttccttaagaagattcctaaagaagctagagcttagctacacatacctctctaatagctaagctcacctccttgagatgagaagctagagcttagctacacaccccctataatagctaagctcacccccatgacaaanaacatgaaaataataaaaat

SEQ ID NO: 266438 - DNA, 393 bp, Glycine max
  unsure (1)..(393): unsure at all n locations
ngagatgaggaagctgtgaagggtgaaacttcctgcttttattgctgaccacagagtggtacctggagatatgtcgcggnggtcacgagaccttggggacgtcaggtggggtgctattgcccaaaaccaagcttgaccaatcccgacccaacccgggcatagtcggtcagtgagaacctgtgatgtacctaagcaggcgagctcctggcagtcaacagataaaaggaaaacaagaccacaaagcaaggaggcttgtggtggctggccagctgtgaattttgtgtaatatgtggatggtggcctctggtaatcgattaccaagggtgggtaatcgattacaaggcttaaaaatgaagacaggaggctaagatggtctctggtaatcgattacca

SEQ ID NO: 266439 - DNA, 421 bp, Glycine max
  unsure (1)..(421): unsure at all n locations
agctngctaacccatggaagctcctaatatctctcacactntnnggggcgggccattcttggatggccttgattttctcaaggtccacttggaccccatttttaccaactacaaaacctaagagaactatattatctacacaaaaggtacacttctctatatttgcatagagggtgtttttcctaaggactgaaagaattttctgtgatgtcctaagtgatcatctaggctcctactatacactaaaacatcatcaaaataaaaaaatacaaatctacctatgaaatcccttaagacatgatgcataagcctcataaaggtgcttggtgcattagtgagcccaaaaggcatcactagccattcatacaaaccaaacttggtcttgaaagccagtttccactcatcaccctttttcatcctg

SEQ ID NO: 266440 - DNA, 413 bp, Glycine max
  unsure (1)..(413): unsure at all n locations
atcagttcacgatgctttgaagaaggttgcggttggaggagtctttaggactgttgtgggagagttttatttgcctttgttgcaaaagtcgagttctgctctgtcatccttgctgagatgcgggttatctatcttggcattaccattgcttggaataaaaggatacattaattttattgtagagtctgattccttgaatggtgtgaatctaatttctaagggttgtgattttcatcatccttgtgctacttgcattattaaaagcataggtgagcttacagctgatggagactccctgagttggaggcatgcattganggaggcaaatgaagtggtaaattctgtctaatctctagatgttcattcagataataggttttgacttcatcccttcttttattttagatgtaact

SEQ ID NO: 266441 - DNA, 451 bp, Glycine max
  unsure (1)..(451): unsure at all n locations
acgcttgatgcaacatattgttattgttattataacancgagatgatgcgctccatgagaggttggatcaaatggagaatacagatcataatgaagaagaaaggaggagaagagggaatgatggtgttcctagacaaaaccgaattgatggtattaaactcaacattcctccatttaaaggaaagaatgatccggaggcctacgtggagtgggagatgaaaatagagcatgttttctcatgcaacaactatgaggaggaccagaaggtgaagcttgccgccacggagttttctgactatgctcttgcgtggtggaacaagctacaaaaggagagagcaagacatgaatagccaatggctgatacatggacggagatgaacaatatcatgacgaagcgatatgtgccggctagctactcaagggacttgaaattcaagctccataaactaac

SEQ ID NO: 266442 - DNA, 300 bp, Glycine max
tctacactctgttcaataatgaagctcttataccactttttatacacgcggcctcagatatcttaagaaagagggggggcggttgaataacaaccccccaactcttctcctccttaaaaatctactctaccttctacttagattatcaattcccttaatcaccatctcctaaatacttactccatcaatcatctttaatatgcatctacctctactttaatcacagacattactggacgacactacgcccactactctttatactggttcatccacacccttgtcctttcttcactcccc

SEQ ID NO: 266443 - DNA, 435 bp, Glycine max
  unsure (1)..(435): unsure at all n locations
agctngcatcaaacaaacaatgacctttttacacatgaaactctatcatttgtgagtagtcgtacaacccaaagaactcgacacgtactctgctcgtgagatccccacatgcttgactcatggcactttcaacgacctctagcaaacttgggtgtgatgcctatgggagcagtccaccaacgtgactttgaacatcatgtaactacctcgacatctggcatgtatgtatagacccaaaaggagatcctcaagtacgttttactcgtcctagttgtagacatataaacacctcaaagcaccattgactatctcgttggagtcccttatgcaagtacctccccccacatcaacaacaaagataagatattccacttatatgaggaggaccagatagctccgtcggacctcattggaactcagtaggaacagtgagta

SEQ ID NO: 266444 - DNA, 444 bp, Glycine max
  unsure (1)..(444): unsure at all n locations
ataataaatatatatagagcatatataggctgagtaccctaggtataaataggtatggtaagtcagctgcctccttttggcctcattttcgtttttccccttctcctctcanaaccctttctttttcccgcagcccaccaaactagtctcagaaaaacgatgatctcaaatccgttcaccggtggatcgtcgtgaaatttgagtatcatgttcgcaacacaattccgagcattctcaccgttgggaatttcgatatcatgtctgaactgagagaaaaaccctttgcattgtagcctttntctttcccgcagaaacccagagctgtcttggtaaaactatgatcccgattncgttaaccggtggattatnggtgaaattggatatgttgttcgaaatcaattccgcacgcttccaccgntgggatttgcgagataatattcgtgg

SEQ ID NO: 266445 - DNA, 264 bp, Glycine max
  unsure (1)..(264): unsure at all n locations
agctnttatagaagattggtgatgaactttagttcacttgctacacctttagatgaacttgtcaaaaggaatgaggtgttcaaatggactgatgtgcatgagaaagataagcttaccaatgcacctttgctttgtttgcctaatttttgacaagctttcgaaattgaatgtgatgcgtctagtgttggaataaggattgtactgantgaggactctaaaccaagtgcataaaaacttccaggaaatttgttctaggttcatatg

SEQ ID NO: 266446 - DNA, 334 bp, Glycine max
actctcacctcacaccagtccataacatccatttagacttgttcaaactggatttacacccaaaattcaccgaacaaattgactctcaacacccaaatttgccctagcaatgggctcttgttcactttgggcatttgtttttctctctagctcagcctaacctttctcacatgttctaaatgacatttcaagctagtattaactcactctaacctccatttaccacagaattcagacttagccttccaactctcaaagtctcactctttttccactcataacgtcacattctcactttctaacctggggttagttctacccctcatctctaaca

SEQ ID NO: 266447 - DNA, 342 bp, Glycine max
  unsure (1)..(342): unsure at all n locations
gccatagtcttcaaaatgtgcaacaatcataatgcctcaaatcagaatgctctaaattataatgctcaagatcatagatggtcaaaatcaccaataacagaatgcacagattcaccagttatggaatgctcagaatgacaacaggcataaaatgatgcctaactaatctatgaaatgtcctatctatctcacgatcaaagggttgttagtcacatggatagcctctaatcatacactacattcatcatgcacacaactagttgccttgtcatgtaaataaaggtgtatgtttgaactacagctaccctcanatgaaatccaaatgacctgaagatttgtgag

SEQ ID NO: 266448 - DNA, 382 bp, Glycine max
  unsure (1)..(382): unsure at all n locations
tgagctgcagctcgatagagagaggagagattttatcccgtccgctttgntcagcactaaaaactaaaatgccgatgtgtttttggaaatgaagagggtccaagttaagtgttgaccgatgcaaccctcttttcaaatctgagttttgaaatctgaaaaaaaatgcttgaaaaattaataaaaaaggggtttcaaaattaaaaaatattgtcaatgataccattctagatttcattggagtaaaaataaaaaataaaaaagattttcatggaaggaaaagaaaaaaagggggctaccatataataagaaaactgaaaaagcttcccaccacctaaggactattaatttggttggcccactggtcttaattcaacccatggtt

SEQ ID NO: 266449 - DNA, 356 bp, Glycine max
  unsure (1)..(356): unsure at all n locations
gacaatggtacggagatctgttattgtgtgcactacctggatgagattgaaaagtacgttggttatgaatgcaacagtccatcgtatgtgatgagattgacgggtagatcgggttaacaaaataagtttcagcaaccccgtatatgaattctgcgataaagttgggttatgaaaacagatttgatcattatatgttctgagacattgggcgaatggatgttactattggatcacttgttgaccctctatatatatatatatatgtatatcgcacaattatcagtgcgtattattatcattacgatattaaagaaatttttatcntgtagaattaacttcaccaattagtaaatgat

SEQ ID NO: 266450 - DNA, 317 bp, Glycine max
acggttctatggcccatttcgaattctagagaaaataggccctactgcctatcgcttagaactaccccctcattcccgaatacacaccatattccacttttcacccaaattctactgagcacacccctgttgataccttaccacccaagtctgtggacaatgattcaggggtaactcctctaccgatcttggataccaaatgggctacttctgctaatgggccaaaattattggttcttgtccagtggcggagcttacttctggaagacacctcctgggaattgtggacacactgaatgactaccaccttgaggaca

SEQ ID NO: 266451 - DNA, 368 bp, Glycine max
accatactatgtcccaatgtagatgggctagtggatataacaccgatcgatacctttcttgcttatcaccacaacaaggaaagcgccatcattgctgtattggcggatgcttatgatacatatgacttgagatgcgatacagagcagcagcgagaaatagtctattggacgcctgctctctatgtatggtgggtatcccatgtttattttatcatgacggtagatctatatgtactctacaaagtcatcgcatgtgctccgaacagggtaaaacaaattgtgaagaactcttggcaggcatgatgggagagtccgttattggtttccacggagatagacaagggcacgagtgtatctcatgcaagatt

SEQ ID NO: 266452 - DNA, 445 bp, Glycine max
  unsure (1)..(445): unsure at all n locations
agctngcccaagcgagctagagctagtccagggtgttttgggtcaaaaacctctaagaaatgaccattntgccccttccttgtcacttttgtttctggaactaacaaacaaccatcaaaaccctgcgcgaacactaggccttgcattgtaactggtgtcaaacaccataatttgattagcaatgatcataacatcatatttgaatgataaaaacattatacctgaattaaattagggtctgacacccatgaacacccctaatggttcataatgcatctcaaggacaacatcaaatcttccatatgatgccacacatatagagggcacatcagatgattgagggtgacaacatctctctttccacatgttgtcacacacgcatagtgcacattagaaaaagaatgctaactacattagaagatgcaatcctgctaacagctgaatt

SEQ ID NO: 266453 - DNA, 452 bp, Glycine max
  unsure (1)..(452): unsure at all n locations
ttcctaagtttgtacaagcttagaacaattttacttggncttctcttaatgggctttgggcttggcgaccaaaatcaacaaagtactttcggcacctactatatgttgacttgaccaacgcttgtattggaatgctgcgacaatctttcaacaccttattcacacattctgataggttggttgtcatgtgaccatatcgtcgtccagatgtatcgtaagccatgcctccattttcctttgaaatgcgatcaatccatcttgctatggctggactcaattgacgaaattcttctaagttttgatcaaacacatgcttgcaaggagtgtacgctgcatcaaattatttatcatcaaaagttgtatgtagacatcaaactccaattaaattaatgtataanataaaccttacccaatttcttgaacatctctttttgttcgcgtagtgaatttgc

SEQ ID NO: 266454 - DNA, 415 bp, Glycine max
  unsure (1)..(415): unsure at all n locations
gcaccccagctgcagctgttcgcacatcggcgcgagaggatatccacttttatttgttcgaagnacaggagagcttcaaccctataacgcatcgtgacgacaaaaatgggactaaactggaatggaggtcattggcaaagcggagggtattctgcgcttcactatccatgttcacacattattgcagcttgtggttacctgagcatgaactactaccaatatatagatgttgtttacacaaaccaacacatcttataaacttactccgcacaaaggtggcctcttgggaatgaaacggttattcctccttctaatgacgcatggacacttatctctgacccaactacaatttgtgcgaaaggtccgccgaaatcatcaacgatcaggaatgagatggatcgtgtccaaccatttg

SEQ ID NO: 266455 - DNA, 466 bp, Glycine max
  unsure (1)..(466): unsure at all n locations
actcaagcttgaacctcttggcaatntctttaaaactagtcacttaagatgtttttatttntgaaagaatcttcagaaacaagtcacttgaagaattgtgacttttggaaatgtatttttcaaaatcagtcactggtaatcgattaccattaaggtgtaatcgattacacattaacagatgtgacttcattttgaatcttgaaaatcttaacattntaaaacactggtaatcgattacatgattatggtaactgattacagctttgtaaatcagtttgaaaaaaatgctggctactggtaatcgattactaccttctggtaatcgattaccagagagtaaaacactttggtaaaaaatttggtgaanacttcatgtcctactcaatgttntgaaaacagttttagtacttatcttgattgagtcttctcttgaatcttgaatcttgagccttgaatcttgatcttg

SEQ ID NO: 266456 - DNA, 52 bp, Glycine max
cctttaggtcacttttaacataggtaggactaaagaaaaacgaaaccctgac

SEQ ID NO: 266457 - DNA, 429 bp, Glycine max
  unsure (1)..(429): unsure at all n locations
agctntatcagatggatgttaatagtgcttttctaaatggtttaattcaagaagaagtatatgttgaacaaccaccaggttttgaaatattggataagccaaatcatgtctataaattgaaaaaggctttatatggcttgaaacaagcccctaaggcttggtacgagcgtctaagtaagttccttatagaaaaggactcttctataggaaaagtggatactactctttttataaagagaaaatcacatgatattttattagttcaaatttatgttgatgacattatttttggatccactaattaattattgtgcaaggaattctcccatgacatgcatagtgagtttgaaatgtcaatgatgggagaacttaacttctttcttggattgcaaattaaaacaaactaaagatggtatctttgtcatcaat

SEQ ID NO: 266458 - DNA, 312 bp, Glycine max
  unsure (1)..(312): unsure at all n locations
tcttgatgcgcttatcttttaaatttatcatattttaaatattggccgaagtatcttccctaacagtcaaattgcaccatcttatattgaaattataacaatttttntttcggctaagtccttgtcccgattcattcaactaactaaaaatatttcgattggaaacaaatgcccncctatatcttgacgatgatnggctacttaaaggggtaagatatatccattntagtctttccctcttcttttaattcttgcaactaactntggattcaatatctctagctggtacatctacaaagatcttttcacttt

SEQ ID NO: 266459 - DNA, 371 bp, Glycine max
cacgaaggatggaaaatattttcgttctaatgttccgaaatgatttatagaagctaattaagttacttgacaagagatgctatattagttgaatttcaaaaaggattctgagaaccacaactgttttcaacaacctaagttatacttgacaatagatgctgagaaacatcataatgttcgcgatttcagtaaaccctaatgttccaaaaagggcgaaaactgccataaaactactaaagaccatgaaggccttgaaagaaaagttcgacatttcagatagctgaccctaacggagggtgtccaccatatattgaaactttgatactgaggacaaatgtcgtacaagatgtgacgacatctcgcttcaaaca

SEQ ID NO: 266460 - DNA, 417 bp, Glycine max
  unsure (1)..(417): unsure at all n locations
agacatatcttatgatacattagccttaatttttgttttactccccaaggtacctgaatgagaggactctggtcaaaagaagaaggaggagagggtatctaagataaggccttaacatgcttgaatgctttagcctctatgaaacctgtctcctttttagtaatgtcaggcataggcacgctgcttgccactttataagcaactgaaacaactttagaggcagctgaaccactttagattgatatatactaatatactactaacataaaataaaactatatataacttgctccaatgaaagacttctccatcatcaatacttaatttatttttatcanaaaagaaacttcatgcacaanagggttagataacaaataatttaagtagaattgctactcaattcatgtcacaaaccat

SEQ ID NO: 266461 - DNA, 381 bp, Glycine max
  unsure (1)..(381): unsure at all n locations
cagctnggtcggatagtacagcacacacactatcttctgatctatatacacgagtggcgcaccatacctatagattattgaccgaagtccatcgctttactcgaaattaatcaactatatccttactctaggatcttttcatgagtgatgagtatttcagaaagctgttttagaattacttgcgccaaccaaatggcacaacataatccataataactataatatggcgtaatatgggtcaaaaacatggtgcggttagaaaaaaaaattgcaatcttgtcttcttttaaaaacacattccggcgatggcagagtataattattacgaggatatcttgcccactattttcctatgtgggactaattgaggggggttcattt

SEQ ID NO: 266462 - DNA, 440 bp, Glycine max
tgtactatgtcggacggcttatacatccaagctgcactactatttttcggccgaactataccctctctctaatctcttgggctaatatcattttcggtacctgacatggtcttctgggctcgttgataaacaaaagacttccgaagccatctgaggtctacctttcttgtccatgtttctagaatgcatgatgaaacaaatattcctaacgagcactcatcttttatttaatgaaatgttcaattctataggtctctatgcattgaaatgttcactcatttctctacaagattgccctaaattacaagttacttggctttattagaagtttctttgctcagcatgacatcattatattctctgcataatggcaacaatgctgcactatgggtactagtactttagaggtaccagtagatgcacagaaagtcttatggaca

SEQ ID NO: 266463 - DNA, 389 bp, Glycine max
  unsure (1)..(389): unsure at all n locations
agctagatgtaagaagagagtccatgtntattancttnagcataanncacatcctttaaaaattctttctcggtaattgacttgcggttatttgactctgttgggctcatggtccaaacaatattgctaaacttatcacccatgggtaaaagagcaattggacctgttggtagaaaacgttgccatgcacattcattttcataagtatgctccaccgtgcagattattgcattctgggagtaattccatccagttgtgttgattcctgctaactccctaacatgtgattttcctccatcagcgccaacctctaaaacaagcatctttgtaaatagacattaaattagaaccatcagaggatngctaattggcctcccacatgtaacata

SEQ ID NO: 266464 - DNA, 446 bp, Glycine max
  unsure (1)..(446): unsure at all n locations
actcagctattcatataaatctttagatagaccagacctatccctanattctctaantaggcaatagaatgacgaggaaaaacttcatataatacaaattataaataatgaaaattaaaatcactgctacttaataacttaaggcctcatagacaaaggaagaaataggtaagctaagttctataaagtaaaatcaagtctattcgagatttaatacaactctcttaatagcttacttaacaacataatttacaacaaaatctctaaataagtaataaactcatcctttaataaacttataggctcgactgtttatataaatcaatgtacttaatatttaacaaggtgcatanatatataatcttaaaacataacaagaatngtaatatagtaataataccaataagaatatattatttagatctaattaaataggatagcctatt

SEQ ID NO: 266465 - DNA, 396 bp, Glycine max
  unsure (1)..(396): unsure at all n locations
agcttctaaacgttgttcaacctcacttatacaccaaggtgttcattaaacaaacgtcttggttatgcttacctttatgtctattttcataagggatatgttgcaattttgcatgtgactctgatgtggggcaaccaaaaatgaggtctttacttgactntaattctgttataattgtgtgttgctaactacattacaagtatcctatggtcccatgagtaccgatttgtgtgcccaaaagtctctctcataatgaaatggaccatataatttactttggcattgatgtggagaacaccttcaaatttgttattcggaatatcctgtggtggcagcggaattattattattattttgttagctgcacttttatggacagaggggacgaaataatgc

SEQ ID NO: 266466 - DNA, 348 bp, Glycine max
  unsure (1)..(348): unsure at all n locations
agcattgagtctgctcgaatttagattaaactatgagttttaacttaaactaaattctggctgtattaagtatgcatgaatctagcaatagccatgattnttagctcaagctaaattctgaagaactggaatctacacaaatttagctcgagctaaattttctagctaaagctaaattgaggtaaagtgctactttctttagagtttccaatccaattccaagtgcacaaattattnttttttattactaggataaagttgattataagtcgagatcatttaattcatatctgtatgtggntttggtgaagcgactatgagaactctaagtgtggaatgtcttacctt

SEQ ID NO: 266467 - DNA, 222 bp, Glycine max
  unsure (1)..(222): unsure at all n locations
agctntaggagaaagagacatatcaacgattgttactacatagcgattatagagcattggatttttagcaaatttaagattcctattagtgttttataaacctatgtaaagagtctatgtcaatgcccacttttttttttaatttctctttgttccctacatctctttccttttggattattttggtggggggggggggggtgacctctcacttcctcttat

SEQ ID NO: 266468 - DNA, 282 bp, Glycine max
  unsure (1)..(282): unsure at all n locations
aaagcccaaaaagaatgatgtcatgattgagtcaacaagttcaagatcaagattaaagaaaagacatcaagaagaatcaagattcaagagaagatgaattcaagattcaagagaagaaaccaaaaagcaacaagtcaagacttcataagggaagtattgaaattnnttttttcaaaaaccaaacatagcacaattntgttntacaagaaaagttnttccaaattnttctaagttaccagagtatntactctctagtaatcgattaccaattacctgtaatcg

SEQ ID NO: 266469 - DNA, 372 bp, Glycine max
ataatagaatttgtttcatagtgcctggtgccttcctttgctgaataatcccaccattcttcctttcttttgggctttgcttcctcctgtactcctggtttgctatttcgacccctgcccctgctgtatctttggttccctaacacttcctgccccatcaaaaacaccttgtcctcaatgtgttggggctacaaccatggctccaaaattcgaaccgggatccccaattaaaatgggtgaaagaatgagtgaaaggtggttagtgtcgccgaagtatagccactttacactgacaatagtatcgtcaaaagtgaagaagaaggagtggtctatctccgtgcccccacctttgcggtgattgtgacgagggaa

SEQ ID NO: 266470 - DNA, 387 bp, Glycine max
  unsure (1)..(387): unsure at all n locations
aatggatatagaaaaaggatttccccaatttaagatactcacacagactttggatgtattcattaaagaattctgagtctcggagtatctttctcctttgcttcctattacttttataggcctaaggtagattaaaattcacgcgatttccaactaagctagctttctgggctttgcgagtatggcggtgatcatgcgcttagcgcaagatttgtgctaagtgcgtctatgaacttctttaacggtcttcttcgcgctaagcttgtgttgacccaatcttcaagatttgcatcaatttttcctcacaagcacttcgtattatcttcttttgaatcctgctcgtaaanaatataaatgatattaatatccttattatctcattaaaaa

SEQ ID NO: 266471 - DNA, 390 bp, Glycine max
tggatccgccactggtataagcttatcactttttgcacagatagaacatcatttaaaggcttttatcccattaaaaaagcacttgtgtaagcttcttctaattatgagaatcaatccctatcttgaaagatggggacatttcagaaaatcatattttaaaggaagggccaaattgcttggtagttagtggcttattgcaatagaactattagtgtggtaacatgcaattacccctaatatttaacttttgtatcaaagaagttcttttataatccgtgtaaggccgattgcctgaattccctaagataatatgcctacatttgttgattaaatcaaacactaatttatcacatccgagcaatccagagttctatatatcctaatacaaac

SEQ ID NO: 266472 - DNA, 330 bp, Glycine max
atctatttaatagccactgctgatctcacgtgtggcattagattggctgatgtatgaaaacaattttcttttttactttaaaagaatgcatgggtccacatgggatgggaaagaaatgtaggcaatatcattgcccatattactctgtagctatatatatacttgacctaagaagtggtgtattaattttggaataaatctttgatattgaaattattggactggtcttttctacattgagcaggatttagagctttattacttgccaccaactagagcacaaaagaaggggctggaggttcatctaacaaatatgctgcctttccatat

SEQ ID NO: 266473 - DNA, 382 bp, Glycine max
  unsure (1)..(382): unsure at all n locations
aacatgttagcatgttatatgtctgaaaatatattaaaatctaatgttttaacctgctattgctaatatactccttttgcaaaacaaggaggagaatattagcatcctttattcatgtgtgtgcgtgtgtgtatgcattcctcaaggtggatctatcaaaagctacgtgtgtgcagttgaaagagcattcatcctccacaccaaccttggaaagtgtagttatgtttggcatgctttatttaataagttttcttagtatcagaattttggaccaaccaaacttatctaaaatggaagttctcaatttgccatgagattccttgattgcacttctaatgtggttacttaatgctgcttgatagaaatttcanagaataccaat

SEQ ID NO: 266474 - DNA, 447 bp, Glycine max
  unsure (1)..(447): unsure at all n locations
agctntgagaatagcccaaactctctctccatttctgatttcaggcttaaataggtggccttgctggtgcttttatgcttagcgcaaatttggaccacttagcgcgcattagtgaatttcggcttagcgcgcgtcttctcgctcaatgaatggactcaagcgatgcgcttagcaggatgacacctcgctcaacgaacatgcacagctcatccttcttcgagattcttcctcacgctaagtggatggagtgttgcactcagcggatggcttgctgagctaacagattggcttagctagcagatgaaaatcagcacttcataaacttgcctaattaacctgaaattgagaggaaatgattattaaatacacaaaatgggagtactaagtatttattacctattnttttaaaaaaagtaattacaacactacaaaataaccataaatggg

SEQ ID NO: 266475 - DNA, 447 bp, Glycine max
  unsure (1)..(447): unsure at all n locations
tagtttatctaatattgctataaagttgactttaagtatttgctttattgcggatgtaggatgtctaaattttcataataattatttactgtaaacaaatgtcataaaaatgatatgaatgtattgatgatgtgatataatgtacgttttgaatgatcatatcatacagtttatgtgagttgacacataagttgagggtgccaagaagatccttaacctattgttggaggtggtggtggtggtggctaactttgaaggggcctatagaatggatggtgcatgaatccttagataggtttaggtctttgcaacccttaccgagataatccattatccatatttattcattagataggtttaggtttangtttangtcttcctaagtgtggctttaacatcggtttgaaaagtgttgcaaaaaccacactttntccaaactttaacatt

SEQ ID NO: 266476 - DNA, 354 bp, Glycine max
cgacgcctcactcctcgatccacatacaattaagatcagttgaagcatacacccactgcccaacatatataactatggggagaggaggctcccttcgctacatcctctaaaggggcaaaattcctcccaaggttcttcttttcaaaagactttcatacaagttgaacacatgcactacaccatgaaattcacaatactattgtgaacaccaatgtcctaaagagtatccttcacagagaccacactcaacctcctataagcgctttcccatctattctcaaagcacccaacctatctaccccacatttttcctcgctaatgaaaattcttgagccatacaaatcatcccactct

SEQ ID NO: 266477 - DNA, 270 bp, Glycine max
agcttcccacattcgtacctgtaaggatctgattacggccttccttaagcagtatcagtacaattctgacatggctcctgaccgaactcaactacaaaatatgattaaacgggaacatgagtcttttaaggaatacgctcagcgttggagggacctagcagcgcaagtagcccctcccatggtcgagaaagaaatggttactatgatggtggataccttgcctgtattctactatgagaaattattgggctacatgccctctagcttcac

SEQ ID NO: 266478 - DNA, 475 bp, Glycine max
  unsure (1)..(475): unsure at all n locations
actcagcttgctcactatgattggcacattgcatctaagtagttatttatatgttttcaaaaaacaataatacgcgttggtgtgtgatttgctttattagttgcatggtagcatttgcaattagcaaaaaaacacacaccacccaaaattggttgacttcttgcttgcttaagataaacgaaataatggttgtgtgtttcgtgcaaactaacattntatggatgtgtctttgcaggcaatggctccaaaaaagcttctctctatagggcaaggaaggatgtcatgggagaaggatccaatgcggctcctcaagcaaacatagaatttgacgaacaccattttcgaagtgaggaacatcaacgctgccatgaagcgatcaagggttggtctttncttatagagagatgggtgcaacagagagagagggaatacacagagtttcaggaggaagttgtcaggaggcaatggactcaac

SEQ ID NO: 266479 - DNA, 280 bp, Glycine max
aagatgatggaactcaataaaccaaaaggggggtgaattggctttaaaaaaaaaaagtttctttaaaaaaaatatagttgcataaaaaaaaacttttctaaacgaatcgtatcacaaaacaaatatgaatcgaatgtaatcaatacttaatcaatcattccttacacatgacctttcattaacttcctttctttcaaaatcacaaaacttgaatctttaaaaccttgataaaactggaatgatttgattaaaccttgaaggagtgaaagatgtgaacaag

SEQ ID NO: 266480 - DNA, 478 bp, Glycine max
  unsure (1)..(478): unsure at all n locations
tataaaactcagcttggtggaggacatacccgttgaagactgaagaatacattatctaacgatgaatcttgaagaacggtcgagaatcttcgcgtaattactcatggaaacgttacagaagcgcctcggcttggattttcttcacggaactaattttcctcagctatttcgtgagagagagaagtgcctaaggggctgaacccttttcttcttcacttcatctcctatttatagcacaataggggagaagcttgccgcccagctcgcccaggcgagcaaggttgcttcctccagaagcaacatccttctggaggaatcttctggagggcccaagtgggcctggttgctatntgcacccccattnttactaaatacacccccttcaatntttttggtgattctttttccgtaatggtacgaatccttacggattatgtatttaatcttttttagctctcgaagaagttacagaaactta

SEQ ID NO: 266481 - DNA, 388 bp, Glycine max
aagcgactgcagctgcactgattaaactatgattgtttttcacctttggaaaatccgcagttcatttactactgcacacttcaagcaagttgtttttgctcaccttttacgaagaaaggaaatcttgtctctatgtgtttcgatcttccgtgtactattggattcatggccaagctgataggggatttgctgtccacatacaattcgactggcctctaaatttctatcttctattcttcaagtaaagagtctagccatagtgcttggcatgcagcatagcatgctgcaatgtactcaacctcgcaggaagataatgctactacatgttgtttctttgaacaccatcatattggcgcagctacgaacttagagacatatcccgtagcgc

SEQ ID NO: 266482 - DNA, 425 bp, Glycine max
  unsure (1)..(425): unsure at all n locations
ataggaaagtgagatgaaattcacttgataagagatcttccacttttctgcatgtgcaggccacgttcagagagattactatatcgacttgcacgtgaagtcgtacattttggactatgtttttggtatgaagaaaatgagatactagtaagacaaaaatagaaaaaatggatggtattataatgtgtctgattcggtggtaaaatgtagtgctgagtgtaaaatatgataagtttactataaaagtaacattcgttgttttaaaaatcattgtgcctttaactcaatctcaacctanacacacacttatcataaaataatttgcaggaaatatataaaataataatatttgaaaaaagtgagatntaatatcaagttagactactaagtacctctttttttattaatgatgatattagtatgaa

SEQ ID NO: 266483 - DNA, 432 bp, Glycine max
agcttactaccattaaaagaatcattggataaaataattatgttcctcatcttccatatagaccagaccacagccatccaccaactttgccacctacttcttcttaacccttccacttgagcaaaggagtgctgaaagaaatgctgagctggattggaaaggaagactgtagtgatactcacccatgatatagtctcccaccaaataggccaaatctttattggagatgcagtttctatggtgcggttggaaaacatttttcaaatccttccaccaaggagaatagtctgctttgtttctgccacagcaaagagtattccatcctccatatttggacattaatattctggcccacagctgatcctgattatttgcaagtcccagctcctttaccaacacggttatttacttaccaagcttaatccaaacccc

SEQ ID NO: 266484 - DNA, 425 bp, Glycine max
  unsure (1)..(425): unsure at all n locations
gcatgcaaatggaacaattgcttctcgcaaatggaagctgcaacaaatgtttacagaagaaaggaaagaaaacacaacatttgtctccattaaacagtgacccaccaagagcatgctcctacagtagaagaatggtggcagaatcttcagcttggcaacaaggatcttcagattcaactttgaagtcatgtagttcctatgtatattaagcttgaggagtttgcttcaaagtctgcatcaacatagtagactacttctcaaggatgggaagaaataataaacgctttcctacataaatccataataaagctaacattgtaaggaaactaanaactccaacatttgatggcaaaaggctagcaaggagctatttagttactcacctgaacacttatatgatcacttttcagttaataattatgcat

SEQ ID NO: 266485 - DNA, 392 bp, Glycine max
  unsure (1)..(392): unsure at all n locations
agcttgtcagagcaatggagagaganaatatnatganaatggagataaaagttgagttaggaggtatgttgagggggtagcataacaggctgacaaaagcaccttagttgcttctggttttaagagctacatttaaacttactccagaataaggtcagtggtaccccctgatccttccactttatttgcataagaattgacactttcacatacataatttaaaagacaatttaataaatctaaaaaatataatttatttattgattttgagaacgtgatctttgaatcattagatttgaaaaaaaatgtagaaactaagagtgtaaggaccttttagcatatcaagcgtgtactcaaaagggtgagggattatattatacttatttcttttc

SEQ ID NO: 266486 - DNA, 417 bp, Glycine max
  unsure (1)..(417): unsure at all n locations
tagatggctcaaagttgattttaagatcaccctcattttcctcaatattaagggtttctatgattggtggatggggcttacagacaataaaatggttaagggtcaaaagctcaccanggtaaaagaaaggtttggatagcaatgatcaatgtggaaacaaagggtactctcataacgagagagtcaactcagggagagagaaaaacttctactctacaactcttttttaaaattttgtattatatgcaatgtgatatatttttatcttcataatttcataagaaaatataactntatcantaataattagatattanagtgaanaaataaaatgttcatattntataaataactgggaaatttgtacttgctttttataaaaaaatatgtgctatattttataaatattnntcataa

SEQ ID NO: 266487 - DNA, 428 bp, Glycine max
  unsure (1)..(428): unsure at all n locations
agctagattagtgagttgattntagctttagtttcacttggttatttctcaactcattaaaagagaattttcaaagtaaatgtccggttgagacttgcccttttgatgattaaccaaggttacgacataaacaatcggttgaattttattttgaaagtgattaaatgagattacaatgcaaacgatcggtcaaaattcattttaaaattgattaagtgagattacggcttaaacgatcagtcaaaactcacttaaaacgaagaanaagaatactgaaagtagacgagacgaacatgaaaacatacgaagcaagaatcgacgcctaaggatgcatagaatgaatccaaagcttcgaaatcaaaaactaaccagttgaagattgcgaacgatgaaaacagcaagaatattccggattggcacggaacgta

SEQ ID NO: 266488 - DNA, 379 bp, Glycine max
  unsure (1)..(379): unsure at all n locations
ggcacctattntgaatcttctatgtttgtcctacatataagaaacagttccattctccccattntacaaaatcatattcatacatcattggggtatttcaccgagcacttggtgggcgcacgtttcaacataaattgcaagagaatggggacaatgtggcatgccccattgcttcagaatacagcataggcctaaggccttctcattcaaatcctcaactcaagaaaacaagcataaaaacaaaccaaaaatgccccacaaatataagcacattctcacaatttggagcaccaaaagatgaagaanatataccaatgggaagctaaaaacatcaaggattgaatacttacttgttggagtgaattataacaccaaaaat

SEQ ID NO: 266489 - DNA, 371 bp, Glycine max
ttgatacgtgcttgagaaaaaggaaaagggataagctgagtttcgaggacccaggaacctcctaatcaagaaaagggaaggactcagaaaaagggtaattcttattcatgtcctgcttggtttatttacataaatatttatactaatatccctaacagaatatggaatattgcttacaagggaatcaaagttcgttaggcttgtctcccactacctgacaaacctcaagcaggaaattacaaagtttaaatccccatctcacccttcagatgtaatccttcaggtaagagggtctgtttactgccctcttgggcctaacttctaattgcacctttcttgagctgaactcttgattctgaatagctgtcttt

SEQ ID NO: 266490 - DNA, 481 bp, Glycine max
  unsure (1)..(481): unsure at all n locations
tactcagctttaagtcatacatgtacatgcacagcacagcttttggttggtatcattttatnccatttcttgttcctcttcactttactgatttttcaaggtctatttctctctttttattattcttttttttctttatatgtgcccatcttttttttttctggtgaagaattttttgtttttgagaaaaaaaaattactttggagttttgtggtatggtagtgaatctataacaagagggcttcttgttgtaggtaaggcacgcagacttgtatttgctgatggttgataccttactgttgtatttgcctataactttgtttcttgtttatgtgaatattctgggaattaaccatttatgaattggagctctcaaatttgacatgctttttatgatgtcaaaagtcttacaaagggaagaattccttttcattcaactcctctcttttctttttctcttatctgttaataccccatattt

SEQ ID NO: 266491 - DNA, 361 bp, Glycine max
  unsure (1)..(361): unsure at all n locations
gatattattatagtctagattctggctcgntgaattgtggtaattaagcattttctttgttgcatttgttccaccacaggtacacatggcaaatttactcacagaggcttctcactctcactggtgtctatggcttctggaagcatgtgtctaaccttgaccgccgtgagagccgccgctatctcgagatgttctatgctctcaagtaccgcaaattggtgtgttgaaaatatcactttctcttcatattctttaccttgaaatatcttatgtcatttaactaacgctaatgtatgttcgtattattcgtttgacctttacgccgagtctgtgctccttgctgttgagtaaactgaggatg

SEQ ID NO: 266492 - DNA, 427 bp, Glycine max
agctcggggtgagagttaaacaagcacaattttaggtcttatggaactccttcctaagagtcctagagccatgaaactggtatagatagggggagaaacaccaagactaagtcttggagcttgaagaaattttgtatttttacatgcccaactcttttgaatggcatttcgtattgatagtagtattgagtgctgcatcttagtctctatgtgttcatatgtacatcatgcatcatcatgtaggagtaaaaagattgttgctaaagttagaaactttcttgagcgcataaaactctccattttaaatgattaccaggctaatcatagttgattacaccagcgtgtgtcgctggaagagagatcctctgactcatttaatccattacacagtaaccgtaattgattctacagttcaattgagacaatg

SEQ ID NO: 266493 - DNA, 463 bp, Glycine max
tatgatcaggagggagctaacaaaagatgtcatgcaggtggtctcttttcttatagttcagactcgcagcagtgatgtgccattattttatcctatttcttaaccctcttgcaccattttaattagtgattagccttaattgtcagattaattatgcagtattatcatttgggcctactagattaattttgtgttgtaatttaatttcaggagaattctaagcaattgtgcttggatctagaattgggcttggacttgaagagagtagactatcttattctacaaaaatttatcttatctagagtttatcttatctagatattatttagatttgatctcatctagatattatttcatctagatcttatcttaacttatctagatgttattctatttatgggcttggattaaaacaaatttgtaagctttagggttgaaaactatatatcagcaccaaggttct

SEQ ID NO: 266494 - DNA, 443 bp, Glycine max
  unsure (1)..(443): unsure at all n locations
agcttcgatcttccaccaccgccgccaccatcatcttataattatattntaatattattattagtactttgattttcagccttgtattttggctatattattatggtatttgaacaatttactatttccttatttgcatggtatgtttgaacaagtatgttatttgactatgtggatttcatagttaatctatttatgattgatgcttcatggttcttacttcatgatttgattgatggtttttcatgaatgttgtatgaatgtttagttatatttgcatacttaaattttgatacgcactttggatttttgttgatgccaaagggggagagaaatgggattaaatcaagaactcacatgagtaatcaatttaattttaagataagcacaaattctaaaacagagggggagaatctatgtgagtgatcgactacgaaaaagtg

SEQ ID NO: 266495 - DNA, 262 bp, Glycine max
cggggggaggttgaggatccactcgccgagaattgctggccggaggggccggaaaagcgtgtcgtcgacagcgagttctggctcccggagaagcctctccgatagctttgcgggtgtgaagtcatcctttaacccacagaaggatttcatggagtccatgatggagatgattgtggagaacaacataagggcatccaaggacttggaagatctacttgcttgctacctttctcttaattcagatgagtatcatgacctcatc

SEQ ID NO: 266496 - DNA, 437 bp, Glycine max
agcttagagatagtagctaacatatagatcctacaactttgagggaaagagactcttggttaatggtaaataagctaaatggagatttctaggttaagaaaccaattttgcaaaaatacttcaacaaaattggtgtaacgagggagaagtttataaccattgaattcatctacataccaagagataagaacactagagttgacttactatccaaactgtccaacattgatgaacaagaaggaatgtaggatgtcatacaacaaaccatccatactcacaagcatagtaatgcttatagaaagtcagacaagttagatcatgtcaatcttataatacatacaggaagccattgcttggaggataaaaaagcccgtagtagaaaaaaggaacagaatatgttgggtgaggaaactctatgaaaaggtaccttaactttt

SEQ ID NO: 266497 - DNA, 357 bp, Glycine max
  unsure (1)..(357): unsure at all n locations
gacaataattattttgaagaaaacaatgagtccaatagtttatgctcaagatgcaactatgggctgaagtttatantgatggattacatagctctcggttaaagaactaattgaggcctagctaatttctcattttcttaatttattttcatgtaataagtctagatgggtgctgacatcttttangtcaatctttatgattttaggcttcccaaattattatggtcattactgggggtttgttgttagtggatatttaatggtaacgggaatttaattctaagtggaaatgatgttataaggaagcctatcctataatagtatgaactctgaacattgatgcagatttgagtctga

SEQ ID NO: 266498 - DNA, 362 bp, Glycine max
gcttcagaattcaatttcgatcgtctcgatatattacatgtctcaatcagacatctgaggaaaaaagttattgtcgtttgaatttgctgagagcttcaacattcaattttgagcgtctcgatgtattacaggacttaatcagacatccgagttaaaagttattgttgtttgaatttgctgagagcttcaacattcaatttcgagcgtctcgatattttacgggactcaatcagacatccgagttaaaagttattgttgtttgaatttgctgagagcttcaacattcaatttcgagcgtctcgatattttacgggactcaatcagacatccgaggaaaaagtttctgtcgtttgaatttgctg

SEQ ID NO: 266499 - DNA, 405 bp, Glycine max
atgctgcatcaaagaggatcatcttattttggtaactatcttttttgctggtcctttctcccctatacaaaataaactacaatttcaactaagcactacttgttaaagtcaacataatgtttaatctgtatttcaaggttgtcaaagtggggtaagacctctgtatgcaactactaatcttttgtctgaagtaacttaattcatgtcaacttcaatatacttttagtctcaatttactcttgatacaaatatatagaagttcctatgaaatatctgaacaatactctagctgtaaaatttatgtaatgtagcttattatggtttcctatattctcttcttttgacaattaatggatgagaacagtaatttgtatttattgaatttgaatagatgtcctatgctat

SEQ ID NO: 266500 - DNA, 424 bp, Glycine max
  unsure (1)..(424): unsure at all n locations
ttattctactcaatanaggcttcnttttactattttaaaaggtgaaatatattagttntatgaattggcatcaaatatgttcgtgacattgtgaaccaaaaactacattaaggaatgagcttagactttgttgttgcttgtaatttatcttgacacaggtaaagttagaggaaaattgtgaaggggtttggatgagaatatttattcgaggggggaaagttcaaaatttaaagagttntaaaaatttgtggagggaatgacccctgaggcatccaaaagagccacctttctcctcgagagaagctcgatttgtatatttggtttggtttccttatattctataacttgttgtggatcnttaaaaataaaatgaatatgtcacatataattagaggtatattgcaaatttgtcagaaaatattac

SEQ ID NO: 266501 - DNA, 415 bp, Glycine max
  unsure (1)..(415): unsure at all n locations
agcttgtcacagagcagattatttacacacaancactattgacaaaccagtacttgtgattgttaacttacctacaaagatagatcagcaaaaggaaaacaaagttagtacttagaacaccacattggtcacgacatttggacactcatttaaagtgagaattgagacaaaatgatgccaccatttcaaggcattaattgaaattcaaagtttgttttttttcacggtataattggggccagtagccagttaactatataaatgtaatcatccctatcttagtcaactatataacgtgagcactgagcacattacaagtcaattcagaagcacaactattttaatagactattgttattataacactacatctaaggaggtttgtgagctacataaccttcatataaaacataca

SEQ ID NO: 266502 - DNA, 473 bp, Glycine max
  unsure (1)..(473): unsure at all n locations
tcgcggtcgtggcaatgctccgcagattgttcttccgcattctcttctgatggactcctcgagatctgcgagagagtttacggtactttctctctttttctctcgttctcaatttgcgaataatgattcaaggaacattaggtatctgtgtgattgcttggaaatgcggcaatgacacgtgaattgaatttgaaagggattttgttcaattcgaaatgaatttaacttattattgttaggacttacgagttagagattgttgttggatataacaagtagcgttaaccgtgaatgtagttnttgattgctgtttcaccacggatgcttggaatgaagagaattacatagtgtacatggatgggatagttggtcaactaatggagaacttgcctgatgcttcgattctgattatcaattntcgggaggaggatacgaagagtcagatggcgaatatcatgtctgagtatgacatt

SEQ ID NO: 266503 - DNA, 406 bp, Glycine max
  unsure (1)..(406): unsure at all n locations
agctntaagaaagattaggtgttttggtattgtttattcaagcgcggtttaacctacctcgcacttggaatattactttttctgcctgcaccgtgagcgaggagaaaaagaattcttacttttcacagtcatgtcaagaacgcctactttgatatttgattctagaaagcacaagataacaaagacttaagactttggtgatctttattcttattaataatttataatagtgttctcaaattattattattatctttaacatactagtttaacaatatctatatataaaaaagagaaaaaaagttatctacatattactaataatcattttattattttatacatttgtaaaaatgttaaacaataatctgtatataattttataatcttattaaattaactaata

SEQ ID NO: 266504 - DNA, 382 bp, Glycine max
  unsure (1)..(382): unsure at all n locations
tggataaagaataagatgtgtacaacatgctgaaaggaaggaaaacatgtccaaattttcaatataaaagtgataactgtgaaaatagtccaaattttccatatacaattataggtgggccaatctggttttgcaaggaatccaaagatgtatctctatggcatgcaactacttacaagatagaaaataaatttattcaaatgtgttaagcacttaagctatacaaactgttgtatgatcttgtggattagatcacgacaatggaaatcattaattctgaatcaaaatgtactaagcaacatagtacatgatatgtatgttgtctatccctctagttntccaaatataactntatttcagttctaggagtaaagaatgatca

SEQ ID NO: 266505 - DNA, 441 bp, Glycine max
  unsure (1)..(441): unsure at all n locations
agctntacggtacccttaccgaacccgttttatagctagagtaatgggtgaagtagaggaggtgcaagagcagatgaaggccgacatggaggccatgaaagagcaaatggccacaatgatggaggccatgatgagcatgaagaagataatggaagccaatgcggttgcagttgccgccaccagggctattgctaaggtgaacccaatgcccccatctgatctcatccaaatgaatcatccaacctcagatatggtgggcaaatatttgggaagtacggacgaccccatgatgtgcaaattcaaaatgagcatgccttcccgctatatggcttgcctcccaactatacgccacctaatgtggcgtacactcccaatgagaatgtcaataacctcactcctatacccattgagagccaacacccccaaactgatcatgcacat

SEQ ID NO: 266506 - DNA, 413 bp, Glycine max
  unsure (1)..(413): unsure at all n locations
acccaatatgcacgatgcttaatctccatcggaaggttgcttgccttaccaaaaaccagcctatatggagacatccccaaaggtgttcggtaagtagtcctttgggcccataaagcatcctgaagtagctggctccaatccttcctgttgggttgcactaccttctacaacacttgcttgatctctctattaaaaacctttgcttgcttgagtttagggatgataagttgtagaaactctatgcacaaccccatacttctggagcaatgatgcccacaacctgttacagaagaggctcccctggtcactaataatggctctagacacaccannacctacaaaatagttagatctctcanaatccataacaactntagaatcattagtgtctgaccctaatntcatctgggtat

SEQ ID NO: 266507 - DNA, 443 bp, Glycine max
agcttggaaaataatttctatacaaaagttagtcatatgaagcgactaacaaactcacccaaatttacaattttgcttgtcctcaagcaaagaaagaacagttcacttgtcctcaagtgacaaagatagtggctaatcaaagaaaatggtgtttgattcatcaaggacatcaaccatgtgaactgaatatcatggaatgcttaaatcaatcacttctcacaagcatgcagcttttcaaagataggagcacaagtattagagtcacagctgaaataagctagtaagcatgacagaaatcaaggaaggatcatcaaccaaaacctcacagtcattgtttcactcaaactcaagtgtttaggcttattccatcataaacaaccaacacaagttccaacctttgcatttcatctcatatcatgtagtaatgaacacactaaaatgaa

SEQ ID NO: 266508 - DNA, 313 bp, Glycine max
  unsure (1)..(313): unsure at all n locations
acatatttctttggctaatagtactccacattttacagcttctaatgtatgattggttggcacaccttcacatgaaactcaccaatttctcttacttatgtctgtacattgcctcattacagatctcttctattttcattgccttctctntgaccctttatgtggtgaacangtgtgatattggtctggtcaaattgggccttgactggtaataaatgtggatgctatataactttatgcagcactcataccatgtctangcttctcttgtgagtatgtgatggatgtacatggatcctcatcaagtgaaatc

SEQ ID NO: 266509 - DNA, 397 bp, Glycine max
  unsure (1)..(397): unsure at all n locations
atgagaaatctccttgggaaagacatctttaaattcctgcaataagggttgaacactaagagaaacataaatagttaactgattagaattatcactctctctctcttgtgtatcactcttttcctcgggtgtatcactcttcttttcatattcctttgtggagcctcactattatctttctcttgttctctcttttctctcattctgatttggtcatcacacacttttctaggggatagaggtttaagagtaaacgaggaagatttggctattcgtctgtagggctcttctttgtacggttaacaaacgttgcattttgtagtccacgntccacaaataagcgctgagatcttccagttgatgatatacaccaccattgtcaccactctgccatgat

SEQ ID NO: 266510 - DNA, 320 bp, Glycine max
  unsure (1)..(320): unsure at all n locations
attttttgtgacctttcttcattgtgttcttattttctcatgatctctccatgcttggaaaatgtgctacatattctttaagtttaccgataacttctataaactaatttatttcatggtcaatttttgtcttaacataattggttagttangtctttactntgcttgtatttttgcgctaacctaaccttaatcttcaaaattaatgagaaaaacctaaaattaagtacttgtacctatgtagntgtatagagcatgttagcataacttgacataaattctatgctgctgatttattcttttcttgcaactattgtata

SEQ ID NO: 266511 - DNA, 420 bp, Glycine max
  unsure (1)..(420): unsure at all n locations
agcttatagtattggagggagaataaaataatccanaatcaattgtacccttcaagtaacgaagaattctttttgcggctnttagatgaggagaggtaggagcctccgtaaagctacacacaactcccaccgcatatagaatatcgggccttgtattgattagataccttaaactccccacaagaatcttgaagatcgtggagtctaccttctctccttcatcaaactttgataacttcaagccaccttccataggtgtgttcacgggattgcaatcaagcatattaaatttcttcaacacttcttttgtgtagcttccttgtgagacaaagataccattctccgtttgcttcacttccattcccaagtaatatgacatgagtcccatatctgtcatatcaaattcatgagatatggact

SEQ ID NO: 266512 - DNA, 375 bp, Glycine max
  unsure (1)..(375): unsure at all n locations
tgctcatctgggtgtctnttctttttcctgattgctttacttgttggacagngaacatattataaaccagtagctgagacttcttatgcctcttgttgttgtagatataaaatctgaaaactagatgatacaattattaaccaagaagtttatttgtggttgagctattacagtaattttcacgctttacttgctcaacatggttatccacatagtggtactgtttgttcctatgtgaaactttcctcgttaggttggatgtcgtgagtgtaagcttagagccagatagctatacattatacactgcaggttcctgtattacttctaaaatgaattagagcattatcttgtgttctattatcttatctgaaaata

SEQ ID NO: 266513 - DNA, 306 bp, Glycine max
attaaatatgaatattctctattaacagccgagattcaaatgaaagaactacagtgtcgagtcaacaattgtgcatcagctgaatcatagtacaaaataaataaatgttaatgtctcacttgttaaaaatatgatggggaaatataatattgtcttgaaaagtaagaatttttttaagtcttttaggtgctcatcacgatatcttaagttcgctcgagcgaagattaattcttctgaaatatgaaaattcgtaagggtgatgattttatatacttattcgttgaccatattcatcacgagattctt

SEQ ID NO: 266514 - DNA, 393 bp, Glycine max
  unsure (1)..(393): unsure at all n locations
aaggagaggctgagccatagctttttctaagaatgtgttcataagctataaccccatatgtacccttcttgggtactctgggctatgtatcatgctcgtcttgtcgatgagggctactcatatttcaatcgggccatgcttgagagccccgtgttgctgaagtctgagcattatgctcgtatggttaacttgctcgctcgctctggacggttagcagaagctgaggattntcttcaaagtgtgtcctttgaccctggacttggatattggaaggcattgctcgcggggtggcaaatccactctaacatgaggttgggagagcttgcagccagaaagattatggatttggatcctgatgatgaatcgtcatatgtgatgttgtacatgctcatt

SEQ ID NO: 266515 - DNA, 437 bp, Glycine max
  unsure (1)..(437): unsure at all n locations
agcttcagcactttgtcaaccattttgaatttattagtgtctgacacttcaaaatcacatgatattcgctttggctgcaccagcttggatattaccgaccacctgctctgctttaactgacctttggggccaataataaaaatcaacaaagactcgaatgagctcatagtgaccatttctgcttcttttaagaagctaagcatggaagaagtctcctcgtctttgtttgaggaagaaactgtgaacttattttgtattgccttcaagtctctcaaggccttcgcaattgcccttttcatcttcttcctacatgccaggtatntgccaccctcagttgtgaatccagtttcagcatctctcttcctgcgaataactgacccaagttcgtgcatgctatcctttgattgcagcaagcaatctttaattgactacaaata

SEQ ID NO: 266516 - DNA, 486 bp, Glycine max
  unsure (1)..(486): unsure at all n locations
tactcagcttgaactcttcagggatatttaccaatactaanatacaataaattcatttattgatnaagtttgaaaaatgctattgatagctaaattaaaaaatattttttatattcctaatacaattttcataatcatttttttctcattctcaatatataaagtatttaagaatcaagtaaaataagaacatattcaaaacataactttttattttatcaaccaaaatctcaaattgtcttgtatatgacataatatcattaaaatcattaactggaactaatttagaagtcatatctacaagttcaatggttggcaatgtaaaaattcttagacagatagtatattaaatttaagctctgaataacattatattaaacttctatataaacagataaatganaggaaaaaaaaaacttccctaaatggacaaaaaanaagaaatacagaaagtactggcctaataatttgaggacaacataagtt

SEQ ID NO: 266517 - DNA, 481 bp, Glycine max
  unsure (1)..(481): unsure at all n locations
tctaagtcacctgcggcatgcaagctntgaccatntatataaacttggatgtgtgtttttttaactaattgctgtgaactaaatacactntgagaagcaattaagttattattaatgttgtattaccttgttattcaaatatccgttgcatttaccgtaaagatataggatatcaatcccaaggattctgtaaaagcattttggggtctaagacgaaaatgttaaaggggtctattttttacaagaattttaaagagacttagtatattacataaaatactaattnttatattaatcttgtagcttttttagctgcaaaatcatttattagagttttataatcaaacaattctaacacttcactttcaatagataaaataactaactcattcaatctatcttataatattgggtgatttagatatgattntaagcaatttaattttgaaaaacttctttcagcagtaataaaaatttatat

SEQ ID NO: 266518 - DNA, 428 bp, Glycine max
  unsure (1)..(428): unsure at all n locations
ttgtaattaagggaattttttagaattatttaattggagtaatagtttttttgttacaatgaagtatcaatgtctagtttaagtttaatacagcaagaaaatagattttcttatttttatgattcacaaaatatttaattgaagtaataattgtattttttagaaaaaattaatatgtgaagtttaagcgtataaatttttgtaattaggttttttactttgaagttattttaattggttaattatttacaagcattacaaatatttacctaattcccttctagttntttgaagntataatgaaatttgaatctatcgtttaacgtttaagttaggttagtagatgaagcaagcaaatacaattatttattttaaaactgctcttggtatgattaattattnntaattntggtcatgtacgtatataa

SEQ ID NO: 266519 - DNA, 453 bp, Glycine max
  unsure (1)..(453): unsure at all n locations
agctaggttntgggcaatattaccctatctgacgtccccaaggtctcctgacccccgcgacatatctccaggtaccactctgtggtcaacaataaaagcaggaagtttcacccttcaacacttcctcatctcaagcttgtaggattatggggtacccatcacatgtggtactaggtggcggtcgggcgatggtgcacaacaagttttccacatccacaatgcgcgcataaacccaccatcccctgttgcccacctccaactgagctcacgtactcccacgtagcccatatcctcgtttctctcaacaccgggtccccatcaatcctctcaagcttccacaacatccaagcaaaacaacattcaaacagcataagctatcacagccaagcaaaagcagagcataagcagaaaactctgctcaaacaccaaccaaaatcacagcttttctcactt

SEQ ID NO: 266520 - DNA, 481 bp, Glycine max
  unsure (1)..(481): unsure at all n locations
aactcagcttggnaggatgctncaatggaggaaaagaaagaggttatttttatagatgggggagcacgacattgaaggaagaataagggagagaagttgaactttgagttgtgtctcacaagactctcattcatcaaagttacaacaagtgttacacatgcttctatttatagactaggtagcttccttgagaagctttcttgagaaaacttccttgagaagcttctttgagaaaacttccttgagaagcttctttgagaacacttccttgagaagctagagcttagctacacacacccctctcataactaagctcacctccttgagaagcttncttaagaagattcataaagaagctagagcttagctacacatacctctctaatagctaagctcacctccttaagatgagaagctagagcttagctacacacccnctataatagctaatctcacccctatgccaaaaacatgaaaatac

SEQ ID NO: 266521 - DNA, 446 bp, Glycine max
  unsure (1)..(446): unsure at all n locations
agcttatcatagtaaaattgatttacttttattatatggcattnttaggaatactaaatatataaaaaaggaatactaaataaagtaaagttgttaagaatgggtcattgaggtgataagcgaatatgcctgtattttcttatttaaatattcacagagaaaatcaaaaacccttctcgtcttcccaccattgcatattgttatttattgggtatagaataaatttgttttttttttatttctacaaatatgattgtttcattttacgagaaaatttaatgaaaggctagagtctataatataattttttcaagtgcaataaagttacataatgtctattttttttgttgatagaaggggtattctcatgcgtattgcacaggtcacgttagttttcatccatattataaaatgacatgtgaataaactgatacgtttctataact

SEQ ID NO: 266522 - DNA, 437 bp, Glycine max
  unsure (1)..(437): unsure at all n locations
cttttaaagccttttatgttgnttctacttctaggcctttagagctcctacaccttgacctatttataccaactaggacaacatccttctatggacgcagatatggtctggtcatagtggatgattacactagatggacatgggttaggttcctaacccacaaggatgagtcttttgataccttctataaattttgtaaaaagatttaaaatgaaaaaggtatttgtatctcttcaatcagaagtgaccatgagggagagtttaaaaatgatatttttgaaaaaatttgtcaagagaatggtattcaccacaattttccactccaagaacaccacaacagaatggagtttttgagagcaaaaatagatctctttaagaaattgtaggaccatgcttaatgaccacccaacccctaaatacttctaggctaaagtagt

SEQ ID NO: 266523 - DNA, 454 bp, Glycine max
  unsure (1)..(454): unsure at all n locations
agcttcaagaattatgatcaagattcaagattcaagattcaagaatcaagagaagacttaatcaagataagtatgaaaaggatttttgaaaaactgagtagcacatggatttttcacaaaacatgtttaccaaagagtttttactctctggtaatcgattaccagattgttgtaatcgattaccagtagcaaaatgtttttgaaaaagttttcaatttgaatttacaacgttccaattaatttcaaaaatctataatcgattacaatgttttgctaatcggtcacatcctttcacataaaagccttgtgtaatcgattacactgatttggtaatcgattaccagtgattgtttctaaataaatcaaaagatataactcttcaacaaagttttgactctttcaaatttggttntaagttctttctaaaagtataactcttctaaatggcctcttg

SEQ ID NO: 266524 - DNA, 460 bp, Glycine max
  unsure (1)..(460): unsure at all n locations
tggcccgaaatcgacaccttgacacccaaatttgtttcgtcccagatatcaagattgggttcccacgataaaagaccccattgaaacacaaccttagactttntgaaccttggcctataaaaaagaatcctcattccttcctcgaagcanaggacaacggaatcacctcaagggagagcgaatagaatgctaaaacctgatttcccaaagaaagggatgggaaaggagaagtgaaaagaaagaaaaggaagaaatggaaagaaagaaaaagaaagaagatgaaaataaagaanagaacaaagaagaagggggaagattcccggtcgaaggttgaaaagaagtgaaaagggaaaaaagcaattctcgatcaatgaaagaaagaggacataaattcttcaaagccagattgccactcagaatcattcttgactggcaatatcccaccccacatgaacaaaga

SEQ ID NO: 266525 - DNA, 418 bp, Glycine max
agcttagagaatcactcttctttgacatgttttctttctttattcggcgtccatgtataagagtatcttgcctgttctggttccaatttcaactttcaactcgatcagcacaacatgtattaactatacgaggtcaaagatacgggtgagatcagctttacctgaatgggtatgttactacgtaatgtgcctgtgtaaatctttattagtgtcatcggagttccttaacattggataggaaacactcaaacaagcaactagtcagccagtcttacattttaggtggagattcatttttccatgtatttcttatacagttccatgggtatttaaatgtatatgttattctcacaaaatcaaatctttcgtgtgtgtgtctatactaaaaaaagtgctataaatttataatataaaatac

SEQ ID NO: 266526 - DNA, 407 bp, Glycine max
  unsure (1)..(407): unsure at all n locations
ttttggtaaaaaaaaataatttaactcattctttgccccctcccctagctcttttactttttgtcattgatctcaaggaccaggttttcaatgaggttatataaatttttacatgggacaatgtcatgacagtgagtaagaaggaattgcaaatgcacttccttattatatttaattatctaatttcatgattttttcctacttataacaccaatatcaaattctgtgggattcttgctcttccatgctntatggcggtatttaacataaccattttgtgataatttagtatttttctgtacgattgtatggtgacaataacattgtttgtttcatgattgatattggaagcaagctgccggatacaatcaaatcttttggctgtgtgcagggaattctgatctcaa

SEQ ID NO: 266527 - DNA, 423 bp, Glycine max
agcaagcttgtgttggttccaatggtaaaaatcttggaaatccaaatcattcttgggatgggttcaagaatgctgtcatccaaaggtttcacgtttcgagcttgggaaatccttttcaagcgctgctggcactgcaacaagaagagacagtgcagggattcataggtcaatttgagaagtgcgttggaatggtgaaagggttggaggagccatttctggtggaagtgttcctcaaggggttaaaggaagagattagcactgaggtgaggcttcatgaaccaaagaacttgatggaagccatggttaagactcaaagagtggaggataagaacagaatttcagggaaagttacccgtggataatggtagagcgagtaatttgcacaaaaatgttcttttggggccaaagtgggtaatgggattg

SEQ ID NO: 266528 - DNA, 370 bp, Glycine max
  unsure (1)..(370): unsure at all n locations
aatacagcccaaaaaaaaagctcgacacaaataanatggtctactctcttcaagccaagccggntcagcccaattccggatccaagcccaatttcttataattcttctgaaattaaattaaaaacgtaaattagttaagtaggcccaaatgataaaactgcataattaatttgacaattaaggctaattagtaattaaaatggtgatagagaggggtaagaaataggagaaaataatgacacatcaaattccnccacacttagccttttgcactccttgcaaaaatcaaaaagcagagcaaggaacaaattctgagacattaaagagagcacacanacacaanaacatttacatatttctcaatgaatat

SEQ ID NO: 266529 - DNA, 420 bp, Glycine max
  unsure (1)..(420): unsure at all n locations
gcttatactcgattcaaatagcgttgaccggtgtggtttacggatcgatttagattctgagcactcatctacaaagtaatatgtctagttacatgtgtgaaagtgttaagttttgagaaataatagcttagttgttaaacatttcccagaaaatcgatgaaaaaaaaatacttttttttaaaataaattaaatcaaacacgcatgtctgcaggagaaactcccaagtatgctagttagcaagtattttttttgcattacaagagttcaagaaattttaacagaataaatttaaacagaagatatttaaaatgacacacatttaattaatttatctaaacatatttaaatgttttacaagaataaattnttcaagtttactccatttgttgtacttaataacctcttataaaatgtgaaat

SEQ ID NO: 266530 - DNA, 409 bp, Glycine max
  unsure (1)..(409): unsure at all n locations
gccgagtcagtttccctcgtgatcactgcattcccaatctgcacaatgtatataatatattctttgatgttacctttgttctattctttgaataaattgctcatcaaactataataagaatctaaatcctttatcacttgactcctctttttaataaactcaggagaagttgttaaacactcctttcttgtgtgaatttatttcttaccaaagtttttttttttcagggtacccagagttgttntgcatctataacgtatatttaatcatctatagtaaaaacaaataattgataagaataaagtaattcatcctaacttatggctacctcaggaactccacttgctcttgattttctttttctcattttgtaattttaaaacctacttatctccctgtagagcatatg

SEQ ID NO: 266531 - DNA, 378 bp, Glycine max
tctttgttcttgcttggttatggatattgatgttgaaaatctcatggattgtgttctggtaaaattaccttttgaatctgaaatttgattattattgttcctactttgaattgttaaccgcttgaatatggaattgcgtattattctttctactttgaattgttgggaattggttattattgtctctgtttgaacttataaaattgtctctatgaaaacaaaatgtcagtaatgttttaaaataccataagaaacacaccgtagatatgtagtctataaatgcaaggtctagactaagcttcccataaggaaaattagattaccaatgccgccgagtttaagctctaccagtaaaatgctcggcccacaactatgtta

SEQ ID NO: 266532 - DNA, 204 bp, Glycine max
  unsure (1)..(204): unsure at all n locations
actagcttaaattgataaacgtcaaactgtggaattattatcttatggtatngatactaggcaatttgattcaatttaatactgtgaaatcattaagcactggatcaatacatccttggaatcataccaagagaaattgtgaaaagattttacttaatttctggacaacctttgtacttattggattccttctattatatacct

SEQ ID NO: 266533 - DNA, 451 bp, Glycine max
agcttaacatctatagatatttataggtggatgctcaactactacaagatactgttctatgacattgaatgatggatattgtatttacgcaacaatatgtaacatagctattgtatctaggtaatagtatatgtccaactattgtatttagcttaacattgaatgatggatattgcatttagtaaatattgcatgactattgtttctttcttcttagtattgtaatctttcttagaagataaacagatagtgtttctaaaaacaattgtttgataaatcattctcacgcgttatgaacatacttgggtagatatagcgctctgttttattcttttcagaacctagtagctctcataactaacataaaacttcttcgactaacaaataatggggtgatactcacagtggcttatatgtcaaagaatgccatccatattagttgctgtgcctg

SEQ ID NO: 266534 - DNA, 446 bp, Glycine max
  unsure (1)..(446): unsure at all n locations
atgctagatatatnaccaggataaatcatctttatatattcttttatgaaaatataaatgcacagacaggtatccatgtatgccttgtcactgaaaatatgtgaatgatgctgatgagaaacgagaacggtaatctattggaggatatcgttagttaatattgttatttcacatctcagttgcccaagataatgaacgatgatgtgatctgcttataacagcatctgatgttatctgttttctttgtacatacaggaagatctgacacaggtccttgaggaagctggctatgcaaaagattgttcattactcttgtctgacttcatgatagtactgaaataccatgattgcttcactagaaacttacattaattatataatcgtttaatacgcaattacaactagggaaacgcattgagctttactattttgtagtactcttatat

SEQ ID NO: 266535 - DNA, 368 bp, Glycine max
  unsure (1)..(368): unsure at all n locations
tataaaactttcaatgtaggtcggctagagttctctggtgcgagctcaacggaagttgtgtttcggtcgacaccggcatgttttcatttattcggcaagaaaaacattatccgatcgaggtctaaaaaagaagatatcactgggtgacgccgatcgaacattttctaatagacatcatccaaatattattcagggattgaattgaaaataaaatacccggcatcgtgcgttgtaaagccgagacttatattnttcagccgacattgtgaaactattttaacaaacgcaggccgatagaattttttacggacacgatcttctttgttcgatgttggcgaaaaatgacaaagaggtcggtaggttttcgt

SEQ ID NO: 266536 - DNA, 432 bp, Glycine max
gcacctgagctgcagctgagatatgactttgatgatttttgtttattatgcactctggctctcttttgatgccaaagggggagagaaatttgggattaaatcaagaactcatataattaaataacttaatttcaagtgaagcttaaactcaaaaacaaaggggtagagttaagtgagtggtcaattataagatagagcttgcatgcatttcttgatttcaggtttgtcatcatcaaaaagggggagattgtagaagcaagcttcatgatgatgaaccaagcaattttgatgatgccaaaagcccaaatgattaattcaagattgattcaagacttcaaaatcgagcatcaagaatccaatccaagattcaagattgaagagaagaaatcaagaagcaacaagtcaagacttcatataggataagtattaaaa

SEQ ID NO: 266537 - DNA, 432 bp, Glycine max
  unsure (1)..(432): unsure at all n locations
tgagaactctagcctctctcttgtatgcctgaagtgcgctcttttttagcctcaaacgctttgcaaaatggcgaccaactcgttaggccaaagccttgtaagccatccacaaggaccacaactacgataaattcgtgttcaaatgattacacagcagcttctgtgtctcactcttactctcaccctttctcacacaaccaaagttgctcactcacccgaaattcaaccgagaantttgagtattcacacagcaaagatgatcaaatntggcattgtggagaggggactaatggctcggttcataacaggttcaagccaattggagatggggttgctttggccaattattccttcatgcaagggaatagtcagtataaggctactagttcagaataccaatcttttttcccttcagaattgcctgcaagagtg

SEQ ID NO: 266538 - DNA, 451 bp, Glycine max
  unsure (1)..(451): unsure at all n locations
agctagtattcttcttttcacttgtcatgcatnatttatatggcgtatgtaattaataaataaaatgttaagaaattatgatttttggaaatcaattttaattcattttctcacaaaaacattttcaaggaaagaataggaattcaatttttttttagtggaagaaaagttttagtgacgcattttatataaatctttcattatcagaaaatatattaagacaaactaaacatattatacacattattaggaatcatgatttcctgtagttgactttctcaggaattatgattcttggatataaaatatttctcccctatcaaacacttcctaaaaaaaattatacatcttttgacttggttaattttgaagagaggactatataaaaaagttgattttggagagagtgattaggaagcattcgataagggcgtttgatatcaattttaaa

SEQ ID NO: 266539 - DNA, 302 bp, Glycine max
  unsure (1)..(302): unsure at all n locations
aagctcaaagatcaagaacaattcatgattacaaagatgatgatctcaagaatcaaagaatgagttcaagattgaatcaagaacaacacttcaaggttcatatttcaagaatcaagtttcaagattcaagcttccaagaattaagatcaagattcaagactcaagattcaagaatcaaaagaagacttaatcaagataagtattaaaaagtntttcacaaactgagtagcacatgaagttttctcacaaccttttaccaaagagtttttactctctagtaatcgattaccagaatatgtaat

SEQ ID NO: 266540 - DNA, 442 bp, Glycine max
agcttatctatccacatgcagataattaattatggggtaaactcaagaatcttcaacgacccacgtccaattatgaatttagagaaaaattagcgataacaaaagaaattaataccaatataataaggcttttagctgtaaagtatcagtattttattcctgaagagccctacaaaaggcaaggggacaaaaagaggattacatggaaggaaatattgccaatattttaacttgacatgtgtggtcacactcattgttgcattcatgcaagacaaccaatcaatttatccaaagccacatcttttgattaaaagaaaaacaataaatccgaacaaatgaattcttccatcggcctacgtatagttagaagtaaaagaaaaaaagagaatataaagtgggattagaaaagatgggacggcccatatcgtctcttaactagtat

SEQ ID NO: 266541 - DNA, 432 bp, Glycine max
  unsure (1)..(432): unsure at all n locations
tccactcatattatacaattgctcattcaaatcattctcaaacactcatttcatgcaaaatgatccactacatatcattntcaatcaattcattgttcaaacacgttgttggtacaagcaaacaactcaatgtgctgaaatttaaataactaaaacttaaaaactgaaattaaaatgactaaacataaatcataaaataactgaaaataaactaaaatgttcaagatgcacaaatttaaatatcctgctcctgtgcacgctcattgaggtccaacacctgagcaactggtggatcttaagagataggctgctctaactcagatgctggtgcagatggtatggcatcatcangtatgggtgctggggatggctctaggttctagtctatagaagtctnctccntctgagccatgtgtacacctgcatcaaaat

SEQ ID NO: 266542 - DNA, 450 bp, Glycine max
agcttctatagaaggtttgttcctaatttctctacaattgcgtcacctctcaatgagctagtgaataagaatgtggcatttacctgtggtgaaaaacaagagcaagcctttgttttgctaaaagaaaagcttactaaggcacctgttctagctcttcctgacttttctaaaacttttgagctagaatgtgatgcctctggagtgggagttggagctgtattgttacaaggtgggcaccctattgcttattttagtgaaaaacttcatagtgccaccctcaactaccccacatatgataaagagctttatgccttaataagagccctccaaacttgggaacattaccttgtttccaaggaatttgtcattcatagtgatcatcaatcacttaagtacattagagggaaaagcaagttaaacaagaggcatgcacaatgggtagagtaccta

SEQ ID NO: 266543 - DNA, 489 bp, Glycine max
  unsure (1)..(489): unsure at all n locations
tacggaccttgaaactcagctgaggcaactgatgcttggtaacttggaacccatctggccttgaatcagaaatctgtacctgttgcaagggtttgtggtttgtgctcctctgctgaccaccatacagacctttgcccttccatgcagcaacctggagcaattgagcagcctgaagcttatgctacaaatatttacaatagacctcctcaacctcagcagcaaaatcaaccacagcagagcaattatgacctttccagcaacagatacaaccctggatggaggaatcaccctaacctcagatggtccagccctcagcaacaacaacagcagcctgctccttccttccaaaatgctgctggcccaagcagaccatacattcctccaccaatccaacaacagcaacaaccccagaaacagccaatagtngaggcccctccacaaccttccctcgaagaacttgtgaggcanatgactatgcagaacatgcag

SEQ ID NO: 266544 - DNA, 455 bp, Glycine max
agctagcctaaatgaacctacctcgctgtttcgtgcatattcgtattagataatgtgaataaaacaacaattgaatgtgcactaaattataattcagtagagataaagaaaaaaaaggacgtattggatctcttaaaatgtattagcctaaactagtagttaattctattaagtttgtgattttcttaaacttccaagtgtgtatattggattggtggtgagttgaagaccacaattttcagagacaacaaatagttgtttttttcggtaagcttaccatattatgcattcatcgtgattttttaccaccaaaccagacaccttaaaaagtaatgtttacaaacatgttagattacgaggctaagtgagcactaatgtaaacctatataaaatcatttcagctacataaaatgtgtaactatatgcagatgaatgattactcatttcataacggg

SEQ ID NO: 266545 - DNA, 391 bp, Glycine max
  unsure (1)..(391): unsure at all n locations
ctcagcttcccagtttctggtttttaaaccttgaaaacttgcttcttttattcttttcatatcttctccctttgccaaaaagaattcgccaaggactaaccgcctgaattctttttgtgtctctcttctcccttttccaaaagaacgaaggactaaccgcctgaattcttttgtgtctcccttctcccttgtcaaagaattcanaacgacacagtctaagaattcttttgattcttccctttccctaatacaaaagtgttcaaaggactaaccgtctgagaattcttttgtatcctcattcataaagtatcaaaggtttaacagcatgagatctttgtcttaacacattggagggtacatcctttgtggtacaagtagagggtacatctac

SEQ ID NO: 266546 - DNA, 430 bp, Glycine max
  unsure (1)..(430): unsure at all n locations
agcttgtgttcaatggtcaaccttatgactgatgctttctgttttgaatctttggattatcttgtatcaacctatccaagcttgtgttgaatggtcaaccttatgactgatgctttctgttatgaatcttctgattatcttgtatcaacctatccaagcttgtgctgaatggtcaaccttatgactgatgttaatgtaaggtgcaatgttctacaacaatggaatgttttaattttggacttgtcatataaattaaagtttgagcatatcgctatgatgtcttaattagtgtaggaacataagttaaatctgaaaatagaaaattgaagataaaattcaagtcagccactttatagaaagggattagatactttgatnttccttattttatgaaaaggtaagttacccacttgcttacagcgattgattc

SEQ ID NO: 266547 - DNA, 453 bp, Glycine max
  unsure (1)..(453): unsure at all n locations
actcagcttatgttgtgtaagtgctgactgcttcgttttgcngtgtgataacggaattattctgaagtgtagatgagaccgatgctgccaacgtctgtgataagagataattatcagtactagtgcttgtaatgaagagagtaagacttgttatttttggtatgcttaaattggaagggcgtaatgcaagacaagggtgaaaacgttggcttgctaagctgtgtagtgtgatgaagtcatttgatgcatgcatctatctttgatttatgtttgggttagaaagatactgaagtgattaggcctttatgtctttcgaacttgtggaagaccacccaattggcaccactttcgtgtgtagattactgaactataatctcagctctattttgattgtagtagtaataggcaatgcctatgtttgtctgtattacttggcaggttgactcatggtta

SEQ ID NO: 266548 - DNA, 440 bp, Glycine max
agcaagcttgaacaatatacttggccttcatttaactgtctttgggcttggcggccacgctcaacaaagtactttcgacacctactgtacgttgatttcaccaatgctgttatgggaatgttgcgacaatcctttaaaaccttattgatacattctgagaggtttgttgtcatgtggtcatatcgacgtccttctctatcgtaagccatcgtccatttttcctttgagatgcgatcaatccatgttgctatggctggactcagttcacgaaatttttctaaattttgatcaaaaatgtgcttgcaaggagtgtaggctgcataaaattagttatgaataacaattttaagtataaatgaaagtaaaataaatgtgaccatcaaatatgaaatcttacccaattcttcaacatttctttgtgtttggcattattgaatttt

SEQ ID NO: 266549 - DNA, 467 bp, Glycine max
  unsure (1)..(467): unsure at all n locations
ttactttcttaatattaatttcctaacagataatgcagattccaaggacaaaatggaagagataagaagccaatgggaggagttgcaacaagcaaggaaatagaacaaaaaagacccgtgaaaggtcaaggttcaatgaatgaataccactagtaagcgttgagtgcacaggtcatcaaatcatctcatggaaaagaaaaaaagaaaaaaaattaaacatgagactcattgttaataacgatgtaaaaccacttgacattaatttcatcttctgcgtattggtgttggtgtaagtctgctcttttttttatatatacacnatattaattattaattatttgattttaggtttaattactatattntataattttaaacttatctttnttgataaataaattttttatcccttaaagtttatatttaaaattctctatccaacaagttaaaaaaaatttaatgataaa

SEQ ID NO: 266550 - DNA, 449 bp, Glycine max
  unsure (1)..(449): unsure at all n locations
tatgtgagacaaattttcaccatggttcataactcatttggnggttccataaagtgccttagatctgataatgctaaagagcttgctctcactgagtttttggcttccatagtgatggaagcttgcttgtggagcttctatggaggctggatctttgagcttcaatgaggttcttcaatggtgattttacaccatggagatgcagtggaaggcaaaggagaagaggagaggggaggcaccatccactagggaataagccaaggaagaaggagcttcgccaccaagaattgccttggataagaagcttgaagaggatgctttaatggaggaaaagaaagagagaaggggggagcacaaaattgaaggaataaaagagggagagaagtggaactttgaagtgtgtctcataagactttcattcatcaaagttacaataatgtgtacacatg

SEQ ID NO: 266551 - DNA, 417 bp, Glycine max
  unsure (1)..(417): unsure at all n locations
cctccatggtaaatttggaatctgtattgtcgcccgtgcctccttctcctgtcatacaataaattacttgcatattagacatgttatctacaaatgtcaactaaaactaccacactgcattgtaggtaaaatattttccaagcaacagttttaacaaaacaaaacaatgtgaatgaaaaagcatcaaccttcaaccaataatgtaatgtcagacaaagaaagaacaataaaaaacanaatgcatcataatacaggagtgataaccactaataactatttggaacaaanataccatattgtgctctgaatttatgtttagctntcaccaggttcgacaacaaaatgttcatttctataatactcatgtcacnaaatgttaaaacagaagaatccaagaattgttaataatcactcatt

SEQ ID NO: 266552 - DNA, 521 bp, Glycine max
  unsure (1)..(521): unsure at all n locations
ccaacctgctgctttaatctcttccgcctctccccagcacggtcnttgaacttgaccgtgaccatagcaccgagctgcaactcctcgagccatttctgtgagattattcatgtgtaaagtatgtttaccaaaaaatgctactcttaatacaaacatggcatacaacatacaaacatcaatgtaaatctagagtaaacttatgcacatacttctttacaaacgttcacttgcacaaaacattcttataactaagaaaaacgcacccatgtacaatcaaggcacatccgctacctagattatttatatgtacttccaaggtgtatttgctacctacatcacatgcacttccttggctaaatttacatacatgcctactcaaagcatttggggtaccaaaaattgcacatgtgcacattccggtatttctaatatctatgcctatacaaactgtgtgatgaatcttgctacctaacaataaggggaacatctatgctttatcaatgcttggctcctaaacccat

SEQ ID NO: 266553 - DNA, 467 bp, Glycine max
  unsure (1)..(467): unsure at all n locations
attatnacanaagaactatgattatgtgaagaatatattcatgttgcttctgatgagactggccctattaggccaagaaaagaaacactcgatgatattacaaattcattagaagacatacacattgatgagaaaaggcctaaaggcaaaggaaatggtaatgaagaagactttcacttgattgaaataaaacatatatagatcttccaagaaagtggagaacttcaagatattaatctcttgataatatcatcagtgacatctcaaaaggggtaacaacttgacactcttctcaagatgcatgcaataatatggcttttgtttctttaattgaacctacaagtctaaatgaagccataattgatgaactctggattattgctatgcatgaagagttaaatcaatctgaaagaaataaaatctgggaattagtggacatacctaataatcatgcagttatatgaact

SEQ ID NO: 266554 - DNA, 149 bp, Glycine max
  unsure (1)..(149): unsure at all n locations
taatcacacattaaacataactactaataatatatatatatatatatatatatatatatatatatatatatcagggtgttacacaangcgacttgngcttctgagttaggacttcaagaccgttcatcagaaattattcgtctacacat

SEQ ID NO: 266555 - DNA, 303 bp, Glycine max
  unsure (1)..(303): unsure at all n locations
agcttaagaaagaaggagagagngacagcatgtctcttttctgcttantcgaggctcaaggtggcaaggaggtgggggatttactggggaggttaccatatgaagctaaggtgaacctcttagccacggtgacgaagggcgaagtatttttagtgttgatgtccatgaaatcatacaaagtgccaagcccaacagctgtcaggccattttcttcaaaatatattgggatgaggtagaggaagacatgtggaggttcgtaaaagaagcattccaaacaagatcttttaacacaacatgtggctg

SEQ ID NO: 266556 - DNA, 338 bp, Glycine max
cctgctaatattatgccgcaatcttgtttttgggataccgccactatgtcgtatcccccatactcaccataaccttctatcgactccttccaacaaactcggcgccatatatgggtcccaccacgtgctatgctctccgtcttgaccactctaccaatcgaatcatgaattatatgttcgcgatcaagacatattgcgctaatatccatggcacctgaggggacagggcatggttcaaaggtcttatgaggagggctggactcgaatggactcacctgcagcaaacggtgggtatggaaatgaaagattaggtttgctgagtcactcagttaaactaa

SEQ ID NO: 266557 - DNA, 350 bp, Glycine max
  unsure (1)..(350): unsure at all n locations
atctctaaggcacctgacgcatgcagcaatagttatagaatttttgttttttaacccgacaggaaatgattagagtgttatacatctacaatccctctcccataacataacatgtgctagctggacaataactctaacaatatcagggaatagggattttatgtaatcattcatagtccttttggcaataaactcagcttttaattccaagaaaacatataaagtaataatacaaaaacctgcattgataatattcgtagttcacttgtanaaataaataactattactattaatactcaaaaaagtttctccatatttcctcgttatttatttggcaaaattacaaatt

SEQ ID NO: 266558 - DNA, 396 bp, Glycine max
agcttgtcaaagatgaaatatttatgttatataatgatccatcgggtaagtatggctactcgattcaagagataatgttagttactcaatccaatagattatgctagttactcaattaagagataagtaatgttcaatcatcatcctctcttccaactcaacggtatagctatacacataaaacattataagtatgtagatgtaaagaaataagtgaaagtaaaagaaaatacgatgaaatgtaaataactaaaattcagtgaaagcaacagtaaaataaaataaatataaagaataaaaatggaatattttggacaataatcccacaccaaccaaattctacaattaatgttaatgaaaatgccaacatggtgtacttaataaatataatatcta

SEQ ID NO: 266559 - DNA, 447 bp, Glycine max
  unsure (1)..(447): unsure at all n locations
acctacttcgactatattgggtgaagaatctcactttatattagcaaggnctttctcagttttgcatttcagttgcatgttccgcaacctaaccaaaatactgtatgttcattctccgatgtatagaggttgtccacttgtgttgcttgaagaaactgacttcattaggtaaggtactttgtatatatttattgatgctcttggaccacattcnttattggtttgtacattatattgagttgttgcctttctatttgcagcatcctcttcactatcttagagttcatgtcgatgtctcgctcctcttaaaaaattcggtttatatgcatgcttgatgctntaatggttatctatgttagtagatgatcatggcacgcgagctgaacttcattatggaaatcactcgttcaaaagatgctcttaaagacactgagtgagtgtgtgtgt

SEQ ID NO: 266560 - DNA, 436 bp, Glycine max
  unsure (1)..(436): unsure at all n locations
agcttgaggtccatagcttattgcttatatgatntatggcaatgttgagctgagggagcttgcaactgttaggttattagacagtagtcctggaagctctggaagttatttattaatgacggctaacttgtctacctctttgggcaggtggaaggaggcacatgttaagaaatctgatagatggtaaaggattggttaaagaatgtggctggagccaagttgaggtcagcgatagctataatacatttgctgcaggaaattaatcacaggttgttttgtcattatctataaggcactagaagatctaaattntattcttcaagaagctagcttatacagcagaaacaaatacaatatcagtgaatgataaacgtattgaaaaacagagtgggaacgtcgaaacctaaagtatcatagattgtgcacacgtgatcat

SEQ ID NO: 266561 - DNA, 422 bp, Glycine max
  unsure (1)..(422): unsure at all n locations
tatcaatttacgtgactcctgtccgactatcccccgtttctattgcaaattccaactcctttatgcctcccatgtgactctcctgcagcacacaaaattcaatatttgtgcaaattaacacactggactgtgtgaaaccaccttggacaatgagcccaaaagtctgattggatgagctgcaaacttgaccagcatgagttgtcaagcatgattggacgagcaagcattggacaacatgcaatntattgacagtgtgaatatctcagttgttccaattcaattcgggtcaccggttntagctcagttttaaccatgtcaagcgggtggatgcattttcaattccgaggggagtccagactggacacatgtccagtttctggtcaaaccgattggaccagccaatccagtccaatattaataat

SEQ ID NO: 266562 - DNA, 405 bp, Glycine max
  unsure (1)..(405): unsure at all n locations
agctnttaggagtaggaacatgggaccttctcattctatttcagaaagtcgtatctaggcaaggtctgagacaccatacaagtttcctaacgacttctaattatgtgggccattaagtctatcatatgctgacaatagccgacaagcccatgaatttcttcgggggcggagtaagtgcccgccattgccttggccttggctaacaatcggggaagttcttgactctcgttcaaggtaagggcaaaccgatccatccacatggttgcctcttggtgtaaagagtcgatcaccctttctctaacctctttttccgcgtatacttgggcatactcctccgcgaccctatgctcgngggccgtggctagacctaaccctttctgcgacttggcgatgatagctatcatg

SEQ ID NO: 266563 - DNA, 319 bp, Glycine max
  unsure (1)..(319): unsure at all n locations
tttgtggagaaggatgtgactgtaatcaaatggacagtattntatgatacattacggcctgctataattaagttaagtgatgaatactttctgggagggaggaaccacatctggcgttcatatatctgtgaactgcaagtcttatgctctgtcgaatgtacttgtggacactggttcctcattgaatgtaatggccaaatccacattagatcaactcttctaccagaggctctccatgagaagaagcggggtggttgtcacagcgtttgatggatcaagaaagcctgttctcggggaggacgatttgctcattaccatt

SEQ ID NO: 266564 - DNA, 407 bp, Glycine max
  unsure (1)..(407): unsure at all n locations
agcttcaccatctgaagtggtaaaccaatttctttcaagctagacttaataaagtccaatctacattgtcataggctttcttcgtctatcttaaagcagcatctctatgcttccttttggatatgtacatgttatgtaaaatttccttgagaacaatggaattaccaatgttcctcttcccggtaaacaaaaactattttggaagcatccaatgatatcattcgataaaggccttaatcaattaacaatgtctctgtaataattttatagattgtattacagaggccgatagacctaaactccttgagagtatctaaattatccgcctttggtgttagaacaatcaaagtttcaactatttcatatataanacaaaaagtgtctcactatttctgtggaggaggaat

SEQ ID NO: 266565 - DNA, 369 bp, Glycine max
  unsure (1)..(369): unsure at all n locations
gaaaattggcagctggtgaagaanaatacatttaanaaaaaatggtggccgcgagatagataatggtaaggtgatgtttatccagatgggaggtggggcccagcgagaacgcacgtgcggagggagatgaagggctgtcatagtgtaagggtacaataattgatgtggccacttgccccatacgctgcactttcttgtctgtacttaggtccacgtgggagaccatcatggccttaatcttacagcttgctttaacgtacccttattattacacaatttatattttttatcatacaagatttttaatgtatataaattattattgataaactactaaataaccttaatattatatattaacgctactta

SEQ ID NO: 266566 - DNA, 349 bp, Glycine max
agcttctttaccgaggggtttcttcccatgttggaattcatgccaggattggcatcattgctgggacaaggttacgctagagctgaaatctgagcaggggccctctgcgatggtgcagacgtccttggctggacgggagccgagctggaagggtttccggcgcgggccgaaaaactcgggtggtgttgagcatactaatgagtaccatgtaaggcttgttgaggtttctgctaagcaggtgccaaggtgacagcatgggtgtccccttcctttctttttgccccggcaggggagacatagtcaaatttcccccttttcaggcctacttctattctctcgcccgcgaata

SEQ ID NO: 266567 - DNA, 402 bp, Glycine max
  unsure (1)..(402): unsure at all n locations
atcaactctcccacatccacaaatcaaacatgaacccaccatccccagttgcccaccttcaacttagctcacgtactcctacgtagcccttatcctcgttcctctcagcaccgggtccccatcaacccctccaagcttccataatatccaagcaattcaattccaactatcatgaactaccctaaatcaagaaaacagggcagaggcaganaactctgcccaaaacacattcacatattacaactttccttactcanataccccagtaacattcccttcgctctggattcgttaaccggtggaatcgacttgaanattntactgggaggttcctagtacataagtctatattntgaccggtgcgatctgctataaaatgtncagaacccaatatataatacc

SEQ ID NO: 266568 - DNA, 435 bp, Glycine max
  unsure (1)..(435): unsure at all n locations
agctnntttggagctaaccatatgatattcagcctgacaacaaacaaagatctcctctcctcatcaacctccatcaaatgagcatgaaggtaattctgcagcaaactccacactgtgttggatgtgagcgaacaccaaactccacactcctttcaccttcctacaatctctcaaaatatgaatactagtttcatcttcataatgacacaacaggcatagagaactgttactgaaacctctttcccatctaaatagactggtcataaggccattacaaaaaaccttccaaatgaagcaactatcttgaggcttgaaacgataattccaaaccttcctccaaaaatccatgtcatcattntgctcctcccctttaagcatacaatacactaacttggtagaaaatttgccattgggtgaaaagcccaacaaacagta

SEQ ID NO: 266569 - DNA, 444 bp, Glycine max
tcattctctagagggagtgacaaaagattggttgtactaccttgctcccaggtccattactagctgggatgaccttaagagggttcttggagaaattcttccttgcatctaggaccactgccatcagaaaagacatttcaggaattatgcatcttagtggagagagcttgtatgagtattgggaaagattcaagaaattgtgtgcaagcttgcctcaccaccagatttctgagcaactccttctgcaatatttctatgagggacttagcaacatggagaggagtatgattaatgcttccagtggtggagctctttggtgatatgactcctgtcacgctaggaatttgattgagaagatggcttccaactcccaacaattcagtgcaagaaatgatgctattgtccttagcaaagtccatgaggtggtcacggattcatcttcat

SEQ ID NO: 266570 - DNA, 377 bp, Glycine max
  unsure (1)..(377): unsure at all n locations
attcacctataggatctcaatatgttatatacatcattgaggattagtcgctttaattaacttcttttgcattaagaactattatgtgtattcattggacgcttggtaaactctaagctaatgtttntcattcattttaatagggcgattattagaagtttgtctatttctcaaacatttaattattacgattgccagacataaataacaatgaaaacatgttttattgtgccgaatgctagaaaaaaatataacactgaaacataatattgtttacaatttctcttttcacaacataacctattttattttgcaatgggggacaaaaatgtatatggacacgtttctgtggtactatcaatgttttcttttcaaat

SEQ ID NO: 266571 - DNA, 341 bp, Glycine max
gaattctttagttcctgaatgtacaactttcaaattgttggtcgctcccctctttgttttatgccaaaaatgaaatcaatatccaacaaaacatgcataccaattgtcatccgttattgctacttgaaccataaggaataacatctaaagaagtacttcaaaacgtttatttattttttttggtattttttgaattacaatttgacttcaatatctaattttttaatgcacctacgtggaggattttgacgaagagaaggagaaggaagacagtcttttaaagaacactatggaagtgtcatattttttttttcctcaccaaggaagtgtcacatgaatgc

SEQ ID NO: 266572 - DNA, 393 bp, Glycine max
  unsure (1)..(393): unsure at all n locations
actagctagaacagtaactgccttctttaatgtgtggggcttgttaccacgacaacaagtactttcaccctactattgttgactgaccaacgctgntattggaatgctgcgacaatactttaacaccttattcacacattctgataggctggntgtcatgtgaccatatcgcccgtcagatgtatcgtaagccatgctccatttttcctttgaaatgcgatcacatcatcttgctatggctggactcaattgatgaacattttctaagttctgatcaaacacatgcttgcaaggagtgtacgctcgcatcaatttgtatcatcaaaagttgctcgaaacatgaaactcnaattaaattaatgtatcaaataaaccttacccaatttcttgaac

SEQ ID NO: 266573 - DNA, 373 bp, Glycine max
ttggtcctcaatggagttaagaatgtatagtgttcgtatgtgatagttaatgcagcccacacccttttcaattagatattgagcaactcttgatggactaaatttttctacacctacggtgattccgggaatgaaacggagctatgatgtcaatcatagacaaacgttatgttttaatcaaaatttaagttagcctttttctccttctcattatgaactaattgatgtggaacaatgaaatgatgtttttaagtttaaaaaagtcgtaagttaataacttgagaccgctgaactataaaaggcctattagatggcttgataacaaaagctttgggcttttatgtcggaagtgcactaaactcaacctttgtat

SEQ ID NO: 266574 - DNA, 369 bp, Glycine max
  unsure (1)..(369): unsure at all n locations
atgaaatcctagcagtaatccccacatgaacattctncttccttatnatgatgaaaacaagtagaatccctcaatatgatatgatgagtganaactcctgatatatantattcatgacagaatgacgatctccgcanactctaagaatcttacatatccgaattggtgcacctggtgagaagcaagtatccaaagcaacagcagttctcactggataacaagccagcccctttcgtctctatcatctatcaatgataatcatatatggacataccagcttctaatcttttatattcataatcttgaataatctcacttccttgatgcctcatcttaaaataatgatgcctgagaaacatgtaacacata

SEQ ID NO: 266575 - DNA, 413 bp, Glycine max
  unsure (1)..(413): unsure at all n locations
tgggttgaccggcacttcatagtaatggctttggcctgngatcaaagcaagaaaccctagggccctattggacctctccaggtccactgggtgtcgaggaggcgctatccctgcaaactgatacatagcatctgagatcaactgggaaatatgtacactcacctgagtcaggatggtgtagaccagctgacacttcaacaggaggaggtctgagttatggtcgttggggagaatgttaccaagcagcaacatcatccaaatttgtgtgagggtggtcatgctggtacgcatgatctgcacctctcttcccgctacgctctgggcaaaatcctgccctggaacacacaacaactggctgatagcctccttatcggagcctgaagcctgactcatcttctatctaaactcacagt

SEQ ID NO: 266576 - DNA, 370 bp, Glycine max
  unsure (1)..(370): unsure at all n locations
cttctctctctctcgaaatagttgaggaaaattagttccgtgaagaanatccaagccgaggcgcttccgtaacgtttccgtaacgtttccgtgagtaattacgcgaagattctcgaccgttcttcaagattcatcgttcgttcttcgttttcttcagtcttcaacgggtaagtacctcanaccaagcttttcaattcattctatgtacccgtggtggtccacatttcgtttcatgtatttttattctcgttttcatttactttttatacccccttttgacgtgcttaagccatatatttaagtcatttctcgcttaatctaanaataaaataaacttccatcgatcggttgaattatatcatcccgtcat

SEQ ID NO: 266577 - DNA, 445 bp, Glycine max
  unsure (1)..(445): unsure at all n locations
agcttgaacgaatataagagacatcttcttcgactctgttgattctngactccatctcattgaagcgcatgtccacttgtaactccaaagtatgaaacctttcccaacaaaggtttgaagaccatcgaacctatccaaaatctttgaaggagagatgaatcttctccatcatgtccttcttcaccaacatgtcgagcactctttttcacccaagagccatcatgctctttttgataaccaaaggatgcaatgactgaagcgcctattaaaaaggatctcttgattggaacatagggttcagaatcaagaaggatgttaaagtgttgaaagaagagggtgactaggtgtggatatggcaatggagcattcaatcgcaatgccttatgcatgcgatatctaacaagatgtgcccaatgaatggatgcggcttcaagcaagatgtgaa

SEQ ID NO: 266578 - DNA, 473 bp, Glycine max
  unsure (1)..(473): unsure at all n locations
gcggatttggtctttgctagcgaaatgatcgaactgggtctattagatgcanatctgatctcatctttgataatgccaaaaactggggccaatgaacagggtgagaatgagggagaaacccatgctgtgactttcattcctatacaaccaagtttcccaccaacccaacaatgtcattactcagccaataacaaaccttctccttacccaccacccagttatccacaaaggccatccctaaatcaaccataaagcctgtctaccgcacttccaatgacgaacaccacctttagcacaaaccanaacaccaaccaagaaatgaatttagcagcgaanaatcctgtagaattcaccccaatttcggtgtcctatgctgacttactcccatatctacttgataattcaatggtagccataaccccagccaagggtcatcaacctccatttctccgagaatacgactcanacacaag

SEQ ID NO: 266579 - DNA, 447 bp, Glycine max
  unsure (1)..(447): unsure at all n locations
agctaatgcgcatattagcctacaatcgttctcttgcccaagacattctattaaccgaaaaaaaatgcacccatatacaatcaaggcagctttgttacctagattatttacacgtacttccatggtgtatttgttacttacatcacacacatctccttggctaaattcacatgcatgcatactccaagcattttggggtaccaaaaattgcacatgtgcacatcttggtatttctaatacctatacatacacaaacttcatgatgaatcttgactatctacacaataaggcgctacatttcatgccttttttcaagtttttgctacctaaagccgcatgcaaattcaagcatattctcctttgctgactaaaattggattccaactatatatatatttttttggantatgtcgttttctcataacacttcacatatttatatatatt

SEQ ID NO: 266580 - DNA, 400 bp, Glycine max
ttgactaaatcagaataaataagcgatgttgaagccatttatggtatacgatcgcgagtttcaaatgcttgaaagcattctaaactctcagttgaaaagaaatccatatcaatgaattttgggtcaataatggaatgagaagaaaaaaggtttttgtaccatatccgctgttcctcaaatgaaaacaatgatccagagggaatggaggaaggaatcggcatttcctgtgacccggaatgcccgtgactccgactcgaagtgccctttcgcttctttgatggttccgccatttgaagagattattcgaaatttcaatcggctcatatgacagagaatgaaaaaatatgaagtttgggctctgtgggaagtgatctggacaagaaatgagtgagatatggct

SEQ ID NO: 266581 - DNA, 446 bp, Glycine max
agcttcttccagcgtcatcttggataactctgaagccaattgcttctctagcatctcagccaagtcctccattcccgcttgtctcatattacaagcactctaaataccaaaacaaactcttaaggaattttcaactcccagcgataaagattgttacactgttaaccaattaccaacgaaatcacacatgaataaaggtcaatttttcaattatatggcaattcatgattggatgacacgctacatttctagttagcactgttgcttgttaggaaaaaaaagagtaaaccaccatttgagtctgttacattagttcttacatatagtccctagctaaaagctaaaactaaggaaattttaaataagttcctgaaaatacaatctgtctatcacattagtcccaaaatataagaaaattgtgaattaatgataatattaataaatgt

SEQ ID NO: 266582 - DNA, 395 bp, Glycine max
  unsure (1)..(395): unsure at all n locations
accactatgattggctttcatgttgatcactataacaacaaatcagttccttttagtcaaagtagatctatcacagtaaaacacatcttttgatgttgtttggaaacttttagaacttanacttcatttattcttcataggattcgacaaatcctgaaagaatgtcttgtgagacaatttctgccaaatgaacctcagacacaaagtactaaatgaagtcttaaatgtcatctttaatattgtatcagatcatgacttattcatacttctgtctganatatcanatagaagatcatgaagcataatctgatatcacataagacaaaacttttaaccgttgtatttatttgtatctaatacaaataattaagggtcttgattcatcttanaatatc

SEQ ID NO: 266583 - DNA, 294 bp, Glycine max
cgagagagggcggagcacgaaatcgaacgaagaaactgggagagaagttgaactctcagctgtgcctcacaaaactctcattcatcatagttacaacaagtgtcacacatgctctcatttatagactaggcagcttccttgagaacctctcttaagaaaacttccttgagaagcttctttgagaaaacttccttgagaagatagagcttagctacacacacccatctaaaaactacgctcaccttcctgagaagcgtagagctagctacacacacccctcgaataactaagctc

SEQ ID NO: 266584 - DNA, 420 bp, Glycine max
  unsure (1)..(420): unsure at all n locations
actcagcttattgtgacccaccctcatgggatctcttcatatcttatagttaagaattgctcgcagagatgttgttgattattctcccaaacctctccaccgagatgtcatgtgctacgtgacgtagctccatgtggagcttgtaagccttggatcttcttcatcaatggagtcctttgcttcttaaagatcaatggaagcggaatggagaaggaggaaaagtgattggagatgccacttcaaggagaagatgagtcgagaataagctcaccaccataggaagccatggataagagctngaatgtaggagaagatgagtggagggatacagagagaggggggcacgaaatttaaaccttatatgaggtctgaactttgaagtttaatttctcagatgatcaaatttgaagagatgcacac

SEQ ID NO: 266585 - DNA, 446 bp, Glycine max
  unsure (1)..(446): unsure at all n locations
agcttgtcatatttggaggcattattgtcttctcttcctttaatantacgtgaatagccacatgctgatcttcacgtgttgcgcatttagatttgtgctgatgtatgaaagacaaatctttctctctttcactttaaaaagacatgcagtgggtcacacatggggatggtgaaagataatgtgaggcaatatacattgcccatatttactctgtagtctatatatatacttgatcctaaggaaggtggtgatattaatttttggaatagaatcttctgattattgaatatttatttggactgtttctatttcatagcattgatgcagggtattttagaggcttctatagactttgaccagcaaacatagtgcaacaaataggaaggggtgcttggatgtgtancatcataaacagagatattgcatgtcactttccacataatttt

SEQ ID NO: 266586 - DNA, 214 bp, Glycine max
taaattatgttaactgtattgtaaactctttgaaacaagagaatattactcttatatgtgggcggggttgcttctagggactataaactctgtgcagtgaaacattatctccaccactgaaggagatgtggtgtattattttttataaaattacaccactattaatgagttattgctaatctgtgcttatggactatggtgataataaatcatg

SEQ ID NO: 266587 - DNA, 267 bp, Glycine max
  unsure (1)..(267): unsure at all n locations
agcttaactctcttcgaggttctgtttataatgtagcttcctggcagttttcccttcaccaattagcccacatgcgttctgttaatatgtgcacgcttcgagtttgattaattgcctctgtgcttaaattgcgttcatgcttaatgaacgaagggttaattgatgtatgtgtngcctcatcccgctttgacaaccctaacttgattttctcttagttaactaaaataaggtaggattaagcggttaacctgtaacgacctccttctt

SEQ ID NO: 266588 - DNA, 381 bp, Glycine max
ccgataggtcggctttcatctggtcttgcactccctcttcattatccatttttctggatcgagtgttataagggtgcctttgcgctctcttagttatggtgagttccctaaagaaacaaacaatggtgagtatgccaccaaaacatgaatatgctaatgaatgatcagagcacttggatccacctcaaggccttttttagataacgtgatgagtttcagaacttctctttgtataaaaagggacaaagcttttatctagccaagatcatacaaaagtgttacaacagaacctaacggtttctaattatatgggccatcaaatctatcatgtgtggacagtaattgattagcccgtgaatttcctcgggggctgtacacact

SEQ ID NO: 266589 - DNA, 422 bp, Glycine max
  unsure (1)..(422): unsure at all n locations
aatttatggnctttttggagtaaattttgtaaataagtctccttctatggttaaagttgcctctaaaacatttccattggatttaacgatgaaatctgtgcattttcaggtgaaaaagaggctaagttttgaattgcaaaatgtagcagttgggctaagcgcataaccaccgctaaacgcagcttcagcgtgcatagcgcaaaggagaatctggcagagcatcagcatcaaagtcgcgcgctaagcgcgagataagtgagctaagcacagcaggtgccttcagccaggctaagctcgagactggcactaagcccaatttcacttactcacgctaagcatgaaggtggcgctaagcgcagtgttgcaatttcagagcctatttaaagcctgtcttgtgaagaataaggtacacctcttatgac

SEQ ID NO: 266590 - DNA, 415 bp, Glycine max
  unsure (1)..(415): unsure at all n locations
accttgttacccgataccattggggttgcttatataacacttcctctaggttaatggacttactttcctattttaaaccccacaatggtgataatcttgggtaatagatatgattgtgatatatattttcttatatgatcctttaggcggngaggaaatctttcccactttcctantttacaatgactaaatgcgttgatgatntttgcaatagatctactcaatcagacacccttcaagttagtgtgtcaagtatgagttagcacatatgccccaagcatcatagtgttctgtatcggcttgagtgtntgctttctagacaaatagatatcaattactaagggtttttctagtctaggcaattgtattctcctggacttctcttttanagctatttatttcacttatcttactt

SEQ ID NO: 266591 - DNA, 437 bp, Glycine max
  unsure (1)..(437): unsure at all n locations
agcttggaatgatctgatttanttaacctctgctgtnggacaaggtctgcttttaaggtaaacacaaagtgtgatttgcaagtaaataacatgtgtgaggcattcaataatgtaataatggagtacagacataagccaattattacactattgaagggaattcgatcttacataagttctagaattgtgaagttgaggactaccctgatgaggtatgaggggtcaatctgtcctaaaattcagcaaatcatggaaaagaataaaaaaaaacatgtgaaccatggcagacacattggtgtggtgaagttgatctatctttatttgaggtgtcaaagggcatggaaaaatatgttgtcaatctgaaacaacagacatgttcttgtagaacgtgggagttaactggaatttcatgcactcatgccatagaatgcatgtgg

SEQ ID NO: 266592 - DNA, 342 bp, Glycine max
  unsure (1)..(342): unsure at all n locations
aaatgggataaatattcttttcagatgcctaatanggatgattcatgcttggaaaaaagacacaaagaaacctacgatgaataccatgaagtgttgagacaagaggaagctttgttgtttcatagatctatgtctaaacggctatcctttggagatctaagcactcattatctccattgtatgactgttgtgagaaggagaacatatacttatgaagccattcaggatctcaatagtaattggtttggtgaagaggaagctctataaaggttagttactaactacctctctaatcttttactaataacatatattatgttccttatagtgtagacgagcctt

SEQ ID NO: 266593 - DNA, 398 bp, Glycine max
  unsure (1)..(398): unsure at all n locations
ttactaagcaaaaaaataaactttctaagttctagtgtttgagcgtcgagacttttagcacttatggntttttattgttgnatgttttatttttgtgttgataaacttttataggcttcataaatatatctattgtgggatttgggccttccttaaatcatccagttatcaccaacttgtcttttctgttacactgcgtttgtaactctttgctcctctacttgtacgaagattttgtcattgagatatccttctaatttgtctttgtcattgtacacttaanagtgaaatgttagaggaatttatcaacctacattaagagaaaaaaattcaaactagttatgtctgtttggatgtgtacaacacagaatacataaggactggntttcactatatca

SEQ ID NO: 266594 - DNA, 467 bp, Glycine max
  unsure (1)..(467): unsure at all n locations
gcgtaccgctcttggtgctcagaaatgccaaaaacaaattcctcttattactaactatnntgaattctttagttcctgaatgtacaactttcaaattgttggtcgttcccctctttgttttatgcaaaaaatgaaatcaatatcaaacaaaacatgcatacaattgtcatcgttatggctacttgaaccataaggaataacatctaaagaagtactttaaaacgtttatttatttcttttggtagtttttgaattacaattttacttcaatatctgaatttttaatgtacttaggtggaggatgttgacgaacagaatgagaaggaagaaataaacttatagaagattaaggaagtgtcacattttttctttgctcagcaaagaagtgtcacatgaatgctcgttggtgaacaagcataatgccatttggatgacagagcctgatgagatcacaaatgacgagtatt

SEQ ID NO: 266595 - DNA, 451 bp, Glycine max
  unsure (1)..(451): unsure at all n locations
cacaattgactgagagggactaatattggacatgtggcaccccctttgaggtatgtgtctcaagtgattacagctagatataactaattcttccgtcaaaagcatggtataaaacacaaacattggtatgataatgaactataatcccattactccaacttgagtgtcgaagactatgcagtcaccccaacgcctctgtgtgatctcttcatcgttgtcatgctccaccaccgaaatcgtcattgcaatccagttctagattaggatcctttcctgaattggatttcttctgcctgaaccaagcaatattaatacgaaattatttagtcaacataaactttaatattttatattgttaattcaattctttcatttttcttgtacattaatcacttaattcttatttattttagtttctatctttaactattaattaaaatanaatattatg

SEQ ID NO: 266596 - DNA, 418 bp, Glycine max
  unsure (1)..(418): unsure at all n locations
aacagggcagaggcagaatactctgtctcaaacacattccaatagcacagctttccctactcagataccccagtaacattctcttcgcttcgatttcgtaaccattggatcgactcgaaaattntactggaggtccctagtacataagtctacattntgaccgctgggatcagctagaaaattttcagaacccaatatgtactacctttcccataaccaataatgcataagcattttctgcacaagaacaaaaattctgctgcacaattcaacaacaattttctgcataatatgagcacatttcgaaatccctcttgccctcatccaattttgctcagattggatcctacaagtcttaaatcatgtataaatcatatctaaaccaaagacaagcttcagaccntagcaattcataatc

SEQ ID NO: 266597 - DNA, 456 bp, Glycine max
agcttacacaaacattcattagtccaacacacactcaacatatagtcatcatccgtccatagtttcaatcaatcatgctcagtatgatgcatgcacctgacctcaactctcaaatgcaatgtggtaccatccccaaggaaatagcctaagtgtgtccacacgactctcttacttaagaaaactaggcagtaagtgtcaaggttaccctatcgtgcaatggcaactcccccctccccccccccccccacggtgatcagcctgagtctcaagggagttccaaattgagtgacatgcactgaccaagtttatactatttccatgtcatatgaagtatgaaacatgggcaccatcaatgcactgaccgtggataattaaagatattaagccatctccctctagagatgcttaaaactctatagccattctatttccccaccagggatatccaacaaagtc

SEQ ID NO: 266598 - DNA, 344 bp, Glycine max
ggggattgtgggcttatgccttgacttgggaaatgggagagttaatttgcgccatcgcccaatcgccacctagtaccacatatgacttggctaatcccgacccaacccgggcatactcagtccgtgagaacctgtgacgtacctaaacaggcgagctcttggcagtcaaccaataaaagaacacagcccacgaagcaaggaggcttgtgtggcgactagccagctatttatcttgggtgttatctgaaaattagtctctggtgatcgactaccattcgtgggtaatcgattacagggtttataaatggagacaagatgttaagtagcttctggtaatcgattac

SEQ ID NO: 266599 - DNA, 418 bp, Glycine max
  unsure (1)..(418): unsure at all n locations
agctntntggagtagaaacatgggaccaactcantttatttgaaaaaaagaagtcgtatccagtcaaggtctgagagaccatacaattttcctaacgatttctaattatgtgggccattaagtctatcatatgctgacaatagccgagaagcccatgaatctcttcgggggcggagtaggtgtctgccatcgccttggccttggctaacaatcggggaagttcttgactcccgttcaaggtaagagcaaaccgatccatccacatggttgcctcttggtgtaaagagtcgatcacccttcctctagcctctttttccgcatacacttgagcatactcatccgtgattctatgctcgtgggccgtggctagacctaactcttcttggtacttggcgatgatagctaacatgttggtctc

SEQ ID NO: 266600 - DNA, 130 bp, Glycine max
  unsure (1)..(130): unsure at all n locations
tctattctactaaaagggatntttttattattatattattattttaccttttcttttatatcccacgtggttacggcacgaccgaacggtcggaattcattntaaccaanattaacggatgatacaattc

SEQ ID NO: 266601 - DNA, 328 bp, Glycine max
agctgggagtatgcttatttcatggagtttatgcaaccaaaataaagcttcattcaaatttaaaattgtggaggtttgaccgagttatgttcaattttcctcatgtcagctttcatgggaaggaaaataacacattactaattaagtgagttttcttgtaagattcagttacaagactaattaatgtggcaccctctaccccgacatacatatagtgaaaggaaacatataatagtgggagtaacttaaaaagatttacttcaccaatcaatataaaacttctcaacggagtaaagggtcacattcacccattaaccaagttaaaact

SEQ ID NO: 266602 - DNA, 404 bp, Glycine max
  unsure (1)..(404): unsure at all n locations
tttatttttnntcttcatatgattgcatctatatgcttttaatccctccatttattatatctacaagccataaagaaaacatcaattgctaacaattaagaatggataattactaaataattatttttaaagatattttaactctattttcataaataaaaaanaacaactcttgtttagcagttatcaatgtttatgtccaagatccgtgcaagtcaagatggtcagtggtaagtaatgtatatagtgtacatatcgcataattctaatacatttatttatttgaacatttacaacttaatgcttatgttgtttatataactcattatgtgctaactcaatttggtttatttgcgcagactcatggcaacacccccaaggtcccatccacattcagatatttc

SEQ ID NO: 266603 - DNA, 398 bp, Glycine max
gctagtgtcacgaattgtaacaatgtttctcaaatgtattggagacacaaattcatgtcggagacagtatccaacagtaatagaagagctgtgccgtcattttttctctgcccgatcttaggaagtcaaccaccaacttctatctacggaggaggagaatttactatactatataaaggttgtctccaacataacggctcttctgattatatggaccattcttttggatcacaacatgcagccaaaactcgcaggtttcagccatatcggtcatggagcacgttttatgtcaaagccaaaaccagttagagttagatgcttttggaggtaatttttatgttgaggctactgcattgtatctttgtctattaaactaaattaatatattaataagttat

SEQ ID NO: 266604 - DNA, 282 bp, Glycine max
  unsure (1)..(282): unsure at all n locations
atccacatttcattctttgcatagcatgcaatggtagtgcttcaagagacacagttcttagcacgcattgcacaaaacacatatgatagactgctgcatagcatatacatccagcagagttgtcataacacgattatttgcatcatagccatgttgcagaatatttagtatgaatctccttacgcttctggnganggcagactgtcagctctgaaacaactcaagccttatactttatgtgaacctatctgatgggatcccaatccaattccagacatatat

SEQ ID NO: 266605 - DNA, 328 bp, Glycine max
ctctctaagctgtacccaagtattctttcgaaaagtctctataagctccacacacatcaataacaatgtgctactaagactcaacaacacgatgtgctgactttaataattcataagcagtaatcccttgagtaatcttctaagttcttccctttatcctaaatgaatcgacactacatcctttgggatatcttctattaaagctccttatataaaggtgtttacaaacactcttttggattaggctctaacctatagcgttttggctaaagatgattcttctgattgaagtattctagatacactctttataaccctaccctctcaa

SEQ ID NO: 266606 - DNA, 211 bp, Glycine max
tgacctcatgaccacaatgatggtaattcatattcatgcgcaagatggatcctaacttctcaatccaaaattaaaagtcatattcgacatctgtgatggatattgactcacattcttaaagcgggtgtgatgatatatattttgcaagggaacataaaaggaaatttggcgacgaaatagatatacatttcggtagatgataaaagacata

SEQ ID NO: 266607 - DNA, 409 bp, Glycine max
  unsure (1)..(409): unsure at all n locations
agctngtgcttggaaactaacacttgatatgataccctattttttgaatttatcttaagaatataatcaatgacaatgaagtattgtgtagggacgtgttttgactataaatgtatttggcacttgttctttgaattcagttgttttttctagagtttggtgtgtttaatttaggtggtggggtattcatttgacacagtgtaatgactttcctttaaacttctcacaattcatgggtttgccaagttgcaatgattagaatgagttactgtgataacaatttggtttgcaatgttttgggaaaaatggaagactcatagttttctagtttttaaaatcacaagaatgagttttgatctaattgtttaacggttaagatagacccttgtaattaattagtactatatgt

SEQ ID NO: 266608 - DNA, 485 bp, Glycine max
  unsure (1)..(485): unsure at all n locations
acatagaaactcagctttagccaatgaacttaccttgaattaatccttgatattctcttntgagccttggntctctttccttgttttgaagctcactacaagccttaaatgaaaaaccatgatatcaccatatccttaaggaattttggagctttggaattgttttgggaataagtgtggggggatttttgtttcattggataacttgttttgttggctatgcttcatgatgtattttgggccatacttgatgtacattgcatattggttaaaggttggacatgctgaatttgatggtgtntctcaaaggctacagagtacaaaatatatatatatatatatatatattattaaaaaaaatcaacaaagaaacagaanagcagtaaacgtgtgtgaataagataataaatgacaaaagaatgatgagactcttgngtctactctttatgttaaactatatctctacttctatttattttcttatg

SEQ ID NO: 266609 - DNA, 333 bp, Glycine max
  unsure (1)..(333): unsure at all n locations
agcttggtcatcattatggtctgaanttattaatctagaacttggtttctttataatctacttagcaacatcttctgatgatccctattcctttatataaccattgctcttttgcattgacttatgatgagaaccaccatttgcttcacttttagagctcaaagacccttgacttatagaagatgacttgtttaagtcaaaaggctttgatggctcaagtcctaatagtccaccattattccccaacctaatgaaatgattacccgcagactctctataagtctcttcagattcgtagatatatatgttgcgcttatctacttgacatttggt

SEQ ID NO: 266610 - DNA, 320 bp, Glycine max
ctttcacaactatctatgggagaactagcttcatatattctaaatataacaatctacaaccatttctctctttctgtctctcccagatattctaaatgaataacacataaaaggaaatcagatgcagatactgtacaagtacactagagatacacatgcagacacatttagaagatgcaacatattctgtatatatagcaagcaacacataaacattgtattattgtatcacacatctgttcatatgtatcataattctgccgtggccataatacagagatataaccatgtagctagattctacagtgatcaacataaag

SEQ ID NO: 266611 - DNA, 292 bp, Glycine max
tataaaaagtttcattgaaaagaacatgtggcgttctttatcccaatgggtgtatttctggcaacaaagggacattgatgagtcatcagagccaccacataacatgatgcaattggccccttctatattctgcgacggcaagtggagtggttagctgttctacacctggacctgatcaaatgcaatgtgggtgaataaacacacgtttgaaccacttataaatggggtcaaaactcctaagctaggttcccaaataggaaggcatacataggcatggcaaccgggcgggtcc

SEQ ID NO: 266612 - DNA, 296 bp, Glycine max
ccaaagaaccatttcacactgcgtgcaagaagaggagaggctgaaccaagaacggactcgaagcgctcatggcgaaagcacctccaaaaacaatggcaaaagaaaaagaaccgaggagaatgaagctgccaagggtccaacacaaaagaaacaaaactccggagacaatcggcgccccgcacgaaacttggacatgaaacaacagatgcccacataaacagcctggcgcgacaagaaaggaagcaccctacactgggccgggccgaggtcaaaaacactccagcactcaaaaccac

SEQ ID NO: 266613 - DNA, 295 bp, Glycine max
aacttgactgaggggagactagggctctccttcttacataccaatttgttctcctcactccaaatcaaattcatacttctaaagtcatgaccttttatctaaacaaattattatatttatttctcctaccaatatagagatttctccattcccatctccacaatcaattcgccttcctctggttaccaaaatttgacaccgcgacctttatggctaaatcaatgttgtataatctagaatactccctatgtatgaaaataagccacttccacccaatggtcttccttaacccctc

SEQ ID NO: 266614 - DNA, 272 bp, Glycine max
aaccgctcgggcaggcccagacaaaagccgaaaggatttgccacgcccacacacaaaagaggagggggacacgacaagacagcacactgacgaaaggactcccccaagaaaaccaacgctcccaacgaaaaaaaaaccgcgcaaggacgcctggcaacgagcccaagcagggcccaaagacccccacggactcacaaactggaacccccacatggcactaagcacgcagaggcacgccgggccccccgacaggagggaccccccaaaaacca

SEQ ID NO: 266615 - DNA, 409 bp, Glycine max
  unsure (1)..(409): unsure at all n locations
agcttctaaactntataaaagaatgaagctttgtttccacttgttagacaagtggcttcaggtatcttaagaaggggggttgaattaagatacacaagctatcccccaattaaaatttaacttcttttttattaacaatgcagcccttattatgaattattctaagaacaatgcaaaaacaaacttctttaaagcaaaatataaacaataataaataacagaagtttaagggaagagagaatgcaaactcaatttttatactagttcggccatgccctgtgcctacgtccagtcgccaagcaacctgcttgagatttccactatcttgtaaaatgtcttttaccaaagtctgaaccacacagggacaaccctttccttgcgttcagaaatccttacaacttaagagacc

SEQ ID NO: 266616 - DNA, 329 bp, Glycine max
tattcactataataaagcgcgggttaaagaatacaatgcaagcatagacaataatctaatcaccactgacctgcgagtttatttggcaaccaacggaaaaagaactctctatcgagcagacacaaagaccacgctgtatactccggagggcctcgcccttgcaatggtagaacaaaatacccaggggcgccggacacgaaatgactattaaccacatcaacggggggaaaagaccacagcaatcatcatctcttataagacaaaatctccgcccaacgagtaataccgagggcaatcacggcaaaaaaaacgaagagaaactgcccaca

SEQ ID NO: 266617 - DNA, 419 bp, Glycine max
agcttgtaataatcttatatagaagtatgatattatgttcctgagtggaattttgatgcaatcctcccatggagggggcccatcaccagagtcatggttaagagactccaggaagattgggccagggatgcaagagaatgccttagggttctcatgagccttagggtagcttttgggcccatgggttaagtatgtgcccacttatctttgttcatattagattatggtttcattatttttttgggccttgatttagggcaccacagtgtagggagggtaccccataagtttagggtaccctagtaatgtaggatttttcagcccttgtattttagggctcacagactagtttttgtatcagggatagttttgtaatttcacatgcattaagtgcactatttgatgtgtgtgttgggaga

SEQ ID NO: 266618 - DNA, 411 bp, Glycine max
  unsure (1)..(411): unsure at all n locations
tgattntgggttagacatgattgatacatgatttgngacttgtatgaattgatttgggcaagattggatgagaggaagtgtgattttcgaaatctgcacttatgcagaattttgctgtcaaaataggtgcagcaggattttggctctgtgcagaaaaatgcttgtgtgtggttggttgtggaaagtctagtgcagaatgagttctggatgttttctagtagatcccaacggtcacaatgtaggcttatgtactatagacttccagtaaaattttgcagtcgatccaacggttaacgaattggatcgaaggaattgttactggggtctttaagtgagaaaagttgtgattatggttggtgtgttgagcagaagtttcttgctttgccctgttttgcttggctgtgatagttt

SEQ ID NO: 266619 - DNA, 330 bp, Glycine max
ttacaatcgatgaaagccgtgtgtgtgccattttgagatactcttacccattaccgtgactgtatttctttataaaaattaaagtaacaaacctcattaagtgactactctggtctaattgattatggcctaagacaaaaaagcttcatgaaacaatttacacggaaatgtaagatccaatgctaagctaaatacctagatgtttaatcatgtgcacattactctgcagccttgcactttgaaatatcttgaataaaagcctttagttattctctgtgacctcattctacatcgacaaattttataaaatatataagccttgtttgcaac

SEQ ID NO: 266620 - DNA, 411 bp, Glycine max
  unsure (1)..(411): unsure at all n locations
agctntaaggcagggctaaggcattggtttattttctctaagagttgggagcgaaggaactgacgggtccaaattccattcttaagcgataaagtgttcacagggtgcgtaagccttctaatcctactttgtcatttagatttagccaaaaagacggggaaaatgatcaattgtcacattttgatgccagtttagggctaaaatgaactctcgtccaaaaagatcgagaaaacgcttcactgggggaattgaactatcactaaagaaggaaaagtgattgtttccaatttttcctgataaaagggcatatttatgttgaagaatatcggctagctatgggcttgaaggaagaaaacaattcaacgattggtttggttactcttttccccacaatgctccagctggattgga

SEQ ID NO: 266621 - DNA, 405 bp, Glycine max
  unsure (1)..(405): unsure at all n locations
tctntaccggnttggntntgtatgttgcagacaaattcattatcaacgcaaggaccatacacaggtcttgcactccagctaccaaacaatgcacctgcctggcaaggtcctaacacaggacttgcaattcagccctcaatctggagtacaaaaacttgtaatacatttttgtttccagggcgtatttcaatctgtttgtaagatttttaagatactcatatttgtcatacacaaattctcgtgcagttgtttgagtatataatgaaagtgttaaaaagtctcatctattacatatttgtattaatggagggaagaagagaattacatttgatgtataggataggatacgatagaagtatatgtagaagttcttcctggtttactatatcacattagatgctcttt

SEQ ID NO: 266622 - DNA, 409 bp, Glycine max
  unsure (1)..(409): unsure at all n locations
agctntaactttttagggatggaactttttcttggcattagatntaataaacattggttaattaaatgtatttaaacataaagacacttgtgaatattnttcaacatgaatgtctgtatcattttccatttcatctcatattcatatcatttttcttatctcttttttttttcactctaatctatacatcccattttgtgagtttgaagatgatgattggacgttgtgagtgagcgatggaaaatctacagaacagaagagaaaagaagtgctctcatgcctcgtacgtacatattgcatttcagtttcacggcacccgtcctatcctatagaacaataatatataaacaatcatttattttaaacaaaatatcaacatctctaatttttttatatatctcttttctta

SEQ ID NO: 266623 - DNA, 193 bp, Glycine max
  unsure (1)..(193): unsure at all n locations
cccccccccnncaanaggtaatgtgctctcccgacaagaatcgcttctagcaacagcgttgcttttttagacaaaacacgtcgtgggaaaacctgcctctcattgcaccactaccacagattctcattgggtatccacaccaacaacacatccccctttatcatcagtgaacggacatttgcgcccaactcaa

SEQ ID NO: 266624 - DNA, 413 bp, Glycine max
agcttctggtgggacatcatgacttgctttttaatctgacattcaccacagattctgccttcttctattttcagattgggaatgcctctaacagcacctttgtcaatgattttcttcatgcctcttaagtgcagatgtccaaatctttgatgccatattttgacttcatcttctttggagaatagacatgtggaggagtaactggtttcttgaggtgtccataggtaacagttgtcctttgatctgctgcccttcattaggacttcactcttctcatttgtcaccaagcattctgactttgtgaagtttacattgaatccttcatcacacaactgactgatgctgatcaagttcgcagtcagtcccttcaccagcagtactttggttagactaggaagtccatcatggactag

SEQ ID NO: 266625 - DNA, 439 bp, Glycine max
tcaagccagggccatattctcatgcatgcagaggcttcttcaagaaaaaatccaaactccatttgcaaatctaatttcaggcttacataggtggccttgttcgtgctcgtgcgcttagcgcacatatggaccgcttatcgcacgttagtgaattttggctcagcgcgcttgtctcgcttagcggataagctgaagaggtgcgcttgatgacctataacggtgcgcttattgaacttgacagctcatcttcttttggattccttctcgcgcttagccactgattgccacgcttagcgaatgctcgctaagccatcacttttaccaatttgcctaattaacctggaattgagagaaattgattattaaacacaccacacataaggatacattatctattacctatatttaacacaaagtccttatattattaccaacctct

SEQ ID NO: 266626 - DNA, 426 bp, Glycine max
tctaagcaccgcagctgcagcttgttcaataataggcattttgtttgcataaaataataattgtgaattgaagtaaaagtatgatatatcctaattagaaaaacagtaaatgcaagcaattaaaagtgatagcagtggtttaaaagcgttgggtctttctaataaacaagttgatgcatataaagatatttctctaattaagaatgttcttgtgttctatgatgaagactaaagtactaaacctcgatccctcgtaagtttagactaatttaaaccaagcttcgtcctcagatccctcttgttggactaggcttaatttaaacaacattataatcacagcataattaaaaactaaaagacctgcaatctatccctagcaatacagttatctagccctgctctatcaagttctaaggaaacaataca

SEQ ID NO: 266627 - DNA, 113 bp, Glycine max
  unsure (1)..(113): unsure at all n locations
ccccccccctaaacaattnaccccccccccccaaaagaaggattgtgcctgacctaatcggagaccacgttcacaagaggacgcctttttcccgaccaacgagagcgagccgc

SEQ ID NO: 266628 - DNA, 424 bp, Glycine max
gcttcaatggaggaagagaacgagagagatatatgcatgggaattgaaggagattagggagaaaagttgaattttgaagtgtgtctcacaagtttctcattcatcaaagttatgacaagtgttacacatgtttctatttatagcctaacacataggaagcttccttgagaagcaagtaaggtagcttccttgggaagctagaggaagaaagcttccctgagaagctagagggggggctactcacacccttcaaataactaagttcaccccatgctaaaatacatgaaaatacaatgggaagcttccttaaaaagcaaataaggtagcttccttggaaaccaaggaagaaagcttccttgagaagctaaaggggggctacccacacccctccaatagctaagcttacccccatgccaaaatacat

SEQ ID NO: 266629 - DNA, 420 bp, Glycine max
agcttgttgtgaccatgaatgggccttcctagttgggaccgagctttcctacttaagggtctttgctagcttggcctcgaactcgccatatgaggtcatcaggttgaaaggttcgtggttaaacctttgtattttatgtccatgctcctcaaagcttggaagcctcttccctgatcctggccatttcttagacttcatctattgtctcgagttctacccttatgttttcctcatttcgctgctattggaacaacaatatccttgttgatggtttcctgacttcaatgggaatcatggtgtctgtgtcttatgtgagtcactaaggagtttcattggttgatgtctggggtgaacaatggtaagcctaaagtatggggagatcttcttttcataggcccttatacattgtgagtcttgtgc

SEQ ID NO: 266630 - DNA, 417 bp, Glycine max
  unsure (1)..(417): unsure at all n locations
agctnataatgactctctcttcattactactttcatcaataatagtaacaaacttctcttccaacatagcaatatcaagatccaaaacaccgagataaaattggacttgctcagtccagtcagagaagttaagcccattaaaattgacacaaatgatacatgagaattcagtgaattggaaacatgtattacataataaaattcacataagtgttttgagacataaaatacatgtcatacatatgattcattcagataacaaccaatgtatattgatgttctcctttggatgatacaccaacaaacaatatacaaacatgatgatgctaataaaaattcttaacattatttgacaattaaatatgcaccaattagtagtatctatttcctttgggtatataaataaaactaatgata

SEQ ID NO: 266631 - DNA, 302 bp, Glycine max
gcaaagcttgccttcaacagctttccaaccgaatctacaacatctccatcaattggaaaataacgccccccgacacaagagctcggtaaccgaccaccagcgtgcttgaacgctgaaattcaaactcaattgcgaagagccacatcctttcacaaaaatgctctgcggaatcgactgcaacgattagataatcgatcacaagggacaagctttgaatagaaaccaaaagatgcaactcctctaaacggcttcaaggtctgctacaggcagaaccctcctaacgcgtctcttgaccgacatga

SEQ ID NO: 266632 - DNA, 417 bp, Glycine max
ctgcagctttaacttataaagaagaagcttttatccacttgttagacaagtggcttcagttatcttaagaaggggggttgaattaagatacacaagctatcccccaattaaaatttaacttcttttttattaacaatgcagcccttattatgaattattctaagaacaatgcaaaaacaaacttctttaaagcaaaatataaacaataataaataacagaagtttaagggaagagagaatgcaaactcaatttttatactagttcggccatgccctgtgcctacgtccagtcgccaagcaacctgcttgagatttccactatcttgtaaaatgtcttttacaaagtctgaaccacacagggacaaccctttccttgcgttcagaaatccttacaacttaagagacccttggtccctt

SEQ ID NO: 266633 - DNA, 466 bp, Glycine max
  unsure (1)..(466): unsure at all n locations
tctcgncatgactactggattaaggctatgcatgctaagctattatctctacaactgaataacacttggactcttaccattcttcctcctcacaaaactgccattggatggcgttgggtatataaaatcaagcaccgcgctgatgggtctatagaaagatacaaggcacatttagtcacgaaaggatacacttaaacagagggttttggattatctcgataccttctcgccaggtgcaaacctcaccaccattcatctccttttctagctttgggtgctttccatcaatggcatctgcgacaacttgatgtgaataacgccttccttcacggtgagcttaatgaagaggcttacatgcatgtccttcctggacttctagtcacaagcccgaaccaggtttggcgtcttcaacgatctctatatgggctcaaacaggctagtcgacaatgagtcacccgcgtatcga

SEQ ID NO: 266634 - DNA, 423 bp, Glycine max
  unsure (1)..(423): unsure at all n locations
agcttggtcttaattataccaagatagatgtttttctctagagttgcatgttgtattgggaaaaagatgaaaatttgcagatttgcaaacattgcagaaaatctagatggaaagcaaaaggtaataatggtaaaaagaatgtactagcagatactttcctttgaaaccaaggttgcagaggttatttgtgtgttccaaaatagcaaagtccatgagatgacattttttaaatagcaacccaaatggattgttgaggcatccaagagttgctaatgcatggaaaagttttgatcaaattcaacctgaatttgctttagaacctanaaatgttcgccttggccttgcaagtgatggcttcagcacatgccgaaccatgaataataagcatactatatggtcggtgcttctaattccatacaatcg

SEQ ID NO: 266635 - DNA, 383 bp, Glycine max
ttgaaaatatctaggaatcgcgccaggtggcgatctttatctttcttggaaggaaccaaaggatatggcacttccttcccctcatctgaagcgcgctacttaatatttttttactcttgctttaacacccttactctttacttctttatttttttcaacatcttctttttcttcttttaccttgtgatttactccctccatatccttaacatagacatttatttcttcctttccaacagttataggtttttctctccactgactcctcccagttgataccacattcttctttttaacaggagtgtccctcaaagcaacttgtcctttcaaagcaacaacatacctatcctcagctgccacaggcttcctacttcttaatacaa

SEQ ID NO: 266636 - DNA, 363 bp, Glycine max
ctctacgcttctttcctcaatacttgtgaaaagaataaaaacatatatattagtggcgttgggtatgttagaagtgggtaaggtctaaaaacccttttcctgggcatcttcctatgagggaacatggttcctcaccaactcaatgagtggtgttacaagtatagaaaaagatgggacaaaccttttataaaagtgtgttaagtcatggaagtcccaaatttcccttatacttggtggagtgggccacttatgaatgacctttattctcttaggagccatgggaaccccttgatcactatctaaaaattaaagaaagtactggaataaaacatacccttctctgtattttgatgatgattactc

SEQ ID NO: 266637 - DNA, 118 bp, Glycine max
cagcatgcaagcttgaatcggacacgggtgagaaaagtttttactatatgaataactggagagcggccgagtgtcaatacagagcaacccgaaatattaatgagcccacaacctacac

SEQ ID NO: 266638 - DNA, 396 bp, Glycine max
  unsure (1)..(396): unsure at all n locations
tggattatcttctagaacggaatgtatccttgctaagatttatccaaacccaaccaccctcattaagaactagctcttttcttcctctatcgcctttaatcgaatacacctttgtacggttctctatttggttcttaaccctctcatgcaacttctttataaactctgacctagattccncttccttatgtataaaagacatgtccactgggagaggaataaggtctaaccgagttaggggattgaacccatatactacctcataaggggactacttggtggttctatgaaccaccctgtcgaggcacattctacatgagaaagatactgatcccatgacttattgttgccttttataagaaaccttaaaagggtggataaagacctattactacc

SEQ ID NO: 266639 - DNA, 349 bp, Glycine max
agctacacacacccctctgagagctaaactcacattcttgagaagtctccttgagaagctcccttgagatgcttcctttggaagattcctagagaagctggagcttagctacacacccctctaatagctaaggtcacctctttgagataaaaagctatagtttaacctacacacaccccctataatagctaagctcacccccatgtcaaaatacatgaaaatacaaaaaagttcctactacaaagactactcaaaatgccttgaaatacaggctaaaaccttatactactagaatggccaaaagacaatgcccaaaagaaggaaatacctattcaaatatttacaaaga

SEQ ID NO: 266640 - DNA, 458 bp, Glycine max
  unsure (1)..(458): unsure at all n locations
tgccaccctgctcgcccaggcgagctaggttgcttcctctttaatgcaccgccttctggtggaacttcctggaaggcctaagtgggtctggttgctatttgcacccccctgtttactaaatacaccccctacccttttttgcttattcttttgccgtaacgttacggaactttacgaattacgtaacgatacatgtttcctttccgtaatgtcacgaaaccttacggattacgtaatcatcccttttttggcttctggaatgttacggaacttcacggattgtgcaacaatacttccttttgacttccggcatgtcacggaacttcacggattgtgcaacaatgctttcttntgactttcgacatgtgatggaacnttcaaaggaagccagtaattgattaaggtatgacaccaggagccaacattcctttcaaactgatttacaaagctgtaatcga

SEQ ID NO: 266641 - DNA, 416 bp, Glycine max
  unsure (1)..(416): unsure at all n locations
agcttctatagatatacatatatatnttttatgttgattataactccaaatatttagatttagaatgttgtaaaacaacatttgccaacgatcgatgaattggtactcatgtctcatgcccaagcatgagacaagaaattttagaaatttattattatactgaatgagacagtttggagtatcactaattgtaacttttccaagtgcaatntaatattattttctttccttggagaggttgcaagctaggcatgggggatatgctgataatggcatgatgatgaatttgacttatgaaaaatctcttgtgatctattgcttatggttccgttctttctaaagaatcgctattactacaagagaggcccctcttgtcccctcttccagaatctataacttgttgaagcaaagtgcat

SEQ ID NO: 266642 - DNA, 440 bp, Glycine max
  unsure (1)..(440): unsure at all n locations
gtggactcaagcctagtgtgaaacacttcaaggtatttgtgctactctgttacaggcatgtgcctgaacagaatagaagataactggacttaagggctcaaaccatgatcttggtaggttatcacagtattggggcctataaactatttgatcccttgagcaagaaaattatgaatagtaatgatgtgattatggataagacaaaggaattggactggaacattggtatggaaagacaaaccaataaaacagtagaagttgaactaggagaagaaatacaggatgaagttcagattgacagtgaacaatatgtgaatgatgagcaacatgtgaatgatgggccagatgtgaatggggttgtatctctgagaaggtcactaagacagatatctncaccagtgaagtgtaagactatgatgtcttccctgatgctactatca

SEQ ID NO: 266643 - DNA, 291 bp, Glycine max
  unsure (1)..(291): unsure at all n locations
gcttttctcccgagcttctccgttattctttggacccatttgctttcgagggaggtggtcttcttcttagctttggttttgttatgcactacattagggtaggttagtgtaacgttaggttagtggaaccttagggtagaagacggaacctagggtagaagacgagaggggagaagacgagaggacgccggaaaaaatggcggaaatcgctgacggaggagtcttccggaagaccccttaggggttcttccggaagttccggaagaacgttttccgganagtttccggaag

SEQ ID NO: 266644 - DNA, 473 bp, Glycine max
tgttgctaatgctgacaggcaaatcctcttaggaaacctgttaagtctgagaggggagatttcttatatggactgtagattcatttttttgttgtggactctcttctaaaactaaactttattacatgctcaaattcatgtagttatggactcaataaattgcttatagcatgagaatgatgaggagattgaataactatttgatgattctccctgtaccttagtaattttttcattttgttgcaacaacaaaatccaaaaaaaaaaatcaaaacaaaacaaaatcacttatcaactcctttcacacttcacaggaaaaagagcctgaaaccttcttcttttttttttggaagaaaaagagcctgaaacttgcaaattagatcttctccagtcaattgtgtgggcataacaaattcaaccaaagtctcaactgatgatcatcattgtatgggtaataaggaagtatgcaatct

SEQ ID NO: 266645 - DNA, 418 bp, Glycine max
  unsure (1)..(418): unsure at all n locations
acccggatcttagagcaccgcggctgcagctttagatactctatcgtgttccgattacacgttaataatgaactnttcctataaacatcaattagaagatgttgattttgttggtcaattggtgttattgctgtgactactttatattttcgttagattccaagcattatttccgtctatagggtttgctcttaactgattgttttgagttattaattattcaagttgatttgattggaatagtaaatctggatctattatgtaatatattagggacgaaatcttgcacattgagaatgatgtagtctcctcaaaattttgataaccattgttttcgagtgataaatgttgtctatgtcaaggttgtcgatgaaattagcaatgatggactgactttgctaacaagttttgtatgcct

SEQ ID NO: 266646 - DNA, 414 bp, Glycine max
  unsure (1)..(414): unsure at all n locations
ngggaaccaatgatgaataatgaatgatcttgattgtttttgatatatatatctctgacatatatgtttatggtgtggacaaccatatattcttattcagatgtgtgtgaggttccgcgccatgccattgtgaaccaaagacttagttggttgttgtataggctattttttacaccttaggagcacctaacatgggggtatatatccaatctgtcaaccaatatatgcgacaccatataactaaaactatagctaccatgtgcctctgctattctattataccaatcttttaatttgtcagactcattcaggacgtgcccttatcccacaactagtccacttttacatatttacataaagcgtgtgctcggttctaatgggttttgaggagcttctgtggtttacataaatgtg

SEQ ID NO: 266647 - DNA, 410 bp, Glycine max
ctgcagctaacaagctagaaatcaagtgatcttgtttccgaaatatagggaaatatagggagaaaacggatgcacattttatctatatacaattgtttgttgcttgcttgaatcttgatttcaggtattgtattgtcatcatcaaaaagggggagattgtacatgcaattgactttgatgttttgatgatgatcatgatgatgtgttgcaattgatgcaaatgggcttttcaagattaaaattcaagacaatacttcaagattacaaggcacaacatgaagatgatcactataatattatgaagggaattcctaattgaattatcaaaggtttggccaagtaatttaaataaaaagtgtgtttcaaaggttttactctctggtaatcgattaccaaaggatgtaatcgat

SEQ ID NO: 266648 - DNA, 426 bp, Glycine max
  unsure (1)..(426): unsure at all n locations
catgcaagcttgaaatngcattcgggcacctattttgaatctcctatgctgnctctacatatataaaacagtcccaccatcccaattttgcaaaatcatattcatatatcattgggggcatttcaccgagcacttggagggcacacgtttggacacaaattgcaagagaatggggacaatgtggcatgccccattgcttcagaatacaacataggcctaatgccttctcacacaaaccctcaactcaacaaaacaagcatggattcagatgtgaattgcttcatgaattttgcaaaaaatgagcaactaaagcaccaaaacacatcaatggagagccaaataaccaagggaaattgcacttacttgtggggagtgaattaaagcgtgaaaagggaagcaaaaactcaacaatggaagcttgggggc

SEQ ID NO: 266649 - DNA, 429 bp, Glycine max
cagtaatgatggcccgagttatgttgtggaacggttacgaacccggaatgggtttaggcaaagacaacggcggtataactagcttgataaatgccaaaggaaatcgtgggaagtatggtttaggctataaacccactcaggcggatataaagagaagcatcgcggaaagaaagagcggtggtcaaagctcgcggttgaggcaagaaagtgaaggaagcccgccctgccacataagtagaagctttataagtgcgggtctgggagacgaaggtcaagtggtcgcgatatacgaagatgatgtttcgagtacattggatttggtacgaccatgccctcctgatttccagctgggaaattggcgagtggaggaacgccccggcatttacgcaacgagcataatgtaaacctttacggttttaaaagctctat

SEQ ID NO: 266650 - DNA, 427 bp, Glycine max
gtcacctgcggcatgcaagcttgagttgaaggcggtgagtgatggattcttgagttatgcggcgctagagaggaaggctgagttgtatgagaagttggcgaatggagagttgtcggatgaggaggatcaagagaagtattgtgtggattttttccgcaagggaattgagcatgatgagttgccgccaccgccactgggccgtgatgtgttgctacaaaatgaagatggtcctgttaatgatgatgatgattcattgatgtttaacatgaagcctgttgggcctgggcgaacagctggagctgttgacaattctgattataaacgcaatattaggtatgagatttatgtttttgcgttatacggttataccatgttatgtgatgaaaagtctatgttgttagactagatagtttgggtggattcaatg

SEQ ID NO: 266651 - DNA, 427 bp, Glycine max
  unsure (1)..(427): unsure at all n locations
agatctcagcttcgacagtgacgtgtcnaacaatcaagactaaaactcttctcaatgatcatcttcaccaggagatagaggcgaatctattctagttggaaactatacctttaatcaagatgctgctaagatggaattgacaaagatgaatgcattcatgaataccctcttgctatggttgggtttcgaaggttttataatcgctggtcaacctttgttcacagtaatatcccgtaatacattgaagctggatatactaaagttctatgagagtgacaagaccaaaactatgacgttaattcaggaaaattcaagtcgcatagctataacaatggacatgtggactgtatcgaatccaaacaaaggctatatgactattatagcccatttcattgataacaanttgaatttgcaaagtcggcttatg

SEQ ID NO: 266652 - DNA, 406 bp, Glycine max
acttactacgtgcgcattactatttatacttcttaaagcattagttcattttggtgacttgacctaacaatttagacgctagctagctactcgacattaacagattagatagaactatttattatttcaaataaagatgaaagttgaaacctggtttatataaatgaaacaactctatgctaagccatgaatttgggaagacatgggttgtatgcaaataagtagtaattaatttattacattttttctcaatatcaataactgttgacaagaaattacccattattacaaaagaaaattgcgaactcccgagtggatagtagtgtgactaattaagtagcatggatctctcgtaattggaataggattgttccaaaccatatatctttcacaagacaacatatgc

SEQ ID NO: 266653 - DNA, 417 bp, Glycine max
  unsure (1)..(417): unsure at all n locations
agctggccgcccagctcgcccaggcgagtttatttcttccaggcgagcaaggttgcttcctccagaagcaacagccttctggaggaatcttttggagggcccaggtgggcctggttgctatttgcacccccctttttactaaatgcacccccttctatttttttggtaattctttttccgtaacgttacgaaactttacgaatttcgcaacgatccttattttccttccgcaaggttacgaatccttacggattatgtatttactttttttagttttttgaaggagttacggaaacttacggattgcgcaaaaacacctcttttcgacttccaccacattacggaatttcacggatcgcgcaagcctgcttccttttgatttccgagacgtctcgggacttcatttatntgtgcaac

SEQ ID NO: 266654 - DNA, 455 bp, Glycine max
ttgcggatatggtcttcacagacgagaggctcagagcgggtctaataaaaggcaaatctgatcatcatgctttgataagtgcaaaaaactggcgcaaatgaagagggtgagaatgagggagaaacccatgctgtgactgccattcctatacagccaagttttccaccaacccaacaatgtcattactcagccaataacagaccttctccttacccaccacccagttacccacaaaggccatccctaaatcaaccacaaaacctgtctaccgcactttcaatgacgaacaccacctttagcacaaacccaaacaccaaccaagaaatgaattttgcagtgaaaaagcctgtataattcaccccgattccggtgtcctatgctgacttgctcccatatctacttaatagttcaatggtagccataacccttactaagtttctcaacctccatctttt

SEQ ID NO: 266655 - DNA, 422 bp, Glycine max
taaagcaccgcggcagcagcttatcaaaatgaggcgagttgttttgtctctaatttcaagaatattctgaggggtaatatgtatgaaaatagtagaatatcctagaactatagtgtgttcgaatatggcagatcaatctagaactatagggacgctgaatatggtagaacaatctataactataagtgtatgtttcagatagaagaatctagaactatcatgatactaatctatcatgaaaactctacaaagacctagagtaatgtagaaacattcaccaccattgaaaggctggtgactcgagcctataaataggaaattggtatgctgtaattgatcatcccaaaaatcaatagacatagccttctttttaaaacaatgatctataactatctactctcatctaataaactaccacctgt

SEQ ID NO: 266656 - DNA, 381 bp, Glycine max
atcaaacctcaacctcgcaaatctggaatacgtaagcactgtctcaccctcctccaaaactactgcggcctctaagaaggaatccaggctgtcagcatcaaacctgattaaaagacctctcaccctcacttgcttagggctctggccttctgggctgtataagtgggcataaaaatatttaaccaccgccacatatatcgcttcctcctgaaagttggcgacgcgcttgtgtatgttacacctctacaactctgacttatactcctcgaatttagtatgataaatcttaacactcctttctggaaggatcactccggcccgaatgccacatgtatatcggatcaagctcttcaggattggaactcctgaatcaaactgagc

SEQ ID NO: 266657 - DNA, 418 bp, Glycine max
agcttataagaacacaattgcctaaatcatttccaaatatgcatgtgaattaggaagcatcaacaagaatcaagccaaggctattgtgcaagcaatcaatggggaaaaacacaccaaaagattatgatgatggatggctcaaattctcacaaaggtaaacttatcactttcaaaattatcatgacatgtagaggaaaaattgggatttcaaatcacaaaatgtcaagagacttttattttcagaacaattacccatttcttgaacatatcctataattcaaagaaaaatatgcgaagttgtacatgcaaacagaattgacctaaaatattaaactagaaacccaacacaactaacaaaactagcaaaaccaaaaccaaagaacactccccctccccatacttaaacaacacatttttc

SEQ ID NO: 266658 - DNA, 409 bp, Glycine max
  unsure (1)..(409): unsure at all n locations
agctngggaggattgatggggacctcttttttgttaggaactaggataagggctacgtgggagtacgtgagctcagttgagaggtgggcaacaggggatggtgggttatacgtgatttgcggatgtggagaattgttttgcaccatcgcccgaccgctacctagtaccacatgtgatgggtcccccataatcctacaagcttgaaatgatgaactgtggaatggtgagacttccttcttttattgttgaccacatagtggtccctgtagatatgtcgcggcggtcagtagaccttatgggcgtcaggtggggtgctattgcccaaaaccaagcttgaccaatcccgacccaacccgggcatagttagttcaatgagaacctgtgattgtcctaagcaggcgagctcctg

SEQ ID NO: 266659 - DNA, 419 bp, Glycine max
agcttatgaatgacattacttggagagtcttgctctgccaagcatcaaccaccaaatgtggatactctgggcgagagagccaagcatcaaccaccaatttgctacaactcaaaagcaaaggattatggtctgagttatgctggtaaagaacctccaccaaagcttgagggaaaaggatcctccaatcaggattcaccatacatttgtctagcttcttacgaacatgagcgccattctaaacattcttccactaggtgaccccccccccccccccacacacacaacatgcatatcaatcatgtcataatgatccaaagctgaagtcataacactagctttattggaaaggaaggactcaccttggacttcaaaggcaaaaatgacttcattcaaatctcctataattatccaaagtcttg

SEQ ID NO: 266660 - DNA, 399 bp, Glycine max
  unsure (1)..(399): unsure at all n locations
cctataaaactcagctgagtcgctataattgagttggcatcttactaagagtctctgtcaatgtctcaagctgcttagctagcagtttgttctgtgccaacagtgcatcttgtgaagaaagctctaacaggcttctttttgtaggtatatgagtccgatcacgcaagatagcatgatcagtagcagccatattttcaataagctccatagcttcttcaggagtcttcaatttaatctttcctccagcagaagcatctaataactgcttggactatggtctcaaaccatctataaaaatgttcaattgaatcggctcaaagaatccatganggggtgtctttcgcagcaagctacagaatctctcaagtgcttcactcacggattcatctgggaaatgat

SEQ ID NO: 266661 - DNA, 420 bp, Glycine max
  unsure (1)..(420): unsure at all n locations
agcttgacaacacaaacgtangactgntttaattcctggtccttttacacagatgcactcgcaagttaatgcttcattctaactactaataggactagtagaaatatcaattgtaaaatttgacactcgttaaaaatgatatgatgactgcaccaaaatagaattcacggtgaaggaattcattcattcattcatacataacataactaccaaatcgcccctttattacagggctattagatattctcctatctttctttctttctgatttttttatctaagccatagaagaaaaaggattaaagaccaagatgcagactcctcttgtgttgagtggaaggtttggtcatgcatctaattgcatatatatatatacacacccacacgatacaaagatgtcgttggtggatcaagtatcat

SEQ ID NO: 266662 - DNA, 393 bp, Glycine max
agcttctcaaggaagttgtctcaacaaatcttctcaaggaagctacctagtctataaatagaagcatgtgtaacgcttgttgtaactttgatgaatgaaagtcttatgagacacacttcaaagttccacttctctccctcttttattccttcaatttcgggctccccccttctctctttcttttcctccattgaagcatcctctccaagcttcttatccaaggctcatcttggtggtgaagctccttcttccatggcttattccctagtggatggcgcctcctctcactttttctcctttgtcttccgctgcatctccatggtggaaaatcaccattaaaggacctcattgaagctcaaagatccagcctccatagaagctcaacaagcaagc

SEQ ID NO: 266663 - DNA, 350 bp, Glycine max
  unsure (1)..(350): unsure at all n locations
tatctattgctattcagaactaagtgtttggagtggctattcaagaaaattgtgatccaagcatgaaaggcagacaagtgttgatcctttctattcttgtcaaaaattctgtcttgatatggnttcttatcttctgtgtaggtagataacttcattcttagcttacgttcatagtttgactgctcatagtctttgaaactttttctctctttaggtgccttcagattgatgtctttagtttggaaggtctctccaaacaaagtttgatcccaaggaagaacaaaattgagggaacaaaggtgactcatcaattgttataggtctaaaagagtgtagaaaggcataacaaa

SEQ ID NO: 266664 - DNA, 401 bp, Glycine max
  unsure (1)..(401): unsure at all n locations
agcttaggcattatcaaccagaaaggcaatgttgcctaattgtgattnttgcaagctaagctataatcaatttattattataactagattaagatgccacatccctttctgtccctctccatctacgccactcattgcagccattgaacgcatcttatttctaattaatatcaacatcctccagtttcttctttgttttctccaaccctttggttcttcatgtacttgtttgtccctctgtatcttctactgccttttcattaataatatcttcattggaataaaaaatatgtataaacaaacataaaatatcttccaaatatttgatactactatataacttcctttatttttcccttccactcgaatgtgtttacttcttgtttgatctgaaagcatct

SEQ ID NO: 266665 - DNA, 397 bp, Glycine max
  unsure (1)..(397): unsure at all n locations
ntngccaagacttgaacacaatanattgttactctcgtattgctttcataattnttctctcttaaattgaagttgcacaaagttattgacactgctcaatatgctatgcttggttttcttttatctaggctgcctggattaaagctgaagaggaggaaaggaagcaagcaaagaaagcaatttgattgtaattttccgtacaattcattcattcatcctttgttgataaaaatgtgcttacatatatcgattacaatgtaataacattggcttcttgattgtacttcagcttctgatgaatttgcttccatattattatactggcctgggccaatctcataatcatcgggttatttatgcccttttttgtttgattttgtctgtcctctgaattgac

SEQ ID NO: 266666 - DNA, 417 bp, Glycine max
agctttttgggtacaattatacgatccagtttataagtggccactctaacgtcattgcagactcactttctcgcatcgaagtaccctttgagccaacatttcttgttctctcggtcccacaaattgaattcatggaccagcttcgggcaacactgcaagcaagtccaattttccaacagaatttgtcttcaatttcctctaatcctaaagcttttccggttttccagatgcacagtggtatgcttttacacaagggcaacatatggctcaatgatgacaatccattttgccctgtattgttaatagaatatcatgccaccccactaggtagacaccttggagttgccaaaactatccaccgcctgtaagctaatttcacctgggaccatctccggtgggacgtcaaggaattcatta

SEQ ID NO: 266667 - DNA, 395 bp, Glycine max
agcttgcttgctaagatatcacaagacgctcttgtttattttgacatacccctctactggctcagctcaccttcttgagaagacacattagagtttatcatcactctcccctctactcctcaagctggaccctatgactcgaaacttcaagcttggaacatatgacctgactactaggaccacttaaagggccccgaaatacatgggttaggccgctctctgatagaatggctctctatgacaccttgtttataaagccttgactcccgagtgaaatgactaacgatttaagtgagctaaacctactaactgaaaactgggtctgtgacagtgtgcaaatgcaattgattgatccattatagacacctatgccttactctgcataaattcaaatc

SEQ ID NO: 266668 - DNA, 54 bp, Glycine max
cccccccccccctaagagaaggggttgtgaacgtgaacccgtatatagaccctc

SEQ ID NO: 266669 - DNA, 413 bp, Glycine max
gcaagcttgtaatcgattacacatatactgtaatctattaccagagcagattttcagaaaatattctcaacagtcacatctttttatgtggctcttgaatggctatcaaaggcctatatatatgtgacttgacacacgaatttgctaagagttctttggatcaaaaaggtcttatcctcttaaaaagcaaaatcgttttatcctcttacaaattccttggccaaattacttgtgattcaataaggaattatttgagtgctcaaattgttcaatctatctctttcaagagagatttcttcttttcttcttcttcattctgaaaagggattaagagaccgagggtctcttgttgtgaaagaattctaaacacacaagaagggttggccctgtgtgtttaaaacttgtacaaggaa

SEQ ID NO: 266670 - DNA, 420 bp, Glycine max
  unsure (1)..(420): unsure at all n locations
agcttgtccttggtttagacatgatttatacatgatttaggacttgtaggattcaatttgggcaaaattggacgaggtcaagtgtgatttcnaaaatctgcactattatgcagaattttgctattgaaatgtgcagcagaattttggctttgtgcagaaaatgatgtgtatttgctggttgtggaaagagtagtacagattgggttttggacgttttctggcagatcccaacggtcacaatgtagatttatgtacttgggaccttcattaaaatttttgagtcgatccaacggttaacgaattggaaaaaagagaatgttactggggtatttgagtaaggaaagcggcggtgttggtttgtgtttttgggcaaagatttctgcctttgcctctgtttcttggttttgatagttcatgatg

SEQ ID NO: 266671 - DNA, 360 bp, Glycine max
gaaacttcctgcttttattgttgaccacagagtggtacctggagatatgtcgtgggggtcaggagaccttggggacgtcaggtggggtgctattgcccaaaaccaagcttgaccaatcccgacccaacccgggcatagtcggtcagtgagaacctgtgatgtacctaaacaggcgagctcctggcagtcaacagataaaaggaacaaagaccacaaagcaaggaggcttgtggtggctggccagctgtgaattttgtgtaatatgtggattatggcctctggtaatcgattaccaagggtgggtaatcgattacaaggcttataattgaagacaggaggctaagatggtctctggtaatc

SEQ ID NO: 266672 - DNA, 420 bp, Glycine max
  unsure (1)..(420): unsure at all n locations
agcttctctcttttcttgtttaattattatatantgtttttaagccttgtatttggctatgttttcatgacatttgaatacttagtatttcttttattatttgatttgtatgactgaatatgatgattatatttacttgctcttgggtgtttatggttatgaagttttaaacttaattattttgatgatatatgactagaggtatgcacttttatttggttatgaagctttaaacttaaatattcttgtgtatgtcatttatgtatgggttttacatatatttgatctattcatgtttcttgcttcttgatttgggtgatatttcttccatgaatgctgtatggatgtatttgaatacttcaaatttgatacgcactttggctttatgttgatgccaaagggggagagaaatatggatta

SEQ ID NO: 266673 - DNA, 301 bp, Glycine max
tggttcgaggtacttacccgttgaagatcgaagaacgatgaatatcttatgaagaacgtcgcagaacggctgaaacttttgcgagattcctcacggaaaacgttacggaaacgtttcggaagcgcctcggcttagatttttttcacggaaaccatttttccaagcacattctaaagagagagaagtgcctaaggggccgggatcctttccttcttcatttcctcccatatttatagcaaaataggggaggtggttgccgcccagctcgcccaggcgagctcagctcgcccaggcgagcaag

SEQ ID NO: 266674 - DNA, 401 bp, Glycine max
  unsure (1)..(401): unsure at all n locations
agcttganatcagatgtgttgaggggagtttgacatttcttcttgagaagcctctgcatgcacaagagtctggccttggcttgaagcttttgcatgtttaagaagttctagagagagaaaggtccaagttccaaagagttctaagagattttgttgtgtgaagatctgcatagacgagagctcgaagcggaagtcgttctgaaagcttgagatgagtttgtaagtgattgtgagatcctagtggggaaggagacatcctcaccacttgtatttttgcaatctttcatcttgttcttctctgtgttgcaaaggaggtttccggactatggaaagctaaatccactgttggatcttccctataggtacctgatgtaaatatatttctatctatgtaatgatgt

SEQ ID NO: 266675 - DNA, 421 bp, Glycine max
cccggatcttaagcacctgggctgcaagctggagtaatccgacaggaggacatgattaggggcattcaaatcatgctgcatttgagtggagaatctaacattgcggagttcaaaggtgcttttaaggataagcaatcagttcatgtggctatgaaactgtgtgctggtggtgaactttttgacaggattattgccaaggtccactatagtgaaacaactgttggttcaatatgtaggcaggttgttaaggttgataacacctgccattttatgggtgttattgatagggatctcaagctaaagaatttcttgctatctaataaggatggcgagggacttcttaaggccacacattttggcttaccagtcttcattgaagaagggaaaatttggtatccattagatggccttttgctatcca

SEQ ID NO: 266676 - DNA, 411 bp, Glycine max
taagatgaagaagtgtcgaagggtgaaacttgctgctcttattgttgaccacagagtggtacctgcagatatgtcgcgggggtcaggagaccttggggacgtcaggcggggtgctattgccccaaagcaagcttgaccaatcccgacccaacccgggcatagtcggtcagtgagaacctgtgatgtacctaagcaggcgagctcctggcagtcaacagataaatggatcaaacaccacatatcaaggaggcttgtggtggctggccagctgtgaatattgtgtgatatgtggattgtggcctctggtaatcgattaccaagggtgggtaatcgattacaaggcttaaatattgaagataggaggctaagatggtctctggtaatcgattaccaacgggtgtaatcgatacc

SEQ ID NO: 266677 - DNA, 413 bp, Glycine max
  unsure (1)..(413): unsure at all n locations
agctntggtgtgtgtgtgcaaccacaaattttacattgagtgtcctcattgatatgttctatagttgattagctttggagcttgaagatatcaagggcatggtaatctccaatttcttaaagatatcaaggaaatgagccagatgtcattccttgtctttctttgttggtaccaatggatatggcacctcctcccttttgcttggacttgcctcctttctcttttctctagccagctcactcttgggctttttcttctctttttttctctcattctctttttctttttcatttttttcattgtctttttctttttctttcttttccttctcacttatttctttttcactcactattattggtatctccttcagtcgatcatcttctgcttccacttcttccttagtctcactc

SEQ ID NO: 266678 - DNA, 402 bp, Glycine max
aacatgatatgttcattgtgagtgaatatgagtattgagtacttaccctccaagatatattttttttgcaaggatgaaggcacccatgatggctacaataatcatcatcaaagggttgaaagcagtaacaaaaacaggccctttttctgcatgacaatcccttgaacatagtaggtgatacctgatgatattattccctggttcaccaaagattacgtccatttagattctcatatgatatggttcaacaacaaatacaccgaaaaatagaataaaaattattgtataatctgagactagcacatgtctataatctggactcctcgtcaatataataatttatcaaatagatcatagatgggtagacacatatagagaaagtggattacagcataagcagca

SEQ ID NO: 266679 - DNA, 419 bp, Glycine max
agcttcattcctttattactcatgtgtcctagtctttgatgccataaggttgaattattgacagcctcagtaactgttgccatatccttatctactatcatgtaaagaaattcttgcttctttccacgagccacaacgagatttccttatgttaccttccaagctccatctccaaaagtggtgtaaagcccctcatcgtccaactgccttatagatattaaatttctctttaaggcaagaatatgtctgataatgtgcattatccataaggatccactggaggtcttaatgttaatatcacctcttccaacaatgtcaagagattttccatctgcaaggtaaactttcccaaaccttccagaaatatagttagataataaatctttaaagggagtggtgtggaatgacgcacctgagcc

SEQ ID NO: 266680 - DNA, 407 bp, Glycine max
atgtgagaaactaatttattataaataagatttgctaaaaaaagataaaaaaaaaacaattagatcttaaaaaatgaacattaaaaataggttcagaagaagaagaagaagcatcttcaagaaaaaaaatacatcagcatcttcactcactcaccacgaaggttccgttctctgtgaatctatatatttctagggcacgttacgtggaacgaagctcttcactgaattcaatcgaagaagaagaagaagatggattgcgttgctggttcgagtttgtttccgttgcatcgttgcaaaaccattcacctggttgggaatattcactctcccctcttgaactcaccacacacacaacacaattatctcattcgcatcaatcattgtttcgctcattccgctattctatt

SEQ ID NO: 266681 - DNA, 420 bp, Glycine max
  unsure (1)..(420): unsure at all n locations
agctntgatgaccatagcttacttaatattcaatagtccatccactgttattgataagaaaactccagaagaaaagtggagtggttaccctcgaaatctttgacctttggttgtgtgtaaggcagggaaaactagaaccaagggctctgaagtgtatgttcctaggatatcctcaagggttcaagggttataggctgtggtgtatggagaagggccagcctcaagttctgatcagtagagatgttgtgttcacggaatctaagatgtattacacaaggaaggcctcaatagatcaacaattaggatcaaacacttatgatagtgttctgaaggaggtagagccagtacaagaaagactaagactagagatcaaagttaagaatcagaagaatgagcctgcacagactcaacctgatctac

SEQ ID NO: 266682 - DNA, 163 bp, Glycine max
ctctaacttcattggcactttccttatggccagcctttcttccccttttagggtcaagcacttgcttgccaaaacaacaacttttttgatccccctctcaatttctttaagaagaagaacaaattccacaatttttaacaagccaattttttcttaaggtaaa

SEQ ID NO: 266683 - DNA, 435 bp, Glycine max
  unsure (1)..(435): unsure at all n locations
atcctcagagtcacctgcggcagcaagcttttatccaggctcatcttgngggtgaagctccttcttccatggcttattccctagtggatggcgcctcctctcccctcttctcctttgtcttccgctgcatctccatggtggaaaaccaccattaaagaacctcattgaagctcaaagatccagcctccatagaagccccacaagcaagcttccatcaagtggtaatcagagcacaagagcttcaagtaggtgctccttaaacctccattaattttttttttctttaccttctcttccattgttgtttcttcatttttctccatgtatctcctcatatgtctttttctaaatgttgttaacatgattctttagagttttcactgattaaacttgctatagaaactagatttgattttctatggttcaaatttcttg

SEQ ID NO: 266684 - DNA, 291 bp, Glycine max
ctattacggacactataaaactcagcttacataggagctacgtcacaaacgttcataaccaaatattaccaacagattcttgcctattaatagaaaaacataaataaaatggtcttcaaaacaaatggcaacatgtgtcttcgatcattgatcgaggccgtacccgaatcaaataaacattaaaatgcagtaactaggaagtgatcctaggtcgtttcccaacgagcaatgataaaccaaatgttcatattatacttgcagtaatagtaacaatgggggggggggggtctc

SEQ ID NO: 266685 - DNA, 411 bp, Glycine max
agcttaggccattcacacataatttaaattatgaaaatgtgaggtacaatctctcttagacaccaactaccttgttctcttttccaaattcttcatcatactgcactccctctttcacatgccaccacatttgttccacttagaatttccaatgctgtgagtgttgatccaatagaaataagatgtgtgtgaccataagccaaacccatcaaggcagcaacataatatgcattaacagctttactagtactctactgatttcctccatctccaaacttagttaaccctccagcccatgaatgcagtttataaaggtcaaaacaccttagccttgtgtaatttgagttcaatcttctgatcaaggtcataaaatcttccattagtgaataggcttaatatcttatacgaaaa

SEQ ID NO: 266686 - DNA, 415 bp, Glycine max
  unsure (1)..(415): unsure at all n locations
agctnaacaaggctctctgaggctgataattctttcccttatacagnggttcgacaggctgaaatctacttttcttcgagtgggctttgcgggaagcaaatgtgattcttatctgttcatctacacacatcaaaagcatactgtccatcttttagtctctgtgaatgatatcatcatcacaaccaattctatctctcttattcaacagctaactttcaaactaaacactgccttctctcttaagcagctaggtcatttggattattttttgggactagagatcaaataccttgctaataattctatactagggactcaaagcaaatatatttgtgatgtacttcacaaactcaaatggctgaagcacattctatttcctctcccatggtttctaactgtaaactatccacacatg

SEQ ID NO: 266687 - DNA, 357 bp, Glycine max
  unsure (1)..(357): unsure at all n locations
cttcaaaaaccaatatggaacattggcttaccaagcaccaagagccaaaatggccgaggcactcagccataatcgccgagcgagtntcacactctaacattctgtacatggctccaagcgcgagggtcactcaaatctccaaccttaggcttgcgtctctccgtaagctcaccgtgctcgatttgcaccacagacattcgcctctgaaagcacgccacaaacaaccaatcaatcgcatcacggcaactagaaaaaaataacaagaacactcgatgcatgcccattttaatgagaatttcacaggaaagaacggatagatagcacggaaatacgacccgcacgatgagtattccaact

SEQ ID NO: 266688 - DNA, 216 bp, Glycine max
cgcgcgcgcgcccagagaaagagttattttggcacggatggccagggtcaacacgccccaaaaaccaacccgccagggaggaacaaacccacgaagaatccgcgaacgaccggacccacacacggggacacaaaactccctcccacaggacccgacaactagcaggggggaaccaaaccggaacacagaggagaatggaggctcccctaaaaaagc

SEQ ID NO: 266689 - DNA, 191 bp, Glycine max
ccccattatatcaaagccgctgagaaccttcacgggaggacactactggagtttcattgctgtcaaactcaaattgacttactattatcccttgacatgataaatttcaatggtgatcaattctcgcacgatgagcaaaaaaaggcacatgccctccacaaaccaaatattgtcactcacatgttgcctcg

SEQ ID NO: 266690 - DNA, 211 bp, Glycine max
ttggcgaccaggacgacggggtgtcggttttctattgacccctaatatatcaacacgcgcggatcgaacactgaagctctgaccaaaattcaacgacagggcgtctgactcggaagtccacgagagtcccgtaatcgatcgagacacgtcgcatcgaaaacaagaagcctgagccaattgaaaccacaataacgttgtactcggatgttcg

SEQ ID NO: 266691 - DNA, 429 bp, Glycine max
  unsure (1)..(429): unsure at all n locations
ttaagncacctgcggcatgaagcttgtgaggatatagaacttgtattttttggcggcgtgagtacatagagaaagtagcaccgaatgttgctaaacggaagaaaatgtatgtctatgaatatgaaagttaaatacctaaggtcaattctcatgttaataattaatattataggcttgttaaaagacttgctttactattagagtatacatttctcgctgatgtacttttgctttattcttagtgatagttatcactagtctgttaggactaactctaaggtagacttcgttaatctgagtgcactaactaaagtcaagagcttatgtgtaaagatataattattgttcctcacctgagaacagttacttgtatgtatactgaagagtatttttaaacttgcttgttaaccttacaccaatagttttctg

SEQ ID NO: 266692 - DNA, 425 bp, Glycine max
taaggaatcaagatcaagattcaagactcaagattcattattcgagagaagacttaatcaagataagtatgaaaaggttttttcaaaaactgagtagcacatggatttttctcaaaacatgtttaccaaagagtttttactctctagtaatcgattaccagattattgtaatcgattgccagtagcaaaatggatttggaaaaattttcaaatgaatttataacgttccaattgatttcaaaaagctgtaatcaattacaatgttttggtgatcgattactagtgcctttgaacgttgaaattcaaattcaaatgtgaagagtccattctttcacataaagcttcgtgaatcgttacactgattggtatcgactctaggatttatctgaataacaaaagagtactcttcaaagggttgactttta

SEQ ID NO: 266693 - DNA, 416 bp, Glycine max
agcttcaagaaaagatggcctcagtttatttcttattttcagaagggaatcctatcgatagaccttcaatctttaatggagagggttaccactactggaaaacccgaatgcaaatttttatcgaggcaatagatctaaatatctgggaagccataaaaataaggccttatatacccaccacagtagaaagagttttaatagatggtagttcatcaagtgaaagcataaccatagaaaaacctataaataaatggtctgaagaggatagaaaacgagtacaatacaacctataagccaaaaacataataacatctgccctaggaatggatgaatatttcaaagtttcaaattgtaaaagtgcttaagaaatgtgggacactctttgattaacacatgaaggaactacagattgttaa

SEQ ID NO: 266694 - DNA, 460 bp, Glycine max
  unsure (1)..(460): unsure at all n locations
tactcagcttaggttgctcaattgctccangttgctgcatggaaggcttttgtctgtatggtggtcagcagaggagcacaaaccacaaacccttgcgacaggtacagatttctgattcaaggccagctgggttaccaagttgaccaacgcatccagtttgccttcaagcttcttagtttcagatgatgcagatgggtttgtagctaccttatgcactcctctaatgactatggcatcatttctggcgctaaactgctgggagttggaggccatcttctcaattaaatttttggcttcagcagggggtatatctccaagggctccaccactggcagcatctatcatacttctctccatattactgagtccttcataaaaatattggagaagaagctgttctgaaatctgatggtgggggcaactggcacatagtttcctanatctctcccagtactcatac

SEQ ID NO: 266695 - DNA, 413 bp, Glycine max
agcttcaagaataatggcctcagctaacttcttatttccagaaggaaattcaatcaatagacctccaatctttaatggagagggttaccactactggaaaacccgaatgcaaatttttattgaggcaatagacttaaatatttgggaagccatagaaatagggccttatatacccaccacagtagaaagaaccacaatagatggaagcacaacaagtggaagcacaacaatagaaaaacctacagatagatggtctgaagaggatagaagatgagtacaatataatttaaaagccaaaaacataattacatctgccctgggaatggatgaatatttcagggtttcaaattgtaagagtgctaaggaaatgtgggacactttacaagtaacacatgaaggcacaatatatgtta

SEQ ID NO: 266696 - DNA, 461 bp, Glycine max
  unsure (1)..(461): unsure at all n locations
tattacgngacctataaaactcagcttgccttaagggtaacaacctttatttttgtttctgcttcaaccttctttntcatggccttttctgctcttgctattctcttagcatcaacaagataacattgtttgggggtgaagaaaacttgggtgttggttgggaaggaaaggttaaggaaggtgagggtacatgggtaggtgtttctaagatttccatcttagatgatggtgtgactgaagttggttgagaaggtccaaggttctaagcaggtttaggagatgatggtaaaggttcagttggtggttaaggctgaaaggtttgattatgatggtaggtttcttgggtttgggtgcatggtctgagtctgagtctgaactttttctctttntgaggtcagatggaggttgggttcttggctttctgactgaagataaaggttgcaagttaaaacatggtgggt

SEQ ID NO: 266697 - DNA, 405 bp, Glycine max
agcttataatatattgatacgctctaaatttattatttaagctgccgagatattcaaatggtcataacttttcacacggatgtccgattcgggcgcataatatgtcgagaggctcaaaattgaacaacggaagctcttgagaaattcaaatggtcataacttttcacacggatgtccgatttaggcttataatatatcgatacgctcgaaattaaacatcggaaactctcgggaaattcaaattgtcatcacttttcacacggatgtccgattcgggcgcataatatgtcgagaggctcgaaattgaacaacggaagctcttgagaaattcaactggtataaccttttacaccgatgtccgatcaagcatatcacttattggacgcctcaaattgaacaccggaa

SEQ ID NO: 266698 - DNA, 454 bp, Glycine max
tgagtcggacctcggtgtgaaaagttatgaccatatgattttctccagagcttccattctacaatttctgacgtctcgatatattatgcccccgaatcggacatccgtgtgaaaaattatgaccagatagaatttctcgagagcttccgttggtcattttcgagagcctctatattggatgcgcttgtatcggacatctgagttaaaagttatgaccatttgaatttctcaagaatttccgttgcccaactttgagcgtctggatatgtgattcgcatgaatcggacatccgtgtgaaaaggtatgaccatatgaatttgtcaagagctatccgtgaacaattttgagcgtctagatatgagattcgcctgaatcgaacatccgtgtgaaaacttattagcaattgaaattctccagaggcttcgactgctaatttcgagcgtttaatttatta

SEQ ID NO: 266699 - DNA, 375 bp, Glycine max
gtttgtagaactttctggtggattaatcggatttttgagcttgaagaacttctggatgcatcacagtctggtacttcattattagtttagcaagtatcaaaaaatatcttgctatttctacatcaataattcttaataatagtccgtcagtcagtcaccatgtattaaccatatcctcaatgatacaggggactccatcaatagtagtattacatctccaatatgggattatcatggtaaagatgctatttccttttgtatggttgatattgtaacccctacccagaagatgttggccagggagttgacatgtgacattgagtttggtaaaagcctgcttgttactggttcgtataattgttagtttattattat

SEQ ID NO: 266700 - DNA, 479 bp, Glycine max
  unsure (1)..(479): unsure at all n locations
tatagatactcagcttcaaagaaacaagatccgaggtatctacgcgaatcattctttcattctttcttgtaaagctttctgtacattcttgtataaatacaaagctctcagaacaccttgtataccttgagagaaaagactancagtgttaagtgatatatccatctattagacgatcatactttagttagtgaacaacattccaataaatcttgttgatctgattagagccagcagtaacttggtagaacaaagaatacttggtttaagtcaagcttggagcagaacttgtaagtgtaagaatcagaagtgacaatgaccaatactcgtaactttgataagttagtggaaatttagtggttaccaagaactaaacgtagtcttgaaattgagatgaacaggataaattctggatgttttcttatactttaactttaactgacaaaggattttgaattaatttttaatcttatattctc

SEQ ID NO: 266701 - DNA, 434 bp, Glycine max
  unsure (1)..(434): unsure at all n locations
cctgaggcatgcaagcttgctnntacatgggcatggctggcttttctcagttactttttctacagaaaactaagtcgccttgggcttagagagacatgctcgcttatcccaatttcattccagaggcatatttgggcttatcgagcatgactcacttatccacgaatggaatacaaaaagcctctaagtctcaggaccaactaagtgggctcgctaagcgtggatggccagcttatggagttcatgctcacctagaaaaataaaagcaaaactcaaaggctcgctaagccgtatcgcaatggcttagcgagttcgcacaaaaatgtagaaatttaaacaaacttgatgaactcgcttagcggaacagggcctgcttagcaagttcatcctaaaatccagaaattcatcaaaactgatgaactcgcttagtgagg

SEQ ID NO: 266702 - DNA, 309 bp, Glycine max
acgcactaagcacgagagcacataagctatcagctatttttcagggcgaaaatgatcttgtattatgaggaacatgccttcttcgcgaaaaaaacattgtataatctaacagtaataagctatactggacatgacacattatggaaagaaagatcctaaatcacatatgtacagttaatgaaacctacttaccaacttaaaactaactgataggccctgatatattttatgggaattattggaaggtattgaaattgactttcgtcagctttttacggaactttgattcaaactttgataaagtgcaac

SEQ ID NO: 266703 - DNA, 216 bp, Glycine max
cggctaaaaaagggaaaaactttttctcaatgaacacaaacatcgctcctaatcacaaggactcctcaaaggaccatgaacaggatagtcaaaagcaccaaacaagatacaaccgaatggtgccgaccacacagaagccgcagatcaacataatgctcgtatgaatgacaccaactaaaacaaacagcgacgtattaacacggcaaagcggccaaa

SEQ ID NO: 266704 - DNA, 416 bp, Glycine max
agcttatggttgaggactactgttgagatgttttttatcaaaacactctatccaaaagggggcctggtcacttgatgattacccgcgagtccataaaaatctttgagttttgttcatccagcaatatagttaggttcaccacattttaattgtatgtaacagagagcgtgttgccattactgtctagtagatgccaaggatgctctagattatccttccatgttacagcaaaggacctactctcatctgtctaaggttacatttaaagtaacctagtatatgcaatattgatgtgcgatattatgtcaagttatctgagaatagtcttgaaattcctaacatgggccttaatatgaactgtggtgaacatttcctttggttttctgttaaattcatcagtgccttagccctttcat

SEQ ID NO: 266705 - DNA, 407 bp, Glycine max
  unsure (1)..(407): unsure at all n locations
agcttcttctagacttatgtcctcactactataaaatacactttcaacatcggttatttagaacattctacatcggttctaaaaccgatgttgaaagtgacgatgttgaatgtatgaattttaacatcggttttggagaaccaatgttaacatacatatgacaacatcggttctccaaatacccgatgttaaacacaatgaacaacagcaaaaaaagtgcaggcatgatgaacgttgacatcggtttttcagtaaaaccgatgttaatatgttagtttaacatcggttntctagaataaccgatgttaatgtatgcccttaacatccgtttttctagaaaaccgatgtcaacgttgatgatgcttacacttatttggtgtagttctttgtgtataacatcgggtaat

SEQ ID NO: 266706 - DNA, 412 bp, Glycine max
  unsure (1)..(412): unsure at all n locations
ggcccttaagcaccgcagctgcagctgatctgataaattggtatttgttgtatgctctggattngngagccatgacagaggccactggaggttaaagttcaccaattcctttttgagatatttcaactctctcgtgacttttacggtcatatttgtcatttctatttgcaacaagaattcaataatggtcatgcattgtgacactctaatatagtgtaattagggctaatatgaattaactctctatgtaaactttgcacttggggctaagaggcaaatttaacccaatttctatttaaggttttgttaagcgtccttcgtttgcctatgccttttccctgtattcattgggtgagaacaaggtcataaaagtgtacaagcaaatggtgaagagctaaattttggattgagt

SEQ ID NO: 266707 - DNA, 419 bp, Glycine max
  unsure (1)..(419): unsure at all n locations
agctngagatgaggaagtgtagaagggtgtttattttctgcttttattcgatgaccacagagaggtacttggagatatgtcgcgggggtcatgagaccttggggatgtcaggtggggtgctattgcccaaaaccaagcttgaccaatcccgaaccaacccgggcatagtcggtcagtgagaacctgtgatgtacctaaacaggcgagctcctggcagtcaacagattaaaggaacaaagaccccaaagcatggatgctttgtggtggctggccaactgtgaatcttgcgtgatatatgggttatggcttctggtaatcgattaccaagggtgggtaatcgattacacggcttacaaatgaaaacaggaggctaaaatggtctctggtaattgattaccaagggggtgtatcgattacca

SEQ ID NO: 266708 - DNA, 372 bp, Glycine max
  unsure (1)..(372): unsure at all n locations
ntctaacaagcttaagatagctcaaatatgaaataccatgtattaagtttgctgccaacattaagtaaccatcgggtgttgcggctgcaatttaaaaccgtgacaagtcctaaatgcacaaggtgcaacgactaactctaagggagagtacattttataaaaatgtgacagaaatcaatgaccacgaaatgtgcatttattttcatattcagagacaaatctggttctataatcacaactgcacatggaaaatcaagggaactcttgatgataaaagaatgttactagttcttcttattctgatttaatactgattgattgtgtcacgcgcttcctaaacaacctcaatcatcaatatcacttctcacatac

SEQ ID NO: 266709 - DNA, 430 bp, Glycine max
  unsure (1)..(430): unsure at all n locations
tagagaaacctgaggcatgcagctngactaataagccgcgtccaactcattctttatctctcgcgacatgtgatggagtttattcataatcaaattcaaatccaggggcggcatctcattatcaaaatccaaacgagcttcaatctcagtgagcaactcaatgcactgactcctcaatgatctgacaagaaaagagaaaccaccctgtccaagaatataatcctcttctgtcataaacaccctatcatgcaacgattgagccaagtcttataggatgacgcgagaagcttttatagaagctctctcatctaacttctccaaaaccagagattcataagttgatgttaaattatgagagaagctcaattcattttacattcttattttcttttactacaagtactaatgatgatgatgcagtacaccatgg

SEQ ID NO: 266710 - DNA, 376 bp, Glycine max
  unsure (1)..(376): unsure at all n locations
ggatttaacgtggattgagacangtagtgaacaatttaatatgagcttatattaattttatgggtgtgtgtgtgaatttctaataaataagttaagataaatatgtgcgactcaacattataaaaatgtactaatatggcgatcaaaattgataaaatgataatgagacgtcgaaatcccttctgagcatattatgtctctcaataggggggaacattttcactataggcgtttataagaagatagaatagtaatatggacatatatttcaaccctgaaatctacaactcgaaaatagaataatcttgctttgtaatagaatgagttggtaaagggtgtatacatactgaagtttcccttccctctatgaagaaac

SEQ ID NO: 266711 - DNA, 375 bp, Glycine max
aacaacggaaggagtcacttactttccatcattattggacaacaaagatatatcacgtggaggtctctaattcttgaaagtcatggttttgatcttatgttggtgtggcgacccaaggcacgcatgggaaaattaaaacactctaatattctaaatatttaattaaaaagattttataattaaatctacaatgtttaaatagaatattataggcttatgaatattaaaaaaattaaatattcaataattaactattaaaaacacaagtcaatcatatttaagtgaataagataccacattgaactcaaaccttaatatttattactagtaaaattgacaatttgagcttgggtaactaaagctcaagtgggcttc

SEQ ID NO: 266712 - DNA, 448 bp, Glycine max
  unsure (1)..(448): unsure at all n locations
tcgaatctgnatcgcagatcaatcttccaattcctttgtctctatctatcttcacatcatgatagatggcgagtaactctgcatgaactgatgttaaagccacaggatcccatataacctgtgtgccagttcccaagactatcccttatgattccgccaaatcctgcttgtcctgggtttccaaaagcgctccatcagatactactatgaatataatctttttagttcttcgaatttgtattttatttacattttgttctcttaacatttttttaactggtaggaattatgtctatgtttatgttttttccccattaaaatgtactttgaccacgaacagtgaaataaataaaaaatgttgaaaagattaaatatctaatatatcaaaatacaaccattggttgtttttataatcttttaactctaaacggtcttctattataaccca

SEQ ID NO: 266713 - DNA, 396 bp, Glycine max
  unsure (1)..(396): unsure at all n locations
ctgcagctaattccattaaccaagcgatgcatgacagattctttgtgtatataanatattattaaaaagagtatatttgctatatttgaaatatgaaatatatagattgatgacattctgttaattatattatattatatattttataatattttaatatatataccagtcatactagtcaataatctacgggttggatctcaaacctattaatccaatatcattcatatttatgacggaattagtaagcaaaaaagaaaaaaaaaatactttgataaaaataccatcacactcaaagggggatatagtgctacaattcaaagaactttacctggaaggaccaaagttctgagaaaaatcactattccatatggtacaaattggaggtataataaa

SEQ ID NO: 266714 - DNA, 339 bp, Glycine max
gcatgcacttgaaacccttcagagcacgcgatgttttctttgggaacctagggaactgctggagatgtcactatgaataccggattacacacctgacctcccctttaggtaaaggattagttatcgctattggggttataatgaatatgtgtttggatccttacaggatcaaatcgatatttaatttgagatgtttactgtattgtgattctttctttataaagaatcttatgctagaggaccctgaaacacactgctctgattggatttgacttgcaacatgaggttttgttttattgactgatgtactggcatgtacctttatcattttgttaacat

SEQ ID NO: 266715 - DNA, 310 bp, Glycine max
ggcaagaaggcaactactttctttttttttagcccaaccaacgggagggatcatggtatgagactcctttaagccaaattaaacctaaaagggccgtctaaattgggcctaatccaacctgagggattttaggtcaatacttgaattgaatcctttcgacaacggaacaatgtttattaatttatgctacaacatatagaacattaatctgattgataatagaaaaatatacatatgcatttgctcgtttgttcaaagaacccaacttttttacctgctgtcgtctctatcacataccttgcatttctat

SEQ ID NO: 266716 - DNA, 61 bp, Glycine max
cccccccccccagaagaggggttgtgcgctcgcggcccccatataccaccaccctacggag

SEQ ID NO: 266717 - DNA, 304 bp, Glycine max
acacactccactatgtaaaagtggcaccccttacaaaaaatactctcacacttttcaataaccattctcaaataccattcccaatccaataactaatatcgttaccaaaatcttgtacatacaaccctttcaatgaaaaaggacgaacatggcctaaactatgacgattatcacattcgacactgacagctataaaagaaaaattgatacctctatgaagcacaccatttcgcggaaaattccttcaagagccacaaaatgcatgtctttaccatcccactacctcctttacgaatataaaatg

SEQ ID NO: 266718 - DNA, 131 bp, Glycine max
  unsure (1)..(131): unsure at all n locations
aaaagagagcccatcaacgagaaaggagagggagggcaaaaaaacaaaagacaaaggggaaccaaaagagaaaagggacaagaaaaccgcaaaacaacggagagaaggcaggacccngggcacaagcccaa

SEQ ID NO: 266719 - DNA, 307 bp, Glycine max
catgtaaatatttattggtatcatttgcctgtaccacttggctcttaaaatctttggaggctactctctcactgacatcttttggcttgaatggaattgccatgacaggtttattgtaactatctttgccattagcgagatgattttgtgttgatggaggtaaatctaataggattaactcaccgtcctttatttgctaatatgttatgacatttgttggtggatcacctatgataccttgtttccacggggaactcttatccttattgatggcatatacatgaaaccactcacatataaggtcttt

SEQ ID NO: 266720 - DNA, 463 bp, Glycine max
  unsure (1)..(463): unsure at all n locations
tatagtanatatgggaaagattgaaagaaggttagttctattctactcatacggcgctttttatagaataaaggctataggtcaaattttcacgatcaagctttttgtctaataaatgggccacatttagtcatattgcttaaaatttcacagaaagttgcgcaaggttatgtctttttttgagaatctaccttgttgaatgcactgcaatttccttgagcaacattattgattgtacataccattcagcattacaaaacactcacaacagaagacgattgtctattgaaccgtcatagatagtgcacactatctatgacgtctcctacaatggcggctaataatcaacattgaatatgtatcttaatctgaccattaaatcatttttgcaatagtgagtggtggagcatgtgcgaaccatttaatggcgctgcccaccgtaaagtcttcttgtcttatgtac

SEQ ID NO: 266721 - DNA, 404 bp, Glycine max
agcttgtgtcgcactttcaactgccgatgttgaatacatagctggaagaagcttgtgtgctcaacagtcttggatgaagcaatgactcgaaaactttggagtaattcttaatcatattcctatgaaatgtgataacacaagtgctattaatctaaccaagaatcctgtcatgcattctaaaactaagcacatagaaataaggtatcattttttaagagatcatgtgtccaaaggtgactactactttgagttcattgatagtgaacataattagcagacattttcacttaaccttttgttagagatagattctttcatattagaaatgaactaggcctattggatgcatctagcataaaataacatcttgtttgcataagagcgtgggtcacataggcattcat

SEQ ID NO: 266722 - DNA, 408 bp, Glycine max
  unsure (1)..(408): unsure at all n locations
ttgcgtggagcttcaatggtgaatgaggaagaagatagctatgtgagagagacggagacaaaaggcttctgaatttctggtttggctgagtgacgacagagaacagctttttggtcttaaataaaaagggttttccctttttccattattttattcaagctctgccacatgtccctatttcagtggagccaaaagggcccactttccctttttactgtgaccaacactcagccacaaaagtgaggaaaatctgacctttgaaacgctaaaatcctgcctcggtttgtgtgtcatttctctggatccaattcctcgcgcttctctgcgtccgtcggngtcagttctcgaaagtaagcactatatatatcataacgctcagaataaaaccccgagcgcgggtctcacgct

SEQ ID NO: 266723 - DNA, 403 bp, Glycine max
agcttggtcttgattgttcctaagttcttttcattcttagaacaataaacttggcgcttctcttaattgtctttgggcttggcgaccaccatcaataaagtactttcggcacctactatatgttgacttcaccaacgctgttattggaatgctgcgacattctttcaacaccttattcacacattctgataagttggttgtcatgtgaccatatcgtcgcccagatgtatcgtaagccatgctccatttttcctttgagatttgatcaatccatcttgctatagctggactcaattgacgaacattttttaagctttgaacaaacacatgcctgcaaggagagtacgctgcatcaaatttgatatcatcaacagttgtacgtagacatgaaactcacattaaa

SEQ ID NO: 266724 - DNA, 239 bp, Glycine max
cttaaaataactgagatagggaccacaatggagacagttgtatcggcagggccacaaggttcacatccgatcagtataacccatcatcccttgtgccccctgagctgagctcaatactcccacgtagcccatatgctctatcctctcaacgccaggtccccatcaatcctcccaagcttccccaacattgccgagaattcaacatcccatcatcacaaactaacaaaccaagctaaaca

SEQ ID NO: 266725 - DNA, 415 bp, Glycine max
  unsure (1)..(415): unsure at all n locations
agcnttggagtttccaagtgtcttttcgttttcttcttttgaccagactttatctggcttcaattcattagagggctttccttctgtgtccagcatcttgggatgttcccagcctttgatgacagctttccaggttctgctatccagtgatttgaggaaggccaccatccttgctttccagtattcatagttggttccatccagaatgggtggactgttcactggtcctccttctttctccatgttcatcagaatttatctccctagatctcactcagtgatttagagtgcctgctctgataccaattgaaattctgataccaatgacagatgttgtaccggatgtcacgacattactcttcagaacatgcagattatatttgacagtatgaacagattaaacacgtaaataaca

SEQ ID NO: 266726 - DNA, 374 bp, Glycine max
  unsure (1)..(374): unsure at all n locations
ctttctntccaatcaatctgtctactgactaacaattcttctatgagttcacactcttattctttctttgtctaacatacatattcgttcaaattcatgaaaagaaacacaaatctcatcttcagcatgcattcaatttaaaacaaggcatacatccatttttcaaaataaataaactattttactgcaacaccaacaaaagttaagttaaactgctctagatgcttcagaatgagcaactacactactcatgcgcaaaactaacaagaagtaaatgatgtactagaaccataattatactaatagatcaaaaagcacaaaaaatcaataggaatttaaagatcctatgattggtcctgggtgtcttgtgtctg

SEQ ID NO: 266727 - DNA, 55 bp, Glycine max; identical to SEQ ID NO: 155533

SEQ ID NO: 266728 - DNA, 442 bp, Glycine max
  unsure (1)..(442): unsure at all n locations
taattgtgtcgaaatggaatatctgttttttatctttctagggactacatatatgctccatttggagttatgtagtttcctataggccctacacaaggcagataggtcaagtaagcacaaaaattcaaaaataagccacaattatcaactaagctcaatcatttgcctaagacaaaaactaagttaaggtaaaaaaataggagcaaaagagagctcaaataagctaagaagaataggaaaatactaaactacaaatgcccaatcacaattggagtatggcctttggacattgcaatgcactagccatattctaaaggtgtgtgaatgtcatcttttctgacatggtagaaaactacatagaggtatttatggatgatttctctgtattcagagattcattcacctcatgccttcaacaaatggaaagtactanaaagatgca

SEQ ID NO: 266729 - DNA, 389 bp, Glycine max
agcttgcaaccattagaagagaatgagcatttgattggaagtataactgaaaatgttagtcaattgtcagattgattgtgaaggaatgcattaaccgtatcctggtgagagtgtgatccttaaattttgagagaaacgactatcatttagtactgatttttgtgtgaatctctaaagtgtggactgaatgcatgaaattgaggatgatgaagaccatgtttgattgtgatagccacttagccaaaaagctgaccacgtgcttgaatgatttatcccttgcacccagtttgagctgaatgaattattgattgattgaacactgagcccatacagggttatctcttgctaccttgtcttaagttggaggagagcatcatccacataagctt

SEQ ID NO: 266730 - DNA, 412 bp, Glycine max
  unsure (1)..(412): unsure at all n locations
tatacataattaataaggtttaaaacggaaatatatatttcaaaaaaactttgcanaanaaaaattcaactcgcttgggcgagcatggtctgacaaaaaaaataaacagggggggggggatgaaaccaaatttcaccccaacttcccccattttcttcaaaactcaccanaggctccccaatacccacgagaaccaccatttttgcaccaatttcaagctttttatgtgcatttgtctcgattattcttgttttccattcatcccactcaagtaagtgacatcttcatctatttttaacttttccttgtggcatttggcgctttatttgttgtttctctgcaatatttgtgagaaaagttatatgttaacccatggtctgaatgctttattaattgctgcaatgatggctct

SEQ ID NO: 266731 - DNA, 410 bp, Glycine max
taggcaccgacattgattcatcatctaaaatttttcttcttgaagaacgaagaagaatcatgaatcaagaacatattaacacaatcaaacttctctccgaacccagaaacaataggtcctagtattttctggaactaatgaaaacatgaagggttttatgaagattttgtaactcttagtttttgttaatgatgagttgtaaataaaatttataaacactagttgattaggatgattgttattgctttaatatttgattgtgtgatatcatgcatagatgaatcctagactaggagtttaaatttagcatgttcaaaatgattgacattgcattcatttatggttgttagccttgaagaattgaaactctcgtaacttaatttttaaaatcactaagtttcaactttgca

SEQ ID NO: 266732 - DNA, 356 bp, Glycine max
  unsure (1)..(356): unsure at all n locations
cttctcctttgtcttccgctgcatttccatggtggaaaatcaccattaaaggacctcattgaagctcaaagatccagcctccatagaagccccacaagcaagcttccatcaagtggtaattagagcacaagagcttcaagtaggtgctccttaaacctccattaatttttttgctttaccttctcttccattggtgntccttcattgctctccatgtatctactcaaatgtcttgtgctaaatgttgttaacatgattctttagagcttccaccgattaaacttgctatagaagctagatttgattttctatggttcaaatntcttgctcttgttcttgaaccatgaaatgtgtct

SEQ ID NO: 266733 - DNA, 420 bp, Glycine max
agctttacagcagattttagtaatgacccattatcctataattaaaataacttaatgccattaacctagggaattaagacaaactaaatggctgagtgtaactgaaattgttggcaaccaaaagtcacccccaacagccaacaagtcagccaccatttggtctcccaaaaggctgatgcctaggttgccaattgggcccttattacaacttgaactaaagcccttttagttgattaacccaaaacatatttttggtcagccaactttacaaggattgggccattatttaaacaaactaaacactctaaaattgaaataaagtggtgtcaattagtcctccatttgggccatgatacaactaacaaccttggacttttctccttgaaaactgggcttgtatataaatagtatggacagcac

SEQ ID NO: 266734 - DNA, 418 bp, Glycine max
  unsure (1)..(418): unsure at all n locations
gctggagagtntgctttaaacaatacgaagctttattaagtttgaaaacatgataagggtagatagaactctcaaacctagggggttgttccatatagacttcttccttaataataccattaaggaacacactctttacgttgatttgatacaacatcataccatgatagacaacaaaggatagcaaaatatgtattgcctctaaatgagcaataggagaaaatgttttagtataatctatacctttctgttgtgagtaggctttggtgacaagcctagctttgctcctcaaaaccttacctattttgtccagcttgtttttgaacacccactttgctccaacaacagatntgcgtttggagagttctacaagcttccaaacatcattcttctgaaactaatcaactcttcttgcatt

SEQ ID NO: 266735 - DNA, 414 bp, Glycine max
ctatagaaactatgcttgactagctaccatacctcttaagaggaagaggcacctcttgagatgagaaactagagcttagctcacagcccttataatagctaagctcacccccatgaccaaagaacatgaggatgcgagaaaaaaagtccttattacaaagactacttaaaatgccccgaaaacaaggctaaaaccctatactactagaatgcgcaaaatacaaggcccagacgaaggaaatacctattctaatatttacaaagataagcgggctcatacttagcccatgggctcggaaactaccctaaggctcatgagaaccctaaggccttcccttggatctctagcccaatctactaggagtcttatacccgatggccttgcggagtaggattggataattccctccacctt

SEQ ID NO: 266736 - DNA, 448 bp, Glycine max
  unsure (1)..(448): unsure at all n locations
gcgatcctnttagtcacctgcggcatgcaagcttatccttatggctggcctccagatttcactccccgtgccgccccggaagatttaagccaagcccctacttttgaggggcaactcccgccttatgacgactatcccgggcaagacgatgaggaaggagatacccatcttggccccctgctccacctcaaagatccatccccacatgaactaccccagccgaacatagtccgccatatcccggcctcacccacacccgtaaaagaatctgttcccttcacggaagataaggaaaagattgaggcgcttgaagagaggttaagagcagtcgagggccttggcaattacccattctcagacttagcggatttatgtctcgggcccaatatcgtcattcctcccaagttcaaagtactggactttgataagtacaaagggacgacatgtc

SEQ ID NO: 266737 - DNA, 377 bp, Glycine max
  unsure (1)..(377): unsure at all n locations
tcagcttggtacaatgtgggtaacctattagaaaggaaaggcggttctagccgcgtggtcgtgctgaataaatgatggctcaacaccagtcaatggaggcccacagttttgacgggtacgggtcacctgtgaaaagagcacgcatttgaagcgtgagatgcatgtgcatatgggcacgtgtgggcacagatggtggtgcggntgcggcatttgggtcatcaaagacaggcatcgatagttgtaggtaggcatcgacgaaagggcgttgggaaggctgccaaacaagggcagaggcacaatgcagttctgttcactgtgataagggctcgtgcaactaaaagacatgtgtgagaacgcataggtggttcttcaaaatg

SEQ ID NO: 266738 - DNA, 415 bp, Glycine max
  unsure (1)..(415): unsure at all n locations
agctttactcattcattcattttatcttgacctcacctcacaccagggttgcacatcttaaaggcgaccaagatcaaaattattgtagataaggtgtgccttcgtctacccatttgtgatgatactaagaagaaggatttcaaaatgtactataatgaagaaatgccctcaaggcagatgaaagttgaagtagtgaactattcaaggaactagagttccttatttagtgggaaaaagcttgttcatgctctagaaacatatgatgccaaaacctttatgaaattagattgtatgggttgacaccttaaaagcttcatcatctaattatgtctagatacatatgcttgtgtgtgtttcaccaaggatgtagacaactactttgtcatcaaccacttngtaagttttcctaccattc

SEQ ID NO: 266739 - DNA, 372 bp, Glycine max
tggtgtcgcgataactcatctatggtatgcgcagatttcataataaaagagtctcacaatgattatcttatatttcaaaaggtattgatctcattaatgaagcagtttttaattttctattcaaatttacattgtaatgtgctaatacagggggatatgatacacatagttgtgaataaggaacactttattgctaggagtttaagttgaagcatggaagtacctatatgatgaacaatctcaaggtagttgctaatccgggccaatacaaagtttgtgatcatgcctacaagctacaatccattggttgtacctttatcatagagcagcctattctagatgtccccatggaagtatacaagttaacaaatt

SEQ ID NO: 266740 - DNA, 412 bp, Glycine max
  unsure (1)..(412): unsure at all n locations
agctnnttttgttcggtattgcctaataaatttgcaatgtagttcggctaggtttcttcgtgcgagctcaaccgaagttgtatttcggccggtcggctaggttttttcgtgcgagctcaaccaaagttgtgtttcggccgacaccggcatgttcttgtttactctgccaggaacacattaacccacctcggcaaaacaaccattatcctccgatactgattgagaaaaacaatagccgatgtcgtccaggaaagatgaccgatcgaggtctaaaaatcaaaagcatcacccgatgacgccgatcgaacatttcctaatagacaacaccaaaaaattatcaaggcattaattagaaaaaacaacacccgacctcggtcgttttatagcccccgcggatatatttcagcccaca

SEQ ID NO: 266741 - DNA, 435 bp, Glycine max
  unsure (1)..(435): unsure at all n locations
tcctcttaccggtgaaaaacattgtcggccagcgctngttaaataattgcgcaatgtcggctgaaaaacatcagttggggctgtttaactaccgatgctggctactgttttttctattccacccctgaataatacttggacgatgtcgatttggaaatgttcgatcggagtcatccggtcatgcttctttttaagacctcgatctgtcatcttttcctggccgacgtcggctagcatttttttcgatcaatatcggtgaatcatgctttttgccaaggtgggctaacgttttcgtggctcatgaaatgagagcatgccagtgtcggccgaaacacaatctcgcacgataaaccctagccgacctacattgtaatttttgtaggcaataccgaacagcaaaacttcgtctaccataaagatatattatcgaccagt

SEQ ID NO: 266742 - DNA, 419 bp, Glycine max
  unsure (1)..(419): unsure at all n locations
agctnngttcccctcatttctctgatattataaggtgggtcacacacaccaaacaaccaaatcacgtcgtttcatttaacaacaatcaatcttttccctctttctcttaattcccaatattcttcacattcacttctcttctgccatgtgaacaaacatcaaacatagcaagcacaaaacaaaatcgcagttccatccatagcactgcctcaattcttcccccaaaaaaatgagccagtgtgttcccagttgggatgtcgaagacaacccaccaccctcaagagtctcacttcgctccaactctaattcaactgcccctgatgttcccatgttagctctcttttcttcttcttttgtctctggatcatacgagaaattattttattattcgagactatagctagtgtgatcaattttta

SEQ ID NO: 266743 - DNA, 425 bp, Glycine max
  unsure (1)..(425): unsure at all n locations
cgagatgaggaagtgtanaagggtgtacttcctgcttttattcgttgaccacagagtggtacctggagatatgtcgcgggggtcaagagaccttggggacgtcaggtggggtgctattgcccaaaaccaagcttgaccaatcccgacccaacccgggcatagtcggtcagtgagaacctgtgatgtacctaaacaggcgagctcctggcagtcaacagataaaaggaacaaagaccacaaagcaaggaggcttgtggtggctggccagttgtgaatttttgtgtgatatatgggttgtggcctctggtaatcgattaccaagggtgggtaatcgattacaaggcttaaaaatgaagataggaggctaagatggtctctggtaatcgattaccacggggtgtaatcgattaccacggcttgaaacg

SEQ ID NO: 266744 - DNA, 320 bp, Glycine max
atgaattttttttttaacacaatggttttatagtaagtactgcgcaaagtttttgttcgccttgttgacacattcattgcctgatgagcttttataagctgatacggactacctaattggaaggaaaatttaataggtgagacccgataaagagaaaaaggttggaaaaattacttctgctaaatatctggatacaaactctccaaatataatacttttttaattttatattagtgaaacaaacatatgttacttatagagaatatccttttcactatttttcagcatccgccccaacttctcttttattataactcacc

SEQ ID NO: 266745 - DNA, 377 bp, Glycine max
  unsure (1)..(377): unsure at all n locations
ggaccttagcaccgcggctgcagcttatgctaggtatgatggcatatttattactggtggcangacaacaagggagcttgtaacaaatcttctatacttggagtcatcacatgcagtcctcttgaacccttaccacccaccctgttatcatgccaagacttaggaaggccaataggtttagccttctcaatgtatgttaaacaaaattcaatgccttcttctacaatgtacctttcaacaatagatgcttctggacgatataaattttttgtatacccttttaagatcttcatgtatcgctcaaccgggtacattcattaaaagctttttctattcctctgtaaggaagagagggtgctaaaatacagcgatgccta

SEQ ID NO: 266746 - DNA, 413 bp, Glycine max
agcttcttgattgcctaagtgtgtatcctctatggctatcctccattctccacttttttcggagccccatgaatgtcattgcctagcactgtccatgtgtcctccaccttcgagtctggagccccgccaatgtcatcgcctaacactgttcgccaattctccattccccactttcattcggagccccatgaatgtcattgcctagcgctgttcatgtgtcctccaccttcaagtttggagctatgcttcatgattgcctaagtgtggaccctcaagtgcaatcctccattctccacttttttccgaaccccatgaaagtcattgcctagcgctatttatgtgtcctccaccttccaggcgggagccccaccaaagtcattggctaacactgttcgccaatatttcattctcca

SEQ ID NO: 266747 - DNA, 402 bp, Glycine max
  unsure (1)..(402): unsure at all n locations
agcttatccttatggcctgcctccggactttacccnccgtgccaccccggaggagttaagccaagcccctacttttgaggggcaactcccaccttatgaagactatcccgggcaagacgatggggaaggagatacccatcttggccccctgctccacctcaaagatccgtccccgcatgaactaccccaaccgaacatagtccgtcataccccggcctcacccacactcgtaaaagaatctgttccctttgcggaagataagggaaagattgaggcgcttgaagagaggttgagagcagtcgagggcctcggcaattacccattctcggatttagcggatttatgtctcgtgcccaacatcgtcatccctcccaagttcaaagtaccggactttgataagta

SEQ ID NO: 266748 - DNA, 413 bp, Glycine max
  unsure (1)..(413): unsure at all n locations
agcttgcataacaagtttctatttctatttttatacaaaataatgtaactaactaaataaattctactaatatatatagcgactactcggaaggaagggatgggccttgattatgcccatctaatctacctaattaaaagcaaaacccaatttgaccataaaaatggaaaaattggctatgacaaatttgaagctctttttcttagctttctagggactactcacatgctccatttggatntttgtagtgttctataggccctgcacaatacagataggttaagtaagcacaaaatccaaaaataagcaacaattatcaattaagctcaatcattttcctaagaccaaaactgagttaaggtgagaaaataaaagtcaaagagaggtctaataaactaagaagaattataaat

SEQ ID NO: 266749 - DNA, 427 bp, Glycine max
  unsure (1)..(427): unsure at all n locations
agctctgaattcattctatgcacccttatgtgtccatcctttgcttggcaagtcttcatcgtcattcttgtaccatcgatgatctttttctttgtttaagcgagctcgactgatcgtttaagcgcgtattctcacttaatcaatgttaaaatgaatttcaaccaatcgtttttgttgaatctcattaatcgttggtaaaaaaaattcaaccgaaccgttgtgttgtatcctcggttaatcatccaaaaaataagttccaactggtcatgtactttgaaaagtctcttttaatgagttttgaaacaaccgagtgaaaccaaagctataatcaactcacaatcaagctttcgtccacaaaaaatcccttgntccattcaaaggccaatgcttaaacgacttttttcttttatccggtaaatgacccttt

SEQ ID NO: 266750 - DNA, 402 bp, Glycine max
  unsure (1)..(402): unsure at all n locations
agcttanagagattcccgatctgagagggtactgttcctttgtctacaacataactcaagtcaagagacaccaaatgtgagagattcccaatctgaggaggaatcttccccctgaatccagtatgagagaggttgagatgagtcacggaagtcattgtcccacggaaagaaggaattgacataccttctccaaggaattcattgccgctcaagtccaagtaattcaaatgctttaaatcagccaaacaaggacttatctctccaccatagctccttctcctataagcttcctcattcaatccacggaagacttcatcatagtagtcatactcgtagccatcatcatactcnaaagcatgaactgtattgttgaggtgaatctgaacaatatgggaagtgacg

SEQ ID NO: 266751 - DNA, 349 bp, Glycine max
tttccattgtggattcaggcacaaaacatacttggatatggtggactatctaacaccgggaattttcattctatttccacacagatgtgggaagcactttctcaggttttgtatttacacctttctcgtaatcatatccatggtgagaatgggactacattatagaaatccaatatctatccccactattgatctaagctcaaatcacttgtgtggtgaaataccctatctctcaagtaatgtgcttcaattggatctttcaagcaattcattctccgaattcatgaatgactttttatgtaacgatcatgacgagccaatgcaattagaatctctgaatcttgcatca

SEQ ID NO: 266752 - DNA, 435 bp, Glycine max
  unsure (1)..(435): unsure at all n locations
aaatttggcatgactgcttaaagggtgctgtttgggtctcctcaagaattggccaacagtctaaaagatgtggagccgatgaatggctggagctcatagtctttaatgcttcacaactggtggaagaagggggtctggacttttacatttccattttctttggcccaaataaattccaatttgaaatagcggaaaatcaaattgagaatggatgttgcttccttgccgtgtatggagttgtgtctcatgaatacagaattataatacctaaagtatttnttttcttttgtcgntaatatattaaattaagggggcatcatgtaaaacaaaagttttaagttggtggaaatctatgtaaaaaacttatgttgatgtatattgttaaaactacattaatgctaatggtatttntagaaatatttaataagtttctga

SEQ ID NO: 266753 - DNA, 432 bp, Glycine max
gcactgcagctgcagctttgccttctcttcagagagtccttggtatcctttccaccacattcctggtttgctttacttgggctaactcttgggccaagaacttcactacttttgctactctcgccatgggaaggtagaattcagaaaaaagatatggcttccttcctcctagcagtgatgccaagaacccttcaaactcttctatggttagtaccaattgaaagttcccaaacgtgaagcatctaagccactattcctattattgagcgagggatgcgatggctttaacaaacacttctattatggtcaaatcccagattttcccatacgccttgcgaaaggcttgacgtcaacttgatcctttcgctgccttagttcttgcaacctggctaattctaggttcttgacttgacatgacaaaccttttttaaa

SEQ ID NO: 266754 - DNA, 148 bp, Glycine max
  unsure (1)..(148): unsure at all n locations
aaatcttgcttcatttgtccctacttggcaccaccaccaccaatgagatttatgaaaaattatgaaaatcctttcatcgaaaantctcaaaatccttctccggttttttcctactttggcccaccaccaccaatgaattttataccaa

SEQ ID NO: 266755 - DNA, 385 bp, Glycine max
agcttattatatttgtgcacgccacggtgtattgtatattaaactacgcacgaaagctacctatataaaggtgtaatgaaagtccaccatatacttaaagttggcataaaatgtgcttattcagccacctgtattttgatttgtagcagaaatgaatcggttaagaaacagaacttaatcaaaattattttgatcagcacctgtttattagttttgctgttgagtggaccattcatattgatatttgcttttcggaatgatgattgatgcaggtgtacattcagttatttctttgattcttgctttcattttggacccgggtgctcatcatcacaggtccaaatgcttgtaccaatgaatacttttataccgtgtcactgcatta

SEQ ID NO: 266756 - DNA, 258 bp, Glycine max
aaatttcatgaagcaaaaaaaagaaagacggaaattcccaatcaagaggggagaagctaaaaaaagaaaggaaatttccacatcaatgaatgggagaaagttaaaaggaaagataaagaaggaaagaaagctcctgatcagggatcgaaggacaaacagaagaaatgtgcagaaaggtctttggaccggacaatatctgaacaatacagaattgtcaccaaatgaacaaaaaagaaggaaaggaaaaccacgacctaa

SEQ ID NO: 266757 - DNA, 362 bp, Glycine max
  unsure (1)..(362): unsure at all n locations
ctgaaaagagtatgatgaactagggatgtcaatatgggcactgatgaagccttgtgaatgagaaaccaaaaagggcccgaaggaagaacacgaccaaagcaaagttttgaggtgctttatatggcagcaatagtgagctcatgctccgaagaggtgataggaatcatcacgggtcataggcatgatcttgaaggacgagctaaaggcttgccttangtcgaaaagaaatttgtcccaacagttaagcgagactgaagggactatgtgggccgtcatcgatgagtgcaaagagaagcttaatctagcggcgactcatgagcanaggctagaggatgagtacgccaagatatcagcagaaagcg

SEQ ID NO: 266758 - DNA, 280 bp, Glycine max
cccaaagcctaaaagaatgggagaaccatgataggttccaactccagaaatctgtgaaaactccaactgagtaaaaagacaggcaaaccaaacaagtattcatgtgtttcccatgactcaaacataatgagagtcccacacattctaatcaacattcaatttaatgttaattatccttatggccaaaattctaattctgtaattatttcatatacttgcacacactttggaaaaacaagagtaagaaactaacatctttactgaaaccagatcatgaaca

SEQ ID NO: 266759 - DNA, 449 bp, Glycine max
  unsure (1)..(449): unsure at all n locations
acttcaaactcacgccggaaaataatttcatttaatattcaaaaatatgttttaatttgtttaacaatatttcgctttgcaaactgttttttacccgtaaaaattaaatatgatatcaaaaaatttataatattcatacatcttattcaaatactggctattttgcaaaatctaacaatacttttagtttacaaaaaaccattactttaaagtgtataaatgagtattagtatgttaatgttaattacaatatataaaaggctagatagaatcaattaaaccgttagttgcagtgataatggctattcatcatattcaactgcatggaaatatccggacgatcgatgaagagtatatatatgcttggccgcatttaatnttatttctaatagatattagaagcgaagaacgaaagattactatagacaaacaacaagctttgaaataaa

SEQ ID NO: 266760 - DNA, 435 bp, Glycine max
ttgtggttgcattgttgttcttggctgatacggtggtgggtaatgtgaatggctgggataggctgagtcatgacattgttgagctggtgggatatgtggccatgtaagaacgacagtcacaacatgggttcctccctcattctcattctctccatttgccctaagcttcctattcatcatagcaggatgatcaaatttgcctcttttcagacccacttcaatcctttcgtcggcaaaaactaaattgacaaagcttgaaggtgtgtaacccaccatcttctcacagtagaacaacggtaacgtgtccactatcattgtcatcatctccttctccgtcattggaggcactaattgagctgctgagtctctccacctctgggcgtattctataaataactcatgctccttcttgcacaagttctgtagctgcattct

SEQ ID NO: 266761 - DNA, 367 bp, Glycine max
  unsure (1)..(367): unsure at all n locations
agctntaattacaagaacttgaggagattttcttaaaatcctatgataaacctaagaggcacaaggagaaagtgaagaggtctcatgactctaggatccttaggaaggagttccatattagccaaaaagcgctcttgctgaattcttacctcaagcttatttttggtaaacttcgatctagatgggacagcgctcttgttattactacattcctttgcccaggcgcagttgaaattaaaaatgaagctaccaacaaggtcctcaaagagaacggtcgccaactcaagctttttcatgagagcccccaagggaggaggaattgttgcaaacctccctttgatctgccaatttatgtgaagatggccct

SEQ ID NO: 266762 - DNA, 366 bp, Glycine max
  unsure (1)..(366): unsure at all n locations
acactatangaaactcaagcgtacccgagccaagtgcaattcgatgttagcactgtcgatttaagcgagtctcgctcgctaagctccgcgagcttagtgaaaattttgaactgaatgatgccgctaaagcgcagcctttgatgagcttagcgcctatccttgcagtagatgttcagtctagtgggcacttcccagctaagccaattatttaaaagcttaatttctgcaacttatcgctaagccggttcatgtgtcgctaagcggaggtaatttttgttgtgaaggacagctaagcggaccatgtctcgctaaaccgccagtgcctttttcagtatttgaatttgaataactagagttctgattacc

SEQ ID NO: 266763 - DNA, 399 bp, Glycine max
agcttcaacggggagaaatttaatatcttgtttgagatagcccttagtgaaacaatgaggttaagtgaacgaatctcaagcgcacatttgattcgacggagctcctttcttctattggagaatcttgaattactttggatgggagaggatctaaatccaataagaagtgactctaaaaaggttagcaaaacaatcaaatatttgctggggctagcagcttagggtatttgatagaaagtgaggctcgatttggttgcacaactaattattgcatctaaaagtaaccgttgtgttgtgacttttttttttaaaaaaaacctttggttagaacattaccacaaaattcctatttgttttttaagaaagaaaaaaacaggccattatttatttgggtctcac

SEQ ID NO: 266764 - DNA, 416 bp, Glycine max
  unsure (1)..(416): unsure at all n locations
tgtncatgacactatcacacatatttctctttgtgcatatcatcaatacagggtccgacatctactttggaatagtgtggaagatcaaacaataacgacatcttctttcatatgcaagttttactttgtccttcttttgagtcattccaaatatagtattgatgtccttaacccgctcaagaacttgctaaccaggtaacagtattggcacactttcatgcttttgacttccattaaaagcttttttcaatcactagtaagggtgataaggtttcagaaaatgtcgatgtcgggtgtatactatatttcttccagatttgaggtgcacgtaacttatgttttcttcacaaatagggcatccacaatggcccttaacactgtatccactcaaattcctatatgcttgaaaagtatta

SEQ ID NO: 266765 - DNA, 301 bp, Glycine max
  unsure (1)..(301): unsure at all n locations
acccggatcttaatcaccgcagcagcttctttcttattattaaacnccaatatatgatttgtgaagatgaagaaggaaaggaaggaactttgggtccaaagaggaagctttcctcaactcctctagtactttacattacaagggcattatccatacttaaaatcaacccaaagttagatctaaacaccaaaactaagcctttttcataaaaccctcccatgggtgtcctatgggacaatggaaatttaagatgagaagggaaggaggagagtttcttaccattgaactagcctcaaaactc

SEQ ID NO: 266766 - DNA, 454 bp, Glycine max
ggagccttgaatcttgtttcttgaaatcttctttcctcttgaatcatgaagtggtcctgattctatcttgaacatcttgaactcattctttcttgattctatcttgaacatcttgaactcattctttgattggcctttgagcttttcgtcatcacctttgttatcatcaaaacatctttgaatcaatcttgattcatcatgaagctttgcttatacacataggaggaagaattttatcattcataataatcttatccgatttaaataaaattatgtataagaaaatatacttgtgatgtagaattaaaaaaatcaaatttgagcaatatttatttttcttgatcaaaagtcaaaactattcatttcttgacgattccattgaggttgtaatgagtagaaaggcaataggcagaagatgccattcaatcaatatagtaaggatatctattgggtt

SEQ ID NO: 266767 - DNA, 455 bp, Glycine max
  unsure (1)..(455): unsure at all n locations
tgccacagagaatagttctgtccttcctcagggagatgtaatcttgataagctttagagggtcattcctcataatgtgtgtaatgttataaaagtagcggtgcctcttgacatatctcgaccgaatgatgtttcagcttaaagacacacaaatgatggcaactttatgattaaatcctcttacanagcaattgtggctcaaaaagatgataatggcctttattacgcactatatgaaagtagcgatggcctgaaagaatgagagaattcattcatggaaagttgatagacaagcaatgctcaccaatgaatcaagatatagaaagggtctaacatatttgaacttgtgtcctctttgtcaggagtcgcaagaatctatcactaatgtccttcgngatngcattttttcccaacatgtgtagagcatacttcgaatgaattgacaacatctcaatc

SEQ ID NO: 266768 - DNA, 385 bp, Glycine max
  unsure (1)..(385): unsure at all n locations
agcttatactttcaactgttcttcaaatttgtattgtgttcactcattnacattcttttaaataggcactggataaaaggcaacttggagatgaagttagaaagaaagacggaaagcttgactccacaagtttgtccttgaaccttattgaaaatataaatatatagtaaatctaactttgaacttattgctaatgtggaagttgatgttgcacctcgtgagaatggtgagaattggagtatgggtcacaggcagttggtgtgccttggtagggtgctgcttaacaaaagcaagattctggtccttgatgaagccaccggatcagttgacacacctactgataagttgattcatcaaactcttaggcaacatttttctgcctcta

SEQ ID NO: 266769 - DNA, 467 bp, Glycine max
  unsure (1)..(467): unsure at all n locations
agtttatatgacttgaaacaagcaccgaggctttggtacaagatgtttaacgagtttatgagcaactcacgattcaaaagatgtgacatggaccattgctgctatgttaagaaatatactaatagttatgttatccttgtcgtgaatgttgatgacatgttgactgtaggatctagtatgacagaaattaacaagttgaagcagcagctggcagaaaactttgaaatgaaggatcttggtccagctaaacaaatccttggtatgagaattcttagaaacagatcagaaggaatcttgaagctatctcaggataaatatatacacaaattgcttgacaggttntaccttagagattctaagaccaagaatacccctttgggatctcattngaagtttcaaagaagcaatctttgcagacagatgaagaataatgttcatgtcaagagtccatatgcataacagttgga

SEQ ID NO: 266770 - DNA, 440 bp, Glycine max
taacacatgaatctaccataaaaatattttctccccatactgtccaaacagacaattcaagattcaatacaatgattaatgcatgtgtccgcaacaatcattatattcaattttaaacgagaatctaaggctcactcatgatgaacataatttgtatagcatatatcatttctcattaatggcagcgaacatgtaataaaaacattggtaacaaacataaaaagttttcaaaaaaacatttgtacctgtgatgatgagcagcatgttcaattaacatatctacaatccaataaacaactgaaggaccacctacatcaatcatcattcccaataacattagatatatattttgcccaccaacatcaatcaccacccgagtgcttaaacacgtacatacataagttgataacaaacttaccacaattaagcaagaagtatgt

SEQ ID NO: 266771 - DNA, 268 bp, Glycine max
attggatgagagaaattggaaccgctcattctaatcttacactgcaatcccatgatagatgacacaattgaacgagctaattgatgcgaaaagatacaacgtttatataagcataaatcacttacatgtatggagatttcttagctatggaattacttagaatgcttaatatttctctcccagtatattgaagtggattttatatgatacaccagtttgaacaatcacgcttgagaatggtcataactatttgttttatcattagact

SEQ ID NO: 266772 - DNA, 404 bp, Glycine max
cactcagctttacaaagttttacttttgtatcgataccatttactgtaatcgattaccatttacaaagattggtttcaaaagctttcaaactggatttacaacctttcaattaattttaaataatgtaatccattacaagaatttgggtatcgaataccactgtgtttgaacgtgaaattcacactcattgggacgaagcacattctttcacaaaaatgctctgtgtaatcaattgaatgattggatatcgattacagtgaaaactttgaataaaatcaaaagatgtactcttcaatggtttcaagttttctaaagtataactctctaatggtttctgacagacatgaaatctataaagcagaccttactgctttaaaacaatatacaatcttacaactttgat

SEQ ID NO: 266773 - DNA, 306 bp, Glycine max
aatgcgtacaagatagaattgcccggtgagtataacgtgagtactacatttaatgtgtctgacctaactctttttgatgtagatggagaacccgatttgaggacaaatccttttgaatatggagagagtgataaagacaaggcaaggaataagggcaagaaacctttagaaggacttggaagacctatggcaagggctagaacaaagaaggccaaggaagctcttaacaaggggtaaccatgctatctgaatttaagcccaagctaaaagtggagaaactctggaatgttaattgcaccatgttcc

SEQ ID NO: 266774 - DNA, 378 bp, Glycine max
ctatgtacccgtagtggtccacattgtgtttcgcgccttttgattcctcgattggtgactctttataccccctgttgacgggctttaaccattttacttaaggcggttctcgcttaacttaaaaataaaagaaaatttccaccgaacggttgaattgtattattccataaccttggctaaaataaatatcgacccgtcggtcatgccgtaacccgttgggaatctaaaagaggtaaacaatattttattatccgaacatttctttttagtaaattaagcggaaaatcaatcgacggtgtctctttggaattctcattctaaccaattgttaatacttcgtggactaaggtaaatcactcgctagtcactcgtcataaa

SEQ ID NO: 266775 - DNA, 380 bp, Glycine max
gttgggaaacggtttctaacccggaatgggtttgggcaaaaacaacatcggcatacctagcctgattaatgccaaaggaaatcgggggaagtatggtttaggctataaacccactcaggcggatttgaagagaagcattcggggaaagaaaaacagtggccaaagctcgcagttgagacaaaaaagtgaaggaagccccccctgcccacataatagaagctttataagcccgggactgggagacaaaagtcaagtggtcgccatatgcgaagatgatgttccgagtcattggattgggcaaccatgcctcctgatttcagctggaaattggcgagtgaggaacgccctcgcattactcaacgagcataatgaaaccttta

SEQ ID NO: 266776 - DNA, 302 bp, Glycine max
cattacttgtttccctaagctctctgtacttttttcacgccggataccatgccttgcgaactccttggagtaccctcgcggtgtggtcgctgaaacctcgtgcgatgaaaggcgtgatgctttcgtctgatggcactcctctcatgggacatcctttgcatgaagatagaatcctgagtcttcctttcttctaacgagggaaccatttaacagacgcccctccatgctagccaagagttggtgcacaacaaacaattcttgcgccgctcttttcacatcccggtcgaacgtgtcatacatgg

SEQ ID NO: 266777 - DNA, 406 bp, Glycine max
  unsure (1)..(406): unsure at all n locations
agctagattcgcgagaagtttttatcctttatttcacttagntatatctcaactcattagagaggactgtcaaatagaatgtccggctgacacttatcttattattttttttctttaaccgaagttacggcttgaacgatcggttgaattttattttaaaggcgattaaacgagattacaacacanactatcggttgaaattcatttaaacattaattcagtgaggttatgacttaaatgatcggtcgaaactcgctcaaaatgaagaaaaagaattccgaatgtagaagaatgaagatgaaagcttaccagctagaatggacccctaagggcgtatataatgaattctaagcttcaaattcaaaaactaaccggttgaagatcaaccaatgatgaagaaccgacg

SEQ ID NO: 266778 - DNA, 333 bp, Glycine max
caaggtctcggaacgaggaatggaccaacagaggggagtgattgttaagttctggtttatctttgttgggttcatcccccaggcttaagtgaaaatcatttcatgcctttcatttgaattgcttgatgatcaagaaagttaaaaaggtcctttgtttgagaagataagggttagcttttactacactactattgaaaataaggctggtgttcttgtacttgctaatcgctttcagggaagcgacattcactaatggccggcatgatttaactaataacttaacgtctcatttgaatttggaaagaaaaagcacgtgatttttatgtgaaattc

SEQ ID NO: 266779 - DNA, 385 bp, Glycine max
  unsure (1)..(385): unsure at all n locations
cttctttgaaagtcatataactcaaccgcacggaacctatcatttgaactggcaaaccaacccgcattgcacctgggctaatgtacgaaaaaagacccgcgtcttgagaggattcacccggcggtttgtatacacttcgacaactagttgaatggacccgaacggaagcatcgtttacctgcatttccaacttaacatccatcccttcttggaaataacaaccnctgaaaatatattaaaaaaactatattcctttttcctggcctaaaatcacagattaatggcacatactgtttaagagtgatgccaccaatactatagttaggcatcactcgaatactattagntaagaaagcacactgttatgttcaatgccatgatttgg

SEQ ID NO: 266780 - DNA, 376 bp, Glycine max
  unsure (1)..(376): unsure at all n locations
agcttatgcactctactttaccctgatgtcaaaatggaaagaatggtatgcttaacctttgtntatgagttgcttatgtagctgaatttttttttcttcttttataaacatccggcttcttaaggaaatctgaatgttgtctcgacatcccaaaagatctgcctagggatactacccctccttataaagacgaggaaagccaagataatgagaaagctgacactaacaaacatataatagacaccatgaacataggagattttcctacgatccatctgggcattatcattccaagaaactacggcacanactttggattttcacctttcttagctatcgctttatttggctatgacattgggagctttttctccaa

SEQ ID NO: 266781 - DNA, 456 bp, Glycine max
  unsure (1)..(456): unsure at all n locations
ntataacgtatttgagagcttaagttttttaaggctatatctttgccacctttctaagagattcctgtaacatataaaggtctatcataaatcatttctcttggtctcttgatcctgtcctgaatcaacattgaatagcttcaatctttttggcatcatcacaaccttcatcagcatatgcacttacaaatcccctttttcgatgatgacaaccatcagaaaacaagataaaggatatacgatttgcaatgcgtgcactcacccttactcccccttaaatttgcaatttattgccttagtttagataagatctacccttagtttctttcccccattggcaacatcaaaagtccaaaacgaccagagaaaatatctaagccacaaaatatctagagcaagtatcacaaacaataacatagactaattatccattgcanaacaaagactaaatattca

SEQ ID NO: 266782 - DNA, 392 bp, Glycine max
  unsure (1)..(392): unsure at all n locations
agcttgtatgagtactggtaaagattctttatattatgtgcaagctgccctcaccaccagatttttaagcaactccttttgcaatattnctatgagggacttagcaacatggagaggagtatgattgatgttgccagcggcggagtccttggtgatatgactcctactgaggctaggaatttgattgagaagatggcttccaactcccaacaattcagtgcaagaaatgatgttattattcttagaggagtccatgaggtggccacggattcatctttatctactaaaaataaaaatcttgaaggaaaacttgatgccttggtcaacctagtaactcatcttgccatgaatcaaaaactacacctgttgcaagaagctgtggtctatttttt

SEQ ID NO: 266783 - DNA, 448 bp, Glycine max
  unsure (1)..(448): unsure at all n locations
ttcgccaccaccactagcggaataatttgcttgaatgtttatcgtggagaaaatcttgaaggagtgtgtggattctgcacacacaatggttaaatggagttggtcgctcccaccttcaaaagaaataatggctatgcctgcaacttctgaaaggctacatgcttcaaccaaacaatggctgcaagcttctgaaaagggtacaatggttggggctggctaagcatgcacatgaaaatgggaggtgtttcaccattgaggatggcgacattcatgtgnttcgccaatggtgatggtgaaacctatggtggactcgctggcaggaatgatgacatgcatggacatgtgtttcaccgatggtgatgacaaaattatggtgtttcgcagtgtaaatggcgatcacatgacattacgtgacctgctcactgactggagcatacaatgtatacat

SEQ ID NO: 266784 - DNA, 432 bp, Glycine max
agctttcatcaagaagtactgcgcccccttcaggcgcagggtgaaacaccacaacagcctggggatggttggcaacgggcaacaaatgcaccgccggcacctccagagcccctcagctcatccacaaaaaggttagagtattggctatgacacatggccgaccaataggcgaccaagtccaaagccaaaggtaagcaaagtactaggtccgtgaccgacaaatcatcaggcgtccagctcaagacgttaaagaagcgctactaggaggcaacctagtaccttttgaatctatgcttgttatttgatcactttttgtagtaggacacgcctagttgctcatgatcctaggaatttaaataaaacaagcacaaagcttggaaggtagtcatacctcacaaaatatatatatttatgtttaggtagtgaaaatac

SEQ ID NO: 266785 - DNA, 476 bp, Glycine max
tactcacgcttatgtgtatcccatttattgaaggatcttgatgttgggatctcttatcctatggagatacattgtaacaaacaaacaggctaaaaatctcgtattccattcaagacctaagcacatgaagtggatcaccatttgcatatactagtataatttgttcaaattggacgataggttaaaataatgagatgttttattatcaaaagaaggaaccttgacgcagaggaagaattgattctgtctctggaactcggccaggacggcgacgaggtcggacttgagcaagcgggagacgctggaccggatgaagcggtctagccggaccgggtccgaccggaacctcttcagctctttggccaccaccagcccttccttccccatctccttcttccgccgccatatcgaaaggcttgggctcgacgccccactcgaagcccaccgggcccagttacgggtgcccgctcgaccac

SEQ ID NO: 266786 - DNA, 266 bp, Glycine max
ctaagaaaaatgctcccacgcacactcaaggcgcttcctcacccacataatttgtttgtactttcaaggtgtactacctaccccacatagcattcctttggtaaaattacaatcatgcatgctcaaagcctctttgctaccaaaaattgcacacatgcaaaccttatgatgaatctttggtatctacacaataaagtgctacatttcatgctttatttcaagtgttttactacctatagccgctgcaaattcaaatttattttctt

SEQ ID NO: 266787 - DNA, 402 bp, Glycine max
gagaagcgttctcaagaggcttctgtgagaagctagatccttatctatccacacccctcttttaacttaattaacctccttaaaaataattaccgatgaaaataacgtaacaaataatcaaacatcagacataattactaataatatatagatatatatatcagggtgttacaactctctcacccttttagaaattttgtcctcgaaatttaccttactcaaacaaggaagggtgagcttctcgcatctaactttctaattcccacgtggcatcttctcctgatgcacctccccaaatcaccttgaccaacggaatctctttccctcttaggtgttttgttcgcctatcctcgatcctcaaaggcaatggttcatatgtcaaattcttcttgacttgtacat

SEQ ID NO: 266788 - DNA, 319 bp, Glycine max
  unsure (1)..(319): unsure at all n locations
cttctctgaatctcttcttaccccttatttctggaggtgctggcctccaactcatgattatcagctcagatcctaacagctgctcttgtacgtagagggtgcagaaatgttcgtcatttcaccttgagctgctaaatgaatcataattagcagcggttgctcacaagaatgaagctcattcatttgaaattgatccttctcacgtaatgtatgtgcgagcttctggagaacattacagtaattcttactctcttactctagatctgtgcgtgttatatnttatgctaagaagcacacatacttgttaatagtacccttt

SEQ ID NO: 266789 - DNA, 371 bp, Glycine max
gatccttatagacacctgaagctgcaactagttagcttatatcctaaatttattgtagactgaacgaaccattcatgctctagaggatctacttcgggcgtgtattatagagcaacaaggtagctggatggattgtctgccattgattgagtttacttacaacaatagctaccaagccagtattggtatggctccttttgaagctttatatggacgaaagtgcaaaactcctatttgttggtacgatgatggaaaagcagttcttcttggacctgaaatgctacaacagattaatgaacaagtgaagttgattcgagagaagataaaagcatctcaggataggcagaagagctattatgatagaaggagga

SEQ ID NO: 266790 - DNA, 459 bp, Glycine max
  unsure (1)..(459): unsure at all n locations
aagcatggaagagtcagtcttcctactcttgtttgntgaccacagagaggttcctggagatatgtcgcgggggtcaagagaccttggggacgtcagttgggtgctattgcccaaaaccaagcttgaccaattccgacccaacctgggcataatcagtcagtgagaacctgtgacgtacctaagtaggcgaagctcttgcagtcaaccaataaaagaacaaagtccacgaagcaaggaggcttgtgtggcggctggccagctatgtatcttgggtggtatctgaaatttagcctctggtaatcgattaccattcgtgggtaaacgattacaaggcttaaaatggagacaggatgttagaatggcctctggtaatcgattaccaatgggtgtaatcgactacacagagtgacaaggcactggtaatcgataccagctgggtgtaatcgattacacggagat

SEQ ID NO: 266791 - DNA, 247 bp, Glycine max
gtcggacatttataatacacccatttcacctggtgatgattgtccacaaaaagctacggcatacgccttcgagatgtcattcggagctggtagctatgctagataacttcttaaaagcatgggttggaggaggtatttcttactttcttatcatcaattacccctttttattttattgaaaatcttacgaatgctatatatttcaactcccatcaccacttttcaaatgctcacgcttatgcacact

SEQ ID NO: 266792 - DNA, 344 bp, Glycine max
acccaagcgaccgagctgcagctataaattttcactcgaccattataatctataagagggaagaagctcaaggaaagagaagggagtggacgagaaaaaatagcaactgagattgaatcaaagaggtagtgatcatcctccggtcgcgacacttgattaatagctgacatatatcagaggtgcatgttgctgtgcttgaaccaacaggatatcagggagcagaaaaagaccctaaatggagggatgttaagtagaaagagcttgccatgactgaaaaaaataactacggaatagttgaaagacctcagaccaaaaggtgattggagtaaagggggtgttaaaaa

SEQ ID NO: 266793 - DNA, 318 bp, Glycine max
aaatttttttctttgttctgactgtctttaagggagcggtagactcggaagagtaattgaaatctgaactgagttatatctattaaagcgtgctaattttttaatctttatttgaatttattttagaaataaggttcacggcttcttattctatttcgttattagatgggaaaaaattaactgaaggtttattcagcaatattggatggcactacttaattttcaaaatacggtactgatttcttatctaagtattatttatgatggaatttaaagtgaaccactggcataggtggtgcaccatgcaccacaatttat

SEQ ID NO: 266794 - DNA, 156 bp, Glycine max
cgcaaaaaaaccaccggggaaggcccaacccaaaaacccacaactcaaccaagaagagcccacgcgaagcagaacaagaacggaacccccaaccggaaaaccccaagcacagcaaagaaaacccagccaacaaagcgcacaaaaaccggaccacca

SEQ ID NO: 266795 - DNA, 348 bp, Glycine max
  unsure (1)..(348): unsure at all n locations
agtggattgaaagaagtatcacaatatctttgggatataacagcgactcaggcgtactcttgaacaacanattatatataaatgatctaccgctaatcatgctaagacattgtgagtgcatttatagaacaataaatggatgaccatttcacttgcagtgatcatcaaatactatagtgtatctatattagactaactcacaccaagggttagaatactttgtagaatctacaaactattgtcatgccggaagagaactttccatttgaaataccagaatttgttgactcatcatatgaaaccttttgcaaaaacattccgaggatacatttatatagacctcaaagc

SEQ ID NO: 266796 - DNA, 386 bp, Glycine max
  unsure (1)..(386): unsure at all n locations
gcacctgcggcatgcaagcttcttaagttcagattatgcagattgttttgtaactacctcatgcactcctttaatgactatggcatcanttctggcgctaaactgttgggagttggaagccatctcttcaattaaatttttggcttcagcaggagtcatgtctccaagggctccaccactggcagcatctatcatacttctctccatattgttgagcccttcataaaaatattggagaagaagctgctcctaaatctgatggtgagggcaactggcacatagtttcttaaatcgctcccagtactcatacaggctctctccactgagttgtctaatacatgagatatctttcctgatggctatggtcctggaagcagggaaaaaat

SEQ ID NO: 266797 - DNA, 463 bp, Glycine max
  unsure (1)..(463): unsure at all n locations
aactaacctaagctgcaacattacaatagacctctaacctattttcttaattaccacagcagaacaattatgacctttccagcaacagatacaaccctggatggaggaatcaccctaaccttagatggtccagccctcagcaacaacaacaacaggctgctccttccttccaaaatgttgctggcccaagcagaccatacatttcttcaccaatccaacaacagcaacaaacccagaaacagccaacagttgaggcccctccacaaccttccctcgaagaacttgtgaggcaaatgactatgcagaacatgcagtttcagcaagagaccagagcctncattcagagcttaaccaatcagatggacaattggctacccaattgaatcaacaacagtcccagaattctgacaagctgtcttctcaagctgtccaaaatcccaaaaatgtcagtgccatttcattg

SEQ ID NO: 266798 - DNA, 373 bp, Glycine max
accttaagtcacctgaagcatgcaagcttctccccaaattttctttttattcagagcgctgagtgcgggaacgcggggataaacagaaaatatcaaatcaaaaacactgatggagtggaacatagtgtatacgtgtatatacatatatatataggtagatgaatatagatatatatatggctatacatggctctggcacgaaatcataagtctcaaagagtctttttatctgtataaaatgatcaatgggtgattgatcattgagaatttagagtacctccattaagaggaggcgctacattattaatgcatgcttttgatagatttgctgaaagctcgcattaatgtcggtcatatccctcaaactccccac

SEQ ID NO: 266799 - DNA, 460 bp, Glycine max
ttagaaactaagcttgccagccattaatcacactttgttcttgagttttagcaatgccagcctattcacattattgattattcatttattccgccctttattctttttcaaaaatgaacaaatttaaggaatatgcacacacacacacacacctaattctatttaattccatcaatattggtagcaacaaccactcctactcctcttccaatcttcatagcaacctcataagtcataaccttacgcatcgcaatctctttagacaccaaaaaggcttataatctttcttgatataaactatgatataacaataacaataaaattacattatttgcattaatgaacaaacttaactaacttaacaaaattaccagactcccacagaagcacaagaccaaacccaagatagagagaataatctagcacattgactgaggagatgatcagtgatcaagcgcat

SEQ ID NO: 266800 - DNA, 370 bp, Glycine max
agcttcatccttcttagctttagttttactatggaacaaccgggattcaacggtaatcgatcttgtacaatgccggggttcaaaccgggcatatctttggacgaccaagcgaagatgtcttggtagtttcttgcaaaacaaccaattcatctcagaccaatgtggtcatgcccgtaccaacctttacctctttcccttccttgccaacacccaagtttatgatttccgtctcttcttggtgtggcttcatttcttagtcttcttgagcgaccatcatttctagctttgaaggaaaccccgtatcttcatcatcttcatccttagctcgatttgctacttgttcaaaatcgacgtcagggtccttgatatt

SEQ ID NO: 266801 - DNA, 390 bp, Glycine max
  unsure (1)..(390): unsure at all n locations
tgtgaggattgatggggacccggcgtatagaggaactatgataagagctacgnggaagtacgtgagctcaattgaggtgggcaacaggggatggtgggtttatacgtgatttgtggatgtggagaactagtttgcactatcgcccgaccgccacctagtaccacatgtgatgggtaccccataatcctacaagcttgaaatgaggaagtgtggaagggtgagactttctacttttattcgttgaccacagagtggtacctggagatatgtcgcggcggttaggagaccttggggacgtcaagtggggtgctattgcccaaaaccaagcttgaccaatcccgacccaacccgggcatagtcagtcagtgagaacctgtgatgtacctaaac

SEQ ID NO: 266802 - DNA, 289 bp, Glycine max
cctttctgttcgaagaaatgaatcctcaaagctaagatgttaaatatacttgacaacccaatacatggaatagttggtttatgcttactaattaatagagaataacgatgattttggataaacatattggaaactttgtatttcgagtaatatggaccataaagttaacacttgaagataaatgtacaactcattcgggggaaaaagtctttgagttgctcaaatacccttgaggatatgaatttaacacggggattgaaagaaacgaaagtactcatttttactcaac

SEQ ID NO: 266803 - DNA, 452 bp, Glycine max
  unsure (1)..(452): unsure at all n locations
ttacctataataccctaattagataatgttttaacaattatttgttgaaccatttcacgggtttaagttggcatataagcaggcagattgtgatccccataaataagagtagtagaaaagtcatcaattgcagcgatggttgttgcatttctccgtggtggtctgatttgacattcttctatgatatgacctttttttgcacgaattgcacaaatttttaggacaatgggaagcaaaatgtccatggcctttgtagcagaaacattggacaatactcatgtctcatcctcaaggtttgccttgtactacatatgccacaggaagggatatagatttatgttgctccatgtntgtctgagcgaggagatgtcattcttcacaaagtagtttatttacgaattcatccatgaggggacaatagttctattcattatgttggttcatatgccctc

SEQ ID NO: 266804 - DNA, 192 bp, Glycine max
ttggaccaaaaaaatttagaacaaaaaaaattttgaggttaaaaatgagaggctgcttgtcttttaaattttgagaatattgccagcatattaaggaacatattcccaaaaaaattacaactgaaattgacttcaaaaaagactactgaagctttactttataaagctaaaaaaataataccaacttcttaa

SEQ ID NO: 266805 - DNA, 453 bp, Glycine max
  unsure (1)..(453): unsure at all n locations
tcaatgagaagtctccctatccaattgttgngcttcatacttgtaaatcatacttaaccaattttattatataaggaaattttcttatacatcatatcttttttggtttcccaaataaaaaactaatttaccactatgggacaacgcaaaaaggaagatggatctccattccatagaataaaactagagagaaaaggacatccaacanacatatttaaaacgctttaattgttacaggaaanaagtttgctcttcaacaaaatagtgatgaacctgatttggcagaagcagaactggatgatagtctttgcctccgtgctntatcagctntntccaagtaatgttgatgagattggtgtttggtccctgcaaggtaagacgaacctcaatagattaagtatttaaatgtgcacaatgaaatggagatttataagaaanatataaatataaagt

SEQ ID NO: 266806 - DNA, 424 bp, Glycine max
  unsure (1)..(424): unsure at all n locations
agcttgntctctatgttaaaataanaatttatagactctcgatttagacttgcaataagttttagcattaattgaaaaatattaaaatcgactaaatttaaaacagtagaatttaaccggaataaaatgatataagaaaaggtgaagcacttatatgagattaagaaaagtcaccatcctcatttaaagggtgtagattaaaagaactcttcactcttaagaatgaaaattcaaaatacgcaatagttgctaatcaaatatgtggtgttaattggaacaatgatggatgatctgatcagaatatcttaaanaattactttcattaaaaaaattcaaaccaataatacactgccaaaattnnngntagacaaacagctacatttctgaanaaaatccggcttacagctcacaaggggggaaaata

SEQ ID NO: 266807 - DNA, 465 bp, Glycine max
  unsure (1)..(465): unsure at all n locations
tgagaggtgatgagggtagcacccagcaataagaatgtgtcagatcaaatggcaaatctctttctgctttttgaaacttgtctttttctttcttccactccaagacttatgtcctgttactatgctaattaattatcctttttatgaaccatcctacttaggagtgttaagtgttaagttgctgattgaattgaatcaattttgaaaagaaaaattatatgatctaattacttcaatgctctcaattaatcatccaatcaacttggttaaaaatttaaactcagtttaatttaaaatggtttggatcaaatcaaattggttttcaattttaatcttatttttatttttccttggaaaaaaatattaaatcaatgattttttaaaaaggctaaatcaatgacaaaatatataatanacatcatataagataatttaaaatattaaatatctcctttatgattcaat

SEQ ID NO: 266808 - DNA, 380 bp, Glycine max
  unsure (1)..(380): unsure at all n locations
aagggggaaacttgntncagcttgtgacaccttgaaaaattatagctcaaattgacagaggaaactatgttgtggcatttgtgcatttatgaatataatttcagnnnnnntatgtttttaatcatagaattttgtgctatatatatgtatgtgattgatttagtaaagcttgacatagaaatagaaactgtttgagctagattttccttgagttttttatgccaaaagtgagttctttgcatgttataacatagacataaccttaaaattttcccaaatcagagttgtctagcaaaaagtacaaataaaataagtttaaggacctttactaaaatgaanagtcttgtccgaatttggactaagaggtacaaaagtatggg

SEQ ID NO: 266809 - DNA, 399 bp, Glycine max
  unsure (1)..(399): unsure at all n locations
ttgtcaatttgacattgttgttgacctttgtttcatgccaaaggttacgagacgaagatgccaaacaagacatagaacggctgggttcaagatagtanaaacccttgggttcatgtcctatgccaatcaaccgaaccataccacgtttctgcataacaaaggaatctacatcaaatggtacagaacaatttaatgattttgtcagttgactaagagaaactaagttgaaaggacaattatgaacaaatagacttggatttcagttaaagaagaaaaaggagactgccacttctttaaggcaatttgggccatttcttggtggcacatgaggaatttgggagacataatggatagagcttacagaatatatagaaccctgattataccatgacctgatat

SEQ ID NO: 266810 - DNA, 369 bp, Glycine max
  unsure (1)..(369): unsure at all n locations
agcttctgaacatcattctctagaaactgtttgagctttttttacatcgcccacccaggcgncatcttgcattgcctcataatgagcttttcttgcatcttgcagtgtgttcttttgtttttaatgactatatagtttaaacacaatctgctggatcacttatgatctgactctctggatggttccttctcatactgcatccaatggtgtctctgactccagcttaagcttcttgttgagtcaatactaatatctttgattcctatctggacgagttgggggctataaaactattgcccaattgtacactttatatgggctatttttgttaaatattatatggatagcttcttcaacaactaaaagtat

SEQ ID NO: 266811 - DNA, 262 bp, Glycine max
cacaaggacacacacccgggacaagatggcaaagaccaacgggcaccccggcaaagggaggccggaacaacaacagccggggaggaggtcgctgaacaacaacgccagccaaatcaatgccagggaggtcacgcaagcgcacatgagccacgcccagatccccgccacgcttcaggcaaaggccggcccaggaacacaaaggcactgactgacggcctccgcgccgaaccctgaggcctaacccctcctcagacagaggccg

SEQ ID NO: 266812 - DNA, 442 bp, Glycine max
  unsure (1)..(442): unsure at all n locations
gaccctaagtcacctgcggcatgcaagctngtgagtagatccttctatgaggtctttaagaggggcattcaaatcatgctgcattcgagtggagaatctaacattgtggagttcaaaggtgcttttaaagataagcaatcagttcatgtggttatgaagctgtgtgctggtggtgaactttttgacaggattattgccaaggnccnctatattgaaacaacngntagatcaatatgtaagcatgtagttaaagntgctaacacctgccatattaannncatcatcgatagggatctcaagctatagaatttcttgctatctattaaggatggcgagggacttctcaaggccacacattttggctcaccagtcttcattgaagaagggaaatttgttatccatttgtggcctcttgtataattttatttgtgagggattctga

SEQ ID NO: 266813 - DNA, 347 bp, Glycine max
  unsure (1)..(347): unsure at all n locations
tggagatatgtcgcgggggtcaagagaccttggggacgtcatgtggggtgctattggccanaaccaagcttgaccaatcccgacccaacccgggcatagtcggtcagtgagaacctgtgatgtacctaagcaggcgagctcctggcagtcaacagataaaaggaacaaagaccacaaagcatggaggcttgtggtggctggccagctgtgaattttgtgtgatatgtggattgtggcctctggtaatcgattaccaagggtgggtaatcgattacaaggcttanaaattgaagataggaggctaagatggtctctggtaatcgattaccaaggggtgtaatcgatta

SEQ ID NO: 266814 - DNA, 423 bp, Glycine max
agcttgcttagttgtaaattgttcttcattttagcgaggaatagactttgctgaaattttctctccatttgtgaaaatgagttaattcgagttatactcaaattggttgctagcttggatttagagcttgaacaaatggatgtgaagattgcatttcttcataaagattagatgaagagatctacatggatcaactaaaagggttcgaggagactagaaaggagaacatggtttcgaaattgaagaagagtcttgttggattgaagcacactccaaggcaatggtataagaaatctgactcattcatgacgaatcatggatatatcaggactaattcaaataaatttgtatatgtcaaaatatttccaagtaacaaatttatcatcctcttgttatatgtagatgatatgctgatagttggac

SEQ ID NO: 266815 - DNA, 445 bp, Glycine max
  unsure (1)..(445): unsure at all n locations
aaaaaaagctgtcttcagtttttactcttcttgcagaacgtggatatagcactgcaccaaaatcaaaccctgtactgaagtggtgcgtgattaccccacaatctgtagttcaataccacgtacccacatcatatcttcattgatttcaatgattttcgcctaataggtggcgcccaaagtttacttttaaaaggtgtctttgtagggtagtgggtacttgctttgctgaattacaatacaattctccttaataagtttcattttaaaattagtaacaaaaaacttanatatgattttcaaaaaattatcattaaaatccagtaacctcagaattaattaataatagaaaaataattctttgctattaaacttaatcactactaacacgtgtattctttaggtgtagttgtaaccaaattaagagaaaatatatatactaaaccat

SEQ ID NO: 266816 - DNA, 348 bp, Glycine max
  unsure (1)..(348): unsure at all n locations
gaccttgagtcacctgaggcagcaatcttagagaaagngatttaccttcttttcactagcctcttcttagctgtctgcttggccttgctacctctagctatagccttcttcatctcaacttcgtttttttgcaactacgatatctttttcctgaaaatatgcaagttagcacagaatccacatagaatgagaacccaaagaacacaacataagaagtaaaacataccttaacattcaagtcacgatattgagatgtacaccaataataaatagggtactaataaaattgataaaccaagtatttggaaaacaaatgacacctaagagacatcattataaagtagcagc

SEQ ID NO: 266817 - DNA, 374 bp, Glycine max
agctttgagggtgcgtatcccaccatcttttcatagtagagtatcgataatgtgtctaccatcacgattatcgtctccctttccatcattgggggtaccacttgggccgccagatccctccaccttttgggcgtgttctttgaaagatccgctcccctttttgcaaatgttctgtagttgcatcctatccagaaccatatcaaaattgtactaatactgcctaacaaaggcaaccattatgtccttccaagaatggactccggaaggttccaagttagtgtactaggtaacagctaccccaataagacttttttgggaggaatgtatcagcaattcctcatcttgtgcgtattcccccatcttctgacaataca

SEQ ID NO: 266818 - DNA, 479 bp, Glycine max
  unsure (1)..(479): unsure at all n locations
cttcgaaactatgcttggtatctccttcttcactacatttagaatcaccgggttgagncctctctgnggctggtttactgggtgagctccatcctctaaatttatttgatgcatacatgtggatgggctaataccaggaatgtccgccagggtccagcctatagccttcttatgcttcttgagaactgacaacaacttctcctcttgctgatcagcaagggaggaagatataatcactggaaaactcttgctatcatccaagcaagcgtattttaaatttgatggcagaggcttcaattctggtgtggtcgactggacagtggtagaaggagatggtttctcagcctttacctcataaagaaagtcagaggtatgtgtacttcctgaaacatggttagtccaatcttgactctatataatcaatctcaagaggtaatacaccaccaccagacatgcaatctatatcactctcaaattac

SEQ ID NO: 266819 - DNA, 403 bp, Glycine max
  unsure (1)..(403): unsure at all n locations
agcttaccttgataccatgccaattagtttcttgtataaggtaaatttaaaaatatgtccaaccacatgtgtacttgtctcaaaagatgacttaatttcagtgtgttgcagagtgattatattgttcatggcttcccaaacactacataggtcttcaagactaatttgcaatagtctctttaaagcccaatgtgcagactgaaccctgcatttgaaaaacacaaacatttatttctattcattgatgtgttgttattaaaaccaatatacatttacaattnttatacctgttagttgttgtgtttcctagatgcatcaccttattcatccagactttaacaaatctttgcatatggggaatcaaccatgttngtttgacatagtcaacaaacattggccatgt

SEQ ID NO: 266820 - DNA, 468 bp, Glycine max
  unsure (1)..(468): unsure at all n locations
tcgcttgatgtgcttggtgaagctaaaaaaattatgcacaagattgagggaacaactttccatttgaggtattttatgcgtttcttcctgcatatatctgaagccacccagaatgaacagtttcacttttgagtctgaatggttcttttcgtgcagactcggttccatggccaagataatgtctacaaggcatttctagccatattgaagatgcacaaagacggaaacaggactcccctgcagcttacgaggaggttagcctaatattttatggcagnnttatattggtccttctattnttcttacacttcttttgggaaactcatttaattatttattgaacttctcctgattactgcacttcttcaggaccatgtggatcttctaaacgtgttacctttnttatctcttaatacttcaagaacaacctctcaattcattcacttctgacaaaatctgttcatgaaa

SEQ ID NO: 266821 - DNA, 440 bp, Glycine max
ggatcttaagtcacctgcggcagctttctttgctttaacattataacagatctgctcagcagcaaaaccaacaacaatagaataattatgacctttcaagcaatagatacaatctaggttggaggaatcatcctaatcggagatggacgagtccttcacaacaacaacagcctgtccctccttttcagaatgctggtggcccaagcaagccatatgatcctcctgcaatacaacagcagtcacaacaaagacaacaagcaactgaggcctcttctcaaccttccttataagagttagtgaggaaaatgaccatccagaatatgcaatttcagcaagagacaagagccttcattcagagtctgacaaatcagatggggcagatggctacttatatgaatcaagcccagtcccaaaattctgacaatatgccttcacaaact

SEQ ID NO: 266822 - DNA, 446 bp, Glycine max
  unsure (1)..(446): unsure at all n locations
ctattcatctnttcattctcttctctctttgccaaaaagaattctccaaggactaaccgcctgaattctttntgtatctctcttctcccttttccaaaagaacaaaggactaaccgcctgaattcttttgtgtctcccttctcccttgtcaaagaattcaaaatgacacagtctaagaattcttttgatacttcccattcccttatacaaaagtgttcaaaggactaaccgcctgagaattcttttgtatccctattcacaaagtatcaaaggtttaacagcctgagatatttgtcttaacacattggagggtacgtcctttatggtacaagtaatgggtacatctacttgggtttgactgagaacaagagagggtacatctcttgtggatcagttctagtggagggtacatccactangttcaaagagaacaagggagggtacat

SEQ ID NO: 266823 - DNA, 389 bp, Glycine max
  unsure (1)..(389): unsure at all n locations
ttttcttaacatatagcatgcgaagcgggtttaattcctagagcaattcccttatgttatcaaacataacaagggaaaagggaattntgttacccgatgctctttctcaacgtcatgcattactttctatgcttgaaacaaaattgatttgtttcgaatgttttgaaaacatgtatgcaaaaatgatgaaacctttggaaaaaattttaacaattgcgaaaaattttcacaaaaagggttctttagacataaaagcttcttttaaaaaaaacaaattgtgtgggcctaaatgtcctactaaaaaattgcttgtttgtgaagcacatgaaggaggcttaatgggcatttttgagtccaaaaaactttaaaacattacaaaacatttttat

SEQ ID NO: 266824 - DNA, 348 bp, Glycine max
atacaaaccttatagaggtaagtcaatactcacacttgtctatttctgaaacaaccacggcttcctccatagtatcaactatagatttccctaaatggatgtcatgtatggggactatagtaaggtatgtatctatgttgatctcccgaaggtgaaaattctccatggagttgtgtctgcatgacatataagatgcataataatgtagaaacatttcataatttgaatttaatgatgaataatatcgcgttttggttgtgatgataatttatatgattcctttctgaattatgatatagtaactatattcctttatataaatcatgtatctttataaaataagtttac

SEQ ID NO: 266825 - DNA, 421 bp, Glycine max
  unsure (1)..(421): unsure at all n locations
acattttctgcgagattatctttntaaagttagctttacaagataatgcttatcttaacacaaaaaatgtcatgctaatctctctgattttaaaacgaactgacccctcacccagaaacagctgaaacacgtatgtgtggaatatcctactatttatatcaacatagaggccatccaacacattttaattgtcatacatgtatgcatttgaaaaaaacatacattctcacgcctaaggcattgcgtcaaaactcacatttaatttatatcctaaacatttgctatttacaaactacctacatatgtttgaaatatatatcatacaaatttttattgtttcactcacatttattcattatggcaagctatttacattatgcacacacttgcattcaaaagggaatcccctgctatatacatt

SEQ ID NO: 266826 - DNA, 305 bp, Glycine max
tcatttgtcacaagatagtgacatggagttgatggtaaatatttgtcacaacaaaagtagtttatctcaacctaatttggtgctgcactccatttttatatattacaattattcatgtttggcatttacatgtaggtccctgcaactattgttccaccaataacaaggaataagctagccataacaagagcccaacaaaggaaggttgctgtataagatgatgcagaaaactgaagaagcattttttggtgcattttgaaaggtgctgaaagttgctgaagacccattttttgttgcgcattttg

SEQ ID NO: 266827 - DNA, 418 bp, Glycine max
agcttgagtgagtcaattctgtaaacactattttgttattttattatcactccgcatagagaaagaatctccatattagagaattataatcgtgtgctcccattactacctttaattactaagtgcctatcttaacttcacgaagcgggaaagtccaagttttcccaacatctgttattgggaattacaaggtaaattgctcttaggggatttcttttaatcaaggtttgatttgaaatattttgcaaagggttttgtgtgagtcttttatcgaggtaaatgacgaaacacagtgaaaatggtgacttacacctatacactcccctgagtaaaacgctcacataaaacagattcacttctcaaaatgttgtaaaacaaaccctcactgataaataggttataaaaaaaaccctgagac

SEQ ID NO: 266828 - DNA, 386 bp, Glycine max
  unsure (1)..(386): unsure at all n locations
tgtttaatanggctatcaatatcaagttatcatcaatcttgttaactggtgatctactgatctccggtctgactgctgaccaaatctgactttaattatacagtatcatcaccataacccactgctagaaacattaagttcatctaagtgtatgaatttctgggaaaaaccccaagccaatttcttgttggcattgaacctgtttagtagatttctgacattcatatatcaagagtcagttgagttggactaaaaatcacatgatacgattatcaaatggatatataattacaaacactcaatcactacacggagaaggtccatgtccatgtccatgtccacatncaaagactatcttattaatcagaataacctcagaacatatg

SEQ ID NO: 266829 - DNA, 421 bp, Glycine max
agcttgcatatgcctatcatttatgattctcttgcagtgtgttaatgtttgcacaagctagcttcaaaagagccgactgaattggctaaaattaaagcttcgtacgctccaatagcttgcatctgtgaagcttgcacatgcataaatagtataaaagcaaagttttgtgtaagaaggatgcacatgctagttaaagttcttatctcgtgaaacatgcttatagggtctcttacatgaaatgatcatacctgtggaatcttgccagatataaagctagtcaataaaaacttgtatcacagaccactaaaaaattataagttgtgtatattggactcaagtgatgcattaatattatacaagttaagatatcagaaggtaacactctggccaaaaaccaatacttgtgtcgaccattacctta

SEQ ID NO: 266830 - DNA, 310 bp, Glycine max
  unsure (1)..(310): unsure at all n locations
ttgggctttttcacgctaaacctgaattaaccgcttaatgaagaaactcgctgaacctgtcttggatgccaagcgaattgttcaatcttcaactttttcttcagggnttttcttcacgttcttgcattatttttcctccatagcacttgaaattttcttcttttgaatcctacttgttaaaaaatataatgatatcaattcctcattatttcattaaaaactgtaaactgaagaaattgtatcatttntaaccaaaattggatatcaatntaacttcaaattcacaattttcaatactctatccctgtac

SEQ ID NO: 266831 - DNA, 316 bp, Glycine max
agcttgaagaagttctgtcatctacatgttcaactctctttagtgacatctgtattgattattggattgggggttgcatcttaatctctatattttcatatgtacataatgcatcctcatgtaggaaaaagaaaagtggttttaaaggccggaactttcttcagtgcataaaactctattttaaatgattacaagcatgatcataatcgattacccaagtgtttagaacctagtaaagaacttttttggtttcgattaatttattacaagctaatgtaatcgactacttacttccgttgaacaatggttggttttc

SEQ ID NO: 266832 - DNA, 443 bp, Glycine max
  unsure (1)..(443): unsure at all n locations
tctcaacactataaagctattcacctttaatccttttgttttaatatctgccagctgcatttcagtgctgcaatacctcaaatacaactacttcttgctcaccttttccctcaaaaaaagaaatctaatctcaatatattttgatcttccctggggtactggattcatgggccaactgatagtagatttggtggctacatacaatctagctggcctctgaatttccacctttaattcttcaagcaaggaatccaaccacaaggcttgacatgcaacatagcaagctgctatgtactctgcctcacatgaggataaagccaccacttgctatttcttggaacaccaacttatngatgtacccataaacttgaaaagatagcctgtagtgcttttcctttcacgttgtctcacaccaatcagaatctgagaagccaattaattct

SEQ ID NO: 266833 - DNA, 396 bp, Glycine max
atatatggtatgccgtatttatgctatattgaacaggtggggctattatacatttaacaatatctaaactgccttcttttaatctacgtcctatggtttgaatgcaccatgtgatacaaatatctcaactctttttcatatttttcactcccaatgtatcatgctacaatttcagcgaataaataagatgcatatatatttaaaattagatttttatcattaagggctatgcgacttaaatgtaaagtaaaagattacattttactagatgaaccttagttaaatcaatacaattgaagtattgtctattcaacttttaaagataagtgtttttactgagagtgtatcatttcttgaatcattgagtcgggtactgggttgtagagtgatcactat

SEQ ID NO: 266834 - DNA, 358 bp, Glycine max
aatatatcatgatgagatacgagaaggtacccctgctatgactatacattcctacatgactaaatttcccaccatctaacaatgcagtactcaaccaactataaaccgttttattggccaccacccgaataagcccaagaacactctaatcataccacaaagtgtcacctcctaaatcagtccacataggcacgctctgccggacactccaatatccaaacaccatcccttaacacacaaccaaaacaccaactatggaaagaatttttcaacacataagcctataaaaatcaccccaatttcgtgtcttatgcatacttgctcccatatctactcataattcaatggtagccataac

SEQ ID NO: 266835 - DNA, 410 bp, Glycine max
  unsure (1)..(410): unsure at all n locations
agcttattatcatagcagtgactacagtatccctgaggagtctggttgaactaattagaaaaccatgactatcttcttgccaaataacaaggtaaaggaaaccattctagcaaccaattcagtttgacacttcatagtgacctttctctctggaatactgacaagtatgcacagttccaatgaaacaatcaagttaacaagaagttacagtgactgactttgtttaggattcactgaaacatatatattttaggatcctaatttttcattaacaatctaagattgtctcctctttgtatactctaantttatctctgcccaaactatggatgaatattctcaacccctgcctaattgcatcatactgtgacaatacacagctgccaaatcaaaaattcgattctttaaaa

SEQ ID NO: 266836 - DNA, 270 bp, Glycine max
  unsure (1)..(270): unsure at all n locations
caatatcttactagcataaccctacgttcgttcgatccatccatccctgagcattacggtatatggatttatagaatcttaaatctacagaatagatctacatttacagaaaagttaatatattcccttcatctcattccccacttacaaaacaccttattctgcctcattacttgaccttaacttccacctaatatcttctttacatactttaatactattaattatatttgcatatattccacttcnaaactatatcttactacttaa

SEQ ID NO: 266837 - DNA, 349 bp, Glycine max
  unsure (1)..(349): unsure at all n locations
agctttcagctaacctattattattnttctcaaacatagccaagagtcatggttttagttttctcaaacataatcaagagtcatcctttttttcattagttttttagtgagacaagtgagacaaatgataatgtgttgaatgattgcgtactcttttttcttcactaattttttctttatcccatgaaatttttcctattaagctataacaagctaccgtttcaaataaaaataaaaataacatacttccaaagagaagtactatgagtcaataatagagaaaaaagcgttacttttcaatatatttttactattatccaccttttttataaatttattagatttacaa

SEQ ID NO: 266838 - DNA, 441 bp, Glycine max
  unsure (1)..(441): unsure at all n locations
aacttacgcttatgctcctgaacacttgtaggactttttcttgatctttttgcttcttgtgngngcgcttttgaatagtgaagacattatttgtgtctcattctctgttcagttttgtattttctgattatacttaggtcatatcttgcttttgaagatctacctcttggccagagattcattcttaccatgcttttgatcatacacaattattctgttagaactgtgatttttgggtcatgtacattatacagtagtgaattatgtatcatagtgtgattggttcagtggaaagtttcctttggagggtataatttgactaaatattccccttaattttaaactttttatacaacgattgatattaaagggcctgttaagcgtatgacatatgatataagataagaatatatgccccttttatgcattgttgtgaaagga

SEQ ID NO: 266839 - DNA, 425 bp, Glycine max
  unsure (1)..(425): unsure at all n locations
agcttaagcgngaaactttaactttttatattctttcaattagatatttttaatattgcctttttatttatcttttggaggttaattaacacactatctcacaattaaggatgaaaataagtctgtccatccaacaggcttatggcttaacctatatcatgctcaagtcaggcttgaatttctttttagcaaataaactatacccatatttttattaaagagtatatggttaaaaaaaaaagtcaagcctaatccacttggtaagtcttttatgcctaacacggttgacttatttaagtaaatatgaataacatttattttctctattagcataagtattatattaacttttttatattggaaaactcatatatttaccttatcaatcattggtacccacttaaatagtccaactagcaagctta

SEQ ID NO: 266840 - DNA, 371 bp, Glycine max
  unsure (1)..(371): unsure at all n locations
tgtgctcttttcatgaatcttcaagagttgcgggtgatgatatacccctttctctctaagtcttgataatccttaagaatatttttcgtacactagatacctctttgtttagtaatgccttgacctcctcacaaacaaatgtgtcttgtacatcactagttgaagtgtgtttccaagagaaaatcaactaaatgagcttgatgagtnttcttaagatccctatgctctctttgaagatgtcgaaaacttgtttatttttctataagctttacagacgcgagcatatacacataaaagtggattgttccctctagataaatattttctagatacaaatagtatctctgtaccatcacagatgatagtgtcat

SEQ ID NO: 266841 - DNA, 419 bp, Glycine max
atgacgtccttcaatggtgattttctaccatggaggtgcagcggcagacaaaggagaagatgtgagaggaggcgcccaccactagggaataagccttggaagaaggagcttcaccaccaagaatgtgccttggataagaagcttaaagaggatgcttcaatgacggaaaagaaagagagagaaagggcgggagcacaaaattgaaggagtaaaagagggagagaagttgaactttgagttgtgcacaagactttcattcatcaaagctacaagaaagtgtacacatgcttctatatatagcctatgtagcttccttgagagacttccttgagaagctttcttgagaaacttccttgggaagcttctttgagtagctttcttgagaagctagagcttagctacacacacccctataataa

SEQ ID NO: 266842 - DNA, 364 bp, Glycine max
agcttaagcatcacattcattttacacaaatttcagcatgcagagaaagccttgaattatcatgaacgtcatacattcatattaggaaatgaaaaaagttagagtatccacacataatcttcaatctactagagactacatgttgatagtataatctccgactacaaaccattaaaatttcagaagaatgacatttatcaaaaagtgtgtagtatagctttgatattacttcattagctatttagagaattggtattataattgtcaaaatgaacaactactatatgttagagatagggggagcaacatgagataagcaacatgagcaacatggtgaacaacctaaaggctaaagcttacagct

SEQ ID NO: 266843 - DNA, 456 bp, Glycine max
  unsure (1)..(456): unsure at all n locations
gcagatttggtcttcgccagtgaaaggatcaatgtgtttccgaaaagaggcanatttgatcatcctactangacgactgagaaaactggggcaaataaagagggtgaggatgagggagaaacccatgctgtgactgccattcctgtacggccaaatttcccaccaacccaacaatatctttactcagccaataacaaactttctccttacccaccacccagttatccacaaaggccatccctaaatctaccacaaagtctgtctaccgcacttccaatgacgaacaccacctttagcacaaaccaaaaacaccaaccaagaagtgaattttgcagcgagaaagcctgtagaattcaccccaattccagtgtcctatgctgacttgctcccatatctacttgataattcaatggtagccataaccctagccaaggttcatcaacctccatttctccg

SEQ ID NO: 266844 - DNA, 357 bp, Glycine max
agctgggtgctgattaaaactgttttttcttttatggcctacaaggaatatatttgagatggttattcaatatagtaccatgaggaaaagaaaacacaccccttttctactttctatttcttctaccgagctatgtgaaaggacttggtcctatgatcccacttcatagagacgtagctgaaagagtgacccagcccttagagaagaggacacagcgcttatttttgactctaacattgacatacagtttgtgcttgaaacgataaaccactgttgatcacacagaccagtgcatcaatcgggtccacaacacaccaaactatcatgatggagaatacgcggagagtactaaacatt

SEQ ID NO: 266845 - DNA, 433 bp, Glycine max
atctctggcttggtgtggggtgatgaggataattctgagctgtgtgcaaaattggggaccaagggggtgatcatgaaggtgttcttgaggtggtgggtgatgatggttgtcctcctctcatagagcttgaacccttgctgcttctttgggtgttgctttcattggaggaatgttgaacgtcttcgatgatgatgattgtggctgaactagatctcgctgtctgtgttgttgttgttgtaagtggggctttgtggtttctgatgagccagtgagcatttgaacaacctgtttaaagtggaggtgcagcttggacaaagtggggggaaggattcgtgagtcgatctgcgatggttttggtgtgggggatttgatgccatgctattataaattgggcgcagttgtgctaattgctctgggagtgtcatgaagtggg

SEQ ID NO: 266846 - DNA, 408 bp, Glycine max
  unsure (1)..(408): unsure at all n locations
agcttagtgagagccaatgaganaaattatactcatatgttaaaagagagccactcatagtataaattgagagttgagaggtccaattttgaatatgtggagattttactctaaaatcagttggagcaagtctaattcaatgttatagacttgatgaagatgagagtttaccccaaaatcacccaattttaattttcacctttcaaaccttgaaaactcactaaattttgttggttttggatacctatattttgatttacctttatttgaggttggtaattagttggaacatgatttatacatggtttaggacttgtaagacaaaatttagggggattggatggttattaagtacattttaaaatatgcgaattatgccaaaaactggtaattttgccaaaattgatg

SEQ ID NO: 266847 - DNA, 412 bp, Glycine max
  unsure (1)..(412): unsure at all n locations
aagcacctgcaggctgcaagcttcggattgccaattgcaccatcttttatgaagagtatagggcgccacctttgttgagtggttngatcaccattttagttagttgaaataaaggcccaaacttatgttaaagtggctgtcaattctcttgggatttgcaccacctatggacttgttttaattagaagaaattaagaantaataaggggggaattctcagcttgggatgcctctggttgaccaaagtgtgcatttttcacatggtttgggccaactctagttaacttagatatgacccctccatgttgaatggagataattcattttttactttgtaccaaactgtgcctttcttttatggcgaccatttttataaaaacaactttgatggtttatccctttaaaggaaaag

SEQ ID NO: 266848 - DNA, 342 bp, Glycine max
tttattaaaataacatgagtttcacatatttattatattacttcaattcaattttctttcaattctctttaattttttgtgtttcattttacaccatcaaacaaaatgacaaaactgaaaccgagtccaaagtcatggactaacattatcttagtttgtcaaatgcacatgtaattagttatttattgtttaagcgacctccttgatatgtagaagtttggattaacattatcttaagggagaaaaaacaacattattaggcacagaaatttttatattattattaattataactatcaataaaggaccatacgttattactataactttgacataacatct

SEQ ID NO: 266849 - DNA, 335 bp, Glycine max
gcaattttactttggttactataccattttaccatgaaactgtgaaactgcgagtgaagaacaaaacatctttattttaatatacttcaattccatcccttctgggtgtgtcccattcacctttaccattttttgtatctagagcatcaataatggataaactttccaaattaaggtgcttccaaagatatttatttttataccgcagccattgttttttattttttccaatacccatatctctaagcactaaattgttacaatgaaacaattctgtttgtgtgcttccaaggtccaatcttttttttacatccattatattgtactattaactt

SEQ ID NO: 266850 - DNA, 273 bp, Glycine max
  unsure (1)..(273): unsure at all n locations
aacttctctttattacacctagtaaggattttttttactttaatcaatttgctttcctgcaggaaccatatttggactctagaacctttggcagacaaagggactccatcagaataacaagaaatcagttaaagaactcactataaaccaaaccctatggttgtacatatgatatagttgcatgttatgagtaccaattntctttatatataaaggttataattacctcattggcacgccacacgaaaccagaaaccttaatatattactctt

SEQ ID NO: 266851 - DNA, 364 bp, Glycine max
agctttacatacctcatgttttctaagttttcttagtggagaaatttggacttgatcttggattaatgagctgaaccataactaaagttcactaatcataattagagaaattttggctccaaaattggctccacaatttcaaattcaaattcaagtgaaattcgaatagaaattcaaatctcccaccaattatgtgtgacacttaggctataaatagagtccttgtatgtgcttatttttaactctcatcatttgagaattacccttcaaagttcagacctcatttgaagcataaaattccatgctccttttcttcttctctctccactcatcttctcataccttcaagcttttaaccatggct

SEQ ID NO: 266852 - DNA, 460 bp, Glycine max
  unsure (1)..(460): unsure at all n locations
gatgaggaatgggtgaaggagtaacttcctgcttttatcgttgatcacagagtggtacctggagatatgtcgcggggtcaggagaccttggggaccttatgtggagtgctattgcccaaaacaagcttgaccaatcccgacccaacccgggcataatcggtcagtgagaacctgtgatgtacctaagcaggcgagctcctggcagtcaacagataaaaggantacaagaccacaaagcaaggaggcttgtggtggctggccagctgtgaattttgtgtaatatgtggattgtggcctctggtaatcgattaccaagggtgggtaatcgattactaggcttaaaattgaagacaggaggcttagatggtctctggtactcgantaccaacgtgtgtaatcgattaccatcgctttgaaatgaagtcaggaaacttacggagcctctggtaatcgattacta

SEQ ID NO: 266853 - DNA, 351 bp, Glycine max
  unsure (1)..(351): unsure at all n locations
agctntaggctccttcgtttatggcctttacatcttgtcaaagagttatctgatgaggttactgcaccaacctgcttaaccattngtctttttctgaaatattgttgacatgtacgctaatgtatttgatgtgcaccatgtaagattcccataatcatttgctcaagtctgaaggagagggtaaaatgcccactggagaggttacaactgatccactatgagagttattgaagaatttattttatatttaccataagacaagggggttaaaatgggatagggccaagattggtagtctaagactcaaaaggagctttttatgacgcattgagatgttttaaaaatcatttt

SEQ ID NO: 266854 - DNA, 467 bp, Glycine max
  unsure (1)..(467): unsure at all n locations
gtgacactttcgaatactttcgctagagcttcgctacacatacctctctaatagctaagcttatcttcttgatatgagaagctagagcttagctacacaccccctataatagctaagctcacccccatgacaaaaaacatgaaaatacaaaanaaagtccttactaccaagactacttaaaatgccctgaaatacaaggctaaaaccctatactactagaattgccaaaatacaaggctcagatgaaggaaatacctattctatatattacaaagataagcgggctcatacttagcccatgggctcgaaatctaccctaaggctcatgagaaccctagggccttcccttggatctctagcccaatctacttggagtcttctacccaatgcccttgcggagtangatcgcatcacgaatgctggcgttaccctcaacatctctcatgcccatgttccagcccgtatct

SEQ ID NO: 266855 - DNA, 381 bp, Glycine max
agcttgagtaagcttctttgatagagattattaataggttgggaagtttatattctcaagctcgagtgagccaccatagggtgagtcaatccaagtagagagcctctctgagagagaagataaatagcttgggaagactctatcctcaagcttgagtgagccaccgtagagtgagtcaatccaagtagagagcctctctgagagagaagataaatagcttgggaagtcatagcttgggacagttttattcctcagcttgagtaagcctccttgagaaaaacatcaatcgcttggaaagtctttatccttacgctagagtgagccagcgtcgagtgggccaatgttgaaacacattctagaaactctactatcattttgata

SEQ ID NO: 266856 - DNA, 319 bp, Glycine max
  unsure (1)..(319): unsure at all n locations
ggacgtttccaggaccaatgggtgtcctggaggttccatccttgcaaaatggtaaaaggcgtccgagattaactgggccacattaatactaacctgagttaagatggcgtagaccagatggcacttcgacaggggaagatcaaaattatgatcaccagggaggatgttgttgaggagcagcgtcatccagatctgtgtcagggtggtcatgctagtatgcatgatccacacccgtctctccatgtcacacgttgggcgaagtcctacctcggaacacatagtagctggccgatggcctcgtcatcaaacctcnnaacct

SEQ ID NO: 266857 - DNA, 434 bp, Glycine max
  unsure (1)..(434): unsure at all n locations
actggatgcattggttaacttggttacccatctggccttgaatcaaaaatctgtacctgtcgcaagggtttgtgatttgtgctcctctgctgaccaccatacagacctttgcccttccatgcagcaacctggagcaattgagcagcctgaagcttatgctgcaaatatttacaatagacctcctcaacctcagcagcaaaatcaaccacagcagaacaattatgacctctccagcaacagatacaaccctggatggaggaatcaccctaaccacagatggtccggccctcagcaacaacaacagcagcctgctccttccttccaaaatgttgttggcccaagcagaccatacattcctccaccaatccaacaacagcaacaaccccagaaatagccaacagttgaaggcccctcacanaccttcctcgaagagc

SEQ ID NO: 266858 - DNA, 400 bp, Glycine max
agcttattgttcacaatttaacatagttgtgtttattgtcttgatctattgacacttggaacaaccttttggttgtcctaaattatggagattttccccttagatgtacagatgatagaaacttaatgaagtcacgaacaagatcacggtgaccctcaacttagtgaagcctacactattagaaattacactttcaacatcggctatttaagacattctacatcagttctaaaaccgatgttaaaagagccggtgttgaatgtatcatcgttaagatcggttttgaaaaatcgatgttgacataaatacaataacattggttgtctaaatacccaatgttaaacacaatgaactacaacaaactaagtgtatgcgtgatgaaagttgacatctgttatgt

SEQ ID NO: 266859 - DNA, 386 bp, Glycine max
  unsure (1)..(386): unsure at all n locations
tacaatacggacatggcttccgatcggaaccagcttcagaatatgactaagcgagagcatgagtccattaaggaatatgcccaaagatggagagatctcgcagcccaagtcgtaccgcccatgacggagagggagatgatcacaattatggtagatacgttacccacgttctactatgaaaagctgataggctacatgccagctaactntgcggatctcgtcttcgccggagaaaggattgaatccggactacgaanaggcaagttcgaatatgcttccaatgtggtccccaacaacaacagaagagccccagtagtgggcgcgaggaataaggaatgagacgcccacgcggtcaccaccgccccgacgtggatgaaagcacccta

SEQ ID NO: 266860 - DNA, 337 bp, Glycine max
atcttaatcactgcggatgcttcttgagatatactgcgtgcccaagttattggatgtgtcaagggccacagtagcccatgatggcccttgcactccatcttcattatgcatcttatttctggatcaaagatatacgggcctggtgtgctttttgccctggtgagttcgatagaaaaacaaacactcgcgagcatgccacctgagactaaacatgctgctgattgatccaagggcttggatccacctaatggcatattttacataaccagtatacacccacagattttctatctataaaaaggaccatagccttcctctaaccaagatcatgccacag

SEQ ID NO: 266861 - DNA, 400 bp, Glycine max
  unsure (1)..(400): unsure at all n locations
tttatcaccataaatgttgacaagaaaacattaagagaggtttatcactagccttggccaccacaataccattcaagcacttcacaaggacttcccttagcttcttgacacaattcacccaaatttgaagaaagaaaaaagcttaccaccaagttctgtcaagtcaattaagaagttatttctttaataatctttctaatcaatgtcaattttcaaagtagttggactaaaggatcaattcaatgaaccacactgtaatttgaaaatgaagactaattntaaatatgattatatggacaagcaacatatgctngagacttatcaagcatggcaagcaacatatatcaatctagtaggacatgtatgntctcctagaaatttttttactgccctatcccct

SEQ ID NO: 266862 - DNA, 422 bp, Glycine max
agcttgagatgaggaagtgtacaagggtgttatcttcctgtttttattcgtagaccacagagtggtacctggagatatgtcgcgggggtcaagagaccttggggacgtcaggtggggtgctattgcccaaaaccaatcttgaccaatcccgacccaacccgagcatagtcggtcagtgagaacctgtgatgtacctaaacaggcgagctcctggcagtcaacatataaaaggaacaaagaccacaaagcaaggaggcttgtggtggctggccagctgagaatcttgtgtgatatatgggttatggcctctggtaatcgattaccaacggtgggtaatccattacaaggcttaaaaatgaaaacaggaggctaagatggtctctagtaatcgattaccaaggtggtgtaattgattaccacgc

SEQ ID NO: 266863 - DNA, 412 bp, Glycine max
tcattatttattatgttctaaaactctttatctcccgacttatcaaccaaagaacgttcagctatttcaagactcttgccatcattacttgagggaatcatactcaacttatcagaacttccctcttcttttatgttggtaactatttcacctgattgtaacactctaagacacaatgtagactaaataaatggttagcaaattcctgtaattctccctcatatgttgcacactccaaggtactaaaatccttgcaaagatcagcaatgctgccataacccaatttccccgcttcatagagtgtaacagcatgagatttcggctttgcaagtttgcatgtatatctagtcaaatgcaaaacgaatttgagacacacacaagttgacgtaatacacaaaaagcctatccacca

SEQ ID NO: 266864 - DNA, 311 bp, Glycine max
  unsure (1)..(311): unsure at all n locations
gctngtagtgaggctaggctacaaaaattattggttttttttaagaatggaaaggcttgtgattctaaggagagcacaaagtcccagagcttatccaaggtagtcttttcatatacaantagctttatgccactagccctttcattcttaacttggattgggaccttattacaaccaacacacactcttcttggagtgcgttcgtttgtacccccctcttgtttatacttcntagctcgttataacacaacttatttgttgggggggctgatgggctctgccctcccctttacatcgggggtgactccccc

SEQ ID NO: 266865 - DNA, 399 bp, Glycine max
agcttgcatgatttacattctccccctttctcaagcaatttcttaattcttcttgacatcatcaaaatcttcatgatttacattctccccttttttatgatgacaaacacctgtaggttaggagcaacaacaaagaaaaaatatctatttgcatatagtttactcccccttggttttgcaatgattgcttatatgagacagttgaagatttcatatttttcatatgtaaacaaattgtctcataaagaatagataattgttcttactattttatcttttatctttctctccccctttgccaacataaaaaacaaatcatgaatagagaggagaaagatggtactacttgttgattacatacatatattttatcttttatcttgttgaatgccatggatg

SEQ ID NO: 266866 - DNA, 390 bp, Glycine max
  unsure (1)..(390): unsure at all n locations
aacatggatcgatacactttttgaattaatggaacgttggtaattccatttggaaaccttttcaaacccaatttgctactggtaattcaagtacaccaatctagtaattcgaataccccgagagtaaaaaactctttggtatacttgtttgagaaaaatcacgtgctactcaattnttgagaaaaacctttcatacttatctngataagccttctcttgattcttgattcttgactctaaactttcttcttgagtcttatcttgaactcttngaatngttcttgatcacttgggttggtctttggatgatctttgagctttttgtcatcatctttggtcatcatcattggtatcatcaaaacacctttgaaatcaccttgattcaccatg

SEQ ID NO: 266867 - DNA, 281 bp, Glycine max
tcttaattccgcaagactggatgcatacgcctttctatccggcaagataaattccatggtgaggcagtggacaccctccattatgatgtcaatcagtcagaccacacagcgcagaccctaagaaaaggaacagagcatcttgcgcctaccaaaacaatcgcggaggcataccaaggcctctcatcctaaatcagccaggactctcacaaatagaatgcagattaccattctgcacaacatacactttccaagcagaaaaaaacaaatcattacaacactaa

SEQ ID NO: 266868 - DNA, 398 bp, Glycine max
  unsure (1)..(398): unsure at all n locations
cttaaattcattttagctctcttttattacgggactcaatcggacatccgagttaaaagttattgtcgtttgaattgctcaaagcttcaacattcaaattcgagcgtctcgttatattataggactcagtcagacatccgagtaaaaagttattgacgtttgaatttgctcagagcttcaacattcaatttcgagcgtgtcgctatattacgggactatatcagacatccgagtaaaaagttattgtcgtttgaatttgctcatagcttcaacattcaatttcgagcgtcttcatttattacgggactcaatcanacatcccagtaaaaagttattgtcgtttgaatttgctcaaagcttcaacattcaaattccagcgtgctgttatattataggac

SEQ ID NO: 266869 - DNA, 416 bp, Glycine max
ttcaacgacataactttttactcggatttctgattgatgtcccgaatatatcgagacgctcaaaattgaatgttgaagctttgatccaattcaaacgaccataactttttacttggataattgattgagtcccgtaatataactagacgctcgaaattgaatgttgaagctctaagccaattcaaacgacaatatacttttactcggatgtctgattgagtcccgcatatatcgagacgctggaaattcaatgttgaacctctgatccaattcaaacgacaataactttttacttggatgtctgattgagtcccgtattatatcgagaccctcgaaattgaatgttgaacctatgagccaattcaaacgataagtaacttttaatcggatgtctgagtgagtcccataatatatga

SEQ ID NO: 266870 - DNA, 363 bp, Glycine max
agcttgcttctacaaggtggttgcaggggtgagtccttcgctcgtcaaactccactaacaataaagaatagaaaaacaaaactaaaacatacaatctatgtaaccattgcgtgtggctatctaaacaaacaacactctcgcatcctaagcgtgtaactatcacacttaattcaccattgggcccaatcactgccaccaatcctcctaggtcttgatggtcttaaaaaatcatgtggatgtcagtcaggagcaatctctacatatgggtacatcggacaccaacctctcatctcctaactcaaaaagcatagtctcaaagtttgtcatgagtaacaaagggaggcatgagttatgatgtaagct

SEQ ID NO: 266871 - DNA, 423 bp, Glycine max
  unsure (1)..(423): unsure at all n locations
ttctttctcaatcaatctatctattgactaaccattctattngcagactntacatacttggtctttctttgtctaacatacatacttgctcaaactcatgaaagaaacacaaactccatcataatcatgcattcaaaccaaaatcaattcatacaccaattttcacaaaggataaaagtgtttcactgcataatcatcaaaatcaagtcaaactgttctatatgcttcaggatgagcaaactaactatttataaataaaactagcagaaaagaaatattgtactataaccataattaaaataataataaaacaaaaaccaaaaagtgtcatcagaaatcactgatgtgccatcattntcttctattttctaaaccctttttgcaccattntaattactgattggtcttaatcgtcaattaatc

SEQ ID NO: 266872 - DNA, 335 bp, Glycine max
gtatctagtcaaggtctgagagaccatacaaatttcctaaccagttctaattatgtgggccattaagtctatcatacgctgacaatagccgagaagcccacgaatctcttcgagggcggagtaagtgtctgccatcgccttggccttggctaacaagcggggaagttcttgacttcccgtcaaggaaagagcaaaccaatccatccacatggttgcctcttggagaaagaagcgatcacccttcccctagcctctttgtccgcgtatacttgagcatactccgccgccattctatgcttcggggcctgggctagacctaactcttcttggtactc

SEQ ID NO: 266873 - DNA, 382 bp, Glycine max
  unsure (1)..(382): unsure at all n locations
tgtagaatggctagacatganacatgtcatggcttggtttggttcaaggcgaaaagggatgccccacattattttcatgacacanattgcaaatatgatgaattggaaactctatgcaaaactggtcatgcatgcatctatgcggacactcaaatgtcaaattnttatggtcatgtgatgctagggctcacgattcatttcctctattttaatcaacccaatgtttccaaaatatgttcttttatcaatttgtgcattcatccgagtccatttcgggcgtccggagaaatttcacagcattcacccttcaggtgtagacacattttccaaaaattggttatgatcaatcgaatttttcanagaaaacgtggaaatcgtctct

SEQ ID NO: 266874 - DNA, 115 bp, Glycine max
accgcgctgcacttgacaaagtttatcgttttttaagctattttaatcgtgctgatattaaccatgctctgacactctggcaaaacttttcaagaaagacatcccttcatctggc

SEQ ID NO: 266875 - DNA, 468 bp, Glycine max
  unsure (1)..(468): unsure at all n locations
gtgacacttcgaaacatacgctcgaagagagctcctccatgccagcactctctccacgtgtatgtanctctctaagcgagaaggtttgctcttctgcgctaaacgcgagaatgccgctaagccaaatctcacttactcgcacttagcgcgagaatggcattaaacgcgccttcatggacaggaagccctttcttaagcctgacttacagaaaatgaaggggagggctggaagagagcgctgaatagccgtcagagtttgaagagcgaaatacacaaagggcaataacagagcaaaggagccaagttttgatcttttacgaagatctgtgaagttttgagtgattgtgagattcctagaggtggaggagacatcctcactcctttgaagcaagcaatttctcttaattcctcttccaatttgtaaaggaacttccttgctattgaaagctaacacctcagtggggattc

SEQ ID NO: 266876 - DNA, 323 bp, Glycine max
  unsure (1)..(323): unsure at all n locations
tttctttttgcttttagatggcgttgccttagcatatcatcacattttttcttttcaatttgagccttcactagctcatgcaactttttacatactcagacttaacctgtgcatcattatgcttanacatagcaatggtaggcataggcaacaaattctgaggagtcaaaagattanatccatatactatctcaaattgggaacaattagttgtgctatggacagctctattataaccaactcaacatgaggcaaccggccttccaagatttaaaatttctttaaaacagtcctaagcagtggtcctaagttctattgactac

SEQ ID NO: 266877 - DNA, 400 bp, Glycine max
  unsure (1)..(400): unsure at all n locations
gacacttcagaatactcacgcttgcctcanagaggtttagtatggacaatgcagccgaatgttcttgttccgctccggagtatgacagtcaccgctttaagagcgctgtacaccagcagcgcttttaggccatcaagggatggtcgtttctccgggagcgacgcgtccagctcagggacgacgagtatactgatttccaggaggaaatagggcgccggcggtgggcatcactggttactcccatggccaagtttgatccagaaatagtccttgagttttatgccaatgcttggccaacagaggagggcgtgcgtgacatgagatcctgggtaaggggtcagtggatcccgtntgatgccgacgctatcggccaactcctangatatccgttggtggtgga

SEQ ID NO: 266878 - DNA, 323 bp, Glycine max
cctatttatataacactttatattgtgtcatgtatcacatattacatagacataaccttattgcaattgatataacgattaatagtaatgatgactcttataatgaaaataatgcatgcaatgagcaaggctagttgagacttttactcttgctggtctaattaacctatatgcctattggcttgggtattggtgtttctatagaaataggtcacagatatacactttggagatagattatacttttaaacacatcagatcaaagcttatagaaactttgtcacaatcaaataggtctgacttattcttacccaagtcctcac

SEQ ID NO: 266879 - DNA, 404 bp, Glycine max
  unsure (1)..(404): unsure at all n locations
tagcttanggtgtagtggtagttctttattatcagtgcttaaatggtaatttcctaacctctcactcttttttcctcatgtattgttggcaaaaatgtgattcataatttactaaaatcaattcccaagattcataatatggtcagaggtgactntggctccttgcatggttttgatttccaggataagaaatcccgctaggatatagatcaacggacaaattctcaaagttttaccaatcctttgccttacaagaactcttccttggatttgaatgcatactttattggggaagcatttgcttataataacactaaaaatcatagaaagggtactaagcatggttttgatgggatgagatatgactctgcttctaactctagagatcactatgaagagaataa

SEQ ID NO: 266880 - DNA, 460 bp, Glycine max
  unsure (1)..(460): unsure at all n locations
ntggaaagngntgtttttcaccttctcgctaagccaatctgttagcttagcgagcgttcgctaagcgcagcactcctaggctaagcgcgaggaagactctagaagaagatgagctgtacaggtttgctaagcgcaccacttcatctcactaagcgcaccgcttcagttcatccgctaagcgagaaaggcgtgctaagccaaaaatcactaatgtgcgctaagcacacgagcacgaacaaggccacctatttaagcctgaaattagattttgtgaagggattttggactagtttgactctaaagtccttgatagtacagggctaagttgttgtactatcacgaggaatcggcgtgcgataacttagttgtgtatgtgtgtcttaatgcgaatcctggtgagtttagtcttacaagaagaatctgtgaacgatgcttgatcaggattaggctaaactatcat

SEQ ID NO: 266881 - DNA, 366 bp, Glycine max
  unsure (1)..(366): unsure at all n locations
agcatcacgcatatanggaacctgcttgcttcactcgcttattcttatcgagagacttgactataccatttttcgctctttcattctcaaactcattaacgatcatcttcaatctcttctttcaagtactctctttgaacaccacacaccctgacccttttctcgttgtcttctcttttattttggatttcacgatcattaatcacatttatgcttgtgtgtgtgactgtgctatacagagagagagagagatgatgttcacaaccaaactcgactttatttttgaactcgagcaatcttgaaattgtaagtaagagatgaatacggtgggaggaaagcttttgaatatgcgtgcctagctttatt

SEQ ID NO: 266882 - DNA, 476 bp, Glycine max
  unsure (1)..(476): unsure at all n locations
tgcaagtgtgtcgaccatngaaggttcttttntctagtttttttatcgtcttgcggggagtttcattaggtcccatgtcaaccctctaacatgacaactaaaaaatgtgactgaattaaaggaacgttagaccattcaaattttttttccttcttgaatctaatatcactttcatacgacatcttccttatcacttgaatacgaattaatgaataaattaagaggttttttttttttcttacaaggacggtaatgaagatacaatctaagtcctcatgcgtttatctcaaccatcatcactacattgactctaatggttcaaataaataaataaagaagggtttgaatagaagaaatttacttgtttatttcaaaccatatattatccaacactacaccggtaatatggaataaatattcaaaaatttaaagtcagatatttttaaattattaaannaagttacgactcttaattt

SEQ ID NO: 266883 - DNA, 432 bp, Glycine max
gctaggaatatttcttttttattttggattctggatatgttcaataggaagaggcatctgtggctggggttacagtggaaaaaaataaaattgtttctaatgttaagtttttaaaatacctataatgatgcaatttcttgtggtggtatatatgggtttgattgaagtagaaatggtcttgagttatgtggacttaatgtctatatcaaaagaatattcaatcaggatgttttaactagaccaaatttgccacaaaagaagttcaacctacttatagctcattttataaaaactatgtttttgttactggtaagtacaaaattctattataatcattaaattaggattaataattaaaaaggccacgttacaatgagccatttctttatatgattaatgtaagaaattactcttaaaatgtatatactaatg

SEQ ID NO: 266884 - DNA, 410 bp, Glycine max
taccaaatgatgaaaatgaagccaaagaaaagtgaagttgatatcgacccattacatgataatcgatggagaggtcctcagacaaggaatttctgctccatcattgaagtgtttggaaaataatgaggcccagtatgtcatgaatgaaatacacaaaggcatttgtagtatgttttccgaaggaaggagtatggcatctaaagtattccaagctggttattattggccaacaatgcatgctaactgtgcaaaatatttcaaaaagatgtaaagaatgctatgaatttcgcaaccttcaccatgcaccaccagagaagttacaccatattcactcacctttggccattttgcattttgggtatggatattcttagccctttcctattacaaaagccaagtgagttcttact

SEQ ID NO: 266885 - DNA, 423 bp, Glycine max
agcttgtgcaaatcaaatcactcctacattttatctctatcatgcattgtatgttagtctccgcctttggcacgggaagccggaaggtccatatcaccttcttaattggacacatggggcactgcgcccccaaatgcgcgagtaagaagagataattttccgggctctcgtgtccgtaaaatgcattcatatcatgcatcgcataagcatctcttcataacatcataatggacatatcctgcatttgtccgttatcatattccagcctcaccttttgcatgagtcatggcatcatcatgcatatgcgtccaacaaacgttttgatctgcaaaattgcataccatttgttttcatgtgtgctcatccttgcggtttcctctacaaaacaaaaaccaagaaaggggaagcgtgaaacttcacact

SEQ ID NO: 266886 - DNA, 196 bp, Glycine max
  unsure (1)..(196): unsure at all n locations
ctaaatcacattgatggttgtatgggaggaggttacatgccatttttgctttaagagtaanggcccactaaaactaacttttcaaatgtttgccttcgcaggaatggcaccgaggaagcttgcctcaaagaggtccaggaaagacaaagccgccgaaagaactagtttcgccccggagtaccacagtcaccgcttt

SEQ ID NO: 266887 - DNA, 395 bp, Glycine max
agcttccttaagaagattcctaaagaagttagagcttatctacacatacctctctaatagctaagctcacctccttgagatgagaagctagaacttagctacacacccctataatagctaagctcacccccatgacaaaacatgaaaatacaaaaaaaaagtccttactacaaagactactcaaaatgccccgaaatacaaggctaaaaccctatactactagaatggccaaaatacaaggcccaaatgaaggaaaaacctattctaatattttcaaagataagcggactcatacttagcccatgggctcgaaatctaccctaaggctcatgaaaaccctagggccttcccttggatctctagctcaatctacttggagtcttccaatgcccttg

SEQ ID NO: 266888 - DNA, 208 bp, Glycine max
atctgtgcaaacacttgtgttgactttcttaattaacaatgaggtttggcggtatttttggagtgtggaacttgataaatgtgaatatgtggtgatttgtaagtgatgttgttatgaaattaactcttatatatatgttcacatgcttatatttattatatataatggataactcatttcgattggttgctttgggtgaatgcatttg

SEQ ID NO: 266889 - DNA, 327 bp, Glycine max
ttatcttggagcttttgacttatatgctccttttttgatggggagtgttggaaatacacacattgtatggggtgttgttccacacattgtatgggttaattgttcaacaaagaatagttattaatgtacctagttagtcacatattcatgtttctaggaattcatatgcatgtgcatagagtctacaactttattaatattcttgcaagctcacattgtatttactccctaagtatatataaatatagattagctgagtgggtaaaacacataatcatttcacaacctctagtctcttcaataggctacaattgttaccaagcttgg

SEQ ID NO: 266890 - DNA, 384 bp, Glycine max
ccctagaggatggtgccgtccctctcctctactcctttgccttctgctgcatctctatgggggaaaaacaccatagaaagacctcattgaagctcaaaaatccagcctccataaaagctccacaagcaagcttccatcagttacgttgctatgaatagagcataatggtttgattgcaaaaatcacgaggatataattgtaatgttggggtatttactgcatatgcgagggattaatacttactaaatattcttaggctccaagtgtgagggattaacttaagataacttaatgtgtgcatcaagaatatttgaaaatggatcatagaagttatcttatatgatcttaaggtataacgataaatccaatctatgtttcttgaat

SEQ ID NO: 266891 - DNA, 399 bp, Glycine max
acttgagggcgatttaaatccttgtttgcaccacaaaaaggggagaaggaatgttgttacatgatttgacgatgtcaaagaaaaatctaacaaggctacttcaaatgataagcatttgcttcaagaataattcaagattgcttcaacaaacaaagccttgtttcaagattcactaaagaccaagccttgccttaaaacaaagtgctttcaagacatgcaaggctctggtaatcgattaccaggaagtgtaatccattacccgaagcagggttgagaaatagctgtcgaaaaaggctctgaatttgaattctcaacatgtaaccgattaccatatgtctgtaatcgaataccagccacgaaactttggaatcccaattcaaagtcatacccctcaaatat

SEQ ID NO: 266892 - DNA, 350 bp, Glycine max
aaccggacgtggtgccgaggtctcagagattaattatccaacccacaatgaccttctctgtttcatattgatccttgagactttggatattccaccactaacacagtgctactcaccaagatgtcttgtgtgttcattgccaccatttatgaagatagaattaagtccagaagcattccatggaagcattaaccaataaattggcaaggtaaaacatataagatctggagattatgttttaactttgaaaggattgtgcatcatgtgtacaactactaaatagtgagcctgataatataataccttgcgagcttatgtgtcagcttctcttcagagaaggtaagccgaat

SEQ ID NO: 266893 - DNA, 399 bp, Glycine max
  unsure (1)..(399): unsure at all n locations
ctctatcgagatttcaaaatagaaaattatcgtggagaccaaagataaaaaaggtccacacacctgtagcttatcttggctcaaagctgatcatgtcaccggtatccagattgcaaatgttgacataaatgtcattcacatatctctcacttgtcttactctagagttgactaaactttgtttgtcagacactgatattttatcctgttttgatgtctttcaattatggtttttcatttctagttgttttaatgtcatatcagctgcaagtatatatttatcaatatatgtcaccaagtatcactgatatttattaataattcatatataggtgaggctgagttngtngatgacattccatcaaccaaaaattgcctacatggagcatatatctatagt

SEQ ID NO: 266894 - DNA, 399 bp, Glycine max
  unsure (1)..(399): unsure at all n locations
agcttcttgagatgcctttctgtaatcttactagatgctnctggaaaatccactatctcattagaggcatcgacattgaagtagtcaatgaatcttgaggcaagcacgacataaagaaatttgtagtccattaatcgacgactctttaacatgatgtcttttatcaaaaatacccaattcatcttgacacctaatttcagaccataaacaatttgcagatcatagtctgttacctaagcgtgaatacttgacctcagagtgagaatgtaagtaatgaggtagactaacattttgttctgtgcaatcaagcctgctactcctcagaactccaccatgtncagaccgactactttctttcacaactgagagccagttaccatttctactccattaacagta

SEQ ID NO: 266895 - DNA, 333 bp, Glycine max
aaatacaagattaatgattgcattaaatccccattccgtttgcactagaaaaaccactctctttagctttcatggagagcacgtcagtaggaatccacttgctttgcgttaaagcaagtatgtcacaacatagcgtgtctttctatgatgtttggaaatctcaacgaacatttatggttggacaattagaagatgctgcctttataaggagctttgtattctaggttcaatgagctttacagtgctttgaaccccttcattgtaaattctcgtattcacaataaacttagaatatttgaatgatatgtctcttatccttgtatcatctaaact

SEQ ID NO: 266896 - DNA, 400 bp, Glycine max
actcaaaataatgaatttattttatgcgcatcaagcatacacattgtttttattctattgggggtctagacgtgtattttgacgttcatctttatcaccttttcttgctcatttatttttcggttctgttcattatttttccattgttttcatttagatggctattttacccagttaaaatttcagctcaaaacttgaagtattcaagccatagcagagttaagaagacaatgggcctgaactgacaatcaccaaaattttcacctagaaatcaagagtagtgtttatgttgcttaaggcttggatagttacaatttgtatttgcctatgcctcattgtctccgataacacaattcagaagaacttaagacttattttgattcacaaatccatccataac

SEQ ID NO: 266897 - DNA, 221 bp, Glycine max
  unsure (1)..(221): unsure at all n locations
atttggtcttaatgaatatattcgngttggnattaatgaaacttcattggtgcaactttaagaagttgacttgctatttctttcatccacagaaggaacattgcaggtaaattattnttttcttttgtacatttactaaacatatggaatatagcatgggtttgtctatacttgctggctgatttattgaataaaatagagaagcggattccaactttcat

SEQ ID NO: 266898 - DNA, 409 bp, Glycine max
tagcttttgctaaacagcatccatatcaaaagttagtcacggtgcaattgatgtttattaagcagcacaacctccacacatgatacttctgtcaaacagtaaatatacgtgttaacaaacataatcaaatgtcactggtgtgtgatgaaatttcaaaatgaatggtgggaatttgcatttcaaataataaaaagacactttatgataaattatgtgtttctcttttcaaataatagcaagcttaagtagtgatctaaggtcaaggattcaagggcattaacattcctagttgagactcaatttaaacgggttcactttgcaaaaatcaatgactataagtatgattcacagtatatgagcaaggcacttacacaaatgagcaaccagacctcctatgccttttcttcct

SEQ ID NO: 266899 - DNA, 438 bp, Glycine max
  unsure (1)..(438): unsure at all n locations
tattcagaatcagaagaaacttaccatagcaacaatatanaaatgctccatcaccatcaagntgcttcctgggattgcacactttggaggtacaatattaagatgctttgttaactgattaacaagtatactaattntatcacaagtagtaaagtaatgggaagtccgagtgtgaaatccacatgaaactntggttgtacttagattgatgtaaatccaatttaaaagcaagaaataaggaaataatagataggagataagatagaatttgaagaaaaaataaatatttaaagataaaaatagaaaatnnaaaatataaaatatttaaattaaaagatgataaagataaaagaagatagaagaaaaaaaaagataagatgaaaaaattcagactgtgatagtgttggaacctaatctgtcttatttgtctaagatgta

SEQ ID NO: 266900 - DNA, 262 bp, Glycine max
aacagggccgcaatcagacggatccatattggtgtgtatttatttaccaatagccataacattatctaccaaggctcatttttaagattccatttaggggaatgatgactgacaatgggtatttgttgttcctgcagggacctaacaaaagatactttgtcaatatcaatgcttataaaaaaaatgtctaaggaaagggaactgtatgtcttttaatttttcatgaaaagctggggacgatatgcagtggtaaagaaatgtg

SEQ ID NO: 266901 - DNA, 360 bp, Glycine max
gccgaggcgaccgcgcacgcaaccaacggggcaaaacataccacacgaccagaatgaaggagggcgcaaatcctcacaaagggaaaaccaccacctccaaaccgagcatgcagaaccaccatgacacgtagagaagaatcaagggatccaagccacaaaatgtcaagaactcttatgctcaaaacaaagacccatgcggggaacatagcccacaacacaaagaacaacatgcagaggcgaacgtgcacaccaaactgacccaaaagatcaaacagaaaacccgaccgaaccaacaacacttaccaacaaacccaactaaccaattaaccaaaccaacaaaactagcaaaaccacagaaca

SEQ ID NO: 266902 - DNA, 222 bp, Glycine max
gatctcgaagacaaacaccttcccacaagaagggagtgatgaggacataaccaagggcaaggaccatgaagcacctgaagggctcagaccagaggcagacttaaacaagcccaacacgtcatagagacaaggctggtcattagtatacctgccaatgaagatgatcgaaggcccaagtggagaaagacgaaggcccatagacaaaggcactacccagactac

SEQ ID NO: 266903 - DNA, 403 bp, Glycine max
  unsure (1)..(403): unsure at all n locations
agctggcacatgagttcttaagatatgtgttgattttcnttgtgttccagacacaaagaactaattattgtgtttttatattacttatgattcaataatcgcattgacagcgtaagagtttgttgtcgctcattgaattaaaacatcattggtgtatgactaattaaaatcaactaatattttgatgccacaagatcatccatccacaaggtttcagttctacattgaatgcatgtatgcttcatgcaatgtttatacttagtgtcttaagcaggtgtggtgtaaagtaaagctgactttgtatcaaatcctctctgtggtatggcattgtaatggtgtaactcttcattcttaaacatgataatcgacttttgagggtattaatttcaagggatcatcattt

SEQ ID NO: 266904 - DNA, 321 bp, Glycine max
agcttcttaagaaattagagggattcctctttactctgaaaatttctctgcaaagagaggcctatccctgacttcctcatgtagaaacaagttactgaatcagggattgtctcttatgaatttgattaatctggtcattcatagtgtattcaatgctgctaaacttggtgaattatatattactaacaggaactgcatgaggctggaaacaccaactttcatttgccacgagaaaaaattccagagtggttagagtaccaagccgggccgggggtccatcaatttctttctggttccataacaagttcccagccctagata

SEQ ID NO: 266905 - DNA, 357 bp, Glycine max
gtattatgattaattataccaatattgtaaaatcttcaaagataaaaaattggatgtgaacggcatcttcctaaaaatagtgctacccaaagcttaagaccactctgaatgcttgatcacccctccaataataaggctgactattccttccttctctgctgacaataaacagcaaaaagacacacccttcgaatatacatatagataggattaaagaaaggtgtattgattgtccccaataacgcatccactacactagatcttttgaaaactctaactgaccaccgcgatccaaagagctttggcaatttaatgcttgaaagccaccttcggaaaacattcaaatagattgatcaa

SEQ ID NO: 266906 - DNA, 342 bp, Glycine max
  unsure (1)..(342): unsure at all n locations
agcttcaacattcaattnggagtctttttaatattacgggactcaatcagacatccgagtaaaaatatattgtcgtttgaattggctcaaagcttcaacattcaatttcgagcgtctcgatatatgacaggactcaatcagacatccgagtaaaaagttattgtcgtttgaattagcttagagcttcaacaatcaatttcgagcgtctcgttatatcacgggactcaatcagacatccgagtaaaaagttattgtcgtttgaattggctcagagcttccacattcaatttcgagcatctcaatatattacgggcctcaatcagacatccgagttaaaagtta

SEQ ID NO: 266907 - DNA, 459 bp, Glycine max
  unsure (1)..(459): unsure at all n locations
ttgagccaattcanacgacaatatactgtttactcttatgtctgattgagtccggtcatatatcgagacgctcgaaattgaatgttgaagctctgaaccaattcaaacgacaataactttttactcggatgtctgattgaggcccgcgtaatatatcgagacgctcgaaatttagtgttgaagctctgagccaattcaaacgactataactttttactcagatgtctgattgaggcccgaaatatatcgagacgctcgaaattgaatgtggaagctctgagccaattcaaacgacaataactttttactcggatgtctgattgacgcccgcaatatatcgacacgctcgaaattgagtgtngaatctctgagcaaattcaaacgacaataactttttactcggatgtgtgattgagtcctgtcatatatcgagaccctcgaaatgaatgttgaactctg

SEQ ID NO: 266908 - DNA, 345 bp, Glycine max
aagaaggacccaaatcaacccaagacgcgggggacaacccagaaacttggggatggaccgaatcaaaccaaaccgcccatcaaaagagaaaggagaaaaagccccacaactagcctgaggtcctcgagcaggctctatgcccaacaagaaacaacgacatcctaaggtagaagcctaggtatttctaaccatgagactccttccactaaggcgacgagcacccaccaacgaccaatatggacttgtcagctaaccaagaacaagagggagagagaatagcacgggcaagtcaatcgggaataaccaatgggaaatcggaaaggccaaccacttttgacgccagaa

SEQ ID NO: 266909 - DNA, 307 bp, Glycine max
atgacacaaagctcagagggcaagaacgcttcctgataacccagacgaggacattcacgaatgacgccaaggatacagccgagaacacttcaaggatcaagaggaactttgattttaagaatccacattccagattcatacttccagaataaccaagaccaagattcaagactgcaagagccaagaatcatcagaagacttaaccaagagaagtacgaaagacgctcgcaaacattgaggaacacaagaagcattttacaaaaccattacccacgagtattactctctgggaatcgactaccagatc

SEQ ID NO: 266910 - DNA, 389 bp, Glycine max
  unsure (1)..(389): unsure at all n locations
agcttaaggtcgttgtttctatcttatttagcccctcgaaacttgtttcggccgtgttcttcctttcgggccctctttgtttcccgttctaaagctttggtcgtggctatattgatgtccctcagattatcgcactttttcttgaccttgatggccattattttgaactttcccttgactaattgtgccttttcaagtttctcttttaaggcttgcacctcctcaccctcctcaggggtttcagcctcttcctcgcttgaaacctttagctttgggagccaatccaactcttatgtccgagctttcaaccacctatgatagccgccgatgatcccattgttgcttncnctaagctctttatattcctttgcattgcccccatggcttgc

SEQ ID NO: 266911 - DNA, 463 bp, Glycine max
  unsure (1)..(463): unsure at all n locations
cttgatgtntgtgttgaatgcattacaggctaattttttttttcaagaaantaagtgcatatagggctacagacgtcttggaatttatacatacggacatttgtgggccatttcatacaccttcatggaatggtcaacaatattttatatcattcatagaacattactccagatatgcatacttatttcttatacatgaaaagtcacaatctctggatgtgctcaaaacatttaaagttgaagttgaaaatcaactcaacaaaagaataaagtgtgtcagatctgaccgtggtggtgaatactatgacaaatatgatggctcaagtgaacaatgtccaagacctttttccaagtacctagaggaatgtgaaatcgtcccacagtacaccatgccaaggccacctaacatgaatggtatggctgaaagatgaaacagaactcttaaaatatggtaagagtatga

SEQ ID NO: 266912 - DNA, 430 bp, Glycine max
  unsure (1)..(430): unsure at all n locations
agcttaaaccanattcggttatagtgtgatcttaaacggggagtgaacgactagctgtgagtaataatctttgcattaatctctgaattttagaatgaaatgtataaataaggacatgatgaaggccatgattctacatacacaagccttttgaccaaaaagcttaccttgaatgataattatatcctttgcaccctttttgagttgaatgatattgttaaaaatttgaaccctgaacttaaataattatctctagataccttatttagattctaggagagcatatagttcaaggcaaatttaccccaaatttgggggagtggaactaattaggatgcaaagaaagagataaagcatcagcacacataacacacaagttgtttgttaaaaaaaaaagagaaagaagaaaagtatgctgatgtatacaggt

SEQ ID NO: 266913 - DNA, 424 bp, Glycine max
  unsure (1)..(424): unsure at all n locations
agcttggaatgaatgaacgatcaatagatattgtatatgctntcttgattccaagttttgtcatcatcaaaaagggggagattgtagaagcaaagcttcaagaagattttgatgatgccaatagtaaagcatatccaagacaaatcaaaaagattttgatgattccaatagtcaggcatatcccagacaattcaagaagattttgatgattccaatagtcaagcatatccaagacaactcaagaagattttgatttcaagaaagatttttcttcatggataattcaagtaagcatcaagcaatccaagatattcaagttagattgactagatagattcttaagttagatctataagttagatttgaaagcacaaagatttggccaagttattcttctttaaaaaaaaatgattttaaagttttc

SEQ ID NO: 266914 - DNA, 429 bp, Glycine max
  unsure (1)..(429): unsure at all n locations
ataagagctattcctttctttataatattattcttctcatggngantcaatctcatcaattccatttcatgttcctgtaactttccaaacaaagaagcaagagacatgttagaaagatctcttgattcagtaatggctgttaccttaactttggcattccctgcttaagcatctcaaaactttattgataagatcttcatttggaaagatttttcctaacgatgcaagatgattaattatgtgtgtgaatctcttttgcatgtccttgatgctttcattaagattcattctaaataattcatattcatgagttaaagtatttatcttagatcttttcacatatgttgccccttcatgggatacattgaaggcatcccacatatattttgcatttatgaatttgacacctaaagtatcatccattctaat

SEQ ID NO: 266915 - DNA, 425 bp, Glycine max
  unsure (1)..(425): unsure at all n locations
agcttgntgttgcttgtgtgttgagtgtgtgatggatcatgtgtataggggttcgatggaacctgtatttatagtaattgggtgtgactgctggtccttgtttttagggctattgaagcctttgcaaataatttctagcttatagataatagccgggagtttatagaaaatgttagaaataaatatttgcttatagataaaaggtagaagataatcataccttgtagataatgtgttaccttatagataattaattacctaccaatagataagatttcaaaatacatttgaatattagtagattagagataaacctttttattagggaacccaactgctaagggtcaggcgtccacgctcctgtagcagggctgacgtggagggtggactcacgtctctgagtgtcatgtaggatgccatgtata

SEQ ID NO: 266916 - DNA, 232 bp, Glycine max
ttctgtcacgcctcgcaacaaactctgccatctatactagatactacgcgcatctcagacactataagtaagctcgtgcttacaaccttggaagctgaatatttcacttattgttctggactcttagcacggagagggtgtcgtaacacaacttgtattccgtaaagagaaaatcatctgctcacctcttgtggaatccgaaaaatagggtctcagaaaagtggctacttat

SEQ ID NO: 266917 - DNA, 442 bp, Glycine max
agcttcaagggatttcctaaaagtgccttgttggctttggcctaccttggtcctcggggtattcagagttgcaactattttcttgtttgtgccttgaaacaaccgtgaattagttctttcttggacgactggtttttgagcaatttcaagccattatgtcaaatcataaccattaacaagtggtcaaagctggcgtgaattgtatcagtctttacactcttgatcattaatcttgaattgacgtacgcaaatctaacccaaatattggatatgacacggagatcagcagtgaaaggtttattacccttcacttcccaattctaattctgccattgcaacgatttatgatcaattttaccggcgcagtcacaaatgttgactttcctaactcctcctccaaggcgagtgtcctgattagcctagcttaactaaaaaatcaaca

SEQ ID NO: 266918 - DNA, 175 bp, Glycine max
aaaacagggcggaagggcaaaggagcccaaaggacgcacaaaggctacgagacggggaacgggacgagcaaacaaaaagccacggcagcatacgcccaaacgcccaagccaataaagaaatgaccggacgagccataatcagcggagcatccataaacaaacaagaacggcaagg

SEQ ID NO: 266919 - DNA, 390 bp, Glycine max
  unsure (1)..(390): unsure at all n locations
accctcagagtcacctgcggcatgcaagcttgtaatcgattacacacatactggtttcgattttcgatgagattntcagacaatattctcgacagtcacatcttttcggtcggttcttgaatgaccatcaaaggcctatatatatgggacttgagacaccaatttgttaagagattttcagaccaacaagtgtttattctctcaaaagcaaaatcggtttatccctttaagaattccttggccaattcaattgcaattcattaaggaatcatttgagtgctcaaattgtaaaatctatctctttcaagagagattcattcttcttctctttctgattcactaagggattaagagaccgagggtctctttgtgtaaagaatttaaacacaa

SEQ ID NO: 266920 - DNA, 440 bp, Glycine max
gcctattgatacttaagagccttattttattgtttagggtttcactttcacaacatatatgggttgattaatgatcccaagcccactaaaactaatcactacaaatggcgtatgtctatgggagcttttacctactaacataaattattgtaagctaaaagcctaaaaatacttttaccgacaactgtttaatgtagttaaaactcaaactattggtaaaatttcaaaaaacatatacctacaactttggtattggtaaaattctataaaacttacatcacagatatcaacaattgataaatctttggtacacatttataaggtgtgcttatattttattgtaactcgtttgaatatatttgaggacgtgtcatctataaatcatgtcacgttttttgtacaatacattgtaaataatacatcaataacaatgccaaatg

SEQ ID NO: 266921 - DNA, 422 bp, Glycine max
taagcaccgcggctgcagctttagatacacactctgtttacttaaaaacttgcgcgaaaagattataacttttcgaccgttatttttccttttttccagctgagacaggataaggacttgcaccatgcttttcgtgaaaaagatttgcaacggtgcaaaagaaatagttaaaagaactgattctaaaacaggtttggtcattataaaatgcaattatgttcaaattatgttataaggacatttttacgagattatctttatttctacttgttaatagaattgcttttagaaaataccaaagactcaccatgcctagcgatcagcaatataggttctgcttttcagtctccacgttattttagtgcgccttcttttcgtatgaaataacaaacctcttgaatagagcgagctaatcaagaatg

SEQ ID NO: 266922 - DNA, 429 bp, Glycine max
cgcttgctcgtggagcttctattgttgttgtatctttcagctccactgaggcccttcaatggtgagtttacaccatggagatgcaccggaaggtaaatgagaataggagaggggagacaccatccactatggaactaacccatggaaagaaggagccttctctaccaaataatgtgccatggataagaatcttgacaaggatgctttaatggacgaaaagaaagagagaaggggggagcatgaaattcaaggaatatcagagggagagaagtggtactttgaagtgtgtctcataatactttcattcatcacaagtacaacaagtgttacacatgcttctatttatagactaggtagcttccttgagaagcattcttgagaaaacttccttgtaaaaactttcttgagaaacttgagcttatctacaca

SEQ ID NO: 266923 - DNA, 451 bp, Glycine max
  unsure (1)..(451): unsure at all n locations
ggatccttaagtcacctgcggcatgcaagcttcatggtgaatctacagtgattcttatatgtnttgatgataacaatgatgataacaaaagatgatgacaaaggtgatgacaaaaagctcaaaggtcaattaaaggatgagttcaagatgttcaagaaggaatcaagaacaattcaagactcaagacgaaaaggttgaaggacacttcaagattcaagaggaaagttgaattcaaaaatcaagattcaaggatcaagatttaagaatcaagatcaagattcaagattcaaggttcaagaactcaagagaagacttaatcaagataagtatgaaaaggttttttcaaaaactgagtagcacatggatttttcacaaaacatgtttagcaaagagtttttactctctggtaatcgattaccagattgctgtaatcgattactagtagcaaaat

SEQ ID NO: 266924 - DNA, 391 bp, Glycine max
  unsure (1)..(391): unsure at all n locations
tccggaggatgacagtcaccgctttatgagcgctgtacaccaacaacgcttcaaggccatcaagggatggtccgttctccgggagcgacgcgtccagctcaagacgttaaagaagcgctactatgaggcaacctagtacctttggaatctatgcttgctatttgatcactntntatagtatgacgcacctaggtgctcatgatcctgtggatataaataaaacaagcgcaagctcggaaggtagtcatacctcacaaaatatatatatcgtatgttaacgtagtgaaaataccttagatatgcatgcatgtaaacaaaacaataccttaccaaatatatatatgtatgttatagagagagacaccttaaatgtgcggtatgaaacaaaaaa

SEQ ID NO: 266925 - DNA, 425 bp, Glycine max
gatccttaagtcacctgcagcatgcaactattatattttcccattatattttatatgtgaactatggagacaacaaacaaaggccacttaatcaacaagcccaacatgtgatatcaaatgataccaacaagtcacttgtctttgattgattacatttgataatttttgcctatgattgataacttttgattgagtttatgatgattgttcttgattgagttttgattgtctttgatgataatttttgcttgagtttttgattatctttgaagaggtaatgtcttctaactatgagatgttgcataaagaatctattaaactcttcaaaatagtttcatattttaagaacactatttcaaattaaaaaaggaacatttgaaatcgaaatttgaaaatttgaatttggaaacttaatttgaaatttg

SEQ ID NO: 266926 - DNA, 459 bp, Glycine max
  unsure (1)..(459): unsure at all n locations
ttccatatgaatttaatgtanatgtcactttcattttttttttttaagagaanaacttgtacgcgcacaagttgttgtctcgctaagcctggaccgcgcgcttagcgagactcaatcgctaatcgagacatcaactgcttagcgagtgagatgaatattgaagagaatctgccatgtcatcacacgctaagcgcgttatcagctcgtttagcgagaagaatgtctcttctgcgcttggcgcgagaatggcgctaagccaaatttcacttactcgcgctaagcgcgaaaatggcgctaagcgcaccttcgcggacaaaaagcctttattacgcttgaattgcggagaatgatatgagaggtttgaaacaactacgtgagcctactgcataacgaagaacacagaaaagctgtgcagtgaggagcaatgccctaactcttatgtagatttaagttaggagt

SEQ ID NO: 266927 - DNA, 419 bp, Glycine max
  unsure (1)..(419): unsure at all n locations
agcttatgaagttttctcagaaattaaaattcatatatatctctnncaaaaatttaaacataggtctcttgatcattataagcacaatagtaaacttatattgaaaatacacaatttatttattcaaaataagaaagaagagaaaagatgtcacctaaccttgtaaatcttttactcactctaaatggtaaaaagcggttgaagtaccgtttttggcgacacaaaaaatagttctcataattgtgatacacacattatgacccacagggtggcttctcttggcagccctttatctctccaataaacgtttttctgtaaaaatctcttacatgagaaaatataatatacaaaatagtattctccggcagatatttgattcaatttggtaagtaatatttgaagaaaaaaactggggcaaa

SEQ ID NO: 266928 - DNA, 457 bp, Glycine max
  unsure (1)..(457): unsure at all n locations
nagcattaagtcatattcaaaaagcatgactatacttctgttttattatgataaaacggagacaatatgcttatggagggagatagctggccacgacatgaaagagagttaaactcactcactttgaagatcgtactctttcatttccattgctacatcttttattttttagcctctcatgactatgagagactaaataactcattattggagtcttggatatcaaaaactctttaatggaatgatctttattatccatttaatattatttcaatattattgcttcctttctaagtatattacattgataatggtttgattgtccattaacatgcatgttatacgggtttaatcattggaaaatgcttttatcctacgaacttgactgaacttctagggaatctatgtctagggataaaatggtgttgtttaacctaatttatacatctttattctt

SEQ ID NO: 266929 - DNA, 398 bp, Glycine max
  unsure (1)..(398): unsure at all n locations
agctttcataagtgaaatcaagtgcagctatttccctatgattcctctcacgaggcggaggttgagccatgttctcagtatgaaaattagtagtcgaatgctcaaaatcagaatattcagaatcaccaacaacaaaatactcagaatgctcaaaatgctcataatgcacagaaagaccaggatacacactatgcctaattaatctatgaaaggttctatctatttcaggatcaaagggttgtaaatcacctggattgcccctagtcatgcactatatgcagcaaatcatgtgtttctcanacaagcaccaggggagggttaaaactacaactatagtcaaacgatatccaaatgagcagatattttgtgagcactctataatcatgaaaagatagcac

SEQ ID NO: 266930 - DNA, 433 bp, Glycine max
agcttgaagacaagactatacatggtatcttccttctgtatagcaatatctctaagggctaccgtgtctacaacttgcaaactaagaaactcgtcattagtcgagatgttgaagttgatgagtacgcttcttggaattgggatgaagaaaaagtggagaagaacgttcttatacccgctcaactacctcaagaaaaagctgaggaagaagacccaggtgaaccaccttcacctccaccacaacaacaagatcaagaactatcatcaccagagtctactccaagacgagtaagatctttggtggacatatatgaaacctgtaacttggccatacttaaacctggaagctttgaagaagcgttaaagcaggaagtatgggtcaaggcaatggaagaagagatacagatgatcgagaaaaacaacacatgggagtt

SEQ ID NO: 266931 - DNA, 410 bp, Glycine max
  unsure (1)..(410): unsure at all n locations
ttctgtgttttctagtttccaaaccttgttctttcacttatacaaaagngcgctatatcttttcattctcttctcccttttccaaaagaacgaaggactaatcgcctgaattcttttgtgtctctcttctccctttgccaaaaataattcgacaaggactaaccgcctgaattctttttgtgtctctcttctcccttttccaaaagaacaaaggactaaccgcctgaattcttttgtgtctctcttctcccttntcaaagaattcgaaacaacacagtctgagaattcttttgattcttccctttcccttaaacaaaatatttcaatggactaactgcctgagatatcttttatttccccttcacaaagtttcaaaggactaaccgcctgagaactttgtcttaacacat

SEQ ID NO: 266932 - DNA, 419 bp, Glycine max
  unsure (1)..(419): unsure at all n locations
agcttgtagctgaagttctttagaggtgttgaaattggntaggcaaaaacaaaagacacattcccctgctntcatttactggaaggtcaaaggtacttcatctctctcttattntgattaaacattgnaatctttatttntatgtgtttacaacgtacattaaattttcatgatagtatttttatgttacgacctctactagttagctatcaagtgtaatttattataattttttgtaattcattgttttgttggttccattggtttttattctaaatacctattcttattttataacatatatggtagtagttgtaacataaaaattagtattgaatcttagngtatgcttcttcccccaccaattattccttttagttagaataattattataagctttcttcttaaattatattat

SEQ ID NO: 266933 - DNA, 448 bp, Glycine max
tataaaactaagcttaagagaattccttcttttcttattatttctttttttgatttaaactcaacagatccatcttgtgttcttgtaactttccaaataatgtagcaagagacatgttagataaatcccatgattcagtaatggttgttaccttaggttgtcattctctacttaaacatctcaatactttatttatgagatcttcattttgaaaaattttccctaaagatgcaagatgatttactatgtgtgtgaacctcttttgtatgtcttgtatactttcatttgcattcatcctaaatagttcatattcatgagttaatgtgtctatcctagatcttttaacactcgttgcggcttcatgtgttacttgtaatgtatcccacatttcttttgcaattttacaatatgagactctataatattcattcatgcctaatgcagaagt

SEQ ID NO: 266934 - DNA, 454 bp, Glycine max
  unsure (1)..(454): unsure at all n locations
cttaagncacctgcggcatgaagcttataagtgcgggtctggggactttgtatttggtcctatatacgaagatgatgctccaagtacattggatttggtacgaccatgccctcctgattccatctgggaaattggcgagtggaggaacgccccgacatttacgcaacgagcataatgtaaaactttacgattttaaaaactctatagttaggcctaagctttacagtttcttttgtaaaggctntgggtcttttgctttgaatatataatacaaggatctttcttcatctggtcctacgtctctacccattctcatccatttgcatgtttacttctttatttctgaaacgacggatccgatgaccagtcccccgaaggtactaatacctgtgacccgcctatcaacttcgagcaagaaacgaatcaaacggaagatgaagggaacgaggatgat

SEQ ID NO: 266935 - DNA, 440 bp, Glycine max
  unsure (1)..(440): unsure at all n locations
agcttcaaagaagactattgaagtgtggttattctttttacaaacttttggaggcaggagacaaagatgacagctgtgaaaggacaactagcagagtcattctgaggtagtcatgttgaggaacctttctgatgagcattttaaagtaaaatcagaatggtgatgttagctgaaaaaggatccatacttgaagtagatccttttgatgaagatcaactattatgtctttctgaagaagcagaactgcatcaattttaatacatcttcacaacacanagcatcctgaagtagattgcttcattaaatcaaagcgaaggtatagtttcttgtgttttagtgttctatcaaaagttagattgtgtaaagtctccaatcttccattctgatgatccacatcaatagttctcaaggaaaactccaacccttaacttgattgcatc

SEQ ID NO: 266936 - DNA, 259 bp, Glycine max
ggaatcaaaaagatttctctattggccaagccttttgtatcgcaaaaaataaaaatttgaaattattggggaatgacaaggatctttttacacttttatctatagggatagaaagatgaacgtgttactatgttcgcgtgagtgtactgttttgaaattctaaaacccttggttcattggaccaaactaattgcttggaatatttttacgtgacagagaaaaggcaggctgaaacttctcgcattagagagaaatatcc

SEQ ID NO: 266937 - DNA, 232 bp, Glycine max
aagcgcacaagccagacttatgagttcaaccatactgtaccataggcattaagaagacctctgactaaaaacaaaagaactactggagaaaggagacacgcttaagaaaataaaggtgaagatcaacatggggcgtatgagatggcaataacacaaaagataatataccgaggatttaccacgatggcaagtgcgataaatgacgagagggaaaaagaagatagatatcaag

SEQ ID NO: 266938 - DNA, 228 bp, Glycine max
acacccgggtccaccatcaatccctctcaagctctcacaactatccaagctaatcaccattcccacacggcaagctatctcatccaaacaaacatagtaaaggcagatactctgccaaacaccaaccaaaaatcacatatttttccactcatcaccccagcaacattcctttgaccaactgagttccgtcggacgactcaaagttctctggaagctaaaggcaaagcc

SEQ ID NO: 266939 - DNA, 408 bp, Glycine max
agcttatcaaggtgatacaatttcttgatatctgaggaataaaagaaaacccaatggaaaagctactcagagtttacaaattcaatgcactatatatttaccaaatgtcaaataacctataactataaagctaccttactcattgcgtctgaaacataacactttatcatatcctcatataaatcagctaatcgatgtatttctggtgcatcaggcgaatgttctaggaccaaataagcatattcacagaaagtgggagtttcaggagcaaagaatatagggtagtggagaaattttggaaattctgctgagagaaaaaacacacagcatagagagagaaaatgaagtacctaaatagcaaattgcctatgtcctcctgccacaactgtaacaaggaccacttttcca

SEQ ID NO: 266940 - DNA, 474 bp, Glycine max
  unsure (1)..(474): unsure at all n locations
cagcctcaatcctttttcactcatatgtgcaagacttttatgtcttatggntgaattattgacagcctcaagagcggccaccatatgctcaactgcaatcatgtaaagaagagacctcgcttcgttccacgagccacaatgagaaagccgtttgttaccttacaagctccatcttcaaaagtggtgtgatgttccttatcatccaactgccctataaataataaatttcttattaaggcaggaatatgtctgacaatgcgcaatgtccatagggatccactggagggcttgatgttgatatcacctcttacgacaatggcaagagaatttccatcttgcacgtaaactttttcaaatctttcagatacatagttagacaataaatctttagagggagtactgtggaacgacgcacctgagtccatgatccatgaatcaacaggactatccaaactgcaaataatgcatatcaag

SEQ ID NO: 266941 - DNA, 413 bp, Glycine max
  unsure (1)..(413): unsure at all n locations
agcttcaaataggcatcatntatccttttcttattgannacttcactaagtgggtggaatatttgttgcgatttgttgttgaatatttccaagggcttattaggattttcatgtttatgctattattgtaaaaaacaatcgcaacgttaataatatggatgaatttgatgtcgtcaccttttattctctcatgatcatatttttgcatgtttatttaactttcacgggaatatgaatgtacgttatttgtttgtttgctcatgtgacctgtgcttcagagttgattttcaagtatgcccaataaaaaaattgtgcattctacacactgtggtggggtgtcatgagcaacaagtaaaattgactaaacatttgattgactatatttcaaataaataaataataagcacagacat

SEQ ID NO: 266942 - DNA, 462 bp, Glycine max
tgcttgtacatttggaagcccgaatatcgtcccttttatggcagttgaataggttactggtacatgtcatacaatatcttcatcaattctcccaatggatcctctacagcacctgtattgcacctttcaacacttcccaccgactttggcacattagggtgtgaatcctatatggttaatgaaaataacaattacatttatgttatgaagcaggtattaacaatgtcaacttcaacaaaaacaagcagagggaaaatcaatttatttacattagagataggtttcacaagatgtgtcgatcatccaatgaatgtgttaacggcctccctggcatattgaatctctgacattggaaatggtactcgcgcgtcaccgtcgtataaagttacaacactaaccctcaccacatcatctgtgtaagggacattgtgtatcgcaacggtagtatcatatacctttccc

SEQ ID NO: 266943 - DNA, 355 bp, Glycine max
  unsure (1)..(355): unsure at all n locations
tgcggcagcaagcttagatatcaaanatatctattattgtatgtaancggccgcgtttcccctttatttccttagtacaaccctttcgcattacctcatattgtttttttctgcaccttcattcagtatcaaacttgactgtgactggaaaaagattgaagcatttggtggatcaaagacagtcatccacgtaatttcaaatgcaagtcgagactggatatctacactagttgtcgtttctgggttgcagccataaatgttctgcatcgaattaggcatgttatagcttcttgaagcttgtttgattatgtcacattgagaaatttggcactttccaaataaagaattgttattg

SEQ ID NO: 266944 - DNA, 454 bp, Glycine max
  unsure (1)..(454): unsure at all n locations
tcttagccaactggatctctcactagcagnngctagtgttattatctcagactccatagcgaactgagctaagatagtctgtttctttgacttccaagaaacagccccaccagctatgctaaatatatagccgctggttgctttggaatcatctgaaagagtgttccaatctacatcgctgtatccttcaagtacagcgggaaaccttttataatgtaatccaagatttatggttcttttaagttacctcattaccctttcaatagcgtgccagtgctccatactaggtctactggtgaacctgcataataatcccacaacataggctatgtcaggtctagtacaatcagtggcatacctaatgctgccaatgatacttgcgtactcagtatggcgataccttcacagtgttttacacagtttacacttgatcatatggtgtctagcacgctac

SEQ ID NO: 266945 - DNA, 263 bp, Glycine max
  unsure (1)..(263): unsure at all n locations
agcnacgccggaagctcaccctgttgcttttcacgaataccgaacacctccaaaagctctgctaggattgcattcttatagcctgtcatttcgatgcttaacatgcagcgctggttgaagtcaaatacatggaaggttactgaaagccgcatcgacggcacccaggcttggcacaattacaaattctcagtatgaatcaactagacctttatcttaaaacttctatctcttctgaaaagtctacctaatatactcccttctcc

SEQ ID NO: 266946 - DNA, 311 bp, Glycine max
tcatctaaccggtcatacatatgaaccagcgcggtatatttctaggcataaccaccactctgacgcaggtcgcgaaaagcccttaaatgcaccacatgaacatatgttgcactcttgatggcgaaaagagtgcaaccgaccaggtgcagcaaataaacacgaactgcgacaatacatcgccgtgccttgcatcccatctcataaatgcctcgaacccatcctagaccgacatatgccccgtgagaacgagatgtctcggctctagcctcctcagcagacacactaagcaactctgtcaacaaaaaaatcgc

SEQ ID NO: 266947 - DNA, 428 bp, Glycine max
  unsure (1)..(428): unsure at all n locations
agcttatggaattcatcccaatcctgattgtttatgctgacttgctgccgtccttgattaccaaccaaatggcagtggtgaaccctgggaagatctaccaatctccctttcctcgatggtacaaccccaacacaacctgtgcttatcatggaggtgtcccaaggcattcaatagaacaatgcgtggctttcaaacacaaggtccgaagtttgattgatgcaaggtggttgacattccaagaggacaacctaaatgtgaggatgaatcctcttgccagtcatgggggatcggcggttaatgcagtggaggaatgtggacctcaggggctgaaacggatggaagatgtgttaacctctaggaggttcatattggaggcgttgtgcgaagcaggcatgattcgccttgatggnggcaagggagatgcttgt

SEQ ID NO: 266948 - DNA, 432 bp, Glycine max
acactataaaactcagcttcctctggccattctgcgaagcaatatttttaatgtttttttattgggacattactcttaaagcaaaaatggcatataacctcctcccataaatacaaacatcaatgttaatttagagcaagcttatgcgcctattttcttacaaacggtctctttgaccatacattttaccgaaaaaatgcacccatatacaatcaaggcagcttcgttacctaaattatttacacgtacctccaacgcgtatatgttacttacatcacacacatattcttggctaaactcacatacatgcatactcaagcattttggggcaccaaacattgcacatgtgcacatcttggcatttctaatacctacatacgcatacttcatgatgaatcttgactatctacaccataacgtgctacattgcat

SEQ ID NO: 266949 - DNA, 422 bp, Glycine max
  unsure (1)..(422): unsure at all n locations
agcttgagtattggctgctgcgccgagtgtaagactacgagttgtgttagggctgggagcaagactgcgaggtcactaaccatagaacttagacaccgctttttgtccaaacaatatataaactcagtattagggacattagacctcactcattcaaacaagcggcttatatcacctccgtgtgttatatatacaacatttttggaaacgcattatattctacgctatatattgaaaatttaggcattgttccaatagaattcaattcattaaaatacacccagtataacttttttttacatcatataatcataaaatgcagaataaaatgcagtgtttgattaactttcacatgcagaactgcagaaaccaaaatcaaaagctaaaacaatataataaatgaatntcaatcgcaacacatc

SEQ ID NO: 266950 - DNA, 254 bp, Glycine max
cattttttgatccccaccaaaataaaatctgcatcatttaaatctcattctctacagtggctggaagcaaagggatactcatgccatatgaagggatttcctaattagaactttctctttactagctttggaaagatactttctctagtagtgattgatgcatttcaaaaattcgatcctttatacaactgaaaattgctttatttcatttgcctatgatagatgggaggcctaagtatttttataccctatga

SEQ ID NO: 266951 - DNA, 435 bp, Glycine max
agcttagctttcaaccaaaaaaacaacactattttattttgtgaggatgcaaaacatactgaaaattttgcaaggataaattccgaacattttgatatttataagaacaaaaaatatatcttagccttgtttttattgttaaaaaaaaaaaagagaaatgctactaacattttctttaacacactccttcatacacactttctcttatgtgttaaaatgtatttagttgaagaacaagttccacaaaatcttgaacctaccaagtgtgatggttgggattggtatgagtgggatcatttgccacaccctttggttgggcctcttgagaaaatggtcaaaggagctttcgacccatttccaatttgattctaataattggtatgattttttttgtgaggattcttggataatcgtacgtttggggttaggttaata

SEQ ID NO: 266952 - DNA, 407 bp, Glycine max
tggacaatccgacctagtttctgatgtgtgccactattttcgacactatcctactttttctttccctttctctctctctctctctcaaatccaacgatcctagcctctcttccttctctttctctacccttcgcagtctctatttctactccgaacccttcttgcccctgccccctcctctcacctccatgacaacctcgatgacaagtggttcgccttcccctctttctctctccctccaaatctaggactccaacaatgacttcctcctcatcaagtcggtccttccacctcctctgttggctcaaccctgacactgtgcaccactgtctcttcctccgatggatgcctctacatcgacaaccacatttgcgagggtgtacggtggaggctttgctagggtggac

SEQ ID NO: 266953 - DNA, 438 bp, Glycine max
agctttatccaactaaaacatggaaagaattctgttgttattggcaccgaagatttctcaaacattatcatccctatcggcgattgaaaagagccttccatggaagtcaagtaaatgaaagcgtgcccagcccattagctggcaaagaagtttatgatcgggtaaaggatatcgtaactatgtttgggaagacacaaagaaaaccatcatctgattcaaacatatggaagaaaaggtcaatattctttgatcttccatactgggccaatcttgatgttagacattgtatagacatcatgcatgtggagaaaaatgtttgtgattctttaattggcaccctcattaacatcaaaggcaagacaaaggatggtttgaagtgtcgtgaaaaccggttgcatcctatctcaaaaggtccacaaatgtatttcccccaacatg

SEQ ID NO: 266954 - DNA, 421 bp, Glycine max
tcaatacaagtcacaggagtgtgtatttatgggccacttctactcacataagggctataaatgtttagcttctaatgggagaatttaaatctccaaagatgttttatttaatgagtcaaagtatcactaccctactattttcccttccaaacctgctactgtaactaagtctcaacctaataccattcctcttactatttttcccattgttccacctattgtgtctgactaatcatcttcactacctattgcttcatcatagtacttaggtgtttcattttgcaaagaatattggtactacttctaccatcatgctgccgttgtgtggggtttatttgggtcttacaaagcatattgggagtcaaacggtgtatgtgcaagtagattgaaaggttgttgttaaaatcttggttagatctaa

SEQ ID NO: 266955 - DNA, 370 bp, Glycine max
  unsure (1)..(370): unsure at all n locations
agcttcatgatgaatccagactgatccaattatgtttttgtatgattacaaagggaatgaccaaaagctcaaaggtcaagaatacttcatgatcaccaagatgatgatctccagaatcaaagaatgagttcaagatgttcaagattgaatcaagaacacttcaaggttccagaggaaatttggattcaagaatcaagaatcaagagtccaggttcaagcttccacgaatcaagatcaagattaaagtctaagattcaagaatcaagaatcaagagaagaattaatcaagataagtatgaaaaagttttttaaaaactgagtacacatggattnttctcaaacccttttaccaaagagtttttactctctg

SEQ ID NO: 266956 - DNA, 419 bp, Glycine max
acatgtgaattcattttgatcgacactcaatggatctgtctccctgtgaagattctctgcatccatcatggacaagttttttacaatagctacaattaaagcacaatagttaaacttcatcttcgaaatgaataaggtaaagtaatagggatcttgactattacatactctggtcaactatcgactcattggtttcgacaaccagaataagaacagaaatatccacgggaactttgagtgtgagttgttctttcgcggttggagggtgttgttcaatttcaagaatcaaaaaatggtcaagagtcatatccatgaccatttcttcaattattggctcttaaaatgacattgctttcgatggggaagactcgatatgactttgagcatcttattcctctacggcttctaccatgccaaca

SEQ ID NO: 266957 - DNA, 389 bp, Glycine max
  unsure (1)..(389): unsure at all n locations
gacttgtaggattcaatttgggcaaaatcggacgaggtcaagtgtgatttcgaaaatctgcactattatgcagaattttgctattgaaatgtgcagcagaattttggctctgtgcaaaaaaggaagtgtatttgctggttgtggaaagagaatacagattgtgttttggacgttttctggcagatcccaacggtcacaatgtagatttatgtacttgggaccttcattaaaatttttgagtcgatccaacggttaacgaattggaaaaaagagaatgttactggggtatttgagtaaggaaagcggcggtgttggtttgtggttttgggcagagatttctgcctttgctctgttntcttggntttgatagctcatgaagtttggatgtt

SEQ ID NO: 266958 - DNA, 459 bp, Glycine max
actcagcttgagatgaggaagtgttgaacggtgaaacttcctgcttttattgttgaccacagagtggtacctggagatatgtcgtgggggtcatgagacctttgggacgtcaggtggggtgctattgcccaaaaccaagcttgaccaataccgacccaacccgggcatattcggtcagtgagaacctgtgatgtacctaaacaggcgagctcctggcagtcaacagataaaaggaacaaagaccacaaagcaaggaggctttgtggggctggccagctgtgaattttgtgtaatatgtggattatggcctctggtaatcgaatacacaagggtgggtaatccattaccagcgctcacaatcgaagacaggaggctaagatggtctctggtaatcgattaccaaagggtgtaatcgattaccacgcttaaaaacgaagtcaggaaactttaggagcctct

SEQ ID NO: 266959 - DNA, 235 bp, Glycine max
agggagggaagaaagaaaggaaattttttggagaaaaaaggggggggggagaaagaaaataaaaataaaaagaagggggaagaagaatgaaaaaaaggggaaaagagggggagaagaaaaggaaaagggaaaaagacaaggagaggaaagagaaaaaaaaaaagaagggaggagggaatgaaaaagaggaggaggaaaagaagggggaggagaaaaaaagaaagaagggagggaa

SEQ ID NO: 266960 - DNA, 431 bp, Glycine max
  unsure (1)..(431): unsure at all n locations
agcttcaacctccagaaggctctatagttgttntttcattccttccggagagtgcacctattcttagacaattgtcactgattgagcatttgtaagttaatatttttctattcttcttatctcaattgaaatctctttgaaccttattttctcaccttaattaactcagttttggtcttaggcaaatgattgagcttaattgagaattgtagctaaatttcatattttgtgcttacttgacctatcttctttggtcaattctgcaatctaaagggtcaaaataagctttgaagtcagaacctctgcccttgaataattgggttgcgagtttggactttgttttgtgtaattaatttaattaggaagattagctgggcctaatggaggcncatccattccttatgaagagccactgtatataatagtggtag

SEQ ID NO: 266961 - DNA, 143 bp, Glycine max
ccgcagacaggaagaaaccaaggcccgacactaaatcgccgagaacaccacacaaaccgaacccgctaccccccaaaatacccagcgaaaaggaaagaggagaaaaggaaaacaggccgaaaccatcgagacgatagccggcc

SEQ ID NO: 266962 - DNA, 417 bp, Glycine max
  unsure (1)..(417): unsure at all n locations
agcttaaccgggttcaggagaggagcgtgtttgaatctngaaaacaagggatattctactggtgcctttntttcttctttaaaattataataaacaatcaatttcggtccttacaattcctagaataataaaactatttaactaatccctgaaatattttatattcgatactttagtccttcagatggtgttttctttagtaaattgagggaccgaggttattgcacttttttcttcttcttcaatattactctctctgctagtaattcctagagaaataaactatttgactaattctactacccctctcgtaataatttcttgagaaattaaattatttaaataattcctgaaatattgaatattcatcaatttcatcaatcatcacttttgtcctaagtgatgctgaatatttag

SEQ ID NO: 266963 - DNA, 436 bp, Glycine max
  unsure (1)..(436): unsure at all n locations
gacctatanaaactcaagcttctacttatgtggcagggcacgcttccttcactatcttgtctacaacgcgagcaatgaccacgactcttgcttcacgcgacgctacttttcatatgcgcctgagtgggcttatatcctaaaccatacttccaggatttcctttggcatttatcaggctaggtaagccgacattgcccttgcctaaaaccatttcgggttcggaaccattccctaacataactcgggccatcattactgctgcatccgacagacaaggctgcccaaagaaagaatccccggaggaaaagctgccacccctatagactggaaagcgggttctaacgaatcttctgcggcttccacataaggcataaaggatgggcagctcaccacgaagtcttcctcggctaacaccaagaccaagtgcgcctccact

SEQ ID NO: 266964 - DNA, 424 bp, Glycine max
  unsure (1)..(424): unsure at all n locations
agcttgcctaaatgaacctaccttgctgtttcttgcatattcgnaanaaataatgggaataaaacaacaattgaatgtgcactaaattataatttcagtcagataaagaaaaaaaaggacgtattggatctcttaaaatgtattagcctaaactagtagttaattctataagtttggattttcttaaacttccaagtgtgtatattggattggtggtgagttgaagaccacaattttcagagacaacaaatagttgtttttttcggtaagcttaccatattatgcattcatcgtgattttttaccaccaaaccagacaccttanaaagtaatgtttacaaacatgttagattacgaggctaagtgagcactaatgtaaacctatataaaatcatttcagctacatanaatgtggaactatatgc

SEQ ID NO: 266965 - DNA, 427 bp, Glycine max
agcttgtgaaggaaatgatgatgggagaatatggaatggaaatgacacaaaaatccttagagcggaagaagaaagcaatacgagctactgatgttggaggaacatcctacaatgatttctaaaagctaataaaggaggtttttcattacagcgttctttaagtccttattctataatcaggcgtattaaggtttattagttatataaaaatacctttcttaagttataatgggatgacaaacatgatgcaattggtttggcctaattactgttagattaaaatgttttcatttatatttatcatgtcacgtgtactaaaattttaatattggaactctctgggaagcatccatgattgttaaaaaaaaatatatgatttactttattacgtttatatatgtcgagtttaagactcaaaaagacgaac

SEQ ID NO: 266966 - DNA, 403 bp, Glycine max
  unsure (1)..(403): unsure at all n locations
ttaatacacttcttacaagatagcttgtttcttaccttttgtgttnggtacacaaaattggaagcttcccgtatccgtacttggaaggatctgattactgccttcctaaggcaatatcaatataactccgatatggctcccgatcgcactcaactgcagaaaatgttcaagaaagagggcgaaacctttaaagaatacgcccagcgatggagagatttggcggcacaagtagctcctcccatggttgagagagagatgatcaccatgatggtagacactctgccagtgttctactatgagaagctagtaggttatatgccgtccagcttcacggacctagtgttcgccggcgaaagaatcgaggtatggttgaaaagaggaaagtacgattacatttcctcca

SEQ ID NO: 266967 - DNA, 416 bp, Glycine max
agcttcccttttaattactagcggctctttatactaccagacacagtcggacacccgagttaaaagttatggttgtttgaatatgcttagagcttctattttgaattacgagcgtctcgatatattacgggactcaatcggacatccgagtaaaaagttattgtcgtttgaatttgctcagagcttctgttttcaattacgagcgtctcgatatattacgggactcaatcggacatccgagtaaaaagttattgtcgtttgatttttctcacagcttcagttttcaatttcgagcgtctcgatatattacaggacacaatcggacatccgagtcaaaagttattgtcgtttgaatttgctcagagcttctgttttcattacgagcgtctcaattactacgggacattatccacatc

SEQ ID NO: 266968 - DNA, 280 bp, Glycine max
  unsure (1)..(280): unsure at all n locations
ttattggacaaatcacgacatatatgttataaatatacttctttggagncctattgctaatgtcgctagttaatttactaagtaatcttctgagattgccaacttccgtggaaaccagaattagccttgaaaactgacttaattaatttaaaaatatgtaaacggctgttaatctatcaatggaatttaaaagataacaacaacaccattgtcatccttaatttcttggaattttaataactttttaaatgagccaaaatttagaaaaataatcctattt

SEQ ID NO: 266969 - DNA, 434 bp, Glycine max
  unsure (1)..(434): unsure at all n locations
agnctcatggtgaatcaaaggtgattcatttgtgttttgatgatttcaaaagatgatgacaaggtgatgagaaaaagctcataaatcaatcaaagaacaactcatgtgaatcaaagatcaatcaaagaatgaagagaagactcaatccagataagtattaaaatttttttcaaaactttgaatagcacatgagtctttgacaaaaccttttaccaaagagtttttactctctggtaattgattaccagattggtgtaatcgattaccagtagcaaaattattttgaaaaagctttcaaattgaatttacaacgttccaattaatttcaaaaaggtgtaatcgattacaatgttttggcaatcaattaccagtgcctttgaacgttgaaattcatattcagatgtgaagagtcacattctttcacacaaagcttt

SEQ ID NO: 266970 - DNA, 376 bp, Glycine max
ctcacgcccgcccggagaaggagacaccgaggaaatgctcaccatctcattataatgtaaagcggtgtctaaatactcctctgcggcaaccacataacgcataaaggatgggcagctcaccaagatgactacctcgcactgatacgacgaccaaatgcccttccactacgaattccaacattcggtggagagttgacggaacaactcctactgaatggatccacgggcgccccaacagatagctagatggggggataaaatccataaataggaaggaaacacgacaggtgtgagggcctatctgtactgcgagatcgaacactccactaaccactcggcgggcgccgcccaaggcacgaaccaccattgaactcgg

SEQ ID NO: 266971 - DNA, 309 bp, Glycine max
tccactactttgacctccacagaaacacatggaggaaatcaccataaaggacctattgaagctcaaaatccagcctccatagaagcccacaagcaagctccatcaatagccatggatcattatctttgctaagaaaaccttgaataattacctaagtttgtgacctaagtctatcatgtaaacattattgactctaaaccctataagcattatatttgcatcatgtccatgttgaatgacacatccttgacaatcaaatgataccagataaccttatcacacaatagactaacactaaagcaggtgcgc

SEQ ID NO: 266972 - DNA, 419 bp, Glycine max
gtcccaagctttagtgttcctctgcaacaaactgagatgattgaagacaagagcttattccaaacctttcatgttcctcctccacgaactgagaaatattgcatcacgggagtttgtgcgactagttttgacaatcttaatgttgaattttatacaacctctccccttgtaaactaaaagatataaattatagaattccatacactatgctgatgaaattcactcaacctttcatctttcgtgatccataataaacttctaaaaacaaattagacattacagaacgtgaataattaataatggacaaacttacctaagttaaagagaaatatcccttaacgagaaacatcatgacaagaatcctttgtagaattcataacctacattagagccctttcacacccagttaaaatcactaa

SEQ ID NO: 266973 - DNA, 134 bp, Glycine max
agaagaagaggagccgcacaggcgcgcaaaccacacgagtccaatggcccaaacacaccgacaaaaagacccgcaagccagaaggcgactaacccagaaatactaacgcgggcgacgagcacgagcacaaacaa

SEQ ID NO: 266974 - DNA, 417 bp, Glycine max
  unsure (1)..(417): unsure at all n locations
tgcaagctgacgccgaaacgncacctttacttcntgccttatcgtagctacccccatgaaccagagacaatgccgcaggaaaatgcgaaaaaccagaaacaaagctctctgaaaatgaagggcaagaagccttccccggaaagagatatgacatttttaagaaagaaacgtgatacggacaattctggcatttcaaaagtttggtgggtgcaccagcaaaaatgctgggtgcacctagcaacactctagatgaaaatgtaaagagttggatcatacacatgccatgcctaaaggaaaaaagaattcacataggcggggaaaaaacaagtcggctaatgtatattataattatttaaaaaaaaatggcgacgacattaagggatgcatcccggaataaattattggaaaaatgataaa

SEQ ID NO: 266975 - DNA, 333 bp, Glycine max
agcttgtgctcactgtggagatttatgtctctctcctgtgaaggacgaggctgcggctagaatatgcttgccattgaacaagctccagattctattgaatcaccgagccgtgcactctcataggtacaaccttgagaggtctgggtttggtgtgttagagggtgacaagagaaatgagtcaaaaatctcaagtaggattcacctaagggtgtgtcttgaaggtgcttatcatgtcctggatgagtccacaatgtatattattgacacatggccaactgctaggcaactttggaagcaaccaattggaatttttgaagtggggatattgagtgc

SEQ ID NO: 266976 - DNA, 320 bp, Glycine max
ctcctctgagagaccatcttgaccgaccggtcttaattactggtccacaacaatcattatctaataaccaaacaaaccaggctcacaaaacccaacgcctagagttcacgctcataaagtctcacgacgacggataaatatcacactctgacgatagcacatgaaagtaaaacacaactaattcacaaatgcacaatatatgtacaaagcgtgctccctctgacgcaggactcaatatctaagagcactcatggaaatctcccataaaacaaccactaaaatcattctcaagagtcgcattccatactctagcctatgag

SEQ ID NO: 266977 - DNA, 329 bp, Glycine max
  unsure (1)..(329): unsure at all n locations
gacctctaatcgaccgcggcagcagcttgaatcgacaagggtcaatgttatcatgaatgcatgaatgaaantgatccaacgntgacatcttcctcttcgcttttgtaatacaaaagatgaagcacaacgtctaactgaaaaattgttatcttgcaccgaatgtaatgcattcacatactcccagaagacggatcgtgcttccttgaactttatagcatggtgattcggatcttttaagccccttttgtctgacctttttaggaggaacacacatataacttagatcagggtaggcaattccccaagaatactatttaaagcaccttgcc

SEQ ID NO: 266978 - DNA, 444 bp, Glycine max
  unsure (1)..(444): unsure at all n locations
actcagctttactnggtcacaatgatgcgtccttgctatgtatttatttgtattcgaatccaggtcacatgaacgttttcttattaattattatgaagcatgtattgtatgattctgattaaatgttacatgttcaactatatcggttccgtattcaaaggactaacaacactttcaatgttgtgatactcaagcgcttgatcatgagcaaggataacaagcctctaatttctttgtcaaggttaattaagtattcaaaggggaaactatgtctcactctatctttatatatcccaacactacttgctaatattcttaaaagttgattaatcgtagcttactttgatctttattaatgtataacgataaaactgatgtagtacataagatggcaattgatgatataagagtatataaacgtcacacatcgaacattatagcact

SEQ ID NO: 266979 - DNA, 419 bp, Glycine max
  unsure (1)..(419): unsure at all n locations
ggatccttaagtcacctgcggcatgcagcttttctttgacaagcaatgcttgttctgtttctcacccacaggaaatgccacattcttcttcaccagctcattgagaggtgaagcaattgtatagaaattaggaacgaatcctctatagaagcttgctaacccatggaagctcctaatatctcccacactttttagggtgggccattcttggatggtcttgattttctcagggtccacttggaccccatttctaccaactacagaccccatttctaccaactacaaaccctaagaaaactatattatctacacaaaaagtacacttctctatatttgcatagagggtggtntttcgaaggactaaaagaactttcctaagatgtcctaagtgaacatctaggctcctacttgacactaaa

SEQ ID NO: 266980 - DNA, 162 bp, Glycine max
aggaccacagacgaagaagctactctcatacgagtatcacttgaaggaggtttcactgcatgaaaagtggggcgtgctctggtattcattgcggctcgttcaactttctctttctcgcgaaacgcgccagagtgaagaaaagagcaatatctgcttcacaaa

SEQ ID NO: 266981 - DNA, 421 bp, Glycine max
  unsure (1)..(421): unsure at all n locations
cagctntagtcctgtcagattaagctttttctgagttgattctggtctgcacaatgaggatgaaggttgcactcttcctcagggatcgtagatataggaatcagattagggcgttttcgggttcttaattttaggatataaaaagtaatagggttattctatctactgattattagtgtcttcagttaatgacatttccaataaaaacaaattatgtgcagacttttgaggttagtggaaatctgacatccaagccctctagcaatcctcaataaatagcttgtactgatactaattacacaaaagtggaattagtggcaaattcagagagtctaaagactaatgtacaacaagttgttcctgacattgatgcaatccaaaataccgatattaaaatccatgtctttcaagcgaacataaa

SEQ ID NO: 266982 - DNA, 457 bp, Glycine max
  unsure (1)..(457): unsure at all n locations
cgcttatatttgccctgcatgtatatatttcttgccatatctganaatccaacaaataagcatttaggtcaaatcgtgaaaattggatctgccattttgaccataaaaagaaagaattcatgttacaagaaaactgggatgttaaggatcatgacataacgttttccataaattgagtgagagtgagagagaaaatgaataagataaaactgatattattgcttataaagaaaaaaacccatagagttagatacaacataggtatttaaagagttttgacttgagaaactaaccacaactaactctaactacctctaactaacttctaacagaatgtaaactaactctaactacctctaactaactttaacagaatgtaactacttgtgcgcaatctagtgaagactattagaccttacaacatatacactgttgtctatatgaacaaaattgttac

SEQ ID NO: 266983 - DNA, 419 bp, Glycine max
agcttattgggtgaagaatagcttataatttgtggcaatttcatataaaactatatttcgaagtggatcagttagtcattagaaggagaattaaatagtcacacacaaattcactaggtcttttttgcacaaataaaaacttgcttatgatattttattttcaagttattgtatggaaattaaaaatttaattaggagctaggcttttcatcttaattactcagataaaatagataatccaacaaaaaatctctaattaagttaaacaaatgttatgttgcttcggaaaattgctcctggaaataacaaaacctattattacatattctggtttttgtttcaataaaaataaagtgtagcgctcgaaggtaaaatagttgtaaaaaaaataatataagatcagagttgtacttatataa

SEQ ID NO: 266984 - DNA, 348 bp, Glycine max
gcatacggaccttaaaactcagctttcatatcttgtcaacctctaatcttccatgttgtatgaaaacatgagaggcgttaaggagttctggcaggctatgtggtgggctacggtggtctatattatcttaaggcgaccttgtgagaactgatgctaagttatttggacttggaaagaggaatataaaatgtagtgccatactagcgtaaaatccccttttttgagatgttgaggggaagatctacctgggttacagtaagcataacttattttgactcgtttgaagcttcacatcttgttgatatagcatgacccaccaactttgaacacatgacacgtcctgcactg

SEQ ID NO: 266985 - DNA, 349 bp, Glycine max
  unsure (1)..(349): unsure at all n locations
agctntcaatcctttctacttccattaattttctgtataaaatttaatttcaacatctgatacgaagggtctatgctttgttcattctttaagcccaaatagctttcacatgaggggtcatcttagatagaaatctatcatgcatcctcacataatagtttaagctagctattaggagagttggtccttcacatatgttaattgagttatttgtgtattagatcgatatggctaggaataaagttataatcccaatatcccaatctagtccaattgaaatatctatcaaaataaagaacaattaagagagggttcgctagaaaagagagagaattaacatcactatctc

SEQ ID NO: 266986 - DNA, 433 bp, Glycine max
ccttgaaaacttgtgctatttattcttttcattcccttctccctttgccaaaaagaattcgccaaggactaaccgcctgaattttttatgcgtctctcttctcccttttccaaaagaacaaaggactaaccgcctgaattcttttgtgtctctcttctcccttgtcaaagaattcaaaatgacacagtctgagaattcttttgattcttccctttcccatatacgaaagatttcaaaggactaaccggctgagaattcttttgtatccccattcacaaagtttcaaaggtttaaccacctgagatctttgtcttaacacattggagggtacatcctttgtggtacaagtagagggtacatctacttgggtttgactgagaataagagaaggaacatctcttgtggatcagttctagtggagggtacattcact

SEQ ID NO: 266987 - DNA, 414 bp, Glycine max
caaccatctcactaagagttctcttatgagggggaagttgagcaatggtctcagtatgaatacaaacagcccgaacgcacaaaaacagaatattcagaatcaccacctcaaaatgctcatgacgctcaaaatggtcaaaaagcacacaatgaccaagatgcacactatgcctaactaatctatgaaaggatctatctatttcaggatcaaagggtaataaaccacctggattgcccctggtcatgcactatatgcaacacatcatgtgtctctcagacaagcaccacgggagggttaaaactacaactatcagcaaacaatatctagatgagatgaaatcttgcgagccacaccctataatcatgactagatagctcaacaaattcaaagacaaattcaaagctaactatgaaa

SEQ ID NO: 266988 - DNA, 463 bp, Glycine max
atactcaagctgtggattatggggtacccatcacatgtgtgactatgttgtttactgtcgatggtgcacaacaaggtatccacatccacaaattgcgcataaacccaccatcccctgttggccaccttcaactgagctcacgtactcccacgtagcccatatcatcgtttctctcaacaccgggtccccatcaatcctcccaagcttcccaacatccaattaatttaacatccaatcatcatggacttacataaccaagcaaaacagggcaaaggcagaaaactctgcccaaaacacaactcaaaatcacagcttttctcacttatagaccccagttacaaattcttcttttcaatttcttaaccgttggatcgactcgaaaatttactggaagtctctagtacataagcctacattatgaccgttggatctactgtaaacatccagacttattctgactact

SEQ ID NO: 266989 - DNA, 157 bp, Glycine max
aaaaagggggagacaaaaaaggaaaaagtaaagccaccaaacccaaagggagaggcatccaaacttaagcaacagcatttccaaaaaaataaaaccaacccatcgcgaagattgtctcacattcaaaaacttgcaacacaaaacccacaaaagaaaa

SEQ ID NO: 266990 - DNA, 226 bp, Glycine max
cgccaccggggcgaggccaagacatcctaacaagaacttaccaaagaaacaagcgaggtcacagcctaacccaaactaccctcggccgccattggagctaaccaagctggatctgccgccgaagatcttagccaaacccaatccgggctcgtaggcgaaccccaacaacaccgggccaccatcataggcgtatcaaacaagcaaggctgcccacaagggaatctac

SEQ ID NO: 266991 - DNA, 393 bp, Glycine max
cgcagccaaattgaatcaaatttcatagttgttgtaaatcagattgggccactggtaatcaattacatcctctggtaatcaattaaccagagagtaaatatacttgacacagactctttaacttatatatcttggccaaaccttttgctacttcaattggaattcccttcctatataatatacttcttctaagactctagaggcggtcttgatcttccatcttgaatatctgtgattacttgtgcttgaatagagctttgagaagcatgtaaccctctggcatcatcaaaacatatagatagaacctttgtctacgaatctcccctttttgatgatgacaatccctgaaatcaagacaagctctatacaataagatatcacgttcacacaacc

SEQ ID NO: 266992 - DNA, 427 bp, Glycine max
  unsure (1)..(427): unsure at all n locations
agctntaccgganagctgggcataataatttttttnttttgcagacattgtgcaatttttttcttatttttcaccaacgccaggcaataattgttttaatacgatcaagctaattttccttgttgattacgctcaatgataggtttaccatcgaggtcgcctttggtatttcgtgggaactcaaccgccgttgtgtttcggtcgacattggcctgcgctggtaaaagaggcaaagaaaaatatagccgactttggcagcaaaaacaaatccctcgacaaacttggataaaaaacaactctagccgacatcggccaagaaagattaactgtcgctgtatcccaaaaagaatcaccggatgaagactatcgaaaatttccttatcgacatcatccgaaaaatattctgcgattgaacagaaaagcaata

SEQ ID NO: 266993 - DNA, 446 bp, Glycine max
tctcagaacattcctcatgccttctatctgccgcactctatacattaagtcataggcactacgagctgagtaatgaccctctgaatctgcataccattcccaactatctgaaatctgttgctggaatttaaattctgcaacatctttgagaaaattagctgctgaggtaatttcactgtctaacaaggctcttctccacgcaaagtttcactcccactccctatctcgaaatattcccatggatctaatgagctggtgctgctgcattgaaattgaatacagcctatggtacttcactgcatttgagaaaataactgtgtttcgcatctggcaaatggaccagactacaaccatccaccaacattgtcatctcttgacccttatgccatccacctgaacatatgagtgttgaatgagatgttgtctcgaagttgatggaaacacac

SEQ ID NO: 266994 - DNA, 406 bp, Glycine max
ctgaagaggacgccggactggacatttacaaacaaagaacgggggagcacgaaactgaaggacacaaagacgcggacaaacgcaactttcggaatgcagcacataagacattcattcaccacaagtacaacaagcgtacaaatgcctctatacataaacaacgcacccttccttgagaagctgtctagaaaaaaataccttgagaaacaagagctaagctaacacacaccgcctataactaagctcacctccttgagaagctcccttaagaagattcctaaagaagctagagcttagctccacatacctttctaataggcaagctcactcccctgagatgaagagccacacaccccccaaatagctcaggctcccccctgacgaacaactgaaaattccaaaaaaa

SEQ ID NO: 266995 - DNA, 376 bp, Glycine max
agcttgagactagcgctaagcctcatttttttgctctcactaagcgcgagggtggcactaagcgcaagcgtccgatttcagagcctattcaaagcctgtcttgtgtaaaattagggaacaactttctacagcttttacagcttctacagacggccaaggcacatacttccagagcagccacaggcctatttgggaaaagagccctagaagtagaaaaaaggagtagcttgggcattgaagcctaggttttttcatttgagatagattattgagtagagagtaagtgtgagatgctgagaagaagaggaggaatctcccttcttgtgtaaggaactatcattctttgctcttagactcatttattgatagggtttct

SEQ ID NO: 266996 - DNA, 470 bp, Glycine max
  unsure (1)..(470): unsure at all n locations
ttacggacctatgaaactcagcttggcttaacaaaattagggtttgtgtcagggtttgtttttatgatgcatangaatggcacgaagttgtgctcgaaggcctcgtgccttgggtgaatcatggtggttgggttcctcgccaatgaagatgacatggatgtctctgatggttctttcatggccacgccgagtgaaaaatcatgacttattgagagagagggatagagaggggaaaaaataagaaagatagagttgtagatctttgattcaggaacaagtataggaagaagagagagatacaagcgcgttctcgtggagtttactgatagaacaatgaccaatgctcgactactatgaattgaacgagataagaaccttatgtgctagtgagaggatagtgttcttctttaagaatactgctgagacaaacctttgtgattccgggtctactcaacgagtttcatcaccca

SEQ ID NO: 266997 - DNA, 422 bp, Glycine max
agcttcatgatgaatcaagattgattcattgagttttgatgataacaaaaatgatgacaaacagctcaaaagtcaagaacacttcatgataacaaagatgatgatctcaggaatcaaagaatgagttcaaaattgaatcaagtacacttcaaggatcaagaggaaagttgaattcaagactcaagtttcaagattcaagttccaagaatcaagatcaagattcaagactcaagattcaagaatcaagagaagactcaatcaagataagtattaaaaagttttttcaaaaactgagtagcacatgaatttttctcaaaaccttttaccaaagagtttttactctctggtaatcgattaccagattattgtaatcgattaccagtagcaaaatggttttcaaaaaactttgaaactgaatttac

SEQ ID NO: 266998 - DNA, 411 bp, Glycine max
  unsure (1)..(411): unsure at all n locations
tctttgagaaaacttccttgggaagctagagcttatctttactctcctctcataactaagctcacctccttgagaagcttccttaagaagattcctaaaaaatctagagcttagctacacatacatctctaatagctaagctcacctccttgagatgagaagctagagcttagctactcacccccatgacaaaatacatgaaaataccaaaaaaacccctactacagagactactcanaatgccgttaaatacaaggctgaaaccctatgctactagaattggccaaatacaaggcccaaacgaaggagaaacctagttctaatattacgaagaatagcgggctcatacttaacccatgggctcaaatctaccctagggttatgaaaaccttgggcctcccttgatctttg

SEQ ID NO: 266999 - DNA, 408 bp, Glycine max
agcttgtatgagagaggtttgcaactggttggaagcctgaccctattactttctctgtgtggggaagatgtttggggaggctggggactatgatggcattaggtacgtgtttcaggagatggagtctggtggggtgcaccctaatttggttgtgtacaataccttgttggaggcaatgggaaaggctgggaagccggggtttgcgaggggcctgtttgaggaaatgatcgagtcagggattgtgccgaatgagaagactctgactgcggttattaagatatacggcaaggccaggtggtcgcgagatgcgttggagctgtggcagcggatgaaggaaaatggctggcctatggattttatcttgtataatactttgttgaatatgtgtgcggatgttggactggtgga

SEQ ID NO: 267000 - DNA, 393 bp, Glycine max
  unsure (1)..(393): unsure at all n locations
aaaaccttcttatatatgcactttgatacctgtttaatgtcaaatttaccagaatttcatatgtattttgtggcgtttatttggcatattatttaactttaggccttgtttttaatcacattagctttaaattcaatttttactttgtcttgggtagaaatttatattttagttatttttaatgaatttttgataagttttcaccaaaaatagaagaaagttctggaaggagaaattgtggaaattgaagataaaatctacaaaaatcaagaacaagatattnttcaaggataaatcaactacataaaaagataattacctgaattacttagagatattatttgtttgaatttcatgcgattatctccctaattaaacctaactacacttcta

SEQ ID NO: 267001 - DNA, 420 bp, Glycine max
  unsure (1)..(420): unsure at all n locations
agctttaatntcattcacaaatgaagggtttagactccaaaaaanaaaatttcttcacaaaggccaataagctatggtgtagcctttctttaacaatgctttatgacancttgaatgacccccttggaagccaatttgaacgtgccaagccataccacaaatgggtagttttgcttttcgcaaaactaccaaaaatgaaagggataagatttgccaaaaatgggttctatgctgtttaccaaaactagtaaatcttactttaatcacctaggttattgtgttaatatctctaggaatacatgtacccaaagcgatcctcacacagagttaaattacattggcgctcaatacatggagttaattggctactgatggaattttttactatacaggtttccaaatctctgtcaataactaaat

SEQ ID NO: 267002 - DNA, 431 bp, Glycine max
  unsure (1)..(431): unsure at all n locations
ttggatgatattggaagacgctaattaattgagaaatgtatttcatcgcgactgcgattggaagaaaattggtactagtgacatataacccctggtcattcttatcatcactccagttgctatttgcattaatttatttgtttcctactaaaaaccaccatcattaaaatatttaaatcctctttttaatcacatcatctgttaatttaataaacttgactaattggaaatacaatgggtcctttgggttcaatatacgaaatattgagttcattgttactactgtgtaggatacattcgcccttgtgtgaaactggattaatttgcataggtcgaannncnnnnccactatatatgaactaagaaataggtgactttaataacttctttccctttttcagtttgactatattaaaacatatggaaatcac

SEQ ID NO: 267003 - DNA, 404 bp, Glycine max
agctttgagcaaaatcaaacgacaatattttttgtattcgtgatgtccgaatgaaataccggattatattgagacacgtcgaaattgacaacggaggctctgagttaatccaaacgacaataactttttactctgatgtccgcttgtggcccgtagtatattcagacgctcggaattgaaaaccaaaagctcgtagcaaattcaaacgacaataacttttaactcagatttccgaatgaattccgtagtatatcgagacgctcgaaattcagaacaaaagctctgagcaaaatcagaagacaataactttttactcggatgtccgaatgattccccgaatatatcaagactctcgtaatcgaaatagaagatccggaccaatttaaggaaataccttttactca

SEQ ID NO: 267004 - DNA, 198 bp, Glycine max
aaagttatgacaatccgaattgctcaagaacatccatcgttcacattcgagcgctatcgaaaattaatgcgcctaaatcggacctccgagttaaaagttatgaccatttgaattactcgagagctaacgttggtcaattacgagcggctcgatatattacgcgcctcacatggacctccgcttaaaagtaatgtccat

SEQ ID NO: 267005 - DNA, 145 bp, Glycine max
caaaacacccaatacgaaagccacaaagaacacacacgaggaacacgagcccacaacaccccgaagcgacacacaagaactagagaaacggaaagcagagacaaaaagaagacaacactcagcggacccagggacgaaataacaa

SEQ ID NO: 267006 - DNA, 424 bp, Glycine max
atgctgcaacactacaaaaactttcttatctactttaaaaacaccacacagaacaatttgacctctccagcaccaggtatcaaacctcgcggtggaaggaatccatccccaacccttagatggtccgaatcctttcacaacagcaacaacaacaaccttattttcagaatgatgctagcacaagcagaccatacgttcctccaccaatccaacaactacaacaacaacaacaacaacagcaacagccctagaaacaacaaacagttgaggctcctccgtaacctttccttgaagaacttgtgaggcaaatgactatgcaaaacatgcgcgttcaacaagagaccagagcctccatttagagctcaactaaccagatgggacaattggctccacagtacaaccacaccagtcccataaaatgaca

SEQ ID NO: 267007 - DNA, 351 bp, Glycine max
  unsure (1)..(351): unsure at all n locations
tgggcacctattttgactttcctatgctgtctctacatacataaaacagccccaccatcccaattttgccaaatcatattcatatatcattggggcatttcaccgagcacttggtgagcgcatgtttggacataaattgcaagagaatgggagcaatgtggcatgccccattgcttcagaatacaacctaggcctaaggccttttcattcaaatccttaattcaagaaaacaagcaccaaagcaaaccanaactgcctcacaaatataagcatgttctcacaatttaaggcaccaaaagatgaagaaaacacatcaatgggaagcaaaaacattcaggaccgaatacttac

SEQ ID NO: 267008 - DNA, 245 bp, Glycine max
gagttctacgaaataaatcatcagctacaaaaagcataccaccaagttacgacgatgtcttatgcactgtgtgagccattctcaagtctggatccttcaatgcacttctaacaaatgctacctgaattaataaaattataagagaagcctaattatacatgttaaaagtttaattattgaccagagcatatgtttctactaagaactcgtatagtatttaaagggtaaccctatattcttactac

SEQ ID NO: 267009 - DNA, 429 bp, Glycine max
  unsure (1)..(429): unsure at all n locations
agctttgaggatatggcctatgccatgtatagatcgatcggggactgaaaaaaagcaaattattcatcctgcttggacgaatgagaaaactggggccaatgaagagggtgagaaagagggagaaacccatgttgtgactgccattcctatataggccaagtttcccaccaacccaacaatgtcattactcagccaataacaaacctcctccttacccaccgcccagttatccataaaggccatccctaaatcaaccacaaagcctgtctaccgcactttcaatgacgaagaccacctttagcacaaaccatataacaccaacaaataggaattttgcagcaaaaagcctgtanggttcaccccaaattccattgtcatatgctaaacttgatcccgattcactcaataattcaatggaagccatacccc

SEQ ID NO: 267010 - DNA, 438 bp, Glycine max
tcgagatcataaactaactggttgaagctcgactatactattaataacggcgcaaaatgacgaagaaactttcacggaatcgatcacggaaatgtctcacaagcaatacggaagcgtctcggcttggattatttccttccctctccttctcctcactaatattatgtgaattctgagctatcaaggaactcaacaccaatactcagcccccctcatgatattttataagaaaatgggggaggtggttgctgcccagctcgcccaggcgagctgggttgtttccacctgaagcaatccctttttctggaatattttagatgggcccaagtgctacgtacaccccctagtttgattagcgcacccccattcttgtgttattagtcgatttcttttcgaaacatcgggaaactttatggattacgtgacaacgagtgtcaa

SEQ ID NO: 267011 - DNA, 423 bp, Glycine max
  unsure (1)..(423): unsure at all n locations
agcttccatagggatatggagaaggaagttgaccaacttggtcagnnaggccgcctggagttcaacagtgagcattgagaagagggaactctttgaggagagagctgagacaatattgctgatgctcaaacatcagttcccaggacttccacaatctttacttgacattagcaaaatccaatacaacaaggtgaaagcaattaactttgcaactagtttgtttattcatgttacattaattattatataaaaaaggacattntgatattaccttattttggtttcatatcataggaaccaatctgtatctcttatttatgttcgatcgcgttttgattacaagtattttttttttccgaataaagtacattcaattcaaatactcgctatcaatattcatgatgtcttcaataaacagtccta

SEQ ID NO: 267012 - DNA, 446 bp, Glycine max
ttgagacgtaatctaactttcatggacgtgacgtgacttacaattatattgcatcattcgtatagaggtttggcgggttaagtgtaagtataccctaaaacaaggttgtccgggatctgggagattgtttatgctctgatatatagccataagagcaaaattatgggggacttaataatggtcctgtagtacaaattaagagatatttgccaaatctatgcacacaaaagaaatggccaccagcacgatggttacgaaggttggcatggaaacggaccttggttagtggttgtgttgcaactttattacgtgtagatgaaaggggcaagacatgcatgcgtgtgagcgtgtgagtgtgagcatgaccaatcgtcagaagcattatagatggagaaagaaggactgaagaaaaatatgagacgagggatatacacgtatatggaacc

SEQ ID NO: 267013 - DNA, 365 bp, Glycine max
  unsure (1)..(365): unsure at all n locations
agcttgngatggaagggaatgaagtcattttctattctgagcttcttgaggcctgtgagagtgtggggattgcaaggagtcctgaggaggctgcagcatttgccagggttcttgatgaggctggggtttgtctcctcttccgggacaaagtgtatttgcatcctgataaggtgatgtttttatattagaatcgtttatgtttatgttggcataaaaacatatcttgtgcttgtggggctcacgaaaagcgtgatcggatctaagtatattacagtatattacttaccaataatggttttaaattgcggtcgtagttgcgttgccttagttagacaacctctatattgtgggaaaatgttgctgat

SEQ ID NO: 267014 - DNA, 420 bp, Glycine max
  unsure (1)..(420): unsure at all n locations
agcttctacaaagggaatntaagtttcccatccttggaagaattgtcggtaatccattgcaacaggatggaaactgtgtccaggtactgtaaaaacagacaaagtgttaaatgttcaatttcagaggttctcagatgctatcccattagaaaatgatctcagctctaccatgcggaaggaatagcctaattgatccttcttccaagtaatttgaagcacgagatcttcattagcttacatatagcatccaatatttcaaagccgtcacagaactattgtcatttaaagcttcaactgcactgctttcaaccacatatccacataatcttttaacccaaatccactgctaggtcttagaaattgcttgaacaatgcctttttggaacatttcagtgctccacatgcctgaaactttttcat

SEQ ID NO: 267015 - DNA, 391 bp, Glycine max
  unsure (1)..(391): unsure at all n locations
gaaagaaccaaacccaacatattntactaatgagtgcgatgaagtataatgtgaggggaaattttatattccatagaaatgaaaaagttaaaaatcatatgaggaaaaaacgtataaacttgaaccttaaagttttgaggtaaagtggtgtattaaaatcacttatatgattgctctagaaacattagtggaaatcttcccgatatttattccccttaatttcataacagccaatataccctaattgggtatgatgcctcagctcatatgatttagactaaagaagaacttctgcttactacaaattaacttgcatttgcagacagaaatggaccaaaaggaataattcagcaaggtaggatatctatattatagttggatgggattacat

SEQ ID NO: 267016 - DNA, 391 bp, Glycine max
  unsure (1)..(391): unsure at all n locations
agctccgggctgcctgagatatttatcnatttgtctcatcgnnactaagagggtgtgctaatctttgttaggtgctccactaagatcgtcttctagttaaccaatgatattaaccattaagaaccctgtgctaatctttatttcttgtttttgtagaatattataccaagacaacttgtaaatagtttttttaggtttaatttcatattttatcactcaattttcatcatgttatgaatttcatcatccaagttctttttcagtgaattttattattctaagttcttaattttacacattttattatcatgttgttggtaataaaacgacactatcttatacaaaataatttttttagtgtcacattaacatcagtaaaatgaatgaaaaa

SEQ ID NO: 267017 - DNA, 387 bp, Glycine max
  unsure (1)..(387): unsure at all n locations
agcttagctacacacacctntctaatagctatattcacctccttgtgatgagaagctagagcttagctacacacccctcttaatagctaagctcacccatatgccaaaaaacatgaaaatgcaataaaggtgcctactacaaagactactcataatgccccgaaatacagggctaaaccctatactactagaatggccaaaatacaaggcccaaaccaaggaaaaacctattctaatatgtacaaagataagcgggcttatactttgcccatgggctcgaaatctaccctataacttatgagaaccctagggccttgccttggatctgtagcccaatgtacttggagtcttctatccaatgcccttgcggggaggattgatcacctg

SEQ ID NO: 267018 - DNA, 330 bp, Glycine max
  unsure (1)..(330): unsure at all n locations
ttctgcttttattttttgactctatnagagagacctcggagatatttcgcgtgggtcaggacaactcgggacgtaaggaggggtgctattgcccaataccaagcttgaacatcccgacccaacccggtcatagacggccactgagaacctgtgatgtacctaaacaggcgagctcctgacagttaacatataaaaggaacgaagaccacatagcaaggaggctcgtggtggctggccacttgtgaatatatgagcgaatatgggctgtggcctctggtaatcgattaccaatggtgggtaatcgattacacgctaaaaaaatgaatacag

SEQ ID NO: 267019 - DNA, 389 bp, Glycine max
  unsure (1)..(389): unsure at all n locations
agctntttacatggaaaactctcatgtgaatgatttataccatgggggacagccagtccatcaaattccactataattaaaataaatgtacagaaatatcttatacaagtgccattaactcttgattaacaggaaatatgataccaacccaattccaaagcattctaggtttaaaacatagaagaatctattagggatgaagagaacctagaaaattttgtatgacgtaaacgcagactaaatatcttccaccataggcaatgaatcaacaatccgactgttgaatttccagaaaaatagatgcagagaaactattgacaaatttcagctcaatccaacaattgacgaaataagacacagcaagcttctgtttggatgttttacataga

SEQ ID NO: 267020 - DNA, 462 bp, Glycine max
ctttgcttgcatattctgtgtaactctggtcttttgtctcaaccatcaaatcctcttccctctctgccttctgcttataatacaacaagcatactgctagaataaatagcagactcagaggtgctcgaagtgcaatgcagtatgttacaaacaaaagcatggttgatgaatatattggatgacggacccaacgattaggtccaaattgcacaacagcagttggctccaccacattttctgaatacttggcgagatacaatgttgcgttatactgcattagcagagttgtaatgattaaagcccagattccaagattgctccacccacccggtatgaggtgaagctcaagccctataaatgctgcaagccaatggccaaccatgactcctgtgctgaacaatatgcgagaccatgtcggcaagttcacatcccactttgggtcatggggcctagcaaaataat

SEQ ID NO: 267021 - DNA, 324 bp, Glycine max
gcaagcttcggtttcaatttcgagcgacccgttatatttttggactttcttcacacatccgagcaaaaagtagtcgtcgcgtgaattagctctgaagttcacaattccatttccagcgtcttcatagaataccggacttcatccgacgtccgagccaatagtcattggtcgttgaattaacttagaagcttcaaaattcaatttcgatcgtctcgatgtattacgagactcaatcagacatctgactaaaaaagttatctgcggttgaatttgctgagagcttcatctttcaatttcgaccgctttatgtattacggactcatt

SEQ ID NO: 267022 - DNA, 455 bp, Glycine max
cttccttcaaactaagcttgagctattaaacacatatgtttgctggattgtttttgttattctaatacatcgagacgctcgatattgaatgttgaagctctcatcatattctaacgacaataacctttttactcggatgtctgaatgagtcccgtaatacatcgagacgctcgaaattgaatgttgaagctctcagcaaattcaaacgacaataactttgtttactcagatgtctgattgagacccgtaatatatccagacaatcgaaattgaattctgaagctcttagctaattcaaacgacaataactttttgctcggatgtctgattgagtcccgtaatctattgagacgcttaaattgaattctgaccctacagctattcaaacacaataccgtttactcggatgcttattgagtcacgaatacatctagacgctcgaaatgattgttgag

SEQ ID NO: 267023 - DNA, 319 bp, Glycine max
ccatgagatatgtctcgggggacaagagaccatgtggacaacaagtggggtgctattgtccaaaaccaagcttgaccaatcccgacccaacccgggcataatcagtcaatgaaaacctgtgatgtacctaaacatgcgagctcctggcagtcatacagattaaaggaacaaagaccacacagcagtgacgctggtgtggtggctggccagctatgaatcttgagtgaaatatgggttatggcctctggtaatcgattaccaagggtgggtaatcgactaccagggcttaaaatgaagacaggagactaacatggactct

SEQ ID NO: 267024 - DNA, 240 bp, Glycine max
cgctcactgaagtttttaatctttccacccaaaagggtgggaataatttactttccaatggttttgaatcttagagttactcaatccactgctccgttcgataatttaaagaggttccttttatacttttttttacctagacaagatgctattatcaaaactctatggataagtgaaaaatatatgggacagtataattagaactccatatcttatactactggactagacattattaga

SEQ ID NO: 267025 - DNA, 299 bp, Glycine max
acacaaaaactaaaacataaacactaaataacacgaacattattctctatcttaagtaaactttcacatcatttaaattttttttataggaaaaggaaacatcattttttaggaaaatgttagaaacacacattggctatgatacacctggggacgaaaaaaaaataagagaaaaaaatattatattaataaatttatgatggatgtgaaaaataataatatatactagaggttaaactaaaaaattatgttcatatttatctttaccgaacaataagggggccatggccctagtcaac

SEQ ID NO: 267026 - DNA, 403 bp, Glycine max
ttatatttaacaccacataaactcgacctgattagactggacattgatcattattgcataccttacataccaacactcatcacagaaaaaacgtgaacaaatcgtgctcctttcttcaggattacatatcgcacggctgaagaaaagtttcagaacgtgcgtctgctataaattctaaacgtaaatgcacaactcaaatctacataaaacatccatcttgataatcggagataagcccatatggcgcactatataacgttacgtgaaagatatctatgaacgtggagggaatcataacactcaacgaattatatgattgcattatcaaacagtgggttctaccttgtggggtgactacacagtacagctagtaagaccgtgacgatcacacgtggtgcgctaa

SEQ ID NO: 267027 - DNA, 429 bp, Glycine max
  unsure (1)..(429): unsure at all n locations
agcttctacataagctgaaccattttattatttaacacaagttgagctctattcagaaaattaaaggtaatctcttttatcttagtgagagtgattctcctnaattcttgagtgattcaagaacaccctggctgtatcaaaggactttcacaanccttgtgtgttgccctcgccggaaagagagattatttccttcctttcatcttcaaccttgttctttcaaaccacaattccagaaaatccacttctgcccagaattatctcgtggccataactcccgttntacgcactcaaattaagtgattcctgagcttaaattgaatttcaagacaagacctttcacctcgttttggaatcatctcattttgagccctatagcttgagttattgccatttctatatttctgttccagccccacttaacctacg

SEQ ID NO: 267028 - DNA, 262 bp, Glycine max
agttgtttgctgcatcctcctttacactaatgagctgctcaggatggaatagatggcggtatgtcccagtcctaacctcatcaatcacagggggctcaagatctacaaaaatcgcacggtgcacgtgctttcctgccccagtttcactgaagaaggtgttgaaagcatcatcacctccaccaacggtcttgtcacttggcatctgcccatcatgctgaaacaacacatacaacatagatcacattagaatttgtagtttatc

SEQ ID NO: 267029 - DNA, 353 bp, Glycine max
  unsure (1)..(353): unsure at all n locations
agcttcttgatagcctaagngtggaccttctattgcaatcttccattcaccactttttttggagccccatgaatgtcattgcctagcgctgttcatgtgtgctccaccttcgagtctggagccccacgaatgtcattgcctagcgctgttaaccaattctccattctccacttttattcggagccccatgaatgtcattgcctagcgctgttcatgtgtcctccaccttcgagtctggagctatgcttcatgattgcctaagtgtggaccctctaaggcaatcctccattctccacttttattcagaaccccatgaatggcattgcctatcgcttgtcatgtgccctccacct

SEQ ID NO: 267030 - DNA, 423 bp, Glycine max
cttctatcttgtctcttagcgcactatatttcttcatcgcgtgaccatgattgcggtgataccgacaatgtattgagtaattggctttccgtggggtgttaactctctttggcatggtcaaaaatgtctatggccaaggcctagtccatgatatgggatttattggcagcaaagggagtgtattgagcataaagcggttctttgggtggacgatccctcctctcttcatcatgagccttgttagagccaggcttaacattatcttttttgatcgacacggcttccgcccacacctagttcctgtactcgacccaatcttccatctacatgtacttagttgctctctttcgtagctcatcgaggtcagatgctaatttatagccactctaccttaatgttgtatccaatgatgcatggctacta

SEQ ID NO: 267031 - DNA, 260 bp, Glycine max
tctactctacgagggcgtgatcaacatcctgctttcacattttggtctcagtcacaaatcgcactcgaatacaaatggcgcagaagcacaatgttacaaatcattctattgaacaaattatgatatatttaaaagggtattcctataaatttgacattattatatttgcgtgggatatgtttcatccaacaataaacaacataaaaagttgccatgtgacttgagtaactgccatgtctaattcttcttggcctatgcca

SEQ ID NO: 267032 - DNA, 463 bp, Glycine max
taccaatgaccaatacaccaagaatcactccatttctgttttatcacacttatcagtgaacttgagtatctgatgatactcaggagcaatatatcccacagtgccagccacattggaggttgttatgtgagtcttgtaatcgggcatagccttggcgagtccaaaatcagcaattcttgcctccatgtcatcgtcaagaaggatattagcaggcttgagatctctatgaatgattcgtgggttgtgattcatgtgaaggtattcaagcccagcagccacaccgagggagatcttgtgccttgacaaccaatccaactcgctctcgcccctctcgaccttgctcagagtgtcttgcaagcttccatttttcatgaactcgtacacaatgtagtgacattccggtctagacacgtgcgccagcagaggcagaatgtttctgtgtctaatttgtcccaccgtgttg

SEQ ID NO: 267033 - DNA, 397 bp, Glycine max
agcttgaatgcatacaaactataataaatttttgcatccacactgcttaaaattctcactagttttccacctttctcatccaccacaatttttccatcactggattcattgccatcagccaaaacattaactgccttcacctcataatttggattaagaccggaattgctatcagtcaagacagctgcacctacaatttcccccaagaatgtgtcctgacaacacaaagggcattaaatagtagaaatcctaatctaattctgcctaatgcaatttcttaaaacgattctaaagttggctattctcctttttggatcacaagttataatgaagtttaagcataacttgcacttgagttaagatctaaaagaggaataagctcgaaaaaagagaagaa

SEQ ID NO: 267034 - DNA, 315 bp, Glycine max
ctaagcttgctgtattaccgaagactattatttctttattactgtgaagccaacagccctagaagctaatcacagacacctactactgtaactggttatgccaccatcacttctctttttttgctcttaacccccttcctcctattcctaacaacacacaatactttattacacacaagcacggatgcgtcttatatactactactcatgtaatgacataagggggattttcattttccaagtaacttgcttcaaaaaaagaggaaaatctggaaaaaaatactctggcaatataacgcattataaaaaatattt

SEQ ID NO: 267035 - DNA, 402 bp, Glycine max
agcttatagaatatatatatttaagaacattgacaattgaagagtctatacatgtttcctttgatgagtctaatgccattcttccaaggaaggattttttaaatgatatttcagattccttagaagatacacatattcatggaaatgattctaaagaaaaagatgaaggaagcaatgaggattctcaagataatggggctagaggaaataatgaacttccatgagaatggaaagcctcaagagatcatcccctcgacaacattattggtgatatatcaaaaggggtaacaactagacattctcttaagaattatgcataatatggctttgatctatgattgacctaaaatataaagacccctagtgatgatactggataatgcctgcagagaactgatcatt

SEQ ID NO: 267036 - DNA, 454 bp, Glycine max
tcatgatgatgaaccaagcaattatgatgatgtctatatcctcggtgattggttcaagacttctagatctggcctcgtgaatccaatccaagattccagaatcaagagaagaaatcgagaagcggtcagtcaagacttcatatgcgataagtattacaagaattttttcaagacgcgatatcacagttctgttttacgaaagaatattctcacattttgtcagttaccagagtgattactctctggtaatcgattaccagttatcaataattgattaccagtgaccaggttggttttcaaaatgttgtcgaattattcgaacattccagaatgatgttcaaatagtgtaatcgattacactatattagggaccacataaaagtgagtcagaacgctggaattcagattcaattgtgaagaggcacaacttttcataaatacattgtgtaatcga

SEQ ID NO: 267037 - DNA, 472 bp, Glycine max
  unsure (1)..(472): unsure at all n locations
cccgttctcaatctcaattaatttaatctaaatgattcaaattattgtgattaaattacaaatctctcatttactcacaaaccgcctgtaattagttcttttaatgtatcaaaaaacatgcatgcgtgtgttaaatcatacataaattacatttaatattacattataaatatatcaaaatgttattttaatatgagaaaaaaagttatgcattcacattgaaaatttttacgtaataattcaatcacaaaaattatcttataataataaaaataataatttatgattaaataatgatataaaattattttacaccatacatatataacatttagctagccattaaatttcaccatagaaatacatntaaccattacattattcttagaattatttaatttactgagtggatggatcaattgataaatagttgattggaacacgatttgcacctctaagactaatggtgtgg

SEQ ID NO: 267038 - DNA, 334 bp, Glycine max
  unsure (1)..(334): unsure at all n locations
gcttttggagtagaaacataggaccaacttattntatttcaaaaaggaagtcgtatccagtcaaggtctgagagaccatacaagtttcctaacgatttctaattatgtgggccattaagtctatcatatgctgacaatagccgagaagcccatgaatctcttcgggggtggagtaggtgtctgccatcgccttggccttggctaacaagcggngaagttcttgactcccgttcaaggtaagagcaaaccggtccatccacatggatgcctcttggtgaaagagtcgatcacccttcctctagcctctttttccgcatatacttgagcatactca

SEQ ID NO: 267039 - DNA, 444 bp, Glycine max
  unsure (1)..(444): unsure at all n locations
gtcatcactaaacaagttgaaattaataacagtcgcacgcaagatatcctaactacatacaagacatatgattgaaaaacacgatagggaacgattagttgggttccctgccagcaagtgctcttttaacgtcactagctagatgcatcgtattgttatccaggatccaagcgaataacagtgttcaatctttccatagctccaccatggtattgcttcaaccttcgtccgttcactacccatgtcctgtcaggatctttagattgaggatcacaaagctccactgctacatattgccgaactttcttgatagtaaatggttcgtaccactttgatttaagctgtccagggaacaatttaagtcttgagttgaaaagcaacacctgttgtcctagctgacagtccttcttgagcngcagtctagaattatactcttttaccttt

SEQ ID NO: 267040 - DNA, 473 bp, Glycine max
  unsure (1)..(473): unsure at all n locations
gcttgcaccaggtggtcctcgtatagaagagacatatggcattgtcttatgtgttttctctccaactctgagaatgcgatcttgtgctgctttatgggttgcttctgttgtccaagcttgcattatcgttcctcttcattctctctattctgctgaactcttncttcatgtggggttgttgctttttttttacctctgctaacctctgcgggtatgtcttccattgactgtgcgatttttctcctatggggtgctgattatgatgaacagagcattctatgcacaccatgtcaatgtgaaaatacaagcttctactcttagcttttaaatgtattgctctgtgtttgatgcctacaattattacttattaatttataggtgtcgctcacatttatattgatgaacgagactttgtgattcacaattcaatccttatcgacgacatctcacatcacaataatggtcgatatgat

SEQ ID NO: 267041 - DNA, 262 bp, Glycine max
tcacgtggccattttctttttcctcattctccattgaaaccccaccaaagctccaacctttggtgctcatttctgccccaaatttcgaaaggagggcattttcggggtcatgaagtgcgtggctaccaatgggacttcaaaacttcaggtttgggcggacttccttatctcttaaatatcgcgggtatggggttttgggagcaatgatgggtagtttcgtaggtttctgcttcatgacgggcattagtgaacactcttggtg

SEQ ID NO: 267042 - DNA, 286 bp, Glycine max
  unsure (1)..(286): unsure at all n locations
ctacttttattcgctgaccacagagtggtacctgaaaatatgtctcgggggtcacgagaccttgtggacgtcatgtggggtgctattgtccaaaaccaagcttgaccaatcctgacccaactcgggcatagacagtcagtgagaacctgtgatggacctaaacaggggagctcctggctgtcaaccgataaaagaacaaagaccacacagctaggaggcttgtgggtggctggccanctatggatcttgagtaatatgtggaatatagcctctggtaatcgattac

SEQ ID NO: 267043 - DNA, 470 bp, Glycine max
  unsure (1)..(470): unsure at all n locations
ctcagcttcacgatgtacanaagagactatgttgacttaaatgatgattgaaaatgtacctctgaatgaatgatcattttgaatttgaatctgacattagagctatctatctttgtttatttgttatgttaacataaaaattattagttaattgttgctttttcgagagagaaaataattggcgcaacgaacataaagtacgcatgtatgataaatcgttgtctgagttgacaatacatcgggaaatgcaagcgtgttaacataaagcgtgacaggacactgtaagacttgactacacattgngaaatgcaagcatgttaacataaagcatgacacgacactgtaagacttgactatacattgggaaatgcaagtgtgttaacataaagcgtgacaggacactgtaagacttgactacacattgngaaatgcaatggtgttaacataaagcgtgttagcatgttacgtca

SEQ ID NO: 267044 - DNA, 384 bp, Glycine max
  unsure (1)..(384): unsure at all n locations
cgtcccggatcttaagtcacctgcggcatgcaagcttgccgcccagctcgcccaggcgagctcttgtgcttcctccagaagcaacagccttctggaggaatcttctggaaggcccaagtgggcctggttgctatttacacccccctttttactaaatgcacccccttttctatttttttgtaattctttttctgtaacattacaaaaccatacaaatttcgtaacgatacttattttttctttcgcaaggttatgaatccttacgaattacgtatttactcttttttagctntcgaagaagttacggaaacttacggattgcacaaaaacatctcttttcgacttccgccaccattacggaattcacggatcgcgcaagcctac

SEQ ID NO: 267045 - DNA, 404 bp, Glycine max
  unsure (1)..(404): unsure at all n locations
agcttgttcttgatattggccaatttctttatttatcttagaacaatatacctggccttcatttaactgtctttgggcttggcggccaccatcaacaaagtactttccacactgactatatgttgatttgaccaacgctgttatgggtatgttgcgacaatccttcaataccttatttatacattctgagaggctccgtgtcatgtggccatatagaccgcctcttgtatcataagtcatgctccattctttctttgaaatgcgagcaatccatgttgctatggctggacttaattgacagaatttttctaaattttgatcaaanatatgctcgcaaggagtgtaccctgcataaattatctagacacaccaactttaatattcatgaaacttaattacgtgcc

SEQ ID NO: 267046 - DNA, 296 bp, Glycine max
  unsure (1)..(296): unsure at all n locations
gggatcagccacgacctactgttaacatcaatcctgctattgtgtataggatcacggcccccatatagaaaagttccatagttacctatgggtagtagcgtacaanaatctccaatagtacattctagttggaaagttgtcccggaatctctaaagaacctaatatgggatgacatttctgtcagtgcagttaattaaccctttgggtttctatttgtctaattaagttgcaaaagtcgtcatttagtaagcatctgaatacaaatttttattgtagggtaaatttgacatccctg

SEQ ID NO: 267047 - DNA, 304 bp, Glycine max
gcgcgcaccccaccatattttatattttaacactggcaacgcggccactattattgcgaacatctctctctcccgcattggaggtgccacttgagctgccaggtctcttcacctttgggcatattctttgaaagattcatgctcctttatgcacatgttctataattgcatcctatccgaagccatatcaaaattgtactgatattgcctgacgaaggcaaccattaggtccttctaagaatggactccggaaggttccaagttagtgtaccaggtaacagctaccccagtaagactttcttgg

SEQ ID NO: 267048 - DNA, 474 bp, Glycine max
  unsure (1)..(474): unsure at all n locations
ttaagaatatcccanatgagcttgcagaccaactggatttcctatttaaattgacgaacaattntgactctgaagataatcttgactaaagaagaatcaatatgctacctctgactcatagaacttaattccctacacataaataatttcactctgttagagaaaaaaaaatgaagccttcaacaaacaatcatgtaacaaaaacaattaagataagaaataggttgatataagtcaacattaacatgaccatttatcggtgatagataagcatggattactgcataagaaaaatcaaatttctattgttttaatagagctaatagacatacttggttgtattctgctctgtctacagtgtctccttccttacggccaacaatggtaaaaatggcaagcgagccttaatggtgaacatcaacaatgtaccaagtctatatgtgaaggaccagaattggaatgtgaacaacgtct

SEQ ID NO: 267049 - DNA, 341 bp, Glycine max
agctttgatggtgttgagaagatatcacatgtttgtcatcatcaacaagggggagaatgtgaatgtatgtatacatgatttcgatgatgtccaaagacaaatcagaccaggctcacacaaatcaaacaaggctcattttgcttcaagattaatacaagattgtttcaacaaacaaagccttgattcaagatttcttcaagatcaagcattgcctcaaaatgaaaggtttcaagtcattcaaggcacatgtaatcgattgccaatacatgtaatccattaccaactggtcgaaagtgcgtaattgattacacatcatatgtaatcgatcaccacaaactctg

SEQ ID NO: 267050 - DNA, 468 bp, Glycine max
  unsure (1)..(468): unsure at all n locations
gagaatggtcttagccactcattactgctcgaggctatgtgctctcatctgaagtccaatacaccactagaagccaacatcactctattgcctataagtagagaatctaaaccattggttctcgtcccccatgtgaaagggtccagaacactcaatggttattgtgctcactcaatgctagaattactacatggttgtgcttggatgttgggactgtaactcacctgcatccaagccctatttatgaataagacacccaccacaacactgaatagactctctccatatgatgttaacctactggctcacatatcgatgctcgagtgcctttgcaagtaggatataccttcttnccctattctgtcgaccaacattcttaccctctgtaccacctaaatcacattcagaaagctggtgagcatacaggctcgactagataagttattatgtaatgaactcatcttccac

SEQ ID NO: 267051 - DNA, 387 bp, Glycine max
agcttttgaaatcaaactataccactggtattctattacagagaattggtaatcgattaccagagagtaatacactggtaacttacaaaaatatggaaaaaattttcttgtaaaacaaaactgtgctatgtttggtttttgaaaaatctttttcaatactctccttgagaagtcttgacttggtgctttttggtttcatctcttgaatcttgaattcatcttctattgaatcttgattcttcttgatgtcttttctttaatcttgatcttgaacttggtgactcactcttgacatcattcttttgggagttttttcatcatcaaaactacttgaatcatacttgattcatcatcatgaagcttgcttctacactgctggtatgttgc

SEQ ID NO: 267052 - DNA, 357 bp, Glycine max
tgtagactggctagacatgatacatgtcagggtttggtttggttcaaggataaaagggatgccccacattattttcatgacacaaatgcaaaaatgatgatttggaaattatatgcaaaactggtcatgcatgcacctatgtggacgctcaagtgtcaaatttttatggtcatgtgatgctagggctcaggattcatttcctctattttaaatcaacccaatgtttccaaaatatgttcttttatcaatttgtgcattcatccgagtccatttcgggcgtccggggaaatttcacagcattcacccttcaggtgtagacacattttccaaaaattggttatgatcaatgacattttt

SEQ ID NO: 267053 - DNA, 216 bp, Glycine max
  unsure (1)..(216): unsure at all n locations
catgcaagctctgcactgcaggtatagtgtttatatttcttccanaccgatggtctgcgcactggatgtataacgcccatgatggtattgtttgatattaataaaaattatgtgttatgcatggctgtttaagtgataggaatcctcaatatctacttgagagtgacaaatattttatcattgggaaattgttgaaagagtattgagtcttgttat

SEQ ID NO: 267054 - DNA, 228 bp, Glycine max
tcctagaatatatgaacgaactatatctcaaagtggccatcattcattcttctttgggatattctggtcgttgattacccttttctttattatgcagttcgggaccctcttcccaactgtagaacgaaatcatgatggtgatagccacctatgatacctgactctgcatactgcatacattaggccgaatcatgaacatatatgtgtccaccataaagaccatttgca

SEQ ID NO: 267055 - DNA, 426 bp, Glycine max
  unsure (1)..(426): unsure at all n locations
agcttgttgacatgttgagaattacgtcatcttccgcgctcactatatctgtcatactgacttttgagtctcgccgacggccgaaaatacccgagtggttatccgtataaactttttgttgtctataagacgaaaagcctgatagcacgcagagactaacgtcgtcttctgcgcccttcgacaatcgcggtcgacaagcccgttgacacgtggagatttacgttatcttccgcgctcacaagatctgtcatactgactgttgagtcacgctgaccggcgaaaatacccgagtggctatccgtataaactttttgctgtctgtaagacgaanagcctgataccacgcngagactaacgtcgtcttttgcggccttcgtcaatcgcggccgacaagcccgttgacaccggagatttacgtatcttccg

SEQ ID NO: 267056 - DNA, 422 bp, Glycine max
  unsure (1)..(422): unsure at all n locations
ntgcggctgagaacaactatatcacagcacgcaggttgtagtttatggggctccctctctccctcgcgggagactctctctatctctctcctctctctcttatgtactgcgcatatagttacagtccctcctgtctttctactatagcttcgcatttatacaattccagagcagacttttagtattatcactagagtatcattctctatgtgatgaatggaaggctaagttcgcagcgatgatctcccttagagatcaagcacagatctctgtgacgtactattaatactgttaaagactgaatagtattactctaactaattaccacgaatgagtgctttaaatacacgcatgcctagtgcaggagtaattgactaagcgcttaatatacgatcatgcttaatgatcgcacgagagtaatg

SEQ ID NO: 267057 - DNA, 386 bp, Glycine max
aagagtaaaaactctggtaacttagaaaatattgagaaaaattcttttgaaaaacaaaaatgtgctatgtttgttttttttgaaaaatattttcaatacttcccttgtgaagtcttcttgatttcttcacttgaatcttgaaatcaaacttctcttgattcttgaatcttcttgatttcttctcatgaaacttgaactcatcttctcttgaatcttgaaatcaaacttctcttgattcttgaatcttcttgatttattctcatgaaacttgaaattaatcttgatcttgaacttgttgactcaatcttgaaaccattctttgggctttttgtcatcatctttgtcatcatcaaaactacttgaatcaacttgattcatcatcatga

SEQ ID NO: 267058 - DNA, 472 bp, Glycine max
  unsure (1)..(472): unsure at all n locations
gccttaaatctcagctttgagttggagctcattttttctcaaatagcctttctagcaataatgtatgcgcgttaattaaaaaatggcttaaatacattcttctttcttatagttgaatcttaataattttttttggctacagaagaatcttttttcttagtttttgtcattaatgcgttttggtaacatttgttttcaatattcaaagtatttattatatggtcaacatgttttctaagatgcagattanaccataatacatactgttgcaatcctacccctcaagggcattggataaaagactcctagaagatttgaccaaagatgcatgagaaggccttaaggatctcatgagccttatggtagatttcatgcccatgggcttagtatgagctcacttatctttgtacatattataataagggttcattaattttggtccttgtatttagggctccataatgtaggtagg

SEQ ID NO: 267059 - DNA, 231 bp, Glycine max
  unsure (1)..(231): unsure at all n locations
ctctacaggcangctgcgcgcatgcaagctntgcactgcaggtatggcgtttcatatactcttgcagctgatggcgcgtgggacactggatgaataaagactatgatggtgtcgcatgacatgaacagaattatgtgtatgcatggctgaagaaagaacgggattctaagatctacctcagagcgacagatacattattaccgtgcatttgatcatagactattgagtcgt

SEQ ID NO: 267060 - DNA, 159 bp, Glycine max
  unsure (1)..(159): unsure at all n locations
agctngctacaatatatatatatatattaatatatatcattttatataaattaaataaattaaaaatacaaaaaaaaaacctgctggggaggggggaacttcagggaaggggactgttgggggggggaagcaaaacgccatagggatgctaggggggac

SEQ ID NO: 267061 - DNA, 142 bp, Glycine max
ctgatctggttgccctcctattattgttgcagtaaagaactgttgatttattgtcacaataaatctttaatggtctttcaatgtcgtcaaccacatgcaaaccagtgataaaatttctcatccatatcccatggttggatgc

SEQ ID NO: 267062 - DNA, 396 bp, Glycine max
  unsure (1)..(396): unsure at all n locations
cggatccctaagcgacctgcggcatgcaagctngagctaataagtggaggctcttatattgtttttaactctttatatccaataaaaagaaaacatgaagagcctccatcttttcaacatgaaaagaaagagcataaaatggagaaatgcttttggtcttaatccataacatacagaaaatatctgctaaagtataaaatcgggtaacatatttntcaagcatattgatgcaaatgcaacttgaaaattatccagtaataaggagatatatttattagggatattntaccttagaacctagcttatctttcaagatttcagttataagaaaatggtcagcatggagttggcgtccattccacctagaataggaggccataatgtgtgaaactccct

SEQ ID NO: 267063 - DNA, 346 bp, Glycine max
  unsure (1)..(346): unsure at all n locations
cactaagcctatctgaagacacctgatgcgcttatcgcattgatctcgcgcttagagcgcgagcttgatactgatgctctgccaaattgtgctctagactaagcgcgcggtggatgcgtgcttgggccaactgctgatcttagaccaactgcaacatgtagaatctaaaacttatcctatgtatcacctaagattgcgcaaagttcatcactaaatacaatggaaatgttctatagatagctgtaaccatgaaacacgatttattcactaaatgacgtcgaanaaaccatagattgaggaactatacaaggtttggaaaatgatttctatacgacagttactcata

SEQ ID NO: 267064 - DNA, 324 bp, Glycine max
  unsure (1)..(324): unsure at all n locations
tcatgaggaggcgttgaatgagtntctggcaaggcttacgcggttgtggctactggtggtctatattatctcacgcgacgacacttgtagagaatctgatgctaaagttagttgtgagctacggaaaacaggaaattataaaaatgttagttgcacatactaccgtaataaatcccctctttttgaggattcgtggaggggaaagattctaccatggtgttcaccagtaaagcaataactctatcttatgacttccgtttggagagctccccaatcttgtttggattatgaacactgacaccacccagacatggacacgacatg

SEQ ID NO: 267065 - DNA, 295 bp, Glycine max
  unsure (1)..(295): unsure at all n locations
agctntgtgatgaatcttggctatctacacatataaggtgctacatttcatactttattcaagtgtttttgccacctaaagccgcatgcaatttcaagtatatttccttttgctgactaaaattgtattcaaattaaaaggtattcttttgtaatgtattttttttttttgagagaaacattaaccatgtcccctccttccttaagggttagtgttttgcccatcttgaacttacttaagttagaattaggcattgattacttatttttaaaacaaacaaaaagtaaaagaaaac

SEQ ID NO: 267066 - DNA, 480 bp, Glycine max
acatataaactggatctgatgtcctctcaaagattaggtcaaaatatctgcaagttgatcatttgagctgacaaattcagtactgactccttggatatctgtttctccctaacaaagtggcaatcaatctctatatgtttgtgtctttcatgaaacactgcattggaagcaatgtgaagagctgccgggttgccactattacaatgtttgactgaatgtcgtgtgtcagaatataccacacttcatcttatcacagaatgaaaaggaatcagtaattgattacaaaatcaatcaattactgattaataaaaattacaataattcctaataaatacaatatctgatataatctcacactcccccttgagctggagcatatatgtcatatgatctgagcttattacaaatgtgatcaacccaagaacctttgagaggtttagtgaacatgtcttctagttgatccttagaattaacaaaatc

SEQ ID NO: 267067 - DNA, 258 bp, Glycine max
ggagatgcagcggacgacaaacgacaagatgtgagaggaggcgccacccactaaggaataagccatggaagaaagagcttcaccaccaacaatgtgcctcggataagaagcctggagaggatgcgtcaatggaggaaaagaaagagagaggggggagcacgatattgaacgaagaaaagaggaagagaagtcgtcccttgacagttggctacaagactctcactcatcaaagtcacaacaacgcgaacacatgcttct

SEQ ID NO: 267068 - DNA, 422 bp, Glycine max
  unsure (1)..(422): unsure at all n locations
agcttccatcaagnggtaatcatatcacattatcttcaagtangtgctccttaaacctccattaattttttgctttaccttctcttccattgtatgttcttcattttttttcaccatgtatctcctcaaatgtcttgcgctaaatgtttttaacatgattctttagagtttgcaccgattaaacttgctatagaagttagatttgattttctatggttcaaatttcttgttcttgttcttgaaccatgaattgtgttgagtttaggttcctttgagttttgtcttgttattttttgtggctgaaacctaaaccataaaattcttaccaaaatattaaagtagaagaaaacctcacaaatctagagtgacttgttcacctatttgtagtttgtcatacaaagcatgtctagtcatgaaattgt

SEQ ID NO: 267069 - DNA, 375 bp, Glycine max
agctgggagaggatgcttcaatggtggaaattaaagagggagagaacgagagagaggggagcacgaaattgaaggaagaaaaagggagagaagttgaactttgagttgtgtctcacaagactctcattcatcaaagttacaacaagtgttacacatgcttctatttatagactaggtagcttccttgagaagcattcttaagagaacttccttgagaagcttctttgagaaaacttccttgagaagctagagcttagctacacacacccatctaaaaactaagctgacctccttgagaagctagagcttagctacacacacccatctaaaaactatgctcacctccttggacaaatacatgaagaatacaaaaaa

SEQ ID NO: 267070 - DNA, 373 bp, Glycine max
agcttcaacaaaatgggagaactggcctatgctttggcttttaaaaaacaacacttattgtaggtaaaatgcttggaccagtggaattacaaggcttgatccttatcttcttaatctaaacactttgaataaccattaatatgactaatttacagcttggacttcccttgatgtgctctccaggagctcagccatgccttatatagcttcttgcagttttccaagactaactataaaaggataaagtagagtttttccaaaaatggtaaaaactgcttttgctaaaattggtaaatcttatcctaatcttctatattagtgtgctaacttcctagattaaagtgctaatctcccttggatatgtgtactctta

SEQ ID NO: 267071 - DNA, 477 bp, Glycine max
tgttgctcgtgtgctgagtgtgtattgaggtcgtatagaggggttcgatggaacctgtatttatattagtttagtgtgagcgctggtctttatttgtagggattgttgtagcctttacaaattctcggcttgtagacaatagtcgggagcttatagataatattagaaataaacatttgcttatagataaaaagtagaagataatcgtatcttgtagataatgtgtggtgttatagataattaattacttatcaatagataagatattcaaatacatttgaatattaatagattagagataacctgtttttgttggagagcctgactgctaagggtcatccacgctcctggactaacgtgaacgattgagacgtgtctttacatatcaaatagaatgtcacttgtactctgtgagtcctagataatatgtccaatattatgaaattatatattatttaattatcattattattttat

SEQ ID NO: 267072 - DNA, 157 bp, Glycine max
accgagaatcacttaatatcactgagaaattcatttttcgagttagcctcccatgatcttcgtgcgatcttccgccttcaaccgggaacttcctgatatggaactctccaatatcgtctatgcacccttagaggccaccacttggcacgcatgctgt

SEQ ID NO: 267073 - DNA, 121 bp, Glycine max
agaagctccagtgctgagcgtgtattgacggcgtatagaagggttctatggaacactgatttatattaatttagtgtgagcgctggtcgttatttgtgaggattgttgcatcccttacaaa

SEQ ID NO: 267074 - DNA, 409 bp, Glycine max
  unsure (1)..(409): unsure at all n locations
aatatagncaatatataatcctgtcttatgtctcttatatcttaagagagaagacgtaaaactattgagtgatatatcctgttgtaagacgatcacatatttcagtcaatatgcaatctttcaataaatctttctgatttgtttagagccaaaaatgactttgtgataggacacaaaatattgaattcaaattatgttcatgatagaatttcgaattgtaaaaatcaaaagtgaacgtcagcaatacttgcattatgtggaagtcttatgaccgtcagatttacattccacaccgaacaaagaccattcaaacatatgttttaatagtaaaatccaccatctaccataaaactttgcacgggcggaagaagtttaactatgcccgaacactctgtgacaatgacgtgga

SEQ ID NO: 267075 - DNA, 351 bp, Glycine max
  unsure (1)..(351): unsure at all n locations
aagccctaaaggcatagcttgtnttatcccggtttgtcaaaacaaagttcaagtccatacccatcaaagtctgaagagagtatgatgaactaagggacgtaaatatggccaccgatgaagccttggaatgagaaaccaagatagcccgaaaggaagaacacgaccaaaacaagttttgaggggctctatagggcagcaatagtgagcttatactcccaagacgtgaaaagaatcatcacgggtcataggcatgatctggaatgacgagctaaaggcttgccttaggtcgaaaagaaatatgttccaacatctcacgtgagaatgaatggaatatcttgggcatcatcgatg

SEQ ID NO: 267076 - DNA, 447 bp, Glycine max
  unsure (1)..(447): unsure at all n locations
tagcttatgaaaccaacatagtgttcattcattttcaacaacaactaactctaacttggacaaatacaatcataagtacatagattgcccttacaaggaagtatccncttccctcctcattgacctctaaatgaaggttttgaaaactcactttctgaggcattcatcgnaaaatcccgatacttgagtgatctgcgcgaatatatatatatatatatatatatatatatatataagagaatacagatacggaacaatttagttcaacaactaacacatgagcttaaataaagcctgaaactgacagtaacaaacagccattatcaactaaaagcctccagacaagtaatttggcggattaagaaacaagtaatactccataaaagttgataaaacctcagacattaataatttaatgaaaagatagatactgaggtttatgtttct

SEQ ID NO: 267077 - DNA, 349 bp, Glycine max
ctcatgcaaccacaactgtgttacttgcggaaaaagacaagggtttctttattcttttgtgtttcaattatttttccgtatggtgtgggaatttctttttacctagatactatgttttggtcacaatattcatattatctatttttaactattatcagcccagtaagggaacaaagcgcaagcgtgttgtaaaacggggttcatcaagatctgcaacaacttcaagacgttctgtgaaggtaatagctcactcctttaactgcaggaatttgaaatgtgattttaacaaaaagaaaaagactaccaacttccccttattgaggaaaatagtttctattttatttttatg

SEQ ID NO: 267078 - DNA, 475 bp, Glycine max
  unsure (1)..(475): unsure at all n locations
ntcaatgttcatgaatatttattgttgccatgaagttcaatgtactatcttgaactccagttagtgaagtgaatttccatagtatatgccacattacaaacagaaaaaatgtcatcatgagagaaagaacaaaagaatcaaatgaataataacaacaaaatgcagaatcttcctaatttcaatcaattttgatctcacagacaacctgtccacaattaacctcttcctcagcatcagaaacaatctcatcaagactcaaaggcaagccagaggagaaagtaagtgtaggtttctccttaggcaccacaagagccactccttcattattattattaagaatctgcaaaactcttctcatggaaggcctttgagcactatcagggttagcacaactcaaacccaaaagcanaatcttaattttaactctcctttgaattgaatcaaatttgttctttgagtaaactgccaacaatac

SEQ ID NO: 267079 - DNA, 470 bp, Glycine max
  unsure (1)..(470): unsure at all n locations
agcttaagtgcccatgttctgtattttttaatattatgtccaagacattacaaatatctgtgacacattttttccgtagtttaaacgtcaaagaatcctaaaaaaatataccgtgcaccagttccatggacaatcacctcaaagtaggagaacaaaataaaaaaactatgatttggacccttgcaacaacgcttaagtgcacatgttctgcattttttttaaattatgtccaacacattactaatatccgtaacacattttttctatagtttaaacatcaaagaatccaaaaaaaaatatatcgtgcatcagttccatggacaaccacctcaaaataggagaagaaaataanaaanaactatgatttggaccctttgcacannagctaagtgctcttgttatgcattntnntttaattatgtccacacattactaatattcgngacacattttttccgtagttaaacgtc

SEQ ID NO: 267080 - DNA, 209 bp, Glycine max
tatatgactgaagacattgaagtctttcacatgtaaatgaagatattgtagtcttttgaaagcgtaaatgactgaagacattgaagtttttgaaatgtaactgaagacattgtagtcttttgaaagcataaataactaaagatatcgaagtctttgaattgaaatgatggaggactttgagtcctacgaaagcataaggacagaggact

SEQ ID NO: 267081 - DNA, 379 bp, Glycine max
agcttggacttaaaacagaattgttagctttttggctgagaacctataaaacagcaccacggttttagttttgggagttcttttgggagaggagaataattctagggttttagaattccagtttttactgttcatgcacactgttcacatagaataaaattcgttttctgcaatctcgtttctgcttcaatctacaatttcgctttctgctgattaatggaaggctaagtctccaccgttgttttctcttgaggatcaagcacaactctctttgaggtgttgttattactattgaattctgatcagttttttctcttcccaactactcttgatgtggtgttattattccatgcatgctcaatgctcgattaattgcctc

SEQ ID NO: 267082 - DNA, 414 bp, Glycine max
  unsure (1)..(414): unsure at all n locations
caagagagtgaacaacctgtgattttgatacaagatgagtgttattacctggttcacgggcctgctntgaggctcacgctctataggtatagagagatcgacagagagtgaacaacttatatacagaacattgttcactggtgttgtcgcctgtgggagataactctcacacctgcatatatattgcgtctaaagcgaattacaggctcactctcatgactcaccttatgatcgttaaccctaagtaccctaagccgctaattaattcactggccaatcctctttaaatcaccctttgaccacactgggtcctctccacaccagaataccaaacggcctgatttgtcccaagatggaaaacagcttaaccttggttcttcgttccaggtcaaaccctcgcagaattcctcattt

SEQ ID NO: 267083 - DNA, 357 bp, Glycine max
  unsure (1)..(357): unsure at all n locations
agcttgagcttaccacacatatctttctttattaagctcaccccctgagatgagaagctagagcttagctacacaccccctataatagctaagctcacccccatgacaaanaaaacatgataaatacacacaaaaagtccttactacaaagactactcaaaatgccccgaaatacaaggctaaaaccctatactactagaatggccaaaatacaaggcccagacgaaggaaatacctattctaatatttacaaagataagcgggctcatacttagcccatgggctcgaaatctaccctaaggctcatgagaaccctagggccttcccttggatctctagcccaatctacttggagtc

SEQ ID NO: 267084 - DNA, 305 bp, Glycine max
agcatggtgaacaatccccaattctgaactatctgcgagaatcttcactagagcaatagcatcaggtcgtgttccattagataacatgttgcagaaaacccccagggattcgtgtgccattccaatatcagcatagccactaaacaaaacagcccaagaaactacatccttcttgggcattctgttgaaaagatcaattgcattttcacgtgagaagcacttcaggtacatgtccataagagctgtagagacagtaatatccaactcaaaaccatcattgacggctaatttatgaatctgcttac

SEQ ID NO: 267085 - DNA, 278 bp, Glycine max
  unsure (1)..(278): unsure at all n locations
ggtaggattatgggggacccatcacatgtggttctatgtggctgtcgggcgaaggtgcacaacaagttnttccacatacacaatgcgcgcataaacccaccatcctctgttgcccaccttcaactgatctcacgtactcctacggagcccatatactcgttcttctcaacaccgagtcgctatcaatcctcccaagctcgcacaacatgcatgccaaacaacatctacacagcacaagctatcacagaccatcaaaacagaccaaaggcagaaaactc

SEQ ID NO: 267086 - DNA, 452 bp, Glycine max
  unsure (1)..(452): unsure at all n locations
agcttgtattggatatatcttgtgcctaccatagaagataatgggcgagtcttcttatgcgtattgtactatccagcttgacctttccaagaaagggactttggcatttggtaattttttggtttcattattcaaatttaacttattcctcattgctttgaaagaaaagcaggtgaatccaattggctaaggttcttatccacttccacatgtggaaacgcggcaaatacacattgaatgcacaaaaagttgattgaatgtgatgtgtggaaaaaaagacaaaaccaatacttacaatataaatactcataancattaatgtcacaatatatgagactaaagataaccgtgatatcacacaatacttgatgttggaacataaaagaataaaatggctgtctggtgtcttttctttatcatagaaatcttgactgagattaagcacttattaa

SEQ ID NO: 267087 - DNA, 446 bp, Glycine max
ctgctatgatgcacgtgttactgggaatgttgtgtgtggctgttaacgataacaatatagttgatacttcttcatttacgatactgtcatctcattgagtgttgcatccccgccaacaaagattttcttactatcatcgttcgaggtatgtatgtgattctcacacttatgtgcttaagtattataggcaatggttgacatgttactattctttagtagtacattgtaattcattgagtgagccatagctccccgtttgagattgaatacaacgattaatacggacagtttggattaactggtgtattcaatcttgaattgtccgtttggacagcttggaaagaccaaatttttttacttcattttgacttataacgtaagtatggtgtgttatttttactaaatcttgacaatgcatcatgcttcgtctctgggtgatacatgat

SEQ ID NO: 267088 - DNA, 473 bp, Glycine max
  unsure (1)..(473): unsure at all n locations
ctataacactaagcttttatccaggctcatcttggtggtgaagctccttcttccatggcttattccctagggganggcgcctcctctcacctcttctcctttgtcttccgctgcatctccatggtggaaaatcaccattaaagggcctcattgaagctcaaagatccagcctccatagaaactccacaagcaagcttccatcacaaggtgcattgcaaaatgtgtatgttggatagttttgcatgtagcataaggaaattctttgcaaacaaaagtaggagcatctcataaaatgtacgtcaccaaaggaaagatgtgtgtaaatgtatgtatgtcctangaaaacccgcgcgttaatgcgtaatgttttcttgtaaattcacgtcgatagtcccgtttggtggaaaaagtgtccgctgtttccatgattgggcttcgtttaattggttcttgactaactcccgatgtatttt

SEQ ID NO: 267089 - DNA, 450 bp, Glycine max
agcttgactgttaaacttaaaacctaaaatttcttattttaacaagcatcccccacaaatatattgaaataaaagggtttctaataaaaccataaagctaccaacaggcttgagaaatgaacagtgtttaccaaaaataaaataaaaaatgtaattgtgatgtaagtgtaagcatacctgtgtgtatcttcagaatctgtaggggcatcaacaagattcttatttggatgaactaatggagtattttgcaagagagtgaccgtgtctcttatggatctagttggtgtgactttaatatgttgagaatgatgacctgttggtcggatatgttgtacttttccttttgatataacatataaagtgcaagtatctggcaaagaccttgctaaagtagttgccacatcactcttattaaatattctgcagaccattgtgaccatcgggtaaaca

SEQ ID NO: 267090 - DNA, 346 bp, Glycine max
atggtcgcttatcctggagcgacgcgtacatgctcacggaccacgatgatactgattatccgtaacatatagggcgcctgatgtgggcaccactggtctctccgctgcgccattgtgatccagaaataggtcttgagtattatgccaatgccttggccacacatgatggcgtgcgtgacatgagatcctgtcgtacgggtcagtggatccagttctatgcctactctatcagcctactaccgagatatccgctggtgttggaatagggtcacctatgcaagctctggcataggaggaacctgtctgatgggtctatgaggatccattaaccagctggtatgtttcc

SEQ ID NO: 267091 - DNA, 331 bp, Glycine max
agcttgccatctgtccccaggccaagccggtgtcacattataataggaagatgggagaagaatgacacaaagtagttagagaactttcaaagttttgtgaaagatgaactaccccctcaaataggttttgtgaaagcctgaattggcaaggaggattgtagcatgatccatagaacttttatagtttgatctatagtacgaaccccacggccccatgaataaacagttcatgacagactttctggtagaattcgctagaaacgaccaaaccacccaggactggtggagcctctacattgattatgcgtccaatgtgaaggggagcagtgca

SEQ ID NO: 267092 - DNA, 456 bp, Glycine max
  unsure (1)..(456): unsure at all n locations
taaataagtggatgtcttcaattggttaggcaaggcaaagaaccaagatttaagtttttaactccaggaacacttatccaattcctgtagctcttatttcacagtaatatgtatttgtattattccagggcatctaggaaatttagatttaactgtcttattgtattttgcaatttttttctagactcattcatgattaggttaataattntttgtcaccaccatcttttcaacaaggtgagaaaaaagaatctcacctaaagttcctttcccaatgatattcatttcattcagatggttagtggccgcatacacttctgtaataagaactctgggacatgcagttttccttaacatgtctccaaatgttactgtataaaacaaaanatagttcatgacacatgagcataataaccttaatctatgatactatctagcatgagtttaaaataatag

SEQ ID NO: 267093 - DNA, 427 bp, Glycine max
  unsure (1)..(427): unsure at all n locations
agcttcatttagagtgtatagttgctttattgttttctaagttnttaaagagattaatctttgatgattaatattgattgaaaaatattttgatctatacatgaaaaagagaaagaaaaaagaaagtctaatagtctatatttcaatagatattttaaatttgatgttagataacttaattttttaccatggtagagagtagcatttccaatcatacctcttgaccacaacggctatgtagtgtaacttttttttatcatgtgtgagagatcacaagtatattttaatccatcaagtcagagtgtgtgacggttgttgatccaagacaattttaggtacgaaatagtttaacttacaataacagtatatggtttatcaaactttatattttttatagaataatggtaaagttntgagttcatcaaag

SEQ ID NO: 267094 - DNA, 142 bp, Glycine max
  unsure (1)..(142): unsure at all n locations
tcaagcttnacccgattgcatagctgctatgcgatagtctcctcattatttccagagacctatctcatcctctagttgcgctagcacagttggtcgtccttcaatatcaagggatggcccagaaactgataaaagcatacct

SEQ ID NO: 267095 - DNA, 370 bp, Glycine max
accttgaacaggcaacgaactgctctcatatatctatgctatgtgctcgcgactggtccctctcttcccttcgcagcttgagttcactattgctaccccacagagctccgcgaaatttattccggccatactcatccttgcgagccctcttggtctcttgttcaagggcccttgtggtagttgcattctcttcccgtaacccggcacactccttccgaatgtgtgtagcggccaacttgaacttctctttggcaagtttcgcctttcctaactcgcttttgagagcttggacttcttcgtcctctatcggtgcttcaaagactctcttcgctgacgacttttaacttggcgagccaatctcaacctcgta

SEQ ID NO: 267096 - DNA, 358 bp, Glycine max
gcttgccttatagcataatgatcttttaatccaaatctaccataacaaaaaaaaaaaaaaactaatatccatggcatgaatagcatactaaagaaccattaattatatgttgaaagtttaagagaataagacatcaatgtgtaaaaaaacaaaaggtgttaagctaccacaaatagttgccatggtcaaagggaagcatcatattgtagaataaacttattatatctatattcttcaacttaatcctgatgcctcaatgatacagcaacaaccagtcaatttaaaaatatatttggaaaaaggttctatatcttaagttgtactgcatgcaatatatggtttcttaagtatcttttct

SEQ ID NO: 267097 - DNA, 363 bp, Glycine max
  unsure (1)..(363): unsure at all n locations
agctngaagaggattctttaatggttgaaataaaagagagaaggggggagcacaaaattgaaggaataaaagagggagagaagtggaactttgaagtgtatctcataagactttcattcatcaaagttacaaaaagtgttacacatgcttctatttatagactaggtagcttccttgagaagctttcttgaaaaaacttccttgagaagcttctttgataaaactactgtcgcaacctacccttcggcgggagggcgacgcgtgactcgcgggttgcgtgttccacgaaaggaatacgcgcggagtcgccaccaacgtttatttgaggaaaacgtcggaaaaaccggaaaagacgcgatctac

SEQ ID NO: 267098 - DNA, 417 bp, Glycine max
  unsure (1)..(417): unsure at all n locations
ntagtcaaacaaaataatccanaaatgtcaatgaattgtgtcttgtaaaagcataacaagactttctctgattggtttaaagatacaatctttgctgatgaaaatgcttcagaaacattaagaaagctagcagattggcctaaaaaaatgttataacttggcaaggatacgacataaacaactattccttttacacaaaagcacaagacgacaaaagtacaatgcaaaacagcagggtcaccgtaagggctaaatctcaacattntgcaagtatgcatgatgacaatccctgtgcagcttccatcccttactttgngttcattgatgaaatttgngagcttaactatgtcaaatntactgtatgtgtttcaaatgtaaatgggttgatagcaacaccggtgtgcagaccgatgatgt

SEQ ID NO: 267099 - DNA, 458 bp, Glycine max
  unsure (1)..(458): unsure at all n locations
agcttctaatgctttcttcctcttgatcatatgtgtcgtcgctgacgctcattccatagaggaggaccacaagtggaggatcatggggaattgttcaccggaacacaaaggttaactaggatgcacaaaacggggacggaacatatacgggtacggaaaaatgataaatttagaaatatcaagattagaaaatgatttttttaatatttttattattaaaaaaaataaaaaaatatgaaaaataatgatgtttttattagcattttcattatttgtttttattttcaaaaattggtttcattttaaaagattaagattttaaaatatatttcatttgacttattgttgtctctattnttaaataataaaaacataaaaatactttttaaaacacaatgtattcctaaattaacttgcatcccatctctcaaatgagatgtttatttcactgaaataaa

SEQ ID NO: 267100 - DNA, 402 bp, Glycine max
  unsure (1)..(402): unsure at all n locations
gtgctcacctttagtagaggagaatccttcatgctgtttcatgtaaaccttctcctctagatgaccattaaggaatgtcgttttcacatccatttgatgtaactcaaagtcaaaatgagctactaatgccataattattcagaaagaatctttcttaaatacaggaaaaaaagtctctgtgtaatcaattccttctctttgagtgaaccctttggcaacaagtcttgccttatgtctctcaatgttgccttgtgagtctttcttggttntaaaaacccatctacatccaatggcttttacaccactatgcaactgtacgagatcccagacttggttaaacgccatagaatccatctcatctttcatgggattatgtcacacagttgattctttagaactcat

SEQ ID NO: 267101 - DNA, 385 bp, Glycine max
  unsure (1)..(385): unsure at all n locations
agctntacacaatttgatatacatgcagtacttatttattccaacaaacatctaaatatatagataaacttatagtattatgttaaagcctaaactatatatcagtaaaagagggagccggaggtaagaaatttataagaaagcgtgataaaaagtatgagcggggaggaggaggcaaaatatatatatattggtgcatgtattaaatttcaccttaaatgattagtagtggatgcatgttcatacatctatcaccaatttcatcatacaaaccacatgcgttcaagtaatttgaatctaaaattaaaattcatcctgaaccagtggtaaatatactaacacacatctttaaccgctttgtcagcaaacactgaattaagtaaat

SEQ ID NO: 267102 - DNA, 476 bp, Glycine max
  unsure (1)..(476): unsure at all n locations
tactcccacaaaatgtagttgcaccatatttagaacaactaactttctatttacaccccattntttactaagtacaccatatagtctcattgtacatcttaattactcattataccctttttacttaaaggaatacaccctatgaaatctctttacctttctgaaaatatctttctagaataatatatacttatcctgcaaatgtatttccaaaactatgatacactagtttggaaatgtatttctagaattatgtatcatagctccataaatacatttctggaataggtatatgttattttaaaaagacatttatggtagtaataaaatatctctcgatattattgacattgtaaatgcttatcttacaccctcatatttgttagttttatttccatcctatcattagtgttctttaaatcttatctaaaatcttattttcacagattttattgtctttaatcttattttaacct

SEQ ID NO: 267103 - DNA, 278 bp, Glycine max
tgagaatgtgatttcaaaccttgtcttcaaagcaagtttcctcatacgtatcctcatctgtgtcattttgggcaagcgttgctttatcttgtgtataagaagtttgggccaatacaactgccaatgcagaatggtcaagcacacaactgatcttgataatcactaacatgtaaaacattgaatacataaacatgtcaaaagacaacgtagatccacagtaccatatggttgtctatgatttcaagtgccttctcataattccttggcaacttactctt

SEQ ID NO: 267104 - DNA, 407 bp, Glycine max
  unsure (1)..(407): unsure at all n locations
agctttccgtggcaatgatggagcataatgtttaggttcgcccttaaccaaacggatgaagtagtaaaccgttgattactccaattggaagtattagatttggcatcaagttagattcgcctttatgtcttattgtagttttagttcaaggttttagagggtaataaatgatatatagattgaaccaatatgttgttggagtagagtgactcaatttcataacacaaccgccattaaggagtcggatttattaccaaaagcaaagctcanacaaaatattgctaacgcttacatcgtggttctgatatccaatgatcaataatgacaaatataactacgacaaattttgacacacactactcgctaatggtttgttcttacatttacataactctaatgactacctg

SEQ ID NO: 267105 - DNA, 463 bp, Glycine max
acctgcggcatgccagctttgatcattcttgattcaagtaacatggtattctgcatatctaaaatcctgtcaaaaacaacaaacatggaagcctgctttgattcaaaagatacctgtaaagtaaaaatagtagttccttgttaaaaattcatttatataaaaccaatagtctaccagaaattgcaaacctgagaagacaatatttcccttgagttttccattaaacgatcatgaaatccttgaatttgttggtgacgctgaataagttcttcatgttgtctatgcccatattcagcaaaatattgtcgggttttcctgcaatacaccaaggagctcaacatattttcaaatataatttctgaattcaaatattatgagaggtaacttacctacctgctctcttctatgctttgattgaactcagtcatgagttagttcctagcgctgggattgcctttagagt

SEQ ID NO: 267106 - DNA, 376 bp, Glycine max
  unsure (1)..(376): unsure at all n locations
agcttgcatttggaattgcgaaagccccccttttcattatgattnggncctgccatctcaaacaaacaaatcaaacgtaacaagacaattattgttgttgtttgaatacctcacccactcaagtgtatcacacaattatggcttttctctaatgaaacactcttgccttttaccactctaattccccttgagttcttaggcaattcaagagattatggccacaacaaagaacaattcaccaatatgtgtaaggtaaggctagagagacaaggaaaaaggttaaccaacaaaaaggctaacaatgtttctaggcacaaatgaaggaaataaaattcagaatttatgaattcaagtaacaatccttcatgcccccata

SEQ ID NO: 267107 - DNA, 361 bp, Glycine max
  unsure (1)..(361): unsure at all n locations
tactaagcttactgaatgtttctgttattgaagaattagcttcctgattattctccttacccacaaatcattataaggcgaagaagatattatgtcttgtgggtatggaataccagaaaattatgattgcattttgtctacaaattggtttgtcgaattgcgcaactgccctatatgtggngtctcacactacaaagtgatatatggcgaatgcactgatgatgcaaccacacacaatgatcatccatcaaaggtgtgttggtatcttccaataataccacacttcaagtgattgtttgctaatgcacatgacccaaaaaaccttaccattgcctgcacattgacaacaaaatgattgatt

SEQ ID NO: 267108 - DNA, 379 bp, Glycine max
  unsure (1)..(379): unsure at all n locations
agcttggagttcaggttgtggacctgtggttttaccattatcttgaaaaatccacccaccttgaaatggtgttgatggatggaaaggtatgtanttatttagcttttactttgtttgataatgtgacagggtttatgctctattttgatgttgtgccagagggatagaatccatgtcatggttaagaaagaggatcagtcctatccaaatttattttttgctctttaacattcaaagatcaccactcatttaacttctgaacattatttttatttaacggtttaatttgaaatttgtatatctaatttacaaaacgcgttcttatcttccttttttccatttataagagcggacccaacaacaataagtaactcattgt

SEQ ID NO: 267109 - DNA, 488 bp, Glycine max
  unsure (1)..(488): unsure at all n locations
ngtaggattatggngtacccatcacatgtggtactaggtggcttgttgtcgatggtgcacaacaagttttccacatccacaatgcgcgcataaacccaccatcccctgttgcccacctccaactgagctcacgtactcccacgtagcccatatcctcgtttctctcaacaccgggtccccatcaatcctcccaagcttccacaacatccaagcaaaacaacattcacacagcacaagctatcacagccaagcaaaacagagcacaggcagataactctgccaaaacaccaaccaaaaatcacagcttttcccactcaaagaccccagtaacaattccttcgatccaatttgataaccgttggatcgactccaaaatacctctggaagtctatagtgcataagcctacattttgaccgttgggatctactagcaaacatccagaactcattntacattactctttccacaaccagcaaaaatacatgga

SEQ ID NO: 267110 - DNA, 401 bp, Glycine max
  unsure (1)..(401): unsure at all n locations
agcgttctctgcatttcggctaattgtacttttgtgacctatatatctccncaccgacaacaaaatgaaaggttaacacgaggcccttctttcaaaaactcaacaatatgaagataatgcgtctagccgtaaaagcaagcataatgcgcaccagattatgtgcattacaataaagagatcctgaaggaattgctattggcatcaagcttcgagttttgtgtttataaaaaagagccgaggaaagcacaggcattacatgaaacctcctgaaacaagttatacttttcgcgagaacacttttgctttacaacaaatagctgcaaatgaaatcaactacctgactcgctcatttgaaatgagaacattgaaatctcctcaatattgacgctcgggaaaaacaa

SEQ ID NO: 267111 - DNA, 381 bp, Glycine max
  unsure (1)..(381): unsure at all n locations
atgcaccctcgtanaattactgggacatcttatctaacagcgcaattccaattttatccttccataaagaagatatacgatggaccaatccttaacacaaatcctgaattgtgtttctggtcaataattgggctatggctcatctagatatataggattattgctatatccgcttccctcttttccttagaacactcatcttcctttttttcaaaatcaaattgagtaaataacatttattttcagaccgtccttctctcactccaacactcgctctttgttaccaacaacatatactctctctctttatcacactcctttctttctcagttccttatcctccttaatctctgccacaacttacgattactttaccttttt

SEQ ID NO: 267112 - DNA, 343 bp, Glycine max
  unsure (1)..(343): unsure at all n locations
agcttctcggctcatgcggngaactcctctatttaacacccgtgcagcctaaggcacccacccagagggaagctccccaagttccaactccgaacacgactcgaccagccggtaattccaacacgacaaggaacttccctccgaggccattgccggaattcaccccgctcccaatgacgtacgaagagcttctaccatccctcatcgccaatcatttggccgtggtaactcccggaagggtcctcgaacccnctttcccgaagtggtatgaccctaatgcaacttgcaagtaccatgggggtgtcccggggcattccgtcgaaaaatgcttggcccttaaata

SEQ ID NO: 267113 - DNA, 346 bp, Glycine max
agcttgtcttcgtcaaagaaggtattatttttcttgtcacaaagagccttgtagagattgccagtaaaaccatagcgcgtgtcttcccctctgaagttgaggaacacatcgtatatggatgcaagggaacgtgttgttgcacccattattaaaagaaaacagtttactatgataatggttgatatggtgggagtgtagaatcaaacttgaacaaatatgaaaaagatagcataccaaatgtttattattacgcagagtaacaccgacatagggtaacaatgacatagtaccaaagtagatactcttgtggaaatatctcgctctttttctttaattaattgttttc

SEQ ID NO: 267114 - DNA, 369 bp, Glycine max
  unsure (1)..(369): unsure at all n locations
agctcgcacaacaagtaactaattatgtttttgattatttgaagtaactaactaactaactaacactaatatatagagtgactactcacaaggaaggggtgggccttgattacacccatctaatctacataattaaactaattacacaaaacaaagcccaaactcgcaacgcaattattcaagtgcagaggtcttgatntcgaagcttaaattgaccctcaaaatggcagaattgaccaaagattatctatgataaaattgaatatctcttttttagctttccaaggaatacccacaagctccatttataattntgtagtgtcctctacgccttgacaaggcagataagtcatgtaagcacaaaaactg

SEQ ID NO: 267115 - DNA, 327 bp, Glycine max
actacttccgctccggagtatgacagtcaccggtataagagcgctgtacaccaacagcgcttcgaggccatcaagggagggtcgcttctccgggagcgaccgcgtcacctcagggacgacgagtatactgatttccaggaggaaatagggcgccggcggtggacatcactggctactcccatggccaacgtcgatccacaaatagtccttgacttttatgccaatgcttggccaacagaggagggcgtgcgtgacatgacatcctgggtaaggggtcagtggatcccatttgatgccgacgctatacgccagctcctgagatatccg

SEQ ID NO: 267116 - DNA, 410 bp, Glycine max
  unsure (1)..(410): unsure at all n locations
actcagcttgataattcgcctgacgagggatcgaggttagttttttgcttaacataancacaagacacgatggattgaaaatatatttcttgcatcagcttgtttttagaaagacccaacatttctacctactgttgtcattttatttaccttgcattttatagttgttagcataaaagtttagtttaaattctgtttgaaattatcactcatacatgttgtctcaacaatgcttcgattctaaacttaatttaggctaacattagttccctgtgtttgaaactcggattcatcccgttcaaattataaatacttgacgattcggtgcgcttttcaagtaaccccattggaatttccttgagacatagatgaacaaaaaagaactaccttggggagccaaccaaagtatt

SEQ ID NO: 267117 - DNA, 309 bp, Glycine max
ctgcagcttataggcggtttggagacgatgttaaatgctcgcgatatgtgaagatgatgttccaaatactttggatttggtccgaccatgcccttctgatttccagctgggaaattggcgagtggaggatacgcccggcatttacgcaacaagcataatgtaaacctttacggttttaaaagctctatagttgggcctaggccttagagttctcatattgtaaggctttgggtcttttgtttttgaattataatacaaggagtcttcttcattggttcctggcctctacccattctcattcatttgcat

SEQ ID NO: 267118 - DNA, 393 bp, Glycine max
  unsure (1)..(393): unsure at all n locations
agcttattggaaatttgtagttaactctttagtttactttgcttcttttntttcgttaattcaaataatagttgccactctactaatcgttaatttcatataataacacgtgcaacaaaaggtggatgattatcattgcattgcatagtgaacatgttttatacacctctttttaggtgatatttaaaccaaaatataataacggctgtagattagataaataaaaagaataatagtttattacttacagtataaaagtttaatttttttttaaatgttatgctccaaaaatgtaaaacattttatacagttgtcttatcacaatcttttatgtatatttaagttaattggttattgatctttaaaataattatgttatagtcatttaacaat

SEQ ID NO: 267119 - DNA, 389 bp, Glycine max
  unsure (1)..(389): unsure at all n locations
ctctgaacctgtatacaccttgaactagcttaacttctgcaaaaagagcggattttgaatattccataaatgctgttaaactcttgaganaatatgcggaacggtgtttacctgtgagggggtttgacaatgattgtcaaactgttagtggctgcaaattgctgtgcagaagacgaaggataattgagcaccgtatgacacaaacatgtgttgtcgctttaacgtttgatgataaaatttggggagactcgaactccttctttgcagatccttataaacttgacgtcttgtctcttcccactggacctctcacccactgatcctgatgctaccgtacttgttcttttatttaatttatattatgtgctaaactacaaaattatttattt

SEQ ID NO: 267120 - DNA, 380 bp, Glycine max
  unsure (1)..(380): unsure at all n locations
gctttatgccttaagaagagccctccaaactttggaacattaccttgtcacttaagtacattagagggtaaagcaagttaaacaaaaggcatgcaaaatggctagagtacctaaagcaatttccatatgttatcaaatacaaaaagggaaaaacaaatgtggtagctaatgccctctctaggagacacacattgttttgctccctatgagctcaaatttaggatttgataacattagggacttgtatgcttgagatgaatatttctctcccatttacaagagttgtgggaaaaaggaccaagatggattctatttggctgagggggtattgttcaaagagggaaagctctgcataccccaaggatccattangaaattac

SEQ ID NO: 267121 - DNA, 344 bp, Glycine max
  unsure (1)..(344): unsure at all n locations
atgtgtcatcacaatcacaattcttatatatattgaanaattacagagtggccgcaattgtagtcacaaaaggattcctaataaaaccctaaggtatcaccaccacaaactttattcttttaagccgattaaaagactaattattactctcgaatctagttacactaaaaattctatgttcctctctaataattatacactgcaaaaatgaaactcaaatcctctccacaaacattttatatattaagaaacattgtgaggttgtaatgcatgttctagtcctggttagtaacattatagcctagttttatggcaaaatctattcacaaatattttttataaat

SEQ ID NO: 267122 - DNA, 309 bp, Glycine max
acctacccaccccctatctctctttctcacgtttccaaagaagtgtcatatttctcaacaataaagcatggaagattgcaccgaccagatgaagccatccatggtgccattaccaagtcaataagtccccggaacgggtgacaggcgccacccaggtgtcaacttgttgactgataccaccaatatccaatgtaacttgaatcacctactctaataaatactttgtgaaccaacccaatatggtattaagtttcaaaaaatcacccattttggtcaattactccattaattgttatcacatttatatag

SEQ ID NO: 267123 - DNA, 342 bp, Glycine max
  unsure (1)..(342): unsure at all n locations
cctgcggcatgcaagcttagggatggaacacttacttgtnggtttgatcttattctcacaacggaatcaaaaaaatgcggaaaaggacgaccctagggctgcaaactcgtcaatcccgtgggtatggcttttgaaaggggggaaaagaagttcttgaatgcaaaaacgccccccctttcgtcattcttataatttggtgcaagggtggctcgcccaagcgagctaacttgcacattntttttttttttnttgaggggaacattaaccatgtcctctcccttctcatggattagcatcttgcctaacttgaacttacttaggttaaaattaggcgctgattac

SEQ ID NO: 267124 - DNA, 482 bp, Glycine max
  unsure (1)..(482): unsure at all n locations
ngctggattatggggcactcgncatatgtggtactaggtggttatctttcgttggagcaaatcaactctcccacatacacaaatcaaacaggaacccaccatccccagttgcccaccttcaactgagctcacgtactcccacgtagcccttatcctcgttcctctcagcaccgggtccccatcaacccctccaagcttgcataatatcccagcaatccagatacaactatcatgaactaccctacaccatgataacagggcagaggcagataactctgcccaaaacacattcacatattacaactttccttactcaaataccccaataacattctcttctttccgattcgttaaccgttggatcgacttgaaaattttactggaggttcctagtacataagtctacatattgaccgttgggatctgctacaacatgtccagaatgcactatgtactatcgtttccataaccagcaatgcaca

SEQ ID NO: 267125 - DNA, 130 bp, Glycine max
gaagagtatagcatatttatgtgatcgcattattgcatccagcggaggaaagatatcctctactctctctaaaagtgtacaagatcttctttaatgcctctaacataatttgtgccgtgaaaagcctctg

SEQ ID NO: 267126 - DNA, 313 bp, Glycine max
cctaagattcctaggaaactaaaagtttcttccctaccaaatgcctccttacatgaatgcaaggacattatatttatggtaaaaatattaaaaatgaaataaagaaaaagaatgggaggaaatggattatgcctacaagtagccaggaagattggggatagaatcaatgatcatgacactaatgaaagttgcaacaatggaccccctaatgacaacatgtgtcacccaataccaccttatgacatccatggccaagtgtaaattaaccaaaataacaacttctaaagtccagaggtctccaatgcttgccaca

SEQ ID NO: 267127 - DNA, 359 bp, Glycine max
actgttttaaaagttaactttcttaagagtaggtgtggtgcaattggggtggatgaaatacatgtaagagctttggcaggtattctacattgtagagttttaaccttcccttttgtgcatttgggaatcccaattaaagccaattcgaagagaaggagcacttggaggcctattgttgacaaatatgtgaagaaactatcatcttgaaaacataggcaactttatttgttggggagggtatgcctcataaattggggatgaacctctcttaccttttttctttttttctttctttactaggattgctaatggagtagtgaacaggctacacagaacatgagggattcttgtgggaaaaa

SEQ ID NO: 267128 - DNA, 387 bp, Glycine max
  unsure (1)..(387): unsure at all n locations
acatggaaacaacaaattattgattctatttaacacatttatgacaattgtaattacaaattgaaataaactatatgtctacaaaaatttcacatgtttgtttgtcatatcaaatctacatctatatgtcaaattaggataaagattttacataaaaacaacaaagagttgtttgatttcacaagtttagagttgtaattgcaaatcacaacacatgtagaatctccaatttgacaacacaaactttgtccattattgtgaggaaaatgggcaaaagagagaattagtgtgaagcaagacagtgaagtgaagttgctaagaaattgccttccaacttaaagccaaaagggcttgttaggtgcaactactcattacntcacttatccc

SEQ ID NO: 267129 - DNA, 200 bp, Glycine max
tacccactcctcaccattggtttcttagggaaaaacaccataactaaacgcgccacacggcattcctatcgcaccagatccaaatctaaaaccatgggtgatcaagacgagacacaggaacagatgaaagcgcacctgtcggctttgacaaaacaaatggcttccatgatcgaggccatgctacgaatgaggcacctcat

SEQ ID NO: 267130 - DNA, 369 bp, Glycine max
  unsure (1)..(369): unsure at all n locations
agctntccacgaagagatctaggatggacgtctttgttgataggaccagcgctaccctngagtttgatagccaccgtttcaggagcgccgagcaccaccagcgctttgaggccatcaaaggatggtcattccaccgagagagacgtgtccagctcatggacgatgagtacaccgatttttatgaagagatagctcgccgacattggatgtcgttggtcactcccatggctaagtttgacccagatatagtcctggagctttatgctaatgcttggcccacacaagagggagtgcgggacatgcggtcatatgtgaggggtcagtggattcctggcgatgggaggcgcctgcagaggctcccaccgatac

SEQ ID NO: 267131 - DNA, 421 bp, Glycine max
agcttgacaatgtcatatgataaatgatttgtataaaacgtgagaacaaatcaaagtatttttgtaaaatttagaaaacaaaattaaaccaaaaaaataaaaaggtatttaatcttatatttatatataattatttttttaaaaatgtataaatgatggttaagataagcatggcaatggagcaccacgagaatgaatgttattacatattcttgttccctaacatcgtctccatcctcgtctcagattctcgaagatgataattaacaaatatataagagagaaaatgaatatttataaccacaatagttatcatagatacttacataagaataatgtagatgtgtagacttaattatcatggtagatcttatttggcactataatttattttctgttttacaaaatataatattatatt

SEQ ID NO: 267132 - DNA, 324 bp, Glycine max
  unsure (1)..(324): unsure at all n locations
ntgagcanattcaaacgacacataacgtttactcggatgtccgattgagtcccgtaatatatcgagacgctcgtaattgaaaacagaagctctgagcaaattcaaacgacaataacgttttactcggatgtccgattgagtcccgtaatatatcgagacgctcgtaattgaaaacagatgctctgagcaaattcaaacgacaataacttttgactcggatgtccgattgtgtccagtagtatatcgagacgctcgtaattgaaaacagaagctctgagcanattcaaacgacaataactttcgactcggatgtgcgattgagtc

SEQ ID NO: 267133 - DNA, 408 bp, Glycine max
  unsure (1)..(408): unsure at all n locations
ctcgacccgngaccttaagtcacctgcggcatgcaagcttgtacgcacatcgttcgcgtgtatgatatccactccacaaggtttgaagtagaggagagcttcaaccctataacgcaacgtggcggacaaaagtgggcagtaaacttgaatgatcgtcattgtcaatgcggaaggtatnttgcgcttcactatccatgttcacacattattgcagcttgtggttacatgagcatgaactactaccaatatatagatgttgtttatacaaacgaacacatcttaaaagcttactccgcacaatggtggcctcttgggaatgaagcggctattcctccttctgatgatgcatggacacttatccctgacccactacaattcgtgcgaaagggctggcaaaatcaccaggat

SEQ ID NO: 267134 - DNA, 171 bp, Glycine max
  unsure (1)..(171): unsure at all n locations
tcaagtgcgtagattacataaaactatttatggcctanagcatgctcctagagctnggtttgacaaattgaaagctactattctcaatctacagttttcttcaagtaaatgtggtcgttctctattggttttttctaataccaagttggtggccaccattggggtctatat

SEQ ID NO: 267135 - DNA, 311 bp, Glycine max
ttgagcagatgcacacgacaataacgttttactcggatgtcctattgagtcccgtaatatatcgagacgctcgtaattgaaaacataagctctgagcgaattcaaacgactataacgttttactcggatgtccgattgagtcccgtaatatatcgagacgctcgtaattgaaaacagatgctctgagcaaattcaaacgacaataacttttgactcggatgcccgattgtgtctagtaatatatcgagacgctcgaaattgaaaacagaagctctgagcaaattcacacgacattaacttttgactcggat

SEQ ID NO: 267136 - DNA, 481 bp, Glycine max
  unsure (1)..(481): unsure at all n locations
tgccgtccagctcgcccaggcgagcaaagttgcttcctccataagcatcagccttctggagggcccaagtgggcctggtttctatttacacccgctttctactaaatgcaccccccttttctatttttnttgtaattctttttccgtaacattacgaaactttatgaatttcgtaacgatacttattttccttccgcaaggttacgaatccttacggattatgtatttactcttttttggctctcaaagaagttacagaaactcacggattgcgcaaaaacacctcttttcgatttccgccacattacggaatttcacggattacgcaagcctgcttccttttggatttttgagacgtctcgggacttcatttattgcatgtcatcaagtaataatcccccgacgaaattacggtatgatagttgccnctctttacttgcctctcatcggagataagacgacagcatagatatgacactga

SEQ ID NO: 267137 - DNA, 410 bp, Glycine max
ctgcagctgcagcttgcaccactcgccagcagctttttgtttctccaaagcaccgccttctggagaactttctggaaggccgaagtggacctggtttctatttgcacccccgtgctcactaaatacacctcttgccttttttgctgattcttttttcgtaactttacggaaacttatgaattacgtaacgatacttgttttctttctgtaatgctacgaaaccttatggatcacgtaatcatccccttttttagcttccgggatgttacagaactttacggattgcgcactagcacttcctcttgacttccggcatgtcacggaccttcacgggttgtgcaacaatgctttcttttgacttctggcatgtcacggaacttcacgaattgcctaacgatgggtgccgacta

SEQ ID NO: 267138 - DNA, 480 bp, Glycine max
tcgaggccctatgacgttatccccacaggataggtttagcgcgggcatgacattcaggggacgaggtggagcattgacattgtccgcgaacgcttgacatttatggcattggcttacatgggtacaacaatcactttccatattgagccagtaataacctgctctcatgatcttcctggccatagcatgcccattggcatgcgttcaacacgaaccctcatggacttgctcgatcatgtgtgtcgcttctatggcatccacgcatcacaggatggtcgtgtcatgctttctcttatataggatgctactgctcatgaataaaccggccgccaatcttctgaatgttcttctatcattgtcggaagcccacggaggatattctttgctttcaacgaatcgcttgatatctaaataccaaagctgaccggaccattcctcttacacctgacaacaatgcgggtctgcagtacaccagaactc

SEQ ID NO: 267139 - DNA, 400 bp, Glycine max
ctgaggctgcagcttgcaattcctctgcatgacaacatttactttatctgctccttcaacttgagcaacaaatatttcccaataattaatgtcattatagtaaattaacaatacaaatttgcagtacatatacatacccaaactctctgttgaggctctgagcagctgttgttgctgctcttcctccaacatatatcttggtaaaatcctcgttgattcgttgaaggaaagcaattggaatctgccgtctagaaaactcaatggtagccacacaataagctacaacaatcagcggacacttaattagttccaactaacagtaattattacttcagtcaatgaaacaaaaacaaagaaagtatcagcagcagaaagcagcaagttccaaaaacacagtcat

SEQ ID NO: 267140 - DNA, 288 bp, Glycine max
tttgatgcaaaagagtcttgtgagacatacttaaaagttccacttctcttcctcttttattcctctaatttggcgctcccgcctctgtctttctctccctctttcttttcatccattgaagcatcctttcaagctccttatccagcgctatctcggtggggaagctccttctccatggcttattccctagtggatggcgcctgctctcacctctcctcctttgtcttccgctggatctccatggtggaaaataaccattaaaggacctcattgaagctctaagatcca

SEQ ID NO: 267141 - DNA, 368 bp, Glycine max
ggatcttaagtcacctgcggcatgcaagcttatgagaacactagggctttctttatttgctctggcccaatcttcttggagtcttctatccaatgcccttgggggtaggattacatcaactaagtaggtagagtttaagaggtccacaattataaacattagtgattagaagcaatttgaagcacctgatgagattgatcaagatcttcaaatgcatccttaacatcagaattcaacactagttaaaggaattgaatggacgagtcaaaactattcaaagcataccaaaaccatggcacccataaagtcaaatagacaaatcaaagctcttgaaatatatggctttgatattttgtcttatgtgctat

SEQ ID NO: 267142 - DNA, 136 bp, Glycine max
cgcatgaactagttcagcagagatcaattatgagtatatatcagttcgttgagaaggtggtatgaccaaaagcccgaccttattttgtgggggataatgaaagttttacagtccaggcacctcaacagcatgggcc

SEQ ID NO: 267143 - DNA, 351 bp, Glycine max
gcaagtcaactcttcacatccacagatcacacataaacccaccattcccagttgcccaccttcactgagctcacatactgctacgtaggccttatcctcgttcctctcaacactgggtccccatcaatctctccaagcttccacaacatccaagcaattcaacatcccaaacatcatgaactatcaaaaccaaggaaaacagggcagaggcatataactctgtccaacacaaaccaatatcacaacttttctcacttaaaaaacccaaggacattcctcctcgttccaatttgttaacccgtggatcgactcgaaaattttactggaagtctttagcacataagtctacat

SEQ ID NO: 267144 - DNA, 481 bp, Glycine max
  unsure (1)..(481): unsure at all n locations
tgattggtgagttgattntagccttagtttcactgtggttattattctatttcaattaagaaaaatcccaaagaaaagtgttcgattgattntttttattattttattgaaagatatttttttattattatattattattttgcctctttttggttttaaacgtggttacgacgtgaaagatcggtcggattttattctaacagagattaaaagatattacaactcaaatgatcggtgaaaatttattttatttttgattaggcgagacaatgacttaaataaatggttaaagcacgtcaaaagggggtacataaagcaaacgaaataaaaatagaagcacacgaaacaagtggggaccactaagggcacatagaatgaattgaaaggttcaatttcgggatcttaccgattgaagaccgaagaacgatgaanaacgatgaagaacgatggagaatcttcacgaaatcacccacaaaaacg

SEQ ID NO: 267145 - DNA, 434 bp, Glycine max
  unsure (1)..(434): unsure at all n locations
tcacttcatcttgagataaggttctatcattgagccattgacttcgtatccaccttccttggggcttggctcaatggttcctttgaatcctttgtaccatggatccattggcaccattgtctccccactcaataaacgcctaacattggcaatgatttcccttggattataattgggaatgtaagaactgcagtctatcccaattcgttgactaccattgacaagaaccaatggtattactggtatgtacctgtaaggccagacaacanaaattatgtttaagggacacatgcaaatgcagtagaaaagacaaacaaactctacaaactgataaactgtgtttgaataccataaacaaacaagggctaaagtggagatgtttcactctcaaccgcaccatctaagatactgacaaaaacatgtcgatgagaagt

SEQ ID NO: 267146 - DNA, 398 bp, Glycine max
agcttatgctgcaaatatttacaatataccttctcaacctcagcagcaaaatcaaccacagcagaacaattatgacctctccagcaacagatacaaccctggatggaggaatcaccctaatctcagatggtccagccctcagcaacaacaacagtagcctactccttccttccaaaatgctgttggcccaagcagaccatacattcctccaccaatccaacaacagcaacaaccccagaaacagccaacagttgaggcccctccacaaccttccctcgaagaacttgtgagacaaatgactatgcaaaacatgcagtttcaacaagagactcgcgggatgcgtgttccacgaaaggaatacgcacggagtcgccaccaacgtttatttgaggaaaacg

SEQ ID NO: 267147 - DNA, 445 bp, Glycine max
tcttagtttcagatgatgcagatgggtttgtagctacctcatgcactcctctaatgactatggcatcatttctggcactaaactgctgggagttggaggccatcttctcaattaaatttctggcttcagcaggagtcatgtctccaagggctccaccactggcagcatctatcatacttctctccatattactgagtccttcataaaaatattggagaagaaagatgtctgaaatctgatggtgggggcaactggcacatagtttcttaaatctctcccagtactcatacaggctctctccactgagttgtctaatacctgagatatccttcctgatggctgtggtcctggaagcccggaaaattttttctaagaatactctctttacgtgcaaaatagaaaatggtgatgaaaatgtgtttggttgaatttctgtttcattttc

SEQ ID NO: 267148 - DNA, 371 bp, Glycine max
accaccagatttgtgagcaactcctctcttaatatctctatgagggacttagcagcatgaacaggagtatgatagatgctgcccgtggtggagctctctgtgatataacccctgctgatgctacgaatttgattgataacatgacttccaactccctaccattcagtgtctgatacgatgctattgtcctcacacgagtgcattatcgaggactgggcttcatattgatctactgtaaatgaccagcttgcgggaacacttgatgcattggtcaacctaggaactcaactcgccatgaatcatatatctgcacctgtcgcaatagtgattggcctatgttcatgtgcacatgacactacatatctctatgc

SEQ ID NO: 267149 - DNA, 484 bp, Glycine max
  unsure (1)..(484): unsure at all n locations
acccggatccttaagtcacctgcggcatgcaagcttcaagccaaggccatactctcgtgcttgcagaggcttntcaagaanaaatgccaaactctcccataaaatctgatttcaagcttaaataggtgggttggtccgtgctcgtgcgcttagtgcaaatctgaatcgcttagcacgcataagtggattttggcttagcgcgcttctctcgcttagcggatgagctgaagcggtgcgcttgatgacctggagcattgcgctcagcaaacctgacagctcatcttcttctggattcttcctcgtgcttagccacttaatgtcgagcttagcgaatgcttgctaagctagaagattggcttagtgagaaggtgaaaacaacacttttggcatcttgcctaattaacctgaaattgagagaaattgattattaacacacaaacaaaaataaatttctattacctattttaacaaaagtcttatacat

SEQ ID NO: 267150 - DNA, 383 bp, Glycine max
agcttggtggaaagaacttgtagaggtgggtcatggtgatttgaaagataagccatggtggcaaaagatgcaaactcgtgaagagttggttgaagcttccgctatggattgcttcagctcttcatgctgttgttaactttggacagtatccatatggaggtttaatcctgaataggccaactattagcaggagattcatgcctgagaaagggtctcctgaatatgatgcgttggctaagaaccctgagaaggagtttttgaagactattactgcaagaaagagaccctcattgaccttacagttatagaaattttatcaaggcacgcatctgatgagttctaccttgggcagagagatggtggtgactactggacatctgatg

SEQ ID NO: 267151 - DNA, 409 bp, Glycine max
tgtctgagtattgcgaaagattcaagacattgtgtgcaagctattctcaccaccagatttctgagcaactccttcttcaatatttctatgagggacttatcaacatgaagaggagtatgattgatgctgccagtggtggagctcttggtgatatgacccctgctgaggctaggaatttgattgataagatgacttccaactcccaacaattcagtgtaagaaatgatgctatcgtgctcagaggagttcatgaggtggccacggattcatcttcatctactgaaaataaaaagcttgagggaaaacttgatgccttggttaacctagtaactcaacttgccatgaatcagaaatctgcacctgttgcaagagtctttggtctatgttcttcttgagatcaccatacata

SEQ ID NO: 267152 - DNA, 405 bp, Glycine max
  unsure (1)..(405): unsure at all n locations
tcgattcattctatgtgcccgnggtggcccacattgtgtttcgtgcattattattctcgctttgtttactttttataccccctgttgacgtgcttaagccattttacttaagtcatttctcgcttaacttaaaaataaaataaatttccaccgaacgtttgaattgtattatccattaacttcggttaaaataaattccgaccgttcggtcgtgccgtaatcacattggaaatcaaaaagaggtaaaaaataatataataatcaaaaagacatcttttagtaaaataaagcggaaaatcaatcggacgttttctctttgggatttctcattcttaatcgaattgattaataactaaagtgaaactaagggctaaatcaactcacctagtcaagctcgtccacaaa

SEQ ID NO: 267153 - DNA, 478 bp, Glycine max
  unsure (1)..(478): unsure at all n locations
gctgtgacacgcggagatatacgtcatcttccacgctcacaagatctgtcatactcaaatatgagtcacgctgacgggcggaaatacccgagtggttatccgtataaacattcttttttgttgtctgtaagacgaanagcctgatagcaagcagagactaacgtcgttttctgcgcccttcgtcaatcgcggccgacaagtcccgttgacacgcggagatatacgtcatcttccgcgcacacaagatctgtcatactgacatttgagtcacgttgacggccggaaatacccaagtggttatccgtataaactttcttttttgctgtctgtaagacgaaaagcctgatagcacgcagagactaacgtcgtcttctgtgcccttcgtcaatcgcggccgacaagcccatngacacgcggagatatacgtcaacttccgcgctcacaagatttgtcatactgacatttgagtcacgttgac

SEQ ID NO: 267154 - DNA, 410 bp, Glycine max
agcgacctgcggcatcaagcttgtactctcctatgtgtaccagcagttgtgttttctatgtatgtcatgatctaacttcatgtgagtaatattgttgttggagcaccctatgaatttcttctatgaatgattggccaccttagaagtgtacaagttggaaaagtgaaaaatttatcccctggcaagtgtttctatgtatacgttcattaggttctacttcactttattaccctttttcctacttggcttcttttatgattctagacaaatctttatgctaggatttttaataaaagagtcttaagaggaaatgccaccttatcatatggggagggttctaatcacacagattgtttatacttggtgaatgcttattctttctttctcgagatgtgtgcaatggttgtttg

SEQ ID NO: 267155 - DNA, 82 bp, Glycine max
tttgattttggttaaagcctgacacaggctttatcttttttcctctccttgcgcaagatcagcaggctaccgctgaatcttt

SEQ ID NO: 267156 - DNA, 420 bp, Glycine max
agcttatccttatggcctgcctgcggactttatccccttttgtcccccggaagatttaagccaagcccctacttttgaggggcaactcccaccttatgaagactatcccgggcaagacgatggggaaggagatacccatcttggccccctgctccacctcaaagatctgtccccgcatgaactaccccaaccgaacatagtccgtcataccccggcctcacccacacccgtaaaagaatctgttcccttcacagaagataagggaaagattgaggcgcttgaagagaggttgagagcagtcgagggcctcggcaattacccattctcggatttagcagatttatgtctcgtgcccaacatcgtcatccctcccaagttcaaagtaccacactttgataagtacaaacggacgacatgttc

SEQ ID NO: 267157 - DNA, 245 bp, Glycine max
  unsure (1)..(245): unsure at all n locations
atatatntgcacggcgcctatgtacgatagtgttacacatcttgtaatctgcactaacaataattaaaaattcctcactgctttcctctcagtataacaatgtcagaaggattcacaatgacactggaacacacggatcaaaatatagtggtgctttactgtaaaacttggtttcactaagaacaatggaaattaaaccccaaacagaaatttggtttcttcttctaaatctgacatgagcacgc

SEQ ID NO: 267158 - DNA, 324 bp, Glycine max
  unsure (1)..(324): unsure at all n locations
ttgttcaaaatcggacgtaatagtagtggtaaagaccaaccaacataactctgtgtaatccctttcttccatacatctatcgtcaaacgtcaatttgggactatggcttttttaactcaaatgggcctagggtggaaaactcttcatttgagcgcattaaaatctgttcttaaactggttacctgacacaccactatttggtaaaatgctgtataaaaaactttaagatcacacttcaccttcccttcttgaattttcgcctttaaatggaagnggacaccttaatataatcgggagcctattaaggtatataccagtgcggaa

SEQ ID NO: 267159 - DNA, 342 bp, Glycine max
  unsure (1)..(342): unsure at all n locations
gctctaaactntatacaagaatgaagctcttataccacttgttacacaagtggcctcagatatcttaagaaggggggttgaattaacatattccaaactacttccccaattaaaaatctatttcactttctattcaagttataaattcccttaacaatgaacttcttaaatattaattcacataaaaaccatttgaatatgaatataaagcaataataaacaaaggagtttaagagaagagaaagtgccaactcagaattatactggttcggccacacccttgtgcctacgtccagtccccaagcaacccgcttgagagttccactatctttgtaaatcctt

SEQ ID NO: 267160 - DNA, 320 bp, Glycine max
  unsure (1)..(320): unsure at all n locations
gaaagtgaaaccatagttaccaggttcccaataagtcacttggagaagtattcagtacataagggatgtacttagtcggtaggctataggtttgcctcacaagattttttttcttccattcttgcatccatcaaaactagaataagaaaactatagtaatgctataagaagggttttaaatagcatgctatagcggcatagtagagcagcccctgtctggtataggggttgctgtagtggagctgtttantgtagtggccatagaaagaccaaatagagggttaaatagcagccatagtggcactatatgttgattcaaa

SEQ ID NO: 267161 - DNA, 442 bp, Glycine max
  unsure (1)..(442): unsure at all n locations
atcttgtgtggttggatggagcattttgtgtcctatatggatgttagttcaaggtggtgaattgttgggctatgactcatatggaagattattctgttattttttctgttntgtcctctttctatataaggcaaggatgccctgtattttctagacagaggataagcttccacttgtatactacaaccataataaaaaagctttctgtttttccctcccatggatgtagcattgatcaaggtgaaccacantaatttgcgtgttctttctctcctttcttctctttcaattctgctacaattttgtgtgtatgacatttatggtctattgcattttctgctactttcttgtttgttcttcatcacttccataacacttataatgtgtgcatgtgacagaagaatttccacttggccgacccttggcttgcggcacatgaaac

SEQ ID NO: 267162 - DNA, 383 bp, Glycine max
  unsure (1)..(383): unsure at all n locations
ttgcatcacctctcaatgagctggtgaagaagaatgtggcatttacctcgggtgaaaaacaagagcaagcctttgctntgctcaaagaaaagcttactaaggcacctggtctagctcttcctgacttttctaaaacttttgagctagaatgtgatgcctctggagtgngagttggagctgtattgttacaaggtgggcaccctattgcttattttagtgaaaaacttcatagtgccaccctcaactaccccacctatgataaagagctttatgccttaataagagcacctccaacttgggaacattaccttgtttccaaggaatttgtcattcatagtgatcatcaatcacttaagtacattagagggcaaagcaagttaaca

SEQ ID NO: 267163 - DNA, 487 bp, Glycine max
taattgtaatgcatgtaaaacttatcaaataatttattatattttaagtgaaattatagttgcttaattggttattgaatggtgataattcaaaagtattcagtttttttaaaattatggtttagggtttttaaaagtattcagtgtttttcaaaattatgataaaattttaaaaatatatgaataattattttcattttttaatatttgttttaaagaaattagtaaattccagacaacgtataacagaaaagaactgttgaaagggcacatatttataaacctttttttaaaaatcatttttttataatgttaaaatcaacagtaaaaaattaatttatcaccatctattttttaaaagtaatcattatgattctaaaaaatctcctattccgataaaagaaaataaaaaatcttaatataaaaaaatgaagacacacatatgcactatattagcccgtatatgttattgaagcaacaaattcta

SEQ ID NO: 267164 - DNA, 389 bp, Glycine max
agctttgttgggcaacaatggtggaggaagtatattattaataaagctgcgtgagagagagggagagcttctgaaatttcttttgggctgagtgaggagagagagagaggtgctttttggttttaaaaaggggtttctctttttctattattctatttaagctatgccacatgtctccatttgagtggagcaaaaagggcccactttctcttttgattgtgacccatactcagccacaaaaagtgagaaaaatatgacctttgaaacgcctaaatcctgcctcgatttgcatgccgtttctctggttccagttcctcgtgtttctctgcgttcgtcggggccagttttcgaaagtaatcaatatatatattcaaacgctcagaataaaa

SEQ ID NO: 267165 - DNA, 300 bp, Glycine max
  unsure (1)..(300): unsure at all n locations
aactcaagctncggtgacgaggtgaacagaaagagaactgagacaagttttcagttgttcactagctaaggcgaacactcgcgctaagtgccaagtcttcacgcgctaagcgggcccttgctcgcgctaaacacttataaccctgattagtggctagatggtagcgctaagcgcgctttgctgtgctaaacccaattatctatttggaacctaaatttctcacatagggcttaacgaggtgatgcgcttagcgccaattcttctctgctttgaaaatctgtggatagcgctaagcgcgtg

SEQ ID NO: 267166 - DNA, 429 bp, Glycine max
agcttgttaattacgactgcactactgtacttcttgagaataggtgttgaaaatgaagagttagcttcctgtttactctatactcactaaaacgaaacctttcaaattatttgaaaggagttcttgcagtataaaaactgaatatagaaaaggaaaagactggttgatagcgatacaagagatgatcgagaatgtcatgaattaagcaaattaagaaacactactaactgtaacatgtccttaatctctttaacactttaaagtctcaatcttcgaactataaaataggagaaataaactatgaaggaatggcacactacaagcatgatcacaaaactgaatgtaattatgctccacaaatgccatcaagagctcacgcttattacacatcataatgaatcaaaactgccatatgcttaaaccaaatac

SEQ ID NO: 267167 - DNA, 452 bp, Glycine max
  unsure (1)..(452): unsure at all n locations
tgtacttgttttatntaaatgcctaggatcatgatcaactatgtgtgtcctactatgacttgagaaacaaaagtgatcaaataacaagcagagatttaaaaggtactaggttgcctcctagtagcgcttctttaacgtcttgagctggacgcatgatggcttgtcggtcacggacctactactttccttacctttgactttggacttggttgcctattggtcggccatgggtcgtaagcaacgctctaacctttttgtggatgagctgaggtgaactctacaagtgatggcggtgcgtctgttgcccgctgttggccatccccaggctgctgcggtgtttccgcctacgcctgcctggggacgcagcacttcttgatgaaagctcgattagtagggggcctaatgcccttgctggaggcgacaggcactccgtagaactgcagagacccgta

SEQ ID NO: 267168 - DNA, 319 bp, Glycine max
agctatgaatgctctattcaatggagttgacaagaatatcttcagactgatcaacacatgcccaatggccaaggatgcatgggagatcctgaaaaccactcatgaaggaacctccaaagtgaagatgtccagattgcaactattggccacaaaattcgaaaatctgaagatgaaagaggaagagtgtattcatgacttccacatgaacattcttgaaattgccaatgcttgcactgccttgggagaaaggatgacagatgaaaagctggtgagaaagatcctcagatccttgcctaagagatatgacatgaaagtcact

SEQ ID NO: 267169 - DNA, 428 bp, Glycine max
  unsure (1)..(428): unsure at all n locations
tctggtgggacatctagacttgctgtccaatctgacattcctctcagattctgccttcttctattgtcagattgggaatgcctctaacagcacctttgtcaatgattatcttcatgcctcttaagtgcagatgtccaaatctttgatgccatattctgacttcatcttctttggaggatagacatgtggaggagtagctagtttcttggggtgtccataggtaacaattgtcctttgatctgctgcccttcattagaacttcactcttctcatttgtcaccaagcattctgactttgtgaagtttacattgaacccttcatcacacagctgactgatgctgatcaagtttgcagtcaggcccttcaccagcaggactttngtcagactaagaagtccatcatgagctagctgtccattccaatgatct

SEQ ID NO: 267170 - DNA, 403 bp, Glycine max
  unsure (1)..(403): unsure at all n locations
agcttgaatatgatgtaaaagaaagtgaatgtgatccttttaccctgttgaaaggattntatttaaatgtgttttaagaacttttaattaattatgatttcttttccttttattagtacatatatgtatggggtagagggtgtcacacttttagctagttaacttagttctcttcggtctattcttagtcgagtagcctagctattttggtctttctttatccaaatagattaagttatccgcgatgtatcttcagtcgactgtaactgccagtctattattaagtccaatctttattcaatattatcaacgccctactttggtttatcagagagatgattattattctccgatttatattccaataatgtngatgaaaataattgttttattaatgaaaaaa

SEQ ID NO: 267171 - DNA, 244 bp, Glycine max
  unsure (1)..(244): unsure at all n locations
tcttgataatgaatcaagctgattcaagtagttttgatgatatcttagatgatgacacacagttcacgagaatgatntcaagattgagtcaacaagtttcaagaatcacaagaagtttgatctcaagattcaagagaagatgagttccagattccagagatgaaatcacgaagacttcacaggggaagtattgaaaagatttttcanaaaacaaacatagcacgagtttgtttttcagaagagt

SEQ ID NO: 267172 - DNA, 312 bp, Glycine max
gagtttaggatcaactaggatatttaaacggaaacgttaactatcacaaaaacgttaatttttactaaacttattttattaatgtatattattaacttgtgtacactttagatggcaagaaccccttggttggattatcaaaattacacaattttttgattaccaagatattcccaatgcggagaggctcaccattgacgttgtttacatggaaggaaccaacctctattatttctaattggatgattaagaacgggtaacttacttcttgggccgttacatcgtattacaatgaccactactgtgcgctat

SEQ ID NO: 267173 - DNA, 335 bp, Glycine max
tacaaatatcaagactaaactccgtcctaaacttcaaaggtccaactgcaaaaaagaaagaatgccctaaatatcttaacatatgaactgggtgagaattatccttgaacatcccaagttagtcctaagagaacaattgtgttcttggttagagtgtcggttcccgagctgcaattaactcaactgacttagtcctctccctcttgggttgcataaaatataaataatatatatgtttaaacaattgtagagatggtattaacttggtatggcgttgttcctactgagatactttatgtttctccacaggattgagttgcacaactacttttttt

SEQ ID NO: 267174 - DNA, 287 bp, Glycine max
gacattgctgactctgtggagaatactaataagacatgattgtctgttatgattaacaagctgaaggagagtagtatcattaacgcaagcaaccactttctgttaaatccaaaactcttctttcaacgagttatatagttgttgtgtgcagtgttaattgcgatactttcacactccaaattttcgttcatacccgagataatatggtacgaagggagaaattgatgtgaatcatgagatgcacatgcagtaataagaaagctacccgcttaatgagaatatcgacg

SEQ ID NO: 267175 - DNA, 81 bp, Glycine max
cagaagaccggccgtaaaacactgacacaggtaaccccacaccaaagcaaactccgggcacaaccctgttagaaccctttc

SEQ ID NO: 267176 - DNA, 378 bp, Glycine max
  unsure (1)..(378): unsure at all n locations
tcaccacatacacactccccatttgactnttaaagagaataaacaagactctatatttatactggcagcttcatacagaataaatatgaacatatatctgtgagacagaaataaatgtgaagttatatctttataagaaaaagaactaaccatagcaatagcatcttctacatcaaccttgattctgcctgccacacgccctttaaaggattcaagtgcatctctaagcttcatcaaagaacaaagttttccatgaagctgcctctctaagtctagcctgaacttcaccagcatacaaaaagctagtttaaaaaggggcgacagtcaattagtaaacgatgaataaatcactggttatttcagcggccacattttaca

SEQ ID NO: 267177 - DNA, 410 bp, Glycine max
  unsure (1)..(410): unsure at all n locations
agcttttgatgtanaaagaagacaaagagcttatatattttaatataaaatttttctgtcgggtgttataaatcttacctttgtcatccatagtgtaatatgttttgaacttaactaaaatatatcctagatatgatcagatctcctattcaattacaaattacttatgatgaaaaaattttgacttttacaaaatactggtttaaaaattatatttgagataatttttttattaaatggcaatataaaaatatttaactgattgtgtataaaaattaaatttatatcttaatacaaacttttaaattatgtgatataataattattcctattcttataatttaagctttaatatatcttacaaaaacatatttgggtacatgaaaaatattttttctataaatacataa

SEQ ID NO: 267178 - DNA, 472 bp, Glycine max
cggacctatgaatctcagctgtcgggaacacatggagaaggaaatctcagagtttttcttattgggatgtgctgactccaaaacgattcatattggaggcgttacgcgagaccagtgtgattgaatgtgatggtaataaaggagattcatgcttgatgcattcgggagtgttacacgatgtataaaggtgcccaatagctgaggatttgctgcagggactgatatgtataggtcaaattgaaatccacagtgcaaaaaaggaggaagaaggggtattcatgcagtcgagtggcaaaagcctttagtaattcatttcaccagagatattaccactcagatacctcgaggtttctagccctctatagcaaagacactatcacccttcccttataagagtggcaatgtaatactgtggaggtatggcgtacacggatctgatagaaggctgacgcattcgtatacgtgctggact

SEQ ID NO: 267179 - DNA, 456 bp, Glycine max
actcagcttcacacatccagcaaacacattcgcacagcacagttatttatttcttcaacagagcaaggcagaaactctgtctaacaccaaccaaaaatcacagcttttcccctcaaagaccccagtaacaatttccttcgatccaattcgataaccgttggatcgactccaaaattttactggaagtctatagtgcataagcctacattttgaccgttgggatctactatcaaacatccagaactcattctacattactctgtccacaaccagcaaatacatggatttttctgcacttgtgcagaatactgctgcacaattatacagcgaaatctgcacaaagagcatattttgaaaaccacaacttccctcatccaatcttgcccaaatcaatttctacaagtcccaattcatgtatcaatcatgtctaacccaaaatcaagcttcagaacacag

SEQ ID NO: 267180 - DNA, 350 bp, Glycine max
agctggattcaaacgctgttagaactttcttttaaacggaccaaaagagtataggaatactttcaaccgaaattaccttagaattcatgccatgtaaatcccaaaattcgacagactaaacttataaacaattatgcgcaagacagataaaagatcctatccacgacataaggaaaagctttatcttgaagctgttatacaggacatctcttttatcaataattccaataacgaacaataaaaatggtgttcttaactaagaatagatattcacgatccaaaactacggactgtatggtatggtaaagtactaaaagataatcattgcatttagtattatacattggaca

SEQ ID NO: 267181 - DNA, 409 bp, Glycine max
agcttctcccctattatgctataaatagggtttatcgttcttggcacttctctctctctcgaaattgctgaggaaaattatttccgtgaagaaaatcctagccgaggcgcttccgtaacgtttccgtgaataattacgcgaagattctcgaccgttcttcaagattcatcgttcgttcttcgttttcttcagtcttcaacgggtaagtacctcaaaccgagcttttcaattcattctatgtacccgtggtggtccacattttgtttcatgttgtcataccctaattacgtccggggacctttgcttgatgacatgcgacttttgtttggtccttggaaggtgcttggcacccatcattaggcaattcgtgaaattccgggacatgccgaaaaagaaaagaaatattgat

SEQ ID NO: 267182 - DNA, 461 bp, Glycine max
  unsure (1)..(461): unsure at all n locations
tatgtggttgcttggattattactccaagggtgagaagtcatgctcagttgaaactaaagatcaattgggtcaacattattgttgatatcatgttgaagaccaaaatgatttgctttttcaaatgtccttatatagttatgatctccacgattgttgagtattttgttgttaatacccaataggaagtctttggtttttttgaggcaaaatttgaagtaaagaccaaagtcttgaagcaaatggggtacataaagtctgaagaagttgggatttggtggattgagaagagaagagaacatcatatataacaaaaagaagctgaagagaagaccatgagccttttatgcaattctaatctccaggattcatgactattttgttgttgatacctaanaggaagtctttggttttgtcgaggcagaatttgaagtaaagaccaaagtcttgaagtagatggggg

SEQ ID NO: 267183 - DNA, 386 bp, Glycine max
ctccctttgaccgtcgatgaccacctaaatgcacgatttaaccttgtcaaacgtctcaatagcattcagtcttttgcactcatagcactacattctcactttctaacgcctaggttaactctacccttcatctgtaggagtttttcatagagcaatttcgagcacacggacatcgtcaaggcatgcatcataaagaactccttaagacagaaccgggtaagcgttgactcacaccaaacatgacaagtttaacatgctttcatcagagttcttcacaaataaccatcacaatgcgtaaacctagtaaaactacccatcatatctgccaaaacccaatacccacgaaaatcatgtgagaaagaaggctacccatacctgaaatttgg

SEQ ID NO: 267184 - DNA, 337 bp, Glycine max
cgatcttcagccttgtattttggctatattattatggtgtatgaacaatttactatttccctatttgtatggcatgtttgaacaaatattaagtatgttattcgactatatgggttttatagataatttatatatgattgttgcttcatgattcttgcttcatggtttggttgctagattctcaataaatgttgtatggatgtttagttatatttgattatttaaaaattgctactcacttttgcttttcgttgatgccaaatggggagagaaatgggactaaaatcaagaactcacatgagtgatgcatttaattttacgatatgcacaagatatg

SEQ ID NO: 267185 - DNA, 355 bp, Glycine max
acgaatgaggaacgtcgaagaacggttgaaacctctgcgagattcctcacggagaacgttacggaatcgtttcggaagcgcctcggcttagattttcttcacggaaacaatttttccaagcacatttgaaagagagaaaagtgcctaaggagctgaaccccttccttcttcacttcctcccctatttatagcaaaaaaggggaggtggttgccgcccagctcgcccaggcgagcagggttgcttcctccagaagcaaccggcttctggaggaatatttcggagggcccaagtgggcctgggtgctatttgccccccatttttactaagaacaccgccctctgctggtttgggcga

SEQ ID NO: 267186 - DNA, 457 bp, Glycine max
  unsure (1)..(457): unsure at all n locations
tgtggggatgttgagatctatgtacaatgctaactaaatttattaattaaatggagtgctaaataagaattaatggaggccaacaagtcaagctaacatgtgaccagcgtccttgttgttgaagtaaaagtaagattttttgcgagaggaagtgctagacagtacggtagaaaagccattgtatttgccatcaaattttgataaccctattttggtaagaaagtcanatagctcattttctcggacaaaaggctgggccatgtagtcctcaattgccatccactgaaaaaacaaagaagaatcacataaccatgattggcataattcataactattaataattgaaattatctcatttaatatacacatctcgttagattatatccttaaatcactttgtaaatttcagaattgtcttctaacttagattaacttctcactttttgttatattatta

SEQ ID NO: 267187 - DNA, 346 bp, Glycine max
aaaacctccgctgaaattaaggctaacttctcataatttgaggcgactgactaagctacaaggtttttttgcccgctgacttataaactacctgcctgaaatctttttataaaccctcttacattaataataatatttctttgtctttgagtagaacctataggaaagttaagaaaacgaaaccaataaaatatgagaatatataggggccatactccacctaattgaattaaagctacttgatatagaatagaattatgaacattatgtgaatcaaacttgatagtttcaaaaatataattgacccaaaagaacaaacgattattattataatataaatatatat

SEQ ID NO: 267188 - DNA, 434 bp, Glycine max
tatcatcttttttgagtgactcacgataaccgtgagtttactttaattggtggacactacaaaacttattttcataacacactgatagtgtgttttgatgagacaatataaaattctttagaaaatgtccttctgtgaatttcaaatgctccaatttaaaatactttatttttaaaattttgtgtttggattcctttattaaaagtcgaagctatatgtttccaatgcatccacacgttcgcttccggcaagtgcaccggatcgcacaagtagtataaaacggtaagaaccgagtatcgaactctcggggaacttgtgttacttggtaagctatttcagtaaatatgtgtctggtgtgaaatctaagtgtgaatatgaacaggtatgtaaactatctatgcaaaaacgaaaatcacgcgagagaaatgatgtgt

SEQ ID NO: 267189 - DNA, 388 bp, Glycine max
agctttgaccatatatataaacttggaggtgattttttaactaatgctggaacaaatcactttggaagcaataaccattattaaggtgaataccttgttattcaaatatccggtgcatttaccggaaagatataggatatcaatcccaaggattctgtaaaagcatcttggggtctaagacgaaatgttaaagggggctattttttactagaactttaaagagacttagcatattacataaaatactaatttttatattaatcttgtggctcttttagctgccaaatcatttattagagttttataatcaaacaattctaacacttcacttttaatagataaaataactaactcattcaatctatcttataatattgctgaatttaga

SEQ ID NO: 267190 - DNA, 448 bp, Glycine max
  unsure (1)..(448): unsure at all n locations
ntgcttctacaaccacaacttgtgcctacatccagtctctcaacaacccgcttgagatttccactatccttgtaaaatcctttacaagcaatgaatcacaaaggaatctcctcttttgtgttcagtgattacaaccaagaagttatacccacttcttgcaatgaatccaaaagcggttagtcttttgagtccagtgatcaaccaagaagcaaatccgcttcttgcaatgaacccaaaagcggttagtcttttgagtccagtgtttaaccaagaagaaaatcctacttcttgcaatgaacccaaaagcggttagtcttttgagtccagtgattaaccaagaagaccttctcttgaaaacagtcaccaagagtcggtctcttgaaaagcttattgtaagaatggaggaggagaggaaaatagaatagcacaagttttttgccatataaac

SEQ ID NO: 267191 - DNA, 443 bp, Glycine max
  unsure (1)..(443): unsure at all n locations
acctgcggcatgcaagcttggacatatattcttgtgtggggcagtttttggggattaagtatttacgggaacatatggagtaaactacggtagggtagcagacaatctaccttctcctgagagtgtggttacccttctgaaagctgcaaagattatgaacgtgagaatatatgatgctgatcgtcaagtcctgagtgccttcaaagggtcaggaattgcaattagtgtttgtgtaccaaatgagcttctgaaagaaataagtgtgggtgaggatcgtgccatgaattggatcaaacaaaatgttgaaccatatcttccaggaaccaaaatccgtggcatttccattgggaatgagatattgggaggaggagatatggagctttgggaaagtttggtgcctgcagctaaaaatgtgtatgctgcccttcanaggcttaacttgg

SEQ ID NO: 267192 - DNA, 423 bp, Glycine max
  unsure (1)..(423): unsure at all n locations
ctcagcttagcgtaaaaccatagccgaatacctaagctttatatttagtaacgaaatttgtgtattgggaaagtaaaggtatgaccaactcaaggaaagactagttggaattaatggtaatatatttcaagagtttatttatatcatggtcagtgtaaattattttacagacatttaacaggaattccaccacattatatcaaagaataggatgatgtggtgatagggtgaattcttattggatgcatgtgtaaaaaaaatttacatagtgcatataaattaaattcatattccaaacctttgtacaaaaaatatagtaggaaatcaattggattgaacaggactagagctcatgtataaaactctacagaaaaaaacaaaccattctttgaattctaattnttcatagaaacacgtacttgt

SEQ ID NO: 267193 - DNA, 142 bp, Glycine max
gcgcaaaactaagagccttgtaacaaaacgccaactagactttccaaactttctccccttacacacaagggcgccaaaaaggcccctaaccacagacggcttaacagaggagaaattcccttagcaacctgcccaatggccg

SEQ ID NO: 267194 - DNA, 286 bp, Glycine max
accttcattcatcacagttacaccatgtgtgacacatgcttctattcagtgactacgaagctttcttgagaaactatcttgagaaaacttccttgagaagcttcattgagaaaacttccctgataagctagagctaagctacacacacccctctcatacaaaactcacctccttgagaacttcctcaagaaattcctacgaagctagagcttcgctcacatacctcctaaaagctaagctcacctccttgagacgagaagctactaacttactacacaccccccat

SEQ ID NO: 267195 - DNA, 279 bp, Glycine max
ggccttatgtttgactctacaggctcggcatcatcaacgtgattcaacactgtttggaccatgatgctgtctacaataatatgacttacgcccgagaaagtacaaatggggattgttgagcacgctattagcacatgagcacctgagattacaaggttaacttagttattacgagaatatgaaaaggagagagatcgcggagttgaatctcatccattaacaaataatattactccctctgataccaacatatatgacataaatatttatctgatatcc

SEQ ID NO: 267196 - DNA, 246 bp, Glycine max
accaccttgcttcgaagaataaggtgcaggaagctaaaatcgagcttcaagatgctacgcaacacattatataaggtaaatgttctgttctgagaaatccttatctaaccctttacaacgagaccttagttataatttattaacctttacttaattttcaactcacaaaaggattcatatttactctacctgatcaaaggtttcacggaaacatttaccagctaaaaatttcgaagtacaagcaaa

SEQ ID NO: 267197 - DNA, 394 bp, Glycine max
  unsure (1)..(394): unsure at all n locations
tgataaaggtaaaacttcagaatcttgccattgtttctttcatcttgttatcagntaattacggaaaaacaaataggaatattgaagatttaatgtgaagaagacttttaaataggctaccaggtcaggccgagccaaaataaaagcctttgatagactataggccaggctcaggcctcaaaaattaatcgtaggctagactcaggccttttaaagcctggcctgacctattcccacccctacctatgagcctcatacgtactaaacagaatggtgatttaattccaactcagatttcatttcctttctgcaaaacttgatttcccacacaaaacttgctcttattatacgtttgatatgcaaaatggtgatttccataaatgggaattccatg

SEQ ID NO: 267198 - DNA, 214 bp, Glycine max
atgacaatttttatatcagatggcgcgaattattgctgcctaactacctacatcctatcaatgaacaatccccgtatgaaatgatcaacgtgaaccctcacatcccgtttaaaacaaatgtgtgatcttggactaaaaaacatgcctgcgaactatattcatatataatgtctttgagaccaaatattttttgatattaatggtgaagactgat

SEQ ID NO: 267199 - DNA, 447 bp, Glycine max
ttacctggtctgctatctctgtttcggaagaatgttatcttctgttaaagaaagaatatggtgatgagatgatggtgtataaatttggtagtaattctcttggaatgtaatagttgttgaacacatataatgcattaattgcagacttctcaaagtatccacttttgcgtagaatctgtcatatgcatcagtaaagaattataggctattattttgttaactttttatataatttcgacaaacaaatttatgcagaaagcagcccaagaagctctggaccctcatcaggtgatgattggaggtctgcatttgattctgctgccaatggtccaagcaacctgacgtctaagtatggttctggtggtcatagtagacgctacagtgacccatcccaaaatggtgatgtgagctcaggctcaaattccaacagtcgtcggacgccaactc

SEQ ID NO: 267200 - DNA, 465 bp, Glycine max
ttaacctcatcgtctctcacagtctggagattttgtagttctttcagtccttgagttcggactctcagccacttatgatagccgccgatgatcccattactgcttcccctaagctctctgtccttttttcacgccgcataccatgccttgcgaactccatggagaaccctcacgttgtggtcgctgaaacctcctgcgatgaaaggcgtgatgctttcgtctgatggcactcctctcatgggacatacttcgcatgaagatagaatcctgatacttccttccttctagcgagggaaccatataacagacgcccctccatgctagccaagagttggtgcacaacaaacaatatttgcgcgcgtctttttacatccacggtcgaacgttgcatacattggcaatatggcgactaccacgctattctttgcatgatgaaaggcgatgaatgcgcaatctctgcttcgt

SEQ ID NO: 267201 - DNA, 203 bp, Glycine max
aattgaatggatcgcgatgattacatgattgttttgatcaagtttgccgtcatttcaagagaatgagccagtgattgtgagtatgtctgaaaatgttattggttgtcaaaataattgtgaggaatgcattaaccggattccggtggagtgcgacctttaattttgtgagaaacacccatatttactccaattcttcctgaatt

SEQ ID NO: 267202 - DNA, 416 bp, Glycine max
  unsure (1)..(416): unsure at all n locations
agcntccttgagaatctagagcttaccttctcaccccctaaatagctaaactcacccccatgactaaaaaacatgaacatacagaaaagatcctactactaagactactcaaaatgccctgaaatacaaggctaataccctatactactagaatggccaaaatccaaggccctaaagaaaaatacaacctattttactatttacaaataagagtggacccaaccttggcccatgggcctaaaaatctaccctaaggttcaagagaaccctaagggcttctttattaactctagcccaatcctcttggagcctcttgctcatggctctggaaactggtcctttcctaaggaggattgcatcactcttcaactctgtcttgaagtcatcatactctgtgtggatatctaaaccatttt

SEQ ID NO: 267203 - DNA, 439 bp, Glycine max
  unsure (1)..(439): unsure at all n locations
tcaacatcagaccacttccgaggtgctggaactactntatatttacttgatggggcctatgcacgttgaaagccttggaggaaagaggtatgcctatgttgttgtggatgatttctccagatttacctgcgtcaactttatcagagagaaatcagacacctttgaagtattcaaggagttgagtctaagacttcaaagagaaaaagactgtgtcatcaagagaatcaggagtgaccatggcagagagtntgaaaacagcaagtttactgaattctgcacatctgaaggcatcactcatgagttctctgcagccattacaccacaacaaaatggcatagttgaaaggaaaaacaggactttgcatgaagctgctatggtcatgcttcatgccaaagaacttccctataatctctgggctgaagccatgaacacagcatgc

SEQ ID NO: 267204 - DNA, 417 bp, Glycine max
cgcacatcgtccgcgtctatgatatccacttgacaaggtttgaactagaggagaccttcaatcctaaaacgcaacgtggcggacaaaagtgggtagttaacttgaatgaccattattggcaatgcggaaagtattctgctattcactatccatgtccacacattattgctgcttgtggttacgtgagcatgaattacttccaatatgtagatgttgtttacacaaatgagcacatcttaaaagcttatttcgcgcaatggtggcctcttgggaatgaagcggctattcctccttttgatgatccatggacacttatccctgatccaagtataattcgtgcgaaaggttggccaaaatcaacaaggataggaatgagatggattggttggaaccatctgagcaccgataaaaatgtag

SEQ ID NO: 267205 - DNA, 418 bp, Glycine max
  unsure (1)..(418): unsure at all n locations
tagctgattaaaatgttttaaaatactgttaagtaatatttgaatttttattcctttattaatatatatgtgaggggtagagggtgtcacatatacctactcgtgcaaacctcaattcgaggggtgttcagtgttcaattatttgtccttgcatgtcattttcgaccgatgtaaaatctgtgatttctagtagtgcttgagccaagttatacagagaaatattgtgctggcagaatcatgttcagggatgatattttcgctacttgcatgctcgcagtaggagcaattcaatcgaatggcaatggtgttgtgggggatctataggggatgaaacanaaaactctaaaataaaatctagttctctgatcaattagtgatgagaagtgatgaattttacanaagcttgaaaaatgttaac

SEQ ID NO: 267206 - DNA, 410 bp, Glycine max
agcttctagaaggctataaaaaggttgagtatatcttttttctcctactcttttgcatctatgcttgcttctttggctaaattccatattggttgaccatatttttctcttcattctctttattccggtcacccttttgccttctaggtacacattttcgaccctcctctcttcatcatgtctaattctgaggaggggtttgtgcccaccaatgggggtaggatgttgttgctggaggttcgccttattgatgagagttcaaatgatgatcctttcaactttcacaatggtttctgatgacatcaatgatcaggaatctagtattccccttggtagtgttattcctttaagtgatggcgatggtcctcatagcactaatcttgccacccttgctagtggcactgttgttg

SEQ ID NO: 267207 - DNA, 378 bp, Glycine max
  unsure (1)..(378): unsure at all n locations
taatattttttgctttaccttctctatcattgatgcttcttcattttttctccatgtatctcctcacatgtcttgtgctaaatgttgttaacatgattctttatagttttcaccattaaacttgctatagaagctagatatgattttctatggttcaaatttcttggtcttgttcttgaaccatgaattatgttgagtttagggtcctttgagatttgtcttgttattttttgtggctgaaatctaaaccataaaattcttacaaaaatattaaagtggaagaaaacctctaaaatctagagtgacttgttcacctattgtagttntgtcatagaagtcatgtctagtcatgaaacttgtcacattagaattcttatg

SEQ ID NO: 267208 - DNA, 282 bp, Glycine max
  unsure (1)..(282): unsure at all n locations
caacaacgacagtctgtcccttaattccagaatgtttttggtccaagcaagccatatgttcctcctccaatacagcaacaacagcaacagtcacaacaaagaacaccagcaactgaggctcctcctcaaccttccttagaagagttagtgaggcaaatgaccatccagaatatgcaatntcatcaagagacaagagctttcattcagagtctaacgaatcagatggcgttgatggctactcagatgaatcatgcttcagtccgaaattctgaccaattgcct

SEQ ID NO: 267209 - DNA, 350 bp, Glycine max
gttattctttttggtgtggtctgagcccttaaggaaaggcgatcttgctgatcagaacttgcaggataacagagcagatgacccatgcctcttatttcaatgacttgcccccccacatgatggctgttgcaccatgcccaagttgatggccttggtgatgacaatactaatggggatggcaccgtcgggtcattcaaaccgcttgtcaaataagtgaagctgttgagaaccacgtacattattaatctatctatctattgggaataacacaactccctcattggctatagatgttgtcaaggtagcatgagggtatgtatccgaaaaatacaattcccacattggctaga

SEQ ID NO: 267210 - DNA, 280 bp, Glycine max
tctgaactcgctcaaacctggtttaccatgaaaacctctccgaatcaaaatatgactcctcaacacccaatttaccctaaaaatgactcttgtcttcactttggacactcaatttcctcctttgcacagcccaagctgtaccacagaaccaaaagacatttcgaactaggatgaacttactttaatctgccataccactaaatccagattagtctttcgaccctccagccatacactttccactatatcatacgtttcactttttacccttgttactctg

SEQ ID NO: 267211 - DNA, 300 bp, Glycine max
cattccttggatatagggttgaaccaagctcatcaacgtcaggtgaaatatcgaaatattctgtcgtgcctaaattggggcaaaagatgaagtcggtcccatcactgctatctctactgcccaacatatttaggagtattgatgtgccatgtcacatatcacatgacctctacaaagatttcatggaccatgttgaagatctaaattcgtttcaaccccatatcttgcgtgaatatatgcaatacttcaactgtccatcgttcgcatacctccatgcgtttcattgggtgcatggtcatc

SEQ ID NO: 267212 - DNA, 306 bp, Glycine max
atggaaatttcaagaaactttaacaagccatctaagcaaaagaacacaagcggatactattaaactaaactcatgcttgacaaccatattgatggaagcttgcttgaaaagcttctatggaggctggaactttaaacttcaatgaaatcctttaatggaattgtccaccatggagatgccactgaagacaaaggagaagaggtgagaggaagcgccatccactatggaataagccatggaagagggagctctaccaccacaatgagctctggaaaaaaacctgacaaggatgcttcaatggatgaa

SEQ ID NO: 267213 - DNA, 428 bp, Glycine max
  unsure (1)..(428): unsure at all n locations
ctcagctcggctcttgattttacgttgcgaacttattttttttctttttactttaaatgtgaatgatacattattacccttcggactgttttaaatatttgttgtgacatttcaataaaaaaaaaacattgtttttgaaatccgcctttgactctaaattttgatacattaaatactaaaaatcacctttcactccttaacgaatcaagttgaagttgctgaaattatgttctttcgagacaaatttaataaatcctaccaaaattacagagttagtaatgcgactggtcctaaatcttttaggactaaaatggtcactatcattttgtcaaccaanatattggcagcttctgcgaacaatatagaatattataaatatttccaccatttttgaagctattgtctaaccatgttacttagttgccgat

SEQ ID NO: 267214 - DNA, 413 bp, Glycine max
  unsure (1)..(413): unsure at all n locations
cagcttgatcaataattcactattgttntcttccactccttccataagagactcgttctttcttagttccctaatcttctggttagctttgtcgctaattttgaaaggtatgaataagggtttttctatggggatgtttgattgagattcttcaggagatttttgtttggaaattttctttgttatgatagactctcctaaaacttgcaaatatttgttggtataatttgtctgttccattacgctttttgatatctttggaagttacttcttcgttgatatcttttgtcctaaagggactggccatgacaggtttatcattactgtctttgatctttggcagttgatattgtgttgtgagaggtaatttcgattggattcactcaccatccttgatctgccaattgtaatta

SEQ ID NO: 267215 - DNA, 409 bp, Glycine max
  unsure (1)..(409): unsure at all n locations
ntctcgtggcttctttgagaagctttctcgagcatcttctatgataagctaacgttntaactactaacaccctttttaataactaaacccacctccttgaaaataattacggataaaaataacacaacaaatataatcaaacatcaagcataattactaaatatatatagatatatatatatcagggtgttacactaagcgcgagatcagtgtgctaagtgcagtagttgtcttcaaccaggctcagcacacgactagtgctaagctcaaatccactcactcgcgctaagcgcgagggtggcgctaagcgcaacatcgtgaattcaaagcctatttaaagtctgtcttgtgcaaaattagggtacaagttntataataaccagggcacaaaattccacagcacaccaca

SEQ ID NO: 267216 - DNA, 410 bp, Glycine max
cagcatgcagcaatggacgcctacattatatcttttttctcatcggaaatatttagaagcggaagctaccgagttctatcgataggtaattaagaggggcaaattctcacattgattaacgcccaccataatttttaattaatgcttaataagctaaagtatgtacaccttttagctcacactcttctacatctgcgtcttctagacgaaggaagaaaagaagcccgcatttgatgtggtacaaataattctctttttatttaaatcacaaggagtatcaaggaagggaaataaaacacactcactgctatatatatactcttaaaaaaaaaaataaggcactaggttacgaaacacaaataggaataagttgttacatattctggggagacaggtcaatttgaaaagaa

SEQ ID NO: 267217 - DNA, 450 bp, Glycine max
  unsure (1)..(450): unsure at all n locations
taaatagagatataggtggagctgggtcttcttcacagttttctggttcagatgcacgtatttctcaattttattcattattttctgttcaacattaatctctctctcattctggtaatgcttgatttctttgttgttattttttattattctattcaaagtcactgcttcttcagcccatgtttgagtttattgtttactttntacacattaaaaataaaaaatgatatagaaaatctttatgtttgatcacgatgtttgaaaactgaagaattttggttgttgatgaatgttaattaactatgcctcaagttgatatctccatttatgccttgtgtttctttgaatggaatatggccagtactagttacaaaggtccaagagatgttttactatttaatatatggactaaacggatntctacttcaatatcaaattatcattatgccc

SEQ ID NO: 267218 - DNA, 270 bp, Glycine max
ctcacgtgatcaagtattgctctggatgaaaataaaatatttggactacctcgacgcaccaattagtaattccttatgcacaatgtaaggtttgtttatggaaacatatatttacttataggcgtgaaaagcaaaacacaaacccaagtgtgtacctttgacattatatgcagagggtggtgaatcaagcacggcagctaaggacattatcagcgtcacaacgcccttgtctttatatcaatccactatttatccttatcattcagatct

SEQ ID NO: 267219 - DNA, 461 bp, Glycine max
  unsure (1)..(461): unsure at all n locations
tgcaagaaggattagttttctcccgtcctcactttatctttaattaatctattcaaaagtcaaaataaaatagtggtttagttgcactttatttaatcttgtcagcgtgttgtttgacttttcgtatatttttttataaaaaaatgttaatctgtttatgcttattcattttttaaaatataatgataaattgtaattttaaatttgttaaaatacacttcagagttatactttagtaaatatttgtttttaatatatattaacaagttcttaattgaattatcaccaaatatatggatcaactgatgtgaaaatattttatcctaacaaaagggtntaagatcaagtctttaaacaattacattaaatattngaagagataattttgtcgtatataatagtcttatttgatatgatatagttgtttccgtgataatactttttatttatctcaccattat

SEQ ID NO: 267220 - DNA, 378 bp, Glycine max
  unsure (1)..(378): unsure at all n locations
ttttatgggaggaggtngcatgtcatttttcgtttaagaatagtatcccactggaaaaactaactctccaaatgtttgccttcgcaggaaatggcccccaggaagcttgcctcaaagaggtcctagaaggacaaggccgcagaaggaactaattccgctccggagtatgatagtcaccgctttatgagcgcggtacaccagcagcgcttcaaagccatcaaggggtggtcgtttctccgggagcgacgcgtccagctcagggacgacgagtatactgatttccacgaggaaatagggcgccggcggtgggcaccactggttactcccatggtcaagtttgatccaaaaatagtccttgagttttatgccaatgcttgc

SEQ ID NO: 267221 - DNA, 362 bp, Glycine max
  unsure (1)..(362): unsure at all n locations
tccatcatacacgcnctcgcctatgtagggctacacgccctcacctttagaggactacaagtcctcgccttatgaaggctacgcaccctcgccttcagaagactacacgtcctcaccttcaaaggactgcacgtcctcacctttatagggcggcacgccctcaccttcggagggctgcacaccccttcgcttttagagggctacgcgtcctcactttcagtgggctccacatccgcaccataagagaatttaaggtcctctgcccttaatgcttaatcgagacttgtgctctcggttaaggggccagtcgtttcctgttatcagttcctgtgccaccccctgatattggagggcgccaacta

SEQ ID NO: 267222 - DNA, 293 bp, Glycine max
aaagtaaatggaccatctttatattatattgaaaatataattggtttaacattaggagataaggttattacacagggagtggtattcataatacatgaggtggaacgtggtggattggaaaaaattaatttctggaaaaactatggattaatccccgggatgactttagaaagggccccaggctgttattttttctcacagcaaaatcacccattaggcagatgggaattcacaatgacaaaggcgtggaatggaaatcttcatggagaaaactgcttttgacaatgaaattg

SEQ ID NO: 267223 - DNA, 380 bp, Glycine max
  unsure (1)..(380): unsure at all n locations
tggggccattgtgccttttaaaagcctttgttttcactaatccttgcgntagtacccttccaaccaaccaatgatgatctggttctatcttccaaacatgaccatattcacctagatctagaatcttaatcacatcttcatcatctttcactaaaactttatttgtgcacaatccatgataacattcacgagatccacaccacaaagccctaatgagttgtgcatgtgagcgggaataaaccctaacaatcaacaatagtgctgagaaaagcaagaatacatatcttgggaatgtcaaaaccttaatgacacccctattggagcatgtatgaagaattaacttacgctttcctttgaattaaaagtttttgtggatattt

SEQ ID NO: 267224 - DNA, 414 bp, Glycine max
  unsure (1)..(414): unsure at all n locations
agcttgggatctaatagggcattcattctcacaacttagaatttttcacaaacaccaaccttattactttgctactcttttcaacacattcattttcttttatgatggtttaccccaacttttattctttacattttttttcaaatgtaactagacattcatgttgtgttggagtaaaaccatgttttgtgactcaatttaacttgtgatgtttattcattttcctacaatagaaaatcacccaaaaatattcccccaaatttgggacaaatttgtctggatcaatgattactctcctacaacctaagaaagggtagttagtaaacatcaatttttgggtttgggttccaatgacanaaaaaattacattaggctcaaaaaaggtgcaagggatgcattcattcatcggatgac

SEQ ID NO: 267225 - DNA, 399 bp, Glycine max
  unsure (1)..(399): unsure at all n locations
acctgtgacgtacctaaacaagcgagctcctggcagtcaaccaataaaagaacaaagtccatgaagcaaggaggcttgtgtggcagctggccatctatgtatttttgggtggtatctggaaattagcctctggtaatcgattacaattcgtgggtaatcgattacagggcttaaaaatggagacaggatgttaaatggcctctggtaatcgattaccaagggtgtgtaatcgattacacagggtgatagggcactggtaatcgattaccagttgtgtgtaatcaattacacagtgctatctgccactggtaatcgattacaccatttangtgtaatcgattacacagtgtaatttgtagatttccatgtgcaaaggctgagtaattcgtgttgggcact

SEQ ID NO: 267226 - DNA, 426 bp, Glycine max
agcttggaccataaacatcagcatcaaatataccaactctagcacccatatcagccaaagtgtaagcaaggtttactgctacagttgattttcccacgcccccctgcaaagttcaacataaaaggcattcatggcatgaaatgaaatgcaaatcgtggtaaatagaatggctcataattccacttagcaaaactttttagtttcaacccatagttgaaatgatatagtggtattgtttttttcagaagcgttctttaaatgcatttaatagaatataatgcaaaaatactttttttccttttatcatggaagatctgcatttagtttatgttccatcaaaaactcgagaaactttttaggtgctatatatataaagaactaccatacataataaaaataaaagttctatttaactcatttagatgc

SEQ ID NO: 267227 - DNA, 453 bp, Glycine max
aactgtcaagcagaaaatatacctcaagtgtaaccacttgttttaatcaacaacacttaatcatcaagagtagaagccaacaataatgcttaaccacttaagacagaagcaaaacaataattcaatgcttaaccattcatggcaaaaactcaaacaatgcttaatcaccatggacaaaagtttacatcaacataaagcatcaataaatagaagaacacaaaatttatctttaatgatgactttttacaaatattttgtgaaacagaagcaaccacaactctaatctgtcatcaaacaggaatactcacaaacagcttgaaagcaagtagcacagtatcaaacaagaagagaaaattcatcaactaatcgaactaaacaactccaataagaggcttcaacaatctcaaattagtgctcaaaacaaaagcctaagaagatttcatcgtacacaac

SEQ ID NO: 267228 - DNA, 438 bp, Glycine max
  unsure (1)..(438): unsure at all n locations
ctcctctgcganaacaacaactcagttcactacctttattatgtccaataaataaatacataggaagatcatcaagtattgttcttgttgggatatttatttatgaatagaacatggaagggtacataaaacgctttaaagttttgctgtcttgtggttgagagagtcacacaatatggcaaataatattaaaattattaataatgcaaattgcaaagggttgggattagaaaagtatgtgtacctataaataaagatgctctttgtctggtcaagatgtttcttgcaagtgtagcaaaatctgatgaaattcccggaggtatcaacagagtgagagttatcgtttggggggagagaataatatgtctccaccataatgcaattgttgaatatgtgtgtggcttttgggatatgtacatgggatatcacgcctgtata

SEQ ID NO: 267229 - DNA, 392 bp, Glycine max
caaaatcactaaaaaaggatttgaatttttattatctcacactttcttaccaaggaaatggatcaattttaaagtccaacgcctttataagatcacctttcaagtaaaaagaaatactgtgattcacccttaaaagaaaactacgtagggttgaattcctttcaaggaaggtacgtagcaacaagagccccgcttttgtcgacctcaaaaaataaaatgaaataaaagggaagataacacaatttcacaattctaaaaaataggttgttgtcctttgagacaaacgtgagagatgctaataccttcctcaaacgtaaatacaactcctgaacttagaaatttcgtgttgaccggtttcctttcaattttccgacggtttccctaaataaacg

SEQ ID NO: 267230 - DNA, 465 bp, Glycine max
  unsure (1)..(465): unsure at all n locations
ttactatgcaaggaataaccaaggaaaattccttcatctgacttancatcaaactttcctaagttttcttttccattgtttaatacaaagcanttgcaaccaaaaacatgaaggtgcgaaatgttaggttttctaccattaaatacttcatatggagttttctttagaatgggtcttattgaagccctattcatgatataacatgcaatattaacggcttcagcccaaaaatattttggaagaggagcgtcatttaataaggttctagcaatttcttccaaagatctatttttcctttcaacaactccattttgttgaggggttctaggtgcataaaagttatggtcaatgccatgcttatcacaaaataattcaaattctttattttcaaattcacccccatgatcacttctatagatataactttgagaatattcttgtctgaatcatttttgcagttctcta

SEQ ID NO: 267231 - DNA, 382 bp, Glycine max
gcgtgagcatgattcttgaattctaatttcctctagaacctcgtaatgttcttgattcaatcttgaacatcttaaattcattctttgactctttaatcatgaagtgttcttgacttttgagctattggtatcacctttgtatcatcaaaacttctttgaatcaatcttgactcatcatgaagcttgcttctacagtgtggaggggacgactcccactgaatggaaccatggacacccccaaagacaactgtaggccgggttgatatccatcacttggaatgtaccttggcaggtatgaagccctatctgtactgagagatcgatctctccccttaactctcggcagctaccgacgaatgcccgaccaccatggaacttggcc

SEQ ID NO: 267232 - DNA, 462 bp, Glycine max
tgctaagcccaattccaacaatttgaaagagagagatattttgttcttatcgtgacagggcacgcttagcgcacaacataactcaaaaatttctaagtgtctgagaacacattactcgcttagtgcacagacgcgcttagcgagttcataagcaattgaactttcaatcagagaagatgaacccacttagtgggacagagccgcgcttagcgagttcatttggaaatccaaatgttcacagaaatgatgaactcgcttagcgcgctcatcacgatttccagaaaaagtagggacttctcacccctccacttaggcccctattaggccatctaaccctaatcaaaacgagcacattgtatccataataaaaccttaattctagtctagggaacaactaagtattaatagaaattcaacctaacactactaagttaactagcctaaagtttgaaacttgggaat

SEQ ID NO: 267233 - DNA, 370 bp, Glycine max
tttttgtcaaatagggagcatggattgcttcctcaagtgaaacttgtattaacattctcaattgtctttacggtttgttgttatcgtttgtgattaaaaactcatttgatgttatgatctctataggagactcataacttgtggtccatgcagattaacttctcctctcgtaattcaataatttgcagtgtatatttaacttgtacatttttattagctattattgctaagcatgaaatgcatacataaagctccaattttttgtgtcttgggggtttaagattggtaatatttttggcctaaacacatgctatgggctaacataatgtgcctaaaaaatattctctaaattgcattgtgatttcatgcc

SEQ ID NO: 267234 - DNA, 342 bp, Glycine max
gaaaatgtaagggcgtattaagaataatctcaaaacaaaaggattttatcttgggatttatctcctctaaaattacgctgcactttagaggataaagtaaagtcataaccattgattagaaaatcaattgttgagatttcaataactacatagtttgtcatacatgtgcgtgaatttaatcacaatcttaacattcgatttctaatcaatggttataacagtagttatcctcttaagtcactcccttacttcaaggaacgaatcctttttctgataaataaaggaagaaattggatattttaaaaaatacccaaatcaagaagaatttgacggtcacctaat

SEQ ID NO: 267235 - DNA, 419 bp, Glycine max
cagcctgtaaacaaagatgacaatgaattatgatactgttgaagtcggctatggcaaatggtcaacggatctatagtctttcttttaaataagtgtgagagtgatatgtgaattccaattaactcaaattcgaatcaaattgccaccatattatcaatccgtgttggacttttgttactctgacattataaactttatcatatgttaactaacacttaaaaaattcaaaaatgataaagataaatttcaaattttttttccgtatacaatactgtataatctatttctgcaacctaataaatacaagacgaaaatatcacttgaataaggcacgatttaaagacaatatattttattcttattatgcataatcgttattaagcataatttcttttactccaattaaaatattccattat

SEQ ID NO: 267236 - DNA, 376 bp, Glycine max
aagaagaataacataagagaatatcaaaatactaccaaaaatatactaacatgaatgagacaataaaatccaaatagcatgaaacatcccgcgagtgtatacctgggaccgatgcaaactgcgatgcatatatcatattcaattcatgtctcaaacgtcaaatatgggacgtgattttattcgaagtcacgaaattgaaaactatcgttgttatgttttgttacttttcagatgttttccccaattgagttgagttttcaacgcggttaaattcgtctttcatggtcatcacaaaccgatctacgtgttttaatccccctcataaatataacattataaatatcggtctcaacgcgttgatttattgaattgtgac

SEQ ID NO: 267237 - DNA, 404 bp, Glycine max
acccaagcgaccgagctgcagcttgacaaaaggagccgagatttgttttcgaggttggttcaggggggaaaacaaacttaaatacacatatctcgcgaagtccggaaataaacgcaaattatcagccactagaccgatgaccaacggaaagaagagtggatattaccgttaaacacatgagaaaatgagagaagaacgcatactgcaaacatgtatacgctttcatgttattattgcaaaggataaggaccgataatcaaattaaatgctaactgatagagaaataggtagtcgcttgtggaataacaaacacgagggatgtggttacaattggggtgtaatgcgactaccaaacatttttattcctttggctggaaaatggacaatgcaatttgtgacaggga

SEQ ID NO: 267238 - DNA, 254 bp, Glycine max
ttaacaaaaggactttaaatatgggaaaagcaaaattcccaaccatacattcccgaagatccataacacaccaaggacatttgactatgatcggtgacacgcttcattaaccgggtgacagaaccatcatgtgtggaagcattgctagctaataaaacataaattgcaccaggacttacatttgatatggatgctgattagcaaatacttcaaggcccaagagtggaaaccctgacctccgatcacaatgacta

SEQ ID NO: 267239 - DNA, 442 bp, Glycine max
  unsure (1)..(442): unsure at all n locations
acatgatatgaatttggaaacctgnttcttttatttttttgacgggaataattaatgtgaaaagctgttacgtatgtaataattattaaggtcaaaactcataatctaacaagaaaattatgtattttttttccactttaaattatacttgctatcagaaacaaaatctttttattttaaaagaattaccaaaatacaaattatgttttttatcccttaaactcacacgtctatattaccaaaaaagaaaaaacttacacgtctcccaccgaaatccaaagaaactatatattttatcacttagtggccaaaggtatggtttaaaaaaaaaaactccaaccaaaaactggctctacagtttacacattcagctcacaaggatggtcctgaatacactaccactattactataaatctcgtaagttctgtatttcttataaca

SEQ ID NO: 267240 - DNA, 450 bp, Glycine max
  unsure (1)..(450): unsure at all n locations
tgccactggagctgacccattaactgccctaactcctttagacnntggggccctaggctcttgaccttgacttgatagaacctccttttaagtgaaggcagttgacttgatcccatgttatactaaagtgaacaaaaatcggtgcgaattaaaactccgacatctatcatgggtggaatggatgaatgtatgaagaaatgcatatgacacagatgcaatttatgaatactggagcccgggaaattgtctccgtatttaagaaggtggcacagaccctccgttgtgttgccaaagagaggggatcaagacagatatcgtgcatgatgcatatgcaaaaggcacaacacggcgatgtacatagtacggaaatattcacaaacaaatataatcaaaggggtacacgacatatgactacatgcatggcagtgtgaaaaaatggcacgcaacgtg

SEQ ID NO: 267241 - DNA, 410 bp, Glycine max
cgcagcttaagcaagatgtgaccatacctttgttattgcctcactaaagtgaattgagaatgcttttatacctgagatttcttgttttagttttcttcatctgtttatgtgtgtatgtataatatagaaactttaagatgattcaaatttcttggtttacggtgatggtaggatggaaatgttttcaagtagctcaattgaatttctagtctgtatatcagagcattcatagaatatcctgttacaggaatggatgcccaagtggcttatggcttccatcatctacgcaatgaaaaaccttaccttgcaagtggtccaatttcaaataatgtatctaccgagatgttgaatgtgtgttataaattaccttcttgcttgcttgcttcaatcagtttacttaatttgatgta

SEQ ID NO: 267242 - DNA, 460 bp, Glycine max
  unsure (1)..(460): unsure at all n locations
tgaagaggatgctntaatggaggaaaagaaagagagaatgtgggagcacgaaattgaaggaataaaagagggagagaagtggaactttgaagtgtgtctcataagactctcattcatcaaagttacaacaagtgttacacatgcttctatttatagactaggtagcttccttgagaagctttcttgagaaaacttccttgagaagcttctttgagaaaacttccttgagaagctagagcttagctacacacacccctctcataactaagctcacctccttgagaagcttccttaggaagattcctaaagaagctagagcttagctacacatacctctctaatagctaagctcacctccttgagatgagaagctagaactcagctacacacccnctataatagctaagctcacacccatgacaaanaacatgaaaatacaaaaaaaaaaagtccttactac

SEQ ID NO: 267243 - DNA, 423 bp, Glycine max
tgcagcttacacatgcgtgagaacaagacaattgtgatagataaaacctctcttaagaggtcaagagcatatcacagagaacccttgggcagtgatttttacaccaaatcgcagctatgatttctttgtgatgcagatatggtccctgaaataaaaccatcattgtagagttaagaactttaagacatactaccctgacatctgcctaaagggaatttatcattataaaaaatattacacagccagacaaagtattgatgttgatatacatggatgagataatcacttattcagattcttttcttgtcaaaaataaacatccaagacccaccccaccacagtagctgacgacatgttcctatattttcagaaagaaacacattcttctttatctctctttatcttcaagaggatatttttcat

SEQ ID NO: 267244 - DNA, 327 bp, Glycine max
gaaaaaggagaaaatataaaagagggaggaacccatgctgtgatagccatccccacatggccaaatttcccaccaacttaacaatgtcaatacttaaccaatattagcccttctcattacctaccaccctatcagccaagaacacctaatcatccacaaaggccacccctatatcatccacaaaaccggcctgctgcacatacgatacccaacaccacccttaacacgaaccaaaacaccaaccacggaatgaaattccaaaaaagagcctgtaaaataccccaattccgtgtatacgctacttactccatattactcataatgcaa

SEQ ID NO: 267245 - DNA, 364 bp, Glycine max
gggttttattcaaacccgtatagaacttgcaaaagtttatagtgataaaaccttcaccaacctgaacaggatacatgtagtcctacaaacaatctaaatggatatgatcaaatctttccacatgcataggtttatgctatgcttattattactacgaagaagattcgctcaccacgaaataatcttttttctttaagaaagactaaactaccattttggtattccaatttccaaatatatacttgatatcaatttgggccactgaaggtttatgaaagcaaattaatactacaaaagttttaaagtgacataaattaaatgggcaaaattgaattaactgatctaatctttggaaatctaattc

SEQ ID NO: 267246 - DNA, 467 bp, Glycine max
tgtgctccactcattcatgaacctatttcaactaaatgtcgttctattttggtagttttatattgtaggcaacatcaattatcagttaatatataatttgaatagctactaaacaaaattaacttacatggtccacaactatagtatggatatgttcaaacatttgtcacctaaaattatcttggttacatttgcgtgtgtgatgaaaaaaccctatttgacattatgaatcccaaatttcgccccatcccatggaaactcaaatggcttttggtaaacatcaaaaaggtttttaaccaattcttccaatggatcaactgtaggcactgaagtgtccattcctgcagatgtaacccttttccgcatacacatttgtaagtcctacatgcttaatgaaatttcaattgcgataactttcaagagaaatgtcgttgcaattaatatcgagaacgaccatactatacctc

SEQ ID NO: 267247 - DNA, 412 bp, Glycine max
  unsure (1)..(412): unsure at all n locations
agcctttgtcctaattgtgagaaccggattcgcgtgttttttgcgggccggngtcactcattcggaggaatgagttacatttatttgctcaacaatttaaggtcgtcctttttttatcatgtaattcgaacaaatgacacatgcttaaggtgccgatgtacacattccatttctcatatataaaccttcttgctaaaaaaactcagtttagaaaacgcccaggcttttttataattaaataaataaggagaaatacacttatctattaaaatcatggcttgaaagaaaatacaaagaatcttctatttattcatctgataggacaacaaacacagttctttttataaactacaatcaactttactcacgaaactaccggttctggcatcctacctataatagacacatctca

SEQ ID NO: 267248 - DNA, 379 bp, Glycine max
cgatgtgagaaagcgtggaagagacagtcgtcctaacttttgttgttgacaatcgagcggtacctgaagatatgtcacggtggttaagagaccatggggacgacaggtggggtgctattgcccaaaaccaagcttgaccaatcccgacccaacccgggcatagatagtcagtgagaacctgtgacgtacctaaacaggcgagctcctggcagtcaaccaataaaagaacaaagaccaacaagcaaggaggcttgtgtggcggctggccagctatgaatcttaagtggtatctggaatatggcctctggtaatcgattaccaagggtgtgtaatcgattccaagggctaaaaatggagacaggaagttaaaatggcctct

SEQ ID NO: 267249 - DNA, 249 bp, Glycine max
gaaagtaacctatcacacaattttcatcttgccaacctataatacatcgatcgaacgcctttttgtgaagaacctaaaattttagaatcttaacaacacaactctagacaaccaaaaatttggaattacaacttccttctaaaatgtgacgaaataatatttctcttcctacagctcattgacagaaacacccaccgcttagctcgaggaacatcagtctgtagtgagcatagtggaatcctgataact

SEQ ID NO: 267250 - DNA, 476 bp, Glycine max
  unsure (1)..(476): unsure at all n locations
tgccaccagaacctattctttcctccatcatcatgatatatgctttttttatgntnncttttatgttgcttttattctctaataaagtacttttttaaaaaaaataacttcaatttgattcattcttttctgtcctttggagtatatgcataacaaaaagaaaaagaaaaagtaccttgtcatcaagaggcagagcaagagctgtggcaagaagaaagtagtcactgaatactccaatttcgagtgttttcttcgcattcaggattttatgcaaaatagatatgaactgcgcttcctccgctggaatactcaacaaataacccctgctaacatatatataaattataaacccttcacaacaatgaattttaatatactatatcaatacaataagttaactcaattatatttcatatattatcataccttaatcaagatgaaaattcaaaggttaaatagacagaaattataaactg

SEQ ID NO: 267251 - DNA, 162 bp, Glycine max
gaccaagacgagacacaaaagcgcggaattttacttcaaggaagagtcgaactgaaggcaacgccccgaacacggaagggaggaggaaccccgctaccaaacaagaactacgctaagataatcggcagctaagactttgaagttggcttgccgataaaacag

SEQ ID NO: 267252 - DNA, 395 bp, Glycine max
tcatgaagatgaatcacgttgatggagttgttttgtttatgacaaaaagcccaagagaatgatttgcagattgagtcaacaagttcaagatcaagattaatttcaagtttcatgagaagaaatcaagaagattctagattcatgagaagtttgatctcaagattcaagagaagatgaattccagattcaagagacgatatcaagagaacttcacaagagaagtattgaaaagatttttcgaaaaacaaacatagcacaattttggttttcaaaagagtttttctaataaatttctaagttaccagagtttttactctctggtgatcgaataccaaatacctgtaatcgattaccagcggcaaagattgattcaaaagctttatactgatatgcaa

SEQ ID NO: 267253 - DNA, 460 bp, Glycine max
tatcctaacgtggaatacaccaccgtcgatgaatatttttatcatttgtctgaatcttgagtaattgatgcaatttttgttgctctgcacagtgctcaataaaacctatgccttttctttattgcgaaattggttgcttttgtcctatgtttcggaaaccatccacattaatgtaatcttttttttttttaccttaataatactctaatctgcggtcggaagcactgtttaaatttttttacatcattcatgaatacgtgtcactgcttcattttctggcgaggggttcacactggactcacacgtgggtgtgaaagagtgatagcactccaccaatatactctacaaattgttggtaaataaaattcaaaaatatatatgacttaacggaacaaaacaatatatgctacattattttaaggattcttagacatatatttcccattaaaattattatttt

SEQ ID NO: 267254 - DNA, 360 bp, Glycine max
cctgcagcatgcagccagacagaacgaggctttgagctctttatcaaagccagggacaccaacaacaaaaggtgtatcacaaacgcgtaataaaaatttactggatatggacaggaagactgtaatcaattcaactataccacgaacctcgcggatgtatgccgagaaaactaccataaattgggtgaacacgattcctaagaaagcattcccaaagacacctctacaacggaggacaaaaatgatacctagtataaggcacctgcatgtgtggggttgccaaacacaaatacggactacaacccgcgacaaagaagatcggacgcacgaacaatccaggggatatcacatcggctatcc

SEQ ID NO: 267255 - DNA, 437 bp, Glycine max
  unsure (1)..(437): unsure at all n locations
ctgcatananatcttattgcgttgcactatgttgatcttatcttattgcatctagtgtttactttagagttagattcagtggttttatgaaattacttcattcatacttctttatattttgatattgacatgtagattttttttcttcatgatgtgaattttttttaggttcagaagagaaaagtcatagcaccacaatttgatgcacgcgctagttggtggactcaaggacccgatgctataatgcaggtcatcctcattttaagtatttactctgttattcaaactagtaataatttataatttcatcattgcagctggtatctttggatatttgtggtcatcttcatgttgcttaatgacatttattaaaatnttaaattttagtttgattcttatataatatgatattaaattgtgtgtcttattatgttatg

SEQ ID NO: 267256 - DNA, 407 bp, Glycine max
agcttcattgcctaacaagccaacttactttagtatgccccaagagactcagcataaggatgcacaggtcaaagttgagtatgtgaaaagattgtatgaccaagtgaaggtgcaaattgcaaagaaaaatgaaagttatactaagcaagccaacaagaaaaggaaggaagtggtacttgaaccccgtgatgatcctggacatttgaggacaaatgttttccaagaaggagggaatggcgccgtctgtgggaaacggattgtttgatacaggctacgaaggttttgaatgacgccacttccggtgaaggaagatatgtcagggtatacgccacaaggattaccttgataagtctgataattggttcacaaggaacccagaagaaactctaccaaatctttcaaatgtc

SEQ ID NO: 267257 - DNA, 452 bp, Glycine max
  unsure (1)..(452): unsure at all n locations
tcttttgtagttgtgctcgaatgtatgatcgacgcctatgatatatcgatacgctaaanattgaacaacggaagctctcaagaaattcaaatggctataacttttcacttggatgtccgattcacgtgcatcatatatcgtgacccttgaaattgaccacggaagctctcggcaaattcaaacgggcataacttttgagtcgaatgtatgatcgacgccaatcatatattgtgacggtcaaaattggacaactgaagctctcgagaaattcaaatcgctataacttttcacttggatgtctgattcacgtgcatcatatatcgggaccctcgaaatttaacacgaangctctcagcgatttgaaacggccataacttttgactcgaatgtatgatcgacgcccatgataaatcgatacgctaaaaattgaacaacggaagctcccaaaaatc

SEQ ID NO: 267258 - DNA, 364 bp, Glycine max
gaatttaaaaaaccgcgaaactgtcgattctaagaatttccaatactcccatcaaacagcccttattttccaaactttgcgggcgaataaaaaaaattaaaaatgggaaggtgaaagaaaatgcctgcccagagaaaaaaaatatggttggtgtgcttccaacgaaaagaatattgatgcggtatgaaagtcgtaaaagaacctgcgcacaacaacgtacaccaccacacccgaccacaacattcattcaatgacgcaaggcatggcccaagccctccgcgccggcgagcatcttcgctgcgtgatgggtagcaatggctactcccctgcactggcagtacagtcctatgtgtgcccctacgca

SEQ ID NO: 267259 - DNA, 400 bp, Glycine max
  unsure (1)..(400): unsure at all n locations
tatagagttttccaaccccatataaggaaaattctgatattcttggacgtgaacttcatggagaatgagaaatggagctggaatgatactgaaaagatgtcgatagctgaccctttgcaaaatcaagatgagttaattgatgatgcacccgtgagaggcactagattgctctcagatatttatganagatgcaatgtagcagttctagaacctgcacgatattgggatgcaaaggaggatccaaaatggagtgctgcaatgcangaggagcttgtcatgattgataaaaatcagacttgggaactcgttgaaaggcctgaacacaaaanagtcataggtgtgaaagtgggtgtttagaacaaagctgaatgcaaatgactcaatcaacaaacataaagca

SEQ ID NO: 267260 - DNA, 420 bp, Glycine max
  unsure (1)..(420): unsure at all n locations
ngagatgaggaagtgttgaagggtgaatacttctgcttttattgttgaccacagagtggtacctggagatatgtcgcgggggtcacgagacctgtggacgtcaggtggggtgctattgcccanaaccaagcttgaccaatcccgacccaacccgggcatattcggtcagtgagaacctgtgatgtacctaagcaggcgagctcctggcagttaacagataataggaaaacaagaccacaaagcaaggtggcttgtggtggctggccagctgtgaattatgtgtaatatgtggatggtggcctctggtaatcgattaccaagggtgggtaatcgattaccaggcttataattgaggacaggaggctaagatggtctcttggtatcgaataccaaggggtgtaatcgattaccagcttgaaa

SEQ ID NO: 267261 - DNA, 403 bp, Glycine max
  unsure (1)..(403): unsure at all n locations
tgcaagcttgttcagaaacgtgcatttgtgtgctttacacaattcccagaacaccacaacaaaatggtgtatcagaaaggcgttacacaactttaatggatatggttaggagtatgttaaatcaattagactttacccgtatttttgtggatgtatgccttgaaaactgccatgtatttgttgaatacggttcctagtaaggcagttccaaagacattntctgaactgtggacaaataatacacctagtataacgcatctgcatatttgggttgctacacacatataacaattcataatctgcatgaaagaaaattggatgcaagaacaatcaatggatatttcattgtttatctacaaaactcaaaggggtatatgtcttattgtcctaaccatagaatgag

SEQ ID NO: 267262 - DNA, 459 bp, Glycine max
  unsure (1)..(459): unsure at all n locations
tcaccaaaaggcatagttatttccagtttcttgtaaatgttatgaatctcngccaaaggcggtccttgtccttcttggaaggtaccactagatattgtacttctgtatccttatttgaagctttttctttcttcttctctcttgctttctcacttctactcttttctttcccttctttatttttttaaactttgtctttttctttttctttttctacctctatttctttttcttggtcgtttatttctttctcctcgaccattactagtttttcactctcctgacttgtcatatctattacctcctctttctttttcttagttccatcctttacaacaatttgtttctccaaagccaccccatcctcatcctcaactaccaaacgcttcttgtatcttgtcatcacaacattacattcctctttgggattctattctgtgttcgccccanagctattgg

SEQ ID NO: 267263 - DNA, 242 bp, Glycine max
ccctttcctagttttgaagctcactacaagccttaagcgacaaaccatgatataaccatatccttaaggaattctggagcataggaatctgttttgggaataagatgggggggctttaggtccatagaacaactcgcttaggtggctatgcaccatgaagtatcttgggccatactagatgcacataggatattggataaacgtaggacatgctgaatgaaaagttgtttctcaaaggctaa

SEQ ID NO: 267264 - DNA, 432 bp, Glycine max
tatgtgatgaacattggttaatggctatgcatgaagagttaatcaatttatgagacatgatgtatgggatttagctcctaaaccaacctctcacaagtcaatcggaaccaaatgggtgtttcgaaacaaacttgatgaatctgacatcacagtaaagaataaagcacgattggtcgcaaaaggatacaaccaagaagaaggaatcggctatgatgaaacctatgctctatctgcaatgttagaagctataagaatactactttcatttgcttcgtttatgaatttcacactttattagatggatgtaaaaaatgttattctcaatacatgccttgaagaagaagtgtatgtatatcaaccacttggatttgtgcattatgaacatcctaaccatgtctacaaacagacaaaatgctgtatatggtttgaaac

SEQ ID NO: 267265 - DNA, 256 bp, Glycine max
cggcccacgagcatgaaaatagcggatgagaaatgcacaagcataggcggaaaaagacgccataggaagggtgatcgacccggtacaccaagaggcaaacatgaggacggaccggtatgtcatacaagaagggagtaagagccgccccgaccgtatgccaaggccaaggcgagggcggacacggacgccaccccaaaagagagaacaggcgcgggggctcacgcagcatatgagggggaaacggcccacaaaacag

SEQ ID NO: 267266 - DNA, 358 bp, Glycine max
ttctcgctaagccgatatgttgtttaaccagcggccgctaatcgcaacactcatgggtctaacgcgaggaatactctggaagaagatgagctgtacaggttcgctaagcacacccgttcatctcactaagcgcaccgctttagatcatccactaagcgagaaaggcacttgctaagccaaaattcacttatgtgcgctaagcggtccataagtgcgctaagcgcacgagcacgaacaaggccacctatttaagcctgagatcagatattgtgagggtagtttggactgggattaaaagcttcgcatgtctagggtttctagagagagaacggtccaacgtccagagagtattgagaga

SEQ ID NO: 267267 - DNA, 193 bp, Glycine max
tgcaattccaggaatagggaaaaccgctagaccccactcccatcccaaaatgacggataccaccaggaaccttctcttaacaacagggtaaaaaaacccatccgacaagaaactcacgattacacaccaccgggggaacaaaagagtaatacctatacgaacacataattctgcacactatacaccaaaaaaa

SEQ ID NO: 267268 - DNA, 423 bp, Glycine max
  unsure (1)..(423): unsure at all n locations
tccnccagctttgttattccatgacaataatgggcgcatttaacttatgcnttgttgggatcattcgttcggttcaactcattccttttacataataacaataatttcacgtgaggaaaagtaaatatttggatttgctctataatggaacgctctcttctctttgaagtgatacctataatataatacggtatatataatttgttgctcacaaagtaaatatttggatttgctctataatggaaccctccgaccccttcgccgctcccttgtatgccgcgaccacgttgaaggcggagtcatatatcacggtggtggaatcgacggagagagtatgaagttgccatcgttatcgtcggagaagatttttgttggagtttgcggaaggaaattgcctcggcttgaaagcgagtgcattatgaa

SEQ ID NO: 267269 - DNA, 412 bp, Glycine max
  unsure (1)..(412): unsure at all n locations
cctgaggctgcagcnttagatgcgcgaaagaagttatttatgcccccaactcgcttggccaaacttttcaaatcttatgaaattgaatgtgatgcttcaaatggtgggatcgggactgtattgttacaagaaagccatccaatcgcttattttagtgaaaaattaagtggtcctactattaagtgatgaatacgactaactttggtgtacaaaacctgtgtgaattatatcaaactcctccaatatatggttgttctgcaagattgtaattactttttgctcaagataggtaataaatacatagtatgcccattttgtgcgtttaacaatcattttctctcaattttaacgtaattatgcaagtttgggaagtgctgattttcaccctctcgctaaaccaatcttctagctt

SEQ ID NO: 267270 - DNA, 455 bp, Glycine max
aactgaatgcattggttgacttggtaacccatctggccttgaatcagaaatctgtacctgttgcaagggtttgaggtttgtgctcctctgctgaccaccatacagacctttgcccttccatgcagcaacctagagcaatcgagcagcctgaagcttatgctgcaaatatttacaatagacctcctcaacctcagcaaaaaaatcaaccacagcagaacaattatgacctctccagcaacaaatacaaccctggatggaggaatcaccctaacctcagatggtccagccctcagcaacaacaacagcagcctgctccttccttccaaaatgttgctggcccaagcagaccatacatttctccaccaatccaacaacagcaacaacccctgaaacaaccaacagttgaggccccttcacaacctttcctctaagaacttgtgaggcagatgactatg

SEQ ID NO: 267271 - DNA, 132 bp, Glycine max
ggctttttaagccacgcaaaaaccgtgcaggaaaaacgcctatacaccacccgaagaaagggacaccgacaccacgtgaagacagaacccggaaaacatagcaaacgcgccaaccactattgggccgaaaaa

SEQ ID NO: 267272 - DNA, 402 bp, Glycine max
cggacctaaaaactaacttagcctgtcggttcagaaacatggtgttttatatatactaactggaaaatgccaacttggtttcacatatttcctgtattaaaattctgtatagacagtggaatcaagcagtcgtgatatctcttaatgagatttgttttccggaaaggccaaaccatatgaactcaattctccttgacattatctaaatctatattcaacaggtgatctagtggagagtataattcttccatggatatacaacatattactgaatcatgatctcaatcacattcatcggcaatatgtgacaatgtacacttaatatcttatacaacgcataatggatcgaaattagcttccttcattatgcgcttgggatctgcaaactacaccttaaattca

SEQ ID NO: 267273 - DNA, 283 bp, Glycine max
ggacccaagccctgagctgctatgtaaaacccaggttttttttcttatcacaaaccaggtcccctaatcaattatgctaacccatgcacacctggtcaaccttcatactaaggaccccccctgtcataccgttgaactctatacctttgtcaggtcaggtcttcataccaactaccaccccatttttgagactcaataggaaaaacacacctactttcatacctccagatcaatatttaaccactcaataattctgggacggcactttttattatgggcccag

SEQ ID NO: 267274 - DNA, 389 bp, Glycine max
  unsure (1)..(389): unsure at all n locations
gttctcagtatgaaaattagtaattgagtgctcaaaaatcagaatattcagaatcgccagcaatagaatactcataatgcacacaatgctcgaaatgcacagaatgatcaggatgcacactatgcctaactaatctatgaaaggttctatttatttcaggatcaaaggattggaaatcacctggatttcccctagtcatacactatatgcagcaaataatgtgttctcaaacaagcactcagggagggttaaaactacaactatagtcaaacgatatccaaatgagctgaaattntgtgagcaacaccctataatcatgagaagatagcgcaacaattttcaaacaaagattcaaagtctaactatgatagctgcctatggaacgtata

SEQ ID NO: 267275 - DNA, 109 bp, Glycine max
acccaagagccgcaggctgcaacatctgagacaagaggtgtatcttacttcaaaatagcaagccacccccgagccagacaacacggaaaaactaaaaagccctacgtca

SEQ ID NO: 267276 - DNA, 409 bp, Glycine max
  unsure (1)..(409): unsure at all n locations
ntccttgtctcccatcaagcctataacgagcgtagtcatattttcttcttcaaccaatccactttcattaacttttggccttagagccacttataaatcatcagctatcatagctgcattcaagctctgctcagcaaagaggggccatgtgatcactggcacaccctgcacaacacttacaagcactgagttccaaccacagtgagataggaaccccccaggtgcactatgacccagcacttgaatctgtggtgcccaagaaggaacaacacaaccttgtctctttgttctctccaaaaacccatgtggcgaaaactctagagggaccttagttccagcacaaaggtaaccagcacttaccacaccgatatgggccctcacaaccacaataatattatttaccactcaa

SEQ ID NO: 267277 - DNA, 312 bp, Glycine max
cgaacgccgcacgacgcgccaaaccagcctacaagtcctgcaacagtctgccgaccaatagaaatgttcacgacctcaaacaaagatgaattgagacacaaacccaaaacaaaaaactctctctggcatcaccatcttacacggattgagcgcacgataaacaagcaaccatgggaatgactacaacaacacggaccacgtgagcgacctccgtatataaacgcactcgcataagatataaattaaaatcaaaggtgacggaccgcgcacccaaaccagtaataggcaatggggcaactggagccgaaccga

SEQ ID NO: 267278 - DNA, 320 bp, Glycine max
ttacgaagtgaggagatgtcaagatctgttgaatatctttttatattactataactcatttatgtctctattcccgatagttgtacaaggaataatatgcattttgtcatttttaggacattagctagtattaataaaatattaattattgtgtgtttggtaagaattttaagaaacttagagcatttttaaggagagttattcggtgagttcttgtgtgttcaccacatctatcactattctttcttaagagttcagttgtttcttaaaagataaaatctagcatcagcaagaaaattgttaacagatagacaaatgtt

SEQ ID NO: 267279 - DNA, 395 bp, Glycine max
  unsure (1)..(395): unsure at all n locations
tgacgggtaangtctcacgatattcacgtgttcatgcatcaattgttagccgtggctatacgagacatcttgtcaaacnaagtcaggttcacgataactcgcctgtgctatttcttccatgctatatgtagcaaagtgattgatccagtaatgtttgatgagttggaaaatgaggccgcaattatactctaccagttggagatgtattttcccctgctttctttgacatcatgattcacttgattgtgcatctggtcagagaaatcaaatgttgtggtcctgtttatctacagtggatgtacccggttgagcgatatatgaagatcttaaaagggtatacaaagaatctatatcgtccggaaacatttattgttgagatgtacattgcacaaaaa

SEQ ID NO: 267280 - DNA, 385 bp, Glycine max
agcttggcgcaacatgcaaaagctaaaggattatattatactccaagcttgcatctcctaggagttgttcaaaaagcaaagaagggaccccagaccctttgaagaagtaaaccttccaggcacagttttaagaaaaagatgcatcttgcagatatccaactctcatcaaatgatcgctcatcccttggcaagttacatgaacaaatgtacttgcgtgatcaagccatggcgtacctcttggtctgcacaactattgggcaactgatattaagatggctgctctaaaatcttgtaaccgagtttaatgctttgaaatctttatgcccacaatttttgtggaggatatcatttcaggagataataagagaacaagtgtgttctctta

SEQ ID NO: 267281 - DNA, 353 bp, Glycine max
gatgaatcttcaatagaaacctacatctccaagaaaacttctgatacccttggcatttactgggggtggtaaattttcaatgacatcaatttttgctttatccacctcaatgccttgggctgaaattttgtggcctaacactatccctttttgaaccatgaagtgacacttctcccaattcggcaccagattggtctcaacacatctccacagcaccaactctagatttgtcaagcggcaatcaaaggaaggcccaaaaattgagaaagacagctagcacttctacgcacttctctaccatgtcagcaaagacagctagcatgcacctctagaaagtggcaaatgcattacat

SEQ ID NO: 267282 - DNA, 282 bp, Glycine max
gcataccaaatttcgagaagatgcaaccggttaaacgcaagcggggccagcgtttttatctaggcatattcatgtactcctcaaaagcttcttaagaggtctcaccagaacttcctcgggctttttgaaaactttctcagaggcttcttgaaaactaaatcttaacttcccaccctctataacaaataacctctaaaaatatacggataaaaacacacaaatatcaacctcaactaagtctaaaataatatatcatctatattatatctatatatatataca

SEQ ID NO: 267283 - DNA, 449 bp, Glycine max
  unsure (1)..(449): unsure at all n locations
ctctttcagaatttagcatatcttggaatttgctttattgcatccagcagaggtatgtttacttctacttttctaaatgtttcccagatctccttctctgtctcttcccattttttgttggaaattgctcttggagggaatggaagacggatatgctgcttctttttagagtcacctgcatagaaattgttaggtaacttactctttacattntcggtttttgcatcatctttttctggagtagagtgaggttgggcagattcatttgctggttaaggttcttgacactgctttcccaatctcaatgtaatgacactcacatttttgggattatggacagattgagaacgtaatctgtcataattctgggattgttgttgatttaactatgtagcccattgtcccatctgattaattaagctctgaatggacgctctggtctcttgtcg

SEQ ID NO: 267284 - DNA, 460 bp, Glycine max
  unsure (1)..(460): unsure at all n locations
ggcatgtgaagtgggtggaattcctagagcatatttcttatgttatcaaacataaaaagggaaaaggtaatattgtagccgatgctctatctcggcgtcatgcattactttctatgcttgaaaaaaattgattggtcttgaatgtttgacaagcatgtatgaaaatgatgaaacttttggagaaatttttaaaaattgtgaaaaattttcagaaaatggtttctttagacatgaaggctttcttttcaaagaaaacaaattgtgtgtgcctaaatgttctactagaaatttgcttgtttgtgaagcacatgaaggaggtttaatggggcattttggggtccaaaagactctataagcattacaagaaccaatttatatgcctcatatganaaaggatgtgcacgaaatttgtgaacattgcattgtatgtaanaaggcaaagtctaaggtaaagcctcat

SEQ ID NO: 267285 - DNA, 424 bp, Glycine max
  unsure (1)..(424): unsure at all n locations
acctgangcatgcaagctttaggccaattcatacgacaagaactttttatttttatgtttgatngagncccggaatatatcgagacgctcaaagttgaatgtttaatctttaagccaattcataacgacagataacttttactcggatgtctgattgagtcccgtaatataacgaaacgctcgaaattgaatgttgaacctttgagccaattctaacgataataacgttttactcggatgtccgattgagtctcgtaatatatcgacacgctcgaaattgaatgttgaagctctaagcctatacacacaacaataacgttttactccgatgttcgattcagtgacgtaatatatcgggacgcttgaaattgaatgtggaacctctgagccaactcaaacgacaataacttttactccgatgctg

SEQ ID NO: 267286 - DNA, 208 bp, Glycine max
actaagctacacttcactttagcgctcgatatgtaggggacttaatatacatccgagaaaagatattggcgttgaataggctaaaggttcaaattcattaccagcgtctcatatatttgggactctgatcggacttcccatataaggcgttgtcgttgaatggttagatgttcaaattcaattcagcggcccaatattacctaatgag

SEQ ID NO: 267287 - DNA, 383 bp, Glycine max
agcttgagatgaggaagcgttgtatggtgtttcttcctgcttttatagcagaccacagagtggtacctggagatatgtcccgggggtcaagagaccttggggacgtcaggtggggtgctattgctccaaaaccaagcttgaccaatcccgacccatcccgggcataatcggtcagtgagaacctgagatgtacctaaacatgcgagctcctggctgtcctcagataaatggaacatacaccacaaagcaaggaggctcgtggtggctggccaactctggattttgtgtgatatgtggagcatggcctctggtaatctattaccaagggtgggtaattgattacacggctctaaaatgaagacgggaggctaacaatgtctctg

SEQ ID NO: 267288 - DNA, 446 bp, Glycine max
gggttcgaggtacttacccgttgaagatcgaagaacgattattaacgaatgaagaacgtcgaagaacggtcgaaaccttcacgaaattcctcacggaaacgttacggaaacgtttcggaagcgcctcggcttggattttcttaacggaaacaattttttcaagcaaattcgaaagagagagaagtgcctaaggggctgaaccctttttcacttcacttctccccctatttatagaaaattgggggagaagcttgccacccagctcgcccaggcgagcagggttgcttcctccagaagcaacagccttctggaggaatcttctggagggcccaagtgggcctggttgctatttgcaccccgatttttactaagtacacccccctgccttttttttggtaattcttttttcgtaaaggtacggaaacttacgagatttgtaacgatac

SEQ ID NO: 267289 - DNA, 358 bp, Glycine max
gcttgcagctttcaaatataggtttttttttttctataatacgaacccagggttcacccttattacatagtcctggctaacccaaggttcgcccttggaaccaacctgctacttaactagaggggcacccctaagttgcttacatgaaaaaactacaatgaccgcttctcacggtacaatttcatccaacgatctaccacctcactattttgcgagactttaattgtgggaataccaccctactcctcataccatcatagaactacatgtagatcaactctcatctgttattgcgaactgaatactctgttggttatggtgccctatgtccgaatacgaatgaataatatgtacatat

SEQ ID NO: 267290 - DNA, 473 bp, Glycine max
ctaagcttactaagtgaaatcaggtgcaaccatatccctaagagttctctctacaagtataggttgagccatgttctcagtatgaaaattagtaattgaatgctcaaaaatcagaatattcagaatcgccagcaatagaatactcaaaatgcacacaatgctcgaaatgcacataatgatcaggatgcacactatgcctaactaatctatgaaaggttctatttatttcaggatcaaaggattgtaaatcacctggattttccctactcatacactatatgcagcaaataatgtgttctcaaacaagcaccaggggagggttaaaactacaactatagtcaaacgatatccaaatgagctgaaattttgtgagcaacaccctataatcatgagaagatagcacaacatatttcaaacaaaaattcaaagtctaactatgatagctgtctatggaacgtatagaataataagac

SEQ ID NO: 267291 - DNA, 418 bp, Glycine max
tcagcttctacatagaacaccggctacaccttttttctctataccacatctttgtgacaacggcggctgtgactttatcgcgttgattactggtcccaaaactctctgcaaggccgatatggttgtggatcgtcatcgagggagcgtgctccttcttttgcgttggagctggagatctttctccccgaagaatcccacggtggtgcatcattgtcggcgcgggaacaatttgaaaccgttcgttgaacacgaactgaggtcatccctcaggtagtccttcatcaaaacggagcgttttgggagatgtattagagaatgattattacacagaggtgtggcaccactagaagccatattatatgtaaggaaagttaattgaacaaatttaatgtagctagggactaaggagagaataaaa

SEQ ID NO: 267292 - DNA, 461 bp, Glycine max
  unsure (1)..(461): unsure at all n locations
tatcagttacttggttaccttatctaagagaatggagactaacaaaacttcctccttgttccttaaaagccttgatatttgaaaccatgctataacacaggtgaaatgaagggcaaccatggttcaaaagtaaaatagccacagaagaattatattctaccatgaattgcttgaaccctctacttcacacaatatggattccaagcataatagcccaaagttctgcaattacatttgaacaatggcctatatcaatagcaaaatagaagttgactttaccattagaatccttgagaactacactagtagctaccttcttcatgtctttattgattgaaccattagtattaagtttgaactagccatttggaggcttactccaactaatgcttttttgaccttgaactctagcttcatcgagggcaataaatttcatatagttcatactntctgccactaca

SEQ ID NO: 267293 - DNA, 364 bp, Glycine max
tatgatctcagcttaatcttctgcagatgaggacattgattgttctttacacttagactgtatctatgctcacaaacgttatgtaatggagcttcatgtgctctaacacggatgcagattcttttggggtcagatctgaaagtactaatagtaataagttttgacgagtgtcttgttgatgcactctatttctttatacgttcaaatataagaccagtccatttattccttgacatcatttaacagcagatatgtctatgcggatttttatttacacacgtgggagtcataaagtcgtatttattagaattactttatgttccctggcatacacttgttcatgctacatgaaatatgttgatgc

SEQ ID NO: 267294 - DNA, 404 bp, Glycine max
ctgcagctggacctgattacttattcttatacacctttttactcctttttggtcgtaggtttgtgtacaaaggcaggaatcctcttctctatccatttgaagattcttttttgctctccttcatagagcacccatgggggttcatgaaagggctcatttttttgggttttaatgtttatatttgatgataggttctgggtggtgaccttctatgtgatgactgcgtggtcatgggaaatatctgatcttggatccaaaaccttctcctttttcatttcttcctctcaaagtttgttttttcggcttattaagtaagggaagctgacattgctcttaactttttatgtcttgcgatctattacaatggttattgtgtatcgcgttggaggttgatgttgagatgt

SEQ ID NO: 267295 - DNA, 392 bp, Glycine max
tgaaccttgaatcttgattcttgattcttgattcttgtttataaatttccttttgaaccttgaagtgttcttgattcaatcttgaacatcttgaacttattctttgattctttgagatcatcatctttgttatcataaagtgttcttgacctttgagccttttgtcatcacctttgttatcatcaaaactcctttagatcaatcttgattcatcatgaagcttgcttctacagtttaaggatgcaacacatatttatgtataagcgaagtttccaagattattttgatgatgccaaagatttttataaacatacattcaaacaggattaaagaaatcacgaagattcacgtgaagacttacgagaagactcatgatatgcaacaacttctag

SEQ ID NO: 267296 - DNA, 416 bp, Glycine max
  unsure (1)..(416): unsure at all n locations
gcttaactcatttatttaattaaagaaacaagcttatttgagcctttaacaagnctaactcgaataattcacaaataacttgattcatttacacttatactcataaattattctaaacactaaaaaatcactttcaacatacacatactcttatgttgaactaaatatatttttggttccttaaaattggattatttcttttttagcccttcaaattaaaagttggtatttttaatttctgaaatttgcataatgctatttagtttctccacagtatgagtcaaacaaagaataagatcttcacaatttattttgatttttaactgtccgaaattaattttttatagtttaaaattatcaaaatcaactcaataaaaaattaatacattttttcaagcagttaatgagatttttat

SEQ ID NO: 267297 - DNA, 372 bp, Glycine max
accacatacttagttgttgacaaagtctctcttatagaggctcaattcatcatgactttagtactgattaacttaagttgctacagctccagcaccaaatctacaatgccaaagatcattaatgagtacataaatagtctaattataattcagtggcgcacatattatgataattcatgatatattaatttgcattgaaatctataaacctgctgaggattagtttcagattggcgttatgttacatcttataaaacattttactcaatacttgttgatagggtatttgggaataatttgtaatttggtagggtccctgtcagcgtaaaggcggtgggaaagaggagtgatggtagatccttattatctttg

SEQ ID NO: 267298 - DNA, 423 bp, Glycine max
gcttgaaggtgtgtactccaccatcttttcatagtagaatactggttatgtgtctactatcattatcattctttctctgtcattgaggtgccacttgagctgtcaggtctctccacttttgggcgtattctttgaaagatctgtgcccctttttgcacatgttctattgttgcatcctatccggaaccatatcaaaattgtactgatactgcctaatgaaggcaaccattaggtccttccaagagtggactcgagaaggttccaggttagtgtaccaggtaacagctaccccagtaagattttcttggaaggaatgtatcagcagttcctcatcttttgcgcatgcccccatcttacgataatacatctatagatggttcttggggcaaagtagccccttgtacttggcaaagtccagcacct

SEQ ID NO: 267299 - DNA, 442 bp, Glycine max
tgcagtcattagaagagaataagcatgttattagaagtatgactgtttatgttagtcaatgtgtcagattaattgtgaaggaatgcattgactgtatcctggtgaaagtgttatccttaaattttgaaagaaacgacaatcatttagtattgatttttgcatgaatctctgaagtatggacgaaatgcatgaaattgatgaagatgaaggccatgtttgattgtgatagccacttagccaaaaagttgaccatgtgcttgaatggtttatcccttgcacccagtttgagctgaataaataattgattgattgaaccttgagcctatacaatgttatttcctgccaccttgtcttatgttgtatgagagcatcatccataggaagcttggttcacagtaaatatgtcccaaatttgtgggagtaaatatcaaggtaaattcat

SEQ ID NO: 267300 - DNA, 282 bp, Glycine max
  unsure (1)..(282): unsure at all n locations
agcttagctacacccacccctctaattactaacctcacccccttgagaagcctccttgaaaagattcttaagaagctagagcttagctacacacacctcctttataactaaacctcacccgcttgagatgaaaaagctataactttatcctcaccaccccctataaaantctaaggctcacccccgtggccaaaattcatggaaaaacaaaaaacagtccctactcacaagactactccaaaaggcctcgaaaaacaagggctaaaccctatactactagaa

SEQ ID NO: 267301 - DNA, 418 bp, Glycine max
acttcactaagcaaatgatagacaaaatatgtatcattgtatcgcccaatgattgtgcaaagtatcgcttaacagaatttactcgtctcttttatgaattttttgtgttgtacttttgagtacaggttgccttttatagacttcagtgaaggatccattacatgattagtgctgagtcttgatatgaccattgcctcacatgtggaggtgggacgacatggcacactctggttggagaataaaaggaataatagtacagatagcagcatgtgttcctcttccgcgtcaaagatgacctttggaggaatattttgtaaatgccttttattctcttatatttcatgcacttccctttgaagataacattgtcattgcgtactcggttgggtgccacgttatatagtgtcaaaagagtatg

SEQ ID NO: 267302 - DNA, 422 bp, Glycine max
atgcaagcaatgaatataacacacaggacaggagattgctctcttttcctatgggtcgccccagaggcgataattgctgggcctctaccaacaactgaatgtaacaaacaactttgcttttaaatgaaccttctgcttacaattttcctctatcagcacaggtaatctatatattaattggaagaccacagggacttaataatgcataaaggaccatacaaaaggcgccacaatcacacattgatattctgaaagggaaccaaagtatggatatatatccgccaagaaattaacattaaataggctccgaacaatgtaggctactactgatacaaaaagtcttgtggaaaggtgcttgcccattgattggaaaggactgtgaaacctttctaaaaccccttagccaagacacagtagaaagt

SEQ ID NO: 267303 - DNA, 275 bp, Glycine max
aaaacggtgctagaaaagaggcagcttaacgtggagacgcacaaaaacttatatgggcctatgcctcttctgtaatgagagtgaccacattttgtcaatcaatgctccttttgagattaaagactcatactacatgaataacaaaattggagaagaggcaaacaaaatcttctgtagggaccccaagaggggatttctgttgattaacaaaaccatctaaaaaatagccaccatctaagagatatgagctcttcagcatatttgagcttcatggc

SEQ ID NO: 267304 - DNA, 412 bp, Glycine max
  unsure (1)..(412): unsure at all n locations
cctgcagcatgcaactngggcagtgtcttctttgttattttttgacacccncgcggacgacccttaggatgatgctatttttaacgttattctgcatgctatggctttctccgcatattgttgaaagtaattttttccatacatttctaaacctcttattataattctaataaagtgctgaaagttatattcctatttcatgcttaaataattggggaaatatttcttttatttccctttctttcttatgctctcttgaaagaaattataggatgttttatatatcgtggggagcgtaaaacaccaacttttcttatatattctttcgaacggttacatacaattcttaacgggaaaatttaattctaaattgcttagtttcttatttcattttattattaacctatccctt

SEQ ID NO: 267305 - DNA, 423 bp, Glycine max
  unsure (1)..(423): unsure at all n locations
tncacatacttgatacccatgtctcatttttatcttctttatctaactacctccacggccaagattgaccaaattggagagattcccaatctgagatggaatcttccccatgaatccataaaagaggtctaggtgagtcaatgaggtcattgcacaaagaaaagaaagaattgccataccttcaaaataattgtcgctcaagtcatgatatcgaagcttagagagaatcccgatctgagagggtactggttcgtcgtaacaacagaactcaggtcaagatacaccaaatttgagagatttcaatctgatgggaatcttccatggaatcactatcatagaggtgatgtggtcaagaagtattgtccaaggaagagcgattgcatacctcaaatcatgccgctcagtccagtaattaatgcttaa

SEQ ID NO: 267306 - DNA, 452 bp, Glycine max
ctccgctcctgcgtgcaccgcatgaagaccacacctattttattggtggcatttggcgtgaagtgtagaaaggaagagtggtatgaacagagagaatgataatgggaaacggtggtgggttattctaagagagagaaagagtgcatatatttgacgtgaaatgtaaaaaggaagagtgttatgtatagagagaatgagaatgagaaacggtaggtgggacttgttggaaacataaatgcgcaccgggagaagtaaaacacgtgccacgtggacacgaaatataatataaaaattaataaaatataaattatgaatacttgggcgggaatgataggggctcggacactgccaccacgaaataagtttataatttatcacaaccatctatacgatgctaagtcacacatgaaagaaataaacaaatgcttgatcccgaaggattgaccccaata

SEQ ID NO: 267307 - DNA, 339 bp, Glycine max
gcggagaagaaggtactgcgggtgaaccaaaagctcgaatttcttttggggatgtaaccatggaataacaaagcgtctggattgagttcctaaatctcaaaaagctattgtgaaatgctggtgaaaacaccaatgcccaacactattaaattttaatagagaatggtaacgggcatgtgaggcaactgtcgaattgctttgcggagaacgggcctataatgctaagcgattacggtggtgcacgtccacaatgcacgatctgttataattcctctaatcaaacaaatgccatctagcccccatattttcaaatgatttggatccaaacccttgggaaaa

SEQ ID NO: 267308 - DNA, 426 bp, Glycine max
  unsure (1)..(426): unsure at all n locations
gacctccaagtcacctgcagcatgcagcttcttcttgacttgctgtggaggattgtcaatgacaattggcggggatcattatgaggacatgtgtgatgtttcctccttggagtcttngtgttaaggatctntttactgccaacctcctgtctcaccctttttgtgcattgtttctcccctaggttagggttagtattgattgctctggaacttggtgtttccctttcttttgtatacgtttgggtagaccaaggttccacatattntgcttgtattcccaatcatcagctttctattatttgtatttgggggatgtatccaaaatctgatgtatctaatgtgttcaaactcactactatttatataattatgcactcttttatgtagttagtaatcaaaagtttatctcatctctcttcactctca

SEQ ID NO: 267309 - DNA, 419 bp, Glycine max
  unsure (1)..(419): unsure at all n locations
actcagcttgaatangagccggtttgagagcttgagatgagtatgttagtgattgtgagatcctagaggtgaaggagacatccacaacacttgtatttttgcaatctttcatcttgttattctctttgttgataagaaggcttcctggtatggaaagctaaatcctctgttggatattccctgtaggtacctgatgttaatatatttctatctatctaatgatgttntgtgtgttctctgtgctatcttcttttcattctagtatgcctttaccttgatcatgtagatgcatgctttgttagggtcattcaatagtggaaactagtctgactctaaagtccttgatagtacagggctgagttgtcgtgctttcacaccgaatcggggtgcgataatataattgagtatgtgtgtcttaa

SEQ ID NO: 267310 - DNA, 345 bp, Glycine max
ccgacagagtggatccttaagatggtgaaccagcccatcacttctgggatatgaacttccttcaaaattatcgaagctgatatccacttgttcaatattgtcaagggcactcaatgaatagatattgatttcacctaacaaatattggggatcatcccctcggatatgaagcctctctacatgaccagtttgattgatgcatagaatgcctttacatttgcaacaacctatgattttgtcatcttccctccaactagagaaaatgccataatcttctatgaggccatgttcgaagtataggagtgcttgtctctcactcttaatgcactatatttttgcgctatc

SEQ ID NO: 267311 - DNA, 448 bp, Glycine max
agcttgaccttacacttaggagaagagagtgagcacaatatattttttttatactcctacacaaaagaatgaaggttcgatcttcaagggtcaaatgtggagcccttaacttatataacaagaccaacctcgggttctccacttgaaattaatcttcacgtattgccattgtcattgtcactagttgttatgtattaaataaactctacaaaatatggcagttttaaattgcactcaagtcaatatttgtctactattaatagttatgtaatttgtatttattgaatttaattaaaatgcacttatagtataaagaattattataatcatctcatcatgtattatctcctatagctgttctaataattacattagaaaaacatatatgacgttatctctaatagaatgaggcgtatgtgaaaattaaactcatttttaacaattcaat

SEQ ID NO: 267312 - DNA, 345 bp, Glycine max
aataatccagtgttcccaatttatcaatttcttctgctttgagagatgaagcagcggggataatatggatgaatagcctacgttataatgagtgaggggaaaaccacatacgtagtttacctaataggatgaccttgcttaatggtttgttttgtcgttaatttaaagcactttttctttatctttgtgaaaagaggatgatgcttacatctgtgcaaaagggagggggctaacgtgtctgattacactgaccctaaattttttgtgggggtcgagactatgcatttgataatcttacatttcgtggtttaataagaaaaattgcttgacaatgccgcagtctga

SEQ ID NO: 267313 - DNA, 385 bp, Glycine max
  unsure (1)..(385): unsure at all n locations
tcanaccatgcctatgaaccgtctgcacaagtttattatatgtcttccaatnatacataaagggtccctcttttttcaccaaaccccaccaagcatccaccatcactcctttcactcccgcactctataatgccatcaaactagcattcattgctctcggcttattcaaagtccctcccattgttacagtgtccaacggaagcatcacaaacacgggaactctcaatgaatcattgtggctatgtgcaaccgatggcgcgtgaaccttctcccttttctcgtttatcatccgtacttcggagttgaagatgtcgatatgatcttgatgatgtctcctgagacatgtgattgatgcatggaactctctgctctaaaacagaaagat

SEQ ID NO: 267314 - DNA, 457 bp, Glycine max
  unsure (1)..(457): unsure at all n locations
tgtagaaatactaccccaagacaaaatcgttgtatgagttaaatggatgtatacaaacaaattggaggaaacatgtaaggttttgagaaacaatattatgcatgtaacaaaaggttactcacaacaaaaagatataaattataatgatacttatccactaattgctagacttgatataatntgcattctattgtcatgtgttttgctcatagtgatatgaaactatatcaaatggatgtaaaaaggaagtccatggtgcaattgctcatatgttgttcatgtaattttttaaaactcaagaaaaaaaataatataatagtaaaaaaatacatataaatagtataatagtaatatttatgaacatttaaacaagattcaatattgttgatagatgaatgagtttcttaaatatgttgacagacgtttgattctctgatcatgccatataaaaagactt

SEQ ID NO: 267315 - DNA, 465 bp, Glycine max
gggttcgaggtacttacccgttgaagatcgatgaacgattatgaacgaatgaagaacgtcgaagaacggttgaaacctttgcgggattcctcacggaaaacgttacggaaacgtttctgaagcgcctcggcttagattttcttcacggaaacaatttttccaagcaaattctaaagagagaaaagtgcctcaggggctggaccccttccttcttgcattcctcccctatttatagcaaaataggggaggtggttgccgcccagctcgcccaggcgagcagggttgcttcctccagaagcaaccgccttctggaggaatcttctggagggcccaaatgggcctgggtgctatttgcacccccatttttactaagtacacccccctctgctgtcttttggtgattctttttcgtaaagtacggaaacttacgaatttcgtaacgatacttggtttctttccgtaatg

SEQ ID NO: 267316 - DNA, 369 bp, Glycine max
aaactaaaattggacaaatcttataagggcaatctcaaacactctgaatgcagctaccgattccagcaaaacaaaacaatgcaaattataccatagggctaagcgagtaaagtcaacaacttcacgtagatatgcatatgcagccaaatttgacaaaaattaatcataccaacaaattatttcaaaatgatatcagaattgacaagtttaaaataaattacaactctcataacaaaattctagaaaattgaagaaacccaagcgagaattcgtaattcgacgccgacatcaaccacaaaacagataaaatgaaaacaaaaaaaacaaaaacaaagcaacaattttgtaacaaaaacagcaacaggaaat

SEQ ID NO: 267317 - DNA, 307 bp, Glycine max
taccttattatcacctaccaaaataaaccataaaaatggaagagtttgatacaaatatacacatgttttatacacaaaagttagtcatattcaccgactaacagtatgctatatacttgttatagaaaccttataattctatatatgcttgtagtatggagctatgccttaaaagcatagataatatggtagattgtgatttttgtacttagcgatgctaatacctttaagttcgatgacccatatcgggatatatttcataaggaatactattttgactatacctttcagttctagtacaacccat

SEQ ID NO: 267318 - DNA, 387 bp, Glycine max
gctgcagctttttgttttcctaacctatccgtttttggttttgcccccaatccgatgttgccttataaatttgttaagtctttggtgtgattgatgtattcttatgagatactttggaattctaaacctttcgttttgggttttgccccttatatcggaatgattccgttacattcttttttgggtgttttaatcccttacacaaatgtatgattcgcttttgcatgttcttcattttgtatgattgtcttttgcatgttgtttgttttgtatcattcgattttgggtgtttccaaagcgttctgatattctaactttgtatttgacattatattatggtgtgactattatctaacttcgcttttctgatgacaatccatttgtggc

SEQ ID NO: 267319 - DNA, 392 bp, Glycine max
  unsure (1)..(392): unsure at all n locations
gccttaagaagattcctaaagaagcttgagncttactgttctttcctctcttatagcgaagctcaccttcttgagatgagaagctagagcttagctacacaccccctataatagctaagctcacccccatgacaaaaaatcatgaaaatacaaataaaaagtgcttactacaaagactactcaatatgccctgaaatacaaggctaaaaccctatactactagaatggccaatatacaaggcccggatgaaggaaatacttattctaatatttacaaagataagcgggctcatacttagcccatgggctcgaaatctaccctaaggctcatgagaaccctatggccttcccttggatctttaaccctagcgctgttcggctatccatcaccc

SEQ ID NO: 267320 - DNA, 387 bp, Glycine max
tttttttaaaaaaggaatatccggatgtggatcatgaaataaaaacctatttacacgtgttacacgcatttataattctattttatcatgaacccaaatcgctcacatcatcctacaaaattttcaccttattcttatgccttcttatgacgggcgtgccatggaactaccttttatttttgtcttggtgacacaggcactcgccaagggagttttggaaccataatagttcctcatgaaccaacaaatgggcatatcattgcataactattcttgccaccaatacaagtattgatgtgggacctcctatagctatctcaatatgccattcaaccttctgaggattttcattttgcttagaacatattcttgaacatggatttattc

SEQ ID NO: 267321 - DNA, 451 bp, Glycine max
acccgggatccttaagtcacctgcggcatgcaactaagcactgaataacattttttctttatatgaagaatgtgtaactcattaaactaaaacaatgcactcaatcaatcttttattgcctctcataaaaaagtagccattctaaccatcaggcaacccgttcattttaatcatagggacacatactgaagaaattcgaatttaattgattataacaatattttaaattttaacgttacaaaataagtagcaaaagaaatcataaatgcgcaacaagaaaaaaaaactgctaaaaagaaaataaagtgctgctacatctcatatacattatttcgttgtctaacctatgcttcatgctaccttcatagccctgcctgtccatctcaccttctactgtcattttcatgaattgaaacaagaataggagttacccaactcacaactcaaccat

SEQ ID NO: 267322 - DNA, 347 bp, Glycine max
agaaaaagtattgtcgtttgaatttgctcacaacttcaacattcattttcgagcggtctctatatataaccggactcaatttgacatccgagtataactatattatcgtcttaattggctcacagcttcttcattcaatttttgagcggcttcgatatgttacgggacttaatcaagcatccgagtaaaagttactgtcgttaaattggctggagcttaacattcaatgtcagcgtctggatttttcgggactaatcaacatccagtaaaaagtattgtcgttgaattgctacagctttaacattaatttcaagcgtttctatattgacgggactcaatcggcatcc

SEQ ID NO: 267323 - DNA, 467 bp, Glycine max
  unsure (1)..(467): unsure at all n locations
actcagcnnggaggaaaatgggggacccatcacacgaggactaggtggcggtctagcgatggngcacaacaaggtntccacatacacagtgcgcgcataaacccaccatcccctggtgcccacctccaactgagctcacgtagctctcaccgaagcggatatccctcgtatctcgtcaacaccggggtcccatcaatcctaccaagcttccacaacatccaagcataacaacaattcggacagcacaagccatcacagccaagcaaaacagagcaaaggcagagaactctgccaaaacaccaaccaaaatcacagctgtgctcacttaaagacccccagtaacaattccttgcgtccacttcgttaaccgttggaacgactcgaaattatactggaaggctctaggacataagcctacattgtgaccggcgtgagctactagcaaacggccagaactcattctggac

SEQ ID NO: 267324 - DNA, 299 bp, Glycine max
  unsure (1)..(299): unsure at all n locations
ataaaaattttttattcaaagaaacaacatttgaataaaattagtaaacaaagaaattaccatgtagtatgtttctttataaaaataagtgtaaaatatacatgacattaagtaaaatccccagcctatagatatagaagaaatgaacaattctaaataatgaagatgaaaaaacaatctttggaactaggttaaatagcaagcatatgcagctaagtttggttnttgtttcttattagtccaacatgcaattcgagttcggtgactnttcagagcatgagcttcatactctagagtat

SEQ ID NO: 267325 - DNA, 418 bp, Glycine max
tctgattatgtcaatcgagtccactccacttctggggctcttagttcccttaaagaagctaataacgaagctgccatgcttgcttttctcaacttctcttctggtactccacaaatttccctttctaggttctgtctgttgccatggaaaggtagcttccttagtggtctcttcttgctggggatgatggtcttgaggttgggaattacggctttgtgaagtgagctatgttgtttattccttgaattggttataagtcatgtctgcgttcatattggaccatagcagcatagctgattatgacagttctcacaatacagagttcttctgtgtgttcatgtctgcggtccttgaattttggttggaaatgatcacttctgtcagtgaaatggtttcacatcctcataattgtttgatc

SEQ ID NO: 267326 - DNA, 375 bp, Glycine max
tatatcctcccaaacgtcaaattctctggctatatattcaacctttccatcactggcacgtggagtgaatcttcctccatggggcaatactaaagttatattgtcattcattctacacaatcagaaaccgcaaacattgtcatatattaggaaaaaaaacctacctcaaaaagcgtgaagacattgacattgtcaaaaagcgcgaagacacaatcagaaacaaaaacattgtcatctataaaaatagagcatcataaacaaaaataataaaggatcataaacctccctacgaagcgcgaagacaatgcagatgaaacccctcgaacatataaaaccccaaatcaaaccaccaaaacaatgcaaacgaattgaatg

SEQ ID NO: 267327 - DNA, 406 bp, Glycine max
  unsure (1)..(406): unsure at all n locations
cccttaagcacttctctctatttcgaatttgcttggaaaaaatcgttccgcgaagaaaaatcaagccgaggcgctttcgaaaccgttccgtgaggaatttcgcgaaggtttcgaccgttcttcaacggtcttcattcgttcttcatcattcttcgatcttcaatgggtaagtacctcgaaccaagcttttcgattcattccatatancccgggtggtccacattgtggttcgtgtatttttattctcggttcatttactttttatacccttntttgacgtgcttaagccattttatttaagtcatttctcgcttaacctcaaaataaaataaaattccaccgatcgcttgaattgtatatccggtaacttcgttaaaacanaatctaaccggtcgatcgtgccgta

SEQ ID NO: 267328 - DNA, 425 bp, Glycine max
agcctttgtcactccacccatatctgaccttcacattaaccatatttacaccgccgacaacagcgttaaggaattcttgcaccctggatacaaaggcttctttgaatcagtttgcaatgtatcatacataggagtatgtgcttgctaaaaagactcttgtccaagatcacgagtcatatcctctaagcgatctcccatttctacatcaaatggttcaaattgagaccccctctgcatgtctgtcaattcaccatgccatatccacgtggtgtaattcttaatcccatcacacagtagatgctcccgaatgtcgtcaagtattggacgtcttccgttctaacaattgatgcaaggacaataatattttccgtcctcatctggtcgacttccatcggaagcaaattgcaaaaactgatcaacatttt

SEQ ID NO: 267329 - DNA, 354 bp, Glycine max
acccttacagacttaccatctaattagaaagctattaggtgtccgtggggttataagattaagtatcatgctaatggctccgttgaacgatataatgctcaacttgtagccaaggggtatactcaaatggaaggattggatttccttgatactttctcttcaggtgcgaagctcacaacagactgattattgttagcattgggtgctattcatggttggcaccttcgtcaactcgatgttagcaatgcattccttcttggagaatctaatgaagaagtctatatgtatctgcctccaggaatgcaagtctcacaccctaatcaagattgtcgattacaacaagcactgtatggt

SEQ ID NO: 267330 - DNA, 424 bp, Glycine max
agcttcatgcggatcaagttgatttttgtttatttactgatcaagttgattcgcaacaagctacaacctatgcggatcatctaacacaaatgcggatcatctacactctacgctatctctacgctatcactgatgcggatcaggtctatgcatacgaagatcaacttgaagaaacacacaaaatggataaacaaacgacaggggagtggcttacctcgacaatgctgcgagccaaagaagaagaacacaaatgcaccactagacgcgagctcaagaagcagaccaacacaccacggcgccgcacaagacaccaattgggtcaagaagcaagtcgtatcacataagaaagaagaagaagacgaagttgcgcgctgggtgaataagaaagaaagaaggaatgcgataagctgggagagagaagctc

SEQ ID NO: 267331 - DNA, 353 bp, Glycine max
tctcttaagaattctccatcaataaaattatcacgagtaatcataacaacaataaaatcttatattgtgtgaattacacaatatcaatatcattcacattaaatttattttcctataagatataatcttacaagtcatttcttatttttactcattagaccaatctttggttatattctatacatttacatgaatcaatagaaagagaactattcctttataaatttacagataacaaaacatgtctctatgcaataccaaacgatgcagataaacatgcagcagacaatgtccattcaatttgatgtcagctacttcaccacattacaatctcttcttgaacacaacactat

SEQ ID NO: 267332 - DNA, 423 bp, Glycine max
  unsure (1)..(423): unsure at all n locations
agcttcctcggggccatttcctgcgaaggttaacatttggaaagttagttntaccaagaaatgctactcttaaaacaaaaatggcatacaacctcctttaataaacacaaacattaatgtaaatttagagtaaactcatgcacatacttccttacgaacgttcacttacacaagatattctcctaactaagaaaaatgcacccatgcacaatcaaggcaccttcgttacctagattatttatatgtacttccaaggtgtatttgctacccacatcacatgcacttccttggctaaaattacatacatgcatactcaaagcatcttggctaccaaaaattgcacacgtgcacattctggtatttctaatacctatgcatatacaaactttgtgatgaatcttggctacctacacaataaggtgc

SEQ ID NO: 267333 - DNA, 468 bp, Glycine max
  unsure (1)..(468): unsure at all n locations
tcaagntgctnggacatcaacttatattgggccaacaatgtatctagtgatgaaagctctaataaactcttcttgtaggaatatgaactctatcatgcaaaattgcatggtcactggcagccacattttcaattaagtccatggcttctttaggtttcttcaacttaaattttcctcttgcataaacgtcgagtaactgctttgattgcggccgtaacccatcaatgaagatgttcagctgtataggctctgaaaaaccatgagtgggagttttccgcagcaagctacggaatctttctaatgcctcactcaaagattcatcaggaaactgatggaatgaagatgcaggtctttaaactgttgcccttgaatgaatgcaaccatctcttggcctcccagataaagaaaatganaataggctgagcctaataacatatccaggtacatccgcaagctngatagtatttc

SEQ ID NO: 267334 - DNA, 414 bp, Glycine max
gaattggttcacacatgatctgtttatgatttgggacttgtacgaattggattgggcaagattggatgagagaaagtgtgattttcgaaatctgcacttatgcagaatatttgctgtgaaattgtgcagcagaattttgcacaagtgcacaaaaatgcttgtgtgcgtggctgtggaaagagtactacagaatgagctctgggtgtttgctagtagatcccaacggtcacaatgtaggcatatcgccctatagacttccagtaaaactttggagtcgatccaacggttaacgaattggatcgaaggaattgctactgtggtctttaagcgagacaagttgtgattttggtcgatgtgttcagcagagttctccgcctatgctctcgtttgcatggctgagatagctcgagcggc

SEQ ID NO: 267335 - DNA, 313 bp, Glycine max
cccatcgtctcatagaacatagacctctctgtggcgatgtaagcattgattagccttaagcggacagatgaattatgctgagtgatcatatgcgccatcgggatcaattattatgctttttattgaatctcttgacaattacaggtaattgggcttgtctccacatatgggctagcacttgaagagaggatacaatgttattctaccacatcttatatcatctagatttgtcatgaggacattatgtcatctagagtatatcctatcacatccatatgttatgatagctagagattacatgatctatgtccta

SEQ ID NO: 267336 - DNA, 414 bp, Glycine max
  unsure (1)..(414): unsure at all n locations
agctngagatgaggaagcggcgaagggtgattctctctgcttttattgctgaccacagagtggttccttggagaaatgtctcgggggtcacgagaccttggggacgtcaagaggggtgctattgcccaaaaccaagcttgaccaatcccgacccatcccgggcatagtcggtcagtgagaacctgtgatgtacctaaacaggcgagctcctgtcagtcaacagatataaggaatacatgacctccaagcaaggaggcttgtggtggctgcccagctgtgaatatagtgtaatatgtggattgcggcctctggtaatcgataccaacggtgagtaatcgattacaaggcttaaaattgaggacaggaggctaacatggtctctggtaacctattaccatagggtgtaatctatta

SEQ ID NO: 267337 - DNA, 434 bp, Glycine max
  unsure (1)..(434): unsure at all n locations
tncatctagtggtaatcagagcacaagagcttctagtatgtttcttcttanacctccatctaatttttttctttaccttctctttcattgatgtttcttcatttttctccatgtatctcctcacatgtcttgttctaaatgttgttaacatgattctttagagtttccaccgattaaacttgctatagaagttatatttgattttctatggttcaaatttcttgttcttgttcttgaaccatgaattgtgttgagtttaagttcctttgagttttgtcttgttattatttgtggctgaaacctaaaccataaaattcttactaaaacattaaagtagaagaagacctcaaaaatctagagtgacttgttcacctatcgtagtttgtcatgaagtcatgtctagtcatgacacttgtcacattagaattcttatg

SEQ ID NO: 267338 - DNA, 423 bp, Glycine max
  unsure (1)..(423): unsure at all n locations
agcttcatgatgaatcaagaatgattcattgttgtnttgatgataacaaaggtgatgacaaaaagctcaaaagtcaatcaaagaatgagttcaagatgttcaagatagaatcaagaaagattgagttcaagatgtttaatatagaatcaagaacacttcaagattcaaggatcaagcttccaagaatcaagatcaagactcaagactcaagattcaagaatcaagagaagacttaatcaagataagtatgaaaaggttttttcaaaaactgagtagcacatggatttttctcaaaacatgtttaccaaagagtttttactctctggtaatcgattaccagattgttgtaattgattaccagtagcaaaatgaatntgaaaaagttttcaaatgaaattacaacgttccaattgatttcaaaaa

SEQ ID NO: 267339 - DNA, 391 bp, Glycine max
  unsure (1)..(391): unsure at all n locations
tttctctcaactattcttcattcttcttcctttnttcacttctggtcttcctttctcttgcacaaatttcacggcttgtccattgtggatgatcatggaaggctaaacacttaattaatccaaggatccactataagtaaggctgaatttgagttctggtttagtatttataatctttgtgaatgttcatcttttcttcaatcctattttttattttcatgattatgattatgattaggattgaaaatggattaggttatggattcatttcctaatttcaaaatttaatcacagattgtttggatgattttccaacttatattgcgatcctcaacaatctatggattgacttgattgaactatctctaatgcatttgactgaactttacac

SEQ ID NO: 267340 - DNA, 345 bp, Glycine max
  unsure (1)..(345): unsure at all n locations
atgtgtaattcgattacatagcgcaaattttgaattcaaattttaatagctgttgtaaatcgtttttggccactggtaatcgattacatcctctggtaatcaattaccacaaagtaaatctgttgaaaaacctttttaacttagatttcttggccaaaccctttgcgacttcaattggaatttccttcctatttaatatacccttcctaagactctagaaactgtcttgatcattcatcttgaatatctttgtcttgaataaatctttgagaagcatgtgattcangtaatcctttggcatcatcaaaacattcagcttgaacctttgtctacaaatctcccctt

SEQ ID NO: 267341 - DNA, 320 bp, Glycine max
tcagcttgcatcacattgtctgggagatgcttcttttcttgttcgccttgagaacagtagtggtccaacgcgctatcgtttatctcctttcacaaccaagagatcgtgtatggtctaacgccttatcgtttctcccctttcaaaatcaaaagatcgtttaatgatccaacgccttagacgacttttgttcagttaagatatatcttgcgaaaaatgataaaaataacttaaccaacgtttagttctcatagaactacgtaggtctgattttctcatcacaattgaggatacgtaggagcgagggaaacacccttgtcgac

SEQ ID NO: 267342 - DNA, 412 bp, Glycine max
  unsure (1)..(412): unsure at all n locations
agctngggtacaanactctcatcctatcctccaactcccatgtagaatcaccctcatcggttccccactgcaccttcaccaacgcgaactcctttcctttcaacgacttcattcttcggtcagtgatcttctgaggttgtgctttataggtgaggttatccttcacctgtacctcgcccactgcaagaatatgtgatggatccgggttgtaccgtctcagttgagagacatggaacacagggtgcaaattcgataaactcggaggtaaggcgatatgataagctacaggcccaatcttcttcaaaatctgatatggacctagatacttgggtgtcaacttcctagccttgagagctcttccaactccggttatgggagaaaccttcaaaaacacatgttctccttcctgaaa

SEQ ID NO: 267343 - DNA, 272 bp, Glycine max
gtgcctactatgactggagaaacaaaggtgatcatataacaagcagagattataagttactaggttgcctcctaatagcgcttctttaacgtattgagctggacgcttgatggcttgtcggtcacggacctattaccttgcttacccttggctctggacttgagcgcctattgctcggtcatgggtcttaagcaacgctctaacctttttgtggagagctgacgtgaactctagaggtgatggcggtgcgtctggtgcccgctgctggccat

SEQ ID NO: 267344 - DNA, 413 bp, Glycine max
gcctatgatgataggactagcacttttacttgctctggggagcaaactattccatcacattttgcccctaaaccaaaatgattagggaaaacatccaaattgtaataactagagaagaaagatcctcttcagtcattttttatcgacaaatattagttattagtttggtaattttttgtttgtgggaggatttgaacctatgacctcttccccctcccttctccctttaccaccaagccaatcatataaccccaaaaatttcttcctcagtcaattttttgtattggatgattggaattcttatatttgttttatctgcaaggaaatgttataattcttatagttgcaagaaccgtttagacgaattagtgacaatgctatggtttgtgtttataaataaaggatcaattcac

SEQ ID NO: 267345 - DNA, 477 bp, Glycine max
  unsure (1)..(477): unsure at all n locations
ntcacatggtctattatggaccacttgattcaccattagttatatatctcattgtcaaaggaaattggtgcaccctctgcaccagattatgtccttcccagcagcctcctgcgttttcggcagcggcatttctttccttgttttgtcaccacttccaccctcttctccctccctttttgacactgcccttgtgctctccaacccaccatcaagatctgccaacactatcacaatatccgccaccacaagaatttccataatccattgcaccccaccagccgtcgcgagctgccatcggaggtttgtttccaagaggagcattgttgttcaaacccacgatgactaatagtgatgtcgatgaagtgggagaccagtctttgatacatatcacaaacaatcaattcacacaaatctctacttgaaataccaagtcacacaaacaatcataagtcttggatccttatggtcacaagaata

SEQ ID NO: 267346 - DNA, 289 bp, Glycine max
caaaaaacctgcggattttattacaacctgcccaagcttaatgataatggctgttgcctgaaaaatatggctggaatttcataaagactaatacccgaattccttaacacaattctggttacccctagcattagacagattctaacaacgcaaaaggggcataactaccaattagaggaggtatccttgtagaaggcttaccacctgccactagaagcatacgactgacaacccgggctatgtaaccctgaaatcttatccacaaaaaaaatatgtatgatgaacattt

SEQ ID NO: 267347 - DNA, 398 bp, Glycine max
  unsure (1)..(398): unsure at all n locations
attaaccttatttttctttattaatatccaattcggcttaagaatgagaaatcccaaagagaaaacgtccgattgacctctcgctttattttactaaaaggcatattttnttatcattatattattctcttacctcttttttgatttccaacggggatacggcacgaccaaaccggcggaattcactttaaccgaaattaacggataatacaattcatacgttcggtggaaacctattttatttctaagttaagcaagaaatgacttaagtaaaatggcttaagcacgtcaaaagggggtataaaaagtaaacaaaacgtgaataaaaatacacgaagcacaatgtggaccaccacgggtacataaaaatgaatcgaaagcttggtcgaggacttacc

SEQ ID NO: 267348 - DNA, 279 bp, Glycine max
  unsure (1)..(279): unsure at all n locations
tcaaataaggtcttcttatatattatcatggcttatatattataaatcgatcattagattttctggtgtcattaagcaaactatgtggaatacgatatgggcttataaatctctaactgtgtgacttagtttattgaagagttattatcaaagaccacctcttccaaaagctttaagctgttaggttagcactttgcgatatangactaatatcattgcctttgtgtataccgaactaatttcctctaactatgggtcccttgccccttcctagacctt

SEQ ID NO: 267349 - DNA, 364 bp, Glycine max
ttcagacaatattgggtacccactataaaatacatatcttacgctcatggcatcctcaccatcggtaaaatttaggctacacctctaccgctgttcgggttaactaaggtgcttctcagcttggttaattgggtctaaggatcgcaaatttctaccagctgtggaggtgaagactaaagagagtttggacaattcgatttattggtccgtcgaagataaagtcatactaattgaacctgccattaccatagtcatgcttatctgtaactaaatctttctaggcatgtaacttaatctgacattaatctcagatctggtttgctgctcatatatgactattatctaccatgaacattatgtgcat

SEQ ID NO: 267350 - DNA, 321 bp, Glycine max
ccccccagccagctattcttatcccgacaacacaaaccgcacacaagaaccaacagggaacgcccataacagacaagcaccagcatcaaggacaaagcgcctaaacacgcaagacacacacgagtgcacaaaaccacaagagacaatgggaagagagaatgcagacacagctctatactggggcggccacataccgagcctacgtccagtactcaggcacccacttgagatctcactatctctgaaaatccatgcaaaggccgaaccacacacggacaacccatccctcgtgtgcaggaaacctcgacaacaagagaccca

SEQ ID NO: 267351 - DNA, 423 bp, Glycine max
  unsure (1)..(423): unsure at all n locations
agcttatagtatgctntgaaggccttcattttatctgttaccttaacaaggtcaacagttggcttctccctcacaatgggcaagaatggaccctggacttgagtggcatttgccagctcttcaaggctagaatcaccagcctgcaaagcaaaattagggatgtaaacaatcttcaaacttcaatgtttactacttacaaggtaatgatgaccataaaataaataaaatttgcacataatcatcaaattaatgattgaagaatttagctttaccttgaccttgtgtgcccttcttgggaacacaaccaacttagccttgtaggttttgagcctctgcacattggcctgcagactctccaaagaacgattctttctgcggtgatcaacagaaatcccaatagttggagcaagtntcttgtgaatt

SEQ ID NO: 267352 - DNA, 416 bp, Glycine max
  unsure (1)..(416): unsure at all n locations
agcttagaaatcaagtgatcatcaatttcttatatagggggagtgaacgccaaantntatatatatgcattgcttgcttgtatctcgatttcaggacttatattgtcatcatcaaaaagggggagattgcacaagcaaatgcctttggtgttttgatgatgatcatgatgatttgatgcaaatgatgcaaatgggcttttcaagtttaaattcaagacaatgattcaagaatacaagccacaacatcaagatgatctctagtattctaggaagggaattcctaattgatatagcaaaaggtttggccaagtaatttaagttaaaatgtgtttttcaagagatatactctctggtaatcgattaccagaggatgtaatcgattaccagtggccaaaaatgatttacaacagctacta

SEQ ID NO: 267353 - DNA, 401 bp, Glycine max
atacataactcgttttgttttattttcctacactaacttccctttaaggttgaaaacattacactaatatccctgggtaagtctaaaaacatttatttcttaaaacgaatcaggaccgctaattattttgattagatgtaaacaaatacaaaggctaaatgttgcgccttttgagaaattcgcgtctaatattgatattttgtatctgatgctctattaaaatatttggagaagtctacgcttgatgtttcaaatgatagacaaatagattcatgatctgatacgacattaaagatgacattcaagatttcatttaatactttatatctaagatattttgcagaatcattctcttaggatctatcgaatcctatgaagaataaataaagttaaagacctga

SEQ ID NO: 267354 - DNA, 372 bp, Glycine max
  unsure (1)..(372): unsure at all n locations
tggcaattacacgtgcatttaagacacttcttcatctaatgtagaaagcncaagcgagagaataggaaaacgagaacccatgcaactttcaactctgggagagagtgaacccaatgcattcataaacacgaacaagctcatctcatccaagcaacatataacaaatntgacacaatttaacagaatgggtggtgatttaacatgatgtccgcaatctgaagcataataaactccatacaggcaaagaggatacagagaacatgtggtcgactaacaaagagaatacttagttacgtggacgatatgtcttcagttgtccaattaagacactcgaagtaagccaccaatgctatacaaatacttaccctgcat

SEQ ID NO: 267355 - DNA, 416 bp, Glycine max
  unsure (1)..(416): unsure at all n locations
agctagnccactttgctactatgccttctatttgaatntctggaaaactgagaacaccttattttttgccttgatcaagtatgcccacatcattctgctatgctcatctacaaatgatgtgaagtacttgttcccacccagttatggtacctcaaaaggaccacacacattagaatgcacaacaccaagtgcactggaagctctcattggcaaatgggaattaaaggaatttcttggttgcttgccaatgagacacacatcacacaccttctctggtacatctaattttggtaaacctataaccatattattagttactaacatattcaaacttttgaaatttaagtgaccaaacctgagatgccaaagccagctcaattggttgatctttgtagccattaaacattgtacttctg

SEQ ID NO: 267356 - DNA, 414 bp, Glycine max
  unsure (1)..(414): unsure at all n locations
ggacctataaaactcagctgtggggcttagggaaataaataccttgttttatatgtgtttataaaatcctactaaaggtagagactaaacttagcccatacttgatgaagaactagtatgcaaatctttgtgtatagtatcctctcaactctgcttctcactatattgtttgcaacctactttttattttattttatttcagagccaagaaacctcgggctaaactgagtgtgattttgaaaatatacttaaagtaagatttttgtttcaaactctntcttggacttgggttgtctcaaaaaggggtgggaacggttacatattttacaaactggcggctatatgggaatccaattaagcattgcataagctttatagtatgactagntatcttgcgtgtggctatatatatat

SEQ ID NO: 267357 - DNA, 223 bp, Glycine max
taaagaatttccggagtttattaagtgtggccaaaatgaatttgggcctatttgagcaataacccttccaggtttagaaagaggtgtatattaattacattcttcttattcattatataatcctcatttgcctcttcgactaaaagcaagaggcgtgtgtgccccactagttttaggtggagctatacacatattagatatatgggtctaaatactcatcact

SEQ ID NO: 267358 - DNA, 450 bp, Glycine max
  unsure (1)..(450): unsure at all n locations
ggcgaaagaaagaanaatggtagctcttatatgacatcttatatatggtactctcaagatgtagatcaacgactcaagtagaagtatgcttgatgattattgaaaaaagagacctaatcgatcaaatacatcatttatagaactagttagagaagatagtttttatcttctaaagtatactcgtctcttgtaatattcgacatcccatcaagtaatgaatgacaaaattaacaaatgtcatagatgaacaaatagaattgaagcaattagagttaaaaatgaggggagattntgggttagagatcatcttcaaggatacatcctagatgatagatagaagcaatgagatctgtagaatattgtgtacttaattatttaaaacatagaatacgtattgagtgatgttagcaactattttttataatctatatatatgataaataatacaca

SEQ ID NO: 267359 - DNA, 413 bp, Glycine max
agcttattattaaggttggatatgaaatttcttgtaatcacctcaaagcctatttagaagtaaggtctctaaataagacattgatttatctttcatgagctcataggtttgactgtttatgtacgtcagcatgctaaatatttaaaaaggtaagcaaatatattattttactacattataaaaaataatataaaaattataaaaaatttgaaacttaaataggttgaatgattagacctaaaagactttcttgataactaaagactaacatattgaattatataggcatttataaaagtcttagactcatttatttcctaaaaatccatggtctgacctagattaatttatgctaggccataggttcggtcaaatgacttagcatatttttacccctacatactataaccaac

SEQ ID NO: 267360 - DNA, 365 bp, Glycine max
taaagagtagtaaactaattcagcaatctctgacactttttatacattgatcttatgcataagaattctgtacaggtacaaaaaataatgagtctcacattttattaaataactaataattttataatttttaataaatttttaatcaataataacataagagtaacatgtttaaaaaagctgtagaatgtattggatcttgctgaccaagtcattgcaatttcttttattaacattatggtgaaaataaacgaaaacttacaacataaacatgttaatactttcttcatactcatatataaacaaaatgaactaatgttatattaaattaaaaagattatttacaatctttaattttaccaatc

SEQ ID NO: 267361 - DNA, 420 bp, Glycine max
ctgctatttatcacttcattcttatacattgtttatacatcttattgagggaaacttcaaaattttcagcgagagaaagaggaggcctataacaagatacttcatttggaaaaacaactagatttctctatccatataaaagtatgaccttgtttactttctccctgataaaagtacaccccctggtccccttttctctatccatatatagagatttgctaatttaccttgaccttttttaggagtattttaatttagcaaactataccttggccttggatgcatttagaaaatcctagttatatcctagttatatctcttcatttaagaaaatcctagttggatttatatgctttattgtgcatacccggaatgatgttgcctcatgggtgaaggagctgagcaggtcttattaacata

SEQ ID NO: 267362 - DNA, 461 bp, Glycine max
  unsure (1)..(461): unsure at all n locations
taatgctgatggtcagcctctgaagatcctcaagaagaatatgatcatactcgctcagacatggagtattctttcttactccatcttgatccccacctcccacacttctgactgtagaagcaagctttatgatgaatcaagattgattcanagagttttgatgataacaaagaagatgacaaaaagatcaaatgtcaagaacacttcatgataacaaagatgatgatcttaagaatcaaagaatgagttcaagattgaatcaagaacacatcaaggttcanaagaaaatttaatttcaagaatcaagtttcatgattcatgttccaagaatcaagatcaagattcaagactaaagattcaagaatcaagagaagacttaatcaagataagtattaaaaangtttttcaaaaattgagtagcacatgaatttttctcaaaacctttaccacagaagttttac

SEQ ID NO: 267363 - DNA, 435 bp, Glycine max
  unsure (1)..(435): unsure at all n locations
tgcggcatgcaagctttcacccanagacacttatttactgtttcttatttttaccaagnaaaacaagntctccgagagttcgatactcgatattcacttaccgctttatactacttgggcgatccggtgcacttgccggccgtcgaacaaggccacatttgtgaagaccataccaatgccacaaggtcccaaaagaaaattatttacaaaatgtgaagaagcagaaagaatggatgtggaacgagcatttggtgttctcaaatcttgattcacaattatatgtgatccatcacgtgcctggaacatggatataattaaggatataatgttgacttgcattatattgcataacatgattgtcaaagacgaacgagatacgttcaatggtaatgtcgatgttgattatgatcacgtagataatgacatttcatatgt

SEQ ID NO: 267364 - DNA, 396 bp, Glycine max
  unsure (1)..(396): unsure at all n locations
ntaacctcatcgtctctacagtctntagatgtgggagttaattcaatccttgngtccgggctctcagccacttatgatagccgccgatgatcccattactgcttcccctaagctctctgtcctttcttcacgccgcatcccatgccttgcgaactccttggagtacctctgcattggggtcactgaaaccncgtgtaatgaaaggcgtgatgctttcgtctaatggcgctcctctcatggggtagccaagctgtcttatggcgaggacgggattataattaatacaaccccatgttctcatccagggaacatttggacatccttcgcatgaagatacaatcctgattcttccttccttctagcaagggaaccaattaacagacgcccctccatgct

SEQ ID NO: 267365 - DNA, 425 bp, Glycine max
  unsure (1)..(425): unsure at all n locations
gcaagcttgtgcaaatcaaatcactcctacatttcatctctagcatgcattttctttctttacccactcctcacgtttggttttttagggaaaaaacaccataactaaacgcgccgcaagggatccctatcgcaccagatccaaatctataacgatgggtgatcaagaggagacgcaggaacagatgaaagccgacatgtcggctctgaaagaacaaatggcctccatgatggaggccatgttaagtatgaagcagctcatagagaagaacgcggccaccgccgccgctgtcagttcggctgccgaagcagacccgactctcttggcaactacgcaccatcctccctcaaacatagtaggacggngaagggacacactggggcacgatggcagccctcacctgggatacaaccgagcggcttacc

SEQ ID NO: 267366 - DNA, 417 bp, Glycine max
taaaaactcagcttgtagatatggggacccatcacatgtggtctaggtggggtttggctatggtgcacaacatagtttccacattcacaaagcacacataaacccaccattccctgttgcccacctccaactgaggtcacgtactcccacgtaacccatatcctcttttctctcaacaccgggtccccatcaatcctcccaagcttccccaacatcaaagtaatacaacattcgcacagcacaagctatcacagccaagcaaaacatggcagaggcagaaaactctgctcataacaccaaccaaaatcacagcttttcttactaatagactccagtaacaattccttcgttccaattcgttaaccggtggatcgactcgaaaattatactggaagtctctagtacttaagcctacat

SEQ ID NO: 267367 - DNA, 381 bp, Glycine max
aatcctatcatatgaataaaagtttgttagcaaattggggtgaccgcttgttaacaaagatcgggtattgtgcttccatcctttggcagaaaattgggttaattttactttggactatttaattttatcaacgacaattacaatcaggggtttgggatctgcataactcagtatgttttccttcatcgagatatcattcatgggttatctgttattccccttcctgagccaaagcagatcaactttgttggaaagagttctctgcaacgagtggatgggtgctactttcagttctaatttgttgatttttttttaatcgagcttagtttatcctctacaacatacacaagagaaatgccagtgacacaaatcaatttagct

SEQ ID NO: 267368 - DNA, 364 bp, Glycine max
cttctatcattaaagggaagcgtgtagaacagaacattcacttgtacatccttattggtaccagatggctgcacgaagtattgttaagaaagctcgtacgaatacatatgagaggtgagaatgacttgctaaaacttgttcatgtccatttctttatcaaagaccttggacagtctttgcttaaggagaatcctaggatgctttttcttatctacaatactgaagctattgagggccttgttgctcatgatctcacgcaaggggaatctgattgcaaggatggtaagctttatactaaatgtataaatggcaacataattgtgtaactgatttatgcgaattaatataatattcaatatatatt

SEQ ID NO: 267369 - DNA, 421 bp, Glycine max
agcttttcattcaccttcacaatatttgttattatgttttacaactaattaataaattcaaaatagaactaaaatgacagccataagtatgaacctctgattttttcttcaaattataattatggcgaagtcaatccccctgcaaatgagcgcttcaatagattcttcatttatgttaaaacaatactcatcaattaccctacccttagcactaaatgtagactctgaaactactgttgatattggaatagctagtatgtcacccgccatctttgataaaaccttgtattttaggctattgttcctccaccactctaacacactaaaataagagttactagtttcaggaatataaacattctccttaagataatcctctaattctgagttcactggaggggtggcttcatttgcacgcaca

SEQ ID NO: 267370 - DNA, 326 bp, Glycine max
aaagaaacgggggatcatattggtgcataccacgccatgaaaccatagaaaagtaatgaaaccgggaaagacatgaacggagacaaccacctggacatgacaatgggctattaatagaagatatgattcaactgcattaatatttgttagactgagaaaataataacatatgaagaacaaaatagcggataaactaaaagttaaacatcttaagactaagcaaaataaatgttaaaagtgattgaaagaaacaaaaaaatccagatcaaactaggacagaaagacatggattctttcctccgcggggaattatatagttttatgca

SEQ ID NO: 267371 - DNA, 423 bp, Glycine max
  unsure (1)..(423): unsure at all n locations
catgcaagctttgattgggccctgtgtctctttattttgcatagcacaccagagaagttcatctgtgaagtctcggtcaaaggtaagtagccctgtccgtcaagagtttgttntcctttcatgattgaacaatgcttgaacccaatgtaattgcatgcatatgctaccctagtccgcctaattgtgtgcctttgtgtttgccttgtaaaacttagttatcactttagttcaattgaaaatagtttgatgagcaaacctattttaggtgtgtggggtctttaagatggtctgaagaaattcttgtatgaatttaaggcagcagctacagtcaactaaagttacactttntgcctctaagttggaacaaatgtatgtaccttcctctttgcctctaagttgaaacatttcattaattatacacta

SEQ ID NO: 267372 - DNA, 442 bp, Glycine max
  unsure (1)..(442): unsure at all n locations
taacgaaacacacaacagcatacagaggaagattaatatgtgtcgatngaagaagaaaaaacctgtgatgctaacacaggaagaataaaaaatgacgaaggatgattggaagagatgaccaatgatgatcggaagagatgacgaaggagatcggaagcatgggagaaaaatttcgaggaaggcacatcacgaccgttctcaggaacgagagaaaattttatggttcacataaatgaggagggtatgcttgtcattttgaaattatcttgacgacattattgtccaagccttattttgggatcaacttcccgaaaaggagacttgagaagctggaaatcagagcttaagaaaaatatctgctaagagcttttgcttatgtaaaaactaataaagtaaaaataacccaacactcttaaataataaacaagatcttttttcagta

SEQ ID NO: 267373 - DNA, 418 bp, Glycine max
  unsure (1)..(418): unsure at all n locations
ctgcagctctacttatgggagggcgggcttttctttttcttcttgtctccaacgcagaacttgaccatnggtcttcctttccgcgatggcttctttcatgtctgcctgagggggcttatagcctaaaccatacttcccacgattaccttgggtatttatcagtctagttatgccgccgttgttttttcctaaacccatcccgggctcataaccgttccccaacataactcgggccatcattaccgctgcatcggacagactaggctgcccaaagagggagtccacggaggaaatgctgaccacctcaaaagactggaaagcagtttctaacgattcttctgcggcttccacataaggcatggaggatgggcagcttaccaagatatcttcctcgcctgacacgatgaccaagtgccct

SEQ ID NO: 267374 - DNA, 409 bp, Glycine max
  unsure (1)..(409): unsure at all n locations
ntgaagattngtgtcttgccagtgaaaggatctatgtgtttatgaaaaaaggcaaatttagtcatcccgcttggacgaatgagaaaactggtgcaaatgataagggtgagaaagagggagaaacccatgctgtgactgccattcctataccgccaagtttcccaccaaacccaacaatgtcattactcaatcaataacatacctcctccttacccaccacccagttatccacaaaggccatccctaaatcaaccacaaagcctgtctaccgcacttccaatgacgaagaccacctttagcacaaaccaaaaaaaacaccaaccaagagatgaaatttgcagcgaaaagcctgtaggattcaccccaaattccggtgtcatatgctaactcgctcccatatctacttgat

SEQ ID NO: 267375 - DNA, 407 bp, Glycine max
  unsure (1)..(407): unsure at all n locations
agggacatccacatcttctagtttcgtttttctctaacaaattcttgcttcctaccctaactcgcactcctttacaatcaattaacacaaacgaaggtctccatctacaccagtgtttgtgtcagaccttataaccaccgtcacaaatccggtttcaagaacaacggatcgagcccaccgcaaaacatcctctcggctgtcaaacacctacaaagcaatccagataatttcaattttttacaacatattcattttattaaatcactcacaatcatgaacattattacatgagaagtattgaacgcatcggaacaatcaacatgtggttcattcacaccacattcttcttcattntgataatccatatccacttctttagacattatactttcatacatccactgatt

SEQ ID NO: 267376 - DNA, 237 bp, Glycine max
taatatatgtgttatataagaaccatcaaatattgcctgttagacatttcggatagtcttagatacacataaatgcttcaaggttaataaatggcattactatatatacattataattgactaattatatcaagattttactagatgaaactttacatgtttctaagaggatgtatgataatcaaggattttatccttccacaaaatctatcttttgtttattaccctgtagaaaaa

SEQ ID NO: 267377 - DNA, 342 bp, Glycine max
cataaaatggagaagtttactttgtccccttcatcaacacagccctatgaacaggacttgaatttcctataggaccagcaagggacatactctatatttgtctgcgcccatgattcatatatatctcgcatttctgtctctggcttacagtttctttgctttggaagccttagacgatccattagactcacaatgaaattgtgatatcaatgtgtttccaagttctccaactgagggtacaaatttgggattcatttctgcaaaaggcccatctgcttcaacgttgtgagtgttgaaccaacactgaagctaattattctttgcaaatgccctactagatac

SEQ ID NO: 267378 - DNA, 425 bp, Glycine max
  unsure (1)..(425): unsure at all n locations
tgcagcatgcagcttgnatgcccatcctaagccagatcgttttatatattttttcatatataaatatattatataaatttaataatcatctaacaatcatttatatcactcatcataaatcatatttgatataattctaaaaaaaattatcataaaaaataataaatttatcataaatgatataattaaataataatataaaattattttacactatcaatacataatctattttcttcatattatattatgcccccataatatctttatactctcttccagcgggcacacttattctggttttcactaaacatgaggatcagtggacgtgcggaataagtgtcattctcttattcttaggaaacagtaatatatagtacgatgatccaaactataatatctatacaccacatgggaattattgg

SEQ ID NO: 267379 - DNA, 403 bp, Glycine max
  unsure (1)..(403): unsure at all n locations
gtgaagagttntcggtgaatgagcgtcttgcaagtctgtcttttattatttcctctttctcttcatgttgatcgcttctgaagaaaccttctgtatatgggcattgattactattacttcagcctgaaaattggctcagatggatggtttattcaacctctattccttatttttctactttgaggtattttcaactttattacctcattttcttgtccaccctattgttgattgatcaaaattcagatccatcctttctcaaggattaacatctgaagttagccttttttatttttaatatgaatcttatcgtaagcgaaaatatgttcatgtaatgcaacccacgaagtgggaagctcgagaaaattgtgagccttatatatggtgttttatgtgcatcttc

SEQ ID NO: 267380 - DNA, 402 bp, Glycine max
ttttggaaagagggactcccttttattaatcccgtcagggcggaattgatccaaaattgaatcgattccggtttttgaaaaaaattgggaccgttgttaattcaattatgaaaacctttttcaaaaacaaatttcctactgggtaatcgattaccaaccaatctggtcatcgattaccaaaaaagtaaaactcttttggtaaaaggttttgtcaaaaacctcatgtgctattcaaaagtttgaaaaactttttaatacttatcctgattgagtcttctcttcattcttgaatcttgatcttgattcttgagatcttgaatcttgattcttgtctctagactttcttcttgagtcttgaattcttcttgattttgaactgctcctgattgatctttgatttac

SEQ ID NO: 267381 - DNA, 241 bp, Glycine max
catcaacttctttcaacatccttcaatcagtctttcaacatctcctcatattccttttatctctttgaacactctcaacagaacattctaattgagttctcttcatcattctaaaagattttgttcaacactttcccttccaagaaaagttgcttgataaacaacttatgttattcatcctgatgtaagctccatttgagcttgtacgcccaggatcttcttcatagatgggatcctttgc

SEQ ID NO: 267382 - DNA, 411 bp, Glycine max
ctgcagctaaatcctgtattctaacagtgttatttatccatcacagcagggtttctaatttcctgccagagataaaaatgaaaaatagaaaagggaaagaaaagttgggttgcttcctaagaagcgctcttttaacgtcactagcttgacgcatcatcctgttatccaggatccaagcatagaacaatgttcaatctttccatagctccaccatgatattgcttcaacctttgtccgttcactacccatgtcctgtcaggatctttagattaaggatcacaaagctccactgctccatatggttgaacattttttatggtaaatggtccaaaccactttgatttaagttttctagggaacaatttaagtcttgaattgaaaaccaacacctgttgtcctggctgaaagtct

SEQ ID NO: 267383 - DNA, 282 bp, Glycine max
ttgaagtggctttctattaagatggtgctcttcccttatgccaaggtggactaaggcatctaagtccctatatggaaggagctcaacctctgccctcacttacataataaaggcactaacaaacctagcaatacttgtgcgttcctcctcctaagcccaactctcaaaaggagtagatctatttgttgcctatactcttcaacactcatacctccttgtctaagcctttggagcttagccacaagctcccttctatagtaggaggggatgtgcctcttccta

SEQ ID NO: 267384 - DNA, 431 bp, Glycine max
  unsure (1)..(431): unsure at all n locations
aagcacctgagcttcagcttaatccacacatcaggaattatggtttttattgaacctctncaaatgccagcttcccgcaagacttacggaaagatcttataggtgaccttatcaaaagtatccatagaagccattgcattagtcacccaatactacgaccagcctttgagatgcttcacattcggagactttcaattagtaccaaccattgaagaaattgaggaaattctaggatgtcctctcgggggaagaaaaccatatctttcatccgggtgtctcccctctttgagcagaattgcaactgtggtcaaggattcagcaagaggtttggaccgcataaaacagactcggaacggcatagcgggcctaccacgggggtacctagaagacaaggcgaggggtatggccaatcaaggagattgagtcccatt

SEQ ID NO: 267385 - DNA, 323 bp, Glycine max
ttcctctatatatcggtcattgtcgactgactttacttctgttttatcgcgctctcaccgaatatttaagccggtttctcacctaataaatgagtaaatgaatttcaaccgaccatttgttgttgtatctcatttaatcacttttaaaatgaaatctaaccgatcgttcacgctattacctcggttaacaaaaaaagtataattataataaaataatccagatatcttgagaataatataaagataaccaaatatctttgaacagaataaaacaaacaaatcaatcggacggttgtctttggaagtttccttgaatcaattga

SEQ ID NO: 267386 - DNA, 376 bp, Glycine max
atcattcttgctaaaacaaaccaaagagattgtagtttgagtttgcaaagagactatatctaatattggcttaccgaccaataaattgatcacacataggctttctttcttaatatgatcaatgtgttttgagaacctctttatactttacaagaattacataaaagcttgtggtaaaaaaataatgaattgtttctcgcacaaagttgattcttcacatctttaaagcttctagtttacatacgcctcgtcttcaagggtttcgtgtctcataatagacaaaattcttcacttaatctttgtccaagaatgtggttggtgggggcatttaatgcttgcattaagtgcatgtcctttcctcatgtagaagagtcac

SEQ ID NO: 267387 - DNA, 422 bp, Glycine max
ggaccttaagcaactgagcatgcaactgagaatcataggaatcatttttattttctatcactgctagactacacacatgagcccgcttagaggttagggatgagtccatcacattcggggttagaatgaacatatgtagggatccttagaggattaaattggggtttggtttgggatgcttattgaattatatttcttcctttgcgattataataacaatattgttgtgtttgatggaccaattgatgtcctgatgtgaatcagttgataaaatcgagtgctcttgatgtttccgtgtatttggcctatgatattgattccttgattttgatatgattatgtgaaattattggaagggttttacttctcatgttgtgagacacattttagataaatggtttgtactttggacaaatttacta

SEQ ID NO: 267388 - DNA, 323 bp, Glycine max
gttttaattaacacatcatctcctcccattttggaatcgctcacgtatttgaggtaggtagaatcattcgcggatgtgatataattgatatgtcgacgatgattatcagtttgagtggagtatggtaaatatggtgtaataggaaccttttatcgctcctgttgaacctataaaagtggaagctcatatctcaagaaaaatattttagtcaccaacaaagaacttctagtatgaagcttatagtttaccatttttattatgtcctcgcacgaattactttaggcttaactcacttggaggaacttcaacgggtcctctttttt

SEQ ID NO: 267389 - DNA, 418 bp, Glycine max
  unsure (1)..(418): unsure at all n locations
agctttaaccaatgttgtggagtgcctttcttatgaataagaaaaagaattgcaaaaatgcctanaagagttagatggcttgaaaggaagcccctcaaaaaaagtcatatttggagaactgaagaaggacatgcccaacgagaaggctaaggtggacctgaagatcttgtcggagcatctaaaatatgtgttcttaaaagataatgaggcaagtccagtggttattagcaactctttgactgatgaggaggaatgctggctggtgcaagtcctgaaaaagcataaggcagctattggatagcacatttcaaaccttaagggaattatcccttcctactgcatgcataagatcaacatggaagccgagtacaaacctgtgcgacaaccgcaaagaagacccaatccttctatgaaggaa

SEQ ID NO: 267390 - DNA, 448 bp, Glycine max
  unsure (1)..(448): unsure at all n locations
cattcggaccttgaaactcagcttcattagttgatatcaacatcagattatgcagatctgatttcattctcctttacacatatacatgtgtatataagcagtagtaacaacgtgctttacctggagttgctataatcaaacagcttccacaacatggccaattagcagtattaaatgaaaccgaataataaaaagcttatgccaattatgcatgggccatactgccacaacaatatatgtatcacattttgcacaaaaatgagtaatggcattagaagaactcagagccaaacctagttaactacaacaaagtaattcagcttatgctcaaccacaatatgtgaaactgcttngtggctattaaaaatagtacttattcatgtgacaagcatagagagctgcaagaggataattagttcattactattactacattccttgacaccca

SEQ ID NO: 267391 - DNA, 263 bp, Glycine max
gctaatgctacccgatcaaaacccaggtgttgatcgctaggaaaaagccatatgtgagactcctcgtcttccaagcataacgagcttctgcatcgcataacacaataaaagacagagcatgcatcgccgcgagtgtcatacgcatctctaggtgtgacgaccaccaatctgacttaccatatgagactcgaagctccgcacttcgatggctccgatcgcaaaggctggatattcaagaccacacagtcgttcgaatatcatgc

SEQ ID NO: 267392 - DNA, 409 bp, Glycine max
  unsure (1)..(409): unsure at all n locations
agctgngcccatggatgaaatataaattttttttaganagggngaccaatcaccaaacctgaaatcctgctgtcttctcaaaagtagtaatcttatgcccaaacccaaaggctgaaaagacctacataagtgtacaataactttcagaatgatatttaacaacatgaatcttactaattgaacaggaaatgaacaatgtctggtgtcatctatggtataatgtaaagaacagggagcattaacaaatatacaatttcaaagataattcagtatacaaaaaattggaagcaggcttaaaggggggtaaaaggagatagtttaactgagtgaattcaattagataattctccttaactgaataactgctaaaatatataactgaaataaataacattaatatttaagattt

SEQ ID NO: 267393 - DNA, 337 bp, Glycine max
gaccttaaatctcatctaagatctaacaaagcttagaataagttatccctcggccatgctacgtcactcaaatagaactacgatcagttctccattaccacactgcaaagggtccactaatcaaaacttagttacaaacaaggattctatcatgtcactcttggctacacgagtattctatcatgtcactcttggctacacaagtattctctaggccactactaagccactcctggcgttgaaagatagtttgaacgagaataatgattcgataacactcacaaagtgaatacataattaagcttaaatttaaatagaccttgctcaacaaaggatg

SEQ ID NO: 267394 - DNA, 359 bp, Glycine max
aaatgatgatctttctccttcttggaaggcaccacaggatatggtgcttccacaccttctaccacaactttttcacttctaccttctttgaaaccttatctttttcttcttttgcatttttccattttctatttctaattctttttcttagacctccatttcttttatctggaccattatttatttctctttttcctgattcccttcacctttcccatcatttttcttaacttcactacttttcttttaagccactttctcattgtacaccacactttctcattgtcatcacaactttgcattcctccttgagattatgttccgtatttgccacaaaactattggatgacttgtcagct

SEQ ID NO: 267395 - DNA, 481 bp, Glycine max
  unsure (1)..(481): unsure at all n locations
tcgcgaccttaaaactcagctnttcattcattctatgtgcccgtagtggtccacattgtgtttcttgcattntgattctcggtttgtttactatgtataccccctgttgacgtgcttaagccattctacttaagtcgtttctcgcttaacttaaaaataaaataaatttccaccgaacgtttgaattgtattatccattaacttcgggtaaaataaatatcgaccgctcgtgcatgccgtaaccacgttggatatcaaaaagaggtaaaaaataatataataatcaaaaagacatcttttagtaaaatatagcggaaaatcaatcggacgttctctctttgggatttctcattcttaatcgaatcgattaataactaacgtgaaactaaggctaaaatcaacttcgctagtcaagctctctcacaaaaataggcttttgaaagttggcatttcaatttctcactaagtaaaatggatcatt

SEQ ID NO: 267396 - DNA, 474 bp, Glycine max
  unsure (1)..(474): unsure at all n locations
agacacttanaaactcaagcttgggtcgagtacttacccgttgaagatcgaagaacgttgtattatttatgaggcacgtcgataacggttggaacctttgccgaattactcacggaaaacagttcggaaatgaatctaaagcgcctctgcttaaattttgttcacggaaacaatttttccaagcaaattcgatagagaaagaagtgcctaatggactgaacccttttccttctcactttctcccctattcatagacaaataggggagatggttgccgcccagctcgctcaagcgagccaagttgcttccttcataaacacaaccttctggaggaatcttctggatggcccaactgggcctggctgctaattgcatgcacatttttacttaatacacacaccttgccttatgtggatgatcttttttaataagagtacggagacttacaaattccgaacaatactgtgtttcttt

SEQ ID NO: 267397 - DNA, 373 bp, Glycine max
  unsure (1)..(373): unsure at all n locations
gagatggtgcacaacaagtttttccacatccacaaatcgcgcataaacccaccatcctctgttgcccacctccaactgagcctacgtactcccacgtagcccataatctcgattatttcaacaccgggtccccatcaattcttccaagcttccccaacatccaggtaattcaacatccaaaacatcacaaactaacaaaccaagcaaaacagggcaaaggcagaaaactctgcccaaaactcaaaccaaaatcaccgctttttctcacttaaagaccccagtaacctttttctctagtacataagtctacgtnttgaccgttgggatctactagcaaacatccagaactcattttgtactactctttccacag

SEQ ID NO: 267398 - DNA, 417 bp, Glycine max
  unsure (1)..(417): unsure at all n locations
tcactctacacctgagaaagaggatgagatagctgctctttagttatagcctcctaacaaagaatttcatgcaggtgggccttcttttagtaattctgacttacaacagcctgctatccctcttccattcccacctagaacaattcccatcaaaaaaaatggaagaagtggaaaaggagatcttggagacctttatgaaagtaggggtgaacatacctctgctagatgccatcaagataattccaagatatgccaagtttctaaaggagctgtgcacccacaaaaggaagctcataggcaatgaaaggattancatgggcagaaatgtgtcagcattgataggtaaatntgttccttacattcctgagaaatgcaaggacccaggtaccttttgtatacctcgcattattgggaata

SEQ ID NO: 267399 - DNA, 419 bp, Glycine max
  unsure (1)..(419): unsure at all n locations
agctcttctttctcaatcaacctatctactttctaacaattctaatagcagggtcacattctcgttctttctttgtctaacatacaaacttgctcaaacttgtgaaaaaaaacacaaactccatcacaatcatgcatncaatcaaaaatcaaatcataacacttattttcacaaaaagataaaaatgtttcactgcataatcatcaaagttaagtcaaactgttccatatgcttcaaaacaagcatactagctaatcactgaaagtataagtatataattataaacggaaaccaaaattactcaaaacaatggactgaaactaatatagttataatcagagagatcaatacagtctgagcattctcctcatctatcatatggataaactgcggaatcagagagagcaacaacttctcca

SEQ ID NO: 267400 - DNA, 452 bp, Glycine max
  unsure (1)..(452): unsure at all n locations
ggaccataaaactaagctttctatcatctatatacccggagggttctcttgtgatcgtgcataatcattctcggcgtggttaattttataccccctgttgacgtgcttaagccantttgacttaagggcatttctcgcttaacttaataataaaatcaaaatccaccgaacgtggaattgtatattcgctaactctcgttaaaacaaatttcgaccgatcggtcgtgccgtaaccaccgttggaatatataaagaggttaggtaatattataatagaaaaaaacatcttttagcgaaataaagcggaaaatcaaccggatgactgctctttggttatctcattcttaatcgaattggtaataactaaagtgaaactaaggctaaaatcacttcgcctagtcgagctcgtccacaaaaataggccgttgaaagttatcatttcaatacccact

SEQ ID NO: 267401 - DNA, 357 bp, Glycine max
attcggcctaaatatagctatgtcaccatggaaagagcaatggtttgatgatgccaccatcacaaatgcaagcataacgtgttgtcaagatatcacctacgtgaataaatgggaaatacctgccatattctagtaacttgcctcatgaatgacgataggtggaatcatcttaatttgcgagaaactactataacactcgggttgactaacgttgaatcttcctcgcaaatattctcttgatcttatgtgaaatatggtaaccataataagactagaactgcactgctatataaagtctttagagctggaatcgatacaataaactatgaatggataaggtacatctgatacctcaac

SEQ ID NO: 267402 - DNA, 419 bp, Glycine max
  unsure (1)..(419): unsure at all n locations
agcttcaccggatgatgccgatcgaactttttctantcgacatcatgcaattggtattcagggattgaatagaataaccaatggccggtgtcggtcgttatatgaccccgactgatatctttcagccgacattgcgcaatttcttttacaaacgctggccgataatgtttttttatatacggaagaggaagttttttgttttggagttgcctaaaaaatttacaacgtaggacggctaggtttttcggtgcgagctcaaccgagggttcgttccgaccgacactggcatgttgttcttctcatttaggaggataagaaaacgttcgcccaccccggcaaaaacaaaaaaaaaaaaacattattcacgcaaattgataaaaaaaatgattgctgacgtctgcatggagagatgaccgatc

SEQ ID NO: 267403 - DNA, 379 bp, Glycine max
gacctataatactcagcttctatccaggcaattctcggggcgaagctctctttttcttggcttatacactagaggatggtgcctcccctatcctcttctcctttgccttacgctgcatctccatgatgaaaaatcaccatcgaaggacctcattgaagatcaaagatccagcctccatagaagctccacaagcaagcttccatcaagttatgaccatttgaatttctcgagatcttccgtggttcaatttctggcgcctccatatgtcatgtgcctgaatctgaccttctcaagagaatatatgaccatttgaacttctctagagcttccgttttcaatttcgagcttctcgatatctgatgtgcctgaatcggacatc

SEQ ID NO: 267404 - DNA, 166 bp, Glycine max
ggaccaaaaaccacggcacgaccgggggtaggggacatcttgtattgccatgtcgacaaagagaaaactcagggcatgggagcaaagaccactgctgctgaaacacgactcgcaggtacgactggcatcatccgggcgtataggcacaacaatagcctccgaaata

SEQ ID NO: 267405 - DNA, 410 bp, Glycine max
acctaacaaagacctgctgtttctgcatatgaaaggacaaattgcgggcatttcttctggattatgatggaacagttgtgccttccgctgttaaaactccaagatctgaaatcatagatgttctaaatatcctctgcagtgaccctaagaacactgtgtttatagtaagtgggaggggggaaaccactctgagtgaatggtttgatcagtgtgagaatcttggtatagctgctgagcatggttattatctaaagtgagtttttcctctcctcaattttatagttggtcacatgcaattctgctgataatgataatcgaaatcctctgtttaatttctatcaagaatgagaaggaagggacaatatgagggagaaggaatacatagtggttcttcacacattcatgatgca

SEQ ID NO: 267406 - DNA, 394 bp, Glycine max
tggaacaagatattcaattttatgactctctattggttgtttagaattgagaagtaattaatatgtatctaggtattattctaataaactatatattgatggatatattaactaaagttaaatctagtataaggaattagcttcttccaacacaactaattaagttataaatttcttactatagagatgaccatatttatatctaatagtatctcaaataggattgttttttaaagaggaaaaaaaatattggtgcatctttattatgctttatattttattcaaaatataaacttcatgtatgttatttctcatttctagaatcaaatttagtcctcggcatatgtccaggttttcattttaagatctacaagatctggactttgtacgcata

SEQ ID NO: 267407 - DNA, 408 bp, Glycine max
agctttgtgactagaatactatataacagctcctaggttctagtttaggctctctcttctctttctcctcttttttcgctattgcaattcctgttctgactcttcgtttcagcaattaaattccattcttcaatctataatttcgttctctattgattaatggaaggctaagtccatagcattgttttctcttgaggatcaagcacagttctctttgaggttctattattactgttaaattctgttcagtttttcctcttcactaattactctgaatttgttgctattaattcatgcatgcttagtgcttgattaattgtctctgcacttaatttacgttcatgcttaatgatcgtttatgactaattggtgtatgtgttgcttaatcacataatgaatgccttatgt

SEQ ID NO: 267408 - DNA, 436 bp, Glycine max
tgagcataataatgcaagagcaagcatattaatcccttttgctatgagtttagtactttacctatcgtggtctcatatttaaacctggaaagcattttgacctcttttattttgatttcattgctttgatattaaatgcactacaatattatattaagatcttttatttcataggtgttacttatgttcaatttcaccaaacacataagtattttcctctcaacttattgggttttgagacacgtgcaagtcttataccgaatctcaacccttaatctacatacattcagcggatcataatattcttaccaagaaaaacaaaacacataaccacttgagtctataccaaacccctcttactctttcgcattgtgatttcgaaagattatttttttcttttactcacaggcatcccgcaatccccaaatcggccctc

SEQ ID NO: 267409 - DNA, 408 bp, Glycine max
  unsure (1)..(408): unsure at all n locations
gctggtaacataaactcaatggatgtttctcatatactcaatnttctctttaggaatgaaaatgttcatacaatccttccataaaattctactgagggaaagggaaaaatattaccctggttgatgaagaaggcaagtttattggatgggtcctagctaacgaccaaaatgggctcaggatccttaacacaatgacaagtgtttgaggccaacacatttttctttatgtatgtgaatccggggaagtaaagagtagttctgcatctgggagaagagggaagaaacaagatgcccatgattgtccggagctacgccaccgaatgcaattaatgttggactggaccacctattatttatttctcgagataaattatgatgtcatgacatactcaccaccttatgagaagc

SEQ ID NO: 267410 - DNA, 414 bp, Glycine max
ggaccttaatcttagctcactcatacttctgatttaattctgttgtttgtgtcaaccagatagcgtgacaagcactcatcgcagctacaacatactcagcttcacatgttgatagagccactgtggattgctttctagaacaccacgatattggtgctgcaccatacatgaatatgtaacctggagtactctgtctgtcatctctggctcctccccaatctgcatcaatatatcccatcaattcctctgagttgctattgtctttatttggaaataaaattccagcattgatggtcccttttatgaaccttataatcctcttggcagctaggagatgaggaattctgggtcctttcatatatctacttaccagtccaacagcagattccaaatcaagtcttgaatgacacaata

SEQ ID NO: 267411 - DNA, 415 bp, Glycine max
  unsure (1)..(415): unsure at all n locations
tgccacctaaaaacaaatggctcaacttttctttttctgtgaattggaagcataaaagaatcaaccaggcctttgggcaagcaatcaatggggcaaaacacgccaaatgattatgaagaatgatggctcaaattctcacaaaggtaaacccatcactcttcacatgagcttttaaaactattatgacatgtagaagaaaaatcaaggatttcaagtcacaaaatgtcaagaacttttattttcaaaacaattaccaatttcttgaacatatcctataattcaaagaanaacatgcaaagtcgtacatgcacacagaattgacccaaaatattaaactagaaatccgacgaaactaacaacattaacaaattaacacaactaacaaattaacaaaaccaacaaaactagcaaagcc

SEQ ID NO: 267412 - DNA, 449 bp, Glycine max
  unsure (1)..(449): unsure at all n locations
tagatgaagatgaatctgtgaccaccttattgtctcttctaaggaccatagcatcatttcttgcactgaattgttgggaagtggaaaccatcttctcaatcaaattcctatcctcaacaggagtcatatcaccaagaactccaccactggcagcatcaatcatactcctctccatgttgctaagtccctcatataaatattgcagaaggagtttcttataaatctattggtcaggacagcttgcacacaatntcttgaatctttcccagtactcatactagctctctccactaagttgcctgatgcctgaaatgtcttttctgatggcagcggtcctaaatgcagggaagaattactcaagaacaccctttatgtcatccatctgctaatgacctagagcacggagttcatggtgaacagacaaatggactcctaaatgctatgagatc

SEQ ID NO: 267413 - DNA, 303 bp, Glycine max
taatgaaaacacatcacttaatagatcattaaaagtcatacattaattatatttctggtgtaaattaaataatataatagtgaaggagaaatccctctgggaaaacatagtttataaaaatgaaccactcctctcacattatagttctaccaacacatgtatggggcgtgtacaaatattgtttttatcaggcggatgagaatggttctatagtacccctttgagatcctatccattgttatccatattgatgatccatttgtgtgctcaagagctactcatattttttatactagtaatagg

SEQ ID NO: 267414 - DNA, 285 bp, Glycine max
acttatgcaaataattgattcccagacttttaacgatgtagaataaagtgttataaaacacaaagaacattgtttagatttttaacgtgtacatgattttatatatcattcggtcaaaacatactatacttggattatgtgggtcatatcttctgtaataaataggtaaaaaattctactcatgtaaaacacacactattgtaagttttgttatttgaaataaaaaaattattgggtcccatatctcatttaatgattgtctcttgatattgaaattctaaaaaa

SEQ ID NO: 267415 - DNA, 321 bp, Glycine max
  unsure (1)..(321): unsure at all n locations
aagcatcttaaagagttccataatggttggtccaccatgaagccccctaatgtccaagaagaacatatctttctaaaggcttttccttattctctggaagggagtggcaaaagataggctattctaccatgctcccaggtcccattttaactaagctgacctctaaagggtgttcttggagaaattcttccctgcatctaggaccactgtcatcaatnaaaacatttcaggcatcaggatacttattggagaaagcttgtatgagtactgggaaagattcaagaaattgtgtgcaagctgtcctcaccaccagatttctaa

SEQ ID NO: 267416 - DNA, 314 bp, Glycine max
ggaaaaagcaccgagcagagccagaaagagacatctattttcttaaagcgacacaacgccaaaatacagtagtgccccaccaaaaggtagacactggcgcatgcaaacaggccaacgccgaaagggtggataacaggactaacatagacaggaaccggacgccaccaccccctctccagatagagccactgaaaaacagaacatgactaataagaggacataaccgaccccagcatggtactcaaacaggttagctattatcgagcaccaaacaggcaccttcatcagccaatcaaaggagaccacaaagatca

SEQ ID NO: 267417 - DNA, 337 bp, Glycine max
atgtattttaccctaaatcataacagaaaatcagtatcacagaatgtaagcaagtattgaaaactcacattcccattactaacttttagagtgctggcattctccttcaccagccgtgtactaaatctgggatctcctctttcattgtaaaaagttatattaccatctaattctgtaacctctcgtgatacctgatgttgtggaggtttccatgtatttacattaacagaaatattcactatcttatgagatgtgttgggtgatgctgcaagttgctcctgttctcgattcctgctttggcgcaaactatcatcaacattttttgctacactatact

SEQ ID NO: 267418 - DNA, 383 bp, Glycine max
  unsure (1)..(383): unsure at all n locations
ttngtattctccatctaatctctagaatttcttatattgaccatttattacttacgcccagagggagaagaatatgctaactttattctctgttgcttccctttaacactcatcccctccaatctctcagtcttactcacttcaagcagtggctttctttctttctctttttgatcggactcagccaaagcttgtacagaacaaagggtcttctccacaacctcttcactctcttttgggctcaaattttcagcattctctctctccttagctcttattgctaattccttcaattcattgcagaatctcgtgatttgattcagaataagcctccccgctaacaaatcttggcggattgaagtgatctcaatgaaggcacctta

SEQ ID NO: 267419 - DNA, 332 bp, Glycine max
ggacttaagcacgcagctcaactgaagagttgtgacctgttttcgataataaaaggggtgaatattatgacggtctatcaataaaaaatatccttctacattactgattcaataacttacactaagtatgaaaagtaataactaaacctacttacaaaaagaaagagaataataagccacagcgaaaataaaatgttggaagaaaagaaccacacattatctggtcggccacacccgtgcctcatcagcccaagcaccccgattttgaattcctaaccttgtaatccttacacaaatcacacgagatctccttgttttgacaccagggatga

SEQ ID NO: 267420 - DNA, 415 bp, Glycine max
  unsure (1)..(415): unsure at all n locations
agctngcggactataccttcgaccgaacactgtcgtgtttctgtctaggcccggattcaaggcgggctgcagcaccggctccgcttccctaactgtactggaggcggttgcggtggctttatcctctatggttttctggagttttaacatgaccttcgagatggaagccatttgatcttttaaggccgatagatcggccttcatctgttcctgcacgccctcttcattatccatttttctggatcgagtgttataggggtgccttggtgttntcttagttatgatgaaattcctaaagaaataaacaacggtgagtataccaccaaaacatgagtatgcaaatggatgatcggagcacttggatccaccccaagattnttagataacgtaatgagtccagaacttctcantttat

SEQ ID NO: 267421 - DNA, 301 bp, Glycine max
  unsure (1)..(301): unsure at all n locations
gcatcacactaaatactggtatttattgctgaacataactaataactgataaataaattgttcatatattgcaggaatntataaactatgcagaatttaaaacttctgatccttctactgtgatcttctgatgctcgttcaaatcagcacctgagcagtaagctcctgagctgctgcttcctcctgagcgactagatcagtctcaaagacacatggcttatgaggagcaagctcatcctctgcatctggcataggctcctctgctggcacatgctcttatgctactgaggcctcatcccct

SEQ ID NO: 267422 - DNA, 415 bp, Glycine max
agcttattgaagaagatgcatattcctttgttctgagagcagaaatgtattataaaaaaaaatcccaaagcttatgaaaatggttgaagagttttacagggcatatcgggcattggctaagagatatgatcatgcaactggagtgatccgccacgcccataagaccatggctgaagcatttcctaatcaagttcctatgatgctgacagatgatttacctgtcgtttctcctgcggagactgagccacatactccagaaatgcgacacccagcagggtgcatttcttgatctagatgaaccacaaaaggatgcttctgctcatttccatgctatcaaaagaaatggtggttatactggtgaacccgattctcctttgaacaaaaccggtttgaaacagctcaatgatctctacat

SEQ ID NO: 267423 - DNA, 316 bp, Glycine max
  unsure (1)..(316): unsure at all n locations
ntgcggatgtggtcctcgctggcgatatgatctcattttgtctgacacaagacacaatctgagcatcatgctctgataaatgcacaacactatgtgccaactgaacaggtgtgagacatgagtggaataaacaccctagtntgtgacatggcattctctatactggccacagatgtcttaccaactccaactatgtcattactcaatcaataacaaccctttctctatcccaccacccatatattcacaaaggccatcccttaatctatcacgaataccacctactacacatcttatgctaatcaccaccctttac

SEQ ID NO: 267424 - DNA, 407 bp, Glycine max
  unsure (1)..(407): unsure at all n locations
tatttgatgacatcgtatcattgcattgcatctagtctttggttaatgtttcaacctgcaggggattctaacctgtattataaagttatcaatctgacattgtttaataccaatacatacttgtcacattttatccgtgtattcaagcccagtacctaccaagcacactttcctgtcgaagcccaaaccaacatcggcacataacatcaaagcccagaaccaacatcgacaccttcatttagggatatgctaggtgcacccagcaatattgctggtgcacccagcaatttattgaaactaccattttacccttcattaaaanaagttaaaatatttaaatagttatcttctcctctcccggaatcactaagccttcttcttgcgtctgcttttcttcctttgcatac

SEQ ID NO: 267425 - DNA, 365 bp, Glycine max
  unsure (1)..(365): unsure at all n locations
tggacaatananatataatacaaatcagacctaacttatgtttgacttaacccaaccaaatacatttctacccctaatgctataattaagatataaggataccatattaacaattttttgattgcatagaatgaagctaatttgcacggcatgaaacgtattctttctaaataagggtgagaataaaaatgatcatacccttactatcattttacaaatggaaaaagggggaaaggctagtaaatttgagcttcttgagtaattaattcagaataaaggataaatttctattgatttaacaaaagcatgtagcacaatatcaacataaatgttgatgatgacaaatttatacctgcttcacagct

SEQ ID NO: 267426 - DNA, 413 bp, Glycine max
  unsure (1)..(413): unsure at all n locations
agcttcaagaaaaagatggcctcagcanattttttatttccagaagggaattctatcaatagacctccaatctttaatggagagggttaccactactggaaaacccgaatgcaaatttttatcgaggcaatagatctaaatatctgggaagccattgaaatagggccttatatacccaccacaatagaaagagtttcaatagatggtagttcatcaagtgaaagcataaccatagaaaaacctagagatagatggtctgaagaggatagaaaacgagtacaatacaatctaaaagccaaaaacataataacatctgccctaggaatggatgaatatttcagagtttcaaattgcaagagtgctaaggaaatgtgggacactcttcgattaacacatgaaggaactacagatgt

SEQ ID NO: 267427 - DNA, 370 bp, Glycine max
cgtagaatggccagacatgatacatgtcatgttttggtttggttcaagggtaaaagggatgccccacattatttccatgacacaaatgcaaaaatgatgatttggaaactgtatgcaaaactggtcatgcatgcacctatgtggacactcaagtggcaaatatttatggccatgtgatgctatggctcaggattcactctattttataaacccaatgttcccaaaatatgttcttttatccatttgcgcattcatccgagttcattttgggcatccggggaaacttcacagcgatcacccttccggtgtacacacaatttttcataaaccagctatgatcggcgaatgtccatagaagagcggaagtcat

SEQ ID NO: 267428 - DNA, 340 bp, Glycine max
accatagaaactcagctgtgagaagctcctcctattatcgaagggtcgagaactactctatatcttacgttcacatacacgcctacgagatccatgtaaccagggctatatgacgtggacgaggactctcaggcactgataatactggttaaatatacgtgtgagagtactaccagtgcctatgaatgaaccaactggtatatgagcaacgccatgggcaactgaccatgcacaaatacttgactacacctatgatctcatgagaatactaataggcttaacaataaacccaggaataatacatagtccgatgcgagaacctctagacttgtataacata

SEQ ID NO: 267429 - DNA, 385 bp, Glycine max
aatatgcatgtgaattagaaaacatcaaccagaattcaagccaggctattgggcaagcaatcaatggggcaaaacacaccaaaagattatgatgatggatggctcaaattctcacaaaggtaaacttatcactttcaaattgagctttcaaaactatcatgacatgtaaaggaaaaacaaggatttcaagtcacaaaatgtcaagaaacttttattttcagaacaattacccttcaaaacaaagaaaggggaaaataggctcaaatgggctatcaaaggaattaattcaaggtaagtccatttggctagaaacttataagaacgaaattgcctaaatgatttccaaatatgcatgtgaattaggaaacatcaacaagaatcaagc

SEQ ID NO: 267430 - DNA, 259 bp, Glycine max
agcaacccattcattggcctacagggaaagcggggggggtataagcgtagaacgtaagaaccccacccttgctctgcgagattaatgaatgaattaactaaccaatgactttggaaacaccaaaatttgtagcttcacctttgagctaacaatggcaatggatttatacaaacaaaataacatatgttgcgaaagaatacatacatatatacatacatagttgatcaataagaacttatacttgtagcaaaacaacact

SEQ ID NO: 267431 - DNA, 306 bp, Glycine max
tactcaactgcactgccaaagtgacaacctctcagagaacgatgtatcctccattgatgtcccttatgaaggcgtcagtttctcaaaaagcctaccatgatttggaagaacccttgacctggcttctcaattttccaaaggtgattggcatttctatgacccatatatggtacagttaccaaaaaggttccaagagaaaacccaatggtgtggataatataccccagctgggcaccatagttgaaggtattgagccacacaggcagttggtggggttttgacttactctgtgtggacctctgtggt

SEQ ID NO: 267432 - DNA, 381 bp, Glycine max
aaaacgttatttctacttcagaaccccttaaactacttcacattgacttatttgggccctctaaaactatgagtttgggtgggaattattatggcttagctatagtaggtgattactcaaggttcacatgaactctcgttttgaaaaccaaaaatgaagcttttgatgcttttcgcaaacttgccaaggtgattcataatgaaaatggtctcaacattgtttcacttaaaagtgatcttggaggtgaatttcaaaatgagtcttttgaagaattatttattgttcaaatatatgttgatgatattatatctggtgctactaatgaaattttgtgtaagaaattttccagttgtatgtacaaagaatttaagatgtgtatgg

SEQ ID NO: 267433 - DNA, 413 bp, Glycine max
  unsure (1)..(413): unsure at all n locations
agcttangaacccaaacgttttttcttcaatgcaagaaaacatactcatgactaggaacccaaatattggttttataattagaaaagcatgaaaatagggacttgcttgtaagaatttgggctgccccatgattggtactttgcacctaagtaacgtgggaaatgcttctcaatggtgtgtaaatatatgtgtaaatataaggggcataaaattcctcgccaagtatgaatgattgttttcctaaatgaatgtatgatagcgtggaatgcccttttgaatgcaaatatgtgcaggatgtaattagctttccaatatgcatataaatacatatgagtgaaacaattaaagtttgtatggtgtactnnaaatgtatgtacgtagtttgtgatacaaaatctctaggattataaat

SEQ ID NO: 267434 - DNA, 406 bp, Glycine max
  unsure (1)..(406): unsure at all n locations
ntataagtgcgggttacggagacaaatgtctagcgttttcgatatgcgaagatgatattccgagtactttggatttggtacgaccatgctctcctgatnttcagctgggaaattggcgagaggaggaacgccccggcatttacgcaacaagcataatgtaaacctttacggttttaaaagctctataattgggcctaggctttagaggtctcattttgttaaggctctgtgtcttttgttgttgaatttataatacaaggatctttcttcatctgttcctggtctctacccattctcattcatttgcatgtttacttctttttctaaacggcagattctaatgacgagtccctcgaaggtactaatacctgggacccgtctttaacttctagcaagatatgaatca

SEQ ID NO: 267435 - DNA, 452 bp, Glycine max
aaaaccaagctgcgactatgcatctataaaaagaatggttttgctctcccaagaaacaatgcatgccactcaacgctgaagcgacaatgacaacggtctttctaaaaacctcttgtccggaacaaacataataactcaaatgaccacggaagtaatgcaaaccctaaaattaaaccactatattcatgcacctgacaatatgagtccaaacacgtgaccgacacatatcatgcggcgcacataacaatcacgaggagcgtgactcctaaacgaaaaaaggtcatgcttcggtcgctggacaacgatacagggattacactataccttgatgcaacgacacatctcgatcttggtatatccatccattcgccacgactaactcaacacgcgaacatacacatcgaagtatttaatgttgatcctacaaaaaaaacccagaacataacttggaa

SEQ ID NO: 267436 - DNA, 412 bp, Glycine max
  unsure (1)..(412): unsure at all n locations
aactctactattatcaactattatgaccatctctccattcttatcctagnctcttcatctcctgtggcggatgtattttgacactactaaaaaaatacagtttcacgatcgaaattatttactccctattagtgaccgtaatagcgatcagagtaatttggtcactatatgccacagcatttgcagccgaaatttagtggtagcttactttgccccagcgaccgtattcgcaaccgaagtgaaacgtcactgaatacctcggtcgctacttcggccgcgatgtatagataaattcaaaagcactttagcgaggaatatagcgaccgacctgtactttccgttagcgaccgaatatgttcggacgctatgttatgctgatagcgacggagctttctttggttgctattataca

SEQ ID NO: 267437 - DNA, 387 bp, Glycine max
aactataaatactagcttagaagaagctacgtttctccttttataatctaagtttatgaagtaagaaagtgctaggtggacctcttaagatttagtgtgcatgtgggggagcatttgcaatattaagtatgaacaaaattgaatatcaagtgatgcgacttatgtttggatgctgaattattctagaagcaagatattgacaaaactcaataaaataactcggatcctacataaaatccaccaccacttgtgtcacttcaaaattaatttctcaacatgaaatcaatcatgtgaaattgtgaaatttcatctaaagtcatgttaaccagtaacttaacatgcttttggtaactcactgtgaatctaaccacacccacttaatgggta

SEQ ID NO: 267438 - DNA, 449 bp, Glycine max
tcgacccgggatacttaagtcacctgcggcatgcaactggatttttttagtcgggtttctattcttcctaagatggagccaaacccaggcacccttattaagaactagctctgttcttcctctattgcctttagttgaatatacctttcgttggttctctatttggttcttaaccctttcatgcaacttctttacaaactctgacctagattccccttctttatgtataaaagaagtgtctagtgggaggggaatgaggtctaatggtgttaggggatcgaacccatatacaacctcaaaaggggactgcttggtggttctatgaacccccctgttgtaggcaaattctacatgaggaagatactcatcccaagacttatggttgcctttcagaaaaacccttaaaagggtggataaagacctattcactacctctgtttgcccatcag

SEQ ID NO: 267439 - DNA, 453 bp, Glycine max
  unsure (1)..(453): unsure at all n locations
tatgcgcatatttncctacgaacgttcactgtgtcattatattctattaactaagaataatgcacccatatacaatcaaagtagcttcattacctatattatctacatgtactttcaaggagtagttgttatttacatcacacatgcctccttggctaaatttacatacatgcatactcaaagcattttggggtaccaaaaattgcacatgcgctcatcttggaatttctaatacctatacatatacaaacttcatgatgaatcttgactacctctccaataaggtgctacatttcatgcttttttaaagttttgctacctaaagccgcatgcaaatacaagtatatcgtcccttgctgacttaaattgtactcaaattaacaaggatatatatattttttgtaaagattttctttacatatcatgcaacatatttatatatataatatatat

SEQ ID NO: 267440 - DNA, 255 bp, Glycine max
accaaccactaatttggcggcgaggagaaaaaaataaaagacatattgaaatatttacacattattctagggtaccaattgaaggaagcatcacacaagggaacacagtcgagatacacattggccaccataaagcgaatcaacatttgctaatcggcaatcaagccctaatcacaggcatgattgtggccacatggagccaaaaaggccatggcacgggcgtctaggagcatcagggcgagacaccattcccac

SEQ ID NO: 267441 - DNA, 340 bp, Glycine max
ccctgtattgcgattatctcacaggaatacaatcaatgacattgaagtattatgtgtaagatgtgtcttgactgttgtcgcaacctacccttcggtgagagggcgatgcgagggctcacgggcgcatctttcaagggaggaaggcgcgcggagtcacaaccaacgtttatttgaggaacacgtcagaaaaaccaaagaaagtgtggtctacgaactcttaattgtgaaaggttcgggagttgtttttacgcccggaaaaggtattagcaccccacgcgtccgtaacaagggacgatagattgtaatcaaatatgcgatatcatgtcttcaaatggtgtat

SEQ ID NO: 267442 - DNA, 420 bp, Glycine max
  unsure (1)..(420): unsure at all n locations
ctatttaaaaacttcaactcctctctattctattgacatattatgccaaggcaactcacactatatctgcacctgctgcagcacaacttttacattcgaattaattaagaatactaagctaattccacacatattgcaatgttaaaagatgatgagctaacatgataggtacagcaataaaataatgaaaaagaaaaaatgctcgaaaagaaaggcatcatctactgattccatcaattaggatactgacatccaagaagaacctcaggtgatctatagtatcgactctgcaataaaaacagagaataagtttagtgacccgacaatgataattacaatatgaattatcataaaatcctactttctacaggtaacataaacctgaatatataaaaaacggtgcggnttctcatgcatgct

SEQ ID NO: 267443 - DNA, 336 bp, Glycine max
atgcaagccttgaagaaacgggcttcaccttcaattcttgttgtgactgccaatcctatacaggccagatttccaccaacccaacaaaggcattactcagccaataacaaaccttctgcttacccaccgcccaattatccacaaaggcaatccctacatcaaccacaaaggctggctaccggacttccaatgacgaacaccacctttagcacaaacccaaaacaccaaccaaggaatgaattttgcagcgagaaagcctgtaaaattcaccccaaattccagggcctatgctgacttgctcccatatctacttgataattcaatggtagccataac

SEQ ID NO: 267444 - DNA, 415 bp, Glycine max
  unsure (1)..(415): unsure at all n locations
tggtcccaatccaatggcttggctgtggccacattgacgtctctcaagttggtgcactctttctggaccttgatggtcgtcgtcttgaacttttccttgaccgcttgtgccctttcaagttccgcctttaaggcatgcacctcctcactctcttcaggggttttagtctcttcctcacttgaggtctttagctttgggagccaaactaactcttgcgtccgagccttcaaccacttgtgatagccgtcgatgatcccattgctggcttccctaagctctntatcttttctttgcaccgtactccatgctttctagactttttgaaatatccttacattgnggttgctgatcaaacccaacaagtgcaccagatcgcgcaagtagtataaaacagtaagaaccgagtatcgaactc

SEQ ID NO: 267445 - DNA, 441 bp, Glycine max
agcttgcttgtgaagcttctatggagggctttatcttttagcttcaatgaggccctttaatggggattttccaccatggagatgcagcggaagacaaaggataaaaggtgagaggaggcgccatccactatggaataagccatggaagaaggagcttcaccaccaagatgagccttggataagaagcttggaaatgatgcttcaatggaggacaagaaagagggagagaaagagagaggggggagcacgaaaatgaaggaagaaaaagggagagaatttgaactttgagttgtgtctcacaagactctcattcatcaaagttacaacaagtgctacacatcgttctatttatagactaagtagcttccttgagaagcttttttttgagaaaactttcttgagaagcttctttgagaaaacttccttgagaagctagagctt

SEQ ID NO: 267446 - DNA, 406 bp, Glycine max
  unsure (1)..(406): unsure at all n locations
gcatgcaagcttctcccaancctaaagacagttttgttatttatactcactgtgacgcccatgtaccgcagaattcagacgtagccttccaactctcaaagcctcactcgttttccactcataacaccacattctcactttccaaccctaaggtaactctacctttcatctctaacagttttccatgagcaatgtcagcatataaacatcacaaaggtcaacacaaaaaccctaaaacagaatgggtatgtgtaactcatccaaacatggcaattgcaacaagctgtcaacaagattcttcacaaataactatcatgaagcagaaaacgagcaagactacccatcatatctccccaaaccccatacccacgagaatcaaaggagaaagaagtccacccaaacctga

SEQ ID NO: 267447 - DNA, 409 bp, Glycine max
  unsure (1)..(409): unsure at all n locations
tgtatacatgattntgatgatgtcaaagaagaatctaacaaggctgcttcaaatgataagcatttgcttcaagaataattcaagattgcttcaacaaacaaagccttgttttaagattcactaaagaccaagccttgctcttaaacaaagtgctttcaagacatgcaaggctctggtaatcgattaccagaagacagggttgagaaatagctgttgaaaaaggttttgaatttgaattttcaacatgtaatcgattaccatatgtctgtaatcgattaccagcaacgaaactttggaaattcaaattcaaaagtcataattcttcaaattataactgtgtaatcgattacacaaacattgtaatcgattaccaatggaaagttttcagaaatctgccaacagtcacatc

SEQ ID NO: 267448 - DNA, 417 bp, Glycine max
agcttgcattccaaatgaacaaggcattactttatctatttgatcatgtgaaataaaataaaatttaattgatgtcactaaatcattatgataatttaaaatagtcatgttttaacataatataacatgttaaaactaaaagcgttagcaattaaaagattaactttaactatgaccaaagatggatgcaggttgaccattgtgggggtaattgccctctttaactctttatttatttatgtaatagatatgaatacttattatttattattataatttaaaatagaataaataaaactattcgcaatataaatattaccctcgcaatattatttttagtctcactctttttattatctcaattaaacattaatattagtattcctgttcattttttatattttacatacaatattt

SEQ ID NO: 267449 - DNA, 473 bp, Glycine max
  unsure (1)..(473): unsure at all n locations
ttaacatagcacttgaggtgatgattggtaaagaaagggacaagtacatacacaatggttttcttatcataactctttttaggatatcttaagtgatttaaattttattataaggctctatatattttttttaacaattgttatactgttcaactagaaatagccttttgaaagtaaaatatatgaatggataattgtctagatattgtttgcttcgtaataattttttatatggtcaagtattgactntttttcttttagttaccattttttatatttactatcatcctttcaaaaacattgatctcaatttcattaagtgtttcttaaagagatggttaattntaaaatattaaggatgattttagagtaacagtacaaattattgacaaatttaaggttactaactaaattagtcaataaatttcttaaagagtataaattaattaanaatgtcttatatataaagacaa

SEQ ID NO: 267450 - DNA, 327 bp, Glycine max
agcttttcattggtgtatttttatcttcttttggcgctctaaaatgtgggaatatgctcaaatatgcggggcaattttggtttggttttcttgcttgattgggttgaattgggggtttgtatgggatggccctatgcctattatgcattttgaagcaataggacatgccacattgtcctcgctctcttgctattgatgcctaaacgcgcgcccaccaagtgttctgtgaaatgcctcaatggcattaacgcgtgatttttgtaaggaaacaacccatggggcattttggtttgccattatttccattttttaggaacatgcattcat

SEQ ID NO: 267451 - DNA, 297 bp, Glycine max
actcactgggtgtgttcgactccggactgttttttaatgatggaaagttggtaaaaaacgtccctcaccatttattttctcagggtgtcgccagcagctaccgacttttttttaaaaataacctgcctcccccttacggtagcgtgctatcacctctaataaatagcacatacttattaacaaaatatataaaacggaatcagactgctgctcacacttttatgttaccgaagacacgattggactatctcttgctctctaaaccgagagaacactccgcacgacgcatgtactgta

SEQ ID NO: 267452 - DNA, 445 bp, Glycine max
  unsure (1)..(445): unsure at all n locations
ggatcttaagtcacctgcggcatgcaagctttcatgggtcatgcatagatttgctttctttttcactgcataggtaatatctggacatgtatgggacaaataaattagatttcctacccgcctttggtatctccctctgtctatgcttgctgaatatgagcattgaaagagtttatgattttgttcaattggtgtatcaaccagtttacctccaagcagcccagtttccgatagaaagtcaagagtatattttctttggaatagaaaaataccatgttttgatctagctacttcaataccgagaaaatatttaaggtttccaagttgtttcatctcaaattagatgcagggattgttgcgactaaanatctcatctggtcatttnctgaataatcatgtctctacatatattatcaaagtgtaattttcctttcctctttaaaaa

SEQ ID NO: 267453 - DNA, 460 bp, Glycine max
  unsure (1)..(460): unsure at all n locations
ctaagcttagggtgctcattgactccagattgctgcanagaatgttaaagatcttgtatggaatcnngaaaagaacatagaccacagactcttgcaacaggtgtagatttctgattcatggcaagctgggttactaggctgaccaaggcatcaagttttccttcaagctttttattttcagtagatgaagatgaatccgtggccacctcatggactcctctaagaacaatagcattatttctaacactgaattgttgggagttggaagccatcttctcaatcaaattcctagcttcagcaggggtcatatcaccaagagctccaccactggcagcatcaatcatactccgctccatgttgctaagtccctcatagaaatattgaaggagttgctcagaaatctagtggtgagggcagctngcacacaatttcttgaatctttcccaatactcatacaagc

SEQ ID NO: 267454 - DNA, 437 bp, Glycine max
agctttgacgcaacatttggagatgtttttatttaacgagatgatgcgctccatgagaggttggatcaaatggagaatagagatcataatgaagaataaaggaggagaagagggaatgatggtgttcctagacaaaaccgaattgatggtattaaagtcaacattcctccctttaaaggaaagaatgatccacaagcctactaggagtgggagatgaaaatagagcatgttttctcatgcttttgtgtggtggaacaaactacaaaaggagagagctagaaataaagagccaatggttgacacatgggcagagatgaaaaggatcatgaggaagcggtatgtgtcggctagttactcaagggacttgaaattcaagctccaaaaactaacccaaggcaacataggggttgaggagtatttcaaggaaatggatgtgc

SEQ ID NO: 267455 - DNA, 473 bp, Glycine max
  unsure (1)..(473): unsure at all n locations
acactangaatactcagcttnaaaattatctctttggacccttaagagctgttaagttaatgttttatctacattcaaataattaaaaaaaaatacaatttttagtttgacttttttgagaagacaatacttgtgtagatatacttgcctctcatgtttattttcttaatgggttttgctagtaggattcaattccctctctttgtctcaacaaaatttaatagaaatagaataagtcttccaaactataggtttgaataattattttgttgtgctcatcatgagtctgatttacaatccccatgttttttttgtatatcttttatttattttttgttatttactatatctctttgacacaccgcacatcatagtcaaagtttatgatgtcaatcaagttatgatcactttagccatccttatgtctttgcatgtcatccttttgtattaaaaaaagtgactctgaatttgat

SEQ ID NO: 267456 - DNA, 432 bp, Glycine max
  unsure (1)..(432): unsure at all n locations
agcttctcccgcaattttctataaataggttggttaagtgaagcgaaaaagggttcagccccttatgcacttctctctttttcgaatctgcttagaaaaattgtttccgtgaagaaaattcaagccgaggcgcttccgtaacgtttccgtgaggaatttcgtgaaggttttcgaccgctcttcattcgttcttcatcggtcttcagccttcaacgggtaagtacctcataccaagcttttcaattcattatatgtacccgtggnggtccacacttggtttcatgtatttatattctcgtttcattcactttatatacccccttttgacgtgcttaagccgttttatgtaagccatttctcgcttaacctaaaaataaaataaatttccaccgatcgtttgaattgtattatccgttaacttcggttaaaatg

SEQ ID NO: 267457 - DNA, 386 bp, Glycine max
  unsure (1)..(386): unsure at all n locations
ttattctttgaattattaatttttggttttggtaagatttggttaagttaaaatttattttcttcttgaattggntgactattggttctggtggcgcttgcatgttgaaatcttctgtacgtgaattggntccattcgatttccatatttaagccacctttacaataaaccatgcggagagaaaaagaaagcttttgcacgatagaacaatagcatccatccttaaaaaggctcacttattcgagtcatcatcttctaattcacctacttccagggaatctcaaacaacagaatttgaagtcgaagtcatggctgaagagaaacctcgacgagtgagccttggagattacttaagtacatttgtgccgcaattctttactagcatt

SEQ ID NO: 267458 - DNA, 425 bp, Glycine max
  unsure (1)..(425): unsure at all n locations
agcttgccaattcatatataattattttttatattgtcaatgggcgaggatcgacagcttcctacttccttgcatagcattttaggttaaatagtatattccttattgtatattaacttccatagatttaggggggtggaggatgatcttcatgccactctggcaagcaaaaaacaaagagaatgcaactagcattgcacgtgaattaaaccagaaaatgaagcatacatagtgcttcgttgatgaatngttatctataatctaaatatacaacgctttttcataaaaaagaagctatatatattggataaagcgttgtcttaatttgaatatatagtgttcgtttatatgagtgttgacatcagtttatatataaacactttttgctagtgtatattaaataatatcgctacacaatacgctaa

SEQ ID NO: 267459 - DNA, 358 bp, Glycine max
taaagtatgcccgagtcattcatccctatgagatgttttttattattggcgatcagaattgccattccttggattatagggttgaaccaagctcatgcttttacaaaaaggttcatcaagtcaagttgaagtatggaagtaaccatcttgcaaaaattggggcaaaaaatgaatcgagttacatcactgcttcatttactgccaaacacatttaggactgttgatgtccttgttacttccagtttcaccttgaccaagatgtcatgaaccatgttgaaaaatctaaattgattcaaccccatgtcctgcgtagaaattcgcaatacttcacctgtgtatcattcacatacatccatgc

SEQ ID NO: 267460 - DNA, 393 bp, Glycine max
  unsure (1)..(393): unsure at all n locations
atccggctcagttagaagtagattttaacatgtttgagttttgaaattagatttgtatttttaagcaggttcaaattatattttaggtcattattttgggtacatttttttaaacaaatatttcaggtcattttaattcactttagtatttaattgcactgtaaaacaatttttcacactgttatccaataaccactttttaaattattttagttaataaatttataatacatgataataagtcataattagatgattgtttaaaatttttctatattattaatgtataacatttttttcatttttatatggttttttttaatataagttntatcaacgatagcgtatcttatcttaatcttgatatacaatagcaacaagtttttttttttt

SEQ ID NO: 267461 - DNA, 367 bp, Glycine max
tcccccaactaagtttttgcctgcggcaactcccatgaaacaataagatctccccacattggctggcaccacgaattttctatcggggtgctcttgattacctaataacaatatcataacctgcattttcttttttaactagtcgccttattgctgcccacttgacccccctccctaatactctcacgttgtaagggaaaatattcatgatgcactggctttggtccccctttctctgtaccttgctgctctttctccatgtcataatttctcaccatttctctaatttctattcaaacccccgctgtttgcaactccataatctttgctcctgtgcttgttgtgcttgtttcgctgacctgctcct

SEQ ID NO: 267462 - DNA, 445 bp, Glycine max
  unsure (1)..(445): unsure at all n locations
ntgcttctacaggatgcatgatgacgacttgttgatctctttcctaanacctgctcgnacctgcccccaagtctccaaatacagganaaatagtattgcatagtaaaatatgactatgctaccacttacatttgcttaccttttgccttggacttggtgtggtatcgaccaactctcgaagcaaatcttctttggtcctttgactcacaagacaacaaaaatgcatatgcatgcacagattgaatagttttaagtgcaaaaatttaaaacaaatgtttgttatgttcaatttttcttaagcgattgtggcacccctagggaacgagctagatggctcgaatcgatcacatgcaccgtttgaaggatgacaatggattgtcacacttaagtgaaactttcttgatttaaggctataaagtgatgccaggggtctgttgaccccact

SEQ ID NO: 267463 - DNA, 318 bp, Glycine max
  unsure (1)..(318): unsure at all n locations
aaagataacttaatcaccaataattacttcagtaactcatacacaaacgtgaggagaaagtgtggccacttagtcataactctggagaagaggattatatgttgagatggtgcaaatggtaatgaatgaccatacctaanaaaatgaattcaacactcaaaatacacaataagacttgtataacaaactatattaatgaaattgagtaatagtaaactattntagttgtacgggatagcatacctaaattatcctttcaccctcaaaggctcaaatatgattaccaattaanatngaatgtaccattctgaactattt

SEQ ID NO: 267464 - DNA, 436 bp, Glycine max
  unsure (1)..(436): unsure at all n locations
agcttgtccacacgacactctaacttagtttctgttctgagttcatcgggaccacccggttgtgcacgtaatagcccccttcccataggtgatcagcctgggagcccaaaactgttccctaccaggtgacaagccccctctgtacaaagtacacttgaccacaattactctatttcctgtgtcgtatcanctaggatcatggccaaaagtaagtgccaaagaccatggaccaattaaagcgcctaagcatcccctcaaaaatgcttagattctctaaccacgctagttacccacgtctaggccatccgacaaggtcagtgcactctaccctcatgacatacactccatacgacgtatgaacgtggccaaaagctagtgccaaagaccctggaggtcattgtacagtgccccccacgaacatacacaacatgcacat

SEQ ID NO: 267465 - DNA, 461 bp, Glycine max
  unsure (1)..(461): unsure at all n locations
tactaagctgtgtgcacttttactgcaaacctgagatatagctttggtatttgtatgctcaaagtctctggatgaagcaacaacttgaagactttggagtaaaccttgatcacattcctctaaaatgtgacaacacaagtgtgatcaatctaactaaaaatcccatcatgcattctaggactaaagacagaaataagacatcattntctaagaggtcatgtcttanaaggtgattgttgcattgagttcatagatagtgtgtataacttagcagatatattcactaaaccacttgctagagatagtttgttcttcattagaaatgaactaggcatcttatatcgatctagcatagaatgacattttgtttaatgcacattatgtgtttcatattgcattctatatcacttgatttctcttaatgtgtcttaagttggtgatatgtgtggttaatcatttgg

SEQ ID NO: 267466 - DNA, 452 bp, Glycine max
  unsure (1)..(452): unsure at all n locations
tgcggcatgcaagcttcgntaggagtaagataagtctcattgttttattctttccacattctcataacgcaggaaccattcgaacccacatccttatcaaatatgaatttatttattatcaattagatcaatcttaactggttgtgactntatattttaagaattttattaataagtatccttaccgtgttaattaaagaactaaaaaaagaaatgtttattctataaatcataaaatgtcataaagaaaaggtataaataatataattttaaacatttcaacaaaaaatttatccttataattttttaactaatatattgataccacctctgggtttatgtcttggttagatgtgagagcgtaagaatatgaaagccaatttttgtaataaaatgctgtacggagcaaattgattggccttgtattgtgcactgaagtctgaatggttgga

SEQ ID NO: 267467 - DNA, 408 bp, Glycine max
  unsure (1)..(408): unsure at all n locations
ggacctatgatactaagcttctgctggttcaaacacacagtgagcttttctattggtgtcaccaagagaaggatatggattacagcagtgtgctctttgggaggaaaacggcctcgctcatattctactcatgtgcaccatgctactttggtggtatattcaagagaagattaagttaacaaaaaccactcttataatttcactctctcttttggtcttctttagctatgtgtaatatattggcataaagtttaccatcttctaaaatggtgacactctttgttgaaggaagctccttgccatgcatggtttgccagcacagttgggttgcgctagcttcactgcgcggttgtcattttagtctcttttctttcttcattctttttaacccattnggaaaaacccaat

SEQ ID NO: 267468 - DNA, 338 bp, Glycine max
  unsure (1)..(338): unsure at all n locations
ggtttctgggtttcggttttcatttggtgggatgtgaagcaattggggatctatcagtgtacgtctctatgcattccttcccagaaaaaaatgtcttggagacgacaaaaaggtttggcgatgcccatgtggcctcctagcggaattccgccaaaagtaatggaatgaaagagttntctggtggaagccatattttacctttgtaaaatatcaggtcgcatgggatggagtactcagagtgggacttanggtgttggcttttctttgtcatcaagtccatgaacgccgaagattgatagagtgattggcgaatttcatctagacattcgaagtttgga

SEQ ID NO: 267469 - DNA, 425 bp, Glycine max
  unsure (1)..(425): unsure at all n locations
ttttgttaaatattaataataataataatattattaatattaatattatattattatcatcatcatcatctaaantggtattttgatttgatactttccaacaatgctaatcttatgtttaaacacttaaatatttattgaaattaattagattttaatatacactaaaattgataaatcttccttatttttgtggtcggaactgtttgttatctactgagcacattcacgggttttagctgtgcaacaaaaatttctatcacagtgtttttgtcaccattacatgcccactcaaattgacttattgacatttttgtttagtataatggctaacagctgtgtttatggcttttcctatagatgaggattctaatggngcaatagctcaagaggagttgaanaaatgtatgttcaacggtgttcta

SEQ ID NO: 267470 - DNA, 444 bp, Glycine max
  unsure (1)..(444): unsure at all n locations
agctntcttgagaagctagagtnaagctacacacccctattatatctaagctcacccccatgataaaaaaacatgaaaatacaaaacaaatcctactacaaagactactcaaaatgccttgaaatacaaggctaaaaccctatactactagaatggccaaaatacaaggcccaaaataagaaaacaacctattctactatttacaaagaagagtggacccaaccttggcccatgggctcaaaaatctaccctaaggttcatgagaaccctaaggccttctttatcaactctagcccaatcctctttgagcctcttgcttatggctctggtaactggtcctttcctagggaggattgcatcactttgtgacttttttgtggacgaccttgactaagcgagttgaatttagccttagtttcactttagttattagtcaattcaatt

SEQ ID NO: 267471 - DNA, 477 bp, Glycine max
  unsure (1)..(477): unsure at all n locations
tnctttggaccttgaacaagcaatcaacttctctttcagaaccatgctatgtgctcgcgactggtccctttcttcctttcgcaacttgagttcattattgctaccccatagagctccgcgaaatttgttccggccatactcttccttgcgagcccttttggtctcttgttcaagggcttttgccggaattgcattctcttcccgtaacccggcgcactccttccgaacgtgtgtagcagccaacttgaacttttccttggcgagttttgcctttcctaactcgcttttgagagcttggacttcttcgtcctcttccggtgcttcaaaattctcttcgctgacgactnttaacttggcgagccaatctaaacctcgtatgcgaactttcagccattcgtggtacccaccaatgatgccattacgaacgcctctaagctcttgatctttccttaacggngtttcccatgccttatggat

SEQ ID NO: 267472 - DNA, 400 bp, Glycine max
ctcaatattctgccattaaagtgagggtttcttattttattaattcagcttcgattgtgaagattattctagacacaggatttaaagaatttgtcatgtgtgcaggtttggctactgtcattggggtgaagtgtatttcaccaggaagtgatggaaaaccgattatgaaggtgaaatcttatgtatcaaataaatacaaagagcttttcgagttggcatctctatattgaatgtaaaataagttcttcagatttattttctgtaacatcctataacatcttcggtggaggattcttctattctgttatactacagagctgcatggattgcattgtctatagctataatcacttaatctgctaagtggcacgaaaactcaattgacagtaattaattgttt

SEQ ID NO: 267473 - DNA, 356 bp, Glycine max
agagagctggaggtgaccagccaatggttgatacatggacggctgatgaaagagatcatgaggaagcggtctgtgccggctagttactcaagggacttgaaattgaagctccacaaactaacccatggccacaccgaggttgaggagtatttcaaggaaatggatgtgctcatgattcatgcaaagattgaacacgatgaggaggtaactatggctcgatttcttaatggtttgactaatgatatccgtgatattgttgagctgcacgagtctgttgaaatggatgatctgcttcacaaagcaatccatgtagagcaacaattaagaaggaagggagtggctaataggagttttac

SEQ ID NO: 267474 - DNA, 185 bp, Glycine max
  unsure (1)..(185): unsure at all n locations
gagagaaagagagaggggggagcacgaaattgaaggaataaaagagggagagaagtggaactttgaagtatgtctcacaagactctcattcatcaaagttacaacaagtggtacacatgcttctatttatagactcggtagcttccttgagaagctntcttgagaacacttccttgagaagcttt

SEQ ID NO: 267475 - DNA, 248 bp, Glycine max
gtttatcaagactaatgctggttggaggaggtctctctccaattggaccaaaacatatcttgtgatgtaaacactatcgcttctacccattaataacatcaacattttgtatcggaaaaaatgacatgttaatgaaatctcattcaaacacttggagcttgatgtagcaaatcaatgcttaagattcttataacattagctatttattttaataccgcccaaagttgaccctcaaagtcaaactatga

SEQ ID NO: 267476 - DNA, 396 bp, Glycine max
  unsure (1)..(396): unsure at all n locations
ctataactgattaaggntcctaaactcagattttgtggtaaaggcttacaaaatttaacataaagcgttggataccgctaaatatctgtaataataagggttggcttaattgcgaagattaaactgtgggtaagaaaaggtctngcatgtgatccttcactaaacttttcttcacaaagaaatgataccatcaagcatcactgcttcaaagcactacccaatcagatagatacagcataacattttatgtctactctacagaataaatttgagccaaggacaaccaattcataacagacagaaaatggactctattactcagtacctcctacagcctacaatacaaccagtcattcaaataagttattagttcataagacaacagatcagtcaaaa

SEQ ID NO: 267477 - DNA, 292 bp, Glycine max
agcttgggggccgccattctcttattttttttgttcttggggggttttgatgtgagggggaaaagtttccggtgaagaaaactctcccccttcaccttttttttttttatggatggccaaccagggggacctcctgctcattaagatcttccacactgtttaagatgatggatgctaaaacccccgaactcattctgactcttctatgcctgactctgccattatcccctgacatagaacctctacctctaatgggaaccctgcttgcatcccatacacaaaggaatacggc

SEQ ID NO: 267478 - DNA, 471 bp, Glycine max
tctaaactatgtacaagaatgaagctctgataccacttgttagacaagtggcctcagatatcttaagaaggggggggttgaattaagatattcgaaactttttcccctaattaaaaatctatcttactttatactcaaggtatgaattgccttaatgacaatcttcttaaatattaattcaaatgaagcaactggaatatgaatataaagcaatactcaataaatcagattaagggaagagaaaatgcagactcagttttatactggttcggccacacccttgtgcctacgtccagtccccaagcaacccgcttgagagttccactaactctgtaatgccttatacaagttctaaacacacaacgacaacccttcctttgtgttagagattctaacaacaagagactcacagtctcttaatcccttagagaatgagacgatgacgaggaccaatctctcttgaagagatgg

SEQ ID NO: 267479 - DNA, 408 bp, Glycine max
acagcatgaccacagatcaaccttcatattctatgtctcacacagacctgggtatagggcctaatacctcaatgtttgtgcaaaggtgtaggtgtcctgcgtgcataaaacaaacaaatattcctaactacgaatgtaatagatagctagacacacaaaaaaacacagtaacacagcaagggttatatacaaatatggacaaaataaaagataaaaggaaaaagggaacataaataaagaagaagacacgataaaacattgcacactgatcaaatggcctaactctctaacaagtccccagtggagtcgccatttgtcgcaacctaccctatgacgggagggtgaggcgaaataaaagtgcatcttccaaaaaaaagcatgcgtgggattcaccaccaacgtttattc

SEQ ID NO: 267480 - DNA, 414 bp, Glycine max
  unsure (1)..(414): unsure at all n locations
cactctgaaaatattttttttttgttgatcctttggcatcgagaaatcaggtgggaccaatctttcttcttcaaatggcgctcatgatatttattggaattatcttcaatgtttgaccaaaaagtttaccttttttggacccccacaattgaaatctttgaagtatttaaccatgcgttggcaagccattcatatttctttggggagaaacatgatctattgtgtctttcggaggcttattctttggcgtcggcttcttcttcttcttcgtcctcttcttcattgaccacaatattatccaactcaacttatgtgcaaaatggtggaatttgagactctgacccaaaggcagatggtgcgtcatgctctttcattacattggacatcattnactacactgtgaaaacccttgat

SEQ ID NO: 267481 - DNA, 387 bp, Glycine max
  unsure (1)..(387): unsure at all n locations
caaaatcactaaaccgtttagggccattgtcttaaaccgtccctcttgcttttatcgggtaatatggacccttcaaaagcattaaatcaacatgtaactttaccgctttttgcaaaactatgtaggtctgatttcctcatcgcaattgaggatatgtangagcaaaagccctgctttgtcgaccaccccaagagatcgttaatgtccaatgccttacgtttcttacttcaaaaccaaagatcgtaatggtcaacgccttatgttctctttttaaaataaaagacatttatggtcaatgcctaaacacatttgtcagtcaaatatatcttgaaaaaagatagaacaacttaccaacgtcagtctaaagactacgaggtctgattccta

SEQ ID NO: 267482 - DNA, 339 bp, Glycine max
cacaaacaccaacacacacacacacacagaaagagacacacacacacacacacagtctcgcacacataaagacatagataaagacacaaacacactgagccacaaacacacacagagacccacacacaaagacacacacattgagtcacaaacacacacatacacaaacacactcacacacatagacagacgcacacacacataaagagacgaacacacacacacacacacacacacacacagataaagagacaaacacagacacacacacccacacacagagtcacacacacataaagagacagagaaacacacaaacacactgagccacagacacac

SEQ ID NO: 267483 - DNA, 322 bp, Glycine max
atttgaaaggcgaaccacgatcctgtgtatcagctgaaatacccgaaagcatagcacgagcaaattccatgtttccatcaaactcagcttcctccattgaaatggctctcgcatcgatgcttgagatgaatgactcagcaaagagcatgtttggaaaataatatgctgcttctgcaaccaatccagattgatgcctaaacctctgtaggtacacgaaattagagtgcagctgaggagggttcgcctgcatagaataccatctaaaagatattgtaaactgcaaaatgaaaaacgtatgctacattaaaatgaaacttaacaa

SEQ ID NO: 267484 - DNA, 401 bp, Glycine max
  unsure (1)..(401): unsure at all n locations
cctctacagatacatggtcacatgtacctagtatgccattctctagagctcaagtattgcccagtggctttttggctgacatgttaaagcctattgccacagggttgacctcatacatgggaagattatgtgttcctcagagtctgtattcatggccctttnttgttgatgttgggggagaaatctatgatcctgaaactaactcgtggatagaaatgcctgctggaatgggtgacggatggcctgcgcggcaggcaggtaccaaattgagtgttgtagtggatggtgaattatatgcttttgacccttctaattctatggatagtggaagaatcaaggtatatgatcaaggtgaagacgcttgaaagtagttattggaacagtcccatatatgaatctgt

SEQ ID NO: 267485 - DNA, 381 bp, Glycine max
gatggccgcctcatctcaccctcttcttcctttgtcttccactgcattctccatggcggaaaatcaccattgaagaaccttattgaaatctcaagatcccacctccatagaatctccataagcaagattccattcaggggtatcataacacaagagctttcaagaggtgctccttaaacctccattaattttttgctttaccttctcttccattggtgtttcttcatttttctccatgtatctcctcacatgtctagtgataaatcgttttaacatgattctttagagtctccaccaattaaacttgctatagaagctaggtttgattttctatggttcatatttcattgtcttgatcttgaaccatgaattgtgttgagt

SEQ ID NO: 267486 - DNA, 245 bp, Glycine max
  unsure (1)..(245): unsure at all n locations
atataaacatcacccaacatcatcaacaaaaaccctanacagaatgggtatgtctaacacatccaaacatggcgatttcaacaagctttcaacaagaatcttcacaaataactatcatgaagcagaaaactaacaagactacccatcatttctcccaaaaccccatacccacgaatatcaagagggaaagaagtcacccaaacctgaaatttcgaagtcccacttgtagccacgcacttcacaac

SEQ ID NO: 267487 - DNA, 403 bp, Glycine max
  unsure (1)..(403): unsure at all n locations
catgcaagctntgnngggcaacaatggtggaggattatatattttttcttgtgagagagggagagaaaaggctatcaaatatgcgggcgccaacgacaacagagagagctgctctttgtataaaaaaaaaaggctccccctttttctattatttcattaaagctatgccacatgcctccatttgagtggagcaaaaagggcccactttctctttttatcgtgacccatactcagccacaaaaagtgagaaaaatctgacctttgaaacgcctaaatcatgcctcgggtcgcgtgctcgatctctggttccaggttctcacgtttctctgcgcccgccggggcccagtttccaaagtaagtaatatgtatatcacaacgctcagaataaaacccccagcgcggt

SEQ ID NO: 267488 - DNA, 456 bp, Glycine max
  unsure (1)..(456): unsure at all n locations
ttgatctaccaccaccaccaccaccatcatcttagntttctattatgtttaatattattaagactttgatttctagccgtgtatttggctatattattatgacatttgaacaatttagtatttcttttatttgcatgttatgattgaacaattatgaattatgctatatgactatgtggnttttatatatttgatctattcatgtttcttgcttcatgattggtttatattctttaatgaatgtcttgtgaatgattagtagtgtatatattttttttactacttgttacgtactttggctttttgttgatgccaaggggggagagaaatagggattaaatcaagaactcacataagaaattaacttaatttcaagtgaagcagaaactcaaaaacaaaggggaagaatatggagaattaagtgagagatcgactangaaaaagtctgtgtatgtg

SEQ ID NO: 267489 - DNA, 129 bp, Glycine max
  unsure (1)..(129): unsure at all n locations
gaaacaaagcaaaaaacctaccaacaaaaaagaaggcaaaacttttcccaacgagaactaacgaacacagcagaaagacatcacctgaagggggaagagctntgcaaatcccttctgggccagagcatc

SEQ ID NO: 267490 - DNA, 469 bp, Glycine max
  unsure (1)..(469): unsure at all n locations
actcagcttaagtatgcccgagtcattcatccctatgagatgntgtttgtttattggcgatcagaattgccattccttggattatagggttgaaccaagctcatcaagtcaagttgaaatatggaagtatccgtcttgcaaaattggggcaaaagatgaatcgagtcacatcactgcttcgtctactgccaaacatatttaggattattgatgtccttgttacttccagtttcaccttgacaaagatttcatggaccatgttgaaaatctaaattgattcaaccccatatcttgcgtaaaaattcgcaatacttcaactgtacatcattcgcatacatccatgcttttcattgggtgcattgctcattgcattctttccttgaaaaataaaataaaataaaataaaatgaacttaatcattgttataaaaaagaaaaaggacacactntacggtgcccttaccgaactt

SEQ ID NO: 267491 - DNA, 297 bp, Glycine max
caaacgcacctgaagcaaccacaaattacagtagcaatacagccacaaaaactcccaaaactttccctttaaacccatttcccccattcaaaaattcaaccaacccaaagtgtcaaaaccaagtaagcccacaaccacataccctacaaaacggtgaaatcaaaaggaaaaaacaaatagggcagggccaaaagcactaaaaaaataaccttgaggatcatgcctagctatggaatgaggtggacctaacgagcttgaaggggattcctggtaccctcgtttcatcgggagcgatga

SEQ ID NO: 267492 - DNA, 473 bp, Glycine max
  unsure (1)..(473): unsure at all n locations
tgttagtnagaaacaacaacacatgcgataacagaaactctgcgttatgcaaaacaagaaacgctgcagcaacagtatgagacctgtggaggcacattgtccttaaggatttatttgcatggcgcaagaaccctccaagatttaatagacccgtctcagccaaggctcaggtagcagagcagcaaggaactctttntgtataagatatgttgtgcccaggaaaatgaaccaaccaaagaagaaaaaaaaaccagttttttgaaaagaaagaagataaaaactaacgtgatattatagtctctgttgttaaaaatataacgtttctgtttttaaattaaaaaaacttggatgatacttcagtttttaaaagtggctgtttcttaagtataaaaaagtcattctttctgtatttttcttcctgagatangacatggagataagttaaataacaaattataaataataaggggtct

SEQ ID NO: 267493 - DNA, 442 bp, Glycine max
  unsure (1)..(442): unsure at all n locations
agcttctaagttatgaatcagccattgttctttgtaattgtncacatgaaggcgaattgtccagtaacagtctccatgaaaatactagtcaagccctctaatgtaagagtcaaagaacagggcatagtctgttcagataaaaatctgaaacagattacttgaaagtaggagacaaagatgactttatcagattggctcaaatgaagaatccttttgtttcaacttctcttcatgctgncatgtagagttaaagatcataatattatacattaataaattgattcaaataagaaaaagcttattagacataaattcacaggctatgtttaagtttcataaaaaaggatcagaaattgtatcatcctatggcaaacattacattcaaaagaagaagaatgatatctaacacaagtatcctatgacaaccacaactataattttc

SEQ ID NO: 267494 - DNA, 470 bp, Glycine max
  unsure (1)..(470): unsure at all n locations
ngaatcttccttggtcgggtacatgagcatatgtcttgttcccaaatactctcaagtgatcaactcttggcttcactccactccatgcttcttgtggtgtttgatctttgacattctttgttggggagcgattggacaaataaacggcacatgcaacagcttcggcccaaaattcctttggcatatttttagccttcaacatacatctagtcatattaagaatagttctattttttctctccgctaccccattttattgtggagatctaggaaccgttagagggcgacgaatcccatatttttcacaaaattcattaaattcttttgatgtgaattcgccacctctatcggatcttagagctttgattacataaccactctccttttccacaagagctttaaaattnttaaaagctacaaatgcctcagatttttgctttagaaaataaacccaagtttttctactataa

SEQ ID NO: 267495 - DNA, 431 bp, Glycine max
ttaagcaccgcggctcacttaactcaatgtggattttttttattctagctcgagaaaccacctactcaagatatttgaaagttttattatgatatcttaaaacacccatataaccagaaatgaaaactgttaacaggcttgtttctgaacattttcattttggacatagtacttgatcctcttcagtggaatgacaacctgcagtacatgaccatatataccttttcgatacttcagcaaatcttgcattaaaagagacagagaaatatgaagaggtttatgtatatactacttgatgactgacctataaaggatcctcaacatgtggcctgagtaaagattctcattgaactctcatggcaaaaggcaaccttatcagtggatatgaagagacaagctagagaggcagatgtggtggacaaataacactg

SEQ ID NO: 267496 - DNA, 470 bp, Glycine max
  unsure (1)..(470): unsure at all n locations
ngttagaatacttagaagtgttattggaaaactaanaattctaattgttataaacaaaactagaatcaaacataagtctcactcattttcatatagcacatccccaccctaaccataatcaaccaccacactctcttacattaatcaactttttttcattgacacgattggaattggttttagtccaaaatatggttaacgtggttagtggttacagggacagagaatcgtatctctaattactcgtctggtaaatttggctataaaaaaagtcctagaagctgcttcatatattttcgggaatgcgagttaattagtatggtcgcaagtcgcaacgcaagacacggctntactcaaaatggaggatctatatcaagtgcgtgcttagatcagcatgtatatttntaatgaatttgatntcagtatctntgcttctttttttatcttgctaaacatattgattaagaaat

SEQ ID NO: 267497 - DNA, 342 bp, Glycine max
  unsure (1)..(342): unsure at all n locations
ttgcagatttggtcttcgctcagtaaaagatctatttgtatccttatagaggcaaatttgatcatcctactaagacgactgagaaaactggcgccaatgaagagggtgagaaagagagagaaacccatgctgtgactggcattcctatacggncaagtttcccaccaacccaacaatgtcattactcagccaataacaaacctcctccttacccaccacccagttatccacaaaggccatccctaaatcaaccacaaagtctgtctaccgcacttncaatgacgaagaccacctttagcacaaaccacaaaaaacaacaccaacaaaaaggaattttgcagc

SEQ ID NO: 267498 - DNA, 439 bp, Glycine max
  unsure (1)..(439): unsure at all n locations
acctgagctgcagctttcagcagccctatttttttatcttagcgcacgagctncaagtaggcgctccttaaacctgaattaattcttagctttactttctcctccattgttgactcattcattttcctccatgtatctactcacatgtcttgtgctaaatcttgttaacatgattctttagaatatacaccgattaaacttgctatagaagctagatttgattttctatggttcaaatttcttgctcttgttcttgaaccatgaattatgttgaaattaggtccctttgagttttgttttgctattttctgtgggtgaaacctaaaccataaacatcttacccaacacactttattacaagacaaccctcaaaatctagagatacttgttcaccatattgtagttttgcataaaaagcatgtccagtcctgaaacttgt

SEQ ID NO: 267499 - DNA, 378 bp, Glycine max
catacagtgttgtcgactaagatctgagacttaacacgaggacgactgtcaggatcataggatcaaacgagtaggttatccaagcaaataatacccattctttgtttcccgctaaacagccctctttatggatgctagagcttctaatgaagcacatgacactagtactatgtcggagctgagctttgtcccctctaagaagttgaattaaaggcagcgttgtgaaaatgcctactaatcaagcagaccggactcatgtgggaagacattgcatgagcttttatctatccaactggttattgagagttcgttatcactgcattatgcataaacaccagccgctgatgacactatatacactatataatgatgacttat

SEQ ID NO: 267500 - DNA, 482 bp, Glycine max
acctataaaactcagcttgtggcagtgcctcaagtcctcaggaatcttgccggagtgcgtgttctgagagagatcaaggtgtgtgagttcagtgagctgcgaaaaattcatgaatatctcaccggtgatgtcactattagaaagttctatgccaaccaccctcttcgtagcactgcatgaaattcctttccattcacaaggattggagctattggcgttccaatatatgtaacctcctctgtctgcaagaattttgctgtccaggtaaaatttcagcttcagcagaacctctttgtctttgtccaaagattcccctacagcaactttacctgccaaaaccaaacacaaaaacaagaattgcttcggtaaacacaaaaacacaagtttgtaataattgtataacagaatcaccaaccttcgaaacactgaatatgaataagagcaaggaatactaactctcaagagcacaatagagcaaagaa

SEQ ID NO: 267501 - DNA, 386 bp, Glycine max
aaaaacttaatgccattaacctagagaattaaaaaaaacttaatggctgagtgtaactgaaattggggcaaccaaaagtcacccccaacagccaacaagtcagccaccatttggtctcccaaaaggctgatgcctaggttgccaattgggcccttattacaacttgaactaaacctaactaaagcccttttagttgattaacccaaaacatatttttggtcagccaactttacaaggattgggccattatttagacaaactaaacactctaaaattgagacaaagtggtgtcatttagtcctcctccatttgggccatgatacaactcacaaccttggacttttctccttgaaacttgggcttgtattcaaatagtatggacaaca

SEQ ID NO: 267502 - DNA, 410 bp, Glycine max
  unsure (1)..(410): unsure at all n locations
tgagcgtgcacaagtttaaattacactttgcaactgctatgcaatgttttgatgttttgcatgatcccccagttgcaagaagatgcactgggggttgtcttcccaaggctgtaactcacttttagttntgttgcttccccctttaacaattagaattccaatctatgtgtttacatgattgattttttttttctggaatctgcttttgagtggatatttcctctttcaggaatttttgaaaaaataatatatcaaagtacatatagcatgagttgaatcaaatcattatttttctgacttcaagattattgactattaatattccgtgtgaaatacaagttaaaaactcaatgtagcatgagctgaatcaaatcattattgttctaactttcattngtcaaaatgttaaa

SEQ ID NO: 267503 - DNA, 444 bp, Glycine max
  unsure (1)..(444): unsure at all n locations
agcttgctggtggggcttctatggaggtttgttttttttatcttcaatgaggtcctttaatggcgattntccaccatggagatgctgcggaagacaaaggagaaaaggtgagaggaggctccatccactagggaataagccatggaagaaagagcttcaccaccaagatgagccttggataagaagcttggaaggatgcttcaatggaggaaaagacagagggagacaaagagagaggggggagcacgaaattgaaggaataaaagagggagagaagtggaactttgaagtatgtctcacaagactctcattcatcaaagttacaacaagtgttacacatgtttctatttatagactaggtagcttccttgagaagctctcttgagaaaacttccctgagaagcttctttgagaaaacttccttgagaagctagagcttaacta

SEQ ID NO: 267504 - DNA, 462 bp, Glycine max
  unsure (1)..(462): unsure at all n locations
actgctccgatagaattcctaaacgtcatatagactattaagtgattgaagtctccatttttactgtcttcttgcgattcctttntctctctccaggaatattttctcataaatcccaacggtataaatgtgaggaattgaatttttaacaacatatcaaaatttcataaaaatccaacagttaacgaaaccgggattatagttttactagaacggttttgggtttctacgggaaaagagagagttatggtgagaagggtatttctcttagctccgacacgattttgcaattaccaacggtgagattggttggaaatgagtggtgcaacatgtgattaaatttcgcaatgatccaacggtgaatgattccgagatcgtcgttttactgagacagantttgtgggctgcgggaaaagaaaatgttntgaggaggatgagagggaacacgaaattgagaggatg

SEQ ID NO: 267505 - DNA, 435 bp, Glycine max
gcttggcctggactcttgaaatttatttctttttgttccattctaagtgacaaaatcacagctgcaaacttggcccttttagatttatcaaacaatcaaatgaagggacgacttccagattgtttgaaatctactgactcattactgtttcttgatttcagcaacaataagttgtcagggaagatccctacatccctaggaatacttgttaagttggaagccttggttttaggaaacaatagtttgatgggtgaattgccttccactttgaagaattgcagcaatttaattatgttggatgtgggtgaaaatagattgtctggtccaataccatcatggattggagaaaatatgcagcaactgataatcttgagcatgcgagtgaatcacttcactggaaatcttccttttcaactctgttatttgagcatattc

SEQ ID NO: 267506 - DNA, 420 bp, Glycine max
  unsure (1)..(420): unsure at all n locations
ataagaactaatggccattcttcctttttcataccttgaaaaactatattcaaatactcaattatcaaatagttatagcataaaaagtgaattgcaaggtgactagctattaaaaacaatatccgtaggtgtagcaaagagtttcagtatgaggatgaagaaataaatacacacgaggaaaataatatgtttcagcagaaagatagagtgaaattctgttgaaagtttcatataagcatatgaaccagatcacctagaagcatgggatatcaaagctaaatatcatgtgttactctaaaacaagggcacgggcattaaataaaagagaagctttataaaagtagacaactaanattgtaaatgaataagggaacttaccctccatccaggtgttctttaaatactttgtcaaatgctcga

SEQ ID NO: 267507 - DNA, 390 bp, Glycine max
  unsure (1)..(390): unsure at all n locations
taaaatctaattngggcagctggggtcaaccatgccacgaattctgctaaagtctttcttctgcgggagttgaccatccttgaaaaaaatgggccaaggaaccaagaggcgctaagcaaagtggcgtccttggaggtagaagttgcctaatgtagggttactgctctcatggtttggaaagaggagtgccctaaggtatctagtgctaccgtcgcctttgttgaaactgtgaagttgaaccacgaactgtcttccaggttggcaagtgtttggccaagctgttgcgcactatgttggatggtaatcgtaacgccttgaaattntgctaactataaatcgatgttaaatgtatttatcatgttatttgattatatgattgactcggatgag

SEQ ID NO: 267508 - DNA, 472 bp, Glycine max
  unsure (1)..(472): unsure at all n locations
tatatctctaattgattntttttacatagcttcgaacttaagtatcattttttttaacacatatttaaggaatatgggtatcagcttatcagaatatgttggtaaaatgaattttgtctggtaatggaaatcgaattttttaattcacaaaaaaagacccaccctaattgataaccaaccaaaattaattaataaaaagtagagattggtgcactcaccaaataattgagataaactcttgatgcccttgattattctctgtatgccagcagctacattgggctttggtagaaccagaaacccagaaggcttgcctctcttcattntagccttgatgattgatctatcttgtccttcttgtcttccttgcataacgaatatctcaaattacagatagcactccaatcacttaacaaaaaaaatgaatagagagatagatattaattagatagagagcagagagagactactt

SEQ ID NO: 267509 - DNA, 381 bp, Glycine max
cagcacttgtgggtgctggagcagtgcaagtcttaaaaagaattgctctagctaataaaacacactgggaacgagctcttcttttactcaagactttgccaccgtgatgagttcaagggtgtaaatcttgaaacacgttcctccgtgtataatgcactctttttttggtacaattgtataatctacttaatttatgtgtaaaagaaaatctttacccttgtaagttattttataatgcaatacacaaaagtctataatcaatattctatcccaacaagttccctttcaaatatcaatttcaatttcaagtatcaaatttaagacctgatacttaatatcaatttcagttccctttccaatattctatcaacaagttatatt

SEQ ID NO: 267510 - DNA, 346 bp, Glycine max
  unsure (1)..(346): unsure at all n locations
acacatagaacaaacactaatgtcatctgcccccttttctccttcaccaaaaccctcattaacataaaaaaccatgctgttntccctgttttctacaatgttctgttcctctacaggatgatcaagctcaaaatcatctctgtcatgatctgagtgatgatgtccttcatcaatctctgcctcaactccacattcagtgatcgaattctgtttctgggaataatccaaaaccctcaaagaaggcttgtctctaacaaagttgacaccacagcaagaacacttcanaggcttcaccccagtctcaagcaccttgttattatcatcagcatcatgtatcatacccttt

SEQ ID NO: 267511 - DNA, 455 bp, Glycine max
aacaataacctggaaacacattcatgttttctaggtcaaattgtagatatcaatagttgtatatgatcaaaggcatgatgctagtgatagtttaagtcaaggggtagatataaaaaattacacatgacttaaggatcatcaaaagatgaaatgttgtgacaacaagtgaagatagacgtgtctacaaagttgagaagcacacactaggagttgtaaatatctacgtcatgtagttgtaaatatattcaaaaggaaagaaagctaagccctacattagcaaggcaaccatgaagaagaaaagtagtccttcacaatctgcaacaatcaagaaaagatcaacaccattctgcagaagacttcctattctaaacaagtagcatgccttatgactgagctggaaaaaaggagaagtcatgagttctaagcaaacaacaggcaccaaatgatacaattca

SEQ ID NO: 267512 - DNA, 395 bp, Glycine max
  unsure (1)..(395): unsure at all n locations
agcttggagcggtaacttgcttcatatcttttattttattacnaggcngttttacaaagatttcttgacaaaagaaaggcttctacatgtagtggaaaacacttaattaataaaacaccaatatgtcaagaaaataatcctactaataggttacaataacatggaacacaacattctgtttattagttaacaaattaaaattgaaaaagaaggcgaaaaacataaatatcacatgtgaagtgtgtacatttaattttgtccccctatgtattattaccatcattatttgagcgtnttactatgattttatttatttatccttttttgaataaaaacagtaaaattatgattgggccatctagtccaatatgaaagaaacaataaggaaattggtc

SEQ ID NO: 267513 - DNA, 460 bp, Glycine max
  unsure (1)..(460): unsure at all n locations
gaccttagaaactaagctntttcttcgaggccatcatgcacatatccacnattattcatgtggaagaagngcatccttaatttcaatggtacaaaggctatctgatgacccttgtgccgactcaccatctttccatatagacccattgtaagaagcagcaatgtcttcagctcttctagtctccacacatttaatctgagaaacagaagtatagaattccaatgatttaaaatagctagcagaagaaaaataattattgcagctttaaacaaactggacaaaaaaaaaatcatttttcaagctatgggttcctctacatggagttcagtaagacaacaatacattattgatagtagaccaatgcacagatttaaaaaactaagcaactagtaacaataacatagaccacataagaaactctatactggaaacacagtattacttgcccaagtaacttata

SEQ ID NO: 267514 - DNA, 461 bp, Glycine max
  unsure (1)..(461): unsure at all n locations
taagcacatgatgaatgactntncattatatntttaattttgtataaaccaatactatnggaaaagnttaaggggtgtattcaattaagattttaaaggattctaaaagtttttttctataaaaaattcttatagtattcaattaatacttttaaatgataaaaataaatcttatggtattcaatcaagactattaagattttttaaagaatgtaataaaattcgttaatattcaattaagattttttacaacttataaaaagtcttctggtattcaaaagtcaaataaatttgaatggatgctcctctggtgtgctagttatcgtgcccatggtaaatgctggtagccaagtgcggaacggataaccgctaaaagcatctaagtagtaaacccaccccaagatgagtgctctcctattccgacttccccttnttctaccgatttctttntttttctctct

SEQ ID NO: 267515 - DNA, 425 bp, Glycine max
  unsure (1)..(425): unsure at all n locations
acctgaggcatgcnagcttangtaaacagatagattttaattctcttcgtgaggcgctctggaaggccgaatagtctgattacaccggtgaattatggatggccacaggtggatatgcaacttccttagttatttatatctatattcttgttgaaaaccattcccaaaatctgtttcttatcatgtttgaaacgacaatgtaaactctttttggccataccatgtcaaatctcctatcggaaatgtcagataaccacaatatctgaataatggccattctaatgaatatgtcggaggatgattgaaatctaatgtgaatctttgaagaaaaaagacctaaagctaagagatttccgtgtggctttatataggctgacatgctttggtctattntaagcgaacttctaccgaaactaaactaatga

SEQ ID NO: 267516 - DNA, 456 bp, Glycine max
  unsure (1)..(456): unsure at all n locations
tcacatcttcatggcacacaccctcagaatgtcaactttgatcatgttgtaagcattaacatcccactaaaatgtggtggccggtgatgcatcatagcatggatagcagaaacccatcagccactcactatactcagcgagtatgaagaattgaaggcaagaataatagagcttgattcaccagctagaacatatttacacggaaaaaccatggcagaacaaatgctattaccaggcatgccatcaagaagttacaaaatggctgtcctcgccagcatccaccaaacctgtgggatgagttgccatcgtcgtccatgaatcttctttcattccactnttccataaatccataattagtaacacccgaaacattntctgcagtctcaccacatatttcacataaccctgtggtaataaagtagctaatatcaataatctatttgataatagataata

SEQ ID NO: 267517 - DNA, 418 bp, Glycine max
  unsure (1)..(418): unsure at all n locations
agcttcctcggggccattcctgcgatagttaaatanttttaagcgagattacaagaaataccacaatcattacaaacaagggccaaacaacacttctcatggcacgagcgtcaacatgcactttataaaataatcatattggggtcgcgctattttatgacacatacgtatttgcacacataaaaattttgtgtgaagcattttacgacacctattcatgtacatattttttgacaaaccttttcatgctacatcctatatatatatacacattttttgaaaggcttctttcgttacctactcacaaatacacatattttgaaaaacacttttacgctacccatccaacactttgtaaggcacttcatgctatatatattcatattatgcaaggcattctctcgctatatatattcat

SEQ ID NO: 267518 - DNA, 438 bp, Glycine max
  unsure (1)..(438): unsure at all n locations
agcnttaatggaggaagagaatgttattatttatagagaggggtgtgggaatcgaatgagattaaggagagaagttgaactttgaagtgtgtctcacaagtttctcattcatcaaagttatcacaagtgttacacatgcttctatttatagccttggtagcttccttgagaagctagtgctacacccttccaatagctaagctnannncatgccaaaatacatgaagaaagaaatcttccttgagaagcttccttgggaagtaagtgttacacccctccaatagctaaactcacccccatgggaacacacacccctccaatagctaagctcacctctccccaaatacatgaaaatacaaaataagttcttactacaaagactactcagaatgccctggaatacaaggtaaaaccatatactactatggtacccttaac

SEQ ID NO: 267519 - DNA, 445 bp, Glycine max
  unsure (1)..(445): unsure at all n locations
tctatggaggctggatcattgagcttcaatgaggtcctttaatggtgattttctaccatggagatgcagcggaagacaaaggagaagaggtgagaggaggcgccatccactagggaataagccatggaagaaggagcttcaccaccaagataagccttggataagaangctggagaggatgcttcaatggaggaaaagaaagagggagagaaagagagagtggggagcacgaaattgaaggaagaaaaagggagagaagttgaactttgagttgtgtctcacaagactctcattcatcaaagttacaacaagtgttacacatgtttctatttataaactaggtagcttccttgagaggctttcttgagaaaacttccttgagaagcttctttgagaaaacttccttgagaagctagagcttagctacacacacccctctcataac

SEQ ID NO: 267520 - DNA, 301 bp, Glycine max
  unsure (1)..(301): unsure at all n locations
atcagggaactagaaaagatcattttcccctgcctttcattgatcaaatgcttgagcgcttggcaaggaaagtctcattactattttcttgatggtttttttggttatttacaaattcatattgctcttgaggatcaagaaaagaccacattcacctgtcccctttgcagatttgcctataggaggatgccctttggcctatgcaatgcccttggtacctttcagcggtgtatgcttagcattttcagtgattntttacagacttgcctagaggtgtttatggaagaatttactgtttatg

SEQ ID NO: 267521 - DNA, 477 bp, Glycine max
  unsure (1)..(477): unsure at all n locations
gaccatagatactcagcttgattggagactaacttttaacctgtgatgttactttctacaaaaataaacacatgtcattaacaaaatgcggaaaaacaaaaatcaaattatacctccagccattgcaatgaaagaagtgtcttgttttggttcttccaagctctctctctttctctttctagatggggtatcagatgaattggaagagatgagctcagggaccaaatacatgtgctatatataggcattctacaatcaagaatgcatttagtagccattaccactcattattggtcattacaacccatcagtagccattcaatttggcttctcaattccaaaactgatgagcctttcgttttccaaaatgttaagagcaaaattattacattctcccacttggtccaaacattntgactcaatgctcaatcttcttaagaaatgaatatacaaatcatagtgatagtctcttataac

SEQ ID NO: 267522 - DNA, 272 bp, Glycine max
cttggagacatctgtttccctgaatggaagcgccatggcaaagtatacttggtacctgtcttctgacagtctggtatgtagatatatcagtcgcacgaggtcatgtccgattggattaactcattctccctcatttgccgatttgtgatgacaactgctggttgataacctatgatatcttgatgaccgggctaatctatatcctatctgatggtataagcatgacaccaatcctagaaaaggacatacatatcgattcttacgacaaattc

SEQ ID NO: 267523 - DNA, 450 bp, Glycine max
  unsure (1)..(450): unsure at all n locations
acctgcggcatgcaagcttcttgggccattcctaaaagatttttttttgtgtgaatnagntttaccaagaaatgctaccttcaaaacaaaaatggcatgcaacctcctccaataaacacaaacatcaatgtaaatttaaagcaaactcatgcacatatttccttacgaacatacattcacacaagatattctgctaactaaaaattgcactcatgcacaatcaaggaatcttcgttacctagatcacgtacatgcacttccaaggcgtatttgctacccaaatcacatgcatgtcctttgctaaatttacatacatgcatactcaaggtattttggctaccgaaaattccacacatgcacattcgggtatttctaatacctatacataacacaaattcgtgaggaatcttggctacccacacaataaagagctacatttcatgcttattc

SEQ ID NO: 267524 - DNA, 397 bp, Glycine max
  unsure (1)..(397): unsure at all n locations
tcatatctagtcaaggtctgagagaccatacaagtttcctaacgatctctaattatgtgggccattaagtctatcatatgctggcaatagccgagaagcccatgaatctcttcgggggcggagtatgtgtctgccatcgccttggccttggctaacaatcggtgaagttcttgactcccgttcaaggtaagagcaaaccgatccatccacatggctgcctcttggagtaaagagtcgatcacccttcctctagcctctttttccgcgtatacttgggcatactcatccgcgattctatgctcgtgggccgaggctagacctaactcttcttggactnggcatgatagctaacatgttggtctctgtctcgcataaacgctgagacaagcttcttttg

SEQ ID NO: 267525 - DNA, 442 bp, Glycine max
tagcttgtgacattcacactctttcagagttgttttttgtgtgtgtgtatgataaaggcgttagctaatacatgggttgctaacatatggcgtgatactgtgattgttgtatgaaaattggggctcgttgctgatactaggagttgattttattctgcaatgtggcacacgatggcgcctccaggggaaaattctgattagattatacgtggcggtttgaatgaatttctgctagatccttgacaagcttggatggcgactggggtgactcacctcacaaatgctctatttaggcttcaatgtgcgagagctaaagttgttttgtaattgttgcgcgaagttgaggaattccaatttacgtctttttgagtgcctgagaagaagacttgggtggtgttattcaatacaatggtttaccatggtgtcaacaggatgtcaaaac

SEQ ID NO: 267526 - DNA, 325 bp, Glycine max
  unsure (1)..(325): unsure at all n locations
aacgtcggaaaaaccgaaggaaaccggtcatgaagaatattccagattcgggagttgtatttatgtttgaggaaggtattagcacctctcacgtttgtcccaaaggacaacagccttagattaggattgtgtgaaattatgtatttaaacctttatttctttnttatttttgaggtcgacaaaagcggngctcttcctcctacgtaccctccatcgaagaggaaatcagacctacgtagttctttcaaaaggcagtaaagtgatgtgttaattntatgcttttgaacggtccatgttaaccgataaaagtaaagaggaccgttta

SEQ ID NO: 267527 - DNA, 437 bp, Glycine max
  unsure (1)..(437): unsure at all n locations
agcttgggcaacatatgagcatataagacttttgtctttacacaatcaangnataaataattgggttgacgaatccagtgtatggacgctggatttgctcacctcataaaaatcttgtccctccgtttttgcaacggtaatttctgcctaagtgcccgcgggattgaacgggcaccattgcatgcgacttgaccggaggcgcagtcagcagtggcgcagtcagcagtggcgcagtcaacataagagaagatgtgtgcccaattaatacctggtagggaaaacattgaggcttagtctgtccaactaacaccagaagaaatgacagaacttgagtccttngctggtgtagatgctattggaaaaatatccaagtcccacatcacctatccagctttcanataaacatcaaaatgatatggaaaactgctagctcaaca

SEQ ID NO: 267528 - DNA, 293 bp, Glycine max
  unsure (1)..(293): unsure at all n locations
tgcaccactccatgtgttgngttgtaatcgatcataacttcaggaatttgaatagcaaagtaagaaaacatagcagcataatttcaagagtaacaaataagagaagttcaaaagatggtcactagctgatatgttactcctttntaactctagattaacaaatgtatgaatgtcacatttctattttactataatgcttgttagtgaggaaaaaaatcctagtctttcacgtaacaacttaagctttaccaatgctaacaaaattagtagtatgataatgccatacaataacc

SEQ ID NO: 267529 - DNA, 266 bp, Glycine max
aatctgatactggggacagatgacgcacaggaagtcacgacaacacacttcagaacaagcaaattgtatgcggccccacgaacagattcaaacaagtaaacaacacacgagaatgggtaaccccgttcggagcaaccccacctacatcggggggctaccaagccagggaggaaatccactctcaatagagctcaggcaaggactaacaacccctggttacaaccttctcacccaaaccctacccgtgcgaactctacctaagaccc

SEQ ID NO: 267530 - DNA, 433 bp, Glycine max
ttgaaactaagcttctatttaattacgaggggctcatatattaccggattaatcttctattcgagcgaaaaggcatcggcatttgatttttctcagagctttacttttcaatttcgagcctctcgatatacttcaggacacaatccgacacccgagtccaaagttattggcgttgaatttgcttagaacttctgttatcaattacgagcgtctcgatatactactggacacaatcggacatccgagtcaaaagatattgtcgtttgaatatgctcaaagcttctattttcaattacgagcgtctcgatatattacgggattcaatcggacatccgagtaaaaagttatcgtcatttgaattctctcagagcttcagttgtcaatttcgagcatttcgatatactacaggacacaattcgacattcgagtcaaa

SEQ ID NO: 267531 - DNA, 380 bp, Glycine max
  unsure (1)..(380): unsure at all n locations
gaacatgaggtcctgagagtgacggccaaaattgagatcacccattgaggtttatgcatcaagctaatgactttaaaagagtgcttcctgggaagcaacccaatgctgacttctttcattctattnttcatgcattgcataatgtggaatttgcttgataattattgaaaaaaaggatatcagcttataacgagtcatagatattggaggctatcttaaatgtttcgaggaaatggactgaaaatcacttaaaagacattttcatgaaaatagtccacttgctaagcgcataccacctcgctgtgcgcatcttttccatgcgctaagcgctcaaacccctgcatctcaagctgatttgttcactaagcttgacatggttg

SEQ ID NO: 267532 - DNA, 457 bp, Glycine max
  unsure (1)..(457): unsure at all n locations
ntgatgcaacatatggagaggttaatgaaacaatgagatatgcgctccatgagaggttggatcaaatggagaatagagatcataatanagaagaaaggaggagaagagggaatgatggtgttcctagacaaaaccgaattgatggtattaaactcaacattcccccctttaaaggaaagaatgatccggaggcctacttggagtgggagatgaaaatagagcatgttttctcatgcaacanatatgagagggaccaaaagatgaagcttgccgccatggagttttccgactatgctcttgtgtggtggaacaagctacaaaaggagagagcaagaaatgaagagccaatggttgatacatggacggagatgaaaaagatcatgaggaagcgatatgtgccggctagttactcaagggacttgaaattcaagctccaaaaactaacccaaggcaacaa

SEQ ID NO: 267533 - DNA, 293 bp, Glycine max
agctcctgactcccaaataggcggaacacggaccaaaactatattccaagaaacactaataaattggaagaacgattttcactataacaccctacaaggcccaaaaaaccaaatcgttatgtgtgaaccccacgataacataagaaactgaagaagacacaacaacacccaacctacaattaaaaacacccatgatatgccctcgaacgtgtataactaaaaactaaaagaaacaagaaacttaacctaaaatttcacaacaagaaggtattgccaaaccacaccacaatcgt

SEQ ID NO: 267534 - DNA, 456 bp, Glycine max
  unsure (1)..(456): unsure at all n locations
ntataagatgatggttctgaatatggcgatctatgctatcttatttataaactcttctaacccttgtacagactcgtttgatagccttttcattactatttcttgtccaaatatcagtatgccccacaataaatcatatgcttaagatagacagtttcggaggaaaatagaagctctagatatcactttcattcataaccttgtatattggtcccagatcaccttctccaagattgtttatggttgaaaagtgttctgttacatatgctaagattgacanatcgaaagttggtacaccaatgtcttctatactgcttttatttttgttatggatgttggaagaattgcttggaacccctgattggttggacaatagaactataagaccattgacacaatattagcacttttaatatgtttttagcccgattgcacgtgttgattgatccatataat

SEQ ID NO: 267535 - DNA, 356 bp, Glycine max
agcttcttagtttcagatgaagcatatggttttttagctacctcatgcactcctctaatgactatggcatcatttctggcgctaaactgctgggagtaggaggccatcttctcaattaaatttctggcttcaacaggggttatgtctccaagggctccaccactggcagcatctatcatacttttctccatattactgagtccttcataaacatattggagaagaacctgttctgaaatctgatggagggggcaactggcacatagtttcttaaatctctcccagtactcatacaggctctctccactgagatgtctaatacctgagatatccttcctgatggctgcggtcctgga

SEQ ID NO: 267536 - DNA, 473 bp, Glycine max
tgcttctacaatctccatgttgttgatgatgacttcttcttaaatcaagaaacacacacacacactatttcctagtcgatcactcacataaatttccattctccccctttatttttgaatttatgcttctcttaaaattaagttgattactcatgtgagttcttgatttaatccctatttctctccccctttggcatcaacaaaaagccaaagtgcgtaacgagtttgaagcatacaaatacaactaagcatccatagaacattcatggaaaaatataaaccaaatcatgaagcaagaactatgaatagatcaaatatataataaccatagtcatatagcataattcataattgttcagtcatactaagcaaatattaaaaagaaataataagtgctcaaatgtcataaaaacataaccaaatacaaggattaaaatcaaaatataatacttaaacaagaaaagagaaactta

SEQ ID NO: 267537 - DNA, 441 bp, Glycine max
  unsure (1)..(441): unsure at all n locations
agcttttacgctcaggcatgtaatttatgtattcttattgtaancaattaaaacataccattttaaaaccaaaaacaccataaacacttaaatggtaatctattaagacatcgggtaatcgattaaaataaacaatgtttcaaaactaataacgcacaacaagcgatggtaatcaattaaatcaagggataatcgattaaaacaaaatgttttgaaaattgatcataaccataaacacgtagtaatcgattaatacgaatgcataatcgattaaaagaaagaagaagcgaaataattaagattagcacgttattttcagaaaataaatgactaaaaaaacacatatctattaacttagacatttaagagaaatcaagagatatagattggcatatgccatagattacatgcactaaacacaatttcattcttactaaatca

SEQ ID NO: 267538 - DNA, 461 bp, Glycine max
  unsure (1)..(461): unsure at all n locations
tgagatgtcctaactatgccatggtccatatgagtntaccatggccattgttggaaggtgaaggtgctgaaggcttangatgttgtcaaacagtcacgtccctccttatgaaattgaccatagccttgctaaagctgaccacagtcgtggtcattgcaccatgatcgttatcaagtgagaataacatccaattctcatgacattatgcatcttccaaatttttcatttaattgagaggttgtattttgcaaggtaaaattagtgttcaaatgtgagtttttccaagacaatgcatganaataacacanatatcactcanaatatgggttatcatccatcatcatttatttaataagaaatgtatntggttaactataacattagtngagaatatttttttatattcgtgggataactaagacatatgtttggttaaatatcttttctacgatatatatata

SEQ ID NO: 267539 - DNA, 307 bp, Glycine max
gacctgaacgcatgcaagcttggagatatagccctttgatatttttttgtttaacccaaaaagaaaaaaaggccccagcgctgaaaccatcccaatagctcatggggaagatatttatcaatcctacatactctgaattatgccacttcaatattaaatgccctacattatatattttgttttactaactattgtcccccagacacattatttaaattaaaacctaacagtttcattgaaaggcgtaacactcaatgtgactatatataatggcaccccttagtacgtaacaattaaaaattcttat

SEQ ID NO: 267540 - DNA, 460 bp, Glycine max
  unsure (1)..(460): unsure at all n locations
tcgatcctcctttgcctttgatcagagaaaatatatnttattcgttaaaatatacattnttttatataaaaaaatacgtttttgtttcctctaactcagatacgtttcacttgattagtttaaaattttaaattgtgtgagttatttttttcttcaaccccacacaaagttggtcctaaaacttctttggaccttttttgtaacataatacagaatcgcaaagttattttgatgcatgtatactgctaatatttctttattgcaagcaacttattggtgcgtagagtctaataattcatgattcccattnttatttaaatattagctagccgtttccacataagaaacttaaatgtcacacaagattagcaagtaaaaataacccgtttttcgtatactcgtagaaaacatggaatatatatatactggtgatatgtagttatcatgtacccttcagtct

SEQ ID NO: 267541 - DNA, 343 bp, Glycine max
tctgggagcggagactcgaaaagaaaacagtgcctattgagaggaaaaaatgttgttttcataagaatgaaacataaaagcgctccggtaactaaaatatcctttaattgatatagtaccagggcgtaagattaaacatataaaaaagagaagttgctgaccttgggaatggagccaatggtgcgtaactcctctgtgtctcccaacctcagtctagagaatacctcatacattaggcgacctataaaattatgatatttaaatatgtgagagaggtatacatagaaaggttaagacacaaaatattcaacgaacctataattattggccaagttgacataat

SEQ ID NO: 267542 - DNA, 465 bp, Glycine max
  unsure (1)..(465): unsure at all n locations
tcaatggagcttacatcacanagngatgtctctctntgtatatttnttaatggatgcaaaacatgatcaatgggagcaatggaaaaaagaaacaaaggaaggcataagtcacatcttcgacctcactcccaaaggagagaaaatgaaagaaagcctcaagaggctaacattaaccctccatactttcatgggaaggacaatgtagaggcttacttagattgggaaataaggatagagcaaaaacttaaaagaaagtctactttaaaatcttatggatctcattcttatccaaagaaagaccaaggtctaggcatcttaggggcagcaccttctaagcccaaagatgataaggggaagacaatagaaaaacaaccccctanagctagtatgcaagaaaagactagctctataaagtgctntanatgtctgggaagaagacacattacttctcaatgccccaccgag

SEQ ID NO: 267543 - DNA, 438 bp, Glycine max
  unsure (1)..(438): unsure at all n locations
ccaagcgacgcagcagcaagctgataggcgagngaaacagccttatttttctttattataaggcactccaatgaagaaagagaaatcccaaagagaaaacgcccgattgattttccgctttattctactaaaagacggccggggtcattattatatcattactacacctcttttgttgatttccaacggggataccgcacgaccgaacggtcggaattcattttaaccgaagttaacaaataatacaattcaaacgagcggcgaaaatttattttatcattaggccaagcgagaaacgacttaaataaaatggctcaagcaccgcaaaaggggcgataaaaaggaaatgaaacgagaataaaaatacacgaaacacaatgtggaccaccacgggtacatagaatgaaccgaaagcttgggccgaggcaccacccgtcg

SEQ ID NO: 267544 - DNA, 424 bp, Glycine max
  unsure (1)..(424): unsure at all n locations
ttcaaccaaattaaaaactataaactgaaatttaaaagctgaaacttaaacataaatctaaagactgaagcataaacataaatctaaagactgaagcataaacataaatctaaattataaaatgtactaaagacatgataataataaaactgttcaaaacacagggaattaaaaatcctgatcctgccaatgatcctgtgcagagtctatggcatgctcattcagatccagtgcangagtgcctgatgatgaatcctgaggaaggggtaggtctggcactggtgcagatgactcangctgagaagaaacatgtccagcactgtagtggaaggctctggtgtcacttgtggggtagctgctactagataagtctaaaaaatgaaaggctcgggtggagtgggctctgaggcctctagaatgtcat

SEQ ID NO: 267545 - DNA, 403 bp, Glycine max
taaaactcatcaaggtggaaaaagtactctaatcttctaatgtttacaacaacagtggaaacaagttaaatctaattataggaagcagaggattaaaatcatagttaaatgaaatgaagatcataaaatgtaaatgattatgtgcaattcacagtacagaatcacttcataaaatgtaaatgattatgtgcaattcacagtacagaatctcgacggagaaatccacaagttcataaaaaaaactaccgtaccccattgctcggaggctcctagctatgtgaaggagaaatccacaactccatagtttcaacaaaaaaagctatagaattttactattttcttttgggtatagtatcctcactggagggtcatgggtagcaatcctagaaacagaatttcactt

SEQ ID NO: 267546 - DNA, 443 bp, Glycine max
cctgaggcatcaagcttaacattaatttgagcgcgcattatatatttgttactcaaccggacatccgagtaaaaagttattgtcgtttgaataggctcataggttcaactttcaatttcgagcgtctcgatatattacgggactcaatcagacatccgagtaaaaagttatcgtcgtttgagttggctcagaggttcaacattcaattccgagcctcccgatatattacgtccctgaatcggacatccgagtaaaaagttattgtcgtttgagttggctcagaggatcaacattcaatttcgagcgccccgatatattacggcactgaatcagacatccgagaaaaaagttattgtggtttgaattggctctgagtttcaacattcaatttcgagcgtctcgatatattacgggactcaatcagacatccgagtaaaaaggta

SEQ ID NO: 267547 - DNA, 370 bp, Glycine max
attcaaacgacaataactttttaactcaatgtccattgagtcccgtaatatatccagacgctagaaatttgatgttgaactatgagcctatttaaacgacaataactttttactcggatgtcttattgagtcccataataataacgagacgctcgaaattgaatgttgaacctctgagccaaagcaaacgacaataactttttactcggatgttcgattcagtgacgtaatatatcgggacgctcgaaattgaatattgaacctctgagcaaattcaaacgacaataactttttagtcggatgtctgattgagttccgacatatatcgagacgctcgaaattgaatgttgaacctctgatccaattcaaa

SEQ ID NO: 267548 - DNA, 310 bp, Glycine max
ccaggcattccaagaagaaaccgctcagacagtacaaacgcaacacacaatgcatcctatctatggcatccgtgtgaaagattaagcctaacaagaaacacgtgcttacaaagaaatcgacaaccaattgatgaacaagaaactgccgcatcttctaaatggactctacacattggagacggaattatcgggcatgaaaacgatgattatgctacagttgaaattctcggccacctgctcataactgaatacgatgatccaatcaatgctatagtcacaacaacattcccaaacttatatcagcaccaca

SEQ ID NO: 267549 - DNA, 353 bp, Glycine max
  unsure (1)..(353): unsure at all n locations
ataacattaatctaaacttggtcaaactggaattacacctaaaattccaccgaatcaaaaatttgacttctcgacacccaaaattaccctagaaatggctctttgttcactttggtcatttgtttttctctctagcacagtccaagctttctcctaagtcctataagacatttcaagctaggattaactcactttaatctccatttaccacagaatccagatttaaccttccaactctcaaagcctcactctttttccactcacaacaccacattctcactttctaaccctaggttaactctacccttcatctctaacagtttccataggcaatntcagcacataaacatcac

SEQ ID NO: 267550 - DNA, 292 bp, Glycine max
tttctttgatagcccttttgagccttggttcccttttcttggtatgaagctcactacaagccttaagggaaaaaccatgaatattaccatatccttaaggaattctggagctttggaattgttttgggaataagtgggggggggttttggttcattggataacttgttttgttgactatgcttcatgatgtattttgggccatacttgatgtacattgtatattggctaaatgttggacatgctgaatgaaatgttgtttctcaaaggcaaaaataaaaaaaaaatttcgaa

SEQ ID NO: 267551 - DNA, 405 bp, Glycine max
  unsure (1)..(405): unsure at all n locations
tggataagatataacttagaaattntntcactcatncactcactcagcgcgccctatgcgctaagcgtatcattgtgcacgtgctgagcgagtcattactcgcgctaagcgcaccaacccctacttattggttgatgaagcatcgcttagcgagccatgtgcgctaagcccataaacctactggaatttcatcttttggaaatgggctaagcgagtcatctcgctaatgccccagtgcgctaaagcgcattccctctctgtttgaccttcatgtgaattggcccagtaggtcaacctggctagcccaaatccctttcgggtttggaattgtgctaagcgagcccatctcgctaagcgcgccccactactacatcaggaaagcattaattcgctaagctggcacat

SEQ ID NO: 267552 - DNA, 439 bp, Glycine max
  unsure (1)..(439): unsure at all n locations
agcttaagctccttaactgcacattgcnctaatatttgaagaggatccttggggaaccttcacctgacgaagacactgacaaaaacttatcttctccttcttggacaaagtatggcaggttgggggcaagtaaattttcttcccatcagaccttggatgcaactgtgatcttatacccatatcagctagatcttgacgggtattcaagccatccttcgtcttgccttgaatgttaaggagcgtcccaatcacactgtcacaaacattnttctccacatgcataacatcaatacaatgtctaacgtcaagatcacaccagtacggaagatcaaagaaaatggacctcttcttccatatgcaactctgacttttatccttcttttgggtcttnccaaatacagtgttcaggtgttgaacccgctgatatacctgctcacca

SEQ ID NO: 267553 - DNA, 490 bp, Glycine max
  unsure (1)..(490): unsure at all n locations
cattacggaccttagatactaagctctcattatgtccttcaactctggcattntctgcatctaagttgcttcatatgttgccttcaaagctccatacattaagtctctaatcattgtccctcctccaaaccattatttgaagttgttgtacaagtgtgcctaagacaaaatctatgttgacctttctctcctatcatttctctgacacaataatccaacccttaacacaaataattacacgtgttaaataacattaaactaattaaatatgtacatcattaaataacacacttgcaatttgaaaaaacatacctttattgatatgataaaaggaccaaattatttataaggatcccatatatcttgaaaaagtagtgtcaagaaccatctccttgtgtccttagtctcgatatctacaacaacaaagcaagaggtagaatttgttcattagcatctctagcaacaacaactaacattattccaccaaact

SEQ ID NO: 267554 - DNA, 309 bp, Glycine max
  unsure (1)..(309): unsure at all n locations
agctttacaagactcactgccaatttagcctanttagttcagcaaatgcaacatgggcgcaagcaacttaatatagatctgcataagaaaattcccatcaccgcacaatttagttcgcaataaataaataacaaaatattgcggcataatgaagaataattattaaataaaacaaaagaaaagacacattgtgctgcattacttggcccagacaatattttcttatagaaaatgaattaaattactgattaaaataaaaaaatacttttagagagaataacatacccaagcactcagattactgccccc

SEQ ID NO: 267555 - DNA, 446 bp, Glycine max
  unsure (1)..(446): unsure at all n locations
gggaacatgagctgaagcatcagaaaattcttctttnatgttagatgctgcggngaagcttgattgctngattgaaacccatgactganactcagatgctaggccatgataaacttcctcagaccaaaacaaggagggatcctcaaattcaggtaacaacacaatggagctggccttcaaaatgattagtactgattaggagacaaccaattgttatgacattaagtatttctgtgcaatttacttaaatatccttcattcctaaatggtgtgttatgtttgaataaactttgttcattgttttattgagggataagtttgtaagtttgttgaagtttgaggatgtttatattttgaccttttgaaatgcanggacttggaagttttagatatcacanatggatcttccagatttcctgacatcagaaaaacanatggaaattctg

SEQ ID NO: 267556 - DNA, 442 bp, Glycine max
  unsure (1)..(442): unsure at all n locations
agcttctccagcttctctggccattatcatacttattcctcnacagaggcagaaaaacactacctagaaagctagcatctctctctacaataattgatagaattggcaaaaaaatatggatgcatactttctttaatatctttaccaacagtacatgaagatgttgaagttgaacaacaatctattttctatgcaagcgaggcagactataattgaagactaccacagcacaaaagtgaaaaatagatgcgtccatatgttagctgatagaacctaaggcaatccgtttgcccaaattcataagcaactgtttccgtatgtgaacattattaatgcatactataagcaatactccacatgcacttatttcaacatataatctaagcccgtttcagatgcgtttaaaatattgtatttgcataaaaacttatcatactaacat

SEQ ID NO: 267557 - DNA, 456 bp, Glycine max
  unsure (1)..(456): unsure at all n locations
ttatgcttaaggtacttctaatgtttcttttgtttanatggactggccatgacaggtttatcatgactgcctttgacctttgtaattgatattcgattgtgggaggtaattctgattggattaactcaccatccttaatttgccaatntgttatcacactttgttgtggatcacctatgatgtcttgcttccacgggtaatctataccctttttgatggtataagcatggaaccaatcaaagaaaaggacattaattttgactcttttgacaaaagcatagaatttgtcttggatttgttttttgtttgaacccttaaaatgttgaaaaaatcatctcctttaaggttcattctccagagaataaaagtcttttctaagggtttccttatcaatgctaaaatngtcagataatatcataaggttcatgcataganggaataagtggagattggatc

SEQ ID NO: 267558 - DNA, 375 bp, Glycine max
atagggaggccacatggtttaagctaaaccgacgtgctactagacatgaccgaataatgaatgtctatgtggcaagggcctacataatatgtgttggttagaaccctctcgagttatttgccttcattattgaaggatactttatttgatcggagtccacaaccgttcaaggtgttatgattgttggttgcgggatcagaagtccaacaatatgtcaagatagaatggtggatatgacatgcaaggatgacatgcctttgtactaataatgaaactgataggtttgaatgagaaattgaagattttaaatatatatcatttttttgacttacaaaaagatacataagactttgtgggaacatgagtatcttgata

SEQ ID NO: 267559 - DNA, 477 bp, Glycine max
  unsure (1)..(477): unsure at all n locations
ttcggaccttaaaactcagctgtacattctaacaaaaaagcctgaacattagttttcattcataaaatactttctagatttcctcttaattcaaacaatgaaacaaaataacagtctcataaataaaataaaaaaggttgttttaaaccttcaattattgaactcgattttacttcaagaaacatacttttatcacttcaaccaatgtataaatataaaaacattatcattttttcaattaaaaacaagaaaaaaattcgtcaatgtatctttattaatgccaagtgtatgggtatcagttgattacgtaaaaaaatatcatttattatcaaattcatttttctaaactaattagtataacttatataaattntaatatatgcatatattaattctaattccattatctttatattagttattacttttacgacaataaatttattacttttatatctaagcagggacgttcaaata

SEQ ID NO: 267560 - DNA, 396 bp, Glycine max
  unsure (1)..(396): unsure at all n locations
agcttgatcaaaacaattatctcattattttaatctattcaaatcatacaatngctcattcaaatcattctcaaacactcaattcatgcaaaacaatccactgtaaatcattttcaatcaattcactgttcaaacaagctttttggtacaagcaaacaactcaaagtgctgaaatttaaataactggaatttaaaagaattgaaatataaaaactggaattaaaattactgaacataaatcataaataactaaaaataaactaaaatgttcaagatgcacaaatttaaatgtcctgctcttgtgcatgctcattaagggccaacacctgagcagttggacaatcctaaaagataggctgctctaactcatatgcttgtgtaaatggtatggcatca

SEQ ID NO: 267561 - DNA, 475 bp, Glycine max
  unsure (1)..(475): unsure at all n locations
gaacactcaagctttttgtacatctttgtatagatataaagctctttatacaccttgtataccttgagagaaaagactaaagtgatctgtttgtaagacgatcatcttttagtcattgagaaaacttacaacaaatcttgttgatttgtttagagccaactgttgcttggtaggacaaagaataatgggttgaattcaagctcgcggtagagcttgtctttgtaagagcctgaagtggcagtcaataatacttgtaacttttgataagttagtgaaacttagtgggttgatgggagaagtttagtacctggcactatggcccctatgcactcttttggggaactacaaggaaggatggagtaagcattcaaggaactattgatgggactncagtggtgatctctctaaccaccatagttgttgcatcttcatgtgctttggatggtctgaccatgagcaaagactangaaaatga

SEQ ID NO: 267562 - DNA, 424 bp, Glycine max
  unsure (1)..(424): unsure at all n locations
agcttcatacaattgaaacattgttttatatattgtacaccaggcatcgacgctttctaaaacctcatcacccttacagacgattgaaattnttttntaatggaagtcaaaagcacgaaactgcgccgataccgttgactggtgagcagggtttttatccggttgaacacctgaatacttgttttggaaagacccaaaagaaggattaaagttagacttgcatatggaagaagaggtccattttctttgatctttcgtattggtctgatctaaatgttagacattgtatccatgttatgcatgtggagaaaaatatatgtgacattgtcatgggacgctccttaacattcaaagcaagatgaaagatgggctaaatacctgtcaagatctagctgacatgggtataccatcgcaattgcattca

SEQ ID NO: 267563 - DNA, 417 bp, Glycine max
  unsure (1)..(417): unsure at all n locations
ccccaatataaaccaaatgattcccataaaattcctccacagcaagacaatctgaaatctgatacaaattccatcactttgcatgatagcaaaaaaaaatcccacatatatgtgaataaactaatgaattttttcttcttctaaagatcacattccactttccacacagattttaatctcatcttgatcattcacctcaagaactgctttgaaatctcctttgagaatgggtaagaaaactgcatagatagcaacaccttggtctcctcctccttcaatattagagccactgtgtgcttcaacaagcaagatcaactcatttaataaccaaagcaagcttatagttgctatctttatgagtctggggcaccattctctcatccaccanaaacatgtgccatttggatcattcaagag

SEQ ID NO: 267564 - DNA, 459 bp, Glycine max
  unsure (1)..(459): unsure at all n locations
ttagatactcagctggtgtctgtgatatgtagctgttgggataactctctctctaaatataaatggcaactgagcttgaaacattttaaagcatgtgctacattcaataggtgtngatggcgcctctttacttaccaaatttgttggggtcagtgtgggcaagaaaactggtgaactactcttgcattctgcanaaactcagtcaaagctaattctttagcattatcagaccgcatagccttaatgtttntggaaaattgtgtttgaacaagcttgaagaaagcttgtaatagatgtggtgcctcagacttgtttctcatcaaatgaacccaattgtaccgcgaattatcatccgcgatggttaagaaatatttcttgccatcatgagtgtcatgaggaaatggtccctaaatgtcatagtggatcaagtcancaggcgactcannaaaatattatgag

SEQ ID NO: 267565 - DNA, 293 bp, Glycine max
ttaaatagtcactactaaaaaagagatcttttacgacaccgtatttacgtcggttatacgaaaaccgttgtaataaataaagcggtggcattttcgtaaataataatatctttttaaagacgggtaccttaaaaccggcttaaaaaatactttatgagagcggttttaaaaaaccgtctttgaagtcatgcgttttttcaatttttaagttgacgtggcacgttataactgggttagctttaacaaccctatttcttactttttcttggatggggactcttcattgtcgtcat

SEQ ID NO: 267566 - DNA, 430 bp, Glycine max
gcttttctttctcaatcaaccggagtactgattttattttgtgaacgaacgcccacagtcttgagcgatttttgtgtaacatacacgctggctcagacttatgaaaagaaacatagtcttgatcatatccatgcattcagtcaaaaagtagtgtataacacccatttcacacaaagataaacgtgtgtcactgcataatcatcatgatcaagtaaaactgttgtgtatgcttcaaaacatgcgtactaactatgcacaaaaagtataagtatatacttataaacagaaaccaaaattactgaaaacgatgctctggacgtatatggtataatcattatgcaaaagcggatcatacgaattaaaattcctgaacagacctggtgcctttgagggggaaattttgtatgttaattatccgtgtatattgtca

SEQ ID NO: 267567 - DNA, 369 bp, Glycine max
gtgggtctgggtgctatttgcacccccatttttactaaatacacccccttgcctttttttggtgattcttttttcgtaaagttacggatacttacgaatttcgtaacgatacttgttgtctttacgtaatgttacggaaccttgcggattacataatcatccccttttttgacttacggaatgttacggaacctcactaattgtgcaacgatgcttccatttgatttccggtgtgtcacggaaccttacggattgtgcatcaatattttcttttgatttccagcatgttccggaatttcacaaattgcctaatgatgggtgccaagcacctcacaaggaccaaacaaaagttgcatgtcatcaagcaaa

SEQ ID NO: 267568 - DNA, 393 bp, Glycine max
  unsure (1)..(393): unsure at all n locations
tcacatgccgaaactccttgaaaaaaatggcccaaatcccctttccaaatctgatattacgcttatataaggggggttggtcgtgctcgtgcgcttaacgtaattctgaaccgcttagcgcgcattagtggattttgcttaaccgggcttttcttgctcagtgaatggactgaagcggtgcgcttancgggatgacccttcgctcagcgagcatgcacaactcatctttcttccagaatcttcctcgtgcttagccaaagattgttgtgctcagcggatggctcgctaagccagcaaactggcttagcgaaagggtgaaaatcagcacttcaaaacttgcctaattatcctgaaattgagagaaaatgattattaaacacacaaaatggaagt

SEQ ID NO: 267569 - DNA, 412 bp, Glycine max
  unsure (1)..(412): unsure at all n locations
tgaaaacatattaattattagcctcacatgataatctcccttggccttccttggttgccctctaaggcaaaaaaaaaaggtccataaagccattcaatgcctcatttaaatcttccttcgccaaactggtcattttggacaagaataagcatctttcttttctctctttcttggacaccaaatcttgtggcagatcgaggacatgtttcctttgtgttagaaagtatattgatattctttcttgttcacatgcatgtcttttgagaggtagtaggtgatacttttcattgtcctttctgtctgctctttctcatgaagatcccaagaatataacatattgtatactntataaataatcctgcatttagcatagattatgttntaaacttaagtttggtaaataatgatatat

SEQ ID NO: 267570 - DNA, 456 bp, Glycine max
  unsure (1)..(456): unsure at all n locations
tattgagatctgaganatgatctgtggcttgtgctattgttacttttgtctacaaacgtcgctcgaagncttattggtggctttcattgttctttacttccatgccaagcatgatctctggtttcacccatacaattgtgaaagaaaaattattttccaacccgtactaattaagttgcctttggggctgtattaggtgaacaattatagtatttattctccttataattgatagccttttgactacgatcacaccctttcctttgatttcaaaatcaatggacacaacaatggtgttgtgagtctttatggggccattctaaatttgcatcagctttatatagaatgactaatagaatccttatgaaaagagaatgtgagaggtgggccaaatcttacctttgatattctttgcgttgctgcagtaaatgaatataacactaatagcgtagcaac

SEQ ID NO: 267571 - DNA, 385 bp, Glycine max
  unsure (1)..(385): unsure at all n locations
agctgctgatttcgtagtattatgttttgtatactgnagnttgccatgatgtaagggcttgaagagaaatctttaacagagtcttggaaggaaaagaaagaacgaaaattttatattcaaattaagagaatcataaatttataaataaacaaaatattttaaaccctggaaaatgaataccattatcacaaaaaaaatgatgaatgaccaatttattctataggatccatcctaaaggatcaaatataacttttttacccggatgataacttaacagtattgctaaacaacaattcttttgatatccgaaataattaatctggccgaaccgcacaagacactgaaaggactacaattaaacagcaatttcttgcttttgattttt

SEQ ID NO: 267572 - DNA, 469 bp, Glycine max
  unsure (1)..(469): unsure at all n locations
taataatgtgataaactcatggacaaaatatctgtntcttataatttgaccgagtcatatatattatatagcacttacctttgacaccagttttccacacagtgttggtgtatttgagacctgaaactatgttattctcaacctggaaagtgaacattagcctataacgactaccctctttcaaagtaaaccataagcccttgggatttcctccctctggtattgcaagaacaatgtcaggtctatcagcagacttaattgcaaggctaaggatcttcacatttggctccagagtttctgaattattcacaatatacataataaattaggtgatgaaaagttacatagggaaagaatttcatgagagcaagttacaagacggaacaatggaaaaatgtaatgatttgaatattctcagttcanattntaccacttacatgtataaaccattaaaagaacctaacagtag

SEQ ID NO: 267573 - DNA, 392 bp, Glycine max
ttaatgaaagtttttggtaacatgaagcataaaaatagtactcacacaaggggtagcttaccctacgtagtagtaacagtggactaaaagtccaaatatcgaacccaaaggaccagttgtgttcccaaacaattatttttgttaaactaagcatttatggttaacttaaatgaaagatagttgtggtcaattgttcaattttgtaaataagaattaacgatagaaaagttgatgggaaaacagttataacaagcaacctaggattgtgatttcacactttctccaatttttcccaattctaactctaactaatccccaaataatgtcaattacaaatatgcccaaattcaattattaaatcttgatcatcatttaataatgctctttgcgct

SEQ ID NO: 267574 - DNA, 276 bp, Glycine max
  unsure (1)..(276): unsure at all n locations
cacttaangacgattgctatgacctattccatattctaagtaagtgtataaaagcatgtaatgtacatattagggttatatacataagtgagaacaaggaaactatgtagcgggcctactacatcgttaatgatactcaattttgaagataaaagacggatatatatatatatatatatatatatatatgaggagagagacttaatattggcccttatgcgatagacaccatactcttgctatgatgattgccaccatctatgcacacagtcatga

SEQ ID NO: 267575 - DNA, 412 bp, Glycine max
agctattgcatgtttaggaagttctatagtgatataggtccaagttccaaagagttctgagagattatgctgtgtgaagatctgtggagatgcgagttcgaagcggaagacgttctgagaacttgagatgagtttgtgagatcctaaaggtaaaggagacatcctcaccacttgtgtttttgcagcctttcatcttgttcttttctttgtcgaaaggaggttttcggactatggaaagctaaatcctctgttggatcttccctgtaggtacctgatgtaaatatatttctatctatgcaatgatgttttgtgtgttctctgtgctatctgcttttcattccagtgtgcttttaccttgatcacgaagatgcatgctctgttagtgtcattcaacagtgggaactggtctgat

SEQ ID NO: 267576 - DNA, 462 bp, Glycine max
  unsure (1)..(462): unsure at all n locations
tgtgtaagtgtgcttaaggctttggtccaatggtattattttgctagcttatcttaatcacctaattttgactcatgaatgactcttggcaacccatgaaaaacctgtacatcactaccaaatgtggcgtgcttcacttttgaaattttcacttaaaaaggctaaagtagaattttgccaaaaatgggtattcttgctttttaccaaaaataataaattttacccttaacgtcttgattactgtgctaactttcttgactattgtgctagtctccctagtaatacatataaccagagtgaaccgcagacagagctaaattacatagacacgtagtgtacaatgcaattcttcacacacacaccccanaaaaatttataattaanaacatatatataactatggaaattaaattcatacacacatagatgacacaacacagagntttatctattagttggagt

SEQ ID NO: 267577 - DNA, 397 bp, Glycine max
  unsure (1)..(397): unsure at all n locations
agcttccagccaccaaatcctgctgtggataattcttgtaaggnaccaagatagatatacatctttttgtcacttcaaaaaatatttttacctcttgaaagctaatataataataaatgaaaaccttacactgctcaaagatatacaaataagcttttttctttttctttttatccgagtaaaaataaactaaaaggtcaaatcacacctatcaagttgtgttttttaacctacacagcacattttgggtagtgggggaaaggggagggttataatgatggtaccaacttttcaaacctatacttcttgccactactctagcattcaatacttaagctttgtcgattatcatatagaaggtaaatccaagtttaccaaggatttagaatttcaacta

SEQ ID NO: 267578 - DNA, 423 bp, Glycine max
  unsure (1)..(423): unsure at all n locations
tgacacctagcacgtaggtggaatgacttcttttctagtttttctcatgggcttgagaatgacatcttcatgaatgggaaacacagcatccagagcttgccacctagcactaagttggataattttaataaggccagaaacttttaaggacatgatatggggattttttgaggagcttgccacgacaatagcaacaggtaaggcttgtctataaaaaaaactgaaaaagtaaatgagacgagtacttagataaacctaggattccttaagcattatgccttgggcttgtttgagatagcgtcacacagccagtatatagcagattcgctganagatagcaatatagctagtttaagtagacatcctatgtatctcatgcctgcattgatcttatagcactctnttttacaactgcattttatg

SEQ ID NO: 267579 - DNA, 373 bp, Glycine max
  unsure (1)..(373): unsure at all n locations
ttaagcaccgcggctgcagcttcacattcaanacgagcgtctttttttaacgggactcacccagacacccgagaacacagtaattgtcgtctgaattcgctaacagcatcggtcttaaatgccgagtggctcgaggtattaccagactctatcagacatgccagtaaaaagtgactggcgctagaaatcgccctgagctcctacattcaattaacgagcggtccgatatattacgggactcaatcagacttccgagtaaagaagcatggacgcctgagtttggtcaagagacacattcaatctcaagcgtcccatatgttagggactcgnccgacatccgagtaaaagggatggctgttgaattgcttagaga

SEQ ID NO: 267580 - DNA, 460 bp, Glycine max
  unsure (1)..(460): unsure at all n locations
ntgaggaaattcaaacgacaataccttttgacacggatgtctgattgagtcacgtaatatctcgagacgcttgaaattgaataccgaagctctgagcaaattcaaacgacaataactttttactcggatgtcggattgagtcacgtaatatgtcaagacgctcgaaatagaataccgaagctctgagcanattcaaacgacaatacctattgactcggatgtcggattgagtcacgtaatatctcgagacgctcgaaattgaataccgaagctctgagcgaattcaaacgacaataactttttactcggatgtgcgattgagtcccataatatgacgagacactcggaattgaataccgaagttatgaagcaaatcaatcgacaataaatctttactcggatgtctgattgagtcacgtaatatgtcaagacgctcgaaatagaataccgaagctctgag

SEQ ID NO: 267581 - DNA, 319 bp, Glycine max
aacatcctagcctatggatagaagcgttcgtgacactccgacgtccctcatgatgaatgagagccttgcgagacacaactcaaaggtcaacatctctccctttttcttccttgaactcgggcgccccctacctttctcttcctctttctttgcctccatagaagcatcctctccaagcttcttatccaaggctcatcttggtggtgaagcaccttctccattgcttattccctaggggatggcgcctcctctcacttctattcctttgtcttccgctgcatctccatggaggaaaatcaccatttaaggacctcattaa

SEQ ID NO: 267582 - DNA, 433 bp, Glycine max
  unsure (1)..(433): unsure at all n locations
tcaccttataagtaagaaggaatattaccgtctttcaatagtganctagnaacctccaaaagatgtctattttttctctcgactactccattttgcttaggggaattaggacatgatgcttgatgaaatgtaccaacaaatttcataaaatttgtcaactcatttttgtagtattcccctccattatcagacctaactatctatattggagtattaaatagtgtgtttatcattttttgaaaaacttgaaaaaccttacacacatcacttttgtgtttaagaaggtataaccaagtcattcttgtacagtcatccacaaatgtcacanaccatcgcattccattatgtgtgggaagaggggtaggtcccaaacatcatagtgaatattagagagaggagcattagctctgttgttattataggacaagtaacg

SEQ ID NO: 267583 - DNA, 304 bp, Glycine max
gaattgccacatgctaataaggttgaaaggaaaaggtgatgtatatcttcttcagaagaggaaaaaattaaacatattaagattggtctgagcatctgtcggatttggtttcaggccaaaaatggctgatccgaccaaaatcgaccacttttaaattctatcccttaccgaccgtgggagcttttgggtttgtcggatgcgttgtgtccggtgctcacacaaggatgaagtcaaagagtgcaaaagcatgtcgcggagatgaaaccagatctacaccgagccaccatgactacatgagtttcaa

SEQ ID NO: 267584 - DNA, 437 bp, Glycine max
  unsure (1)..(437): unsure at all n locations
agagaaccctatattttttatttttttctaaaaacataaaattaaaatctcactctcttcttttaatcatctctcacatgtgccttaactcatttggtgaaaaccagagggctagtgcattttctctgcattttttaaaatcaattccaaagtatgaggggttttcttctctttctcatgctttttatgtgttgatggtgttggtccccatgttagaagtcataaatatagatttaagcttttataaagctgattgatcacgtgattaagtgtcatgaatgaagcacacaagctatttgatattttttagcactaacatactgcatgaaaattgatactaaaagttttagggttctcatgtggcacaaataaaattatattctaaaagcagccatatggngcttatgttttcatgtataanacataaactttggata

SEQ ID NO: 267585 - DNA, 389 bp, Glycine max
gagcagcaactaggcccactgggaagggacaccaacgttattaattctagacaacaaagcggacaaactacaaaaactggatggtaaaacacacccaaaaacaaggaacgccacccacctaaagatgcactccaggtgacctaaagaaaaccagatgcaaaggcgactcctttccaacccagctcaagcccaaaaaaaaacaaacaagctgtggctaagaggattaacaggcacaccaggaaacgaaggaatcgacccaaccaaaacaatgaaaaagcctacaacctgcagcccaaaaaaccggatcggaagaaggacaacccgggagtcttccaaaacaagaagacgcgcgcagccgtacatcaagggcccgaaacccacgccaccca

SEQ ID NO: 267586 - DNA, 437 bp, Glycine max
  unsure (1)..(437): unsure at all n locations
gtagagtatttcggctaagaaagactattgaaatttggggtattcttcttgagagacttgaatcttctgacattaccttgccttgatgtccccttttcctttcaatgagcttctacaaataaaaattcgtaaataaaccttgaagttttatgattgttggagggattttcaaatggtttccaatgacatatatatgagacatccctttcatacctttgtcttcgactatttttcccttataacttgcaacttctgaattntattatgctgcattctatgctctttctccactatgaacgactagcacaattcacaattcgaattgtagttgttagtgcttattgtttgtctagnggataccttatgaacttttctagtattgccatgagtgttgcttctgaagactattctcctgcatatgtatctaatgctacttt

SEQ ID NO: 267587 - DNA, 434 bp, Glycine max
agcttactattagtaactgtcaaccccttatgtatttatgctgagaagagttcaacactggagttctaagctgctgtcatatgctggcagagtgcagttaattaacagtgtgttgttttccatagctaactattggcttcaaatttttcctttacctaagaaagtggttaaacatattgaggggatctgtaggagttttctctggacaggtaagagcagcaatagtagaaaagctcctatttcttgggatcacatgtgtgatcctaaatatgctggtggactaaatttgataggccttgaggactggaataaagcttcaattggtaaacttctgtggaatatttgggagaaaaaagacaagttgtcgattcattggattcacatttactatatgaaaaatatagaagccagtaacttccaaccgggatggagct

SEQ ID NO: 267588 - DNA, 475 bp, Glycine max
  unsure (1)..(475): unsure at all n locations
tncatgaaattatcaaggagtagggacataggtcttgaagtgttatcttctatagataaaaaacatcttaccaaaactttgagagaagaaatggataaattagacaaggaaaaaatggtaaaagttgtttttgccaaaactagtaaatcctatcttaaacatctagattaacatgctaactcactatattattgtgctaatatctctagggatacgtgtactaaaattatgcctcacatagagtctactcacatggagacaaatttcactgcgactcagtacatattgcaattcctgcacagatggaaatttagttcaaatagtttttatttctctgtcaagcttcactaaactaatcagatgtatatatatatatataggccgacctatcaggcttataaggctttntaatatgcctaagcctggcctaatttaattaataggcttttaaaaaagcctgagcctagccttttaa

SEQ ID NO: 267589 - DNA, 401 bp, Glycine max
  unsure (1)..(401): unsure at all n locations
caacattctttcatcccttgcaaatgatatttgaatttattacagcttcatagatttatatcatatagagntaaagtgttggacaatatgtttgtgaatcatctatttacttgctatttgagtatatggtgtatgacctgaacgatatttttgtttcgctgcctaataagtggacttgttttaaaaagcacgatctgcanatgggaaagttagatatgaatttaggtatatcccttgatgttcgtcggtcttgccgagctaatcgcttttaaatcagacattannaaagataaattttcttcctagtcatttgtcatatttcatattggctaaaagtttgacagtttctgcgaaggctgaaccatgttcttaacaaaccatgnaaacaagttttgatagga

SEQ ID NO: 267590 - DNA, 444 bp, Glycine max
  unsure (1)..(444): unsure at all n locations
cgacaaggaattctttagtatccaattggtcacgcatacatatatatatatatatatatatatacacaatgggtcaatgtgaagactacaccaccacattcttggtgcaaaaatagtatatacactgttaaccaaagaccctttntgtttattcttttgcctttaattaaatgggcgtgccctcccaaatttaaaaagataaagttagcatatggtagcaaaatacccttacaaggcaaaaaagcagcaaggaaacaaccatataaaagagaagcatgccgacggcaaaatcaacgtggacagaatcaagagagtgacacattattatgaagtcaaaaaagatcagccagccatgcagaagaagaatggangcatttgcatgtgtacggctttatcaaagagagaagttggaaaagttntaagagaacnaaaaattatacactt

SEQ ID NO: 267591 - DNA, 271 bp, Glycine max
gcttttatatgggaccacagagtggtacctggagatatgtcacgggggtcaagagaccttggggacgtcaaatggggtgctattgcccaaaaccaaacttgaccaatcccgacccaacccgggcatagtctgtcagtgagaacctgtgattgacctaagcaggcgagctcctggcggtcaacagattaaaggaaaaccagaccacacagcaaggaggcttgtggtggctggccacctgtgaaacttgattgatatgtgagatatggtctct

SEQ ID NO: 267592 - DNA, 413 bp, Glycine max
  unsure (1)..(413): unsure at all n locations
ngattgatgcatgatggctcacatttcaagagggttcatatgtgaggactaatccactcgctagccaagggggatcagtggttaatgcagtggaagaatgggagtctcgggggctgaagtagataggggacgtgtcaacctctagaatgttcatattggaagcattgcgcgaggctggtatgattcgccttgatggtgacaaagaagattcctatttaatgcatctgggggcatcacacaatgtggagacgtgtccaatggcggaagagttgctacaaggaatgatgaacatgggccaaattgaagtctgcagtgcgaagaaagggaaagggatgtatgcatgaagtcagatgataaaaacctgagtaagcccaagcctttggtgatccacttcaccagggacgtcaccactt

SEQ ID NO: 267593 - DNA, 383 bp, Glycine max
  unsure (1)..(383): unsure at all n locations
atggggcggcttgttggttgctggtgtggcgggacgcgaaaatgatggaatttacgacaacgaagagcaaaatggtgtggcgctatgattttcgcggccataaaaaaccaccacattttattatccacactcctcactttttaagccatatttcacagtatgtgacagcttttgatcaccaaaaattgaatcaccgtcaactccaactgacagagttagngatgggtttattgcgacattttttaaaagttgtgggacgaaaaataatgtttttaaacggaaagactacaaaataactttttcatatttatgggggccaaaaaaattgtctaacccttttaaaatttaccccctaaatctgatgagtaattaaacagagtggc

SEQ ID NO: 267594 - DNA, 464 bp, Glycine max
  unsure (1)..(464): unsure at all n locations
tgtagaggcattntctgataagggaatggattgcagtctgtttgttgatctacaaaaagaacctttacttactaagttgtaagtatctgccaaaaatcccgaccgagatatcccaatcttatgtgtaatatcaatatatttacattctcagtataatatcaattntaatctctgggttttgtacttttgtggtttgttactgtggtgtagttgatagataaatcaacataacatgtgcttgtagtatgtgtatgtatcacagcatggtttgtggatgtaaaatatggaataagaaatgcagccattggagtgatttgctttatgtgtcttctcctcaatttaatgatgatttacagatgttttatgacatgttaaagaaaagttggagaatgtagtgaaggaattctttggtagctcttgttgtaactttgagaatactatatttgttggtgagatcaatatat

SEQ ID NO: 267595 - DNA, 431 bp, Glycine max
  unsure (1)..(431): unsure at all n locations
agcttgaatctgttagtaaacatttgtnnattattttaaaactnctaataatatattacttatattaattatgttacgcgtttgctatgtttggttttgttctacacgttggtttccaacatttagtaagtggggtactttgagttttttgcattgttacataagggggtctatgcctatatatatctctctcctcctttagccacaaacacaagcagaaaaaacaatnttcattttcctctaaatctaaaattagaatatattttctttatcaattatgttttttaaagataaaatgttttagaattagtttctgtgaaaaacttgcagcatcccattacttatcattttgttacttgagtgatttggtactcttggcaaaatcataacatatatccacaataacaatattaaccaatataaaaaggtat

SEQ ID NO: 267596 - DNA, 468 bp, Glycine max
  unsure (1)..(468): unsure at all n locations
tgcttgaagggcttctatggaggatggatctttgagcttattgatgtccttcaatggggattntctaccatggaggtgcagcggaagacaaaggagaagaggtgagaggaggcgccaaccactacggaataagccttggaagaaggagcttcaccaccaagaatgtgccttggataagaagcttanagaggatgcttcaatgaaggaaaagaaagagagagaaagggcgggagcacaaaattgaaggagtaaaagagggagagaagttgaactntgagttgtgcacaagactttcattcatcaaagttacaagaagtgttacacatgcttctatttatagcctaggtagcttccttgagaaacttccttgagaagctttcttgagaaacttccttgggaagcttctttgagtagcttccttgagaagctagagcttagctacacacacccctataataactaagctca

SEQ ID NO: 267597 - DNA, 425 bp, Glycine max
  unsure (1)..(425): unsure at all n locations
agctttaagatcaaactttnttctctcaattgttcttcattcttcttacttttttcactttttttcttcctttttcttgcacaaatctcatggttcttccactagtgatgatcatggaaggctaaacacaaaatcaatccaaggatccactccaagcaaggctgaatttgagttctggtttacaatttctaatctgcgtgaatgtttatctttttcttcaatcctattttcgattttcatgattatgaatattcttaggattgaaaatgaattangtgggatttctttcctaattttgaacataattacaaattgtttaaatgatattccaacctaatntgcaatctcaatgaattgagggattaattngattgaaccaactctaatgagattgattaaaccctcacaacttgatcattctttgt

SEQ ID NO: 267598 - DNA, 464 bp, Glycine max
  unsure (1)..(464): unsure at all n locations
gtttcttcacaaataactatcatgaagcagtttactagcaagactacccatcatatctcccaaaaccccatacccacgaaatttaagagagaaagaagtccacccaaacctgaaatttcgaagtcccactcgtagacacgcacttcacgaccccgaaaatgctctccttttacgatttggagcagaaatgggcaccaaaggttgaagctttgtttggagcttcaatggagaatgagggagaaagaaaggcaacgtgagggagagggagagagaaggcttctgcaattttttctgctgagtgaagagagagagggttgctttttggtttttaaaaggctttttcctcttttcttattattttatttaagctatgccacatgcccctatttgagtggagcaaanagggcccattttctcttttgattgtgacccatactcagccacaaaaagtgagaanaacctga

SEQ ID NO: 267599 - DNA, 351 bp, Glycine max
aatcatcgcttcaatattttaaaaaaattatatataaacataagattaaatacttttttattttttagaattaaatttattttctaaatattcaaaaaatactttgagttggtttcatattgttattaaataatttatcatatggcattatcaagttaatgttccaagttagtcttacaattatatgtatttcattgtttataaaattttaaaacataaataataatagatatcgatactaaataaataaaattatcttataaaatatattatatatttcaatcatattaatcatagttgtcatcaatatatggatacaattatactatatattaattgtataactcactc

SEQ ID NO: 267600 - DNA, 398 bp, Glycine max
tgaatgagatactactcggataacttaataaaaaatttatatcatttaagaaataaattgtataattaaaataaaaatatctgataaataaatttatcataataactttcaatatttgtcttacgaaaaatataaacatacattcactttctctttcatctcattgtgcaaacatctctctatttattgttcattagattacttatactctattatttatttaatattgagaattaaatgtgtgaataactcatgtagcaattctatatataatatattattatactatgaaatatatatatcaaatagtttagtggctcggataatgaaagcgattttgaataacagagaaaaagtgttgtctatccaacggaagtgggaagacatgatgatgaaag

SEQ ID NO: 267601 - DNA, 213 bp, Glycine max
acttaagagacgcgctgcacttaaggcaatgcttcctatttttggccccctttggcttagagccaacttaatccttgaggcttggaagcttgaagtgaactttttaaaacctgagttttgacactaataggccaacattgactatcacttagtagtgcaacaagtttatgcagactactttctaagaatgtaagcatgtctcctctttgctac

SEQ ID NO: 267602 - DNA, 452 bp, Glycine max
  unsure (1)..(452): unsure at all n locations
tctatataagctgaatcattctatctttaaacacaagttgagttttattcagaaaattagagtttatctcttttatcttagtgagagtgattctcctaaattcttgagtgattcaagaacaccctggctgtatcaaaggactttcacaacctttgtgtgttgccctcgctggaaagagtgattctttccttcctttcatcttcacccttgttcttttaaaccacaattccagaaaatccacctttgcccagaattatctcatggtcataactcccattttacgcactcaaattaagtgattcttgagcctaaattgaatttcaaaacgagacctttcacctcgttttgaaatcacctcatttggagccctgtagcttcagctattggcatttctatatttctggccatccaccacttaacctancgtttaccatcccattcatccattttat

SEQ ID NO: 267603 - DNA, 439 bp, Glycine max
  unsure (1)..(439): unsure at all n locations
gacacttagaaactcaagctggcanactanacactannnnnnnnnntttattagtcatttatgcaccngnacgcaggcatacagcgagtgaactagnccattttgcgatggactgcacgcttgcataaattatgagatatcattctatatatatatatatatcggcttgatgtgttctggacatatgcctctatttctagcttctctaacctgtttcttcaggattgtattgcaatgttgaacacaaatcaaaaagtctgaataagatgtattatactgaggtttcatctatcacagacggattgtacatgcgtggcacaggagctggatctgtacgtgtatgtatataataataaatgtcatatgttacggttcaaccccccaaaatgtaatgtattatactattataggcttatgaaacgcatatatatatatatat

SEQ ID NO: 267604 - DNA, 398 bp, Glycine max
gcttaacctcactatcatttctcacccaatatcttataaacttcaatggctcaatgaacaaggggaaatgatagttaaccaacaagtgaaggtacctttctccattgggacatataaggatgaagttaattgtgatataagtcccatgaaggcagggcatattcttttaggaaggccatgacaatttgataggaaaatcatttacaatggcctaactaatgagattaccctcacccatcttggcactaaatttgtgttgcatcctcaaacaccttcacaggtggccaaggatcaactaactatgaaagataagagggatgaggaagaaaaactagaaaacaaaaaataaaagaagcatagtaaggccatgtcttcaaaggccaaggggaaggaaaaag

SEQ ID NO: 267605 - DNA, 436 bp, Glycine max
ctcagctattaacgcgtattcctgcacaaaattaattatacattcaactcttaaactgtatatgcgtttatattattcattacttttgtctcatactctctatatgttatttcttctaattcaaatatgaattcaattcacattgacatttaagttgtttgtttgctttgatgtaaaaaaaaaaagctaatgggatgcatcgtttttttcttatcaccactcttttaaaaagaaaagtattaaaaaaacatttattttatcagtttttcatatgcttcctttcaattagacttattttttctctcattataaatgagcattaaaaatagggatcaacttctccattcctcaacttaaagctcgaaaattgttgaggatgaatggctcctaacttcaaactcataatacaagcatttcaagcaacactcccctcttt

SEQ ID NO: 267606 - DNA, 429 bp, Glycine max
  unsure (1)..(429): unsure at all n locations
agcttngcctttgagtggtgtcccgcgtattccttaaccaaacaagaantttcctgttgcgttacgattcgcccagtctggaacgggcctattaaccgcgtgtgacatctgaacgttgattagagcggatactaacacaatgtattattcattagtctaagggtgaaaacaaaaaacagatcatgttgttggtggatattctttatatttaactaaataataacaatggattatagctttatttttttcatacttattttgtctttctaatgtatcgttccgtagagaaaaaaaaagatagaattactaagagatatttaaattaaaatactgtatgaaagtgtgagattcttgctaaatttttaaaattttccttacattttcatttctttccttaaccaaacaaggcttataggtttaagtttactt

SEQ ID NO: 267607 - DNA, 366 bp, Glycine max
  unsure (1)..(366): unsure at all n locations
gacgacggatctcnatctccggctgacgctgagttttctgcttaactcggcgaacttcggctgccggcaggaaattcgatggccgggatctccgtcgatgaactccgaggagtcctggacgactacatcgtgtttggagagcgggatcagagatcagtacgctcccgacggagaccggaaagtgctggaccttcttggttgagagttctctttctctaagctatgagattgagggttctcgctgacgcgcctttttaccatttttttatatgccgccttatgttgagacaaaagttttctctgaattgaatccggcgagaaatatttggaatagcggcacatgatattttctctattgttctttct

SEQ ID NO: 267608 - DNA, 427 bp, Glycine max
agcttcatccgcagatcactgtgtgaagactaagtttcgatcctgcttcaatcaaggtctagggcaatagtacattttccaatgctaaagtcacctaactatgcacataaatggatgattagaccaaaagcatacaaacattaagcattgaaggaagcattaaacacagaaaacataatcaattagatattaagtatttacatcagctattcattacaaattcccaactagggtgtttagccagccattacagaagaaaccctaactataataagcttacaaaacctaggtatctctgcaaaagctgctcctcttgctgcctcgagagctctttctccgaaataggcactgtggtgtgttgtggaattatgagccctggccttcttaaagttttgtaccctaatcttgcacaagataggctctaaat

SEQ ID NO: 267609 - DNA, 367 bp, Glycine max
tactttggaccttgaacaagcaatcaactcctctgtcagatccatgctatgtgctcgctactggtccctatcttcccttcgcaacttgagttcattattgctaccccatagagctccgcgaaatttgttccggccatactctttcttgcgagccctcttggtctcttgttcaagggcttttgcggtaattgcattctcttcccgtaacccggcgcactccttccgaacgggtgtagcagccaacatgaacttttccttggcgaagtttgcctttactaactcgcttatgagaacttggacttattcgtcctctttcggcgcgttaaaattctcttcagtgacgactcttaacttggcgagccaatct

SEQ ID NO: 267610 - DNA, 426 bp, Glycine max
  unsure (1)..(426): unsure at all n locations
agctngagtaaatgttcacagtagcagtatgaattattatgagttgcgtactagtacttctatacaagaaagtgtttatgacctgaaccttttatcacgtgtattttgtttcttgaaaccttccattgcaattgcatctaaattgtgttgtggaagtgggaaataaaaatcccatgatgccaatagctctggggcccttcaccttcaaacttcaatactctcattttttttcttctataacattaaggggatctttatactttgttttaattttcatatctcaatttaattgctttttatttcttttcatcttaccggaccgaacccattaactaagtctacctactaattcacccttcccatccatcctcgtgtatgcccacaatagcgattaattacgacaggcttatgattgatacaaccttc

SEQ ID NO: 267611 - DNA, 417 bp, Glycine max
  unsure (1)..(417): unsure at all n locations
ntgactggagaaacatgagcctacatattgtgtatattatgcatattgatggaagntacctgctcaacttagaaagtattatcccaaagctctgtccattagctcaagaaacaggagatgatgaaagtgcatgaaataatcgttcagctggtttgaaagctctttcagcaatggtatttattttataattccaccattgtttcaacttttagatcacaaattggtcttgcacaacagcatgttgcttgtcagtttgtactttgaaagagagtgatttaaaaagataactatatttaagacatggtaattgttatcaacattanaaatcagcactaataggctagaagcagcgctaaacatgtttaatattgacgggaaagatggcttgactaaacctagaagaaatagttaatcatg

SEQ ID NO: 267612 - DNA, 389 bp, Glycine max
acttggttgaaaacctctgcgccgatggtcatgtggaacaacgttttggattatttgataaattcgtggtggaacattgtgtttcctatggtgatttctacagttcacttgtgatttctttgataaggatcaaaaagctggaggaagcagataagctcttcaaggaaatgcttgctggtgatgtaagactggatactttggcatctaccctcttgctaaaggagctttgtatgaaggacccgatattggatggattctacttgcttgaagcaattgagaataagggatgcttgtcttccattgactctgatatttattctattcttttaattgggctttgacacagaagccacctcaaggaggccaccaatctggccagaaaatgctta

SEQ ID NO: 267613 - DNA, 430 bp, Glycine max
  unsure (1)..(430): unsure at all n locations
tanatgttcaggaaatcgatacatagcaactcaccatgatatgtatttntataattataaatacataaatattcaggagtacaactaatattgataatcattnggatcaatgtcatgtttaagtacacactatactgatggtgttaagcttgtaaatcaacattcaaaattactatttttttctagttttggattcatatccaatcgatggagacggggaaaaaaataagttaacataaaattcttgggatcttttctttgaaaatcggtttggtaacatcttgaattcctgtatggttattgcaatccactgatctaataagaatgacacaatcaatcattagtcaacaataatatataactagcttcatatggaccttatcatatgtgaggttaccaacctaaatctataatcaaatcagcctttaaa

SEQ ID NO: 267614 - DNA, 386 bp, Glycine max
aaatactggtaacgtgtctactatcattgtcatcgttctttcgccattgaggtgccacttgagctgtcaggttctccccctttgggcatattctttgaaagatctgtgccccctttttgcacatgttttgtagttgcatcctatccgaagccattatactgacacagcctaacgaaggcaaccattaggtccttccaagaatggactcgggaaggttccaagttagtgtaccaagtaacagctaccccagtaagactttcttggaaggaatgtatcaacaattcctcatcttttgcgtatgcccccatcctccgacaatacatctttagatggttcttggggcaagtagtccccttgtactcgtcaaagtctgacaccttgaactt

SEQ ID NO: 267615 - DNA, 422 bp, Glycine max
caaaattaattatacaatcaactcttaaaccgtatatgcttttatattattcattactgttgtctcatactctctatatgttatttcttctaattcaaatatgaattcaattcaaattgacatttaagttgtttggttgctttgatgtaaaaaaaaatagttaatggcatgcatggttatatttttaatcaacaacttatataaaaagaaaagtattaaaaaaacatttattttatcagtttttcatatgcttcctttcaattagtcttattttttctctaattataattgatcattaaatatttgtaatagttttcatatgaaatcttcgacatactaatactacatgcaacaaaataaagtcatatctcaggtggtggacatggtcatttacacatatgatcgatatcaattgaccctct

SEQ ID NO: 267616 - DNA, 425 bp, Glycine max
agcttcgtgagcatgggcttaagacacgaatagcaagtcaccgcgatattcgacgaagcccctcaaaggcggttgggcttggtgcaaccatgccttcccgatttccagctagggaactggcaagtggtggaacgacttgaagtttacatgacgaatataatgtaactttttagttttaaccctacggctgggcctaggctctagggttttttctccttgttaaggcattatgtcttttgatctcaaagattataatataaagatctttcttcatctgttcttgtgccgccacccattctcattcatttgcatgtttatttctattgcgtttaaatgatacagatccgacaacgagtcctgtgaaggtactaatactgaggacccagccatcaattttgagcgagaagcaagtcgagcagaggatg

SEQ ID NO: 267617 - DNA, 433 bp, Glycine max
  unsure (1)..(433): unsure at all n locations
tcaacgaaggaagagaataagagagagaggggggtgcggtaattgaatgagattanggagagaagttgaactttgaagtgtgtctcacaagtttctcattcatcaaagttatgcaagtgttacacatgtttttatttatagcctagcatatgggaagcttccttgagaagcaaggaaggtagcttccttgggaagctagaggaagaaagctttcttgagaagctagagaagggctactcatacccctccaatagctaagcttacccccatgccaaaatacatgaaaatgtgaatgtatgtatacaggttttgatgatgccaaaagaatttacttgataatggttgtaatcataaaaaataaagagaatgtgaatgtttgtataccaagttttgatgatgccaaaagaaattacttgatattggttgcatcatc

SEQ ID NO: 267618 - DNA, 395 bp, Glycine max
  unsure (1)..(395): unsure at all n locations
agctnttcgcaaagcttacggtaagatctgggacctatccatggcagaggtctccacagaggccattgcctccctcgcccaatattatgaccagcctttgaggtgcttcacctttggggacttctagttatcacccacggtggaagagtttgaagaaatcctgggatgccctctgggaggaaggaaaccatacctcttctcgggattctatccctctttagctagaatttctaagatagtcaaaatctcgacgcaggaattataccgcggaaagcaagtcaaaaatggggtggttggagtaccaaggaaatgtttggaagcaaaagcaagagtctttgcaggtaaaggcgaaagggccccgatcatctatcacttttgatctttgaggggggggg

SEQ ID NO: 267619 - DNA, 404 bp, Glycine max
  unsure (1)..(404): unsure at all n locations
ntgngactgagaacctatataacagcaccaatgtgttagttntaggagtntttttcgttgggagaggagaataattttaggttttgcaattctagttgttactgttcatgcatactattcacgtagcaataaaattcgttttctgcttcaatttgcaatttcattttctgcttcaatctgaaaatttgttttctactgattaatggaaggctaagtctccagcgttgttttctcttgaggatcaagcacaactttctttgaggttttattattactattgaattctgataagtttttcctcttcaccaattactctgtatttgttgctattaatccatgcatgcttagtgcttgattaattgtctctgcgcttaatttacattcatacttaatgatcaagttca

SEQ ID NO: 267620 - DNA, 427 bp, Glycine max
  unsure (1)..(427): unsure at all n locations
agcttcttccatatttgggcgccagtatgtactacagcatggatatgaaccctaggtttagtttggttaatggcaacttggtgcatgttcttatacataccaatattacccattctctcaatttcaacgttgtggatggcagatatgtgtttactgaaagaaagattcataaggtgcccacaaacaacatggtggccttgcatcccccacttatagggctatntgcacaacgtcgagcacacaatttttttcatctatgtgcaaaactacaatgagagtgatcccaagacccacgccgggatggacttgacgcgagtgactactcaagagttgataacaaaatatggccttgatgatacactatagacttaattggtcatgctttggcccttcctagcgatcatcgctacttggcacaacactggac

SEQ ID NO: 267621 - DNA, 410 bp, Glycine max
  unsure (1)..(410): unsure at all n locations
tgaaggcanactggatgcattggttaacttggtaacccatctggccttgaatcagaaatttgtaactgtcgcaagggtttgtggtttgtgctcctctgctgaccaccatacagacctttgcccttccatgcagcaacctggagcaattgagcagcctgaagcttatgctgcaaatatttacaatagacctccccaaccacagcagcaaaatcaaccataacaaagcaattatgacctctccagcaatagatacaaccctggatggaggaatcaccctaacctcagatggtccagccctcagcaacaacaacagcagcctgctccttccttccaaaatgttgttggcccaagcagaccatacattcctccaccaatccaacaacagcaacaaccccagaaacaaccaacag

SEQ ID NO: 267622 - DNA, 398 bp, Glycine max
tatgaaactcaacttgtgaagaaagataactagagagctggtcatattctttttggagactgatctgagtgctctatctccgacactcaacataatcgcactgtaagctttctcaagcattgagttcttatccttgtcaggcatcggtttttcaaccttagcctctccttcatctgtgatagactaaagtcattttgaccactgcatttctcaacatccgactcggctgaacccatgactcaagttccaggttcactgtgcaccaagtttgataaaaaaatataatttgattaagaccccctcccaaccttagccgcaaaagccacttattcggattcgttcaggccacacaagcaacaaaaatacaagtatccctcgtggcattgaattggaatcag

SEQ ID NO: 267623 - DNA, 415 bp, Glycine max
  unsure (1)..(415): unsure at all n locations
agcttgaagaaggctcatgacaactggtatcaatgcagnggacgagaactgcatataaaggagcaaagcgctccttgtgatggcgcgttccacctgctatccgcaacccgcaagctccaatggcgtttcctgctcctgcttcctgcagcagtagcagactgctgcagcactgtgctctttgtccttgctgcaaaggtaaaatgccagtttgactggcgccttcagtcttccatgcagaacgcgccagtggtccttacgcctccctcgccacgtaagcagaaaagcaacgcgctggtgctactggcgtctcgaggccatgtggcagcttctacgcgaaagcgtcaatggtggtggcgccatgcatgggcttcacgtaaaaaaactgcccctggcatgaataagtttcaaaagaacc

SEQ ID NO: 267624 - DNA, 436 bp, Glycine max
  unsure (1)..(436): unsure at all n locations
tattagttttagaccaaatagaaactatattctcatgtgatntatagaatgactttattgaanagatgcttataatgtgatcgtattaggataaagatgtattcaggtcattggctaaaatttttatacataggttaaaatgtaattttgatttctttatttttataaatccatgattttagtttccatcttttaaaattgagatatttagtccttcaattttctaagattcttaattttggtcaattcattcatttgagatggttaattgttaattgattaacgttgatcatttatctggttttttattttcatttttttattaccgagtaaaagaattttaaaaaaaaaatatttgacgatatcggtcccctgtctacctggtgagaatcccatagctgcccaaatataaggatctatgaccaggagtaggact

SEQ ID NO: 267625 - DNA, 431 bp, Glycine max
  unsure (1)..(431): unsure at all n locations
gcttggtgcagctggtgtctcgctaagaaggcatatgcgcttagtgagtaacatctgctaagcgagacatcagctcgcttagcgagtcaagagaatctgccacgcatgcacgcgcccaacgagtcatttgtctcttctggcacttagcgcacctaatgcgctaagccaaaattcactaactcgcgtttagcgcgaaaatggcgataagcgacccttcgaggtcagaaatcccttttaaaggttgaagttggaaagatagcagaaaaagaggagcgttgagagcaaaatagaggcgcaaaatagagcatggaagccaaaaacctcagctntcaaaaggattctaggtttaggagtaatttctaggttcctagaggtggaggagacatccccaccactgtgtaatctgtaattttcttcaaacaccctcatct

SEQ ID NO: 267626 - DNA, 456 bp, Glycine max
tactaagcttacatagacccattggtttacagcgaaggtaacatcgtcacgccttgcatcagtatgtttcttcatggagtcttgagccttcttcaaccgcttctgtagttttgtatgcatgttctgtcgtgattcgaccagtgactcaacaacttcgttcttcattaagcctgggatatactgaggtattgtgggtgggggtttcccatatatgacctccaatggggttagtcgggagcttgaatgcaatgaggtattgtagcaccactctgcgagtgacaagtaacggaaccacgatgatggttgagagctgacgaagcaccggagatattgttcgaggacgccgtgcttaaccgaaggtgggtgccactgtgtctgaataactctctccaaaaagcgcttaagaacacggggtccctattggagacaatgcttttgggaaatccgtgatgtttg

SEQ ID NO: 267627 - DNA, 445 bp, Glycine max
  unsure (1)..(445): unsure at all n locations
ttaagcacccgggctgcagcttagataagcttgttgtgtgtctacgctgtgtgatcagnctatatatgtatgtgcatcttagcttggatgaataaagtcgtattctccctttaataaaatcacaactttgtagcatatactatgtagtgttagattgtacgtactatacttcaatattaattaatatttcatcgtaataagtttatcatattggtcgaatagattatgaaaaatgttagtgatacatcccattttgggctggaatagggtgaaaaatgttagccatacatcccattccattttgtactgagcatggtattgccttttgtgggatcctgcgttagattttattttcttgcgtttactgaagcataaattgcgtctaaccttcggaattctttctgtgactttcactgtgaccgcttatgcatgaatgaatattttt

SEQ ID NO: 267628 - DNA, 360 bp, Glycine max
tcacttgaaaagagattaacaccacgccatcttcttaaataattagagtatcttttacggaagctataaaaatggcaagtggtatttctctttcccaaaccaacaactgataacaaggatttgccagtttaatagatgggaatcctttgtatacatatttatataaatagtgtcattattatattgttaataattcgtaagtgcatgtttatctatctcctctgaatgtctattgtgttttgaaattccatgttcgattaggaatacacattcggtcctatgttaaggaagaagcttctcaaggaaaggaaaaattcaaatactccttcatttttaggtcattcattgctggccatgtgt

SEQ ID NO: 267629 - DNA, 332 bp, Glycine max
  unsure (1)..(332): unsure at all n locations
tgatcttccaccaaagaataacggccaagctttcacctccactctcttcttataacccaaaaaagatcctccgccatggcttntctatcaagaacctctccattagcatcaacaattcttgcatctagaacattgtgagcaccaagaccatactttctcatcatggaaccatatgcacctcctgtgatgtgccctccaatccccaaggttgtgcaaaggcctgcagggaagccatgaactgcactcttctctgaaattctgtagtanacttcaccaatagtagcaccggcttgatccaagccgtgtttcgcgcaatatcaacattcactgca

SEQ ID NO: 267630 - DNA, 367 bp, Glycine max
  unsure (1)..(367): unsure at all n locations
ctggcttctcactgttngattggtctatgcacattaatcctattacaatgcctgtctaacttgatgaaaatttgtttcagttacttccattctctcatcaatattttgctgcaaatctgcaggattaagggttcttaagtacctaataaatccagcatcacctccatcaaactgctcctgcacctctcatctctagcaagaacactccaaacctacatatctctacaatataaaagaaaataccaattaacaaacatgccataaaccaagaaaaaggaaaagagacatcacaaggaaagaaatattgtttgggtgcatattgtcttttggtcttacttcttccggtgctgttttgatctccaacttt

SEQ ID NO: 267631 - DNA, 429 bp, Glycine max
agcttcagatttctacttcatcatgaatacccatgtcattgtggagtaatcattgatgatggagaggaaatacctttcccctctcagtgatggaactctcaaagtccccccagtagtcaaaatggacatagtccaaaatgccctttgtagtgtgaacaacctttagaaattttgtcctatgttacttcccttagacataatgctcacaaaactgaagaggttcaaccttatgttttccaagtaagcctcgcttgctcaaaacttctattatgttttcacttatgggcccagacacagatgccatagagaattatcattggatgagccattggacgcatggctctcatattgtgaaatagttgatcctgtcatagtggacccttgaaggatgtgaatatttccttgcttggtccctaccatctatagaag

SEQ ID NO: 267632 - DNA, 372 bp, Glycine max
  unsure (1)..(372): unsure at all n locations
tcattctacacctganaaagaggatgagatagttgcacataagagaaagcttcctaaagaaaaatttcatgcaggtggaccttcttctagtaattctgacttgcagcagcctcttatccctcttccattcccaactagagcaattccaaacaaaaaaatggaagaagcggaaaaggagattttggataccttcaggaaagtagaggtgaacatacctctgctagacgccatcaagtagattccaagatatgccaagtttctaaaggagttgtgcacccacaaaaggaagctcaaaggcaatgaaaggattagcatgggtagaaatgtgtcaacattgatagggaaatttgttcctcacattcctgagaaatg

SEQ ID NO: 267633 - DNA, 431 bp, Glycine max
  unsure (1)..(431): unsure at all n locations
gccttatgnatacctagtccgggccatgtttatgttaatttgttccacgaaaaaccttaaatgaagtcaattgcaattggaacaattaatatatcctcctttaaaaaaaaaagatgagaattctgttacataaagtggtagaatagagagctgccacggtgccaatataattgaaggggtttggcatgtacaattaacttttgggtcattaaatgcataaaacctaagtttccttactaattagcaaaacaagtgacatgatttcattaaatggaaactcatgcaactattaggtcaaaaaccaattatacttaaacctccaaactntgctaattattaggccacccagaatataattgtcctcttctttctgtgatgacctcttatcatattatatcacttagacataatacataatgcatttcacatga

SEQ ID NO: 267634 - DNA, 350 bp, Glycine max
tgggttgatacaatctaataaattgaccttctctacaaatatacgcatgatgaatagctatagctttagggatggaagattgattgtggggatattatatcatagtaattttatgacaaaaacactggaagttgttgcaaaaaaagacatgtgtatgaaagaacaaaaaaatgtgtatatgtatataattaaattctgttttgtgcctttaaaagtatacttgagtaatcaatttaattagggtataacttatctaattattttataagttttaattaaaagaaaaatgtttggtgagccatttaataaatgttagttgggataccacttaaacttaacgattattatta

SEQ ID NO: 267635 - DNA, 428 bp, Glycine max
  unsure (1)..(428): unsure at all n locations
ctccattaagacatgaaaactcgagccaatgatgcatgagttgacatnactataagcgtgatcatctatctttaattgggacttaccgcggcaattaattgattcacaaatttattatttatttataaattacactacagttagagtgaacttttctaactgcctaaagagcctttatagtaccagacctactaaacttttcaaacttggctgtattgccactcttataaagaatacaatcatataaaggttctaatatatcctcaattattatttgtttcatattattattcattaattctttaatctaattattgataactagatttttcttggagctgcctgaaagcacgatagatacatgtctagattattgagatttgaatgcacgaagcaaattcctagatatgcataagaattggtttgtc

SEQ ID NO: 267636 - DNA, 420 bp, Glycine max
agctttgagcaaattctaacgacaataactttttactcgaatgtctgcatgaatcccgtaatatatcgagacgctcgaaattgaatgttgaagctctgagcaaattcaaacgacaataacgttttactcggatgtctgattgagtcccgtaatatatcgagacgctcgaaattgattgttgaagctctgagaaaattcaaacgactataactttttactcgaatgtctaattgagtcccgtaatataacgagacactcgaagatgaatgttgaatctctaagcaaattcaaacgacaataactatttactcggatgtctaattgagtctcgtaatataacgagacactcgaagatgaatgtggaagctctgagcaaattcaaacgacaataactttttactcggatgtctgattgagtcc

SEQ ID NO: 267637 - DNA, 451 bp, Glycine max
  unsure (1)..(451): unsure at all n locations
cggaccttaaaactcagcttaacattcaatttcgagcgtctcgatacgttactggacttaatcagacatccgagtaaaangttattatcgtttgagttggctcagagcttcaacattcaatttcaagcgtcccgatatatgacgggactcaatcagacatccgagtaaaaagatattgtcgtttgaattgactcagagcttctacattcaatttctagcgtctcgatatgttacgggactcaatcagacatccgagtaaaaagttattgtcgtttgaatttgctcagagcttcaacattcaacttcgagcgtctagttatattacgggactatatcacacatccgagtaaaaagttattgtcgtttgaatttgctcagagcttcaacattcaatttcgagcgtgtcgatatattacgggactcaatcagacatccgagtaaaaagatattg

SEQ ID NO: 267638 - DNA, 418 bp, Glycine max
agcttgtggatattagggattgagggctgttttggtttgtgtctaggtttgagtttgagtttgaggtttgtgttttggaaaaaaaactcgaagaaaaaggtttgagtttaagtgtatatttctcttcataaagattggccaacgaaactgttctgaggagtgatgtaggtgattgcgcaatgacatccattctgatattaggttttaatcctcccataaagcaatccaatagagcttcttgtgtaattccttgtactcgattagctaaagccgtgaactgcacgtaatatgactgaactgaaccaatttgagtgagtttaaacaactgagatctaggacattcacacggtgatgggccacattctgtcttctaggctcgcataaaagcaatccatggtttgaatgaattctcacgagt

SEQ ID NO: 267639 - DNA, 447 bp, Glycine max
  unsure (1)..(447): unsure at all n locations
tacccncactactacccacaaccacccaccagacctatctatgttaagaaaatgacatcggcagaaatgcagttgagaagagaaaggggcctatgctttacttgtgatgacaagttttcccctagccatcgttgtcctaataagcaatattttgttccacagtgggaagaagaggatgaacctgcattacaaccagatccaccagacgaggttgagacagctggtgaccccagtttgcaagatcatcatttgtcttataatgctttaaaaggctcatcaggtcttgggacaatgaagtttcaaggatcaataaatggattgggagtgtagattctactagatagtgggagttcagataacttcctccagcctagactagctcaatgcctgaagttacctgtagaaccaattccaaatttgcatgttttggttggaaatggacatgcc

SEQ ID NO: 267640 - DNA, 416 bp, Glycine max
agcttatggttgtccccaatcccataattttgggcctcttccaacagctgattgttacaaacaattttgctttttaatctcccttctgcttccattttttttatcagcaaaggtaatctatatattaattggagtacccgaggtacttaatagtacataaaggaccatacaaatggttccacaatcagacattgatattctgaaagggaactagagtatggatatatatttgctatgaaatttacattaaataggctcgtaacaatgtaggctactactgatacaaaaagctttgtgtaaagctgcttgcccattgattgaaatggactgtgaaacctttctcaaaagattgtagtcattttaactaaccattacattatgttgaatattttgagatgccatgtccactgtgtgtt

SEQ ID NO: 267641 - DNA, 452 bp, Glycine max
  unsure (1)..(452): unsure at all n locations
ngatgtcattaaaacacactatgtagacctaaatgaagactaaacatgcattgtttatgtaattgtattcattatgtgatataatttgttgtaacccgttactaaccaattaatattatcaagtactcgtttggttaagcaaggaaattgttggtccaacaaaaatcatttacgcgtgcagcatacatcattgtcataattgacaacacataatgacatgcatgcgtattacagtttgagcgcgacaacacattggctgacttcagtacacatattgaaactagcagtcgttcgacaacacattggctgacttgactacacattatcgacaacacattggctgacttgactacacatttacgcgtgtctattnttatgtaaacaaagttaaacaaaggctcggtcacaaccatctatatatatggcagactaggctactaaatcacacatta

SEQ ID NO: 267642 - DNA, 411 bp, Glycine max
agcttctcccctatttttctataaatagggggagaagcgaaggggaaaaatgttcaaccctcctggtaattcgagatcacttgagattagtgaaaaaaatcatttccgtgaagaaaatccaagccgaggcgcttccgtaacgtttccgtgggtgattttgcgaagattttcgaccattcttcaacgttcttctttcgttcttcggtgttcttcggtcttcaaccagtaagttcccgaaataaaacttttcaattcattctgtgtacccttagtggtcctcatttatttcgggtacttctattttcatttcatttacttttcgcacctccttttgacgtgctttagtcatttacttaaggcattttctcccctaatcaaaaataaaataaatttccaccgatcatttgaatt

SEQ ID NO: 267643 - DNA, 407 bp, Glycine max
  unsure (1)..(407): unsure at all n locations
ntgcctcggatatccgattgagccccataatatatcatggagctcgaaagtggaaatcgaatgccaacgcacattcggatggcaataactttcgactcggttgtccgatatatttttatgatatgttgagaccgtcgttgttgaaaaatgaagcccatcgtaaatacaaatggccataacctttcatccgaatctctgcataatgccagaaacctattgagacacccaggaaccaacaaggaagactcgggaaaattctgacacgcgaaagttttgacttggatggccgattgagcccaataatatatcattgagctcgaaagtggaaatcgaatgccgacacaaattcggatggccataactctcgacttggttgttcgatatattnttatgatattgtgagatag

SEQ ID NO: 267644 - DNA, 366 bp, Glycine max
actctgaaatggctgccaaccggactcggatgcaaaacatgattaaacaagaaagcgagtcctttaaagaatacgctcagcattggagggacctggcagcgcaagtatcccctcccatggtcgagagggaaatggttactatgatggtggataccttgcctgtattttactataagaaattagtgggctacatgccttccagcttcgtggacttggtcttcatcggagaaaggatcgaggtgggtttgaagagagggttgtggcaagaaagaggtatcactcgaggaggccggtgagttcctctgcattatccaacatagcgagttcaaagtcattgaacaactcaacaagaccccagctagagtc

SEQ ID NO: 267645 - DNA, 454 bp, Glycine max
  unsure (1)..(454): unsure at all n locations
tcanattccattacaggacaatatatttattntaaagagttaaaaccatcaacttagtcctccaaagttatatgagtcaccatattagtcattcaaaaatttggatcaacaaattagtccctcaaaaattaaaattatcaccatattagacctccaaagattttattaccaatttagagctttaaagacttaatctgcaacccaagtaatctctcaaagatctaaaatgtaatcatattggtcgttatggaggactaaagtggttcacaataagaatctttggaggtatagtctaaatgatggattaagtctcgggggaaaaatctaaaatgtcaccatatcagtctttaaggagaattaaagcagtgataaaaaagaatatttgagggatttagtaagaaattaaaagctttgagggactaattttgaaacacaaagaatctttcagaaacta

SEQ ID NO: 267646 - DNA, 385 bp, Glycine max
catgacttaattcttcatgggttttgctagcatgaaaatttttccattatacttactacttagaggagctctttatttaaaaggaaaaagatgcatcatattcataacaatattgaattttaaggcgtcttttgattttgttggtgtgttggactcactaaaggccaatagaaacatgtatggtgctttgtcacttgaattggcaaaaatatattaatagttatttttctcaaaccaagttttcaggttaaattttagcctcaaacacatgtttagaattataaccatattaacttatttaatgtttgtataaataaattattgcaaaaaatggataataatacaattataaccatatttagcaatatttttagtgaaataataa

SEQ ID NO: 267647 - DNA, 458 bp, Glycine max
  unsure (1)..(458): unsure at all n locations
tgttaatattgacgtanaatcatctctgtgcactagtgatagaagccttattttcatttttttccttaaccttttaatttttggtgaattttatctcatcaaattaaattgacatattttacatccaactttaaaaaacttgtgaattttatccctagttaattatccattaaaagcttgtcaaaaaaaagttaggagtaaatttcaccaaaataaataaaaaaaaatgggtgtaaaaaaatgaggagtttagaataaaaagtgcaattatgttagaagtaaaaagacaagggataaaatcggcatatttcttataattcatgggtaaaattcttccaattaacttgctagagataaaatttacctaaaattgaataattgaagataaaaagtacaattaagcctttatggaaagatagaatggtttgtttcatgatatccaattttatttaaatatt

SEQ ID NO: 267648 - DNA, 412 bp, Glycine max
agcttgccacccagctcgcccaggcgagcaatgttgcttcctccaaaagcaacagccttctggaggaatcttttggagggcccaaatgggcctggttgctatttgcacccccttttttactaaatgcacccccttctatttttttggtaattctttttccgtaacattacgaaacttcacgaatttcgtaacgatacttatttttcttccgcaaggttacgaatccttacggatcacgtatttactcttttttagctttcgaagaagttatggaaactcagggattgctcaaaaacacctcttttcgacttccgccaccttacggaatttcacggatcgcgcaagcctgcttccttttgatttctgagacgtctcgggacttcatttattgtgcaacacaggacgccaagta

SEQ ID NO: 267649 - DNA, 453 bp, Glycine max
  unsure (1)..(453): unsure at all n locations
tataagaacaaaatngcctaaatcatttccaaatatgcatgtgaattatgaagcatcaacaagaatcaagccaaggctattgtgcaagcaatcaatggggcaaaacacaccaaaagattatgatgacggatagctcaaattctcacaaaggtaaacttatcactttcaaattgagctttcaaaactatcatgatatgtagaggaaaaacaaggatttcaaatcacaaaatgtcaagagacttttattttcagaataattacccatttcttgaacatatcctataattcaaagaaaaatatgcaaagttgcacatgcaaacagaattgacctaaaatattaaactagaaacccaacaaaactaacaaagcttacaaatttaacacaaacaaaacttacaaaactagcgaaaccaaaacccaagaacacccccccccccatacttaaacaacaca

SEQ ID NO: 267650 - DNA, 417 bp, Glycine max
acctgacgcatgcagcttccccagttctacaatcgagggtttatttttatgccatgcctcctattcaaggagctgctctactaacaaaatggaccctaaaggagctaccatctgttggttttgcataataataacttgaccctagaataagctttgcagcatactggttgtgatttgggagctctgggcatctggtcctgctgatgcacattgaagcgctggagtatatgatgaagggatgtcatctgctctagcctttgttttcctttttctcgatgccatctataacgaaaagaactcaaaattcaccttatactacatttcttcagttgaaataaataaaaattaaaggctgaaattaacgatgggtgcttaataagatacaactcgcttaatgtgctctcagaaatatatcac

SEQ ID NO: 267651 - DNA, 433 bp, Glycine max
gacctgcctcgacgataagatatcgctactctaaatcgcatttattccaattcttcgtaggcgaacactccgcttatatgcatatgaaaaatgatagtgattttttttgcaattgcattcaccactcaacgcgcaattacttaaatgaatatgtataaatatattatgtcactgcgcatcatccacatgacgggaagtaaattagttcatacatgtgaattaatgtgtgatttacatccccaattcaaaaagaattatcaaactgcgatgaaggagctgattaacaaaacataactgtctcccaaaataatcccaacgtcatcacgaaagcttggtatctccaactaaagaaccccactccatgtgatctactattgtccatctactcccacgaacgaaagttcttgatcatcacaggtaccaaccacactgt

SEQ ID NO: 267652 - DNA, 432 bp, Glycine max
  unsure (1)..(432): unsure at all n locations
gcggcatgcaagcctgctttaagactgtatattgatttctttagtatgcacaccatgtgttcctttccctcaactgagaaccccatcgggtggtccatacaaacattcttctataaatctccattaagaaaggcagtattcacatccatctgagatagctccaagacataatgggctactaatgccataataatcctgaaagaatcctttcgtgagacgggcgaaaacgtctctttatcatcaatgccatctttctaagtaaatccattagcaacaagtctagccttgtaacgttcaagggtgccatgagagtcacgtntagtcttgaagacccacttacaaccaactctcttacaaccctttggtaattctacaatgtcccaaacaccattatgttccatggaatctatctcttctttcatgacatttaat

SEQ ID NO: 267653 - DNA, 402 bp, Glycine max
  unsure (1)..(402): unsure at all n locations
tctngaaatgaggaagtgttgaatggtgaatctttctgctcttattgttcaccacacagtggtacctggagatatgtcgcggtggtcaagagaccttggggacgtcangtggggtgctattgcccaaaaccaagcttgaccaatcccgacccatcccgtgcatagtcggtcagtgagaacctgtgatgtacctaagcaagcgagctcctggcagtcaattgataaaaggaacaaagaccataacacactgaggcttgtggtggctggccagctgtgaaacttgattgatatgtgagatatggtctctggcaatcgattaccaanggtgggtaatccgtctacaatgcttaacaatgaagacacgaggctcagatggtctctggtcatcgattaccacggggt

SEQ ID NO: 267654 - DNA, 409 bp, Glycine max
acgagatctcaactttgaagttgttgttcaggttgattcatttttaccacacagcatagttatcacttaatctctctccctcacacacacatgcacactcatgcagagaggagcaaggagagcaatatttagttaaaaaatctttggctctcttgtagttctattttcttagttgctgtctgcagtattgcagattttgcgccaaaaagctacttccatgaagcaagactacacagaaatgacaactactgtaaggagatggtcttatacttggacattgattttactgtcaattttgcaaaaagtaactgttttgaaaccaacttttcttgtgaaaataatagcagtgaatccactaaagtcctgttgtttccttttatttctttggaaatataatgcgttaagtctt

SEQ ID NO: 267655 - DNA, 432 bp, Glycine max
  unsure (1)..(432): unsure at all n locations
tcactaataattaagtatttacattgacagcatgatacattatatgaataaataactntgtgtgcattgcttacaataaaatgtattacactaccaatataattaattaattataattttttacattaacaaagttatttattaatataatgtatcatactgttaaatgttactccctatattttttttagaagagttactccctaaatcttaaaacagaaacatctataaaaactactaaataaatagtttaataaatacttaatcaatatctgggagagatgaacaatcgttttatgtgtccctatatcacgttttccactttagagagccgtacaagattctggaattagatatcattatatcaagagggaaaaaaactaaaatgatattttgctttntatatataaaatattttaaaaaattatcaat

SEQ ID NO: 267656 - DNA, 418 bp, Glycine max
agcttgaaatcccgctgtacttaaataggtctaagatttaaatcttccatatatgcagaatttgctgggataagagcactttgtagctgggggtactcctaaatttcggttgcttgagaatcaacaacaagactttgagttacagaatgatgactaccaaagtcattgtcgacatcttctaaggcaaaatgacgattgcttccatcaattaaatggccatcatcattaacattagctaccagagaaggataaatagccttctgttgttgagccacatgcctgaatagagcatatttctattgatttcctctattcgattggttgcaacatgacattgatcacaaaacattggcagtctttcgtactctactccaacatagaacgcgtaatctttatctttcaacaagaatctcaatat

SEQ ID NO: 267657 - DNA, 431 bp, Glycine max
  unsure (1)..(431): unsure at all n locations
tcttcagtgctaccgttcnctttcccttcatgttgggtttttgtaacaagacttagggtatacgagtgaagaacctcccaagtaattgtcttattcacagaaccaatgtttccactgatcatgtcttcgtgctctctttcaacagtagtgacctccaagttaagtggacgatcatggcatgaagaagagtctacgagactcgattcagctggactgacccttgaaggacgatcatctgaactgcatatgttacccatgtaggacgtgtgtatttgtattcttctaagacgatttttcgaactaacgacgtgaaaagtgcgttgtaaaagcttctttttctagtgttggaattatcatacactcatggatgcacgatcgggtttaaatatagctatacctacaaagcgtctagaatattcatcgtggatatt

SEQ ID NO: 267658 - DNA, 420 bp, Glycine max
  unsure (1)..(420): unsure at all n locations
agcctgagattttattattatttcttacttcgatcatccgcctcggcttaatgaaggatccagttacaagtatggattaacaagctttaatccaactcaacttttatatgaaaggcacgaacacattcattaaaaggcgaagataaatttaaaaaactggcagtgagaaatcaaatgggctcgtaaaggtgtaacgtccataatataggcctgaagtttgaacatgtcaaaaaaaaaaaaaccgaagtacccagaaaagagggataactgctaccttttttttttttattcttacgtacattatgaatagcaaatatttgatattccttctcatgaaagacaagggttncacatgggatacatctattatcataccacaaaagactgagttcaaaccgtaatcagagctttcacctatgc

SEQ ID NO: 267659 - DNA, 421 bp, Glycine max
  unsure (1)..(421): unsure at all n locations
ttataanaatgtgaacggacgttttcaatgctgcanatgtcataccaaacgtctaacaagagcgcaagatctgcgttcaattattaagatgcctgtaagaaagatcacaaagacgaaacttgatccatgttctttgtcttcagtgtgatgacaagtgtattacttttatcctatactcaagaaaaatcatcaatagcttaagtcataatacttgtaatatgctaacattaaaaatacattcatttcaagtgaagcttgacctcaacatatataacatcaattatgataaccctgatttatagtaagagttactgggttttaactcagcctctgaatagcttccttaaagcaatcactattcatcaactactttggaactattattatgatcggtcataatgagtggctctcaagtctcaac

SEQ ID NO: 267660 - DNA, 402 bp, Glycine max
  unsure (1)..(402): unsure at all n locations
ctgcagctttagaaaaccataaaactaatgtttttcctaaacaaaaatcaattgaggaagcttcgcccaatatccctattgaaaaaactttattcaaacctttcaaagttagtgagaaagctaaaccaaaatttatggaacttagaaaaactagatccttaattgaaggcgtaggggataaccatagtgaattacttaacacgattggtagtttacttaaggtcattccaaatactcctcaagcctcggaaaatactttcaaaatggtaacaagaagtacctccaaattaattaatgttattaatgaagatagtgaccaaaactcagataacacaactgagataggatcagtgtcagaaaagaaatataatccaattaattccacacactgganaacaccct

SEQ ID NO: 267661 - DNA, 441 bp, Glycine max
  unsure (1)..(441): unsure at all n locations
tgaagacaagactatacgagggatcttccttgggtatatcaatatctctaagggctaccgtgtctacaacttgcaaactaagaaactcgtcatcagtcgagatgttgaagttgatgaatatgcttcatggaattgggatgaagaaaaagtggagaagaacgttcttatacccgcttaactacctcaagaagaatatgaggaagaagatccaggtgaaccaccttcacctacatcacaacaacaagatcaagaactatcatcaccagagtctactccaaaacgagtaagatctttggtggacatatatgaaacttgtaacttggccatacttgaacctggaagctttgaagaagcgtcaaagcaggaagtatgggtcaagggcatggaagaagagatacagatgatcgagaanagcaacacatgggagttagtaaatcgtcc

SEQ ID NO: 267662 - DNA, 300 bp, Glycine max
cggactcaatcgcatccgaaaaaaaataatgtatttgtactgctcacagctcaacattcaatttcagcgtgtcgattattaccggacttcatcagacatcccaataaaaagttattgtccgttgaaattgctcagagcttccgaattcaatttcgagcgtctcgatatattacatgacttaatcagacatccgagtaaaaattattgtcgcttgaatattctcatagcttcaacattcaatttcgagggtctccatatattacgggactcaatccgacatccgagtaaaaagtattgtcc

SEQ ID NO: 267663 - DNA, 444 bp, Glycine max
  unsure (1)..(444): unsure at all n locations
tatgcgcctatttccttacatacgttctcttgcacaagataatntaaccgaaaaaatacacccatatacaatcaaggcagcttcgttacctacattatttacacgtacctccaaggtgtatttgttacttacatcacacacatctccttggctaaattcacatacatgcatactcaaagcattgtggggcaccaaaaattgcacatgtgcacatcttggcatttctaatacctatacatacgcaaacttcatgatgaatcttgactatctacacaataaggtgctacatttcatgctctttnttcaagtttttgctacctaaagccgcatgcaaattcaagcatattttcctttgctgactaaaattgtattcaaattaaaaggtataatttttgtaatatgttttcttcacataacatgcaacatatttatatatattttttt

SEQ ID NO: 267664 - DNA, 415 bp, Glycine max
  unsure (1)..(415): unsure at all n locations
agcttatctcanatcaatttatgaacaaatttaacctccttaaaaatacatgtttcactccaaccaaatgcatagattgcacattgttcagtccctcaagctcatgcaaagatgggaaattacaaatatttacattctttcaatttgcattcagacaaacacaaacacacatttatattaggtggaacaatgtaatattaatttgaatattgattacatatatactattttccatgatgatataataacttgccttgtgacaatatataccaacaacccagttgtttaaatatttcatcaaaaatgcttgcatggttccattcttttctctcttcacatactccaaataattcggatgaattatccctataactagcctgaatttagtcttccatcttttcccatggtgatacca

SEQ ID NO: 267665 - DNA, 445 bp, Glycine max
  unsure (1)..(445): unsure at all n locations
ntgaagactatattacaactaccaaaagccaccatacttctcttacggtcttactaaacatggagatatatggttggttggatggttaaaaaagaacgaaatgagagaaaggtcgagggtttgatttctctcgttaacaaaaattaacaaaccaacaattaacatttacccgatagaaaaaagtcttgctagacacaaaatccaactagaaatcaacaaaatgatccacacagacagaaaaaaaatactaaaacaaccccaaaaggaggaagaggaagaagagccccagacgcaccttgtgattttacttaagagctgaacaagaagaaaaaacaagtcagcaacaaaaagaaggcttttgggtggttggaaatagcagagagagcannagtcagggtgataggtagagacttcaagaacaaggcaacggccaaagggtgaggaa

SEQ ID NO: 267666 - DNA, 345 bp, Glycine max
gaaatatactattgaactacactcaaatcgaaaacaaatttagaacccacgatccacccttcaaggttattacaaaaatcctttaattgagattctacatattttaataaaatttgcattttatttattaaaatgaaactgaacttctataaagattataacaaagcaaaagttgaaaaattaatctaaattagatatgagtgaattgagtaaaaccttttaaagacttcttacttaagggatataaacataatgcgaggattccttacttctcctagtggctttttgaacgaacttaaagatgaaattcgagataaaagggggaactaagatctttttacgcaa

SEQ ID NO: 267667 - DNA, 435 bp, Glycine max
  unsure (1)..(435): unsure at all n locations
tctagatgtggtgtggtatgacggtttatgtcgcgttatgacattattacaggacgcnggaggacgaggcatagggtggcccaatgcatgacacagggtggtgggtggtgggtggtgtactgcacggtgaagggttgatgtgcattactatgggaagaagacaaacgaaagagggagtgacatctttgttcattcgacttcctttgggaggtgtaggattcacataccattttaccttatcctccaagagcatgtgaaaaccaattaaagctcaattttgtatttgctttgacctcttattattatcattagttaacaccattgaaacgattgtgctttatattaatatttgacatatttaaactataacttcttccatactttcaaattgtctataaatattattaccctcagaaaaggtgtgggttcaatatt

SEQ ID NO: 267668 - DNA, 254 bp, Glycine max
gcacggctccatcgacatgggccgttgaacaagaggatcaggaactgtccactctcggtcttgcacagaatccacggatttaaccccccaaacccctgaactacgaagccgaaagaacacaatgagctcgagaccaacatggcggccaaactcaagaagtacatgccggcccaagctttacggaggagcaaccactaccctgaccgctgaagccctccatggcatagacaggcaaatgccaacaacattaccct

SEQ ID NO: 267669 - DNA, 332 bp, Glycine max
gaccaaggtttgccaccatgctttacgatatgtgaaggtggatccgaactcttgtcttaagaatgcgatgaaaggaagaatggttatgtgctcgttttcttcaaccatcacaaggatatttttgcctacaagttttgaacctatcttattgagatcttatgaaatggttggcattacacatgtgtgaggcccttctatcattctaatttcccaaacttttagattttttctttcggacgcttggtggtccaaaaaatgcctatagacgaggttgacgggcactcgatagtcactaacatcaatgctatttggatatggaggatagacatttt

SEQ ID NO: 267670 - DNA, 407 bp, Glycine max
  unsure (1)..(407): unsure at all n locations
ctcaagcttctacttatgtggcagggcgggcttccttcaccttcttgtctataccgtttctgntgacaccactcttcctttccgcgatgcttctctttatatcggcctgagtggccttatagcctaacccatacttcccacgatttcctttggcatttattaggctagttatgtcgccgttgtctttgcctaaacccattccgggttcgtaaccgttccccaacataactcgggccatcattactgctacatcggacaggcaaggctgcccatagaaagagtccacggaggaaatgcttaccacctcaaaagaatggaaagcggtttctaatgactcctctgtggcctccacataaggcatagaggatgggcagcttaccgagatgtcttcctcgcctgatacgatg

SEQ ID NO: 267671 - DNA, 318 bp, Glycine max
attctaattgtttcaccatattgtatacggttagaaacactatatacattatactttccttcttgtacatcgcatattcgcgagtaacctctgtattctttaattttaactatacttttctgttttagaataattggaaatatatgatccggtctggtactttgctctccaaacttgttcttaatttataagagaaattttcacaattatagaagggggtgctctatacccttcctcaaattagtagttatttttattataactattacattgatgagattgatatattctatagatgtggatgctctcatatgctat

SEQ ID NO: 267672 - DNA, 413 bp, Glycine max
gcagcagatgccactctactcttattttttgaaagatatgttaacaaggaagcataaatatattcatcaggaaaacatcatagtggaaggaaatcgctgtgttgtgatccaaaagatccttccacccaagcattaagatcttgagagtgtaacttgatgaggacacaactaagggcaaggaccatgaagcacttgaagggcccatgaccagaggcatgcttaaaaaggcccaacacagtgatgaggacacaactaagggcaaggaccatgaagcacttgaagggcccatgactagagacaaacttaaataggcccaacacgtcatagagacaaggctggtcattcgtatagctgccattgatgatgattgaaggcccatgttcccataaattttacttttattatattattta

SEQ ID NO: 267673 - DNA, 172 bp, Glycine max
  unsure (1)..(172): unsure at all n locations
ttatattaatntcgccactcatacaatgaaatctgtgttcgaaaatgcttctagccagagtataacatttctaaagtttatcactcgcgaactcacctacttagcaaggacaagtgtcttgcgatgcatcttctgcgctataaatacagtcagcagtttacacctttaccat

SEQ ID NO: 267674 - DNA, 405 bp, Glycine max
  unsure (1)..(405): unsure at all n locations
agcttaacgacctgtggagtntttaactccctgcttcattggcaccatgtactttgatagagcattgtgtgatttacgtgctaacattaacttgatgccttgctttgtttataagaagttggggtcacaagaacccctaacccactaacatttccattcagcttgcggataggaaccttacttacccgaggggaatagtaaataattttgttggtgaaagttaaaatttttatctttcatgttgaatttttaattctagacatggaggaggacaaagaagtcccaacattttgggataacctttccttaacattgcaggggttctaattgatgttaaataagggaaactgacttggaggttatgtgatgaggaagaagagcttaaaatacttggttctttataaa

SEQ ID NO: 267675 - DNA, 454 bp, Glycine max
  unsure (1)..(454): unsure at all n locations
tgaagtgaganagcgtggaagagttcgtcttcctactttttatttgtgaccacagagtggtacctggagatatgttgcggcggtcatgagaccttggggatgtcaagtggggtgctatttcccaaaaccaagcttgatcaatcccgacccaacccgggcatagtcagtcagtgagaacctgtgacgttcctaaataggcgagctcatggcagtcaaccaataaaagaacaaagaccacaaatcaaggaggcttgtgtggtggctggccagctatggatcttgagtggtatctagaatttggcctctggtaatcgattaccaagggtgtgtaatcgattacaaggcttaaaaatgaatacaggaagttaagatggcctttggtaatcgattaccaaggtgtgtaatcgattacaaggcttatacatggagaaaggatgttgaggtggcctctggt

SEQ ID NO: 267676 - DNA, 414 bp, Glycine max
  unsure (1)..(414): unsure at all n locations
agcttgatgggacatatagatcctctgatgntttattaattcngacatattcactcgtggagccgtctttccaaactttcacttaacacgtacttgctctatatttcttgatgcaggttcccatgttcacagcatctggattacgtgttcgtatcctcaaggtattcatcgcaacctaccggtcccctttttcctgcattctctcataactaggtgattctattttctttatttactctcttcaggtgtgggagaagagtgggtacaataccgttgagtgggttcgttacattacaaaagctggatcctacgagattatgtgctaaacaaaatttgtattactggatggagaatgaaacaaaattccgattaagccgcagttcacgctagtcatcctatgtttcgtattgtatt

SEQ ID NO: 267677 - DNA, 447 bp, Glycine max
  unsure (1)..(447): unsure at all n locations
ggggctngaagaacatggatgataaaggttcacacttcttatattacaatncatacctggcatgccttcattccacatgtccctcctaatcaagtagttctgaacagaacatgtccaagagacatacaaaacttaatgtaaccaaattagtgaagaaacaacaaactttaatttgaccaaagtagtaagaagcatacaaaacttgtatttgaaaaaattagtaatgacaaagctttgctaccaattatttgaatatttaatttcaccaaaaaaagtaaatgttcttcatgatttcaggatcatggttagaacaagagggttagggcgtgccttaagtactagtagaggcagagacatgagtcaggatgcacatcatcctaaagttccttgacgtaggcctactacttcaatacgtaggcaacggggtcatgtgactgaagatgatac

SEQ ID NO: 267678 - DNA, 348 bp, Glycine max
atatcaggagataacaacatgatctctacagggagtttctaatgaaacactaccaatctttagataaaaaataaaccacagtaatcatgaaatgtgtaatactttagcagaccatatgacctcgatctttaatcctacgttaaagactaccaacaacagctatcaatagatgaatggtatcgtaactcaaacaggagatacttatgccattcgtagaaacgaacctgggaataaacatgcaattcaggaaatactagtacaagacgaacctattaataataataatcttgaaatcgaagttaatgtccttcacgaatagtgagtgataaagaacaaccaaatcctatt

SEQ ID NO: 267679 - DNA, 420 bp, Glycine max
  unsure (1)..(420): unsure at all n locations
gatcttaagncaccgcggctgcagcttggtctaacatggacttttattgttcttcccgattttgaatataggggcaaaacaaattcatgtgtcagggtgtcagtctcggcttaaactcccatattatttcgacgaggcgcccgtaacaatgatgatttggaaacaacgcgcgaaattagtcatgcatacagctaggtgggtactcaagcaaccagcttatggcattatgatactaaggcttgggatttacgcaagtagacccaacgtttccaaattatgttctttcattggttcaacgaatccatccattcttatctcggttattttggaaaataaactcctggcgtcaatttctttgttccaaaagatatgtttgctctctacgaatgatatgtgcttcctatgaccataacatgccga

SEQ ID NO: 267680 - DNA, 439 bp, Glycine max
tgtctcagcgtttatgcgagacggagaccaacatgctatctatcatcgccaagtaccaagaagagttaggtctagccacggcccacgagcatagaatcgcagacgagtatgctcaagtatacgcggaaaaagaggctagaggaagggtgatcgactctttacaccaagaggcaaccatgtggatggattggtttgctcttaccttgaatgggagtcaagaacttccccgcttgttagccaaggccaaggcgatggcagacacctactccgcccccgaagagattcatgggcttctcggctattgtcagcatatgatagacttaatggcccacataattagaaatcgttatgaaacttgtatggtctctcaaaccttgactagatacgacttcctttttgaaataaaatgaagtggtcccatggttctacttcaaaaagc

SEQ ID NO: 267681 - DNA, 419 bp, Glycine max
agcttatccttatggcctggcttcggacttttccccccgtgccaccccggaagatttaagccaagcccttactttcgaggggcaactcccaccttatgaagactatcccgggccagacaatggggaatgagatacccatcttggccccctgcttcacctcaaagatccatccccgcatgaactaccccagccgaacatagtccactatatcccggcctcacccacacccgtaaaagaatctgttcccttcgcggaagataagggaaagatagaggcgcttgaagagaggttaagagcagtcgaaggccttggcaattacccattctccgatttggcagaattatgtcttgtgcccaacatcgtcatttctcttcagttcaaaggtccagactttgataagtacaaagggacgacatgtc

SEQ ID NO: 267682 - DNA, 443 bp, Glycine max
taattgatgttaggcatataggtaggtgttgtgaggtgttttgctgggtttcggtcaagtaagagtcgaagtcatggtgtgggcatacctttccttctttgccccacttgctccaaatcttctgctgcttgtaccggcaggggcaacatagtcgaacttttctcttttcaagcctacttcgatcctcttgcctgcaaatactagatctacgaagctagagggcatgtagcccaccaacttttcgtagtagaacattgacagcgtgtgatgcaatcctaccccccaagggcattggatagaagactccaagaagattgggccaaagatgcaagagaaggccctagggttctcatgagccttagggtagatatcgggcccatgggctaagtatgagcccacttatctttgtacatattagattaagggttcattaattatgggtc

SEQ ID NO: 267683 - DNA, 400 bp, Glycine max
  unsure (1)..(400): unsure at all n locations
tagcttagaattgtttaattgaattaaaattttttnaanaatgaaaaattatcattcgatcataggtcaagtatcttgtttgtttactatcttattaataaatctaacgttgaattttaatgcttcactggtggtgcactttttgcatacttcaccgtagacagtaccaaagtagacatataatcctaagagcaggcacatttactgtacagggcttgttttataaacaatttaccaaacagggttccttttaaaacatattacagacagggtctgttatggacgtggatgccgccattgctatcggcgggagagcttgtaccgccactggcaatggcgggaacaaggatgccgccattggcaacagcgggactcagcctaaaccgccagtactaatggc

SEQ ID NO: 267684 - DNA, 434 bp, Glycine max
  unsure (1)..(434): unsure at all n locations
ntgataataggtttagaaactttgataaacttgtggctttatatgttatagttcgaggggattctaaattggttattaataaagttgttcaaaaatacaaatgcataagttctaatttaatgaaatattttactcgagcatgtagatttgtaaagagatttaatgacattgctttcaaacatgtgcatagagattgaaatgttagagcaaatgagttagctcatatagcttcaagatataggatatctaaagagaaatttaaataaaagataagttacttgatgaatatgcggttctcaacattggtactttgtctttagatgattggcgtaaacttttatttgaatacttgaagaatcctcaatcgacaattgatagagttgtcaatatgtgattctaggtgatgatttattcaaagaggtgtaaatgacact

SEQ ID NO: 267685 - DNA, 429 bp, Glycine max
gcttctagccaaatggacttaccttgaattaattcctttgatatcccctttgagcctatcttcccctttctttgttttgaagctcattacaagccttaagtgaaaaaccatgatatcaccttacccttaaggaaatttggagctttaaaattgttttgggaataagctgggattaagtgtgggggggtatgtttcattggaagatatgatttttggccatgcttaatgttttattttggtcatgcttgatgtatatatatattgcctagttctttctttaatcttcaatttcgtactgttcaatcaaaataaaaaaaaattcaattgttgcaaattctgcaatttcctactattcaaaaaaaaaagaagaaaagaagtgaagctgaataaataaggtcttgatatgaaaactcgatttgggagccttgg

SEQ ID NO: 267686 - DNA, 95 bp, Glycine max
ccccccggggagcatgtctctgcgcccaaacaccgcgcacccccgagggcatttttaaccctcgagccggggatttcctcacccataaaaaacac

SEQ ID NO: 267687 - DNA, 418 bp, Glycine max
gcttacatggagctacatacacggtctttcttttgtcatatttcttacctcttaacataggtgatttgttagaaaaaaatgcttcttccatttctttctttgattttgctagatcctttccttagtattattaaatactcaaccaataaggccaagttatgacacaaatcaaaataacaacaatcacactagaagggggctcgaatagtgtgttaataaaggatagaaacttatacatagtaaagagttttatcccaagttcagaaagctatatgtactaaagttgtccactgataagtaaaaaaacaagtttgaaaaaagtagaagttgatcgtccagtaaatataaagcgatatattaaaaagggttttaaataaacacttggtgggaaaacgtgacaaagtaagataagagaata

SEQ ID NO: 267688 - DNA, 475 bp, Glycine max
ctatactatactcacgcttaatctccatgttgttcccctgatctctaacaatctccgcctttatggctttgatgatgccaaactagaatttccatttgagtgcatttagagagtcttgaaagtagagactcctcttgagaaaaaaacctgaaagtatctaaacactaagagaagtgtcaaatcatatctcatcatcatagagtagagttagtatacagtgtactactacttcctaatgcaatgttaatgcaatatttctcccccttttggaacaacaaagccaaaaagtcacagctactaaacaacaaacaaatatatgatgtgacatacaaaaataccattgcatttcatccatacaataaccattacaacttaatcagtacaactattttaagaaaacataacttattaatcaaacatcataataactgactagaaaatataaagacaggattaatagcaaacaaaaatgaca

SEQ ID NO: 267689 - DNA, 401 bp, Glycine max
caagccattattttttctctcaaagagggccattcccacgcgaagaagtggaatcactccttagtcttggacgacaagaaagaaggcccctaccctcaagtaaacaactccacctccacaatgaagggtggagaccacctgaatcctcaggtggaaaataattctctagaaaggcccacccatactaggagtctctacactctgctactcccttccatactctttcataagggtcaagaaggacccacacatcgccagaagatatcagaggcctacacactctcccacaagcttctagagagaccaacactactctagagccctctacgacgttcaagaaaacccaacacttttctaaaaagctgtagaatctactacaacccctccaactaaagagggag

SEQ ID NO: 267690 - DNA, 374 bp, Glycine max
ttgtgactgtggtctctcgatcggttcaaaagtgtcaacttggaagcaatggacacatagatcggttctccaaaaaaggttatgactgaattcccaatacgtcttaaggtcgatgcatttgatcatgacaccactattcttgataacaatcttaatatgggaactccatgccactatcgcggtaatttcaattaatggatactatttcttgacaaagattcgatccttgtttatcgatgatcggttttatgcgcagctgaggcatactctgatgcctcacttgctattagcgaggaaactctggaatcaaatcaaccaccacaaaacaagaatctgacatcgttcttatgaacttgagccatagcgaagggcca

SEQ ID NO: 267691 - DNA, 276 bp, Glycine max
aaagaattttacattttttttcacccatcgaatatggacgtgcagcgacctaactgataatcaacttatttataaaataagagaccgatgcagtttgagggaaattctcccaataagacccaaaagttgtctttacttttgtctaattctatattaatacaaattattatgataataatactgtgaatttattcgtttcaaaacacagacatttctttttggaaatctattctaaatttactgtagttacgcctcatatttaatcatagattttta

SEQ ID NO: 267692 - DNA, 134 bp, Glycine max
ccggaagcacggaaagaaaagaaagagccccctggaaacctgaaaagaccccacaaacctgaacaactgaagaactcaggagaagagagaaaaaaaaagggggaccaaataagaaaagaagaatacttggtggc

SEQ ID NO: 267693 - DNA, 417 bp, Glycine max
gcttagctttcttgtagtgagtgggctgctcttatctctattaaattcataggtacatgcatccatcatccttagagtatgtgaacggttaacgtattctattattcatggattagatgcccagaagtcctatgtattcccttgcactctattacatgttgaagaatcctttggaagacaatcccttattgcagagctttgtggatggagatgatgcttataagaacctaggatttaagttgataccatatatttctaaggttcatttatactaaaatgtgacatgtaataaacaccaacaaaaataatgcaggatcaggataataagcgtatctaaagggttctgctcccacgtgacttgtttctcttaaggatcatggatagttaagcaaagtgtttgtaaaaaagattgttagt

SEQ ID NO: 267694 - DNA, 423 bp, Glycine max
agcttgaaggtgtgtaacccaccattttccatagtagaattctggtaacgtgtctactatcattgtcatcgttttttcgtcattgaggtgccacttgagctgtcaggttctccccctttgggcatattctttgaaagatctgtgccccctttttgcacatgttttgtagttgcatcctatccgaagccattatactgacacagcctaacgaaggcaaccattaggtccttccaagaatggactcgggaaggttccaagttagtgtaccaggtaacagctaccccagtaagactttcttggaaggaatgtatcaacaattcctcatcttttgcgtatgcccccatcctccgacaatacatctttagatgggtcttggggcaagtagtccccttgtactcgtcaaagtctgacaccttgaacttg

SEQ ID NO: 267695 - DNA, 433 bp, Glycine max
  unsure (1)..(433): unsure at all n locations
tattataggcgtatccctcaacanaaattaattatacattcaaatcttaaactgtatatgcttttatattattcattacttttgtctcatactctctatatgttatttcttctaattcaaatatgaattcaattcaaattgacatttaagttgtttgtttgctttgatgtaaaaaaaaatagttaatggcatgcatggttatatttttaatcaacaacttatataaaaagaaaagtattaaaaaaacatttattttatcagtttttcatatgcttcctttcaattagtcttattttttctctaattataattgatcattaaatatttgtaatagttttcatatgaaatcttcgacatactaatactacatgcaacaaaataaagtcatatctcaggtggtggacatggtcatttacacatatgatcgatatca

SEQ ID NO: 267696 - DNA, 418 bp, Glycine max
  unsure (1)..(418): unsure at all n locations
nagcttataagaacaacattgccttaatcttttttcaatatgcatgcgaattaggacgcatcaacaagaatcaagccaaggctattgtgcatacaatcaatggggcaaaacacaccaaatgattataatgatggatggctcaaattctcacaaaggtaaaatcatcactttcaaattgagctttcaaaactatcatgacatgtagagaagaatcaaggatttcaagtcacaaaatgtcaagaacttttattttcaaaacaattacccattttttgaacatatcctataattcaaagaaaaatatgcaaagtcgtacgtgcacacaaaattgacccaaaatattaaactaaaaatccgacgaaactaacaacattaacaaattaacacaactaacatattaacaaaaccaacaaaacta

SEQ ID NO: 267697 - DNA, 388 bp, Glycine max
  unsure (1)..(388): unsure at all n locations
tccgccccggagtatgacagtcaccgctttangaagcgttgtcaccagcagcgcttcgaagccatcaaaggatggtcgtttctccgggagcgacgcgtccagcttagggacgacgaatatactgattttcaagaagaaatagggcgccggcggtgggcaccactgattactcctatggccaagtttgatccagaaatagtccttgaattttatgccaatgcttggccaacagaggagggcgtgcgtgacatgagatcctgggttaggggtcagtggatcccgttcgatgccgacgctatcagccagctcctgtgatatccgatggtgttggaagagggccaggaatgcgagtatggtcagaggaggaaccggtctgatgggttcgatg

SEQ ID NO: 267698 - DNA, 398 bp, Glycine max
agcttgaaggtgtgtagcccaccatctttttatattagaatactcggaacgcgcctactatcattggtattatttttttctccgccattgaggtgccacttgagctgccaggtctctccacctttgggcgtattcttttgaaagattcgtgccccccttttgcacatgttctgtagttgcatcctatctgaagacattatactgacactgcctaacgaaggcaaccactaggtccttccaagaatggactcgggaaggttccaagttaatgtaccaggtaacagctaccccagtaagactttcttggaaggaatgtataagcaattcctcatcttttgcgtatgcctccatcttctgataatacatctttaaatggttcttggggcaagtagtcccct

SEQ ID NO: 267699 - DNA, 441 bp, Glycine max
  unsure (1)..(441): unsure at all n locations
tncatcaaggagctctagtntcttggtcctncaccaaggtaaccagtttaacattgtcatcctatgaagctgagtatattgcagcctcagaagctgcatgccaagcagtgtggctagatgccccgatgaagaaattgcaactggaataatcatgtaaagtgaagttgttggtagacaataaatcttccattgatttanctaggcatccgacttctcatggaagaagtaaacacatagaaacaaagttccacttcctaagaatgtcagcaatgagaaactgaagattgaacatttgcaaactgaaattcagcttgcaaacatactcactaagactttgaagctagaaatgtttagatgtttaagaaattccattggaattgtttgtgtaaatgcaactttgaattaaggaggagtgttaggaataattcaaagttaaaatag

SEQ ID NO: 267700 - DNA, 424 bp, Glycine max
  unsure (1)..(424): unsure at all n locations
agctntgatggtgtcgagaagaaatatttgtttgttatcatcaaaaagggggagaatgggaatgtatgtatacatgattttgatgatgccaaagaagaatcaaactaagttgcttcaaaggataagcatggctttaagattaatacaagattgattcaacaaacatagccttgcttcaagattaactcaagatcaagcctggccttaaaacaaagtgctttcaagacatgcaaggctctggtaatcgattaccaagcagtgtaatcgattaccagaagacagggttgagaaatagctgttgaaaagggttttgaatttgaattttcaacattgtaatcgattaccatatgttggtaatcgattaccagtggagagtnttcaaaaagtcatgacactttaaattattactgtgtaatcgattaca

SEQ ID NO: 267701 - DNA, 443 bp, Glycine max
  unsure (1)..(443): unsure at all n locations
ngaaggtgtgtaacccaccacttttccatataagggttgtggttatgggcgaaattaggcccctccacagtgttttgcaagggtataccaccaactgcttgcccttcagtggcatatccgaggcaaggctcgaagtcggctagactgtggtggggaatttcatgtgtctcccccatgggttgagagacatgtacatgatgaggttgtcggctctcaatgagtatgggagcagagttattgacatcctcattgggagtgtacgccacattgagtggtgtatagttgggaggcaagccatatggcgggaaggtgtgctcgttntgaatttgcacatcatggggtcgtccgtacttcctaaatctttgcctaccatatctgacgttggatgattcattttggtgaagtcagatggtggcatcaagttcaccttagcaacaacgcta

SEQ ID NO: 267702 - DNA, 412 bp, Glycine max
agctagggaggattgatggggacccggtgtttatataaacgaggatatgggctacgtgggagtacgtgagctcagatggaggggggcaacaggggatggtgggtttatgcgcgctttgtggatgtagaaaacttgttgtgcaccaatcgccgaccgccacctattaccacatgtgatgggtaccccataatcctacaagcttgagatgaggaagtgttgaagggtgaaacttcctgcttttattgttgaccacagagtggtacctggagatatgtcgcgggggtcaagagaccttggggccgtcaggtggggtgctattgcccaaaaccaagcttgaacaattccgacccaacccgggcatagtcggtcagtgagaacctgtgatgtacctaaacaggcgaactcctggcag

SEQ ID NO: 267703 - DNA, 441 bp, Glycine max
tcaggctgttcaattgcatcatatagttgcacagaatgacaaagatctgtatggtgatctgcagaagaacatagaccatagactcttgcaacaggtgcagatttttttattcatggccagccgggttaccaggttaaccaaggcatctagtttaccttcaagcttcttagtctcggctgatgaagatgaattcgtggctacttcatgcactcctctaatgacaatagcatcacttctggaactaaattgttgggagtttaaagccatcttctcaataaaatttctggcttcaacaggggtcatgtctctaagggctccaccactggcaacatctatcatacttctctccatgttactgagtccctcataaaaatatcggagaagaagttgcttaaaaatctggtggtgaggacaactggcacatatgttcttcaatctctc

SEQ ID NO: 267704 - DNA, 359 bp, Glycine max
ggatctctaagcacctgcagcatgcaagcttcattgcctaacatgtcaacttctttattaagccccaagagactcagcataaggatgcacagaccaaagttgcgtatgtaaaaaaattgtttgaccaagtgaatgtgcaaattgcaaagaagaatgaaagttatgccaagcaagcccacaagaaaaggaatgaagtggtacttgaacccggtgatgaatttggacatttgagggcaaatgttttccaagaaggagggaatgatgaaaatcctgaaattgggcaaatacaggctaaaggcccaagtggagaaaggcaaaagcccaagtggagaaggataaagcccccgagtggagaaaga

SEQ ID NO: 267705 - DNA, 462 bp, Glycine max
  unsure (1)..(462): unsure at all n locations
cggaccttgaaactaagcttgcattggaattgtgaaagccccactccatcattaggattattacctgacatctcaaacaaacaaatcaaacgtaataagacaattatagttggtgtttgaatacctcacccactcaagttgatatgaaccctcatggaacaagggctgacttangatcgtctaggattaaaccttgatggaaaatgcggaaattgattaaggaaaggatggaaaataaggtggctaatttcgtgggtcttaataaggtggttcttggcataaaatggatgaatgggatggtaaaacgtaggttaagtggtggctggacagaaatatagaaatggcaataactgaagctacagggctccaaatgaggtgattccaaaacgaggtgaaaggtctcattttgaaattcactttaggctcaagaatcacttaatttgagtgcgtaaaatgggagtt

SEQ ID NO: 267706 - DNA, 443 bp, Glycine max
  unsure (1)..(443): unsure at all n locations
tcaacatgataaggcttatgaattactcaggattattgtattttgactataatatgtcttgtaagaatgaatattgactagagaattaatcacatatttatgtttatctttacatttatatacatacaggacatattatatgagagaaatatatattatatgagagtgagaaaattaaatctaatccatataactaaaatattgatcatcatcatttaatgtcatttgaccccctaagaagtcatgtgactttttgacattaaatcttaattttttatatatgattatataattcaaatttaatcatttcactctcatataatatgatttctcttaaaagatatgtgatatatatattaaaggagaagggtgggatattttacatataataggagatggtgaaagtagttntgaaagaaaattaaattcatgaggatcacttt

SEQ ID NO: 267707 - DNA, 430 bp, Glycine max
ctgcagcatgcaagccttgagacgcatgtgaacctatggcattatttatacattcaggtcgatccttagggtacatgtttttggaggctcaaactcccaacctcttacgttagagaagttaattgatcctacaactttggtggtccaacttaggaacctcatttgaacaatcacctctatcagattccaacttaagggtgccaagatcaaaaacatcgagatattctttttttgactttatcttaataccatgtacttcctctgggaaaagtatttagactttgagtcataggaagacactatagccgtcttgattcttactatagagctatgtaaaaagatacactactacaacaaggccttctatgacgggtgtaacacatattcaaagacggttcattgcaagtcaccattgaagccaacgtcattg

SEQ ID NO: 267708 - DNA, 463 bp, Glycine max
  unsure (1)..(463): unsure at all n locations
actatacattactcaagcctttctttcataatcaatctgtctactgactaacaattctaatgcaattcacattcttggtctttctttgatcgacatgaacatttgctcaaattcatgaaaagaaacaccaattgcatcaaaatcatgcattcaatttaagatgaaagccaaccacccatttaacaaaaagataaaagtgttcactgccatgtcctaaaaaataagttaaactggtccacatgcttcaggataagcattctaactattcatatttgaaactaacaagagagtaatagtgtacttaaaccatatttattctaatagatcaaacagcacaaaaaaatcaacaggaattaaaagatcctgtgattggtcctgagtgtcctgtgtctgaacctnctcctcggcagtcaaatgaagcacaggagtagctactggagaaatgttcatagacaggactggg

SEQ ID NO: 267709 - DNA, 424 bp, Glycine max
agctttgccgatttagttatgaccggcaaaatgtcttatgtgggtctgaaaagaagcaaatcttattatcctgctttgatgaataggaagcccgggctaatgaagagaacaagaaggagggaggaacccatgttgccattcctacatggccaaatttcccaccagctcaacaatatcaatactcagccaatattagtccctttcattacccaccacactatcattcaaggacactctattatccacaaaggccacccctaaatcagccacaaaaaccacctgctgcacatccgataccaaacaccaccctttacacgaaccaaaacacccactgaggaaggaatcttctataaaagaaacctattaaattcaccccaattcccgtgtgcgatgctaacttactcccatatctactcaataatgc

SEQ ID NO: 267710 - DNA, 426 bp, Glycine max
  unsure (1)..(426): unsure at all n locations
tctcagcttgcttctcaggtgggagttgaagaaattaaacggtattcacacttgctcaaattctttcatggtaggttagactcttttataattgctcatactattggtcatttagtgaaaacaaatcttggtatcaaaatcaaaaccttgattgcagataggcattaacagtttgattacattgtttcatacaaaaaagcctggacaactaaataaaaagcccttgaaatgacatttggatgttgggaacaatcatacaattatttgcctatatggttgacaactacttaatattttgtaccaggtaccatattaaaatacaaaacttcatcttcaatggnggaaggtgaggattagtctcctagggtgattcttaaacgtgtattttgggtgtttaacccatgcattgaaggctttaaatattgc

SEQ ID NO: 267711 - DNA, 274 bp, Glycine max
aagatgtcaatatagactaacgtagaggtaaaggtttctgtttgctttttatcacaggcaaaggaaggtagtcgacacacaaatctacaatggagcattgtaaacgttacaacctataaacaacaacaatagcaataccttacgggaagatatcatagaacggtaacgtatgacagttccgggaatggtgtcatgaacaaacttgagatggatatgccacatgacaggccgcgctgctataagatgtacacggatttctggagaaagaggggga

SEQ ID NO: 267712 - DNA, 427 bp, Glycine max
  unsure (1)..(427): unsure at all n locations
atgcnagcttttagaaatataataaaagatctagactattgaagaatcaattcatgttgctgctgataagactaactctattaaaccaagaaaggatatacttggtgatattacaaatactctagaagatacgcatattcatgaagaagtccacaaagacaaagaaaatggaaatagtagagattctcaatccaaagaaaataaaataaaataaacgtggatcttccaagggagtggagaacttcaaggtatcaccctattgataatatcataggtgaaatctcaaaaggggtaacaactcgacactctcttaaagatgcatgcaataacatggcttttgtctctttaattgaacctaaaaacatatatgaagtcataatcgatgagcattggattattgctatgcaagaagaattaaatcaatttg

SEQ ID NO: 267713 - DNA, 426 bp, Glycine max
  unsure (1)..(426): unsure at all n locations
ngtctggtaaanaatggcatgtttaatgataaaaggtgatatggacaatattggcatttcataagtttgctgggtgcaccaacataaatgctgggtgcacctagtaacactctgattatatataggttggataacaaattttgtttttttttcaacccaatccaactaaactcaacccaaatcacataattaaatttatttatcaatttttagcttccgtagtttattaaattaaatcacccatgagtatatttagtctttatatacttacgaaactttagacaaaaacaaattattattctaagtttttttaagatataaaatcatttaaaaatattgaaacctaattaacccaatccgttattatcaggatggattggttatgtattgaaaaaaanataacacaaattcgacccactcaaccca

SEQ ID NO: 267714 - DNA, 358 bp, Glycine max
  unsure (1)..(358): unsure at all n locations
ctgaagcatgcagctcagggtaatgtccataatattttgtaaaaactgtattaaattatggagatcgtggnattgtattgtaaaagacatccttggctaaagtaaaattgattgggatggactaacacatgatcccattgaaatgaaaatgcttggaatgaatattgcactgtaagaattccctaatatgttgctattaggtattcaaagtagataggatttgactttttcttctttatattatcagtcgcataaatcggctaaaccgtttcgattcaaggtgcttcaaaattgggatgatatagtggatttgggtgctaaagatagaaccaccggtcatggagctgatgaagtgatg

SEQ ID NO: 267715 - DNA, 446 bp, Glycine max
tgttcgcacatcgttcgcgtgtatgatatccactcgactatggttgtagtagaggagaccttcaatcctatatcgcaacgtggcggacaaaaatgggcagttaacttgaatggccattatcgtcaatgcggaaggtattttgcgcttcactatccatgttcacacattattgcagcttgtggttacgtgagcatgaactactaccaatatatagatggtgtttacaccaatgagcacatcttaaaagcatactccgcacagtggtggcctcttgggaatgaagcggaaattcctccttctgatgaggcatggacactaatccctgacccaactacaattcaggcgataggtcgcgcgaaatcaacaaggattacgaatgatatggattgggtctaaccatctgaccaccggacaaaatgtattaaattgggacctgaaaggcacat

SEQ ID NO: 267716 - DNA, 425 bp, Glycine max
agctctaacaatcatgcttatggtcacactcttagaagaaaaaaaaaagaattagtctacacatgttaacacattgattaaacacactcatttgcaacacacctgccagttcaaggtttttgacaacgttaatacacacatcatgttttcaagaccccttgtatcacctaacggcttgccatgacatcctaccgcacttcatgaattatagagatggctagtcttataactcatgactcaacaggggatttatggtataacaaacattaaggatgcaagacacatacaagcattattatcaagtctcatttgctcatgcaaaagaaagcacaaataataattctagcgtgctcaacaaagtaatcataagtaaccacacagagtgtgcaccacaatatgatagcacataacacacttaccgaaaa

SEQ ID NO: 267717 - DNA, 427 bp, Glycine max
  unsure (1)..(427): unsure at all n locations
ngtttggcttgattacctggtcaaaaacagatattatattgtatgattatgaggacagtgattttggaggcgtgcttagctcaaattcttgtttttgaaatctttattgaagctgttcataaacatatattttaatgtttgattttgtgtttatcttgaagctattcttgttctccctcacttgcgggtcgtgcaaaacactaaggtctcaaagatatacatttctgccttataccttttctttattatctttngaatgttttaaatggcgattatgatgtggttattatatattctttcgctagttagtcttcactcttcataaatacaattatcattcaactttgcctgttagtctttttaaacaaagttggatttaattgtaagattcaacttttagatagttgaaccattcacagcacactat

SEQ ID NO: 267718 - DNA, 430 bp, Glycine max
  unsure (1)..(430): unsure at all n locations
gatcttaagcaccgcagctgcaagctgaacgaaatgatgcccttttcacagacctttagntctctcgaccagatatgcagattcaataaaatttgcaagtggaatcctagtaacacaagcagatgcatttaaaccatgatgatgtataatgacacccatttgccatgtgagcatcatccttgcaaaagttttaataaatgttatgtaaaaacctggcaaatgcagcatttgatatcatccttatcctcattacaacactcatgtgtatatgcagactgatatatacttcttttaagacattcagcaaatgcttcctccggcaaagcggtgctcacagttcccatcctctcttctagagctaaaaggttctgtcatccatcagaaacttttggagctaagataacactagaaagagaaaacttatagattt

SEQ ID NO: 267719 - DNA, 437 bp, Glycine max
tctagaatagaagattagattagagccgagaaatccttgtttatatcttagagaaatcaaaatcggtagggttagcgctagagaaagcggggccgaggttaaatgaaattggggtgaggctgccgtcgctggggtcggcggtgcgcccgattctggccgaaaaagacgccctcgcggcggtcggcgggcacatcaaccgcgccgtgggtcccgccgcggcggtgctcaaggtttttgacgccgtccacggcctcgaaaagtcgctcctgtcggatccccggaccgacctggctggatacttgtcggtgctgaagcgcctccaggaggcgctgaggttcctgggggacaactgtgggctggccatacagtggttggaggatataattgagtatttggaggacaattctgttgctgataaaggttatctcgcgaatttg

SEQ ID NO: 267720 - DNA, 408 bp, Glycine max
  unsure (1)..(408): unsure at all n locations
agcttgcanttgaatactnatgaggagcctgttcttatcaaaactataacnacggaaggagctttcctgctgatgtggattacggttcaaaggaatctaattattaacgatactcatttgggtccgcatagtccggtgcatttgtaaaaaacaaataatataatgggatctttgaatgttttaaatgaaaagtagcttattgaatcagcggggctatatttaattgatgtaatgtaataatgagtctgtagtgcatttttgtattgaaaatgtaagcaaattatctgtttgtttgtcgaaagataaaaaagatgatgcatacaatgtctctagttctggtgttgatggtactgcatgtttgtggagttatgtctactataagatctgaaccttggaggtttgtgtgca

SEQ ID NO: 267721 - DNA, 451 bp, Glycine max
agtgaaatggcattgattgatatgtgatagcagaattactcatttgttccacaactcatagacaaatggactagacaaattaaagtgatctaaatgtcctaaccaagttgcacaaaaagtaacattcaccttgaggaagcagatttataattgctgtatgatgtgttcagcgagagaatcactaagctagcaacaagcatttgcatacccaggtgtttagacacctcttgcaatccaatatcctatcacaaaattcaaaaaaagaaagtaacaatttaggcaataacacggaaaagaagcataaacacataaggttttaaaagggttaacataactaacctaccttgactgtaacatagaacaaggtgaatgacaataaagctgaaagtaaacagtaggagcatgacgagtcagagaatctggtggttagaatgtacaaataatacgcact

SEQ ID NO: 267722 - DNA, 399 bp, Glycine max
gtcctaaatgacatttttagctagtattaactcactttaacctccatttaccacagaattcagacttagccttccaaccctcaaaggctcactctttttccactcataacaccacattctcactttccaaccctagggtaactctacctttcatctctaataggttttccatgagcaacttcagcatataaacatcacaaacatcatcacaaaaaccctaaatagaatgggtatgtctaactcatccaaacatggcaatttcaacaagctttcaacaagagtcttcacaaataaccatcatgaagcagaaaactaccaaaactacccatcatattctccaaaaccccatacccacgaaatttaagagagaaagaagtcacccaaacctgaaatttcgaa

SEQ ID NO: 267723 - DNA, 429 bp, Glycine max
  unsure (1)..(429): unsure at all n locations
ngctctaaattacatagatgtttgtatttatgggaggatgttgtatgccatatttgtattaagggtagtgtcccactggtaagactaacctttcaaatggttgccttcgcaagaaatggccccgaagaaacttgcctcaaagaggtccaggaatgacaaggcagccgaaggaactagttccgctccggagtatgatagtcaccgctttaagagtgctgtacaccagcagcgcttctaggccatcaagggatggtcgtttctccgggagcgacgcgtccagctcaaggacgacgagtatactgattttcaggaggaaatatggcgccggcggtgggcaccactggttactcctatggccaagtttgatccagaaatagtccttgagttttatgccaatgcttggccacagaagaggcgtgcgtgacatga

SEQ ID NO: 267724 - DNA, 385 bp, Glycine max
agcattttgcaaaacttacttgtaaatcttggacttaaccatggtagaagtctccacagaggccattgcctccctcacccagtattatgatcagccattgaggtgcttcacctttggggacttccacctatcacccatggtggaagaatttgaagagatcctatgatgtcctctagggggaaggataccatacctcttctcagggttctatccctcattagctaaaatttctaaaatagtccaaatctcggcacaggaattataccacaggaagcaagtcgaaaatggggtggttggaataccgagaaaatgtttggaggcaaaagcaagattcttgggaggtaaagtgaatgggccctgtcataaacattctcgccttgtgatc

SEQ ID NO: 267725 - DNA, 435 bp, Glycine max
  unsure (1)..(435): unsure at all n locations
ctgctaaagtgatacgttttgtaataagccttgtttggatcgggatccttatgatcaacctcgtagtgcatcaccgctggtggaggtctaccaaaaactgcttgaaatggtgtcatgcccaagctttggtggaaggaagtattatactaaaattaagcccaaggtagcatattaacccaactcttaggatgttcaaatacaaagcaccttagatacatctcaatggtcttattaagattctcagtctggccattggactgagggcgatatgaagagctcatggtcaatgttgtgccttaagctttgaataattgttgccaaatagtgctgataaatattctatctttgtcagaaacaattgtttntggaaaaccatgaatattgacaatgttggcaatgaaaacttcagccacaaccttgttattaaactcaaac

SEQ ID NO: 267726 - DNA, 390 bp, Glycine max
tggtctttaagtggatttttaaaaggcctatgactcagtctcatgggcttttttggattatatgctgtaaaaaatgggtttttgtctcaaatggagacactggatttctgcctctctcaattcagcaaccatttcaattcttgtgaatggcagtcctacaaaggaatttgctcctactagctcctactaaaggcttgaggcaaggggaccctttagatcccttactcttcaatatagttggagaaggcatcactggattgatgagggaagcaattcagaagaatttatatcgaagttacatggttggaaagaaaaaggaacccattaatattttgcagtatgcggatgacacagtatttgtgggagaggctgcttgggagaatgtttttg

SEQ ID NO: 267727 - DNA, 458 bp, Glycine max
tgagatgaggaagtgttgaagggtgaaacttcctgctgttattgttgaccacagagtggtacctggagatatgtcgcgggggtcaagagaccttgtggacgtcatgtggggtgctattgcccaaaaccaagcttgaccaatcccgacccaacccgggcatagtcggtcagtgagaacctgtgatgtacctaaacaggcgagctcctggcagtcaacagataaaaggaaaacaagaccacaaagcaaggaggcttgtggtggctggccagctgtgaattttgtgtaatatgtggatggtggcctctggtaatcgattaccaagggtgggtaatcgattacaaggcttaaaattgaggacaggaggctaagatggtctctggtaatcgattaccaaggggtgtaatctgataccacgcttgaaaaccaagtcaggaaacttagggagcctctggtaatcc

SEQ ID NO: 267728 - DNA, 378 bp, Glycine max
tcaaccgcaagctttgaccaccgtactttcttaccgcgaagcttttctatatatccgcctgagtgggcttatagcctaaaccatactttccacgatttcctttggcatttatcaggctcagtatgtcgccgcaggctttgcctaaacccaattcgggttcataaccgttccccaacataactcgggccatcattactgctgcatcggacaggcaaggctgcccagagaaggagtccacggaggaaatgcttaccacctcaaaagactggaaagcggtttctaatgactcctctgcggcttccacataaggcatagacgatgggcagctcaccaagatgtcttcctcgcctgatacgatgaccagatgcccttccacta

SEQ ID NO: 267729 - DNA, 462 bp, Glycine max
  unsure (1)..(462): unsure at all n locations
actatatcatactcacacttatgctccgaanatgtaattatgagattgagatgccggattattcaccatcttctattaaccatgtgccgcaacctacccttcggcgggagggcgacgcgtgactcactggatgcgtgttccacgacaggaatacacgcggagtcttcaccaacatttatttgaggaaaacgtcggataaaccggaatagacgcgatctacgaacttttaaatgaaaggttcgggaggtgaatttacgcacggtgaatgtattagcaccccacacgcccgttccaagggacgagaagcttttatcgaatagtgcaaacatgactttgagttttatgttccctctatgggcgtatattcctcaggccctctgtataattctctctctatttatgcgccgacagggtggattcctttgcttccaccacttctcaattgggatgagaaatcaacct

SEQ ID NO: 267730 - DNA, 383 bp, Glycine max
ctgcaacttctcatcactattgaaataatttcctgaagatggttgtctttgagaaggtgtttgtctctcatcaataaggacaaatataacatgcctcagtctttttgctaataacttagctatcaacttgtacatacacccaatcaaggagattggtctgtaatcatcaaaggactgagggtgtttaactttgagattagagccaaaaaggaagcattactgcctgtagggaagctgccatgcacatggaattcatctacaaatcttctgaagtcagttttcagcactccccaaaattctttaatgaaattgaagttgaatccatcaagtccaggacatttgtccccaccacagctccacactgcttctttgatctcatgatc

SEQ ID NO: 267731 - DNA, 420 bp, Glycine max
gatgtcaggattcgagattcaaaatgatgacttatctcaagcagacacttctgataactagatatgacttcagaatgagtcaagattgagtcacgaacactccacagatcaagaggaagatttgatttcaagaatcaagaatcacgactcaagagtcaagaataatcaagatcaagattcaagactcaaagattcaaaaatcaagagacgacttaatcaagataagtattaaaaagtgtttcaaaacattgagtagcacaagaagttttacaaaatcattaccaaagagttttactctctggtaatcgattaccagattatagtaatcgattgccagtggttctaaaacgttaagattctcacaattcagaatgaagagtcacatctgttgatgtgtatcgattaccctttatggaatag

SEQ ID NO: 267732 - DNA, 251 bp, Glycine max
gagaatgaaaaattttctaagcttaaataattctcacaaaaaaacttatatttaacttacctttaaaaaataagtgaaggctccggcctatgactcaaatcttataaatattattgtttatgatagaaaaagagtgtaaaaacacttctatactcagctattggtgattattattaatattattagtattattattattattattattattattattactattaaagggattttatttcactattctaaca

SEQ ID NO: 267733 - DNA, 454 bp, Glycine max
  unsure (1)..(454): unsure at all n locations
tcaaaattcaagtttcatattgccctgtctgcagcctgttcttttcatactccatagactaccagagagcttgttttcatggttaaggctaaacgtaccgtttgggtttttaatgctaatgaattgtattttttctcataaaatggatcgtgagatattaccatatttgtaacacaaagaatagggtacaactctttaattaatgcttgtaggcaactattaacaaacttataaatctttttaattgatttttctatattattatctattaagaaattcgaatgattactttcaataaagaaattcttttaatcatattctcttatatgattcnaaactgatattgtacttaagataatcaaatttaaaattactcataccaatttattgataatcacgtctttaattgatattctgaattcgaattaagcttgtttttgttttcaataatatc

SEQ ID NO: 267734 - DNA, 400 bp, Glycine max
  unsure (1)..(400): unsure at all n locations
agctnttacaaaattataaagccttcatgttctattattatatgtgnaatatgaaaactattatgatgattctacttttttttatatattggttgtatatactacaccttataagtaactattgtagtatttttttttcaatttttgtaaaaaaataaattcttataagtcgaccattgatccctttagttgaaaatgaagggacgagataaagtacaaatcacaggacgcatttaactaaacgctccaaaggattttgatcacctaatcacatttgatctatgctttggacaaagcacgtatgataccccaacatagtactataatattattacaaacatagacagtgaaccaaataaggcaaagagaataatgtcgaaaagtacagaatgggagaaag

SEQ ID NO: 267735 - DNA, 450 bp, Glycine max
attaagagttattagtgtgtgttcccgtatgatgcacaattttattaattaatattctctcattttataaaaattaatttagcattagatatattttttaaaaatagtataattaattatattgtgagaaaaagtcatgcactgacatatataaatgtgtattatactctcactttttttttttgagatatcactaacttgattatgtaaaagagtcagactcaagtatttacttttgtttttttaaattcatacattgcatgttaagcctattttttaattatcttgtataaaaatgattattaaatattatactgataaagctattaaattatctaagaaaaactaataaagataattgagtttaattaagttagaaaaaataatacaaataattaatatttatccacacatattacccacggaatatgtctttgacacaaatgaaaa

SEQ ID NO: 267736 - DNA, 415 bp, Glycine max
  unsure (1)..(415): unsure at all n locations
gcttgagagaaagaatcgaatcggtttattcgattaccgatatctcataatctattacactattgtttgagacaatgactgatttatttaggagtctttgctttaatcgattaccaagtggattaatcaattacttctatctcgttcaagtgttctggggtgaacaagaacactttaatcaattacttaggttatctaatcgattacattgttcttgagttgttttctagatgttggaagaacattttaatcgattactttgtgaaaataattgattactttatagatntaatcgattacagacggttataactgttttctctataaataaccatcttgtgttcacatctacacatcaagagatcattacagaatactcaatacatctcaaaaacaactttctagccttagaata

SEQ ID NO: 267737 - DNA, 448 bp, Glycine max
  unsure (1)..(448): unsure at all n locations
tcatgatgaatcaagatagattcagagatgtttngatgatgacaaanagctcacaagtcaagaacacgtcatgataacgaagatgatgatctcaagaatcaaagaatgagttcaagattgaatcaagaacacttcagggttcatgaggaaatttgatttcaagaatcaagaaccaagtttcaagattcaagttccaagaatcaagatcaagattcaagactcaagattcaagaatcaagagaagacttaatcaagataagtatgaaaaagttttttcaaaaactgaacaacacatggattgtttctcaaaacatgtttaccaaagagtttttactctctagtaatcgattaccagattgttgtgatcgattaccagtaagcaaaatgtgtatcaaaaagctttcaattgaatttacaacggtccaattgatttcaaaaagctgtactc

SEQ ID NO: 267738 - DNA, 417 bp, Glycine max
agcttataatcaatatgctgcaatgatgcttttggctgaatgtgtaaatattaagggaaaccaagtagttttattaatagaaaattaatttattagagagaaaagagggaaggcacagttggggagattgggggggaggggacaagatactattcaaaaaaggaaagcatattacaggataataatctagaatgcaacaaaactgtctgcatatttagaaatggaaactctcttgaaaaagccaagggtaaagcacccaagtgaagccataaacaaaagctcaaagcatatttagttgcaaagggaaacccttaaaaatgtatgtacttcactctgacaaagatcaagcttaagcaattctgtaggcacataggaattgtttttttgcatctttaacacaccaattcaaatttattt

SEQ ID NO: 267739 - DNA, 437 bp, Glycine max
  unsure (1)..(437): unsure at all n locations
ntcctataatagaacagagcatccaatattccaaatccataggaataagaaaagtatcataaaccaaatgaaacacaaattcacatgctctgcaaaaacatggtacgaatatggctgacataacaagtatttgacttcttcagaagatataaagcacgggagaaaggtactaaaactaaaagttaaagacataaaaattggcaaaagagccactaagctcacctagtttggttatagaattctccacagtattaaacagatctcttcgtttgctcaactgtgagggttcatccttaatgtcaatgggatgtagtatagtggatatcaacagtgcaacatgccaataatctttaagctctcttaagagaaaccctaaataaataaaatataaaaacctcagccaaaacagatacaattcataatgcacaatagcgtac

SEQ ID NO: 267740 - DNA, 406 bp, Glycine max
acctgcggcatgcagcttgatggagaggaatagaaaatttaatcactttggatcaccttaaaaaaatcctcctatagacatacacatggcacttaaaatatcctttgatgctctgggttacctcgagaaggaggtttttctagacattgcatgtttcttcaatggatttgaattagcagagatcgagcatatactcggtgcacatcacggttgttgtttgaaatttcatattggagcattggtggaaaaatctcttataatgattgacgagcatggccgtgttcagatgcacgaattgatacaacaaatgggtagagaaattgttcgacaggaatcatcggagcaccctggcaaacgcagtaagttatggtctactgaggatatatttcatgttttaaaaataaca

SEQ ID NO: 267741 - DNA, 440 bp, Glycine max
ttgcattgcagcatgatattgaatcaaatccaccccatttatcatagttccatcgaccttgcgtagaagataactccattgctttaatatgatacttctgaacctgtccattaaacaccaatccacatgttacttagtatattcaagaaaaaaatattataagcaatcataatgcgacatattatataccgttgctgctacaagccagagtaagagcacataaacgtaagaaaaaattatgtgtaagcaatgaaaactatactataacaatagaaatagtgaaacccagaaggcccataagtattcgacatcacaaaaaggacttccttacaaactttattgtgggtaaaaggcttttcttattgtgaatcatatataagatattcgaaccacaaataatttccttccatgacatattcttattctggcataaatgcaat

SEQ ID NO: 267742 - DNA, 201 bp, Glycine max
  unsure (1)..(201): unsure at all n locations
gaagtgaattttatggatgttagagtttttttaattttttttgaaaataaattaatatttattttaaaggttatgaatgattatttnattggtgnataattttagaagaattattttttatgtacacttttttgtttggtgagaagaataattgtatttgtnataattgggtttataaccaacctttaaacactatataat

SEQ ID NO: 267743 - DNA, 417 bp, Glycine max
cgaagctccacgaacagcttgaagaagttctgagagaattttggcttttacatgcccaactcttttgagtggcatttgtattggctggtatcttggtggcgcatcttaatatatttgatatctgtattgcatcatgcatcatcgtgggttggtttgagaaaagtttctaatgtagaaaacgttcttcaaaggcataaacacctctgtgttgatcgattacagcctcattgtaattgattacaacaagttgtctaaagcttggagactcgagtctcgtatcgggttaatcgattacaactatttcataatcgattacattgctagttgagagaatgactgatttattcaggactctcggctttaatatgataccaagtggagtaatcgattacttctctctcattcggtgtttagacg

SEQ ID NO: 267744 - DNA, 421 bp, Glycine max
agcttgtgtgaagagattttcatataaatacttataaaattcttgccattgtctatccgctaagcgcagaccttgcgctaagcgcttagtcttcacacgctaacccgagcttgctcgcactaagtgcatagacccctgattggttggatgaatagttcagctaagcgcacatcactgtgctaagccccacatcttgacgatagttttgttttatgaacgctgacaagtcatccaatagttttgtggaaaaatacagagaagaatcccaaggaggaatgcaaagctgtgatgacaagaagtaaaaggtttgtggagaatgaggaagagtgtcggacttaagaagaaagctgtttgaaagaaaggtactgatggcaaggaaaatgatgagcgatgtgaaagcaatcatgaaaaagagaaacaa

SEQ ID NO: 267745 - DNA, 412 bp, Glycine max
  unsure (1)..(412): unsure at all n locations
ntaggctattcaattgcttcagattgttgcacagaagggcaaaggtctgtgtggtggtcgacagaggagcataaaccacaaagtctggcgacaggtgcaaatttttgattcacggccagttgggttaccaggttaaccaaggcatctagtttaccttcaagcttcttagtctcggctaatggagatgaattcgtggctacttcatgcactcctctaatgacaataacatcacttctagtactaaattgttgggagttggaagccatcttctgatggaagcttgcttgtggggcttctatggaggctggatctttgagcttcaatggggtcctttaatggtgattttccaccatggagatgcagtggaagacaaaggagaagaggtgagaggaggcgccatccactatggaat

SEQ ID NO: 267746 - DNA, 417 bp, Glycine max
caacttatgaactttgttacttgagaaccttttattaaccattccatgcttgcgatataaataaatcttgtgatattcaatcatcactatcatcaattttgtaggaatgaaacaaaatttggtggtattctaaaactgttgagactattctacaatttcaccctagattatgacattttagtataaaatataatgtcacacctatctagcaatttcacccaaactgttaaaacttttctaaactcccattctttcttttttagtggttagttaaacttttctttatcccatcacatataattccttctctcttattgaaggttgtccagacattggcatacttagtcatcttttctttcaattctacatagcttctctatgataggctcaaagatcttgctagtttttttttttttt

SEQ ID NO: 267747 - DNA, 409 bp, Glycine max
  unsure (1)..(409): unsure at all n locations
ntggagttgtcangtgccaattcggcgtcgtctttaatttatactgcgtctggcttcaatacatcagtgggctatacttctgtgtccaacatcttgagatgttcccagccttggatgacagcttttcagggtctgctatccagtgattcgaggaaggccaccatccttgctttccagtattcatagttggtgccatccagaattggtggtctgttcactggtcctccttctttctccatgttcatcagaatatatctccctagatctcactcagtgatttcaagtgcctgctctgataccaattgaaattctgatactgtggacagatgtcgtacatgatgtcacgacatcacgcttcagaacatgcaaattatatttgacagtgtgtacacgttaaacacgtaaataa

SEQ ID NO: 267748 - DNA, 419 bp, Glycine max
  unsure (1)..(419): unsure at all n locations
agctttncgatacattccatgtacaccgggtggttcacattgttgtttcgcgtatatttattctcgtttcatttactttttatacccttttttgacgtgcttaagccatttaatttaagtcatttctcgcttaacctaaaaataaaataaatttccaccgatcgtttgaattgtattatccgttaacttcgtttaaaacaaaatttaaccgtttgatcgtgccgtaaccacgttggaaataaaaaaaaagagttaaataataatataataatcaataaaatattttttagtaaagtaaagcgaaaaatcaatcggacgttttctctttgggatttctcattcttaatcgaattgactaataactaaggtgaaactaaggcttacatcaactcacctagttaagctcgtccacaaaaata

SEQ ID NO: 267749 - DNA, 451 bp, Glycine max
  unsure (1)..(451): unsure at all n locations
ctatatcatacttacactttcanaaatacaactatacatcctaagatagaaatgcatcttaaaatgctttttcattattcatcataagcaaccttcaaactcagcaaccttacaaatgcaacacaaaatgggtcttcacaaaccttcagctacgttcaaaatgcaacaaaaaatgcttcttcagttttctgcatcatctttatcagcaaccttcctttgttaggctcttgttatggctagcttattccttgctataggtggaacaatacttgcagggacctacatgcaaatgccaaacatgaataattgtaatatataaaaatggagtgctgcgacaaaataggatgagataatactactttgttgtgacaaatatttaccagtaactccatgtcactatcttgtgacaaaagatgctgagataatataatcttcaccggatcttgttgaa

SEQ ID NO: 267750 - DNA, 384 bp, Glycine max
tcacattaaccacccaaataacatcggtgcctataggccaccttaagggaacacttgaatacactggtggcagaacaaaacaattatgccaaaactcaccgccgaaatgcccggcaacatcattgccatccgaagactcccaaatacacatactcagaaacattgtaacaaggaacaaagctttcaaactcctcaaaacagaaatccgactccttcaacctcaacggaccacgagaaaactcgccaatatccaaaaggtctgagacaagcttctcttgaagccttctataaccatggtaaatgcgacctcctgaagaggatgaaatcgacaaagtccaccaaacaaatccagtatgagcccaaaccaacataaacacttagctg

SEQ ID NO: 267751 - DNA, 150 bp, Glycine max
cccgccggaccacagagggcaaagagcaagacccaaaagagccgagcgaaaacgcagaaagacggggcgcacagaaaagcgaagaggggcagaaaaacccgagaggccagagacaacaagatacgggccgccaaggaaacgccgcaagag

SEQ ID NO: 267752 - DNA, 314 bp, Glycine max
ctgcagctgcagcttcaaatatggagagtgaaatctttttattgctcatgatgaaaacgacatgattcaggcgtttgagataccacaagatgaccaagcccatagaatgagtcaagataggtcaaaacattcagaatcagaaaagattcagagaacttaagttttcagaatccaaatcaaaatattcaaacaagaatcagactcagattcagaatcaaaaaagactcattaaataagtctgaaagtttttaaacttggtagccatgattttcacaaaacctttaccaaagatttactcttggtaatcataccag

SEQ ID NO: 267753 - DNA, 320 bp, Glycine max
gatatcaccatatccttaaggaatattggagctatggaattgttttggaattaatgtgggggggttcttgatcattgggatacattgttttggtggctatgctccatgatgtattttgggccatacttgatgtacattgtatattgggtaaatgttggacatgctgaatgaaatgttgcttctcaaaggctttagagtataaataagaaatattctgaaaaagataatgaagagcgatagagtcgagtgaataatatcttaaatggcacatgaatgatgaaactcttggttctacctttaatattaaatgctaactttac

SEQ ID NO: 267754 - DNA, 365 bp, Glycine max
catgctagaaaaccactctctttagcttttgtgtggaacacttcagtagaaaatcactttctttgtgtcaaactatgtttggtactatagagcatgtgttttgatgttgtatggtaacctcaaagagattccacttcatttattcttcataggatttgaccgatcctaggagaatatcttataagacatttcctgtgaaatgaatctcagatgcagaacattaaatgaagtcttaaatgtattctttaatgttgtatcagatcatgaaatacatctactttcgttcggaattttaaacgtagagcatgaagcatggtctaatattgcataagacgtaactcttaacctttgttttatttcatcta

SEQ ID NO: 267755 - DNA, 422 bp, Glycine max
  unsure (1)..(422): unsure at all n locations
agctagangcaagagagagacatcacctgttatataaggaacaattaccgagtggaagatctcaattacccatcttatgctgctcctttcaacacagcttatggagtaaagggaggttctcgcaaaccagccactgctcaatatacaaggactttancaaacgtgggtgcccccgcaacgtataaagtatctgtgtcgcagtctccctcagtgaagattatggttcaaccacaaacacttagtttcgggggacttaatgagaagaacaactacacagttacgttcacgtcttcatcaaagccttctggaacaaacagctttgcttatctggaatggccggacgcgaaacataaggttactagtcccattgctttcaactggacttagactctgaatttaacaagccctaactttgaattcct

SEQ ID NO: 267756 - DNA, 352 bp, Glycine max
ccttgaggaaccttcacccgacgaagacattgacaaaaactctatttctccttcttggacaaagtatggcaggcctggggcaaataaattttcttccatcaaacattggatgcaactgggatcgtatacccatatcagctagatcttgacggagattcaagccatccttcatcttgccttgaatgttaaagaagcgtccaataacactgtcacaaacattttgttccacattcttaacatcaatacaatgtctaacgtcaagatcacaccagttctggagatcaaagaatatggacctcttctttcatatgcaactctgacttttatacttcttttgggccttcccaaatat

SEQ ID NO: 267757 - DNA, 421 bp, Glycine max
acaatgatgcttatggtctcactctaagaagaaaaaataaagaattttgcgacacatgttaacacattgattaaacacactcatttgcaacacacctgcgagttcaaggtttttgacaacgttaatacacacatcaagttttcaagaccccttgtatcacctaacggcttgccatgacatcctaccgcacttcatgaattatagagatggctagtcttataactcatgactcaacagtggatttatggtataacaaacattaaggatgcaagacacatacaagcattattatcaagtctcatttgctcatgcaaaagaaagcacaaataataattcaagcatgctcaacaaagtaatcataagtaaccacacagagtgtacaccagaatatgataagcacataacacactagccgaaaaat

SEQ ID NO: 267758 - DNA, 442 bp, Glycine max
  unsure (1)..(442): unsure at all n locations
tgttgggcttgattacctgttcanaaacagatatnttattgtatgattatgaggacagtgattntggaggcgtgcttaattcaaatttttgttgttgaaatctttattgaagctgttcaaaaacatataatttaatgtttgattttgtgtttatcttgaagctatttttgttctccctcagttgcgggtcgtgcaaaacactaaggtctcaaagatatacatttctgccttttaccttntctttattatcttttgaatgctttaaatggtgattatgatgtgggtattatatattcttttgctagttagtcttcactcttcataaatacaattatcattcaactttgcctgttagtctttctaaacaaaggtggatttaattnttaaattcaacttttagattgttgaaccattcacagcacactatgtttntgctcttggt

SEQ ID NO: 267759 - DNA, 355 bp, Glycine max
ctttgctctattacgatgatcctattttcttctcctatgaataaaccaacaaccattttggcaactactgtttagatacaatgttaccttttatttatcatcccattgttctgatcatgatcctcacgactgaaaacttgactctggttgaatctcgagtagtgccccaagattggaagaggaatatcatcatgcatccatatcaagatagactattgcagttccaaatgataatgggatgaaaaatattcaaccaaagaaactatatatacaagaaatggggagaagagaggtacttatgagttcgcctaggcttgatatacacttgtctcattcacttattcactaacattta

SEQ ID NO: 267760 - DNA, 320 bp, Glycine max
gataaccctttgcgaagacatactacccttaaagctcttgacccccattccagctatagaatgctccacaatccttcgctatgagcttaaaaagtaacttcgatgaatgatgataagaaaaatgaccacatgaaagaacgcttattgatatccatatggaaatcaaataagggtttaaaggccttatcattggcccatttgctttaatatgaaatcatataatgctttttaagtttcttaagctatttctacttgttatgctagtggctgccaaaattgtgtaaactttttgctttccatatccaaatgtctaacatatc

SEQ ID NO: 267761 - DNA, 361 bp, Glycine max
  unsure (1)..(361): unsure at all n locations
cgatccgaaactgcatggaaaaggccttaatcgttattattatatataaagtttaacacttgcacctttctcaatttggcttttgattttttcttttaattggccaaacagagcttatttgatgagcatttttctaacctaattgaatcttttcaatgttgttgcagcgactcgctagagacaggttagagcaatgctctattcaggattactccgaaacggtggtaattggcactgcatcacaagaagtccagtaagtaatttactaattgagtttctaatattngtaattttgtcctcacaacaaaacatgtttgattntggaattgaagtttttctttatgattctgataatgggttt

SEQ ID NO: 267762 - DNA, 373 bp, Glycine max
  unsure (1)..(373): unsure at all n locations
tanaggttagagttggctaacaataggctttctggtgtaattccagatgacatttcctcttccacatccctttcctttattgatctctcaagaaacaaacttcattcttcgcttccttccactgtcctttccattccagacttgcaagctgtcatggtctccaacaacaacttggaaggtgaaatcccagaccaatttcatgactgtccatcacttgcagttcttgatctctcatcaaatcatctatctggaagcattccatcaagcattgcttcatgtcagaagttggtaaatttgaacctacaaaacaaccaattgactaatgaaatcccaaaagcattagcttaaatgcctacattgggcatgcttgatc

SEQ ID NO: 267763 - DNA, 413 bp, Glycine max
  unsure (1)..(413): unsure at all n locations
agctngtagaatggctagacatgatacatgttanggtttggnttggctcaaggataaaagggatgccccacattttccatgacacaaaatgcaaaaatgatgatttggaaattttatgcaaaactggtcatgcatgcacctatgcggacactcaagtgtcaaatttttatggtcatgtgatgctagggttcaagattcatttcctctattttagtcaacccaatgtttccaaaatatgttcttttatcaatttgtgcattcctccgagtccatttcgggcgtccggggaaatttcacagcattcacccttcaggtgtaaacacgtttttttcttcaaaaatcggttatgatcaatgaatgaatttttgttttccctttttgtctcttttccatttcattcatgtcattttttc

SEQ ID NO: 267764 - DNA, 421 bp, Glycine max
  unsure (1)..(421): unsure at all n locations
tctccttgcttttcctataaataggggaaggtgggaatatctataaatcttcaaccctcctggtatctgagattcacttaaaattagtgagaaaattggttccgtgaagaaaattcatgccgaggcgcttccgtaacccttccgtgacgtttccgtgagtgatttcgcgaagattttcaattgttcttcatcggtcttcgtttgttcttcgtcgttcttcggtattcaaccggtgagttcctgaaatcaaacttttcaattcattctatgtacccttagtggtcctcatttttctcgcgtgcttttattttcatttcatttactttccgtacccccttntgatgcgctttagtaatttatttaagtcatcttctcgcctaatcaataataaattaatttcaccgatcatttgaattgtaca

SEQ ID NO: 267765 - DNA, 410 bp, Glycine max
agcatgtgattggtatattgtgttatattttaatggacgacgcacccttaagttgagaccttactatgcatccttgaaaaatgtccacgtggtttccaacctatatttggcttggttctttttgaaatatcttgtgatgaatatcttgatgaatcacactttcgttcattttttatttttgaaactttgttgtcaaactcagaccttcttttcctagaaacaatgccctgcctaagatggtaatcttgttaacacaatttttgactcaacgaaggacacaaagagttcgtctttgtatgaatttataaaaaaaaatgttgtattttctaaaatccaaagtgtggtcatcacaatcttctaagtcataccttaggattgcacagaacttcaatctctaatgtgacattttt

SEQ ID NO: 267766 - DNA, 285 bp, Glycine max
  unsure (1)..(285): unsure at all n locations
ntatcatattgagttcgatgagttcaatgtgtgattggtgatgcataatctacacaaatgcctcactaacctccaagatggaagcatagatgtttctatggtgaaggagtgttatgttaatctatacagcccataggaccaagctcctaacaagctagagtacaggacatctgattaagaacgatgcaaacaacctgaatgaatttcttcagactccactggtggtagaagagggggaatctttacccacctaccctaaaatttgcaaggtgaggactaaccacc

SEQ ID NO: 267767 - DNA, 403 bp, Glycine max
ttcttccatatgtgatgcgctagtgtattattctcttctcacccctattcctttatcttctgtagcatccctatggtggaaaatcacctttgaaggacctcattgaagctcaaagaaccagcctctattgaaacctcataagcaagccttccatcaggcttgggcttgctcgggcttttgtaagccgattgcatgcacacatattgctcctccttgctcgtgccacaaacctcaaaccgaccttgatccattatccattgcaacaaatcctctgccactgggcatgcctctacgtcgtgtgctgccctcgggtgtaccaagcagttgtttccctcacccccatcaaagcaaatgatgtccgcctcgcgcaacgccttcaatatacaccttctagaggttacca

SEQ ID NO: 267768 - DNA, 453 bp, Glycine max
  unsure (1)..(453): unsure at all n locations
atgagaagttctggactcattactttatctattaaccttgnggtggatccaagtgctccgatcatccatttgcatactcatgttttggtggcatactcaccgctgtttatttctttaggaatttcatcataactaagaaaacaccaaggcacccctataacactcgatccagaaaaatggataatgaagcgggtgtgcaggaacagatgaaggccgatctatcggccttaaaagatcaaatggcttccatctcggaggtcatgttaaaactccagaaaaccatagaggataaagccacgacaaccgcctccagtacagttagggaagcggagccggtgctgcagcccgccttgaatccgggcctagacagaaacacgaccgtgttcggtcgaaggtatagtccgcaagcttatccttatggcctgcctccggacttcacccnccgtgccaccc

SEQ ID NO: 267769 - DNA, 224 bp, Glycine max
  unsure (1)..(224): unsure at all n locations
atgtatttttcccctgctttctttgacatcatgattcacttgattgtgcatttggtcagagaaatcaaatggtgtggtcctgtttatctacgatggatgtacccggttgagcgatacatgaagatcttaatagggtatacaaaaaatctatatcgttctgaagcatctattgttgagaggtacattgcanaagaaaccattgaattttgttcagaatacattga

SEQ ID NO: 267770 - DNA, 463 bp, Glycine max
cactctagcttacgctgcttagagccgagagaggaccagtcaagaggcgtagacatgttattgtgagacaagttgaaggctcgccagaggtccaaaaggagtttcgccgagcaattgggcaagaccaaaaaaaacatgtgggccatcattgaccaatacaaagaaaagctaatcctagtagaagcccatgaacaaaggctagaggatgagtatgcaaaggtatccgtcctgctagcgaaaagggaagcgagagagagagagagtaatcgattcattacacagagaagcaatgatgtggatggataggtttgcattcaccttgaatggaagtcaagagcttccgagattgctagccaaagccaaggtgatggtggatgtatactcggcctctaggaagttcacgggctcctcgattattgtcagcatatgatcaatctgatggcccacatagctatgaatcgct

SEQ ID NO: 267771 - DNA, 376 bp, Glycine max
taccatcacaatcattcgtctccttttcatcattgggggtaccacctgggccgccagatcccttcaacttttgggccgtgtctttgaaagaattcgccccctttatgcaaatgttctgaattgcattctatcccgaaccatatcaaaatggactgatacttgctaacaaaggcaaccattaggtcctttcaagaatggacttgggaagattccaagttagtgtaccaggtaacagctaccccaataagactttcttggaaggaatgtatcaacaatttctcatcttttgcgtattcccccatcttctgacaatacatctttagatggttcttgggacaagtagacccctttgacttgtcaaggccaccaccttgaa

SEQ ID NO: 267772 - DNA, 471 bp, Glycine max
  unsure (1)..(471): unsure at all n locations
tctggtgggacatcttgacttgctttccaatctgacatttacacagattctgtcttcttctattntcagattgggaatgcctctaacagcacctttgtcaatgattctcttcatgcctcttaagtgcagatgtccaaatctttgatgccatattctgacttcatcttctttggaggatagacatgtggaggagtagctggtttcttgaggtgtccataggtaacaattgtcctttgatctgctgcccttcattagaacttcactcttctcatttgtcaccaagcattctgactttgtgaagtttacattgaatccttcatcacacagctgactgatgctgatcaagtttgcagtcagtcccttcaccagcagtactttgttcagactaggaagtccatcatgaactagctttcccattccaatgatctttcccttagagccaatctcaaatgtcacataactagtggagca

SEQ ID NO: 267773 - DNA, 334 bp, Glycine max
tggagggtgcggggccaaaaagaggccccaaaccgggtacagaaaaagtgaccgggactggaaaacctatacctgaagaagtcattgacaatagaagctggccagaaaaaaaggaggtcctgaaagacaagaagaatgaaggaaatgccaactccaagaaaaaatcacaacacactcttacttcagtgctcactgcaagaagcacggtacataagagataccagattaaaatgaaagaaaatgaaaagaaaaagaaaacccccttgtgtctgttcttgaagtctgaaccggtaccatcgtgtaccatcacttgcatgacatgatttattcctcc

SEQ ID NO: 267774 - DNA, 354 bp, Glycine max
  unsure (1)..(354): unsure at all n locations
tattattactgtgagtagtaaaactctttctttaatctttaatgccaatggatatttaaaagtaaaatttgaaaatattgattagttccgaagaattccatgcacccgtttatcagtgtgtttgtgctcagtgatactgaaaaactntattaattatgcttaaactatgtggatgtttgagaccatctacaataccaaagaagaaatatactgctaatcnttcatgggaatcgaagntanggcacaacgtggcgttggttgtggtgattgatctacatatatcctncaatggccacttaattgcacatacggaaacaaacatggattgcttttaaagagtttaaaatagaattt

SEQ ID NO: 267775 - DNA, 422 bp, Glycine max
  unsure (1)..(422): unsure at all n locations
gatgatatgggcttcaccgacgaattgttcttgtgagnctaaaaagaggcgaatctgatcatcatactttgataaatgccaaaaaaactagggccaatgaagagggtgagaatgaaggacaagcccatgctgggactgccattcctttatagccaaagttcccaccaacccaacaatggcattactcagccaataaccaacctttctcttacccaccgcgcaattatccacaaaggccatccctaaaacaaccacaaagtctgtctaccgcactttcaatgacgaacatcacctttagcacaatccaaaaacaccaaccaagaaatgatatttgcagcgagaaagcttgtaaaattcaccccaattccagtgtcctatgctgacttgctcccatatctacttgataattaatggtagccata

SEQ ID NO: 267776 - DNA, 463 bp, Glycine max
  unsure (1)..(463): unsure at all n locations
tcaacatcagaccacttncagggtgctggaactacttcacatggactttatggggcctatgcaagttgaaagccttggaggaaagaggtatgcctatgttgttgtggatgatttctccagatttacctgggtcaactttatcagagaaaaatcagacacctttgaagtattcaaggagttgagtctaagacttcaaagagaaaaagactgtgtcatcaagagaatcaggagtgaccatggcagagagtttgaaaacagcaggtttactgaattctgcacatctgaaggcatcactcatgagttctctgcagccattacaccacaacagaatggcatagttgagaggaaaaacaggactttgcaagaggctgctagggtcatgcttcatgccaaagaacttccctataatctctggactgaagccatgaacacagcatgctacatccacaacagagtcacactt

SEQ ID NO: 267777 - DNA, 459 bp, Glycine max
  unsure (1)..(459): unsure at all n locations
tagaagggatccaacacaacaccccaaggttataaaacattattattccaatgtagaagaggaatatagactaaccaagggagagacacggtgttggcactattagaaaatatgctntctagatcggttatttatgattttcaatatcggtttttgaatcgatgttgaaagtaccgacgttgataatattattgttaacatcggttttttaaaaatcgatgttaacgtaatatgaattacacccaaaaaatgtatattaatgttgaaagttaacatcggtttttacaaaaaaccgatgttaacgaatgtgttaatgttgacagttaacatcagttctctgtaaaaaaaaaacgatgttaacgaatgtgttactattgacagttaacatcggttntttaaaaaaccgatgttaactaacattaacatcggntntctgtaaaaaccgatgttaacaaattg

SEQ ID NO: 267778 - DNA, 441 bp, Glycine max
  unsure (1)..(441): unsure at all n locations
gcttaacacttgtgcgagttgttcttcgttactgatccaagcgatttgtgtataacccacccgacccaaggatcaaacatgacttttagaagattctgggatcaaacaatgtatgcgtaatgttgttattctcagactgatagacacatctaaagtcctccctaaccccacttaactagctataccaaacattttttggtgcaaacacaatttgatattacataaaaccctcgaagtaaattctactgtcaacatatacattcatattataagtatacattgagaaaatatatgtatatattaaatagagggcaaagatgcatatcggcgtgactttggtttaacaaaaggattagtttcctacaatatggtgaactcaatctctgctgaaagaagtctcctacattcatttagtgtctgaccgtgtaaaanaatgcctac

SEQ ID NO: 267779 - DNA, 459 bp, Glycine max
  unsure (1)..(459): unsure at all n locations
tttttggatactacctggctagagcttgaatttgctaaatatcaactnttgctaacttaatctttgctccttttgaaagtcaacttttttggtgaagatgtagctttctctctgttttttgttctatttcctttatctactgcacaattatttgaattttatcccctaaaataatttaggatgcttttaccgttttgcagatgacggcaagggagtagatggcttgccaactgaaggtgtagaaattacatctttcgatcaggtaatttttttgccttcaattacacaaatttgtttgactgagagtgaactgaacaagtagaaagagctctcctcctatagtttcctctttccaaagggtttcccctttcactactcattcgctaagctctcaaaaaacaatttctaactaatcccctctaactaactaatttgtctaaactaactacgttttttaac

SEQ ID NO: 267780 - DNA, 401 bp, Glycine max
acatctataaatttaggttatataagaatgattatgagaatgctatccaaatagctatagcttattaattagtcaagtaattaatttataagaatgacttgccaaataaactcctaatatgattatttaaaggattcttgtatttatttttttttgaagaaaaaagaaatactctgaaacctttttttcttaagcatgtatgttgaaatatttgatatagatgctcatagttatgtgcacaaaactggtaaacttccatatcaataaggattggcggcgaagccgcatagatacaacgacattcattagggaaaataagagtttggtaaaataagggggcaggggttgaggaagaatcaattgctcacagagcatgctaaaacacctaaatattccacaca

SEQ ID NO: 267781 - DNA, 458 bp, Glycine max
  unsure (1)..(458): unsure at all n locations
tctcaaggaagatacctactctataaatagaagcatgtgtaacacttgttggaactttgatgaatgagagtcttgtgagacatacttcaaagttccacttctctccctcttttttattccttcaattttgtgctcccccctctctctttctctccctctttcttttcctccattgaagcatcctctccaagcttcttatccaagactcatcttggtggtgaagctctntcttccatggcttattccctagtggatgacgcctcctctcacctcttctcctttgtcttccgctgcatctccatggtggaaaaccaccattaaagaacctcattgaagctcagagatctagcctccatagaagctccacaagcaagcttccatctagtggtaatcagagcacaagagcttcaagtaggtgctccttaaacctccattattgtttttgctttaccttctct

SEQ ID NO: 267782 - DNA, 337 bp, Glycine max
ggctcttgataatatcgggaacggcgtgttcaactatgactttgggtctgccacaaaaacaatctcccagtctattacagggtttgaccttaataggatatcgcattatcaacgtgttatatatgatcgtatctgatctgcaaaatgaaaagtacactgtggcaaattatctttcttatatttggcctccttaaaagtgtctagccacctatttagcgcacttctttattaatatggaccccacaagctcaatctcttgatttacaccttgaagatattactagtttctcaaacaatgcgtgggtaaaaaagacttatcatcatcaaataatacata

SEQ ID NO: 267783 - DNA, 469 bp, Glycine max
  unsure (1)..(469): unsure at all n locations
ngtggtatactntaatctcactaaggcatagcatgaatataattactctttgcaagtgcatgttttaattatcataatcaactattgaacttgactatgcgtaaataaaatgccaaatttatgaaaaaatattggcgtaactggctggtgagatcaattttatataaaattcagctcaaaataagattttattgtatgattttttaataattataaaaaaaagtaaatagactaaaaaaaacaagatacttagcaaattaagtaaaaaaaatactgtgtcggggcaattgccccactgtggatccaattgacggtcaaaccaaaaaattgaaaaattaatatattctttcctagatattgtgtgattcattatgtgattctcaccaagtttattgtccttcttgattcacacgtcaatttgattattgtggtttcatggtaagtgaatttataagacaagtctcatgta

SEQ ID NO: 267784 - DNA, 429 bp, Glycine max
agcttatcacgagctctacgagcagtgttctgttttgagaagaaacgccctcaaatcaggcagagatatcaaagtccaattacgcatcgatgctgcatgaaacataaaaaaggcatcaatagcaacgttgaaacattataattttggaaaatattaccaataagattaaatcataaccaaacatgttttgaatttacaaagaaataacactcgttgtcataatattcttgtaaagatatacgttgaaacaaatgcctcctaaagggtgattctgtttaactactacacaggtcaataaatcctaatttataccagaaaaaatagcaactgatattagttataattggctgcaattttctcccaacttcgaatatgaattatcatttattagctgataaattctaattgatattggatagattttggatc

SEQ ID NO: 267785 - DNA, 282 bp, Glycine max
tatgtgcatggcttcctacggaggtgagcttgttctagacttattatctacttgaagaggagctccattcataattctggttctccatttcactacatcatacctcgtgacttccaggagtctattgatgattaatatcccacgtctacttgcttcacatggaagccatcatactgtattctaatttgtaccgatagtgcacacctcacatatatgtttgtttcttcactgcataccgaacgaactatacttttgacatatgacaaaccagtctatgtgcat

SEQ ID NO: 267786 - DNA, 494 bp, Glycine max
  unsure (1)..(494): unsure at all n locations
ttccctgctattacggacctataaaactcagcttataggtggaatatgagaccaaaattttaactcaaggtctttntgtatgactgccacattgtgtggaatttggcttctccaatttgcatattatggcaatcacttcaaatctgtaaaatccatgcagattgatagcttgcaaaatctaatttgtggaagtaaagggaatgactagtgtcaattctgcccccacccccttttttccttttctttttctaagatctattttggttcatttgtgtatcacttatattgggtttttcgttcttccagcttcggaaatgaaaattcttgttgcaaatgaaaaatgaaagaatttctgatggtggcactaagagccacaagagaatatcctagggtttaaaagtctactagagagaagataaaatgtgcaattaaaagatatccgttcattcatatgtgctccagcaacaacanaacattaagtagtctcacactat

SEQ ID NO: 267787 - DNA, 438 bp, Glycine max
agcttaaccccacccccatggtatgacccttatcagtaatatgtttcatttagcaacacattactcaatttcaattgaaagttcaacatcaatccttaatagcaaatcacaatccaagtaattaggcataagggattaatatgttgaagttaaaattaaattattcaggtagtatccgagtttgatccttgcaaattctgaattaatcaaaatttctttctcctaataaaccagaatattaagtaaaaaaaaataacaaaccacattctcaagacccatcataatcaaacaaacgaaccacttcctcaaataaacccattccctcattgtatttttttttctcttcaaaataacagtttggttcctttacctatcttttcaccgattatcacccaatgcatgcacccctccaatctttacactcacggtctttccatg

SEQ ID NO: 267788 - DNA, 458 bp, Glycine max
  unsure (1)..(458): unsure at all n locations
nttcgcgcggcatcgtggagaatgcgggtaaacacttaacgttntacgacaaaaacaaattgaaacaaattttatattttttaaaaatcaacaaagacggttatctattgacacccgccgtagaattatgtcttcaaattaccaaaatgccatcgcgacttggctacaaagacgggtgtcgaagatcgtcgttgttaagttgccattaattacaaaaatgccactgacacacattctacatcggttctttggaattgccttagaatgtgcgtcgtaaaaaagactttttttagtagtgagcatgagttctattgcacttaagccatagttttttatggtgagtttgtgtgcgcccatgcttaagcgagagaattgtcacacttaagcgatgatcagttcttgcttaaacatggacctatgcttagttaagaatagaagttcacttgaccttgaaattg

SEQ ID NO: 267789 - DNA, 399 bp, Glycine max
cactcattttaaatccttcatgctgtccctatatatataaaacagtcccacaatcccaagcttacaaaaccatgctcatatgtcattgaggcatttcaccgagcacttggtgggtgcatgtttaggcatgaatagcaagaaagtgggggcaatgtggcatgccccattgcttcaggatgcaccctaggcctaaggccatcccctacaacccctcaattcaaaccaatcaagcatgaaaacaaaccaaaattgccccacaaatttgagcacattcccacaatttagagcaccaaaagaagaccaaaatacaccaatggaaagctagaaagctcaaggatgagatacttacttgttggagtgagtaggaataccaaaaatgaaagcaaaatgcaaccaaag

SEQ ID NO: 267790 - DNA, 460 bp, Glycine max
  unsure (1)..(460): unsure at all n locations
agagcaaaaaagatataagaagcatgaatgaattagctcacaaagttggtcattatagtttattatataattagttacaagagtaactaactcacaactaactaaactaactctagttacatagagattaaccaattaaccaattaaccaactaagctaactctagttacataataatccatgctaagaacaacaacacaaattaagacaattattatcttttgtgatcatgtacttattttgtaaaagcatgatgtgatttctatgagaagaagcacgccttggattattatcttttctatttttttagtaatacaattttggttcaattaaatttgttcaattctcattcacatggcatgttattttttgttcaatcattattatgtgagaagtggagttatgttgtagtaagggtttgaaattttggcaactacgtggaataaaaagaanaattatt

SEQ ID NO: 267791 - DNA, 373 bp, Glycine max
  unsure (1)..(373): unsure at all n locations
aatataacaatcattacaaacaagggccaaacaacacttctcatggcccgagtgtcaacatgcactttataaaataatcatattggggtcgtgcctatttatgacacctacgtatttgcacacataataatnttgtgtgaagcattttacgacacctatccatgtacatattttttgacaaaccttttcatgctacatcctatatatatacacacacatttttttggaaggcttcttttgttacctactcacaaatacacatattttgaaaaacacttttacgctacccatccaacactttgtaaggcacttcatgctatatattttcacattatgcaaggcatnttattcaactttctgcaaggcattttat

SEQ ID NO: 267792 - DNA, 469 bp, Glycine max
  unsure (1)..(469): unsure at all n locations
tagttgggtgtctggaaccatcacctgcataagttcctgttctatatgtacttccacctttgagttcctccatatcgaacattccagcaccaaatgtgtatccaatcggaacaaatagcattccatgatgaaccagctgagttatagcagtaagcctgacattggattccacaatttctcatcattaatactattatttcataaaatattgcttaccatggccttaaagacaatagtgagtgactttaaatacattatattaattagttacagcatgacttaaatataaagatttttgtgttttcatggctaaaactacaaatacttcaccttctatagtcaattaaaggagttgacattnttttttcccgaaaattaacaagggctcttatattaaacaatctaaagtgaattttttttatagaagaatgttactgatacatcctaccgtgatttctaataaaaacat

SEQ ID NO: 267793 - DNA, 457 bp, Glycine max
  unsure (1)..(457): unsure at all n locations
tctatggtntctagaataatcaattatcatatgttgtaatctattattntgaaacacagagagctcctaagtttccaaatgcaatctaatcaattacaatatgttgtagttggttatttcaagatacaaagatcctctttntttaaaattgggttgggtaattgattacaaaacttggtaattagttaatttgataaaaattgtcaatacttccagagaagttcttttttcttgttctaacactttgtaattgattacttaaacttggtaatctattacacagtgtttaacttattgcttcttagaaactttgaaatcaatacatatatcttctcatgtttgatggccactaagcatgggtaaagaaaactaagtctaaaacactcaacatgcctagtctaanaacatncaatgtaaatgccacgtcttcagaaatttatttggcattgcacaacta

SEQ ID NO: 267794 - DNA, 443 bp, Glycine max
  unsure (1)..(443): unsure at all n locations
gctggaaacatagattacaaacgtttcttatttttttaaaaaggatagattatatcattactcgcatgggcgtcacctgaaaatatttaaaaaaagaaagctctaaaaaattatttatggttgatttattaatatgggtgcaggatttaaaaaaaaaaaaatacaagtgatgacatagttattgatgaaaatatcaatgtttattggtctaagtagtaataaggagttttgctctcataagtaaaggcttgaattgaatattaatttgtgttgttgttggcactaaaaatatttgacagctaaattaaataaggcatttctagacgactgatacgagcctagctagagtaggttcaatagcgacccanaaacaatccaagtctgaaggaagctaattaagctgcagcaaanatcacttcaacatttttcctctacgaaaacac

SEQ ID NO: 267795 - DNA, 427 bp, Glycine max
  unsure (1)..(427): unsure at all n locations
atgtcctaataccttgcattgttgctccaccacgggagatggtgcttgaccctccatgtatggattcatcacaccagaaaccaatgcttggcaatgcaacatgcaaggcaatcctaaagatgcactatagagagtcaaaaaggattctatcatttttaatcgagagatctttgaaaatatttaattcataaagagaaagattatggtacaaattatcaagagggtcaattctttatctcaaatttatctagactgaatgctttaacatctaattatgttccaagaggaacttcattggaataaaatgtccaaagagtaatgagtcaatcttgtggacaaagatgtttctttnttccatatctagaccatatattatacatagcaagcaaaataacacacttaattggcctaactcttcctagtgaca

SEQ ID NO: 267796 - DNA, 244 bp, Glycine max
aatttttccgtaggaccaaaaaaataccctccggcacacggattcgacaagtccatacaccattagtacacgaagaaacgtctcaccatgacaagacctaccacagaacagcagaaagaccgcgaatagaacccctgacttcaacagcgagcaacaacacgaagaaaaaatgctccacggataatactaaatgactcattataataaccacctattgcgcaaaaaatggaccagggatgataat

SEQ ID NO: 267797 - DNA, 385 bp, Glycine max
  unsure (1)..(385): unsure at all n locations
aagaacattntagtcgactgaaaatatagtataattgattattatttggaaagaattgattacattggctatttaattgattaccagcggctataactatttttctctataaataaccagctagtgttctcacttttaagagagaagaaaaagtgcttagaataattttgtgtgactcacaccttttagacttcgtcttctgaagctctcatggtaaaaagtgagttgtgaatttcttgtgagatcaagaagagacccattctttccaggaaaggctcttgcatgtgactgatcaggttgagtctctccttaacttagatatttgggtgttttacatggtgatagcatatgcatgaatgtctgaaggcacactagaataggcttt

SEQ ID NO: 267798 - DNA, 461 bp, Glycine max
  unsure (1)..(461): unsure at all n locations
nggaacatatagactgaatcctaggcctcttttgacttatttaaaatatctgctggctgatcattagaattaatgaactcactgacaatcaccttggacaatagtttctcccgaatgaaatgacaatcaatctctatgtgcttagtcctctcgtggaagactgggtttgaagcaatgtgaagagcagtctgattatcacagtataacttcatttgcaccacttcacaaaatcttaattcttggagaaattgtttaatccacataagttcacatgtaatcatagtcatagatcgatattcagcttctgcactggattgagcaacaacagtttgcttttttcttttccaagagataacattccctccaatgaagacacaatattctgatgtagatcttctatccatgggacaactggcccaatctgcatcacaatacccagatacttgtgtgttacccttgtc

SEQ ID NO: 267799 - DNA, 271 bp, Glycine max
agagtatggagtcaccaccacttctcatatctctgatttaacgacttttacaagtggagctgatatagaggaggaggaacaaccagattcgaggtcaaatcctctctcagggggaggggatgacgcactcctccctatgaaaggagcaggtaccagagccatgagcaacaggctccattaggatcgggctagagttgataaagaaggccttatggttctcatgaaccttatggtagattcttgagcccatgggccgacgatgggtccactc

SEQ ID NO: 267800 - DNA, 345 bp, Glycine max
ccaattaattgctgcacatgcggcatttaatactactgggctcaatagctaaacaagagagccatcagaggactcctgttggtagaatcttctgtttctgatatcctgactcatagagatatcaccaccagtacatgaaagaatgccatgtaattctatgtcctctatcgacctcagataggttacggtatggcgcattagcagacgaatgacggaaacctcctactattctgtgctttagcccctaatgagagcgcggggaaaatttgagatacaatgaaagacaacaagacgccctcaccctactcaaattaagctaacaaactattaacagcacgaagcagg

SEQ ID NO: 267801 - DNA, 375 bp, Glycine max
  unsure (1)..(375): unsure at all n locations
ggctttttctgtgagaagactggcagagaactaancgagaagaggaagccatgctgagaaaatgacatgagtctgtgagtgattgtgaggctctaatgagggaggagacatctccactacttggatatatccaatccatcatgtttctcttctctctgttggaaaggaagcttcccacatatatgagagctgaatactctgtttgttcttcctttgaagtacttgatgtaaatacttgtatatctatataatgatgattgatgtgctctctgcgctatcagaacatcatttcaacgtgctttttccttgatctagtagatgcatgcttccgtacgagcattcaacattgaggattgggctccttcttataacttg

SEQ ID NO: 267802 - DNA, 444 bp, Glycine max
  unsure (1)..(444): unsure at all n locations
gctnttacatgcatgttcacaccatattttctatacttcgatcaactgatgcaatctattngattgaaaagataatttatattactcttctaatgtagtcgacaactaaaaaaaaaatataacagaaagtaatgcttaggccaatctaatcaagtcattttgaatctcgtcattactatcatgcatctcaaagagaaggagaatcaggcatcgtaatacatagcacaacaaaacattaaaagaaaacatgccttccaaagccaaccaaggttaaaatgtattcatatttggtgaactttttcaaaataataacacatatatataaacatggtggaacaatctgaccacatgcacaacacattccacacattatttctgaaaatgagtggcaagggaatataataaagcattgttattaaaactgtacatgcactaagacaacaa

SEQ ID NO: 267803 - DNA, 461 bp, Glycine max
aagtcacctgaggcatgcaagcttactgtgggttggttgaaagctatttataaggcttctttgagaagccagatccttatctatccacacccctctattaactaaattaaccttcttaaaaataattatggatgaaaataatgcaacaaataatcaaacatttaacataattactaataatatatagatatatatatcagggtgttacaaagtgtatttctctcatatcagacatgatttcaaaatgcacaatgatgagaatgctaggaattgagttttgaatctggtgcttaaatttcacgacgatccaacggtgaatgaatccgaaatcgtcatttttctgaaacaggtttggaggtatgcagaaaaaaagagggttttatgagaaggaaaaaggaacactaaattgaaaggaaagggagggctgaaagctatcgtcagacctatacatttattattta

SEQ ID NO: 267804 - DNA, 472 bp, Glycine max
tgtaacagttgtgaatcatgccgaaagcatgtaaaagtatttcatcactattttcttccataactacaccggtaatgccaagattaatgtgtcgtgattgcattaaaaatgggaaataaggtcaatcattaaaagaaatgcctaaactagtggaggagactgcagtgactaaagagagcacacgactctacagacttgcaattgcaatatatcagactccttataattatatttttctaatatgatttcaggttgcaagaattcttcattgagtaacctcattgagtagctatatatgcatatagctacaatgttgacatttttggcaagaacacatcttggtaccttcaagctaatcaacatacgaacaagagcttgaagaggaaaaaccatttttcacataacctagaatgataaggaggttcatatagccttacattaaatatcagtcccttaatactatatcatactt

SEQ ID NO: 267805 - DNA, 160 bp, Glycine max
taaaaggggggtgataaattccaacattcccataaaactattgctttttaggggtaaatcctacaagactctattttaatcacaacaattgatcgtttcacatataaaaggattagggaaaaggcactaattgtctggcacacccctggctcgcagccca

SEQ ID NO: 267806 - DNA, 460 bp, Glycine max
  unsure (1)..(460): unsure at all n locations
ngatccttgaatcttgattcttgaattcatccttcttctttaatcttgaagtgttcttcaacttttcctcttgagtcttgaattgttcttgattccatcgtgaacatcttgaactcatcctttgattgacctttgagctttttgtcatcacctttgtcatcatcttttgttatcatctttgttatcatcaaaacatctttgaatcattcttgattcaccatgaagctntgcttctataatctccccctttntgatgatgtcaacttctgaaatcaagaaacacacacactttttcctagtcgatcactcacataaattctcctcctttgtttttgattntatgcttatctttaaaattaagttgattactcatgtgaattcttgatttaatcccatttatctccccctttggcatcaacaaaaagacaaagtgcgtatcanacttanagtatacagatat

SEQ ID NO: 267807 - DNA, 432 bp, Glycine max
  unsure (1)..(432): unsure at all n locations
agcnttgctgaatgagttgaaggtttaatctgttaatggaatgctgttgatgatagataacaagtatgctataagccttgcaaagaatcctgttgcccatggaaggagcaagaacattgagactagattttactacttaagagatcaagtgtacaatggaagattgaggttggatttttgcagatctgcagatcaacttgcagacattttaacaaaacctttgaagaaggagaggtttgaagatctgaggagaaagataggacttagaagctcaaatgaaatctgaattaaggaagagtgttagataaaaagataattcagatgattagttagttagttctatcacttgtatgttagttagtggtagttataacagaattagaggaataaccatatataacttgatgagtactgtgtaaaaatagaaaattg

SEQ ID NO: 267808 - DNA, 344 bp, Glycine max
  unsure (1)..(344): unsure at all n locations
cgctcccncaacaattccatggcatggagaagcttatcatcatgaaggagaagaagaacaagcagcctagctctccatgtggaaggcttgcaagcttcttgaactctctcttcagccaatcagcatcaaagaagaagaagtctaagtcaggctcacaatccatgatagatgaagatgagagccctggtggaaggagaatgagaagaagcagcattagccatttcagaagctcaagcaccgcagattcacagtccttgtactcctccttgagttcagagtttcgaactcctccttatgtacaaacaccaacaaagagctgcaaggaattcagaaccttctcatca

SEQ ID NO: 267809 - DNA, 430 bp, Glycine max
  unsure (1)..(430): unsure at all n locations
agcttatgatggaagaaacagctaggtaaaacattattcttaattaattgctgcacatgcagcatttaatactactgggctcttttgctctactgttgagtcatcaagggactctctgtgttagagtcttttgtttttgttatcctgactcatagagatatcaaaacaagtacatgagagaatgccatgtaattctttgtcctctattgatttcaaattggttttggtatgggtcattctcagccaaatgttggtttcctcctcttattctttgcttttccccctctcgagagtgtggggaatttttgtgatacaaggaaagaaatcaagatgccttgtcccttntcaaattaggctaacaaaattttaattgtatgtagcaggttgttgtaacttttcaaatttaattaagctcatgtatctttaatta

SEQ ID NO: 267810 - DNA, 474 bp, Glycine max
tttgcatgttttgagatttcaagagagagaaaggtccaagttccagagagttttgagggctctttctgtgagaagactggcagagaactaatcgagaagaggaagccatcctgagagaatgagatgagtctgtgagtgattgtgaggttctagtggtggaggagacatctccactacttgtatttattcaatccatcatttttctcttctctttgttgtaaaggaagcttcccagatatagagagctaaatcctctgtttgttcttccttgtaggtacttgatgtaaatacttgtatatctatttaatgatgttttatgtgttctctgtgctatcagtacatcatttcagcgtgctttttccttgatcaagtagatgcatgctttgttaggagcattcaacagtgaaaattggtctaattcttagaacttgaaattggttgtctttaacttttacaaactaagttgtctatttg

SEQ ID NO: 267811 - DNA, 365 bp, Glycine max
  unsure (1)..(365): unsure at all n locations
ttgagttcaaccgagtctaaacgtagaattggaaagagcaaaactcttaacaaatgccctcgccaaaacttcaaggaaggaagcctaaattgtggcaatgggtaaagaattctatgccaatttctataatacaacagatcaagctcctaaatgtgctttaataagacgccatttaatcaggatagatgcagatagcttaaatgagttcctccagactctagtgttattagaagaggggaaatctttacccacttattctagattttgcatattaaggtctgatcccaaagagatggaggctagtctgtgcattccgggcaagggccttattctaaacacanagggttaaccatggaaactcctca

SEQ ID NO: 267812 - DNA, 331 bp, Glycine max
  unsure (1)..(331): unsure at all n locations
gaagccataaaaaaatagggncttatatancccaccacagtagaaaagagtttcaatagatgatagttcatcaagtgaaagcataaccatagaaaaacctagagatagatggtctgaagaggatagaaaaagagtacaatacaacttaaaagccaaaaacataataacatctgccctaggaatggatgaatatttcagggtttcaaattgtaagagtgctaacgaaatgtgggacactcttctattaacacatgaaggaactacaaatgttaaaagatctangataaatgcactaactcatgagtatgaattatntagaatgaatgcaaat

SEQ ID NO: 267813 - DNA, 307 bp, Glycine max
tttgggcaactcctccagagctctcttcagaaacccgcattcctctaacaatgagatctgggcgacaaatctagtgcacagaaagattacagggaaaaataatatcagcacgcccaccatataaagaattcatattcttgaacattcaacagtaaaattgacaacaaaaagaatcatattcaacacacgtattctgactatatatcaaaatattaaagtgaccaacagaattcatttgtattataaagccatagtggataccacctatcattagcaatattaaagagcatcgcatagagcccaaata

SEQ ID NO: 267814 - DNA, 433 bp, Glycine max
  unsure (1)..(433): unsure at all n locations
aattttcaccagtgttggctgaaattattttaaagttcctcacaaccaattggttggcaagctgaccacagggggttaaatagtgtgttagatatatatgaaaatcatttcgcaaggagtatgtgttaagtcaaagaaattgtgtcttaagacgaatcatgcccttgactattntgatttgacccacatanatacaaaggttaaaatgttgttttgtgcgatattagaccatgcctcatacantttgtgttgtataatcgaatgatagaagaggcattccatgatctgataaagcattaaatgatagcattaaaaaattcatttattgtcgtgtctcggattcattntatagatgttgggttagtcgagaatctaaaagaggggaggggttgaatagattccttcgaaaacttaacctcttaatttcttaatt

SEQ ID NO: 267815 - DNA, 451 bp, Glycine max
ttacacgtatcagtcaagtgtatggaccatatcgtagccaatgtgctcatcgataatggttccagtttaaacgtgatgcctaagaacactttggagaaattaccattcaatgcctcccacctaaagccgagttcaatggtggttcgtgccttcgacggcacccgccgagaggttaagggacagatcgacctcccagtacagataggccctcacagatgccaagttaccttccaaataatggacattaaccccccctacagctgtctgttggggtgtccgtggatccactcagtgggagttgttccctctacacaccaccaaaagttgaaattcgtagtggaagggcatctggtcatcgtatcaggcgaggaagacatcttggtgagctgcccatcctctatgccttatgtggaggccgtagaggagtcattagaaaccgctttccagtctt

SEQ ID NO: 267816 - DNA, 326 bp, Glycine max
  unsure (1)..(326): unsure at all n locations
atcaaaggttctttttttgtattctgaaccccggctcgatgaaacacaactgggccaataaagagatgagaagagggagaaccnctgcntgactgcattcctaccggccaatttccatcagcccacatgcattaccaccaatacagccctctacccatctacataaagcctccccaatcaccacaggctgctgctacacaccccatgccaacaccccttttcgaaccacaagatttgaaccaagccgtggatacccaatccacgcaatgctactgtccatacactgatagcatacagtataaccctgcaggtcctaaccttatttc

SEQ ID NO: 267817 - DNA, 396 bp, Glycine max
tattgaaagggtatgctttcacttacctggtgaacaagttatctattttaaagataacaaattgaatgatgatgttcttttaaacccaagtggtaccgaatcgatgttcaccttctggatggatgcaaatagaatatatccagaggcaaagaatctaacctatactcagtttgtgtccaaggttgtctatgtcaaaactagaaaaacttggaaaccacgcaagtcagggtatacaattggaagggtgatgtgggttcctccaagcacaggcaagttatattttcttagattaatgttaaatcgtcgcaacaggaccatgtagttatgacacaattaacacttgtggaaacattgaatatccaactctcaaggaagcatgttttgctatgggtttca

SEQ ID NO: 267818 - DNA, 420 bp, Glycine max
  unsure (1)..(420): unsure at all n locations
caccccattgngnnaggggnnatgaatnannnnnttttanaaaaaanggggtttatataaaaaggacaaggacgctctgtgcttttatttgggtaacaaacaatatatttgtgcgatttggtttcaagaactttaaaactttgatgcaccttcataacatattgtttcagtgcattttttaccgcatctttactatcaaaatccataccaacatataattcttgtccaacattaaaactcgatggcatctccaaaccgcaaatgtcctcctcatcaggatgactccaattgatattgntataatgcaaaacatcattccaaaatgaattttgaattccttctacacctaatactttaaaaaaataaaattcacgtcaatatcaccaaaatatttatttaccattaaatacaaatgttata

SEQ ID NO: 267819 - DNA, 397 bp, Glycine max
  unsure (1)..(397): unsure at all n locations
tcccaaatgcgaagatgaggctccgagtaccttggatttggtaccaacatgctctcctgatttccagctgggaaattggcgagtggaggaacgctccggcatttacgcaacgagcataatgtaaacctttacggttttaaaagctctatagttgggcntaggctttagagattttccttttgataggctttgagtcttttgtttttgaatatataatacaaggatctttcttcatctgttcctgggctctacccattctcattcatttgcatgtttacttctttttctgaaacggcagatccgatgacgagtccctcgaaggtactaatacctgggacccgcccatcgactttgagcgagaaatgaatcaaaccgaagatgaaggagatgaggatgt

SEQ ID NO: 267820 - DNA, 392 bp, Glycine max
  unsure (1)..(392): unsure at all n locations
ctctgctcaacacatnaaccaanatnanagnttttntnaacgaaagaccanagnaacaattncttcgatccaattcgttaaccgttggatcgactccaaaattttactggaagtctatagtgtataagcctgcattttgaccgttgggatatactagcaaacatccagaactcattctgcactagactttccacagccaaccacacacaagcatttttctgcacttgtgcaaaattctgctgcacaatttcacagcaaaaactctgcataagtgcagatttcgaaaatcacccttcctctcatccaatcttgcccaaatcaaatcctacaagtcccaaatcatgtatcaaacatgtctaaaccaaagccaagcttcaaaccacagcaacaca

SEQ ID NO: 267821 - DNA, 445 bp, Glycine max
  unsure (1)..(445): unsure at all n locations
agcttatgctgcaaacattgacaacagatccntctttacctcagcagcaaaatcaaccacagcagaacaattatgacctctccagcaacagatacaatcccggatggaggaatcaccctaatctcagatggtctagccctcaacaacaacaacagcaacctgctccttcctttcaaaatgatgctggcctaagcaagccatacattcctccaccaatccaacaacagcaacagccccagaaacaacaaacagttgaggctcctccgcaaccttccctcgaagaacttgtgaggcaaatgactatgcagaacatgtagtttcaacaagagaacagagcctccattcagagcttaactcgccagatgggacaattggctacacaattaaatcaacaacagtcccagaattctgaacagttgccttctcaatttgtcctgaatcccaa

SEQ ID NO: 267822 - DNA, 427 bp, Glycine max
atgcatggaaaatgtaattatgaaattgatattttcgtataaacaccatttcctagttaaccatgcattaggtaccatgttcaattattttgtttttaagtgaaatgggtttatgatcccaacatggttggctcgtggtgcctaacacatgaaactaagaatgtagtgtgaagtttcacgcttcccccttctttgtttttgttttgtagaggaaaacgcaaggatgagcaaacatgaaaacaaatggtattgcaatttgcagatcaaaaagtttgttgaacgcatatgcatgatgatgccatgactcatgcaaaatgtgaggctgaaatatgataacggacaaatgcaggatatgtccattatgatgttatgaagagatgcttatgcgatgcatgatatgaatgcattttacggacacgagagcccg

SEQ ID NO: 267823 - DNA, 395 bp, Glycine max
ttttttccacaacaaagcatgggaaggaaagaatcaactcagttcatctgcataccaacatcatatgaacaagaacacccggacacaagtgtgaatggggatgatagtatatatctgacgaaacacccctgcagccctaaaaacatacaccatttgtaattcccatcatgtcatgaatatgacacataaaatgttaatcaatttcattctgacaccaatttcaataattacagtatacaaacacatattatcactcaagcgagtcaaccatgatacataagattgcactataggcataaagagaacacatttaaaaagaaggacattctaatgtatatcaatactataaagctctaatacaaaaaaatcggcaaatcatacaagtctaaaaggat

SEQ ID NO: 267824 - DNA, 413 bp, Glycine max
gctgcttctccttctctagtctttgccgctatattgaatttattctccaaaaccgcgcggcctttcttctttctctttacttttatagtcgatattccgggctgctgaataatatgcttttcttaattaggcttcctttccttaattagtctgtctttttaattacccttctttccttaatctacattgctttccttaattagtctcattatcttaattagactcatttccttgattagtcttgcttttcttaattatcattggtttcttgggctttatattactcactaaacatgataaattatcacttttaatattctctgttcaaaaacttaatgatattaatctaacaattatttactcaaaaaacaaaaattacgagagacaaattataaattcctatataatctaat

SEQ ID NO: 267825 - DNA, 334 bp, Glycine max
  unsure (1)..(334): unsure at all n locations
tagatcataaaaatatttacatcaagtactcagtagaaattctcaacaaaggattttagcccttcattacaagggagtagctttcacaaataggaaaagggtttcagagaaaataccagattacaaagcaatggggatgtcttctccacctctacctccacctttaagaacctagaanataactctaaaatctataatctacctaaaagttaggacctttgcttccttgctcagcttttcctctgttctctacacataattcgcagtcaattcagacctctttcacgtcatcacgctctttctcaattttttatgtgcaaatcaggcttaaaaa

SEQ ID NO: 267826 - DNA, 461 bp, Glycine max
  unsure (1)..(461): unsure at all n locations
ctcgagctnttcattgggggtatttgatcttcctttggttctctagatngngggaatgtactcaaatacgtggggcaattttggtttgttttcttgcttgattgggttgaattgaggatttgtatgagatgaccctacgcctataatgcattttggagcaatggggcatgccgcattgtccccattctcttgctattaatgcctaaatgtgcgcccaccaagtgtttggtgaaatgcctcaatggcatttgcgcatgattttgtagggatacaacctatgggacaatttggtttgcgcgtgtttgctgtctttggagcatgtattcagtttcataagggctagaatgattgccccacatacaccctatgcctatgaaccgaagcttgtttttggatgcaagagaacgcgagagtgggtgcatattangtgaagctaccctttttggccagcaatcaactat

SEQ ID NO: 267827 - DNA, 439 bp, Glycine max
  unsure (1)..(439): unsure at all n locations
agcttgaagaggatgccttaatggaggaatataaanaaagaaggggggagcacgaaattgaaggaataaaagaaggaaagaagtggaactttgaagtgtatctcataagactttcattcatcaaagttacaacaagtgttacacatgcttctatttatagactaggtagcttccttgagaagctntcttgagaaaacttccttgagaagcttctttgagaaaacttccttgagaagctagagcttagctacacacacccctctcataactaagctcacctccttgagaagcttccttaagaagattcctaaagatgcttgagcttaactacacatatctctctaatagctaagctcacctccttgagatgagaagctagagcttagctacacaccccctataatagctaagctcacccctatgacaaaaaacatgaaaa

SEQ ID NO: 267828 - DNA, 400 bp, Glycine max
  unsure (1)..(400): unsure at all n locations
cgcacganaattctcaaaggaacaatgaactcatatcttgttgtctcaagcttcaaggaatgaaaaagaaatttggaacaaaaaatgagagctttgcacaaaatgatgaggaaacaagaagaggaagaaaattaagagtctcttaccaaagctttgagggaagaaacctcaagaacgcttgtatgaaatttggaagaagaaaaaaaaatggagtcctttctctcccttgaagaactcgtgcaaatgatggagaacgaagattccaagtttgacttttttgaaaaaatgaagatataagaattaaggctagtgagaaaatcaattggacaacaagaatgacccttgcctatgccatgctcaacgtgcccaaggctaccataaatgggtattttagcttttg

SEQ ID NO: 267829 - DNA, 179 bp, Glycine max
cttcatataactgcctttgggcttggcgggcacgctcaacaaagtactttcgacagccactgtgcgttgaattgaccaatggctgtatggggatggtgccacactccctctaaaccttattgataccttctgacaagatggttgtcatgtcgccatattgaccactgatagctttttgg

SEQ ID NO: 267830 - DNA, 244 bp, Glycine max
gctggaaagtgcaaatgacagataaatgcacttctggtggatgtttttaatttggaaacaactcttatttcatggttcaacaagaagcagaactgtgtgttcctatctactgagaagcaaagttattgcatcaggaagcagctgttcacaactagtttggatgaagcagatgctgaacgagtacaatgtctaacaagatgtcatgacattgtattgtgacaacatgagtgctattaatatttct

SEQ ID NO: 267831 - DNA, 454 bp, Glycine max
  unsure (1)..(454): unsure at all n locations
ttttggagtagaaacatgggaccaactcattttatttcatattagttgtatctagtcaaggtctgagagaccatacaagtttcctagcgatttctaattatgtgggtcattaaatctatcatatgctgacaatagccgagaagcccatggatttcttcgggggcggagtaggtgtccgccatcgccttggacttggctaacaatcggngaagttcttgactcccgttcaaggtaagagcaaaccgatccatccacatggttgcctcttggtgtaaagagtcgatcacccttcctctagcctctttntccgtgtatacttaggcatactcgtccgcgaccctatgctcgtgggccgtggctagacctaactcttcttggtacttggcgatgatagctagcatgntggtctctgtctcgcataaacgctgagacaagctccttttggaccttgaac

SEQ ID NO: 267832 - DNA, 216 bp, Glycine max
aaaaatggctacataacatccttggataaagggcaaaccgaagccttttccctctaatgggaaggacatcttcaaattcattctgcataagttatggtgattactctctgggatgattgcctccactattggcgaataacccagctatttatgagttgttccaatcccattcctgaccttcatggaagagcacatctctagcgactggcatctttt

SEQ ID NO: 267833 - DNA, 380 bp, Glycine max
  unsure (1)..(380): unsure at all n locations
atggtgatgacctgggtgctttattaagaaagaataccataaagtgcttgatcttagtggaaagcctacaggtgaaggtattggatgtagccagagtggggtgaaccaatataaatcattggtgtttcatttccttccttactacttattgnttgttgttgtgtgttgaagttttgtttcaaaaaaaggtttttataaaattgttttaatatttagaagcaaaacctactttgttctaagaaaagaaaaattagaaactcatagtcaacaggttttgtatcatttgtgagtatgttctgaagtagtaaccaacaagattacttggaagttttacttgaanatattcaccaatccgtacttgttaatgaaatgtattactt

SEQ ID NO: 267834 - DNA, 366 bp, Glycine max
tgctagaaaagcctcataatgcaattatcctgagtcttggagatcaggctctcatacaagtcttcaaagagaagactattgtaggagtatgggcaaagtttgataggttgtacatgaccaaatccctagtaaatgtctctatcttaaacaatgaatcaagaaacacctatagtcgaatagttacgatatgtctaataatttaatccttgacttggaaaacattgatcgttactatagatgatgaggatcaagctttgttatttactaaaaacacatgtacacttcaaagaaactttgttgtttggtagagagtccttaacccttgatgatgttcagccttctctgaattccaaataactgaatgaa

SEQ ID NO: 267835 - DNA, 468 bp, Glycine max
ttaccaataattccaagataattaactattataattacctttacctctaagataagtattataatctcttaatctcaaggttcagtcctacttataaaatgactaaatgagtagtataatctattaactatgaaatgagtataccacactaccacctagtccccctcaatcccaagtgcaagagcttttaccaaaccttcctatagctaaccaaaagcatcggaaagaaaaaaaaaatgtatgcacttgcaattacttaattttgtaaaatcttatctcttatattgtcatatgatatgccaagtttgctatgtcttctcttggaagaaaaaagattgaaaatcaattctatagttagaggaatagccctatgttatgttgatatgggaggaatattttcaattccaatagttggattattattattattattattattattattattattattattattattattat

SEQ ID NO: 267836 - DNA, 444 bp, Glycine max
gcttcatgatgaatcagaggtgattctcattgtgttttgatgattacaatgatgataactaaagatgatgacaaaggtgatgaccaaatgctcaaagatcaatcaaagaacagctcaagtgaatcaagaacaattcaagagttcaagatagaatcaagaagaattcacgactcaagaggaaagttaagagtcaagaatcaagattcaaggttcaagatctcaagattcaagaatcaagcgaaggcttaaacaagataagtatgaaaacttttctcaaaaattgagtagcacatgatttttctcagaacatgtttaccaaagagtttttactctctttaatcacaaattgttttaatcgattaccagtagcaaaattgttttgaaacagttttcaaattgaatctacaacgttccatgtaatttcagaaagttgtaatcgattac

SEQ ID NO: 267837 - DNA, 462 bp, Glycine max
  unsure (1)..(462): unsure at all n locations
tcgttggaaccgatatgtttccatggctgagctctatcgtttgttgcttcgagctccgcagcttactcaccttggaacgggttcattcagtgctactgaggctggggcggtcggggatcangagccggattatcaggagccggattacgcggccgcctttgaggcttgcagatccctggtttgcctgtctggattcanggagatttgggcggattaccttcctgctatttatcctgtctgcacaaatctgacatcgttgaatttgagctatgctgatgttaacacggatcagctgaagtcagttatccgccactgtcataagctgcagatattctgggtatgtgttgtagctntgtgacttgtgtggctgcattgttgagaattctgaattgattttagatttggagcttattggttgttggatnttggtgtgcaggtacttgattcgatacgtgatgaggg

SEQ ID NO: 267838 - DNA, 432 bp, Glycine max
caccatcgcccgaccgtcatctattacgacatgtgatgggtaccccataatcctacaagcttgagatgaggaagtgttgaagggtgaaacttcctgcttttattgttgaccacagagtggtacctggagatatgtcgcgggggtcaggagaccttggggacgtcaggtggggtgctattgcccaaaaccaagcttgaccaatcccgacccaacccgggcatagtcggtcagtgagaacatgtgacgtacctaagcaggcgagctcctggcagtcaacagataaaaggaaaacaagaccacagagcaaggaggcttgtggtggctggccagctgtgaattttgtgtaatatgtggattgtggcctctggtaatcgattaccaagggtgggtaatcgattacaaggcttaaaattgaagacagggggctaagat

SEQ ID NO: 267839 - DNA, 466 bp, Glycine max
  unsure (1)..(466): unsure at all n locations
tatgcgcatatttccctacgaacgttcacttgcacaagacatcctattaactaagaanaatgcacccatatacaatcaaggtagcttcattacctagattatttacatgtacttccaaggtgtatttgttatttacatcacacacgcctccttggctaaatttacatacatgcatactcaaagcatttcggggtaccaaaaattgcacatgcgctcatcttggtatttctaatacctatacatatacaaacttcatgatgaatcttgactacctacgcaataaggtgctacatttcatgctcttttttttttttttttttttgaggggaatattaaccatgtcccctcccttctcatggattagcatcttgcctaacttgaacttacttaggttagaattaggcgttgattacttatttttttactttntaaaacaaacaanaagtaaaagaaagctgcnaaatac

SEQ ID NO: 267840 - DNA, 468 bp, Glycine max
  unsure (1)..(468): unsure at all n locations
tgtanaccaacaaagagatacaatctactcttggatttgcattataaaaaaatctttgtatctatctttcttctgctccctgcctgaaaacatgcatgtatagcctggtaattggtcaatgtctttgctaaagtttatctgggctgttgactcgaagcttttctaatttattcaataagatgcatgaataatttaatcataaatcataaattccatacatgatgtaattattcatgtatcttattgaatatatagatcttatggttatttcatataattagttaattaactggtgattattttctgaccaagcctggtgattatttcatacgtttagttaattaattgattttgttttatactttatttattaattcttcataatggagatgaattctagacaattcatgtttgaaacacaggatgcattgnttagtagcatttactttgtgatctgtgtctcagttt

SEQ ID NO: 267841 - DNA, 429 bp, Glycine max
  unsure (1)..(429): unsure at all n locations
gctgcagcttgaggtgtgtgacccaccattttccttattttaaaactggnaatggggctactatcattggcatcatttttttcatcattgaggtgccacttgagctgccaagttctccacctttgggtgtattctttgaaagatccgtgccccctttttgcacatgttttgtagatgcatcctatccgaagccattataccgacactgcctaacgaaggcaaccattaggtcctcccaagaatggactcaggaaggttccaagttagtgtaccaaggaataactaccccagtaagactttcttggaaggaatgtatcaacaattcctcatcttttgcgaatgccctcatcttccgacaatacatctttagatgggtcttggggcaagtagtcaccttgtacttgtcaagtccacaccttgaacttggga

SEQ ID NO: 267842 - DNA, 457 bp, Glycine max
  unsure (1)..(457): unsure at all n locations
tgtcaacagagttcatcaagttaatatctctattcctttttatgcttgnngntccactaaaattctgattatgcgtatgaaaaaaaaatttattggaagaatcaaaacttattttggttatttctattcccctagatctagtcttatgattttttattatggacatagtttcttttcgaaaaaaataatatatttaatttttatgtattattaatttagtcaccttaaaaagttaatatgatttaatcaattaaatactataaatctataatagctttgatttttaagaaaataatcatgcaaattaacaaatttattttatatgataatttgtaattaaatattaataatataaaatcccattgatttttttcacaatttttttacaagtttcttatattntttattaaataaaaataagtacatttaatttacaatgtttatcatataaaacaat

SEQ ID NO: 267843 - DNA, 428 bp, Glycine max
caacataacaattgatttggttgtacccacatgtttaatgtagcaatttcttgattcttccagcttatgtgttgcatatactaataatactataggacattccaattccaatggctatccctttttctcttttgtatgttatgtcaatctttacgagtttggttttgtatatgacgaaggccctctatcattttgtcatgtccttgtctatttcctttcatgaaatcagaatatttttagactattttcatgtttttttttctgtacattaatgtactgagattgagtatattaatgttgaagtttcagctaaaagagcatcttaattgtttgtcttcgagtttgattatttcaccctcataggaattgaatgcttattatgcctttgtgtttatagtgaccctcgagctcacctgcactgtgccttt

SEQ ID NO: 267844 - DNA, 463 bp, Glycine max
  unsure (1)..(463): unsure at all n locations
tacttgcagagattcctttatgggaaagaccgataccagctgtgttgatccattgtgatagtaccacggctattgcaaaaattgagaaccgttattacaatggtaagaaacgacagatacgtcgtaagcacaacactgttagagaattactctcaacaggagctgttagagtggatcacgtactcactgatgataatttagcagatcctttgacgaaaggattagctagagagaaagtccataacacttctaaaagaatgggactattgcccttactatgattatcattcatgatggtaacccgacctaaatgactggagatcccaagaactaggttcaatgggtaataacaagttatgaagtgatatgagatgaacatgctgttataagtgaaagcagcatgattcctgaagtaacaagaggatgagttatgannaaaaaatcataattcttaatgagatct

SEQ ID NO: 267845 - DNA, 380 bp, Glycine max
taaaatgtctcattgattcattaacaattaaatgattcattgattcacaaattactaaagaagctttgtcatctttttttcatactcatcctcaacatcttacacttgaagaagaatcatcccttgattgagacatttcaacaaacatcctacaagcaaccaataaaataggagaaagagaacacaatgacataaggctacataaacacaagactgcattcaaacaccaaacccagcatccaccaacaccaatacctcaaaatgccaaaaaacaaagaatcgggagatagagaacacaattatatgatctcaaacatgcttataacatttcaatacataaattaatttaaaataaatctgaaacacaactattgtttcac

SEQ ID NO: 267846 - DNA, 461 bp, Glycine max
  unsure (1)..(461): unsure at all n locations
tgaatatatgaaactggctaacttaacaaagctaagattcacttatttctcgcaagtttccttcatccattaaagttgatagcgctacacatggccgttactgtgaaaagagagatagtgggaactctaaacactttntgtagcatatcttcatagaactacaacttgccagtgtcgtcttgcgctcaaagttgacttttagtgtacaaatcaaatataacgttaacagcataagacaaaaggaattaagaatattaagacaagacaatttaaatcttcccttttgtgcgttgtggcacgagttgcttattgaacctatggacgctactttctgatgattgctttttgtacttaaggatagagtaattgtttcattgcctttgtactatgagcgaagtgtcaaagcacttttcttctgaggactggatgttgaggcagtatcgcccaatgactatacattg

SEQ ID NO: 267847 - DNA, 471 bp, Glycine max
  unsure (1)..(471): unsure at all n locations
gacacatcacgacattcacctaatgcagtngagaaagttatattattcttatatgcacactagctgaagatgaggtagacacattctgctgctgctgctgccaagagtactatacggacattgatcgatcttaaggtttccccttggaagtagatctatacaatggtgggggcttataaagagggagttgccgtggtatcccacaactaccatcacgacaagaaggaggtcgcataggagaaaaccacaacccagcacgcgtctaaggggtgaataaggtaagcgaaaggaacaaaactagcaaggcagagtatgacatcttcatattcatagccttctattgtattgtattaaagcaaaacgtgtnttatatataccaaccgggtcctcgtctcaactatgaactaaagtctggtcaatttatcaacatgcgcaaatgcatgcttaactcataaacagctaataacgaga

SEQ ID NO: 267848 - DNA, 202 bp, Glycine max
catcaaacggaatgaacacaaacgaaactgtgaagaatcaaaagagatgaacaaacagttcgaagagagttacgctatttgtttgatgtgaaacagattccaaacatcgaccaaatctttaaactaaagtgatttagcctgctagaaatgtcaaaattcttaaggggtttcctagactatcaatgataggaaaccacccgat

SEQ ID NO: 267849 - DNA, 424 bp, Glycine max
tatcaatcgaattagcagcattagcaagttcagatgcagttcttatctcttttattgtggctccctcctttccatatgcaatgttatccttaatgctagatgcaaacaacaccggctcctggctgacaaggccaatttttcctctaatccacctaagctgaaattctttcaagttgatgccatcaataagaacttcacctgcctgtggatcataaaatctctctaccaagctgataaccgcagactctccactttcactttgtgcaactaaagccgcagttgtaccacttggtatatgaagagagaatccattaaatatcagtttctcatgtcttgcaggataactgaaatcaacatccctcaactctattttcgcttgaatatcttctaatatttttcatttggatcataagcatctatctct

SEQ ID NO: 267850 - DNA, 380 bp, Glycine max
agtcacgctgacgggcggaaatacccgagtgggtatccgtataaactttttgcattctgtaagatgaaaagcctaatagcacgcagagactaacgtcgtattctgcccccttcgtcaatcgcgatcgacaagcccgttggcacgcggagatatttgttatgttccgcgctcacaagatctgtcatactgacttttgagtcacgctgacgggcggaaatacctgagtggctattcatataaactttttgctgtctgtagccgaaaagcctgttagcacgcatagactaacgtcgtcttctcgccattcgtaatcgcggtcgaaagcccgttgacacgtggagattacctatcttccgggctactaatccgcatactgattt

SEQ ID NO: 267851 - DNA, 388 bp, Glycine max
tttcctactaacagcttatgtcatcttgtgccaaggaatatcctgaagcaatcattggtgctcaaatatggttatgctgtctcctcattaccaacaattcctccctagcaataccagtatccaagccacgtcagctttcctctcaacaaagcttctctatacgtggtcactaaggtaagagggccttgagaatggcctctttgcctttgctgctatctgcacccctttggcctgtgactgcacctttgtatctttctccttgaatatgtcttctgctgctatctttcattccctatcacacgtggtaaacttccggggatgcctgaaggaagaaccaattcggtctaacaagtgaacacttttaaactcagagaccaaagttgaacta

SEQ ID NO: 267852 - DNA, 463 bp, Glycine max
  unsure (1)..(463): unsure at all n locations
gacaactgacaaaccacttggaggagtcggggttgattatcttatatgttgnnnctgnatttgaaacaacttcaaggcagaagaaatatgttgttcaaaatcatttaatttgtgtaattgattatgaaagattaattaggaaaagaacttggtaatttttgtttgtttttttattcttttttgtgttttttgctttatatatttgaagtggaggaggaagtagtggtaggttctatatttataatttgaaaaaatattgtagactaaaaattatcataaattaattattttaaaatttaaaacataaaaaatgttaataataaattaatgaaaggactaaaatggttcactcctaaacataaaacactaaaataagacttttaaaanaaaatccaaaatgaaaaacacaaaanacttatttacatcaatgttttctgatcatatcatcaatcaattatctctt

SEQ ID NO: 267853 - DNA, 405 bp, Glycine max
aagacattctattaaccgaaaaaaatgcacccatatacaatcaaggcagcttcgttacctaaattatttacacgtacttgcaaggcgtatttggaacatacatcacacacatctccttggctaaatgcacatacatgcatactcaaagcatttgggggtaccaaagattgcacatgtgcacatcttggtatttctaatacctatacatacacaaacttcatgatgaatcttgactatctacacaataaggtgctacatttcatgctcttttcaagtatttgctacctaaagccgcatgcaaattcaagtatattttcctttgctgactaaaattgtattcaaataaaaagggatacattttttggtaatgtatcttctttacataacatgcaacatatgtatgta

SEQ ID NO: 267854 - DNA, 464 bp, Glycine max
tctatagagggttttattgacagcctctctcatcatgccttttaggccctcagccactatattaaatagcataggagccaaaggatctccttgtctcaatcctctagtggggactatttccttggtagggctcccatttactaaaattgagatagtagctgagtgaagacatgcagatatccattgtctccatttaaggcagaaacctagcctttccatcatgtttttttttttttttgaaaagcaaagataatttatattaagatataagaagtaccagaggtactacaagaaataaaagaaaggaaccctgcaaaagcagggaccgaaagcagacagcaaataacaaacccccgccctaccctacaaataaaacattaattaaatactatagacattgctgaagaccaacagtggaaagggaccttgaaatccctttcccatcccctcaaccaagtccacat

SEQ ID NO: 267855 - DNA, 318 bp, Glycine max
acaaagaaagcattagcgaaggaactactctgaacacgcctgccaataacataacaaaacataaaggacaattaacaaaaaattcacaaaatatgaacataaacaacgcacctactacacaaggggcgataaaatcccaatcacacttctcgtgatcttgtgtgaaggtcatactcaaacatgggagcggaccaccccattgagagacaccccacgaatctgcattaaaagataaaatcgccctcacgcagaaagggcaaggacactctgcactatattcaagcacaaaccacaaactcgtcgattagctgcaacaac

SEQ ID NO: 267856 - DNA, 466 bp, Glycine max
  unsure (1)..(466): unsure at all n locations
tgtgttaatcccacatgggtggagcactctcataaaacttattgttcctgactgggcnccctatgatttcacttagtgagagtaacttgacttacccagtgacttgacttacccattgtgaggcatgtatcgtcatgtactcttatgcgcccgacgaggtttttcactgaaaaatgataccacattgcatgtaggtttgagtctagtatatttgttgcataatgcttgtgtttgactttcattgagttaacaattttggcttgatgttattttctggagtgtgtgaacttgaatgagtgggaataatgtgtgtgattttgtgaagcgatgttgttcatgtaaattcagctctaagtattatatgtttcacatgctctagcatcttattatatatgaatgtggtaattcattctaatgtgtgtttgtgcttgggctgaatgtcatttgttcacgtgagccaacatat

SEQ ID NO: 267857 - DNA, 377 bp, Glycine max
  unsure (1)..(377): unsure at all n locations
actctacatttttttttgcaagaaatctttgccaaaaattgactatcctctggggttgcgcctaatttatattaaatcataggattatgaaccaaccagggctattcaactatgacttaagaaacataggtgaataaataacaagcagaaatttaaaaggtactaaggtgcctcctaaaagcgtttcgttaacgtcttgagcttgatgcgggatgatgatatgttgatcacaagcctaacacctgctcgtacctgcccctaagtcaggacatgacattacgcagcaaaataggactacactaccacttacctntggttacctttgctttgaattcagcatgctatcaaccaaatctttgcttatcctccgacccaca

SEQ ID NO: 267858 - DNA, 465 bp, Glycine max
  unsure (1)..(465): unsure at all n locations
tttctttanaatctttacaagagatatcacattattgtttgaagaacaacatcataaggcatatcttcttcatcgtctaatgaagcatacgaaaaggtatcacattcaggacaggtttttacgtcgaccttatcatctatatcttccaagagacaaatgttggcttgttcatcacttgaactattactcttctcattgtctgagtcatcccaggtgaccttatcatctatatcttccaagagacaaatgttggcttatcatctatttattcttctttagttggggacatttaaccttcatatgttcaagctttctgcacttaaagcaaataatctcattgctttcctccttgctcttatttttgaatctagaacctttatgtttggaggaatgttgaaactttccctttgaatccatcatctctttgaatttcttggacatgagagtcacttcattatttgtgga

SEQ ID NO: 267859 - DNA, 427 bp, Glycine max
ctgcagcttgggttaaatatgagcgtctctattattacgggacacaaacggaggtctgagtgaaatgttattgtcgttctaatttgctaccagctttggttttaaatttccagcgtatcgatatattacgggacctaatcggacttccgagggaaatgttattgtcgctagcatttgctgcgagcttccattttaaaatttgagcgtctcgataaatacaggactcaatcggactttccagtgaaatgttattggcgttcgaatttgctacgagctttggttttaaatttccagcgtctcgatatattacgggactaaatcggacttccgggtgaaaagttattttcgttagaattatctgcgagcttccgttttaaatttcgagcgtctcgatatattacaggactcaatcggacttccgagtgaa

SEQ ID NO: 267860 - DNA, 437 bp, Glycine max
  unsure (1)..(437): unsure at all n locations
cgtagcatattcgaacgacaataacaattcactcggatgttctattgagtcccgnaatacatcgacatgctcgaaatttaaaaccgaagctcctagcaaattcgaacgacaataacttttcactaagaagtccgattgagtcccgcaatatatcgagacgctcggaatttaaaaccgaagctcgtagcaaattcgaacgacaataacatttcactcggaagtccgattgagtgccgtaatatatcgaaacgctcaaaatttaaaatcgaagcttgtagcaaattcgaacgacaataacaattcactcggaagtccgattgagtcccgtaatatatcgacacgcccgaaatttataaccgaagctcctagcaaattcgaacgacaataacttttcactaagaagtccgattgagtcccgcaatatatcgagacgctcg

SEQ ID NO: 267861 - DNA, 427 bp, Glycine max
agcttagcgcgtgaatagagaaaatgtttatctttacatctctcgccaagcgcgtctctaggctcacttagctgaaatcatgtatcttgagtacacaggagtgggcgctgaatgtaaattaaaatcgctcagcgcacatattgccgcaaacatttgagcttagcggcatggaataacacttagctcaatcaaaatgaagtttggctgcaagaagttcagcttagccacaatgattggcgctcagctctatgaacttcagttatagccgtaaagagttatgcttggcaacactgagtcgtgcttaaccaaggataaggtatcgcttagtggtttggttgtcgcttagtcaaattcagatcgaattgaagttggcttaactcagccttggccagcttagtggaccaaatcagcctcagatgcaagggtc

SEQ ID NO: 267862 - DNA, 355 bp, Glycine max
cttagcgagcattcactaagcgcaacactcttgggctaagtgcaaggaagaatccacaagaagatgagttgtacaggttcgctaagcgcaccgcttcagttcgtccgctaagcgagaaaggcgcgctaagccaaaaatcactaacgttcactaagtggtccatacgtgcactaagcacacgagcacaaacaaggcaacctattcaagaccttaattgctgtgttaaattttgttgtaatagaacaattgagtgctcaattttttctattgcaattccttgtatttggacattcttcacgggtgtatggggagtcttgttagtcgtcttatacgactaacttttgtatataaaaca

SEQ ID NO: 267863 - DNA, 333 bp, Glycine max
ttttgtctttttttgcaatacaaacttcccctcaggtaggaattcttatgaaagcgctggaactaggctctagttgttagtgttttctgccatcaaacaaactaaaggtatcgcataacaattaaatactgggggaagcctttgagagtggccttgtcaaagtatcattagttgcatgactctggctctactttttctacaagcaaagagggctaagttggtggactgtattaacagattgagttttgaatgtttcaataagatgtcgggactgcttatatgagacttgaacatgaatgacctacaggaaaaccatgagctctgttataggta

SEQ ID NO: 267864 - DNA, 472 bp, Glycine max
  unsure (1)..(472): unsure at all n locations
actcagctggttaactggtagcctctgccccatcaanngncttactcttaatggttgctctngncnctngctgaaattgcatattctggatggtcatttgcctcactaactcctctaaggaaggttgagaaggggcctgacttgcttgttgtctttgtcgctattgctgcattggaggaggaacatatggcctgcttagactagcaacattctataaatgagggacaaattgttgttgctgctgttgttgttgtggaggatttgcccatctcagatttggatgattcctccaacctggattgtatttgttgcttgaaagattataattattctgctgttgttggtttttttgttgagggggtctattataaatgtttgcagcataagcttcaggttgctcattgactccaggttgctgcaaagaaggatagagatctgtatggtgatcaacagaagaacatataccccacac

SEQ ID NO: 267865 - DNA, 328 bp, Glycine max
attctccatgtatatcccccaatttcttgaggtatggggctgtttagagtagattccaaaacaataaaccaattaaatcttagatctacacttgttcttgcatttctatggttcaaaatttgtaaatctactcttgaatcatgtatttgagttgattctaggttctatcattcttcattcataatattcttgcgctgaaccttaaatctaaattttcttccaaaatattgattagaaaaaaaaacacacaaatctaagtataaatcacttcatccatgttgtcttagagtcatgttcagtcataagaattatcacattatgctctaac

SEQ ID NO: 267866 - DNA, 471 bp, Glycine max
taacaaaaggcatgcgaagtgggtggaattcctagagctattctttatgttatcaaacataaaaagggaaaaggtaatattgtagccgatgctctttctcggcgtcattcattactttctatgcttgaaacaaaattgattggtcttgaatgtttgaaaagcatgtatgaaaatgatgaaacttttggagaaatttacagttttgcttgtcctctgcaaaaagagaacaactcagttgtcctcaagtgacaatgacatgcaatgactatgtacaaaggtgtatgaaacaaaagttactgattgcataataagagaatggagtaaaatgccctcatcacttgtctttcacaaggtatgcagttatccaaagagaagaataaaatgtaacctgaacaaatagatggagttaggcgtaagacaaatatcaaggaaagtagcttaaaccacaatctcacggctactgtttcactc

SEQ ID NO: 267867 - DNA, 431 bp, Glycine max
  unsure (1)..(431): unsure at all n locations
actcagcgtcgtattgcaaaccacaatggatttcctaggtagggcagtttgtatttcaactgtctggngggcagaagcaccgcattgtcataacaagagccttactaagggatccaaaggtcctcttgcttgatgaaactaccaatgcactatatgctcaatctgaaagagtggtacaggcagccattgatcaagcttcaaaaggaaggacaacaatcatcattgctcaccgcttgtctacaattcgaacagctaacttgattgcagtccttcaatcagggagagtcattgaattaggtacacataatgagctcatggaattgactgatggtgagtatgctcacatggtagagttgcagcacataacaactcagaatgatgaatccaaaccttccaatcttctaacagatggaaagagctcccacagaatg

SEQ ID NO: 267868 - DNA, 264 bp, Glycine max
ccgccgccacacccacgagaaggaaaagtttttccccccgaacggcaggggcccaaaaaggggaccgtcaaccgacaccacaagaaaaaagcgcccagaagaaaaaaaaagagcgcagaccgaccgacagcaagaggaggaaaaaaaccaggaaacaagggcccacaccaaaagcagggcccacaaaagcggggcaccacacaccccgaacggcccgacaaaccgaacaaacaaccacaacaacccacaacaacagcaaccgaa

SEQ ID NO: 267869 - DNA, 275 bp, Glycine max
ttatcacaaaataacaaccagaaggcactcaactcaaaaggaaaagaacctgcgaacccaacaatttcactagtaacagaaaacaagacacgttcagcttcactggatgattttgacacagtgggttgtttcttacaacgccaagaaagaaggttgtgtcccaaaaagacacaaaagccaaaagtggatcttctaatatcaacacaactggcccaatcagcatccgcaaaagcaatgaggttgagagagttctgagcaaggaaaaacaaaccttg

SEQ ID NO: 267870 - DNA, 475 bp, Glycine max
  unsure (1)..(475): unsure at all n locations
ctctagcttcgcagttctttgactaccaagggatcctagaccatgaacgccttacttttctctctttntacatggagggcccgacgttgtgctggtaccaatggatgtcgaggaatggtttcctcacatcttggacaggcatgctcgaagctcttgagtcacgctttgccccggcatattacgatgatccttcaagcaccttgttcaaactacaacagcaaggctccgtcaatgattaccttacaaagttcaaacaccttgccaatagaatttttggccttgccccatcctttctttaagttgtttcatctccggtttgaccctgngcttacgtcgcgaggtgtaagcccttcaaccctcttcgttgacacaagccgcgaccctggccaagctccaggaaaccaaactccttggtcagcatcgaaactattactctccaccatcgcctcgttacaaagcacccgcanaccccaac

SEQ ID NO: 267871 - DNA, 391 bp, Glycine max
gtgcgatccttgacattgcgtgaaaatgtgtttgtcatgatttggttgcagagaatcgtaaaatctttatgttgcggtcgcaattgtggttatatatggatcatgatttaaaaccatactaacaattttgcgctctgtgtttatcaatcgattaattgatgatcgaatgtgaaaattaatataagtttttggcaatgtatggcaatgagaggctccaacaactcaagaaggggcttatcaaaccaatacgatggtccatgcaaggcgacaaaccccattgacaatgttggagatgtgacctccattgcgagaaaaaccgcatgaggctagcagattgtgccctatgctttgcgcatggcacaacagggggcaaagatggcaaaatttacgt

SEQ ID NO: 267872 - DNA, 382 bp, Glycine max
ggatcatttttaaggtccaaagccttaaaatgatcacctttcaagtaaaaagaatcactcgattcacgcataagaaagaactacgtaggtctgatttcctttttgatggagggcacgtaggagcaagaactccgcttttgtcgacctcacataaataaaaagaaatagaagttaagataacacaattccacaattctaaaaaataggctgttgtcctttgagacaaacgtgagaggtgctaataccttcctcaaacgtacatataactcccgaacttagaattctcattttgaccgttttccttcgggttttccgacgttttccacaaataaacgttggtggcgactccgcgcatctttcctcctttggaaagcgcacccgt

SEQ ID NO: 267873 - DNA, 466 bp, Glycine max
  unsure (1)..(466): unsure at all n locations
gtaacctcatcgtccctcacagnctttagatttgtgagcctatccaatccttgggttcggactctcagccacttatgatagccgccgatgatcccattactgcttcccctaagctctctgtcctttcttcacgccgcatcccatgccttgcgaactccttggagtaccctcgcgttgtggtcactaaaaccccgtgcgatgaaaggcgtgatgctttcgtctaatggcgctcctctcatggggtagccaagctgtcttatggtgagaacgggattataattaatacaaccccttgttcccatcaagggaacatttggacatccttcgcatgaagatagaatcctgattcttccttccttctagcgagggaaccaattaacagacgcccccccatgctagccaagagttggtcccaattcgcctttcctttttcgacgcacgagcggtaaccttgtagcggatagac

SEQ ID NO: 267874 - DNA, 399 bp, Glycine max
  unsure (1)..(399): unsure at all n locations
accccncaattagcggatattcaaggcttgagaagtgaaaatgaaaatggggtaaatatggagcaaactctcacctcacacaagtctatatcatcaatctaaacttgctcaaactggtttttacgacgaaaattctaccgaatcaaaatttgactcctcaacacccaattttaccctagaaatggctcttgccttcactttggtcatttgtttttctctcttgcatagcccaagctttctcataagtcctaaatgacatttcaaactaggattaactccctttaacctccaaataccactaaatccagatttggccttccaactctcaaagcctcactctttttccactcataacactacattctcactgtctaaccgtaggttaactctacccttcat

SEQ ID NO: 267875 - DNA, 473 bp, Glycine max
ggactcattccatgcttaagcttgaaatacaatagctcatttttccttgtaggtcatctcgcttaagcctggtctatcccacacttaagcttagtcacgtttaagcatggcttaacctacacttaagcttgaaaaccaataacccattttcccctgcaggtcatttcgcttaagcttgaagaactcttcgcttaagtaccacggtctagcaaagattcaaaaaaggagtttttcactcttaatgtggcttccaaatcaacccaaatggaatcccaagcctatcaaacatgtttccacacactaaacacctaaaataacaacagtttataagttctaacaaccttaacatgaaatctaaaggtaaaggacctaaagtgttgatttatggagagctaacttcttatgatcctacaacacatctaatggagaatactccatgaacaagcaaaagaaagaaagataactcctctata

SEQ ID NO: 267876 - DNA, 391 bp, Glycine max
tgcttgcgacttcttttataggcccaaggtaccttcacatcgacttcacgggaagagtgcctcttctgggcttaacaaggtggacatgtgcttagcgatgaatgtcgcgctaagcgagggtgtgcgctaagcttggcctgtgcactaaatgagttgtacgaccaacttatttccaaggtctattctttcagtttttgcatcaaaattcctctaaaccacttgaaattctcttcttataactttgctgctaaaaaatcgcaagtatattaattccttcattatttcattaaaaacaacagtaaagtaaagaaactgcaatcattcttagccaaaactgaccatcaaactaactcaaatattgcagttatcacctatactaattgaaaggaac

SEQ ID NO: 267877 - DNA, 456 bp, Glycine max
  unsure (1)..(456): unsure at all n locations
tgtccganattcanaagggcataacttttcactcggatttcttattagacgcataatatatcgagatgctcgaaattgaacaatggaagctttcgagaaattcaaatggtcataaattttcacacggatgtccgatgaaggcgcataatatattaagacgctcgaaattatacaatggaagctctcaagaaattcaaatggtcataactttntacacggacgtccgattcaagtacataatatatcaagacgctcgaaattgaacaacggaagctctcgagaaattcaaatggtccgaacttttcagtcggaagtctgattcggtgataaaatacatctagacgctcgaaattgaacaacggaagctctcgagaaatacaaatggtcataacttttcactcagatgttcgatttacgcagataatatattgagacgctcgaaattgaacaacggaa

SEQ ID NO: 267878 - DNA, 471 bp, Glycine max
  unsure (1)..(471): unsure at all n locations
cgaagatgttcatgttaaggttgtcgaatcacaagagaatattctgagacaaaatgaacaaagtgttgtaacactgtcagtttactggacaaaggaaacttgagcggattgagtaaatcttagttttgctaagctaacaagtttcattgtattcaatcttttgtgtaaacactctttgagtgatcaaaatacattttctatcaagcatatattgtttgtgaaagtcangagtgacttagtgataaaggatacttggtgctaggaatggcctagagagtactcattatagccagaagtggcatagagaatacttggttgtaatcagagaattgatcagaaaaactcttcaaggtttgaaggagaattggacgtagcccaagagttggggtgaaccacgataaaacctttatggttctttattgcttctacataactagttcttttctataagttactactacactactgaat

SEQ ID NO: 267879 - DNA, 372 bp, Glycine max
ttctccataaaaggaagtatgcattggaattgcttgaagacaccggtttattggctactaagcctagtacaactccctttgattgctccctgaagcttcatgacagtgactcaaccccttatgaagaaaaaataacctataggagacttggtggcagacttttatatgtaactacaaccaggcctgacattgctttcattggtcagcaaaataagtcgattcatctctcaaccattacaagttcatcactcaccagcaattagaggcctcaaatattccaaaagtgctcctgacaagggattgttatatttttcctcctccacactcaaactctctggtttgcagactcaaatggccaagatgccctgttac

SEQ ID NO: 267880 - DNA, 462 bp, Glycine max
  unsure (1)..(462): unsure at all n locations
tctgaagcctacttacatcanaagcctcaacatgggaactctcattctctttcccaataccaccactatgcttagcattaacattggctacaacaaaactataagtttcttaagaatttgatgcccagaaagtttgtttctcatatttgatttatttttattttttttttaaataatatccccgagaaataatgatttcaggaatagttttagtgtttctcataacaggaatttaaccctctctagttaaaaaaataaatttaaaaaattaaaaaatgttatcgacatttttttaacattttctttttattattacaagtataatctataacaacatctttttgtttaatacttagtaaaaatgtcactaaaatttttcacgacattttttaaatattactatagagttttaacaacattttgtaatntttttaatgttaaataaaacaatattagtaaaaa

SEQ ID NO: 267881 - DNA, 430 bp, Glycine max
agcttggaatagatacactgacattattctatgccggaatatccttccggagagaaatgtgaagctttattatatagagttcgacgagttcaaggtggagttggagaggcataatctacacaaatgcctcaccaacctctaggatggaagcatagacatggctctagttaaggaattctatgctaatttatacaccacagaggaccaagctcctaagcaagccagagtaagaggacacctgatcaaaatagatgcagacaagctgaatgaatttcttcagactccggtggtgttaaaggagggggaatctttacccacctactttagattttgcaggttgaggactaaacaccaggagattgatgccaggctttgtattccccgcaaggggtttgttttgaatgctgagggctagctatggaaacttctc

SEQ ID NO: 267882 - DNA, 414 bp, Glycine max
  unsure (1)..(414): unsure at all n locations
tacatgttcaactctttgagtgacatttgtattgattattgcatcttagtctttatcttttcatatgtacatcatgcatcatcatgtagaggtaagaagattgtttctaaagttaaaaaaattttcaatgcataaaactctctgttttaatcaattacaaggctaatcgtaatcaattacacaagtgtttgtagcttgcagagatattctagtttcagtttaatcgattactagttaaccataattgattacataaattagttgagatcatgtttgattnttcacgaagtctctgtttaatcgattactagatgatcataatcgattactacattcttaaaggtgttcccagaagtgattgagaactctttaatcgattacatcaagaatctaattggattacattgttcttga

SEQ ID NO: 267883 - DNA, 392 bp, Glycine max
tatcagtacaattgtgatatggctcccgatcggactcaactgcaaaacatgttggatcgagtggcctcaaaataattaagaaagggggggggtgttgaactaattattcctaaacctttactaattaaaaaattactcttcttaggcttttactaaattgttaagagaatgaggagttagaagagaaacttaacacatagtaaaagcagaaattatatgcacaacggatagtaaaagagtatggaagaaggaaacaaacacacaagagtttttatactggttcggcaacaacccgtgcctacatccaatccccaagcgacctgcggtccttgagatttctttcaaccttgtaaaaatcctcttacaagcaaagatccacaatggatgtactc

SEQ ID NO: 267884 - DNA, 461 bp, Glycine max
  unsure (1)..(461): unsure at all n locations
tctggcattttagagatttctagagagagaaaggtctaagttccagatagttttgagagcttttgttgtgcaaagactggcagagaactgagagtgaagaagaagccatcctgagagcataagatgagtctgtgagtgattgtgaggttctagaggtggaggagaaatccccactacttacatttcttcaatccttcatttttctcttctctttgttgtaaagaaagcttcccagatatggagagctaaatcctctgttggttcttccttgtaggtacttgatgtaaatacctgcatatctatttaatgatgttttatgtgttctctatgctatcagtacgtcatttcaatgtgcttttgccttgatcatgcagatgcatgctntgttaggatcatttaacagtgtcagttctctgccagtacctccctatctggcaagaagtccaggggtaagagatctg

SEQ ID NO: 267885 - DNA, 356 bp, Glycine max
aacaataaaagcagaagtttacccttcaacacttacctatctcaagctttgaagataatggggtacccatcacatgtggtactaggtggcggtcgggccatgatgcacaacaagctttccacattcacaatgcgcgcataaacccaccaatcccatttgcccacctccaactgagctcacgtactcccacgtagcccatatcctcgtttatctcaacaccgggtacccatcaatcctcccaagcttccacaacatccaagcgaaacaacattcaaacagcacaagctatcacagccaagcaaaacagagcaaaggcagaaaactctgctcaacacatcaacacaaatcacagcttc

SEQ ID NO: 267886 - DNA, 466 bp, Glycine max
  unsure (1)..(466): unsure at all n locations
tatgtgttggtgttaggtctttnaaatccatgttgaaccattaaaagtttatttgaccatttcaaggggttggaccttaataatggttntttaggtgatgacaaaagcttggtttatgaattgattttagccttagtttcactttggttattagtcaattcgattaagaaagaaaatcccaaagaaaaatgtccaattgatttttttctattattttatttaaagatattttttttattattatattattattttgcctctttttggtttttaacgtggttgcggcatgaaagattggccggattttattctaacagaaattaaaagatgttacaactcacatgatcggtggaaatctattttatcttttgattgggtgagaaagtgacttatataaatgactaaagcacgtgaaaaggtggtacgaaaagcatatgaaataaaaataaaagcacgcgaaacaagc

SEQ ID NO: 267887 - DNA, 404 bp, Glycine max
  unsure (1)..(404): unsure at all n locations
ccacacaaaaaactgtgcatatatttgacctacagtgatatctgctactaatgcaaaatctatacctaagatttgaataccactgattatagtgagtggtaaaatccttctctaaatatttcagccaagaccataacaaaaacactgccccatccattttgtttcccccataacaaaaacacttttactctctttgatgtttgtagacatggataatcagaaattaccctgcagagcttgtgatagtgctcactcgcggtacattagttgctatgctatctatcccaccttgactgatttcggtaacggatccaaaagctttgagaatacgattcgatgtgaatatgatagctattgcattgcangtaagaataaatggtgatactcatttctatatcagcatg

SEQ ID NO: 267888 - DNA, 336 bp, Glycine max
  unsure (1)..(336): unsure at all n locations
acaacccaaatctctagcccatcagaaacataaggataggccccgacaaaagccaaactccatggggagcaagaggatccataacaacaactcccctgaattaaaagcacccaaataacattgattagcataagaggtatatcaagcctgacgccttctatcttcttatggcattgatgacctcttatatcacgcatacatgtgccactactctgtcaaagccatgaactgtcaaagccaatcattaggatgaaacagactttgtctttccaaaatcagaaatacgagccactngagcatctgctaaacgatatctcgcgccaccaatacgaacct

SEQ ID NO: 267889 - DNA, 394 bp, Glycine max
  unsure (1)..(394): unsure at all n locations
tgtagaatggctagacatgatacatgtcagggtttggttttgttcattgtataaaagggatgccccacattatttccataacacaaatgcaaaaatgatgatttggaaattttatgcaaaactggtcatgcatgcacctatgtggacgctcaagtgtcaaattttcatggtcatgtgatgctagggctcacgattcatttcctctattttaaatcaacccaatgtttccaaaatatgttcttttatcaatttgtgcattcatccaagtccatttcgggcgttcggngaaattttcacagcattcacccttcaggtgtagacacgtttttttgttcaaaaatcggttatgatcaatgatttttttttcaagaanagttggaaatcatctcttttc

SEQ ID NO: 267890 - DNA, 478 bp, Glycine max
  unsure (1)..(478): unsure at all n locations
gacactacngaaactcaagcctggtcttgattntntctaagttctttaacaagctgtgaacaatatacttgttcttcattaaactgtctttgggcttggcggccacactcaacaaagtactttcgacacctactgtacgttgatttgaccaatgctgttatgggaatgttgcaacaatccttcaaaaccttattgatacattttgagaggttggttgtcatgtggccatatcgacgtccttctctatcataagccatcgtgcatttttcctttgaaatgcgatcaatccatgttgctgtggctggacttagttgacgaaatatttctaaattttggtaaaaaaatgtgcttgcaaggagtgtaggctgcataaaatgagttatgaataacaattctaagtatatattaaataaacgtgaccatcaaatatgaaatcttacccaatttcttcaacatttctttttgttnggcattattg

SEQ ID NO: 267891 - DNA, 325 bp, Glycine max
gatgactcctcaagcttgagccctgtgagaaatcccctccttgggtgaatctcggcggacctcattggatgcagccttataatccgtgatgattctgagctcccttgtagttcacctccttaaacgacattacttgggatatgcattgctctggctcgcgtgcaccaccgtagatgtggcatccccctatttgcacgatcgagaagtgagaggacctcaccgcttatagactttcagggagcttgtagaggatccctgcgagggcctctatctcgcgaaccatagctagttcggggccaatgtgcatcatgggtcgcgagaccag

SEQ ID NO: 267892 - DNA, 432 bp, Glycine max
  unsure (1)..(432): unsure at all n locations
ctgctctanatttacactgatgtttgtatttaggggagtgatttgtatgccatttttgttttaagggtagtgtcccactggtaaaactaactttccaaatttttgccttcgcaggaaatggccccgaggaagcttgcctcaaagaggtccaggaaggacaaggcagccgaaggaactagttccgctccggagtatgacagtcaccgctttatgagcgttgtacaccagcagcgctttgaggccatcaagggatggtcatttctccgggagcgacgcgtccagctcagggacgacgagtatactgatttccaggagaaaatagggcgtcggcggtgggtaccactggttactcctatggccaagtttgatccagaaatagtccttgaatnttatgccaatgcttggccgatagaggagggcgtgcgtgacatg

SEQ ID NO: 267893 - DNA, 407 bp, Glycine max
tgaatcttgagcaatcatcaaccagggtaaggaaaaatcttcttccctcataggtagggtgagcatagggaccccatatatcacagtgaattaagtccaatgtgaattcagataaatggttagagttaggaaaggatagtcttctaaatttagcaagaggacaaatagaacaatcagaagaagagaaattgggagaaaggtgcagacccaattttattattcaaatgtctgaaaactttgtcagagatatgaccaaatctagaatgccaaatatgagcatttttacaaggaatggaatttgtatgtgaattgataacagagaaagtaaatttgcaatcaagagtgtccttgaaatcaaatttacgaatggctagaggagcactaactgaaattaaattgaattcgaa

SEQ ID NO: 267894 - DNA, 460 bp, Glycine max
  unsure (1)..(460): unsure at all n locations
aagagaagaanataagagctgttccaaagtagtaattattatatatggaatctgatggactagacaactccgatggatccacaaatggtgaagtgaccctcatgtcttggaagttcaaatagatgatgaagaagggaaagtttcaacattcctctagacataaagattccatattcaaaaagaagaatcaggaggaaaacaatgagatcatttgctttgagtgtagaaagcctggactcatgaaggctaaatgtccccagcaaaagaagaggagatattctaggggaaagaagaagaaaagtctgatgatcacttgggatgacttagacagtgagaaaagcgacagtctagatgatgaacaagccaacatttgtctcatgatagatacaaatgatgaattacccttntctagaagtattcagtttcagcccgtagcatctcatgctgatgtagttagaga

SEQ ID NO: 267895 - DNA, 290 bp, Glycine max
aagaatacctggagggaaacctacaaaggctctgagaaagaatacttggagggaagcctacagaggctctgaaaaagaatacttggaggaagcttggagaggcttgcaaaagaatactctatgaagcctatagaggctttacaaaagtaatatacacggagcttggaaaggcttaaagaatactagagttaggagcttatggggcttcgaaaaaaaaaaaagaatatcattcgagggtgcttggtccttgcggagaaagtctataagtgcaggaagtgcatgtagcccat

SEQ ID NO: 267896 - DNA, 439 bp, Glycine max
  unsure (1)..(439): unsure at all n locations
ngccgccacagagttttccgactatgctcttgtgtggtgtatcaagctacaaaaggagagagcaagagatgaagagccaatggttgatacatggacggagatgaaaaagatcatgaggaagcggtatgtgccggctagttactcaagggtgaaattctgatactggggacagatgtcgtacaggatgtcacgacatcacgcttcagaacatgcagattatatttgacagtgtgaacagtttaaacaagtaaataacacaagagaattgttaacccagttcggtgcaacctcacctacatctgggggctaccaagccagggaggaaatccactaaaatagtgttagttcgaagatctaacagccactggttacaaccttctcacctaaccactacccgtgcaatctctacctaagagccactcttatatatgagaacccc

SEQ ID NO: 267897 - DNA, 314 bp, Glycine max
  unsure (1)..(314): unsure at all n locations
cagctgtcaatctcatttttgttttcctatcctcgaattctgcgggagatgaacattgcttcatgttgttcctttcttttcgtgatttttaaatcatcaatgagcacatccttttaaggtcattgtgtgattggatcaggcgcttaccggatttgatcccagctgaaaaaagtaagttngatggggtgaacgacaaagtggtagtggatgcatcttatggggctggtggagtgaaacttacatatttagggaaattgctgaatggttcgattattgaggctccgaacaccagtgaagatggacgtgtactgaat

SEQ ID NO: 267898 - DNA, 441 bp, Glycine max
  unsure (1)..(441): unsure at all n locations
nggctctggtttagacatgtttgatacatgatttgngactttgtaggattgatttgagcaagattggatgaggggaagtgtgattttcgaaatctgcacttatgcagaattttgctgtcaaaataggtgcagcagaattttagcttggtgcagaaaatgcttgtgtgtggttggctgtggaaagagtantacagaatgagttctggatgtttgctagtcgatcccaacggtcacaatgtaggcttatgcactatagacttccagtaaaattttggagtcgatccaacggttaacgaattggatcgaaggaattgttactgnggtctttaagtgagaaaagctgtgattttggttgatgtgttgagcagagtttctgcctttgctctgttntgcttggctgtgatagcttgtgctgtttgaatgtntgtttgcttggatgtt

SEQ ID NO: 267899 - DNA, 415 bp, Glycine max
aaaacattgaacgcatgaatattacctcaaatagataataaaaatatttacatcaagtactcagtagaaaatctcaacaaaggattttagcccttcattacaagggagtagcttttacaaaataggagaagggtttcagagaaaataccagattacaaagcaatggggatgtctcctccacctttacctccacctctaagaacctagaaaataactctaaaatctataatctacctaaaagttaggacctttgcttccttgctcaacttttcctctgttctctacacataattcgcagtcaattcagacctctttcacgtcatcacgctctttctcaattttttatgtgcaaatcaggcttaaaaagggctttctgacctcgaaggcgtgcttagcgcgagtaatggtatttggc

SEQ ID NO: 267900 - DNA, 396 bp, Glycine max
  unsure (1)..(396): unsure at all n locations
cgagctnttcattgggggtatttgatcttcctttggttctctagatnnggggaatgtactcaaatacgtggggcaattttggtttgttttcttgcttgattgggttgaattgaggatttgtatgagatgaccctatgcctataatgcattttggagcaatggggcatgccgcattgtccccattctcttgctattaatgcctaaatgtgcgcccaccaagtgtttggtgaaatgcctcaatggcatttgcgcatgattttgtagggatacaacctatgggacaatttggtttgcgcgtgtttgctgtctttggagcatgtattcagtttcataagggctagaatgattgccccacatacaccctatgcctangaaccgaagcttgtttttggatgc

SEQ ID NO: 267901 - DNA, 440 bp, Glycine max
  unsure (1)..(440): unsure at all n locations
agctntggggctggagaactatattacatttcctagggtctagtttaagnctcttctctctcttttctctctcctattttcgnttttaattttaggcttttcttcttttagacattattttcattttgcaatttcagcttttacttttcgtttcagtaataaaatttcattcttcaatctataatttcggtctctattaattaatggaaggctaagtccccaacgttgttttctcttgaggatcaagcacagttttctttgaggttctagtattacagttaaattctgttcaatttttcctcttcactaattactctgaatttgttgctatttattcatgcatgcttagtacttgattaattgtctctgcgctntaattacgttcatgcttaatgatcgtttatgagtaattggtgtatgtgttgcttaatcatataacg

SEQ ID NO: 267902 - DNA, 455 bp, Glycine max
  unsure (1)..(455): unsure at all n locations
tgtcggaatcgctccttgtttgtgccacatctcttgtgcaccagtaatcactccccaccctcgccagcgctcgggatattacatgcccactagcttccacttggttcatcctcgaaccacaccatattgcaagagaggccttctccaataccacttgtaatgcccaactacttgtaagatcattgattattcctataaaccaacacaacatgttttaatgtgctttatcatcattcacacacttttcaataaacttcctcgaaggtttccatcctataactgctctaagctaaacccactagattgtagagttcttaagtgatgggataccaaaaaagtaaatgcatctcattactataggtagtactaattaattcttttaatcatccttaactatatggncttatacctgcacagcttctagatccctctcattcaagtgtgattcattcatg

SEQ ID NO: 267903 - DNA, 453 bp, Glycine max
  unsure (1)..(453): unsure at all n locations
tatttagattcctaggatcatgagcaactatgtgtgttctactatgacttgagaaacaaaggtgatcaaataacaaacagaaatttaaaaggtactaggttgtctccaagtagcgcttctttaacgtcttgagctagacgcgtgatgacttgtcggtcacgaacctagtacttttgcttacctttggctttggacttggtcgcctgctggtcggccacaggtcgtangcaacgctccaacctttgtagatgagctaaggggctctggaggtggcggcggtgcgtctattgcccactatcggccaaccccaggctgctatggtgtctcgccctgcgcctgcctgngggcgcaatacttcttgatgaaagctcagttagtanggggcctgatgaccttgctgggggcaacaggcactcctttgaactgacagaggcctgtaattaaagctggaaa

SEQ ID NO: 267904 - DNA, 428 bp, Glycine max
  unsure (1)..(428): unsure at all n locations
ttgcatatcccttgataaaccttcgatagtaaccagtgaggtctaagtaacctctcaactgcttgatattgagtggggaggccactctanaactacctgcaccttagtagcatccgtagcaactccttcacctgaaactatatgtcccaagtagtctatctccaatacaccaaaagaggatttagataacttagcaaacaaaacantttctttcaacactttcaatacagcctctagatggcataagtgttcatgctgtgtggaactataaaccaatatatcatcaaaaaacactaacacatatttccttaaagcatgttggaaaatatggttcatcaaacactgaaaagaagccggagcattggttaaaccaaatggcattaccaaccactcataatggccatggtgagctctaaaggctggtttat

SEQ ID NO: 267905 - DNA, 292 bp, Glycine max
cttcgcggcacaatcacattgataataggatatgtgtgtgagttgctcttctctctccccacaaatacctgaaccatactttaacccataaaccagtttcgccaactgttggaaaattctgcgcttccttcactgggtattgtaattttgagtaagtagacggatctgttgcctcggactgggaaaaattaacttattgatcatgctccattagcatgtattgtggccacatcatataatttgaaaaatctacctacatatatacaacgactctcgtcgaatatgtgttttg

SEQ ID NO: 267906 - DNA, 456 bp, Glycine max
  unsure (1)..(456): unsure at all n locations
tgtcaaccctatcagcctgtctgattaagttgtaaaatgcttgagattgtctatcccatctcttcctgaagtcctgtacgtgataggatagatgtaaaagaaagaattaaattaactgaattcacagtagaacatgtttgtgactacctttaggacaacttcaaccccagcttcacgaaacctgagcaactccagggcataactacatggccaggaaggctagttgtgttaagtacgtaaaacatataaatttaacatgaataaatgaaaataattcaaaagttaaaaattatgaagacaatatttacgggttggcaatctcagtgatgtcaaaacgtgggtcaagcccctttccaatgccatncaacactgcagagacaaaaatngacttgtaaccttacaaccatatgcatggnattatgcgaaatatgcattaaacttgattgcatttacctg

SEQ ID NO: 267907 - DNA, 448 bp, Glycine max
agcttatgttgcaacatctacaatcgacctccttaacctcagcagcaaaatcagccacaacagaacaattatgacctctccagcaacaggtacaatcccgggtggaggaatcatcccaaccttagatggtcgagtccttcacaacaacaaccttattttcataatgttgttggcccaagcagaccatacattcctccaccaatccagcagcagcaacaacaacagcaatagccccagaaacaacaaacagttgaggctcctccgtaaccttcccttgaagaacttgtgaaatgactatgcaaaacatgcagtttcaacaagagaccagagcttccattcagagcttaactaatcagatgggacacttggatacacagttaaatcaacaacagtcccagaattctgacagattaccttctcaatctgtccagaatcccaaaactgtgag

SEQ ID NO: 267908 - DNA, 453 bp, Glycine max
attctaaccttgaaattcaagaaagtaccttgatttctgaggactatgggataaagatggtcattgaccaatccctcttctatgatttaacccaattgtctagcgaagttgtaccatttgaaggtacactggatgatgattggaaatttgaattttttgtgcatgatgctcgccggttggtttgcaccaaccaagcggatatgaccggaaggctgcttgccggttcattggctcttgaaagtcgtatccttcactatcttattgttcgtatcttactcccaagatttttaaaccttgcacaggtttctgaagaagatcttataatcatgtgagcctttcatatcggccgacaaattgattgggcacacctagtccgatatcgcatgcataaggcattgcgattaaatgctcctttttccctatcctcatttagtcactcttttccttcaacat

SEQ ID NO: 267909 - DNA, 441 bp, Glycine max
  unsure (1)..(441): unsure at all n locations
agctttaagcaagacactattggttttatcttattccatctgtattaactcttttttattctaagacatggttttaattgttctttggcatttggctcaagagtgttgaatctgataaaaatagaagcttgattctgacctttaggttttattgaccaacttgttcactgaaatccaaacatttggccaaaatattattcaaatacaactgaactatacccccacatatgtttgtatccccaacaccagcagctacaggtacactatgcccaactccaacagagtaaccagaaacattttcatcatttttatctgttcccatttggctttcaacttctagaagatacttgaacatgttntgcaatccttgaatctaattaccagagagatttagtatacacaacaccaacaacaacaggtacactatgcccagctccaaca

SEQ ID NO: 267910 - DNA, 468 bp, Glycine max
  unsure (1)..(468): unsure at all n locations
taatagagagaatatctaactctggatacaagaatttcttatccaaaacattntaggattagagccaaaattttatcatcctataaagtgtctataaacacctttgtaagaagagccgcagtgaatatgacatcccaaaaggtgtaatagatctatgtccttaaaatggaaccttgagaaggaggtgttgttttcttaatatcctagtggaaagggttagctagaagacggtagactcataagagagttctataaactcgacttgtgaactcaactcgtagactcgtaagagtctacttcatataaaaataataacaaaatatctataaataacacgtcaatcaaacatttcaacaatataataaaataaaatagtaaatcataaatttcacaatacttacataagcaagtctagtaatacattattactagataataactcgtagatgttatagtagtcgtagatca

SEQ ID NO: 267911 - DNA, 413 bp, Glycine max
tattggttgtcttaagttttggaggctttatgaaagaaaaactaccacggttgggtgcttggtcttaattaaaaaagtctacacgcgtaggtattaaagatgcctacgttggggtgaaccaatacaattccttagtgtgttgtttcctttcttagagcttcttgtgtatccctgttattataaacttaaagtttgttattgaaaagccctgttttgaaaagtataactgatatttgatcaaaaggttttcatataatagttttattattcaaaagcaacacatactctatgtaatggaagtcaaaactaatatcaaaagattttcataaactatttttgttattcaaatggaaatctgccaatgatacacacgaaaggaataaaaagcattccttgactccagattttactac

SEQ ID NO: 267912 - DNA, 467 bp, Glycine max
  unsure (1)..(467): unsure at all n locations
ggtaggatcatggggtacccatcacatgtggtactatgtggcggtcgggcgatggtgcaaaacgattctccacatccacaaatcacgtataacccaccatcccctgttgcccacctccaactgagctcatgtactcccacgtagcccttatcctcgttcctctcaacgtcgggtccccatcaatcctcccaagcttccacaacatccaggtaattccacatccaatcatcatggactaacaaaaccaagcaaaacagggcaaaggcagaaaactttgcccaaaacacaactcaaaatcatagcttttcacatacaaataccccagtaacatttccttcgttccaattcgttaaccgttggatcgactcanatattntactggaagtctctagtacataagtatacattntgaccgttgggatctgctagaanatgtccagaaccccatatgtactacccttttcaca

SEQ ID NO: 267913 - DNA, 399 bp, Glycine max
  unsure (1)..(399): unsure at all n locations
tttctcccaatgcattgcaagcattggcaatttcaagaatgttcatgtggaaatcatgaatgcattcttcctccttcatcttcagattttcgaattttgtagccaatagttgcaatctggacatcttcactctggaggttccttcatgagtggttntcataatctcccatgcatccttggcaactgtgcatgtgttgatcaatctgaagatattcttgtcaactccattgaatagggcattcaaggctttggagtttccaagtgccaattcgtcttcttcttttgtccagtcttcttctggctttaattcatcagtgagctntccttctgtgttcagcatcttgggatgttcccagcctttgatgacagctttccaagttctgctatccagtgatttga

SEQ ID NO: 267914 - DNA, 456 bp, Glycine max
  unsure (1)..(456): unsure at all n locations
tgttcacacgcagtgactaacgtcgtcatctgcacctttgtcatctataggcgacaagtccgatgacatgcggagataccttatggttatccgcaccttttgtcaactagaggcaagcgagtccgttgacacgcagagactaacatcgtcatctgtacctttcccggaggtgtcaacgtcttccggccaagactgcgaaaaagtctcgtttgctatccgttagactcaagggtccgatagcatgcagtgacttatgtcgtcatctgcacctttcccgaagatgtcaacatctttcggccgagactgcaaaaaagtctcgtttctaccattagactcaagggtccggtagtatgtggagatacctcatggttatccgcaccttcgtcagccaaggcgaacaagttcgataatattgngatgatgttgtgttgccaattctaattattttgaaaatct

SEQ ID NO: 267915 - DNA, 439 bp, Glycine max
agctttgtgaaatgattagactgatttgattatcgattaccagtgattgtttctaagtaaataaaaaatgtaactcttcaaattggttttgactttttcaaattggttttaagtttttctaaaagtcataactcttctaaatggttctcttgaccagacatgaagagtctataaaagcaaggctttgttttgcatttcaattatcttgaacaacctttacaatacaatcctttacaacttttgcatctcttcgaacttcttcttcttccttgtgccaaaatttttccaaaagttttttggttttctaaaccttgaaaacttgtgctattcattcttttcatctcttctccttttgccaaaaagaattcgtcaaggactaaccgcctgaattctttttgtgtctctcttctcccttttccaaagaaacaaaggactaacc

SEQ ID NO: 267916 - DNA, 474 bp, Glycine max
  unsure (1)..(474): unsure at all n locations
tcanagaatgaaaaatgaagtttgggaaccatgaatgagtttcttgcacaaatttggttaggaaaacaagaagagaagaaagattaagagccccttaccaaagctttgatggaggaaacctcaagagaacttgtatgaagcttggaagaagaaagaaatggactcctctccttgttggtgaactcatgcaaaatggagaaggaaggattccaaattgttttttttttttttttggttttaaagaaacaagaagaaaagattgaaagcttaaggtgacaagcctaaatgacaatatgaatgaccaatggccagccatgtttaattaacatgcgaaaccatgccttttagggttagtgttgcttttgaaattataaccaaaaatggctaaggtaggtttaaggtcactagtgaggaacatttataactaaagtatcttgcttaataacaaatgagattgtgtgcttaaaccgcgta

SEQ ID NO: 267917 - DNA, 438 bp, Glycine max
  unsure (1)..(438): unsure at all n locations
agcttcacacaggcaagtgtttcatcttaattccaaatcacagatatgtcataaatcgattntgcaagtcatttcccatcaaatcaaggataaatgtgcataatcatcatggatcaataggactttttaagattggactagtaggaaattttggctttggttgatctggtcttttttttttttggtgtgagtaggaaagcacgcataaagatttggttagtaacttaaatgggcaatcacatcctgtccccccatgtcttgaccaagttactattgctccccttcctttttattcctttcaacaactctgtacatggttcagacattgtttgttctaaagaacttgtttttcttttctattttccttttgctcttttctattnttgattgaatgaattttggtccttctttnttcctttntcttctctatggttttct

SEQ ID NO: 267918 - DNA, 437 bp, Glycine max
  unsure (1)..(437): unsure at all n locations
tcctgatgggccaagatgggcccagggctgaagaacaccctctaaattgattagtttacccccattntgagattttggcttgtttccttctgaaacatcgcaaaatcttacggatcgcgcgcaattggctctaagcacctcaacgtgactagcaaaaaccttaatgtcaacaaacaattgtccccggacaaaattagagtatgacagctganaaatcctacatttctagggtgccctatccacattatggagccctaaatacaaggcccaaaaataatgaaaccttaatctaatatgtacaaagataagtaggctcatacttagcctattgtcgcaacctacccttcggcgggagggcgacgcggngctcacgggtgcgtcttccaagtgaggaaggtgcgtggagtcgtgaccaatggttattcgaggaaaacatc

SEQ ID NO: 267919 - DNA, 258 bp, Glycine max
agcttcattctttgaggtgatggatattttgtttaatacacttaacgcatggaaagccaagatctctcattggtccgtagagtgactctcacaaattttgtccttggtgccctacggcctggattctaggtaacattgacgacttctccttttatcgcggtacatggaaatatattctctaaagttcttcccgactcgctcacgcttataaagaacgagatggtcttctctaataagggagctctacaccctacatat

SEQ ID NO: 267920 - DNA, 431 bp, Glycine max
agctttgagcaaatattaacgacaataactttttacttggatggtcgataaaggcacgtaatatatcgagtcgctcgaaatagaatacagaagctgtgagaaaattcttacggcaataactttttactcggatgtccgattgagtcacgtaatatatcgagacgcccgaaattcaatacagaaactctgagcaaattctaacgacaataattttttacttggatgtccaagtgagtcgcgtaatattttgagacactcgaaattgagtacagaagctctgaggaaattcaaataagaataccttttgactcggatattcgattgagtcccgtaatgtatcgagacattcgaaattgaatacagaagctgtgagcaaattctaatgcaataactttgtctcggattgtcgattgagtaccttatattcgaga

SEQ ID NO: 267921 - DNA, 458 bp, Glycine max
  unsure (1)..(458): unsure at all n locations
tctatataagctgaaccagtttatcaataaacacaagttgttttttattcagaanattagagtttatctcttttatcttagtgagagtgattctcctaaattcttgattgattcaagaacaccctggctgtatcaaaggactttcacaacatttgtgtgttgccctcgctggaaagagtgattctttccttcctttcatcttcacccttgttctttcaaaccacaattccagaaaatccacctctgcccagaattatctcgtggccataactcccgttttacgcactcaaattaagtgattcttgagccaaaattgaatntcaaaacgagaactttcacctcgtttcggaatcacctcatttggagccctgtagcttcagttattgccatttctatatttctgtccagccaccacttatacctacgtttaccatcccattcattcattntatgccaag

SEQ ID NO: 267922 - DNA, 439 bp, Glycine max
  unsure (1)..(439): unsure at all n locations
agcttatatcaaactggcccttctcttatcttgaacctaaagacaaagaccttggaacaagcgaagttagttttgttgtgaagtatatataactatatgttgttcattcgttattttgaaaggcatctttatttgtcttgttgcagtgtgactaattttttgtcttaattttataatttactcaaacattttttacaacgtacatcgatcaattacgtttggcaacgagcataacacttgccaaggttataggcttccttgctgtttctataaacaatttagtcaaaaatcacaattgcaccatgcaaattgcataattaattttgaaggaaactctttctttttttaatatatgacaatatcaagattcatacttaaaacttcaacctatttngtctaagccttgacccaaataaaagttagattctagaatttatat

SEQ ID NO: 267923 - DNA, 439 bp, Glycine max
  unsure (1)..(439): unsure at all n locations
ctttntttcagactaacaaagttgtcgggtttggttttagagacatttgccttttggtgatatattatttcttccacgttgacatgataccttgcttaaaaagattaatttctttgaacacattttacttcggtcgataataatttctctgtaaatatccattaacaacgttatcctactaacaaaattcacaatcaaatatgcctaaaactaatcagcatcgtcatgctacatacaacaaactattcatcgttcacaaatctcttccttctccaccctaaggcaaggtaattcaatctcccttcaaaaacaaacagaccaaccttcattgcataatttgaccgttaatgaaaaaataaaaagaaaacccaatcaactgtttaagaaacaaagcaatctacagtacacatgttatgagctgaatattttcctagtattc

SEQ ID NO: 267924 - DNA, 385 bp, Glycine max
  unsure (1)..(385): unsure at all n locations
ttaagtcacctgcggctgcagctgggagaggtactcttggaatttaaaatattactcagctaatnttcaattgaaacaatttgagtttctaagtgttgaacatgacctaaattaataaggttacttgaataggacctaaaaattacttggggccgtttactcattctttttgcattttccttataaataggtgatcctgcccgaaatggcaattcatagaagaatttcctataaatagatggatgtcatgttcaccctggggtattattacctagctagatagctagttttgtctactaattgcaaattttataatagaattaaagatgactgggataataaaagtcgaaccttgtattgagaaatgaaagagcagtatttggtt

SEQ ID NO: 267925 - DNA, 347 bp, Glycine max
tctcttaaaattcgtaaaatgatcaaaggtactaaagattcagattctatccttatttataacctcctaaaatatattagtccaaaaaggcacacaacgaccatggtgaaatccaccatgaccacgattgaaaaggtgtgagcttaaactttagaccctgtgattaactacaacctattggtgataaacatggggattacatgtgcaatgtgggtgtttgagcgtatcttgatgtattgttacaatgataagcccactttatgaagtatgaggtactaacatacgcagaatatggatagcattgatatatactatgcactgacctagtgtgttaacacttgtggagt

SEQ ID NO: 267926 - DNA, 391 bp, Glycine max
aaactagctggagtgttgtgagcattgctctaatctcctcttttatatccctgaatcttcttcagcctggagaaatccttcctttacagctcggtcagctctcccttgatggaactaaatcgggtctccaaccgggggttcaccaccgttttcagagcggtaaccctacgattcgtggtcctgatggcctcattcagagtcaaaaacgatgtttgagggacgcaagtcgaaagcacctcgatggcttatgacgcgggcggactgtgacctgtgccgcgcggcagtcgggaggcgtttcgggcgtcggtcgcggatcgactcggagctacgcgcacattctgccagcgaccgaggagctttacatttagcacggtgagtgcgcgcagactgc

SEQ ID NO: 267927 - DNA, 342 bp, Glycine max
atacttcctatggaactgttctttcaaaagcttctctttttgaatatcactaagaatcgaattaaaaatcgtattggagatgcatgaatgaatgattgtttacttacttgcatatagagagagatttttgatagggctgaaactgagaaaatcatccaatgttttcacacaatgaaaacctatagaaaacaattatgatgtatatttatacctctaaaaaagttgttttatctttagcgcgaccaatttatgtataaatattatccccactacctaccattcatggattatatctctttctatatctacatatctatatatatacatttatatatatatcta

SEQ ID NO: 267928 - DNA, 279 bp, Glycine max
  unsure (1)..(279): unsure at all n locations
aagaatatgatgaactaanggacgttcatatggccacagctgatgctttggaacgaaaaaccaagaatgcccgaaaggaagaacacgacccaagcaaaggtttgaggggctttataaggcagcaatagtgagctcaagcttctaagaggtgaaaggaatcatcacgggtcaaaggcatgatcttgaaggacgagctaaaggtttgccttatgtcgaaaagaaatttgcccaacagttaagcgagactgaagggaatatgtgggccatcatcgataagtg

SEQ ID NO: 267929 - DNA, 324 bp, Glycine max
catgggcaggaacaatcacagggtctacccacacaatatagtatagaatattgtacttgatttgtaatatcaagtgcggctattggcatgtgggtcgactgtaattcttttcctgatctgtctgcttttgaactggtgtcatagattggtttgagctgttttctttagaactatattccaagactatattcataatactataacagtattgtcattgttaaactgtacaacttatcttttcagtaatgtgaacatgtattctgtccctctggagttatttcccctgatctgcctacagtttaaaattttgctattaagacatac

SEQ ID NO: 267930 - DNA, 327 bp, Glycine max
  unsure (1)..(327): unsure at all n locations
gaatggttaagaaatcatcttactgcactggcagtgcagacaacaagtccaatagcgccatcccatgaattgcnnnnnancccaattgacacaattaaacagaacagcagttcctccatagcatgcattaattgaatcaacaccctcaatgtcaggatttccatatttctggtggttcaaacaaataaataaatcttgtattagaaagccaaggaaataaatgatgtgattgagaaaattatatgataaagccaacccaatccaattattaacattataaatatcctataagacagtaaaacattactggataaccttatatgacga

SEQ ID NO: 267931 - DNA, 206 bp, Glycine max
atttagtcaactcttaaaggtttgtgaaaggatcaaaacaagcattttggaaaactagcttacatgacacagataggcagatagagattaagaggagacaccctcccctatgaattaattttggggttgagttaagccaaaaacttacattccaagaggaggacctccatattattattggagttttgaagttgtgcatcctacta

SEQ ID NO: 267932 - DNA, 405 bp, Glycine max
  unsure (1)..(405): unsure at all n locations
naacttcattctcttatggaagaatatgtctattagaacaaaacatcttggccctgaaaaacacacctctattgcatgcgggtgtgtaaaaattcctattctcattataacccaacataaatcgaatagattttttttttgaaataattcaagataaaagaaatgctttgattcataaaacaaattcaattaacaaaattatttgttccaaaccaaattggttaactaaactaattttcatttgaatattttatttgaaaaaagaatatttgaaaatcaggttaaaagtaatctgatccttataattagtttaaaattaattaaaaatcagtttagaatcaattttttagagctaattcgatactgaactaatcttaaattaatttaatctttaaatataaatta

SEQ ID NO: 267933 - DNA, 424 bp, Glycine max
gtcgtaaggtggttaaggcgatcgagtaggagatcaaccttggaagcaaggttaaagtgttgagagaccacaaagtcgtgatggacggtgagcttgaaaatggcctccttgagtctgtctgtagtggttctgcgggtggtatggtcggccatggcaagtctgaccaaatgatagagatagaggaagggataagtgcgattccttgtgtttgaggcccaggtacctcctcactacactaaatagtttgtatcaaatttcactctgcgtgatgctattcatatattgatgtatttatagaagttatcaggttgtatcataacagaaatgattccatttgctaatagcctatacaattccactactaacaattataacaaactttggcattttcctacatcacactaacactagtgcttcctacatt

SEQ ID NO: 267934 - DNA, 336 bp, Glycine max
  unsure (1)..(336): unsure at all n locations
ggctgttggagatggtaccaccagagggaatctctggttcgttcgttcacttttggtgnacaaattatgcaaaggaaaaaaaaagaaaaaatatttagactgccggaaaattttgtcaccttttccttattttatctttcattagccatccttttatttctatctctctatcagatgtgtacagattatcagtactgaatgaagactctacttttggattttggctctgccttgcttagacctttccgctcaatgcctctntatatttcgtataataagtgatgctgctgattttgtgttaacggttatcttatgcttctaatgggcgtaggaaaa

SEQ ID NO: 267935 - DNA, 423 bp, Glycine max
  unsure (1)..(423): unsure at all n locations
aacttctccaataaaattcaaattttaacacattacttctcatttgcataagcagagtgcagctatgtaacttatcatctgaaccagccataaaaatggaggtaggtcgattttttatcaagggcacagtgatgttgatcaccaatgtatttccacaaaaaaaatcaagtgaaccaaccaaaatcaaatctatgtcaacatacaatccataagatgctcatattcttaactcaattcagcaagtattaatgtttctcatgattggcttcatacgcaagcatttcagatatataacatgaacctttatttatgtcaactttccacaggagcacggtaggcattaattattgtagatatattccattnaacaaatgatggctagaanttagaaatgtagttacaaattttgccattttgaacatg

SEQ ID NO: 267936 - DNA, 414 bp, Glycine max
  unsure (1)..(414): unsure at all n locations
agctntatatccacaaaaacggatcctcatgctagtagcaactagatgatntagcttccctcttgcatatacttgagagcaggaccccccaatatgtcccaggccttcaactgtcacaacagactgacacgcgatacgtaattgaagattgcatagtcctcttcctttcagctcccctccaatcattttcactatttccttccatttaccaccctaaacacaatcagcaaaacaatccaagagctccaaaatgttcataatgagcaaaaaaataagtaaataaattccatccaagtccaaccacaaaaattaaactctaatcctaaccaaacaacccacattactcccacatgtacaaatgcacaacattataacnatcaaaacacagcacttagcttatcaacaacgcatttg

SEQ ID NO: 267937 - DNA, 480 bp, Glycine max
  unsure (1)..(480): unsure at all n locations
actcagcttgagttaatattaaaacannaaattgatagtacatatgtattttgcatgattnttgtatgatatgtgatcattcatnaaagtttttttttaaaatctatcatgttatatatatttattttcatataagagttttttttaatataagatactttgactccttttcaaatcctttcactctaagaatttgttcagcacttagttttcctaaaaagcactctggtaatcgattactacaatactgtaatcgattacagcaagtcaggaagagtataatcgattaccaaatgttgtaatcgattacaacacatccctgctcctataaattcaaatttcgaaattagaaatcataaatttccattgctctcgcgaagccctcattcccaattcttcattntgccataactcactcatttcttattcaaatcactcctcacaaagcccaaaattcatctttnttcattatctttcatt

SEQ ID NO: 267938 - DNA, 392 bp, Glycine max
  unsure (1)..(392): unsure at all n locations
ttagagtnacctgcggctgcagctatgcccttttcattgcctgacttttgagcttggtcttcaaggagtgcatatcagtgttaaaggtccttattctgctcagtctcaccctgccacatattttagaacttgcaaatgcaggattaatttttacccaaactcttaggaagactatgggtgacagccacatataaaaaaatcccatgccattgtacaaaaacgtgtgacacaatgcgtacaaacaaaatcctttctaatcaagccatggaaaatatcccacaagccaccctctcataataatagccactcattcattcatggaatactattcaaaccgcgatcctaacatgctattngctactgtattagtaagctcattcataaatagcttg

SEQ ID NO: 267939 - DNA, 459 bp, Glycine max
  unsure (1)..(459): unsure at all n locations
cttatccaaaaggactactatcccagatacagctatgaattattatctttcaggaatacttggtacccaatctcttccttcactattgaagaagcatgcaatgtgtaaaaagatgtccttttgagaattatctaagccatcataccttaattttaatatgtcatgaatttttgtattcggaatattttggagttttggcaattcacttttccatgcctctntactttttacttcttgaacgaagaattgaacccagaacttttaaagccaaaggaataccttcgcaataagaaattgcacttcctgatagatcttcatatccaagtttaggttgtttttctccaaaaattgtcaaacagaataactgaagggagtaatgaaaactcgattccttgaccttgtatacttcatcaacttggctaanactttgcttattntcaactggagcaatgactctac

SEQ ID NO: 267940 - DNA, 439 bp, Glycine max
  unsure (1)..(439): unsure at all n locations
agcttgtttgctgtggtgagagcgatgacatatcggtggtgaagaacttaaagaggatcccactggttgctgccttggtgtctgaactcttggctacatatctaatgcctccaattgagtcagggtctgtagatttggcaaagtttgaaccacaactcgtgtactaaagttgtgtataaattgattaaattccttgtgtccttttgatctccatcaaaatgttcatcttgagtgttactagtattggtgctaaagtaaaatatggttgtacaagacagtgaggaaacatttaccatgatgaggtcctttntagtattaatcatctttttctcccatccttccttttgaatttcctttcttggttttttagaacatcattaggagtcttacccttatgagttacctatcaggaaatgattctttcctcactcttatgatc

SEQ ID NO: 267941 - DNA, 447 bp, Glycine max
tctgcggatccaggtccgcaccgacgttgctctcgtttatcttcttctgtgtgtactccgaaaccgacgacgacggagccgctgaaggcgccatcggcgtcggcggcgggttgctaaccggtccgatggatgccagctggcacgctgtcatgcggttgccgatcttcttctgcggctccttgagcgcgttttgcgcgccgcggcgcgtcttgaagaggatgaagccgtagcccttggacttgccggagaccttgtcggtgacggccttgcagtcctcgatctctccgtactgccggaacgcgctaattagggttccggcggtagtgtcccagcccaatccgtggacaaatatcttccggtgcaccggatctccatccgccgcctttcggatcctctcctccacatcgcggcgcttcgccgtcgcgtcgcaaagaaggttcagaagct

SEQ ID NO: 267942 - DNA, 422 bp, Glycine max
  unsure (1)..(422): unsure at all n locations
agcttgaagagagacatcaatggtggtgtttataatgaaaaagaaacatggaggaagaaagagagagttgtgctanaagtttctggagaaagagagagaagatttggcttttaaaatgggttggcttttctttntcattttctttttaaaagcaattccacatgtcattttttaattggagcaaaaagggcccacctttacctttgacttgaccacatactcagccataaaagaagaaaaaaattggacctttttggatgctgaaatcctgcctcggtttgtgtgccacctccctggttccaattcttcgcgtttctttgcacccatcgagggccgttttcaaaggtaggcaatatgtatatcaaaatgctcagaatgagaccctgagcgtggttcagaggttggttttgtttaattataag

SEQ ID NO: 267943 - DNA, 423 bp, Glycine max
  unsure (1)..(423): unsure at all n locations
gcctacacatgccgacaaagaaggccgccttataaaggaaagaaagaagcctagcccatttgcaagggcggggaccacagatggagagggtccctatctgccacaatagcaaaagctttgtcagcgcggggtggataagtgagaaacaaattgctgtgctagacgaagaaaccgaccaagagcaaccaagttgggtgtagccgtgctccccgggtttcaaattgaagaactagcggatcatggagcgactcgagatttcagtgtcaaacacaatataatctagtagtttgaaccctattgcttggcctaggctntagggtctacttctttngttaggcatacctctttctttaatgttcccacaantataaatacataacccttttcatttgatgtgttccctctcgcacttttcatctatta

SEQ ID NO: 267944 - DNA, 417 bp, Glycine max
  unsure (1)..(417): unsure at all n locations
actaccttggnccgtcccactgaattttttttccaacttacaatccggattaccatttacagttattgcactctacaattgaaccccttataactaattacattatataaaagttctcacaacatgggagtaaactcctaaacaatgtcacacaatcatattaaaatcaatgaatcaaaattataagtcaaaatacaataacaccacgagcactcaagttcatctaccaattcacatcagaatatcaattggtccgtctaacacaaccatactgtatttataatcataaacgataattgtaattcaataaacatctcataatacaccttaattaatcctctaacgatcctacacatgttcattctaacaccaactgtgattagctcatctcttacctctaagcaggctcacatgtgt

SEQ ID NO: 267945 - DNA, 102 bp, Glycine max
tgtgccacctacatagcatacgttttttatgggtgaacaacctatggtgtggttgcaaatttgagaatctctcccatacccaaatatgaaccaagtagtaaa

SEQ ID NO: 267946 - DNA, 404 bp, Glycine max
catgcaagcttgggcctccctctctctctctctttttctcatacgaactccatgatatcatatactggctttactctccttacacacattcttacttgagtgtcggagtcctttgttttgcaggtcccccttcctatcaaaagcatttctctcacctgatgtgtgaagttcggaccctacttagccaggtccaccttgacgtgccatggctccgaattttggtaagaacatcacccgacaaatcaaaagtgcaatcaacaccattgcgggtggattctcctacgaagggtagtccagccagtctcgtaagcgtcaactttaactatttgagacatcgacatcaactatgtcgatacaccatcaccacgaaggttactttctatcactttcactgatagaaactt

SEQ ID NO: 267947 - DNA, 421 bp, Glycine max
  unsure (1)..(421): unsure at all n locations
tctaatntaaaaaaatgggtatttatattagatccaatgatctttttgacaattttttacattgaaaatcttaattttgattgatatggccaaccgttattagatgtgatagtgcatgcttaaattaattgccaacttatgtttggttgccaacttgagttataaaaataattaaagtcttttataaagtgagttttgagacattttcatgtataaatgtattntaggtcaatttattatgcacgaattttgagatcaaattcattggtttactgcaaactgaacacaaaatgaaggatgaagaatgttttgcacactttattctaccatcaacatttgtttgtaagagatactcaaacatacactaaacatgttaccataatgaatttattttcaaattgagtttgaagctccacaaatg

SEQ ID NO: 267948 - DNA, 414 bp, Glycine max
ctgacctggcgccagactctggagtttatgctcctctaacgaccaccacacagacctttgcccttctgtgcgacaatctgaagcaattgaacagcttgaagcttatgctgcaaacatctaaatagaacctctaaccttagcagcaaaatcagccacaacagaataattatgacctttccagcaacaggtacaatcccgggtgtagaatcatcccaaccttagatggttgaattcttcacaacagcagcaacaacaaccttattttcaaaatgctgctggcccaattagaccatatgttccttcaccaatccagcgcaacaacaacaacaacagccctagaaacaacaaacaattgaggctcctccacaactcttccttgaagaacttgtgaggcaaatgactatgtcaaacatg

SEQ ID NO: 267949 - DNA, 436 bp, Glycine max
  unsure (1)..(436): unsure at all n locations
acctgcngcatgcaagctttgagggtgcgtatccaccatcatttttattagagtaccgataatttgtctaccatcacgattatcatcttcctttttgcacatgttctgtagttgcatcctatctggaaccatatcaaaatagtactgatactgcctaaccaaagcaaccattaggtccttcccagtatggactcgggaaggttccaaggtaatgtaccaagtaacagctaccccagaaagactctcttggaagaaatgtattagcaattcctaatgtttgcgtatgcccttatcttccgacaatacatctttggatggatcttggagcaagttagccccttgtacttgcaaagtctncaccttgaacttggaggggtgngatattgggactaagaaaactcttctagttagcaaaggaaaatctccacctcttaat

SEQ ID NO: 267950 - DNA, 333 bp, Glycine max
  unsure (1)..(333): unsure at all n locations
agcttggagggnttaagtctcaccactgtcttgtgttgatgcaacaatcgttagccgtggctatacgagacatcttgcgcaacaaagtcaggttagccataactcgcttgtgtttttcttccatgtcatatggagcaaaggtcgtgatcctgtcaagctttagtcaaacagaaaaatccataaatgtcaaagaattgggtgtggaacaagcataacaagactttctgcgattggtttaaagatacaatttttgcagatgataatgcttcataaacattaagaaatctagtacatgggcctaaaagaaatgttattacttggcaaggatacgac

SEQ ID NO: 267951 - DNA, 412 bp, Glycine max
  unsure (1)..(412): unsure at all n locations
tatcttatntcagttgtgactctaatgtgtatgctcctatctttggaaagctacatgtttgtgaaaatcaattaattgaagcatgtcccagatattcagttcatatggttgaaattctctgtgaagcaaacaccattttgagtgatcactgtagcttgtcacttgaggacaagtgaactgttctttctttgcttgaggacaggcaaaactgtaaatttggaggagtttgttaatcgtcttatacgactaacttttgtatagagaacattttccaaaaattgtatagtccccccatttatggctagtttgtagtgatttaggaaataaatcctgtttattgtaaagatgtctttaaaatatttccattgcatataatgatgaaatctgtgcaatttcaggtaataagaggcta

SEQ ID NO: 267952 - DNA, 393 bp, Glycine max
  unsure (1)..(393): unsure at all n locations
atatcagtctttctttttggtgtgaacctttccttgatcagcagttgagattaactcatataatttgtgtgacagcacattgaaaaattcagtgtatcctgtaattttattcctttgtgaagatatgtacacatcatatattttcacgtttattattattattattattattattattattattatagatgctaacgaggatgggaaatggccactggtataaaaggatattgagtcacaaacaaagagtgaatttttggcaattttttacgaggaatactcgaatgaatngaatatatactagaataatggagattaaaaaactgtgccggtacaaaactgtatgactaattatagttctttagaagataattaatatagtttaaaggaata

SEQ ID NO: 267953 - DNA, 323 bp, Glycine max
agccttttcttatgtggagggcgggctttcttattttcttgtcttcaacgcgagcgttgaccactgttctttcttcccgcgatgcttcttttcatggacgccctgaggggcctatagcctaaaccatactctccacgattttcttggtatttatcaagctagttatgccggccgtgtctttgcctaaacccatcccggggtcataaccgttccccaacataactcgggccatcattaccgctgcatcggacagacaaggcttcccaaagagggagttcacggaggaaatgctgaccacctcaaaagactggaaagcaggttct

SEQ ID NO: 267954 - DNA, 364 bp, Glycine max
  unsure (1)..(364): unsure at all n locations
actatacccctatcattctatcatagggtttctatgggcgtattattgtattattaggaattattatactagataataaactttatatttgatagatataaatatatgataaagtaacgtctaatgcatcatcagattatgatatgctattatgcatttgatgctctagatggtagaaagtttaagtgatctgatgagacatttaacaagaacatctaattctttatatctgatattctctctacaaaaatattctccttagatataaaaaaaccgctatgaagactatatganattcccaaatctaaaagtatttcatcatcatcaaaaagatgtgcctctacttttgcagacttgttctgac

SEQ ID NO: 267955 - DNA, 353 bp, Glycine max
agctttatcctcatcgtctctcacagtctttagaattgggagccaatccaatccttgtgttcggactctcagccacttatgatagccgccgatgatcccattactgcttcccctaagctctctgtcctttcttcacgccgcatcccatgccttgcgaactccttggagtaccctcgcgttgtggtcactaaaaccccgtgcgatgaaaggcgtgatgctttcgtctaatggcgctcctctcatggggtagccaagctgtcttatggtgagaacgagattataattaatacaaccccttgttcccatcaggggaacatttggacatccttcgcatgaagatagaatcttgattc

SEQ ID NO: 267956 - DNA, 403 bp, Glycine max
  unsure (1)..(403): unsure at all n locations
tgggtatatgctataaaagttggggccaatggacagattgatcgcctcanagctcgattggtagccaaaggttatacccagatttatggcctagattatggagatactttttcccttgtggctaaaattacttttgttcgactctttcttgccataactatcattcgttattggccactgtatcagttggatattaaaaatgcattccaacatggggaattagaagaggagatttatatggagcaaccatcgggatttgttgctcagggggagtctagcttggtttgcaaacttcgaaggtctctttatggactcaaacaattcccatgagcttggtttggaanattcagctcagatgttcaggcttttgggatgaaacatagtgaagcagaccattcagttt

SEQ ID NO: 267957 - DNA, 409 bp, Glycine max
  unsure (1)..(409): unsure at all n locations
ggatcttaagtcacctgcggcatgcaagctntgaaccctccgatgagataactcttatatgatgttgcgacactctcatgaaggaaacatgaatgacattacataaggtgtttgcaatgcaaccattaacataaccaatgaactcatccagagttaacaacattataaacaaacaaatgttgaatgatcttagaaattcatatatgtcaaaaaggtgtgagacacactactttggaataccaatggttccaaacgatgacaacaattctattggcaacaatgcctccaagtcaatcctagacttgtgatctctcgagcctgagtcactcgatgattcatcctccatatcaccatcattcttctttcctccatcattctcaaccactgactcaccttttaatcaagtcac

SEQ ID NO: 267958 - DNA, 389 bp, Glycine max
  unsure (1)..(389): unsure at all n locations
tcgatgtatgagagaaaagacgcataaatcttctattttgcaatagaacctctggtactttttattcaatatatatatatttatctttgcagaccaaacaaaaaaaaatgtcaacatgttctttaatagtaataggatcaccaatggcagtgagagaatcaaccaaattctgaattttagaaagataatcagatatagtgcgttcttcaagattaagatgatgcagttctgtgcgaagatacctcaccttcgcatgcatatgagcatgaaaatggttatgaatcttatcccgaagtaaccatgatgtgatgcagccgataaatntgtgaaccatggtagcataaatggtggattgaaaccatgagagcaacaattggtcctggtgtcct

SEQ ID NO: 267959 - DNA, 434 bp, Glycine max
agcttgatgagtactgtgacagattcattaaatcgtgcgcaagctgtcctcaccaccagatttctgagcaactccttctgcaatatttctatgagggatttaccaacatggagaggggtatgattgatgctgccagaggtggagcccttggtgatatgaatcctgctgaggctaagaatttgattgtgaagatggcttccaactgccaacaattcagtgcaagaaatgatgctattgtccttaaaggagtccatgaggtggccataaattcatcttcatctgctgaaaatacaaagcttgagggaaaacttgatgccttggcaaactagtaactcagcttgccatgaattataaatctgaatttgcacctgttgcaagagtctagggtctatgttccttagcagatcaccatacagatctatgtccttctttgc

SEQ ID NO: 267960 - DNA, 423 bp, Glycine max
  unsure (1)..(423): unsure at all n locations
tttggatgattctcaaacataaattttgtgataaaaatctggtctcttattttaatgatatttcattttactttaaaaaaaactaatagttattttgcagaatgtaacccaaaacttattcatttgaaaaattaaaaaggaatagaatttgttgatgtgagaatcatttggttaggagaaagtggaaaattgttataaaatgttgtcctagtgatatctagttagtttagttgtcaatgtcatagttcgttattcaagatttatatattataaatagatgtgattatattggcaccaaattatattggaccttttctcacagtcaaatcgaaaaattaaaatgttagctgaatcaacaaactntagataaaggtaaccaaaacaagatanttatctagcaatgatcataagtaatattcagtt

SEQ ID NO: 267961 - DNA, 423 bp, Glycine max
  unsure (1)..(423): unsure at all n locations
agctngcaatagaatctggaatgagccctcttgtcctctgtgcttatcgacaactctttgctactgtgtccattgctccctttgctaattggctcgagcggcaattatatatatatatatataccctttctggttttgttttatttcatatatataaacaatgcatgcatgaaagggtttgatcaactttgaagcacctataacattctcactgtgagtgtcaccgtcgatatcccttttgttttggctgatgcatgattgngttatttatctatctatttatatatgtttgctggatataaatggagtagagagacactcaaaagaaaaatgctacatgttgttctgaaaataagtaacggactttccattcatattagacacaaataataattagaagaacagtaacggatatatttatca

SEQ ID NO: 267962 - DNA, 355 bp, Glycine max
ttccactatgaacaaagcacagttccagggaaatgccctatgggcaccaatcaccgtttaaaaagacagcaggaatacaaattttaatttgttatgggactatgaatgagtttaagctactaacttgacaaaatattcagacttctcaccactaggtaggttgattttaatgggtaaagaacattaagttaatactcaacagagataatatacgttccgaatcatttcattatttaacagaatccaactaggacaaaaaaattcacacaggaactgctcaaaatggttccaatcacccatttagatataatgacgatgattttaacaaagataagtcccatttagtgcactgagt

SEQ ID NO: 267963 - DNA, 378 bp, Glycine max
agcttcttatccaggttcatcttggtggtgtaactccttcttccatggcttattccctagtggatggcgcctcctctcacctcttctcctttgtcttccgctgcatctccatggtggaaaatcaccattaagggacctcattgaagctcaaagatccagccttcatagaaaccccacaagcaagcttgcattcatcccgtttcatattctatacaacgattaatacagaaagtttgcattaactcgggtattgaacttgaattgtccgtatggacagtctgggaaaactaatttttaatactagatcattatgtataggttaattttcttttcttaaatttgtcaacatatccgaatagtcatatccctttgtcttcc

SEQ ID NO: 267964 - DNA, 457 bp, Glycine max
  unsure (1)..(457): unsure at all n locations
acgcttcatcggagagaaagaagagcacgaatttgtttctataagagcttgaaatctgaatttgatattcaaatgatcaaagttgaaaaaatgcacacacattacctctatttatagcctaagtgtcacacaaaattggagggaaatttgaatttcaattcaaatttcacttgaatttgaaattgaatttgtggagccaaactttggagccaaaatttcactaattatgattagtgaatnttagttatggttcaacctactaatccaagatcaattccaagattctccactaagtgtgcttaggtgtcatgaggcatgaaaagcatgaaggacatgcacaaagtgtgactatatgatgtgacaatggggtgtaataagcaaatgctcacctccccctctaaaaattaattggatgggcttctaccaattcaattaaatcttatttccaacacacaca

SEQ ID NO: 267965 - DNA, 381 bp, Glycine max
gctttgagccaaaatcctgactcaccatataccttgacccagggtgagatatgtaatccttaccctcggaagcaaagaaaaaaggagagaaggaaaatttccaatcaaaggaaaaaaggagaggaaaggaaattcccaatcaaagagtgggagaaagccaaaagaaaagaaagaaaattcccaatcaaagaatgggagaaagaaaaagagaaggagaagaaggaaggaaagctcctgatcaaggatcgaaagaaaacagaagaaatgtgcagaggggatctctggaccaaacaatatctaaacaaatacagaattgtcaccaaatgaacaaaagaaagaaaaggaaaccataacctaaaagtggtcttctccctttgatta

SEQ ID NO: 267966 - DNA, 356 bp, Glycine max
  unsure (1)..(356): unsure at all n locations
gctttcaaactatcatgacatgtagaggagaatccaagattttaagtcacaaaaaggcaaaaacttttattttcaaaacaattacccatttcttgaacctatcctataattcaaagaaaaacattgcaagtcgtacatgcacacaaaattgacccaaaatattaaactaacaatccgaccaaactaacaacattaacaaattaacaaaaccaagaaaactagcaaaccaaaaacactcccccctattaacaacacattgcctcatgancacaattanagataaaacaattaatctcaatagaatcgacaaggtataaagcaagaagaatangaaaaaaactcctaatcatggggag

SEQ ID NO: 267967 - DNA, 246 bp, Glycine max
atcagaggaacataaaccacagatctggcgacggtcagattttgattcatggaagtggttccagttaacaagctctagttacttcagcttttacctcagctgagaaaatgaattcggggctacttcatgcactcctctaatgacaatagcatcacttttggcactaaattgctgggagattgaagccatcctcttaataaaatttctgacttcaacaggggtcaatgtttcaagggctccaccact

SEQ ID NO: 267968 - DNA, 417 bp, Glycine max
  unsure (1)..(417): unsure at all n locations
aaaaagacttcacaaacctctagctttggcccttgtttttcacaactaattttcaattggaatttaagaactaagattggtataagataggaaccaattatagaataaatttggagccaaaacaacaagcacactttcctttcacctttttctttttctggatactaatttttcagccttgtgtgatttttcttatttttttccttatatccaaatcacttgtttctttttttataacttctttccagatgtctaaaaaattcagtaaaaatttcagctcaaaattcgaagtaaccaattctcagtaatttttacaactttgtatgtccaagctgccagcactagcgattttttttaagcattggatattgaatgcattgngcttactttcaaccttcctatgtatngtgaactcac

SEQ ID NO: 267969 - DNA, 334 bp, Glycine max
cctatttgatctcctatgagcccttccttaagaattgtccactctccaagtttaccaatcatattatcatcattgggcattcaccgagcatttggagacacatgtttcacatatattgcagaggaaggggacaatgtggcatgccccattgctttaaaatcagcctaagctaaagcctttcattcaatcctcaactaagaaactaccttataacaaccaaactgccccaaaatataagccatcctacaattggagcaccaaaatgaagaaatataccatggaacctaaacatcaggattgatactacttggagagtgataattcaccaaaatga

SEQ ID NO: 267970 - DNA, 426 bp, Glycine max
  unsure (1)..(426): unsure at all n locations
agctgaaggacctaaagaagctaatacgacaattttttttttttgaaagaagnggagaagccactaactgcatggatcaattatcccatttcaaattacacttgggcttcatctattccattgacctagtctgaggtgagggtcaaatggttaatgatcccactggtgggctataaattgccctaatggtacctgatacatatataaaaatccaaaataattttgtatctattatatataagtatataactaatactaattgacttagaataagtccattcattgttccatacttcaaaattccaaaatacaaattgatgtattcaaagttgataacataagtgaagagtattaataataataagaaagtgtatatagcaactacttataataaaacacacgtccatgttttaacaaacaatatga

SEQ ID NO: 267971 - DNA, 418 bp, Glycine max
agcttatgtgttcagttgatacataacatctcctacttaagagcaatactttttaattctaacccatccaacaataaaacacactcctactaaattttccatgcttccacgtgtgtcagtggtgattatgcagcacatttctagcacactccagcatcatccttccaatgaaatacactccaaattattaattatttatgcagcatcatcattctagttaaaacacattccaatttacttatgcatcaatatccttccaatttgttaattatgcaaaagctctccacaccaacaataaaccaagttttctcctatgtgcttgaccattaccccaatgctaaacacctctctttacttgtcttacagtattctgctgcaacgtccaccaaacttgacgtacaatgaaatggtgatcact

SEQ ID NO: 267972 - DNA, 413 bp, Glycine max
  unsure (1)..(413): unsure at all n locations
accatactctttccaaatatagaggggctagtgggtttaacagcaatccacactttcttgcttatcatcagagcaagaaaagcccgaacggtggtgtttggccaatgcatatgacacattcgacttgagatgcgaaaagaagagcgccaggattgtttgttgcacgcccacactttatgtgtggntggtctcccacgtgcttcgtcatgaaggtagacctgtctgtcctctacaaggtcatcacatgtgcgccgaaaagggaaaagcaaattggaatgaactcttggcaggtatgctatgagcggtcgttagttggttcccccgatggaaagaaagagggccggagtgttgtgctcgtgtgaaggattcccaaacatccccttgatgggaacaaggtgttgcattaattataa

SEQ ID NO: 267973 - DNA, 305 bp, Glycine max
gccatagaggggatggacctttcttttttttggtgaggatcaatttcttgcctataggttggaccttctagaacagtatggaggcggcacccctttaacatttctgagttaattccttttgcaggggagctgatttcaggaggaagacctaacaaatcttgggtcaaatcttcttcaagggggaggggaggacgcattcctttctaggaagggaccagccacctaagccctgaccaagagggttcacatggattgggctatagttactaaagaaggccctaggggtcttattgaccttagggtag

SEQ ID NO: 267974 - DNA, 350 bp, Glycine max
  unsure (1)..(350): unsure at all n locations
tggcttcaacgggagtcatgtctccaagggctccaccactggcagcatctatcatacttctctcaatattactgagtccttcataaaaatagtggagaagcagctgctctgaaatctgatggtgaaggcaactggcacatagttttttaaatctctcccagtattcatacaggctctctccactgagttgtctaatacctgagatatccttcctgatggctgaggtcctggaagaaaggaaaaaattttctaagaatactctcttcaggtcatcccagctcgtgatggaccttggagcaaggtaagacagccagtcctttgccactccctctaatgaatgangaaaagcc

SEQ ID NO: 267975 - DNA, 302 bp, Glycine max
catttgcggttcagattacatcgacttacttttttcttttttgtcggattaaagcattatgtttataatttgatatgatttatagtgcctacaatgttgagttttagatcgtgctgagtctccaccctcagggatgggttgaagatcgatcccacaagattctacgaatattaattcatatttgaatttgggtttacaaacttaaattcacgttaaactcgtaaatttataaaaacttcttaagtccttgttatttaaacttatttttaacatctcttttatctcaaacctacttgtaagaa

SEQ ID NO: 267976 - DNA, 421 bp, Glycine max
  unsure (1)..(421): unsure at all n locations
cacggnntgtctcatgatctcgtacactgatagtaatgtcttgtttcaacaaacttgtcaagttatatactattcaacctgatattgagcaatcaattcttgaataatcttgaaaaatgagaaaacctaactgtttttacatgcattactatcagtaactgcttctatagtgcttatagttccatttactcaccccattatttcatttaaatatcatctttgtattatctttatgagtctccatataaggtactaaaattagatgtccccattgatgttacaggtctattttgtttctcagtgaagtcttaacgtgaagttctatacatgcatacgtgttttactttagagataaaatggtcctgcctgtgtccacattcatgtcattctgtgattatatggcagtaagtgccagcatgat

SEQ ID NO: 267977 - DNA, 390 bp, Glycine max
agcttgatggtaatctcaaagctacaaatttttattctcgtaagaggactaccaagtgtgtcatataagaatgatttattctatgaggcatgccaaaggggggaacaagttaaaacttcttttttctagtaaaaacattgtttccacctcaaggccattaaaactatttcatcttgatatgtttggaccaaccgggaatgcgtccattggtggaaaaaggtatggactagtcgtagtggatgattactctagatggacatgggttatgttcctagcccataagtgatggttggacaagttcaacgttgttattcttgaagtgcacaactaataggtcccctatttttatggaaagaaatttcttctgaaaggtaaatgaacttttctgga

SEQ ID NO: 267978 - DNA, 472 bp, Glycine max
  unsure (1)..(472): unsure at all n locations
tactcagcttacaaattagtgttgctggcaaaggaacaaactttcattattcacattctcccccatttntatgatgacaatcattatcaagtgaattcttttcgacatcatcaaaacctacatgtttcacattctccccctttttgatgatggcaaccatctgtaggttaagagtaaaaaaaatatctatttgtatagtttattcccccttgattttggaatgattgcttatatgaaacagttgaagattgcatatatttcatatataagaangtgtctcataaacccttactatcttatcttttggctatctctccccctttatcaacatcaaaaagaaatcatgaacagagaggagaaaaatatttagcaatntataatggaattaaagagtagagcatgtcataccattcaaagtatcatttcttgggcccaaaaaaatgttacccgcttggtggaatnataaagaatc

SEQ ID NO: 267979 - DNA, 392 bp, Glycine max
  unsure (1)..(392): unsure at all n locations
agcttgttagtccatttggacactcccttatgttntcagcagagatgtattcagctgatcttaacattggaggcaagcctgaagatgataaggtaatggcttcattgtcatgaacaatttacctggccttatcttaaattcctaattatattaatattaagtttgctcctagtttttggtatgctgtaactattaatttcaacttttatgcaactatttttgttagttgttactatcggcttattgatgtcatgtctatatacatttgtcaaccaattcatcttcatgagatccatttcagctagtcgcacataaccatcaatcctgtcttttagtccgtattcttgctcaatctgaagctatgctttgattattggtagaaaatggaatag

SEQ ID NO: 267980 - DNA, 442 bp, Glycine max
  unsure (1)..(442): unsure at all n locations
tgctagcaataatntataacttttcttccctatatatttggttgaagacactgataattccttttgctttttactttttagaattaattcccatcccagtagattttaaaatgaccaagactcaagagtttatatcatttcagcaataaattttgaagatcatatttggtattatacatatttaattgcncnnggcntgtattatctatatatattaaaatattttacaaaaaccaaaggataatgnanattntttcaaaattaattgttgtacaaaaaaaaaaagtattccggaagaatgtctcatctcttccctgggacagtgtgttcccaattaatggacattagccaatnnnggggtatatgaaacatcaattgcacaaagaagataaatatgtaaattgcattggcattataaaatcatccacaaaacagaaacatt

SEQ ID NO: 267981 - DNA, 406 bp, Glycine max
  unsure (1)..(406): unsure at all n locations
actaagctttgacaaatactggcctcatttacagtctttgttttgtcggccacgctcaacaaattaccttcgacacctactgtacggtgaattcaccaatgctggtatgggaattgtgcgacaatccatttaaaccttattgatacattctgagaggttcgttgtcatgtggccatatccacgtccttctctatcgtaagacatcgtcccatttttctttgagatgcgatcaatccatgttgctatggctggactcagttcacgaaattnttctaaattttgatcataaatgtgtttgcaaggaatgtaggctgcataaaattacgtatgaataacaattttaagtataaatgacagtaaataaacgtgaccatcaaatatgacatcttacccaatctcttcaaca

SEQ ID NO: 267982 - DNA, 429 bp, Glycine max
  unsure (1)..(429): unsure at all n locations
agcttcactcttgataatggagaacacatgatcagtgctaggcaatgacattcatggtactccgaacaaaggtggagtatggaggattgccttgagggtccgcacttatgcaatcatgaaactcagctccaaactcgaaagtggaggacacatgaacagccctaaacaagaacattcatgtggctccggaaaaagatgagaatggaggattgccttgagggtcctctcttaggaaatcatgaaacacagctccaaactcaaaagtggaggacacatgaacagccctaagcaataacattcatgtggctccggaaaaggacgagaatggaggattgccttgagggtcctctcttatgcaatcatggaacacangctcagactcgaaaagtggaggacacatgaacagccctaagcaataacattcatgtg

SEQ ID NO: 267983 - DNA, 284 bp, Glycine max
  unsure (1)..(284): unsure at all n locations
acccggccgagtcaaaggccgagttcgagccaacgcgctgcaggccctgttgtctcgggaacgagtcanggaagcggcgagtactttctccgagtcggaatcggaaagccaccgagtcaagcctacgtggttctcgacacgggaagcgacgtgagctggatccaatgcgcgccgtgctccgaatgctaccaacaatcggatccaatcttcgacccgatttcgtcgaattcgtactctccgatccgctgcgacgagccgcaatgtaagtccctggacctcttcga

SEQ ID NO: 267984 - DNA, 263 bp, Glycine max
  unsure (1)..(263): unsure at all n locations
aatccaatatgcacaaactgtggaggtccttgcatgattggtgaaatttcactcgaagaacagcatcttagaattgagaatgctagattgaaggacgaactaaaccgtgtttgtgcactcgctggcaaggttttaaggccgacccatttcatctctaacaggctcaattgngcctccattgccaaactcaagcttggagcttggtgttgggagcacatggtttggaggattaagcactgtgccttcaacaatgccttgatttg

SEQ ID NO: 267985 - DNA, 407 bp, Glycine max
  unsure (1)..(407): unsure at all n locations
ttttttaattccaattatcatctatgatccatgtaattcccaagaaattgaagctaaaagttccttcctctgccatttttaggatgagaaaagattgagggaggctcttgattttgcaaatgcttgtgctgctttcacagtgacaggtagaggagccataccttctctccccacaaaggatgctgttctcagaattatgttctcatactaaagttcaaagaggagtagcacatttggcaatgtgcttcctaaattggttaactgtgaggtgttgaattcaattcatgttagttgaggcctgtggcatgtcctaattttgaaataggataactttcatttgccataagccatttaacaatttggtgaatactaacattntatgaactaatgtcttgcttattactttt

SEQ ID NO: 267986 - DNA, 350 bp, Glycine max
  unsure (1)..(350): unsure at all n locations
agctttgaagagttaatgttagaagaattcatcattgtgaaantcttattctctcttaccttcaaattctcttatgtaaacttttttaagttgtaaaaagctctcaaaacaccttgtatcgtgagagaaaaatacattatacttaggttagacataaaccaatataaatttttatgttcatatgcttgctttctttatctattttatactaattcttattctctcttaccttcaagctctcttatgtaaacttttttaagttgtaaaaagctctcaaaacaccttgtatcatgagagaaaaatacattatgcttaggttagaagaaaaccagnataaatcttttatgcca

SEQ ID NO: 267987 - DNA, 310 bp, Glycine max
ctgggcttgtactccaagcaccccaatgttcaacgcatcttcgttggagattactccaaaggataccttgcacactacatgcgcgggaaatattaccttgcgacacttacacgacatcaaggctgttctatgtttcaggaaattatatttatagctggacatgcttgtttactaaaagcgtacatgtatattgcttcttgaagctgaattcaccaagctcgatgaggttgctacatttaaacagctctaaaacttattcatcatggagagactttatggaactgaaagagcctattcgtacggcgcgccg

SEQ ID NO: 267988 - DNA, 344 bp, Glycine max
  unsure (1)..(344): unsure at all n locations
tgagttatgcccttaattggtntttattcttctgtattttatacttgtttttggtatagttcatttcatcatcattgtaactatagctgcccattataaaatatcttaaacaatctaaggctgctgcttctgaaccttttatttatccttgaagtaggttaatttttttttatttgtgttcaaatagtgaagagtgaagactgaagttgttctgtcagactcgttgattttcctttcatttcgacggaagcctaagcaatacactgccactgaattgccagtaagaaaaattggtcatgaaacacacacacacacaaaccctaatgacacacacacacgtatga

SEQ ID NO: 267989 - DNA, 484 bp, Glycine max
  unsure (1)..(484): unsure at all n locations
actcagcttgtcttttataaacgagaaatttgaactcatcacgttatctgaataacctcgaggtggatccaagtgctccgatcattcatttgcatgttcatgttatggtggcatactcaccgttgtctatttctttaagaaattcatcataactaagaaagcacaaaggcacccctataatactcgatccaaaanaatggataatgaagaaggcgtgcaagaacagatgaaggccgacctatcggccttaaaagatcaaatggcttccatctcggaggtcatgctaaaacttcagaaaactatagaggataaagccacggcaaccgccttcaatacagctagggaagtggattcggtgctacagcccgccttaaatctggaccaagatagaaacacgacagtgtttggtcggaggtatagtccgtaagcttacccttatggcttgcctncagacttcactccccgtgccgctccggaaagtttg

SEQ ID NO: 267990 - DNA, 418 bp, Glycine max
gcttagcgagcccgctcttcggctggcccattgcttaatcatacaatgctgttcccaccattcaaccatcatgtgaaatttaaattgatttaaaataaattaaaaatcaaattaaattgacttttttgaattttttttatttgtttaggtaatttttggcttgttaaaactacaatccttatattaatctagcggtataatgttttatatattaattaaatttgcggtggtttgtagattatgtatataaaacttatataatataattttttagatgacccttttaaaatattgttaattctaaaatggataaaaatttgatataatttcacttggaaaatttaacctatagtaaattcataaattttattatcaattttttattaacctcaattaaagatgaacacaattcttaatt

SEQ ID NO: 267991 - DNA, 451 bp, Glycine max
  unsure (1)..(451): unsure at all n locations
tgaactgatgatgatgatccccttaccatcgtcctcaattgctctcaaaagtatcctaagaaatctcatttataatatcttagctattcccatactagaatatataatacctagtacttctctagcttcggttaattgcacattaattccatggctttgtttaattaagactttcaagaaaggaaagagaataaataaaaaaattgatcgacttctttcataaacataaatcaatttatgtatatctaacttttgcagaatttctttnttatgtaacttttacaatagctgatatgtatgagcctgatttaatttatgggaagaattcaatttaattattttacctttcttgctttngtttatataaataattatgtaagcaatcattgaaccttaaacttttacatccttnggtacacaacttttataattgtcagaaatgtattataat

SEQ ID NO: 267992 - DNA, 394 bp, Glycine max
ttaaaacttatcacccctcttatcgagattcagctttaaataggcaatcctatcggtgggcgtgcacttaatggaagatgagctcgcttagcgcgtgtaagtgacttctggcttagcgccagtcttctcgcttagcctaaaggctaaaagcggtgcgcttagtgagttcacactcgctcagctcctctgtacaactcatccttcttccagatttttctgcgtgcttagtcggagggtagttcgcttagcggatggctcgcccagcgcgtggcatggcttagcgagttcataagttttgcacttcaccaatcttccccattttgcctgaaattgaaaaggaatgatcatctaatacacaaaattgtgatactgagtacctattactttaattaac

SEQ ID NO: 267993 - DNA, 469 bp, Glycine max
  unsure (1)..(469): unsure at all n locations
tgactaggcgagttgatttaaccttagnttcactttatttattatttttttcaattaagaatgagaaatccccaagagaaaatggccgatttgattttcgctttaatttactaaaaggcattcttttattattatattattattttacccctttttttattttccacgtgggtacggcacgacccaatggtccgaattcattttaatcgaaattaacgaatgatacaattcaaacgatcggtggaaatttattttatttttagattangccagaaacgacttaaataaatggcttaagcacgtcaaaagggggtataaaaagcgaatgaaaacgagaataaaatacatgaaacanaatgtggaccaccacgggtacatagaatgaattgaaaagctcggtttgaagtacttacccattgaagactgaagaanacgaagaacgaacgatgaatattgaagaacggtcgag

SEQ ID NO: 267994 - DNA, 446 bp, Glycine max
  unsure (1)..(446): unsure at all n locations
gctttgtcacctctgcttagcatgttaatatgcttgtagaatataactgctttcgtgatatagtaggggaattgaaactccagaagaaataaagcacttgcttgccgtgaaatgagatttcctttgttgttgcaaatgcaagggtggaagagactgttgatttgcgaaccaatgtggagttggttagatcagtctctgataagcatcatgatctnttgaggccatctgctcggaacctttcgagaggtaacaatattaacgatatgtctatatactggaatgcaaaatatataattttactatttgtttccaagtattctattataaaattggatctattagtacacaatgactaatatgctgattggcaccaatggaatgatcatcctccatttgtttttatatagggagggaggggatgcggcaagggatatatgttactgaat

SEQ ID NO: 267995 - DNA, 470 bp, Glycine max
  unsure (1)..(470): unsure at all n locations
nttaagtgaggtttagtggatagtttaacatgttattttcgccctctttatcaatattaggtgtgtttctttgggttttttttagtatatcggtgtgttttctttgttttatcactttatctgcagaaaatgttataattatattatcttctatcttctttttttttttttttgtacctatacacccaaaaaatagagtatatattgataattatccctgagttaaaaggggtttgattttgatgggaatgaattaggaaggttggatttggaggagaaattggttgcaaaaagatgcagtagagtaggacgtagcagtgtagcagaagagagcagggtgtaaaaagttggaacgggactcccgcgcgtgcgggtgatcttttcagacttttcatatcacactccaatagactttttgcttttttaagtatttttaaaacataacacaactctcatttactttacctcat

SEQ ID NO: 267996 - DNA, 274 bp, Glycine max
agcttgccacccatctcgcccaggcgagtttttgtgtgtttacttcaaaagcaaccgccttctggaagaatcttctggagggcccaagtggggcctggtttttatttgcacccccatttttactaaatacacacccctgccttttttttgtgcttcttttttccgaaaggtacggaaacttacgaattttcgaacgatactttgtttcttattcgaatgtaacggaaccttgcggataacaaaaaaatcccttctttgacttaccgaacgttat

SEQ ID NO: 267997 - DNA, 254 bp, Glycine max
acagccttctggaagaatcttctggaaggcccaactggcctggttgctatttgcacccccactttactaaacacacccctgccctttttggcgatctttttcgtaagtaccgaaatacaattcgaccaactgttgcttcataagtacaactgcaaacacctcctttgctacaagacgacacatggccactcttatcgggagactcgtgctaatctatcgctcaataaagcagtggccctaaaccctgtccacca

SEQ ID NO: 267998 - DNA, 206 bp, Glycine max
tagagaacaattagattcaatgttattaaaaatattgtttttatttaaagtatttgcgaactatacatgatttatcattgatgaatctgatggatgaataatagcttagcagaatggaagatagatataacttatagaaagtgttgtataagatgaatatagatagtctatagaaagggaaatgggtagtaaaatttatgatcttg

SEQ ID NO: 267999 - DNA, 406 bp, Glycine max
  unsure (1)..(406): unsure at all n locations
ccctaaaggaaggcgcctacactcaccacgtntccattgactaccgctgcatctccatggtggaaaaccaccattaaaggacctcattgaagctcatagaaccagcccccatagaagctccacaagcaagctcccatcaaacccaatagagcttgagacatagtgcgaacacccaaccatttgcaccgtaccaaatagcactggaggaggcccaaatgcttcaacgcctgacataggcccaatgaccaaaggtcgaactttgggcatagaataagacattgcgtgcctctgaataaatgtgacagcattctcctcttgagccttctagatatcattcatgaccataagttncacaatatcacccaaatggttggacatacggcgcatgatatcatggacccaactc

SEQ ID NO: 268000 - DNA, 356 bp, Glycine max
  unsure (1)..(356): unsure at all n locations
tagncttacatgaacaaaaaatgagtgggattaaccctttatactagtggtcgtttttcgcattattttgtattaaataccggacaggattcaaggacttcaaaacccaaactctcaacttataagttttgtgcagcttgagcttccacaatcataagttaaattttcctatattgttcgtatatctcttgattggtgtgaagtccttgaaaaanatatgagttggattagtggtctgttttcgcattattgtgttttaaatagaggacatgattcaaggactttacaccccaaactctcaacgtataagttttgtgctgcttgagcacccacagtcataagtttaattttcctat

SEQ ID NO: 268001 - DNA, 327 bp, Glycine max
  unsure (1)..(327): unsure at all n locations
gacgctatggaactcagcttagcacatagcaagccgtgattgcaaaaagataagttatttgtcatgctggaagacgaagccgctaacagtaggaggtaagaattactcgggtacacctgctttatgctcgacgcctcaccactatattttatgacctttgatcactacttccaattaggtggcacctattataaagacaatccaaaggaattatttgtgaggggcctacggagaaaaacgngaaatgactagggtgacatgccaacctgagcgcatacgactagatatgagggttaggacccaaacacttaaaatgttagacggcct

SEQ ID NO: 268002 - DNA, 432 bp, Glycine max
  unsure (1)..(432): unsure at all n locations
agctagttttttagaatctaangttattcttgattcttgagtggtaagaatgtgtcttacaaataactagaaaaaacatcttatattaagttgttcaattttttagttgctctttatattcattgttctaacatttttcataatgatcaaaactcttttttatttgaatatcaatgggattctataattttcatatggttgtatgttataggacaagtttcatggctcgaatgattataaaaaaacatcaaagatattgtgtcctttaatataaaactatcattattgtggaaaatatataaagatttaaattagactttttaacagataaagattaaactgaatatagcttaagaagtaaatactaaaaatatatttacttcgacatatagttagataaggctttccaagttatgaaaatctaattcttat

SEQ ID NO: 268003 - DNA, 480 bp, Glycine max
  unsure (1)..(480): unsure at all n locations
ggacctataaaactaagcttgtaggtgatatggaaaaccctccaactttgtttttgtttcttgggtgntgattattacaatttataattctgtctttatttctcaatacaccataaacaaaaaaaatagagaaaaaaagactacctcaaaagcaaacaatgatattacaaattaaagnttgtgttcgctgtctatttaaagaaagaggcactaatatattaaaatcgatcccttttttggttcataccacgtggttcatgatctttggtcctttaaatattttgctttccaatttcaacttttaactgtgcaaagtatctgtaaaagaagatccagttttaaaaatgggatataaaattagaaatgtctactcggaccgtgaatttaatatattcccattataatttatgataaaatcgttctatttatttaattattgaaacctgttgcgaanaaaggtgagcaataatgttaccaatt

SEQ ID NO: 268004 - DNA, 416 bp, Glycine max
  unsure (1)..(416): unsure at all n locations
agcttcataccatagcaattcaaaatctattgttttaaaacccctcaattagtggattctcaaggtttgagaagtgaaaatgagaatggggtaaatttggagcaaactctcacctcacacaagtctatatcatcaatctaaacttgctcaaactggttgttacgacgaanattctaccgaatcaaaatttgactcctcaacacccaatnttaccctagaaatggctcttgccttcactttggtcatttgtttttctctcttgcatagcccaagctttctcataagtcctaaatgacatttcaaactaggattaactccctttaacctccaaataccactaaatccagaattggccttccaactctcaaagcctcactctttgtccactcataacactacattctcactttctaacc

SEQ ID NO: 268005 - DNA, 464 bp, Glycine max
ggactcattccatgcttaaggctgaaatacaatagcttattttttcttgtaggtcatctcgcttaagcctggtctatcccacacttaagcttagtcacgtttaagcatggcttaacctacacttaagcttgaaaaccaataacccattttcccctgcaggtcatttcgcttaagcttgaagaactcttcgcttaagtaccacggtctaacaaagattcaaaaaaggagtttttcactcttaatgtggcttccaaatcaacccaaatggaatcccaagcctatcaaacatgtttccacacactaaacacctaaaataacaacagtttataagttctaacaaccttaacatgaaatctaaaggtaaaggacctaaagtgttgatttatggagagctaacttcttatgatcctacaacacatctaatggagaatactccatgaacaagcacaagaaagaaagataac

SEQ ID NO: 268006 - DNA, 434 bp, Glycine max
agcttataatataagaaacatactttcatgttgggcttagctctacttagataaacattgaagactaatgggactaggatgtgttgtttccgtgtaagtctaaactttgaagtgcttctatatttttgcattactatatcaattaaattagtcttatttcttttcaattggaactaatatagagatatttaaattatttattttgtattattaatgtatagatatttgcattataaaaaaatagtttgttgtgtaatggtgaatttgttaatgtgaaatgtttcttttatatttggaatcttatagctcaagaaggcttaaaatggtggaagatgttttacataagattagagacatcattaaacacgtgaaaaacattaaaggctagaaaatagcatttagataatgtgttgtcaagtgagaagtatgatact

SEQ ID NO: 268007 - DNA, 424 bp, Glycine max
  unsure (1)..(424): unsure at all n locations
tgtaagntatatattcaatatattntatatgttttatttatgtagacgcctatatgccacattatattctgataaataaatagttttacgtagtataagataagagaataatcttgtataatttagtctgaattggtaatgctatattgtagattagatttacgtttatatgacaaattaggaatagttttacatactctaagttattaattttatatggtagattaagaatagtttaaattttgatatgatagattaagtttagttgaatttttttgtaaaatagattagacataatttgaagtagcataacttattacatttagattagctttagtttaaatgttgtatatggtagattacatttaatttaaatatttaatatcatagattaagaaaaattgatgtactgaaattattaatt

SEQ ID NO: 268008 - DNA, 285 bp, Glycine max
ctaaactcaggtcaagatacaccaaatttgagagattccctatctgaggaagaatcttcccataaaatccactattatagaggactaagcgagtcaaggaggtcattgtcccaaggaaagaaggaattgacatacctgctccaagtaaataattgccgctcaagtccaagtaattcaaatgctttaaatcagccaaacaaggacttatctctccaccaaagctccatttcctataagcttcctcatcgaatctacggtagaatccatcttcatagatgtcatgat

SEQ ID NO: 268009 - DNA, 469 bp, Glycine max
  unsure (1)..(469): unsure at all n locations
tataggagatggagctttggaggagagatatgtccttgtttggctgatttaaagcatatgaattacttggacttgagcgccaatgaataccttggagaaggtatgtcaattccttctttccttgggacaatgacttccttgactcacctcaacctctctcatactggattcatggggaagattcctcctcagattgggaatctctcaaatttggtgtatcttgacctgagagctgttgccgacggagcagtaccctctcagatcgggaatctctctaagcttcaatatcttgacttgagcggcaattatttccttggagaaggtatggcaattccttctttccttgggacaatgacttccttgactcacctcgacctctcttatactggattctatgggaagattcctcctcagattgggaatctctccaatntgctctatctcggccttggaggtcattctagtcttg

SEQ ID NO: 268010 - DNA, 393 bp, Glycine max
agctttgagccaatttatactacaataactttttactcggatgtctgattgagttccgtaatatatcgagaccgtcgaaattgaatgttgaagctctaagccaattcaaacgacaataacgttttactcggatgtctgattgagtcccgtcatatatcgagaccctcgaaattgaatgttgaagctctcaacccattcaaacgacaataacttcttactcggatgtctgattgagtcccatcatatatcgagacgctcgaaattgaatgttgaagctccgagccaattcaaacgaaaaatacttttctcggatgtctgttcgagcccgtaataaacgagacgctcgaaattgatgctgaacctctgaaccaattcaaacgacaatacttttta

SEQ ID NO: 268011 - DNA, 436 bp, Glycine max
  unsure (1)..(436): unsure at all n locations
ggacactataaaactcagctanacattcactttcgagcctcccgatatattacgggtctcaatcaaacatccgaganaaaagttattgtcgcttgaaattgctcagaggttcaacattcaatttcgagcgtctcgatatgttatgggactcaatcagatatccgagtaaaaagttattgtcgtttgaattggctcagagcttcaacattcaaattcgagagtctcgatatatgacgggactcaatcagacatccgagtaaaaagatattgtcgtttcaattggctcagatgttcaacattcaatttcgagcgtctcgctatattacgggactcaatcagacatccgagtaaaaagttattgtcgtttgaattggctcagggctttaaccattaatttcgagggtctcgatatattacgggacctaatcagacatcc

SEQ ID NO: 268012 - DNA, 456 bp, Glycine max
  unsure (1)..(456): unsure at all n locations
agctngaggaaggtattagcacctctcacgtttgtctcaaaggacaacatcctattttttagaattatggaaattgtgttacctaactttatttctttttattttttgaggtcgacaaaagcggggcttttgttcctacgtaccctcctttagagaggaaatcagacctacgtagttctttcacatgcgtgaatcaagtgattcttttttacttgaggggtgatcatcttaaggcgttggaccttaaaaatgatccattttacttggtaagaaactgaaatgataaactttcaaaaacctatttttgtggacgagcttgactaggcggattggttttagccttaatttcgctttagttattagtcaattcaatttagaatgagaaatcccaaagagaanaacgtccgatgacttttcgctttactttactaaaaggtgattttcttatcattatat

SEQ ID NO: 268013 - DNA, 389 bp, Glycine max
  unsure (1)..(389): unsure at all n locations
ctcacttccatattaagcccattaaggaacctagccatacttggtctttccttctncataagcccagctcttaaaagaagtagttcaatttgggttctatactcttcaacactcatactcccttgtctaagccattggagcttggccataagctctctttcatagtagtaagggatgtgcctcttcctaagggcacttttcaagtcattccaacactctactggaggatgcccatgaatccttctttccttaataagggaagtccatcaatagagtgcatacctttggaagctaagggtagccaaaggaaccttccttttctcactcgtatgatggcaagcaaagagtttcttaaccttcatttcccaatctaaataagcctctacatt

SEQ ID NO: 268014 - DNA, 449 bp, Glycine max
  unsure (1)..(449): unsure at all n locations
gcaagcttgaaaacggatggcatgataatgtttggtgtaggctggtttttggataaagggaatgtccaccattatttccatgacacatatgcaataatgatgatttggaaattttatgcaaaactagtcatgcctgcacctatgtggacacaaatgtccaccattatttccatgaggtattttgctacctaaacatatgtatatttttgtgagggtatttgctatatacatgcgtgtccaaggtatcttgctacctaaacatacaatatatatgtttgtgagatatttttgcttatacatgcatatccaaggtatcttgctacctgaacatacacatatatattttgtgaggtatctttgctacatacatgcatatccaaggtatctttctacctaaacatacatatatatantttgtgaggtattttctgttacatacatgcatatct

SEQ ID NO: 268015 - DNA, 135 bp, Glycine max
  unsure (1)..(135): unsure at all n locations
caccacctttagcacaaacccaaacaccaaccaggatatgaantttgcagcanaaaagcctgtagaaatcacccncattcttgtggcctatgctgacttgcttccatatcttcttgataatcaatggtagcataa

SEQ ID NO: 268016 - DNA, 316 bp, Glycine max
  unsure (1)..(316): unsure at all n locations
ctaccttgaattatttcttgaagcccttttttaccttggtgccctttccttggtttgaagctcactacaagccttaagtgaaaaaccatgatattaccatttccttaaagaattttggagctttgaattgtttgggaaaagtgtggggggtttttgtttcattggacaacttgntntgttggctatgcttcatgatgtattttgggccatacttgatgtacattgtatattggttaaatgttggacatgctgaatgaaatggttgttctcaaaggctaaaaataaaaaaaatcgaaaaaaaaaaattcgaaaatag

SEQ ID NO: 268017 - DNA, 388 bp, Glycine max
taacaattctaattgtagttcacattcttggtctttctttgcctagcatgcatacttgttcaaactcatgaaaaggaacacaaactccatcacaatcatgcattcaatccaaaatcaaaccatacaccaattttcacaaaaagataaaagtggtttactgccatgtcatcaaaatcaagtcaaactgttccatatgcttcagaataagcaaaccaactatccaaaaataaaactagcagtgtatataaacataaaggaaatactgtattaaaaccataattaacataataataaacccaaaagaaaaaattgcatcaggaatcaacaatgtcaacaatgtctaaactggggaatcagtgagagcaacagcttctccagatgacgaatc

SEQ ID NO: 268018 - DNA, 347 bp, Glycine max
agctatgcctatatcctcaaacgttttttgccaagaatccttttactaaaaaaaatgcacccatatacaatcaagggagttctattacctagaatattcacatgtacctccaaggtgtatttgttatttacattcacacacgcctccttggcttaatttacatacatgcctactcacagcatgttcgggtaccaaaaattgcacatgccctcatcttggtatttctaatacctatgcatactacaacttcatgatgaatcttgactacctacccaataaggtgctacatttgatgcgtctttttcctttttctttttttttgcagattttgttacctaagccacatg

SEQ ID NO: 268019 - DNA, 464 bp, Glycine max
tatgcgcatatttccttacgaacgttcacttgcacaagttattctatttactaagaaaaatgcacccatatacaatcaaggcagcttcgttacctatattatttacatgtacttccaggtgtattgttacttacatcacacacatctccttggcttaatttacatacatgcatactcaaagcattttgtggtaccaaaaattgcacatgtgcacatcttggtattttcaatacctatacatacacaaacttcatgatgaatcttgactatctacacaataaggtgctacattacatgctcttttcaagtttttgctacctaaagtcgcatgcaaattcaagtatatttttctttgctgactaacattgtattcaaattaaaaggtatatttcttctttgtaatggtatttctttacataacatgcaacatatatatatacacttttttgtgagaacatttgact

SEQ ID NO: 268020 - DNA, 275 bp, Glycine max
  unsure (1)..(275): unsure at all n locations
tctatctaatgatgtgctgtgtgatctctatgccttcgagtattagatcctacgctgcttttaccttgatcatgtaaatgtgtgctttgttanggtcattcgacagcggaaactattctgattcttacacttgatagacagggcttgtttgctgtactatcacgagggatcggggtatgatacctaactgtagatgtttctcttaacgcgccctggccaacgttactccatcaagaaggatatgcggatgcagctctgacacgattatgctatac

SEQ ID NO: 268021 - DNA, 284 bp, Glycine max
tcgacatgcacattagcgcaaccctctctatgaatcacatctctcatgataagcatgccagccatgtgacaacatagtcttacacccacagtcgcctaataaataatctacttctatgccatgccatcgcgagttgaggagaatggtcatgcgtgctttgagaagaacaacgaatctgcggatacccaccactaacacccatgatctaatgaactagacatcaaagatatgctaataagtcagaaggacgactagaatcataatactctcatagatatccacat

SEQ ID NO: 268022 - DNA, 410 bp, Glycine max
  unsure (1)..(410): unsure at all n locations
agcttgtaggattatggggtacccatcacatgtggtactaggtggcggtcgggcgatggtgcacaacaagtttttccacatccacaatgcgcgcataaacccaccatcccctgtagcccacctncaactgagctcacgtactcccacgtagcccatatcctcgtttctctcaacaccgggtccccatcaatcctcccaagcttccccaacatcaaagtaatacaacattcaaacagcacaaactatcacagccaagaaaacagagcaaaggcagaaaactctgccaaaacaccaaccaaaatcacagcttttctcacttaaagaccccagtaacaattccttcgttccaattcgttaaccggtggatcgactccaattnttactggaagtctctagtacataatcctaca

SEQ ID NO: 268023 - DNA, 422 bp, Glycine max
gatgatattcccgagactttggatttggtacgaccatgctctcctgatttccagctgggaaattggcgagtggaggaaccccccggcatttacgcaacaagcataatgtaaacctttacgggtttaaaagctctatagttgggcctaggctttagagttttcattttgctaaggctttgtgtcttttgtgtttgaatttataatacaaggatctttcttcatctgttcctggtctctacccattctcattcatttgcatgtttacttctttttctaaaacggcagattcgatgacgagtcccccgaaggtactaatacctgggacccgtctatcaactttgagcaagaaatgaatcaaacggaagatgaaggagatgaggatgtgggacttccttcggaactagaaagaatggtcgcccatg

SEQ ID NO: 268024 - DNA, 411 bp, Glycine max
  unsure (1)..(411): unsure at all n locations
agcttcatgcttaatttcaaatgaatcaatgttgtttataaagtcagcatattgcctatttatactaagagcctaaagagttntcaagacccatttctaaaaagtccaatataaccctaatacaccactagaaagtggcacatgaaataaaagatctgttaatggtttcacacacacaactaaagaaagaaacccagcaaatggcccaaatacacaaattggtcaaattatcaaatggcttacattaagtaactttaattctaagccatatactccatgctctccaagtgttttgatcttcctcatatgcttctcttcaagcctcttggaccttgacctagtcaatggtccctttaattcatgtccttcatcttgttctttaatctcacaaagtctgaccataggtaaatc

SEQ ID NO: 268025 - DNA, 402 bp, Glycine max
  unsure (1)..(402): unsure at all n locations
tgggttgggttgggttaaaagtttctgtgtgtcttccaaattagataaagaaaaagaaaagttaatgcaagcggtgagtacgttactagttctagaaggggaactctttgctataaacaatagaacaataccattttttttttccttcacactataccatgtcactcatgccaaaatttcagtttactggtttggttttattaaacttaataggtatcttttttctttttgatcataaatgctagcggtgcatacgttacttgctctagaaggggaacgctttgctatatacaataaaaatgatattgtaccattntttttgttcacactataccaaatgtcacccatgctaaaatttcagcttacctggttggaattaaangtttttagtatatcttttat

SEQ ID NO: 268026 - DNA, 402 bp, Glycine max
  unsure (1)..(402): unsure at all n locations
agcttgtatgattatggggtacccatcacttgtggtactaggtggcggncgggcgatggtgcacaacaagttttccacatccacaatgcgcgcataaacccaccatccccttgtgcccgcctccaactgagctcacgtactcccacgtagcccatatcctcgtttctctcaacaccgggtccccatcaatcctctcaagcttccacaacatccaagcaaaacaacattcaaacagcacaagctatcacagccaagcaaaaacagagcaaaggcagaaaactctgctcaaacaccaaccaaaatcacagcttntttcacttatagaccacagtaacaattccttcgatccaattcgttaaccggtggatcgactccaaaatttactggaagtctatagtgcat

SEQ ID NO: 268027 - DNA, 467 bp, Glycine max
  unsure (1)..(467): unsure at all n locations
actcagctgactggcgagtgatttagcctaattcactttattttttaatcaattcgattaagaatgagaaatcccatagagaaaacgtccgattgatcttccgttttattttactaaaagatgtctttttgaatattatattattttttacctctttttgatttccaacgtggttacggcacgaccgaacggtcggaatntattttaaccgaagttaatggataatacaattcaaacgttcggtggaaatttattttattcttaagttaagcgagaaacgacttaagtaaaatggcttaagcacgtcaacagggggtataaaaagtgaacaaaacgagaataaaaaggcacgaaacacaatgtggaccactacgggtacatagaatgaatcgaaaagcttggttcgaggtacttacccgttgaagatcgaaggacgatgaagaacgaatgaagaacgtcgaagaacg

SEQ ID NO: 268028 - DNA, 414 bp, Glycine max
agcttataatatatcgatacgctcgaaatttaacgttagaaactctcgagaaattcaaatagtcataacttttcacacggatgtccgattcgggcgcataatatgtcgagaggctcaaaattgaacaacggaagctcttgagaaattcaactggtataacttttcacacgaatatccgatttaggcaaatcacatatcgagacgctcaaaattgaacaacggaagctcttgagaaattcaaatggtcataaaatttaactcgaatgtccaatttaggcgcatcacatatagtgacactcgaaattgacaacggaaactctcgtgaaattcaaatggtcataacttttcacactgaggtccgattcaggtttataatatatcgatacactcgaaattaaacatcggaaactcttt

SEQ ID NO: 268029 - DNA, 374 bp, Glycine max
taatagctgtttgtaaatcagttttggccactggtaatcgattacatcctctggtaatcgattaccagagagtaaatttcttgtaaaagactttttaacttaaaattcttggccaaacctttagctacttcaattggaattcccttcctatttaatataccctttctaagactctatagacagtcttgatcatccatcttgaatatctttaatttctttgtcttgaataaagctttgagacgcatgtgatcttttggcatcatcaaaacatcggcttgatcctttgtctacaatctccccctttttgatgatgacaatccctgaaatcaagacaaactatatacaagatgatagtacgttcacacaacccttac

SEQ ID NO: 268030 - DNA, 428 bp, Glycine max
  unsure (1)..(428): unsure at all n locations
agctnggngaggtttgtctattatcatggtaggttcgatctgggttacgagcctacacatgccgacaagagaagggtcaccttataaaggaaagatgtagaagcaaagcttcatggtgaatcaaaggtgattcaaaggtgttctgatgataacaatgatgatgacaaaagatgatgacaaaggtgatgacaaaaagctcaaagaacaactcaagagaatccaagatcaatcaagaacaattcaagagttcaagataagaatcaagaagaattcatgactcaagaagaaagtctagagacaagaatcaagattcaggttcaagatctgaagaatcaagatcataattcaagactcaagattcaagaatgaagagaagactcattccagataagtattaaagagttttccaaactttgaatacacatgag

SEQ ID NO: 268031 - DNA, 373 bp, Glycine max
tggcttagagaatagagctgttgatgctctgtccagatgtcatggtgaggtagaaatgaattctattatttcttttcccttgtgggctgatagacagaaacttttggatgaaataactaatgacccgtacattcaaaagttactgaaagaagtgcaggagtctcctgatgttagacctgggtttcaggtgaaacatggagttttactttatcatggcaggctggtgatttcccccgaatcaccctctattccttgactattggaagaatttcatagtactcctgctggagggcactcaggttttctgagaacataccgaagactggtagattccttatattgggtggggatgtaaaggagtgtaagggattat

SEQ ID NO: 268032 - DNA, 352 bp, Glycine max
cttttcattactcaaacacccattttgctctttgctttcaatgatttcggctccatttcaaaattggatatatttttttggatagtttaatcttcattttccattaacataacccaaattaggatggatttctttttttgtaaaatcttttacagaggaagtgaattgagtcagatactgtaaatacattgtgataaaaaaaatacccaatccaaaattgaaggcactgtcgtactgtgaatgtgtatgttcacaagattgctagacattgattatattttgtataaattattctgccttatgctaagatcttatggattactactgctggaaatgggctgtagtctggcat

SEQ ID NO: 268033 - DNA, 297 bp, Glycine max
aagtttgcttaccttcgtaaccggtggatctgctcgaaatttggtctgtagcttcacaagacacctttcaccgctgccattggatcttcagaaaatgtctggagtgtgcgcgaccttttctgtgtccgagaccatttcttacttgaagagtttcagcctttgctatcgtggagcttaagaaaaacacccattcttcttctttatttcttcaaatccattctaacggccaaacactgtttcattccccatgacaccattagccatcactaaccgcctttgttttcggtgaaccccaca

SEQ ID NO: 268034 - DNA, 415 bp, Glycine max
  unsure (1)..(415): unsure at all n locations
cgaaaatgccccattcaatcaggcaagtgtgtacctataatatttacacgtacttccaaggtggatttgttacttacatcacacacatttgcttggctaaattcacatacatgcatactccaagcatttggggtaccaaaaattgcacatgtgcacatcttggtatttctaatacctatacatacaccaacttcatgatgaatcttgactatctacacaaaaggtgctacatttatgccctttttcaagtattgctacctaaagccgcatgcaaattcaagcatattttccttggctgactaanattgtattcaaattatatatatacttttcggaatatgtcttctttcatacaacattcaacatatttatatatattattttttgtgagaccatttgactaccagaaattata

SEQ ID NO: 268035 - DNA, 381 bp, Glycine max
  unsure (1)..(381): unsure at all n locations
tggctgatctctaaatgaaaaccttggctggtgcacaaatcaaggaaaccaatatccattgatgagatcattactctgatgccagaaaaatatatatggtcatggttttactttaccaaaatcgtatgctgggtgtttttctataacaatagtttgtattatcaatgcttctttacttgttgatgtagaccattgttttatgaatcaactgaaaaaattcggggttgtattaagcacttgttgntaaaacaattgatgaacacaaaaaagtaattcaaccacagtatagactacaataacatatctcgaaacaccaaaaattatgcataatacatcaaaagatactaacaatgattatattgataaaataatcgcctctgt

SEQ ID NO: 268036 - DNA, 143 bp, Glycine max
cggaaaagtatgcggtgatggctaaacttcgatttgaattcagcgtctcgtatatacaggactcatcaacatccgagtaatagttatatcgattgaattggctcaaaacttcaacattccattttgagcgtttggatatctta

SEQ ID NO: 268037 - DNA, 375 bp, Glycine max
  unsure (1)..(375): unsure at all n locations
acttttactcggatgtctatttcagtnccgtaatatatcgagacgcttcaaattgattatcgaagctctgagaaaattcaaacgaccataactttttactcggatggctgattgagtcccgtaatatatcaaaatgcttgaaattgaataccgaagctttgaaccaattccaacgataataaccgttttactcagatgtctgattcagtcccgtaatatatcgagatgctcgaaattgaataccgaagctctgagccaaatctaacgacaataactttttattcgactgtccgattgagtcccgtaatatatcggaacgctcgaaattgaatattgaagctctgaacaaattgtaatgacaataactttttactc

SEQ ID NO: 268038 - DNA, 348 bp, Glycine max
  unsure (1)..(348): unsure at all n locations
tgcaagcttatccttatggcttgcctccggacttctcttcccgtgccaccctgttatattaagccaagcccctactttcgaggggcagctcccaccttatgatgactatcccgggcaagacgatgaggaaggagatacccatctcggtcccctgctccacctcaaagatcggtccccccatgaattaccgcaaccaaacatagtccgccatatcccgacttcacccacacccgtaaaagaatctgttcccttcgtggaagataatggaaagattgacgcgctngaagagaggttgagagcagtccagggcctcggcaattacccattctcggatctagcggacttatg

SEQ ID NO: 268039 - DNA, 483 bp, Glycine max
aaaactcagcttttggcaaggaagaacaagaagagagatgagtagaattgtatttttataagttctcaaaaattgttaaagagatgcgaaagttcttttgaatgcaagtcaaggtcttatttttatagactcttcatgtctgggcaagaaaaccattggaagaggtataaccttgagaaaatcatggtcagagttacaacttttgaccttttattcaaaagttatcactggtaatcgattaccataatcatgtaatcgattacacaatgcattttatgaaaaggtgtgactcttcacaattggatttgaattccaacgttcagatacactggtaatcgattaccaatataatataatcgattacaccatttgaaaaatattttggaacatcgcaaatcagttaaaaacatttcgaaatcaaatttggtcactagtaatcgattacatgaaactggtaatcgattaccagagagtaaatactca

SEQ ID NO: 268040 - DNA, 351 bp, Glycine max
  unsure (1)..(351): unsure at all n locations
agctnttgatcattgatgcatntaatgcttgcattaaatgtacgcctcattcatgctagaaaaccactctctttagcttttgtgttgaacacttcagtagaaaatcactttctttgtgtcaaactaggtttgttactatagagcatgtgttttgatgttgtatggtaacctcaaagagattccacttcatttattcttcataggatttgacagaacctaggagaatatcttataagacatttcctgtgaaatgaatctcagatgcagaacattaaatgaagtcttaaatgtattctttaatggtgtatcagatcatgaaatacatctactttcgtttggaattttagacgt

SEQ ID NO: 268041 - DNA, 417 bp, Glycine max
acaagtgtatgtctccctctggtcgtattcttatctccaaagatgctctctcataagttaaaatcgacttatggacctcaatttatgaagaagttagacaatggaacttatataaaagttaaagtgtacaagttgattttcatatatgaaagatatttgatttattttatctctttgattcatgctattttattctcctgttagtgtttactgaacagtttatccaaacggttctttgtacgggctttgagcctaatggaactgaggttatataaaaatataaaccattttttaggctactatttatagcatatgctgtatgtaaagcttgagcttcaattatgttgagtcaattaataattgaatcataatgaggctcattttttttttttgacagcaaaaattagtattatatat

SEQ ID NO: 268042 - DNA, 292 bp, Glycine max
acgtcaaaaacccctaagggcttaacccttttacacttcacttcctcccctatatatagcaaaataggggaaatgcttgctatatgccttctggagggcccaagtgggcctgggtgctatttgcacccccaattttactaagtacaaccccctctgcccttttttggtgatacttttatcgtaaagttaccgaaacttacgaatttcgtaccgatacctgttttttttccgtatgttacgaaccctgggatacataacatccccttttatatacgaaggtccgaacccttta

SEQ ID NO: 268043 - DNA, 368 bp, Glycine max
agcacgaaattgaatgaagaaaaagggagagaagatgatctttgagttatgtctcacaagactcttattcatcaaagatacaacaagtgttacacatgcttctatttatagactagggagcttccttgagaagctttcttgagaaaacttccttgaaagcttctttgagaaaacttccttgagaagctagagtttagctacacacacccctctcataactaagctcacctccttgagaagcctccctatgaagattcctaaagaagctagagcttagctacacatacctctttaatagctaagctcacctccttgagatgagaagcttgaacttagctacacaccccctaaaatagctaagctcacct

SEQ ID NO: 268044 - DNA, 366 bp, Glycine max
  unsure (1)..(366): unsure at all n locations
ngctttttcttcttttatatatgtaaaatttttattatagtggtttagatccatgcattttgttatactactgaccattcatattgtcnggngaaacatacaaattgtgttgtttttntgaagaaaaatacagaagaagcattgagctggaaacaaaggtcttaaatctatgacatgcgagttggagagatattgattattgacattataaaatttcttttgcaagtaaaanaaattgtcaaaagttggtaaaaaaatatttcattagtattcattttctttgaaatatgaaacataaaaggcaggtgagctatatacaaatggagcattgtgatattatgagtattgacactgcttcacgttttg

SEQ ID NO: 268045 - DNA, 450 bp, Glycine max
  unsure (1)..(450): unsure at all n locations
tacgttggcaatccaaaaattatntatatactctcaattttttcctctcagaacttaaatcattattgtatatggtggctagagattttaactcttgctttctcacagggacttttaaattattacatctttaattaataacttttataaggacataaagcaaaggttacctctcataggtaatactatataagttcatccaaagaacgatgtcctctcataggacaaggtcctcttatgagaactctatggatgtaccaaatctttagtacctttagagaatgatatgttctctcacaaaacaaggtcttctcagcaggactctacggagcatccaggacaatggttgttccagagggcagcatgtcatttcaccagacaaggttcgcctaacaggactntatgaaacaccagcacgaatttcgaaggcgacatgtnctttcactggac

SEQ ID NO: 268046 - DNA, 293 bp, Glycine max
  unsure (1)..(293): unsure at all n locations
ctcatgtccaagaagatcatatctttctaaacgcttttcctttatctctaaagggagtggccaaagattggctctactaccttgctcccaggnccattttcagctgggatgacctttagagggtgttcttggagaacatcttccttgcatttatgaccactcgcatcagataagacattttaggcatcacgcaacttagtggagagagcttgtatgagtactgggaaagatttacacatcgtgtgcacgcttgtctcaccaccacaatttcgatcgactccttcttcatatct

SEQ ID NO: 268047 - DNA, 420 bp, Glycine max
  unsure (1)..(420): unsure at all n locations
agctntgttaaagtaattgaaatagaaattttgatctatatggactacctcagaaaggtgttaactctgctctcttcaatttactcagacaaaaggatgagacttcaaaatccttagtgtttctcaaacaaaaaattccagatggaaccaactctgtaagattcagcataattcaaagttcgcaactgccaatgggtgatatttaggcctaagctccttaaatgtgcatttctttcactaatcatgactcacaccaccaaaaccaatttcaagggtcaattttcttgatggaatacacgtttatagaccaattcagaaaataaaatatttttccatctagttttcttgatgcaacaggtggaataaacaatttccttcactcaataccacatttgtcaaagaaaaaaacttacaggaagc

SEQ ID NO: 268048 - DNA, 457 bp, Glycine max
  unsure (1)..(457): unsure at all n locations
nntttgaaaacattntgctactggtaatcgattactattatctggtaatcgattaccagagagtaaaaactcattggttaaaggtttttgagaaaaattcatgtgctacttagtttttgaaaaaactttttaatacttatcttgattgagtcttctcttgattcttgaatctttagtcttgaatcttgaccttgattcttggaacttgaatcttgaaacttgattcttgaaatcaaatttcctcttgaaccttgaagtgttcttgattcaatcttgaactcattctttgattcttgagatcatcatctttgttatcatgaagtgttcttgacttttgagcttttggttttgtcatcatctttgttatcataaaaaatctttgaatcaatcttgattcatcatgaagcttgcttctacatcagccagcctacatcaatcagacttttggacctatatg

SEQ ID NO: 268049 - DNA, 416 bp, Glycine max
  unsure (1)..(416): unsure at all n locations
agccttctcgggattatgcacacatagattcaatgttgcgtcagctggctctcattattaaacattgggctaagccaagaagagtcaatgaaacttaccatgggaccttgtctagctatgcgtaagttaacttctgatacttttcttgtttaaaaagattatgctttgcctttatctaatttacgcccgtaatgttaatattcacaaaaatcaaaatagacttgattgaacaattgaatgtcagataaatgtggtgactggatattattcgtaaaaaataaaatatgattttaatttcaggtatgttttgatgtgcattcattntttacaaatgagaagacctgctatccttccatgcttgcaggtgtgtacttcagtcttcactcttggattcgaatattgagatatatctgtat

SEQ ID NO: 268050 - DNA, 249 bp, Glycine max
  unsure (1)..(249): unsure at all n locations
gcttgctgttcggttactctgttaaaacctgagtgtgtcacaattacctttccttctttatgatctagtagctcagacgaagtgaatctcagtttgtctatgtaaagctagtcccatgatgacttccaacttgccagagtagaggattatagttctggcagatcttggtagagagcacgagagtgttgtgaaaaggatccttanatacattaaaagaacctcaagtgtcgcattatgttttgaaagatc

SEQ ID NO: 268051 - DNA, 307 bp, Glycine max
agcttcgttcacagatccctcttgtaagactagacctatacaaaacaacattattgtagcaacataattaaaatcaaaacttaatccacagatccctcttgtaagactaagtttcgatcttgcttcaatcaagttctaaggcaatagtacatttcccaatgctaaagtcacctaactatgcacccaaatggataatcagaccaaaagcatacaaacattaagcattgaaggaagcattgaacacaaaaaacataatcaattagatattgagtatttacataagttggtcattagaaatccccaacta

SEQ ID NO: 268052 - DNA, 323 bp, Glycine max
  unsure (1)..(323): unsure at all n locations
aaggtgagacttcctacttttattcgttgaccacaaagtggtacctggagatatgtcgcggggttcaagagaccttggggacgtcaggtggggtgctattgcccaaaaccaagcttgaccaatcccgacccaacccgggcatagtaatcagtgagaacctgtgatgacctaatagcgactctggagcaccataaaaacaaaccnacaggggtggggggtgcactgaattataaatgaatgcttgatataaaggggatatcagtaataaaaactaatgcttgataacagatgatataactaaacaacaataagttgatatcagg

SEQ ID NO: 268053 - DNA, 462 bp, Glycine max
  unsure (1)..(462): unsure at all n locations
ctctgcacgcattgcaagcttccgcatcagcacttggaaggattttattactgccttccttaggctatatcangacatatgtgatatggctcccgatcggactcagctgcaaaacatgttggatcgagtggcctcagaataattaagaaggggggggggtgttgaactaattattcctaaacctttactaattacaaaaagacctcttctaaggcttttactaaattgctaacagaatgaagagttacaacagaaacttaacagaaagttaaagcctaatttaaatgcacaacggaaagtaaaagagtagggataaaggaaacaaacacacaagagtttttatactggttcggcaacaacccgtgctctacatccaatctcctagcgacctgcggtccttgagaattcttccacccttgtaaaatccttttactagcaaagatccacaatggatgtacctct

SEQ ID NO: 268054 - DNA, 249 bp, Glycine max
aatccccctacctacatttcttcaatccttcattctctcttctcttggtgaaagaagcttccagattggagagctaaatctctgtggttttccttgagtactgatgtaatcctgctactattaagatgtttatggtctctatgcatcagacgtcttaatggctttgcctgatcatgcgatcatgcttgtaggacattaacaggcagtctctgcagacctcctattggcagagccagggaagagatctga

SEQ ID NO: 268055 - DNA, 304 bp, Glycine max
  unsure (1)..(304): unsure at all n locations
cgcggggcagctctatcttcagattctcaaatcaaacatggttgttaaactttgccttatatacatttaaatgaaaagggccatttgaaaagctaaattcatataacaccttattaccgaagatgatagttggaacatttaggcaatatcaccatcacaaacattgggttctgcatataataattctaaaacagcattacttacttgatctaataagtagtttgatatcattaaatgctaaagagcaaactgttatcctttgaattcattgtggtcataanaaaccctttaacttaggttactg

SEQ ID NO: 268056 - DNA, 343 bp, Glycine max
ccagctaggactaccaaaagatgtacaaatgttttgttctacaacatacctccacgatgcattactaatacaaagattaaaattttttttggccccatagaatttagaatatcgatggcacttaaagaggacttagaaggtcagacgatctcccttcttaatgacaccctcaaggggaattaagccaacatgatggaggaccatgccccgaccctaacaagacggacattaggcgccaaagagatatattaccattcatttaggcctgactgtgtcctgggggtacccggacgagaggagtccaagacttgaaaaaaagaaaggacacccagaacagatatat

SEQ ID NO: 268057 - DNA, 410 bp, Glycine max
agctttttaataatcaagacgttaagggttttcctcaagatgttgtccaacttcatgaggaaattagaaccttgaaaactacattagccaaatttgtcaatggaacgaataatcttaacaaactgttaggatattgtagatgttccttacacaaatttggaaatggatatgatggaaaggtatatgttcatgataaggataccattgtttgctacttctatggaaaaactggtcatatgacattcaagtgtaaagatcgacttaagaaaggtacaatcaatacttttatagctaacacaaaaggactcaaatagatttgaatacttaagaaaaatattattcttgttgcgatgtccttgataataagacgcagaccttatcatggacttggacagggtgtcatgacacat

SEQ ID NO: 268058 - DNA, 476 bp, Glycine max
  unsure (1)..(476): unsure at all n locations
tgcatgatttacattctccccctttctcaagcttattcttaattcttctngacatcatcaaaagcttcatgatgtacattctccgcctttttgatgatgacaaccacctgtatgttaggagcaacaacaaagaaaaaaatatttatttgcatatagtatactcccccttggttttgcaatgattgcttatatgagacagttgaagatttcatatttctcatatgtaaacaaattgtctcataaacaataatagatagtttgtcttactattttatcttttatctttctctccccctttgtcaacatcaaaaacaaatcatgaatagagaggagaaaggtgttaccacttgttgcaatgtatgagaatcaagtgataccacaagacattataacaatcattcaatattaatcaagcaaaaacaactacaataacacatcaatcaaacacaatcatatacaatcaatcatcaaatatt

SEQ ID NO: 268059 - DNA, 436 bp, Glycine max
  unsure (1)..(436): unsure at all n locations
agcttggagcagaatgattagactctgcattcctggtaaattgttatcacaagacacaataagtaactatcttttgagttgagattaaaaactaatcatgaataagaaacaaaagactgggtatttgcaattataaattatccggccaatgttttaaaaacaatattagatgatgtaaatacaataacactctaattccttgatatatcaattagatacatttctaaaagggcaatgttccatctcaggaacatttagaaaatgaaatgacataaaaagatgttcacaacaccgacatctacataacttagttatgctttctcggttttagtagttaatagccacacttgcatatgtcaattcaacattatttggcataaatatngttttgtgcattgccatctgtgtcatgctctcgtctgcattaatactacat

SEQ ID NO: 268060 - DNA, 425 bp, Glycine max
  unsure (1)..(425): unsure at all n locations
accttctnctgctccagccccaactcctgcttctatatcttcaggaactgctgtgtaagtatttttgtacctgtgatttctggaatgtggagtttgaaatacctgttaattctgtatcctgaaagatggaaaacactccaacttgattgattcttccttttaaattttgttgttaaaagagacttttatgaaccagggaagggtctgatatctatgggcaggctgcatccaatctggttgctggaagcaacttggagggaacaattcagcaaattcttgatatgggtggagggagctgggacagggataccgttgtccgtgctcttcgagctgcctacaacaaccctgagagagctgttgaatatttgtatacagtatgtggattttagatgttaaattccttgcttaatgaattttatctgctg

SEQ ID NO: 268061 - DNA, 414 bp, Glycine max
  unsure (1)..(414): unsure at all n locations
agctnggattntcttcaccgaaacaacttttctcactaattttaagngattctcagataccaagagggttgaacgaatttgttctgccttccttcccctatttataggggaaaagagggaggtggttgccgcccagctcgcctaggcaagctcaactcgcccaggcgagctgggttgcttccaccagaaggcaccgccttctgttggaacatcctggaaggcctaagtgggcctgattgcttttacacccttgttactaaatacccccctttgcctcttttgctgttctttttccgaatgttacggaacttatgaatacgtaacgatactattntctttccacatgtccgaaaccttacgattcggaatcgcccctctttggctcggaatgtaccgaccttacggttgccctaa

SEQ ID NO: 268062 - DNA, 457 bp, Glycine max
  unsure (1)..(457): unsure at all n locations
tctccgaagggcatggttatttccaatttcctgaatatatcttaaatctcaccaaatgacgatccttctccttcttggaaggtaccactggatattaaattcttttttcttgaccattatctgtttctctttttcttgattgctttcacctcgctcatcattttccttgccatcagtacctttctcttcaacaactctcttcttaagtccaacactcttcctcattctccacaanacctttacttcttatcatcacagctttgcattcctccttgggatccttctctgtatttgccacaaaactattggaggacttgtcagctatctgcttggctagttgtcccacatggacctcaaggttcttaagtgttgactcagttcttttatgatttgacattgttacctgcataaactgagtcaaagtctcctctagcttagtagtcctctgaaagatgta

SEQ ID NO: 268063 - DNA, 365 bp, Glycine max
agcttaataagtcccttaactagctctctttatatgagtttgtttaagtggtccatatcaatgtgagctacctttctatgccagagccagaaatacatcctttcaagttaagacaagtaaatgatgatgatgaaacacaatctattattagcatgtaggagattcctatagtggttgacacacaatactcaatttgaatggtaattggattggaaatagtgaaacaatctttattaaaaataattttataaccattgtcacaaaattgactaatgtttagaagttatgcttaattcatccacaaacaaaacattcgctatcaatggagctaataagttcccaatattacatatgccaagaattta

SEQ ID NO: 268064 - DNA, 172 bp, Glycine max
ggctaatcaggcatagctgttcctgtgtaaattgtatcgttcacattcacacaacttacgagccgatcataagtgaaacctgggggcctaatgaggagctactcaataattgcgtgcctcatgccgcttccatctgaaactgcgtgccactgttatgaattgccaccgaaca

SEQ ID NO: 268065 - DNA, 385 bp, Glycine max
  unsure (1)..(385): unsure at all n locations
gcttcttccacaacacctttaagtagtgtgcaagccataatcaacactctaatggttttggccccaatcttgtatagaacttttcaagatgttaggacaatggttggaaaaagttctatccaataccacaagcgagctcccttgccatttgtcaacccatttccttgaagtcaaacctttatcaaatacattcatggtcctcccatttggatgaaaccatgtgaattttctccccacaaatggaatatcttccacattcatatccaagataaattcattaaactctctattatgcccccnctctatgaggatgtgtattatcactctttctttcatgcaaactgaaattctgataccaatgccagatgtcgtacatgatgtcacg

SEQ ID NO: 268066 - DNA, 450 bp, Glycine max
cttttgaagtttgtcgtttcattttctcactaagtaaaatggatcattcttaagggccaacgccttaaaatgatcacctcttaaagtaaaaaagaatcacttgataaaaaagaactacgtaggtctgattttctcatcccaaattgaggaatacgtaggagcaaagggaaacacccttgtcgaccacaaaaaagaaaaaatataaaaagggtataaaggatataagaacataaaagggaacataaaaatcaaagtcatgtttgcacattcgattaaaggctgccgtcccttgggacgggcgtgtggggtgctaataccttccccgtgcgtaaaaacaactcccgaacccttcactaaaaagttcgtagattgcgtcttttccggtttttccgacgttttcctcaaataaacgttggtggcgactccgcgcgtattccttttgtggaacac

SEQ ID NO: 268067 - DNA, 293 bp, Glycine max
  unsure (1)..(293): unsure at all n locations
ctccatcacccgcagccaccattagccaccacaaaccatcattgctctccattgaaaccccacaccgagaggaacccttcaaccgaagcggaatcttccaacttggcttgcgcgttcggtagagagcgaaacctaatctgacctttcgttntctttcgaggtaacctgtagaagcaaagcttcatggtgaatcaaaggtgattcataggtgttntgatgataacaatgatgataacaaaagatgatgacaaaggcgatgacaaacagctcatagatcaatcaaagaacaactc

SEQ ID NO: 268068 - DNA, 465 bp, Glycine max
gcggatttggtctttgccagtgaaagtatctaagtgtatctgataagagggcaaattaatcatcctgcttggacaaatgagaaaactggggcaaataaaaagggtgacgatgagggagaaacccatgctgtgactgccattcctgtacggccaagtttcccaccaaccaaccaatgtcattactcaacccttctccttacctactgcccagttatccacaaaggccatccttaaatcaaccacaaagcctgtctaccgcacttccaatgacgaagaccacctttagcacaaaccaaaaaaacaccaaccaagaaatgaattttgcagcgaaaagcctgtaagattcaccccaaattccggtgtcatatgctaacttgctcccatatctacttgataatgcaatggtagccataacccctgctaggttcccttcaaacccccattttatgaagatatgactcgaac

SEQ ID NO: 268069 - DNA, 382 bp, Glycine max
  unsure (1)..(382): unsure at all n locations
agctntanagactcaatttcatttgaatttggttgggacatatattgagttgtttattaaatcaatatttatttctaatttggaaaaatttagttattcttgttcaatttgaaataataaagttagtctctctcgtgattcaaatgtttgaagttatgagttcttttatggatattgagtgttcctattggaaacaattttaggtggtacaaaacttaaaattaaatgagaatttcatcactttataacataagtgctaagtcatatctcttaatagagaaattggatgcttgtgttataggaaattttggatcctttatattggttggaccctatagtctacattgagtatataaaggcacaataaacaaaaaaaaaaaat

SEQ ID NO: 268070 - DNA, 430 bp, Glycine max
tccttggtacatacttctaccaacccaagtaccccctttggttcgctcacatgcagcaactatgacgaccaccgtcaagggtctaagttccaccaagaaaactaccatcccattatttggcaagacttttaattaagccaaagccacacttactcctcataaccatcagggtagtacttctgcaggtcaagaccttcaatcaagtgcagctcacactcactcctcataaccatcagagtaggaactcaataggttaagcgacctatccccacattggttaggcaagacttataaccaggggcaattcaaacacaactcctcacaaccatcaggggagaagctccacacaacagaaggaagccctaccagatgggtgacaagacctttaatcaggttgaaatcaagcctgagatgacttcatgtcacttta

SEQ ID NO: 268071 - DNA, 345 bp, Glycine max
  unsure (1)..(345): unsure at all n locations
gcttatatagaccatcaccaacattttaacatttggctctagaatatatatgatttcttggcttggagatgaagaggaaagttacaaattataatataattcagaataaattacattactttgctggaggtcatgggttcaaatccaaaaacagcctcttttcatatgccagggtatgacttgaaacaatatatcctcccccatacctttgcatagcaaggagccttctggccatggcctatgatangtttaattaacattaaaggccaaagatactctcctgtgtgctttcatgaatttatatttagatcgacttaaaacatttttaaatttaaaaaatcattt

SEQ ID NO: 268072 - DNA, 249 bp, Glycine max
  unsure (1)..(249): unsure at all n locations
ttttgaataaaaatcaagagatgtattcttccatggtttcangttttctaaagttataactcttccaatggttttcttgaccagacatgaagagtctataaaaggcaagaccttgattttgcatttcaataactttgacaacctttacaaacaacttttcatatattcttttacatcntttacacacatccttttgaaattcttcttcttcttcttcttcttcttcttcttcctttgccaaaagctttc

SEQ ID NO: 268073 - DNA, 412 bp, Glycine max
  unsure (1)..(412): unsure at all n locations
tttacaggttgacctaactcagtatgtcaagaagcacgaaatttgttttgatgccgtttcgaacgaagagttacaaatgatgagataactataatgtagtacatctttggttgaaagaataaatggacaaatacataggccaacttagctttattcttaatcttttgatttccttaagtgtgtccgcgaaaaacagagcccatagttccaattaatattcaacgcacgaaggcaacttgctttgcatatggtcaaacaggtgagaacaacctctcgaatttgattatgtgcttgccaactttctagtttttgaaaaatatgcgtaaatattcccacatgtgttcattatgtctacccttgtataatgtcaaagagacatgcttgaattntgtaatcagggtatgattctcct

SEQ ID NO: 268074 - DNA, 450 bp, Glycine max
  unsure (1)..(450): unsure at all n locations
actcagctttaagtgaatccttctctatacatttcttcacgttgattctcatctcaacaaatccatttcatggtcccggtacttgttcaaaataatgtaacaagagacatggttagttaatcccatgaatacataaaggctggtaccttgggttggcattccctgcgttaacatctcaaaactttatttattaaaatttcatttggaaagaatttttcttaagatgccaaatgattacttatgtggtgaatctcttttgctgtcttgaatattcatttgcgttattctaaataatcatatcatgagttagtgatttatcctagatctctatcatctngtgtccttcatgtgttacctgtaggtatccacatatatttccactcttacaatttgatactctaaagactcatccaatcctaagcagatgtaattatatatttggcttttaaa

SEQ ID NO: 268075 - DNA, 321 bp, Glycine max
caacacaacttgaacacctctctcacagatgattgaaaaatagttattacgaaccatattacaacaaaccatgtgtgtgcgtgcgatatatctatatgcatgagtccctgaaggtgcgtagccacttaagaaataaattggtgatgtaattaatagcggggacggcgattttctgggtgggacgttccagtggctaccttcgcaacactccatggctgatgccttcgacttcttattggagccaagacgaatctacctaacgcacagattgctcatagcccccacaggccattctcatgggacactgaggcattttcttac

SEQ ID NO: 268076 - DNA, 336 bp, Glycine max
catcgttcgcgtgtgtgatatccactcgaccagggttgaagtacaagagaccttctatcctataacgcaacgtggcggacaaaaatgggcagtcaacttgaatgaccattattgtcaatgcggaaggtattctgcgcttcactatccatgttcacacattattgcagcttgtggttacgtgagcatgaactactaccaatatatagatgttgttacaccaacgaacacatcttataagcatactccgcacagaggtggcctcttgggaatgaagcggcaattcctccttctgatgaggcatggacactaatccctgaaccaactaccattcctgcg

SEQ ID NO: 268077 - DNA, 403 bp, Glycine max
  unsure (1)..(403): unsure at all n locations
agctattcagttactgaagagccctcattctgctctttaaggcgcgtaaactttctcctagcgacctccagatcctcttccactcttttcttggcaaacctagatataaaaagacaaaaaggttcacaacttctgtgtaccaaatcattcgaagaaaaattntgtacacattattacagactaaatacctttctttctcaagttctacttgtaactccatgcacgtcactcgattactaccaattttagattgcatttccaccactgtatccctaacctgttgagattgtcttctaacatcggacagccttctttgtgtattttccaaagtgacggaactttgaagcttatcctcttgcaagttttgaagctgatccaaacanaactttaactgcataccaag

SEQ ID NO: 268078 - DNA, 419 bp, Glycine max
ctatcaagtcaaaattaaaagcctagaggtggcccgtgtgcaaaaattggggcaattgatgggacagctccaacatcaagccttccgcaagacctatgggaagatttggtatctagctatgatagagatctcgatggaggccattgcattgctcacttagtattatgatcagcccctaaggtgcttcacatttggggactttcagctagtaccgactgtggaagagtttgaagaaatcttgggatgtccgctaggaggaaggaagctatatctcttttcagggttctatccctccatggcaagaataaccaaggtaaaggtagttagaatctgtagaagcaaagcttcaagaattattttgatgatgccaaggaattataaagatcattcaagaatgaagaaagcaagaattcaatcaa

SEQ ID NO: 268079 - DNA, 357 bp, Glycine max
gtccacaccatattttctattcttcgataactgatgcatctatatgattgaaaagaagtttatattactcttctgatgtagtcgaccactgaaaaaaattataccatatggaatgcttaagccattccaatcaagtcagtttgattctcacattactatcatgcatcttaaagagaatgagaatgaggcatcgtaatgcatagctcaaccagacattaaaagataacatgcttctatagccaacccagggtaaaatgcttttatatttgtgaactttttcaagattataacacatatataaaacatggtggaacaatctgaccacttgacagcacttccacaattattttgacatga

SEQ ID NO: 268080 - DNA, 458 bp, Glycine max
  unsure (1)..(458): unsure at all n locations
atatatctctgatggcttatatgtgcctgacattgatcaaaatctacttaatgttgctcaacttgtagagaaaggattcaaagttatatttgaagaaaattggtgcttgatccaagatgcaaatggaaaagacgtattcagggtgaaaatgagggctaaaagctatgctctaaatctaatggaggagaagcaaatagctttttcaagcatgaccaccaatgttgaactatggcacaaaagtctcggacacttccatcttgctggacttttatacatgcaaaaacatgcttggtgaaaggtgtgtcaatgcttgaagacaagttagccgattgtgtggcttgccaatatggtaagctagtcagaaaaccatttcctcaattaacttggagagcaactcanaagctacaattagttcacacagatngttggggacctcagacagtatcatcttntaatga

SEQ ID NO: 268081 - DNA, 420 bp, Glycine max
  unsure (1)..(420): unsure at all n locations
taggctttatatgtctatggttntctagatatattaaggtccaagattcataaaattagagagattttactgtgtgaagacctgcagagaattcaacttgaagaggaagccgtcctgagaacttgagatgagtctatgagtgattgtgaggttctagaggtggatgagacatccccaccacttgtatttcttcaatccttcatctttctcttctctttgttgcaaagaaagctttctagttatggagagctaaatcctctgttggttcttccttgtacgtacttgatgtaaatacctgtatatctatttaatgatgttttgtgtgtttactatgctatcagaactcattctaccatgcttgtgccttgatcacgtacatgcatgtgtttaaggatcactcctattgaaactgctctgatt

SEQ ID NO: 268082 - DNA, 436 bp, Glycine max
  unsure (1)..(436): unsure at all n locations
tattgttaaaaaggcgttatatgaatcacttatatattgtggaagntataacttcctccattattaattaatcttctttcacccactctctccatatataaacccaccctcaatgctttcaaaagtttaaaaaataattataagaaaaatggcaacatgtaaactttcacctacctaaattcaaacaaaaaacacccacacacacaaagaagttaatgaacaaatnggaaccataagcattctctcttaatggagaaggagacaataatgtcaaaggttgaaggttccaagtaccaagaacttagagtacggagaattgcagagaatcaagccaaaatagaagctttaaggttatccaaattggctgccattttcaaggataaacattacaaggctatgctaaaggataaaaggaagggtaatgatgatgatgatg

SEQ ID NO: 268083 - DNA, 400 bp, Glycine max
agctcgctatatccttggatagctgactttttacttagtctaatctatcaaccgccgacctacctacatatccacttgaaccatactttttgttatggaggcagctattaccggacacatgctagtgacggggctaccaacccgtgctctctgaatccagatatcaacctacctaccggataaagaagctcaccacatcaattgccatggccactgctggtatgccaaatctccacccccaacttacagttgtgtgtaccctcaccacctagaagctgcaacatgaccaccaattttattgacatgataacctgtgaaaaaagacttttgtgctctgttaacttatcacatcatcaattggtctgaccaaagagaaaccaatgttgattcaccatgccaa

SEQ ID NO: 268084 - DNA, 470 bp, Glycine max
  unsure (1)..(470): unsure at all n locations
ggacctaaaaactcagctctgcctacaattaagccactaccttcctcctatgagaaanaagaaggcgtccaaccttcagtctgttgtttaactctcaagttaatgcacaggaacacctaatctgaagccacccaaatctcaatggacctggtacacgacacactcagtgggacgatagattgtgggagaatacacacggcagggtttgggaacggtaaccaatgcacatgaccccaatggtgagaaagaagtcagaaccagctgtggtcgcaaataataactctccgttacaaatgcttangaatttcatgaccaatttgcaagaggtcttcttcggcactaagctagtggggctttatccggcagtccctttggctgttggtgcaaatttttatagctctggaagggtgagtatcatatcattcatgcaaactatgttggtattttccaatcaattcgcacatatgcta

SEQ ID NO: 268085 - DNA, 375 bp, Glycine max
agctttaatgaatgatgtctcgtggccatacctacagaagttcgccttattatattgtgatgatatcctcatccataatagaagtaaagaggatcatgggacttatgtgagacgtgtctatccctattggctgagaataagttgttggtcaataagaaaaagtgctgtttcgggcagagtcaattatatattcagggcacataattttttgggaaggtgtagctgcaaatccccaaaaattagaggtcatgagaagcttttttttttttgatcagcacagataaattatatttatatatattgtgagtaccagaggtacaaaacagttcatgtaattagattgacttgccagcaacatggttccaagctcagact

SEQ ID NO: 268086 - DNA, 460 bp, Glycine max
  unsure (1)..(460): unsure at all n locations
ctcagctttagcgcggctgggaacaatgtaattggtctctgtncaacctacccttcggcgggagggcgacgcgtgactcgcgggatgcgtgttccacgaaaggaatacgcgcggagtcgccaccaacgtttatttgaggaaaacgtcggaaaaaccggaaaagacgcgatctacgaacttttaagtgaaaggttcgggagttgtatttacgcacggtgaaggtattagcaccccacacgtccgtcccaagggacggcagcctttaatcgaatgtgcaaacatgactttgattttttatgttcctttttacatttctatgtcccttataccctttttatatctttctctttttgggggcgacaagggtgtttccctttgctcctacgtattcctcaatttgtgatgaagaaatcagacctacgtagttctttcttatcaagtgattctttcttactttaag

SEQ ID NO: 268087 - DNA, 425 bp, Glycine max
  unsure (1)..(425): unsure at all n locations
agcttgtagatagattgtacttatagtatataaacacanaananaanaaaaaaaaacatgaacaaaagtgcatgtaaaaaagtcaggatttacattggaacatcccatcttttataacagaaataaaaatgactttattttaaaatcaatagattttaggaaaataatgaattttttttagttaaataaataagaagaaatagttttatttattaaaataatggttttaagggaaataaaataaatatatgttcttaagaaataaaaaggagattttatttattcatttgataaggtgtaaaataaagtttctttctataaaataataaaataaaataaaatatagagtcaataatagactgagaatatcctagttataaataaagatatattagctcactattatatctattataggtttctac

SEQ ID NO: 268088 - DNA, 395 bp, Glycine max
  unsure (1)..(395): unsure at all n locations
cacaatattagcaaaccaaggagtggggaaggaatcataaatactatacagaatgtacaaatggtcatccggaaaatcatccaggatgggtgagtcctcagacgcacactcaatcctactcaggtggtcagccacgaagttctgtgcactgccccgatcacggatctccaaatcaaaatcttggagccaaagcatccacctgatcaatctaggcttttattcaactatcttcaataagtacttcaaagcagcatggccagtataaacaataacacgagtaccaagtanatataaacgaaatttctcaagagcaaaaactatcgctaatagctccttctctgtggtagtgtaaattgcttgagcagcatccaaaattctggaagcgtagtagatca

SEQ ID NO: 268089 - DNA, 397 bp, Glycine max
  unsure (1)..(397): unsure at all n locations
agcttnctcaacccatgggcatattgcctgactataggtcgatgtccttcaagattgagccttccataacataaagagtgatgatatatattaattctgtgccacatcacctaatacaaggaccaccttctagacataacaaaacacctaatggtgattccaacaacaattctgcccttggtactgggaggctattctctctgaagatacgtctcacatcagaataaagtcaaactttgtcagtggggcagagttctagctttaaaacttgaataaacaacatataataaacaaattaatagtcatataaaataacatgagaccaacaaataagagggtagatggagaaatgaaccatactacctaactgccaattgtgcagaatacacacacacac

SEQ ID NO: 268090 - DNA, 384 bp, Glycine max
gagactcaagggttggaaatgattgaaatcaatgtattcaaaaatgtatattaaatgcaagttagggtcttgcttttatagactcttcatgtctggtcaagaaaaccattagaagagttataacctttagaaaaacttgaaaatcattggaagagttacatcttttgatttttattcaaaacttatcactagtaatcgattaccaaaccattgtaatcgattacacaaagcatttttgtgaaataatgtgtctcttcacatttgaaattgaatttcaacgttcaaacacactggtaatcgattaccaatatattgtaatcgattaccccatttgaaattgattggaacgtggaaaattagtggacgctttttgaaaccatcctt

SEQ ID NO: 268091 - DNA, 440 bp, Glycine max
  unsure (1)..(440): unsure at all n locations
ctgcagcttcctttttaatttcgagggcctgttttttatgtgccgaancggacctcgagtaaatgttatgaccatttgaatatctcgagagcattcgttgttcaatttcgagcgtctctatatgtgatgtgcctgaatcggacctccgagtgaaatttaatgaccatttgattttctcaagagcatccgttgttcaatttcaagcgtcaagatattttatacttctgaatcggacctccgagtgaaaattaatgaccatttgaatctctcaagagcttccgttgttcaatttcgggcgtctcgatatattatgtgcctgaatcggacctctgagttaaaagttatgaccatttgaatatctcgcgagtttccattgttcaatttcgaccgtctctatatgtgatgcgcctgaatcggacctccgagtgaaaagtaatgac

SEQ ID NO: 268092 - DNA, 286 bp, Glycine max
ttcactggattctttctgccctaaaatcgagtgtcaaatgaaaccgaactccgaaaaatcaaaggcataactttcactcaaggccgatcctgtgataatatatcgagacgcctcaaatagaacaaccgaagctctcgagaaattccaatggccaaacttttcactccgaaggccgactcaggcgcataatatatcgagacgctcgaaatcaacaatggacgctctcacaattcaaatggcataacgtttcactccgagggtcgaatcaagcgcataatatatccag

SEQ ID NO: 268093 - DNA, 433 bp, Glycine max
  unsure (1)..(433): unsure at all n locations
tgcagctttacatgctgttcaaccattttanatacttgttcaactgangcaatctatntgattgaaaagataatttatattacacttctgatgtagtcgacaactaanaaaaaatataacagaaagtaatgcttaagccaatcaaatcaaatcatttagaatctcatcattactatcatgcatctcaaagagaaggagaatcaggcatcataatgtatagcacaacaaaacattaaaagaaaacatgccttctaaagccaaccaaggtaaaaatgtanttatatttgtgaactttntcaaaattataacacatatataaccatatataanaacatggttgaacaatctgaccacatgcacaacgcattccacacattatttctganaatgagtggtaagggaatataataaagcattgttattaaaactgtat

SEQ ID NO: 268094 - DNA, 418 bp, Glycine max
  unsure (1)..(418): unsure at all n locations
cacacaaaatgaaaatactaagtatttattacctatacttaataaaaaatacttataacactacaaaataaccataaattgggagagtttgattcaattgntccccggtttatacacaaaagttagtcattttcaccgactaacaactcccccatatttatagttttgcttgtcacttgtcctcaagtgacantgacatgcngtgaactatgtacaaaggtgtatgctacaaagttattgattgcatgatgagaaagatgaagcaatgtgtacctataacttgtcttcacaaaatatgcggatattcaaagagaagaaataaatgtgaactgaacaaatagaaggagttaggcatacgacatatantaaggaaagtagcttaaaccatagtctcaccactactggttcactcaagcac

SEQ ID NO: 268095 - DNA, 382 bp, Glycine max
ctacccttccgcaggagggtgacgcctgactcgcgggtgcctgttccaagagaggaatatgctgttaaacaagtggcctcaaatatcttaagaaggggggggttgaattaaaatactccaaactatttcccctaattaaaaatctatttcactttttactcaagttatgaattcccttaatgacaatcttcttaaatattaattcaaatgaaacaatttgaatatgaatattaagcaataataaataaaggagattaagggaagagaaaatgcaaactcagttttatactggttcggccacacccttgtgcctacgtccagtccccaagcaacccgcttgagattccactatcttgtaaattccttttacaagttctaaaca

SEQ ID NO: 268096 - DNA, 419 bp, Glycine max
  unsure (1)..(419): unsure at all n locations
atttgagggtaaatataagccggngttagagtttaatgcggcagatgctttgtcaaggtgtcaaggtgtcatggtgacatggaattttctgtgttggtgtcttatcctacttggctggatggagagaagctgttgcatgaagtcaggcaggacacaatgcttcagaagacagtcaaagaacttcaaatgaatcctgatntgaaggctggttntactgtgcagaaaggtattttgttttatcaaggtcgtttggtgttgtctcctaattcaccttctattcctctgctgctgaaagagtttcatgagacacctatgggaggtcattcggggttcttgagaacttatagaagggtagcagcttatttgtattggccaggaatgcatagacgggtcanggactttgtgagggcatgcgatgt

SEQ ID NO: 268097 - DNA, 424 bp, Glycine max
  unsure (1)..(424): unsure at all n locations
agcttgcatttggaattgcgaaagcccctctctatcattatgattagnacctgacatctcaaacaaacaaatcaaacgtaacaagacaattatagttgctgtttgaatacctcacccactcaagtgtatcacacaattatggcttttctctaatgaaacactcttgccttttaccactctaattccccttgagttcttaggcaattcaagagattatggccacaacaaagaacaattcaccaatatgtgtaaggtaaggctagagagacaaggaaaaggttaaccaagaaaaaggctaacaatgtttttaggcacaaatgaaggaaataaaattcataattaggaattaagtaacaatccttcatgcaaccaatatattaccttaaagagaatttttttaaagttcttcaagcatgaaccattc

SEQ ID NO: 268098 - DNA, 422 bp, Glycine max
  unsure (1)..(422): unsure at all n locations
tgtcttcacaaataatcatcacacagcagttaattatcaaaactacccctcatatctcccaaaaccccatacccacgaaaatcaagagggaaagaagtccacccaaacctgaattntcgaagtcccactcgtagccacgcacttcacgaccccgaaaatgcccttctttcgcgatttggagcagaaatgagcaccaaaggttggagctctgttggggtttcaatggagaatggaggagaaggaaaaagcaacgtgaggaagagggagagcttctgaattctctgttntggctgagtgaggagagagaaaagctttttggttttaaataaaaggctttcctctttttctattattttattcaagctctgccacatgtncctatttgattggagcaaaagggaccactntntttctttttgact

SEQ ID NO: 268099 - DNA, 446 bp, Glycine max
  unsure (1)..(446): unsure at all n locations
agctnttaaacatgctaacaannatttaagttatatataccaaannnatatatnncaagcctaaaaaacaatggcatttttttggtaaggacaatgttatgacatactaagaggagacttgggtcgtgaaattataaaataaagcgggttagatttagataaagtctaacttatttggacttacttccactgttaattactagataattntatatattttcataaaaagaacatttttcttctcatgaaatgaatagtgatcgatattagtttatttcaaacatttagaatgaaaaattatattatcagcagactaacttcaaattatcataatcttggtcttaatagactatggtcggcttcataattaatgaataattaaatntgaaagatgagaaaaggactgatcttatgaaagtgaatgctgaccagtacttcaaatcttt

SEQ ID NO: 268100 - DNA, 458 bp, Glycine max
  unsure (1)..(458): unsure at all n locations
ggaactataaaactaagcttgatccattgaagatgaaaggactatcttttttgggcaatggngcaaacaataaagaaatacaaatgaattaatggtctggactccttgcaacaggaactaaagtgaaggcacaccagaaaacaactgcatacctgagggtacttgttttcttccttaaagccagtagatttgtgtacagtgttataccaccaaggggcccataagccatctattggttntggacctgcttcccaactggaaaattcaaaatttgagttgtcacttctcatgtatgtatgcataaaacttgttgcatggaaaatnttcaattactgaatgtcttcaacatttccaaatcaaaggagatgaacaagaaaatattgcanaaaagaaagacaaggaataaataggagcacaaggcctgggcttgcaaaatgaaaactctgcatacttgagca

SEQ ID NO: 268101 - DNA, 455 bp, Glycine max
agcttcaatttaatccttaatttatgtgtttttcttttatgaaacattaaacatttcaatcaagtgatgatttccattttgctgttaaagaatatcatgtgtaacctttttgttttttaatttcaaataaattttatttcaaataaaaattaaaatagatttatcatttagaacttttgagaatgtcacgtgtaaatattttttttataaaacattttcatatgtatacagtaaagatttctcaaactaatttatggagttcacggaggatatactcattgataagaataagcacaccactaaaaaacatataagttatatataatgatatgctaataattaattaattaattaatttgaagttagacatacaaattaaagagaatcatatacaagaaataaatcggtgttaattttgcagatagatttagagatagagatgaagtagcaagctc

SEQ ID NO: 268102 - DNA, 482 bp, Glycine max
  unsure (1)..(482): unsure at all n locations
tgtgaattactagccaccttgngttgaccatagtctttttgtataacaacataacacttaggtgttagagtatgaaggtttgagcaaccatgtgtaaaaatcattattaatttcaatgtataattatagttttggctctcttactattgtcatgttgccaatttagttcctcaattttctatttttgtaaatttaatctcttactgttttaattgtgtaatttttggttttccattaacttgacatctaatatttaattgaaatgttgacatgacaatgcatgacaatagtaggataaaaaaaatgaaaataagtctaacttcaaagaatataactaaattcatggtggcctcacttctaccccacgggaaagcaatctcttgtgcagttcctcaagtgctagaattccggaagtatcaacattcatcaagtctatcaaggacaatngcanagggtcattgggataatatcnaaattaatta

SEQ ID NO: 268103 - DNA, 379 bp, Glycine max
ctatatatatgtatatatacttatattattttttgggtaccaatatatacttatattattttttgggtacaattaattttttttttaaaactattgattacacattactgttccataacttctattcctataatcaagtaagactttaattacaatataggtgtgagtcatgtgcccatttatattcctcatttttattggcttttctagttctgttaacgtttcctttttctttaactttcctattacgttcctactactcgagagcaaagagatattaaagatttaatgtgaagaagacttttaaagaggctatcaggccaagctaggcttttaaaaagaccaggtcgagccaaaataaatgcctttgataggctat

SEQ ID NO: 268104 - DNA, 494 bp, Glycine max
  unsure (1)..(494): unsure at all n locations
ggacctataaaactaagctgacaactgctactctgccctgtcaggttactattcttgacactagacaacacttgtctaggttggggggcttggcaaactaacaaccctcatacttgtccaagctattggtagagatagggggagcaatatgagaaacataagcaacatggaacaacttaaggctaaagcttgaaactcagggaaaagcttgaagaagctttagaagaagttttggcttttacatgcccaactcctttgagtggcattagtattggttgttaacttgattgttgtatcttagtacatctgatatctatgttgcattttgcatcaccatagagtgactgaagaannattttataagttaaaaaaatttcttagacgcaaaaactcactgttttaataagttacaatgttgtcgtaatcgattacaacaacgtgtctaaagcttaaaaagttaactctcgtatcnagttaatcgattatgggagtac

SEQ ID NO: 268105 - DNA, 456 bp, Glycine max
agcttggatatttctatctctatatgtatatatttaaactaaaataagcatataaattatgcatcagatgaaaaggtagattaagtgatggccgccattgttgggcacccagtggctggcagatcaccagccctattaaaaaggtccagaatcacaaaggatatacattgtctaatactccagtggaaacagaaacgtagtaccttccacatttcagatgaaggtttctcggctctcactttgctcattttcaagcataatagaattcctgtcaaaaaatacccattataataaaaacttagtctacaaaaaagagaaatatcatgactcacaagccatcagcaatttaatcctctcacaaaaataactaccaccttttcagattataaatccatccaaaactcgtcttataatgaattctttatttgcacaaagaaaaattcctctcatgatatt

SEQ ID NO: 268106 - DNA, 476 bp, Glycine max
  unsure (1)..(476): unsure at all n locations
tgagatagaatcaggtattttgaccaagcaacttgttttatgcatcaaaagtttggttaggtcttttaattcaaagagtttatcaagtattgtaccttctaatagattctcatgtagactaagcccctgaaggcgagaaagtttggacagttctggaggaatttgacctgaaaacttattttcagaaagggataaagtgacgagttcattcaagtttccaatctttggtggaattgatccaatgaaagaatttacattcagctgcaggcgtatgagtttagacaggttctggatacctgattntatcaatccactgaagttgttcattgccaaacttagactgataagattcgagcagttatggaggtcatctggaatttccctctgtcatattggtggatccaagagacagganagtaagaataggaaaccttgaanaaccctcaggaattttccacttaaagattaacagacat

SEQ ID NO: 268107 - DNA, 434 bp, Glycine max
  unsure (1)..(434): unsure at all n locations
ccgggatcctcaaagncacctgcggctgcagctntcctttagcgctngcctttattattttcttccgaagctctaacctcattgtctctcacagtctttagatttgggagccaatccaatccttgtgtccggactctcagccacttatggtagccaccgatgatcccattactgcttcccctaagctttctgtcctttcttcatgccgcatcccatgccttgcgaactccttggagtacctttgcattggggtcactgaaaccccgtgtaatgaaaggcgtgatgctttcgtctaatggcgctcctctcatggggtagccaagctgtcttatggcgaggacgggattataattaatgcaaccccatgttcccatccagggaacatttggacatccttcgcatgaagatacaatcctgattcttccttccttcta

SEQ ID NO: 268108 - DNA, 464 bp, Glycine max
  unsure (1)..(464): unsure at all n locations
tgcctcanagagatctaggaaggataaagcagcttgtttgtccagttccgctcccgaatatgacagccaccgttttaggagcgctgagcaccagcagcgcttcgagggtatcaagggatggtcatttctccgggagcgacgcgtccagctcagggacgacgagtataccgacttccaggaggaggtagttcgccggcggtgggcatcactagttactcccatggccaagttcgacctagacatagtcctcgagtattatgtcaatgcttggcctacagaggagggtgtgcgagatatgcgatcctgggtaaggggtcagtggatcccatttgatgcggatgctctcagccagttcttgggatatcctttagtgctggaggagggccaggagtgcgagtatggccagaggaggaaccgggccgatgggtntgatgaggaggccatcgcccagttgctatgtatac

SEQ ID NO: 268109 - DNA, 384 bp, Glycine max
ggaatggttacgaacccggaatgggtttaggcaaagacaacggtggcataactagcctgataaatgccaaaggaaatcgtgggaagtatgggttaggctataagcccactcaggcagatataaagagaagcatcgtgggaaagaagagcggtagtcaaagctcgcggttgagacaagaaggtgaaggaagcccaccctgccacataagtaggagctttataagcacaggtctaggggacgaaggtcaagtggtcacgatatacgaagatgatgttccgagtacattggatttggtacgaccatgccctcctgattttcagctgggaaattggcgagtggaagaaacgcccggcatttacacgacgagcataatgtaaaccttac

SEQ ID NO: 268110 - DNA, 347 bp, Glycine max
  unsure (1)..(347): unsure at all n locations
ctcccacctctattcgctgaccacagagaggtacctggagatatttcgcatgggtcatgaaaccttggggacgttaggtggggtgctatttcccaaaaccaagcttgaccaatctcgacccaacccgggcatagtcagtcaatgagaacctgtgacgtacctaaacaggcgagctcctggcagtcaaccgataaaagaacaaagaccacaaagcaaggaggcttgtgtggtggctggccacctatggatcttgagtgatatttggaatatggcctctggtaatcgattaccaagggtgtgtaatcgattacaaggcttanaaatgaagacaggaagttaagatggtc

SEQ ID NO: 268111 - DNA, 446 bp, Glycine max
  unsure (1)..(446): unsure at all n locations
ntctcccaagtcctaaatgacatttcaagctagtattaactcactntaacctccatttaccacagaattcagacttagccttccaactctcaaagcctcactctttttccattcataacatcacattctcactttctaaccctaggttaactctacctttcatctctaacagttttccaaaagtaatttcagcatataaacatcacanacatcatcacaaaaaaccctaaaacagaatgggtatgtctaactcatccaacatggcaatttcaacaagctttcagcaaatgccttcacaaataatcatcacacagcagaaacctagcaagactacccatcatatctccccaaaccccatacccacgaaaattaaaggagaaagaagtcacccaaacctgaattttcgaagtcccactcgtagccacgcacttcacgaactccaaaat

SEQ ID NO: 268112 - DNA, 334 bp, Glycine max
gcatgcgatgatcatgatgatgggccctacccggggccttggactcatcgtgggccccaccaacggagtacctcgcgtaacacttcccgaaaaacatgtcaccgtaatccgctgtggccgcaatcgctcttcaggcgcgagatcgcctccgccacgcagtcctggcactccccgtagctcaggtcgccggtgcactgcgccacgccgtgtaccccaccggacccaccgacgcgaaagttcccaccggcggcggcgagtccggcgagcacggcgtcgcggctccccatggcgtcggggttgtacccgaccgacggcccgcacttcttcagcacca

SEQ ID NO: 268113 - DNA, 474 bp, Glycine max
  unsure (1)..(474): unsure at all n locations
ctcagctaagccatgttcaaggggaacagtcttttaacacccttaattatatataaagcagnggagaaataaggacatatatgcttctcaaatcaaagcaaaattttctatgactttgggcactaaaaagaattcctaggctagggggaatgcctactaattagcccattaaggcctaagcacatgtccaaaaagcaggttagtgattntctcaactagatcagaaagagtgatcaatataaacattaaaaaaacccacaacaaatgcaacctagccacgtatgttggatcgttgtccaatcaaaatttgtccataagagtggtggaataaacaatgcaatagaacagtactttnttttctctcaagaaactaacacaagtataagacagtaccaaagacaacacaatttaattaatcgtgtctatcaataatcctattggggttgttttaccctgtcacataaatggcacatg

SEQ ID NO: 268114 - DNA, 410 bp, Glycine max
ttcagaaaacattctcaacagtcacatctttttgtgtggttcttgaatggctatcataggcctatatatatgtgacttgagacacgaatttgacaagagtttttcagaacaaaaaaggtcttatcctcttataaagagaaatcgttttatcctcttacaaattccttgggcaaattacttgtgattcaataaggtattatttgagtgctcaaattgttcaatctatctcttgcaagagagatttcttcttctcttgttcttcattctgaaaagggattaagagaccgagggtctcttgttgtgaaagaattctaaacacaaaggaaggattgtccttgtgtgtttagaacttgtaaaaggaatttacacgatagtggaactctcaagcgggttgcttggggacaggacgt

SEQ ID NO: 268115 - DNA, 352 bp, Glycine max
  unsure (1)..(352): unsure at all n locations
tttcattctttacactgcattctaagcacccaccggnttgagtaaaaaaaggggccctatacccgagttcatgggaatctaaggagtagaggtgaatctataatcatgctaggtctctgacttgcttgataatagtgaaacctcgtctagagctttctctctttataatagtgtgtcgctggtattccatactgccacaatattattatcttgagtgatgatacctctagaaaacagccgtgtgagttatgaattgttggggagtagttattagagaccnctagatattgtcctatangttcccaaataggggcaaagagcanacatgctccatgccaattcgtctcatgca

SEQ ID NO: 268116 - DNA, 245 bp, Glycine max
gcgagaccgatacttacatgttatccatcctcacgaacccttctttaatggacgtagtggtggaagaaacttccttactccaccctactctgtctccaccatgacttagggagtttttcttttcctatctccttctttgcttttattacacttgtctgattctctttgatgatttaattggttttaatcttttaattgtgctacattgaggacaatgtgttgtttaagtatggggggaggggggg

SEQ ID NO: 268117 - DNA, 338 bp, Glycine max
  unsure (1)..(338): unsure at all n locations
tccttttggggcgccttnattttttttttttttccncacccccccacacgggcggcgctaaaggggggcctcgccattggaagtgccggaaacaggctttgtggttgaattaaggatggcctttgtggataaccgggcggggggtaaagagaaaagttgtattggctgaaaaagatattggtgggttggtgggaaatttggccgtacaggaatggccgtcacagcatgggtttctccctcatcctcaccctccttatttgccccaattttctcagtccgcctaagaggatgatcaaatttgcctcttttcggacccacattgatccttttactggcga

SEQ ID NO: 268118 - DNA, 373 bp, Glycine max
cgcgaactttgaccattggtcttccttcccgcgatgcttcttttcatgtccgcctgagtgggcttatagcctaaaccatacttcccacgatttccttgggtatttatcaggctagttatgccgccgttgttttttcctaaacccatcccgggttcataaccgttccccaacataactcgggccatcattaccgctacatcggacagacaaggctgcccaaagagggagtccacggaggaaatgctgaccacctcaaaagactggaaagcagtttctaacgattcttctacggcttccacataaggcatggaggatgggcagcttaccaagatatcttcctcgcctgacacgatgaccaagtgcccctccacta

SEQ ID NO: 268119 - DNA, 417 bp, Glycine max
  unsure (1)..(417): unsure at all n locations
tctttcatcaacgcactaagacttttcgccaccatagtgtatgtgtttatgagacaacatgccaccttgtcttagacctttatgaactcttcattttaaacacctaatcaacatctcctatttctttttatctctctctttctatcacaacataaattctatcatacctatctttttctctcattctaagtattgaataacactttgggtgtttatcaaacatttatcataatatttttagtgtgtcacgtaagaactgataattgccttttattcctatattttgttggagtttaggggaaattatgtgatacctttcgtgttttgagatnttttatgtcattnntagtgagtttaataaaagctttgttagttaggattttagttatacccttttacgcttgactttggtattta

SEQ ID NO: 268120 - DNA, 398 bp, Glycine max
  unsure (1)..(398): unsure at all n locations
aacttggctagnctacgacgacaggtttgatgaaaaccgtcttcgtattgaataattttaagacggttatacccaaaaccgtcgtaaatgcgtacacatatttacaaaaatgtcactagttatttgttaacgatggctttggtagaatcgtccttattcacgtgtcgtaaaaaaattttatgtagtagtgtaaactcccctcacctatctatatctctttgttagttccttgcggcgttgttctaagatattttaggttcatatctgttcatccaaaggtagagctctatttactaaatcaaagaaaatttaatatagatttccaagacaagggtcatatcaacttttggggtcaaatacccattttagttaaaaagaggctaaagaggtgttttgag

SEQ ID NO: 268121 - DNA, 367 bp, Glycine max
agcttatccttatggctggcctccggacttcactccccgtgcctccttctgttatttaagccaagcccctactttcgaggggcaactcccaccttatgacgactatcctgggcaagacgatgaggaaggacatacccatctcggtcccctgctccacctcaaagatccgtccccccatgaactaccccaaccaaacatagtccgccatatcccgatttcacccacacccgtaaaagaatctgttcccttcgtgagagataagggaaagattgaggcgcttgaagagaggttgagagaagtcgagggcctcagcaattacccattctcggatctagcggacttatgtctcgtacccaatatcgtcatt

SEQ ID NO: 268122 - DNA, 412 bp, Glycine max
  unsure (1)..(412): unsure at all n locations
gcagtacagaattccagagcaagtacaccacagtgctaatttcgagatagaagctctggaggcagcaagaggagcagctttgcagaaaagcctagggttcttcaattatagagagattancgagctgtacagtgattgtgaggtgctgagaagaggaggagggatcccccttcttgtgtaaggaacaattattctgtactctcaatttaatctgtgttacggtttttctgtaatggctagctaaactcccttgttggggatttctaaggaacaactgatgtaattactttaatatctaattaattgtgttttatgtgttcaatgcttctttcaatgcttaatttctgcatgctcttggtctgatcaccatttgtgtgtatagttaggtgactctagcattgcgaaatgtatt

SEQ ID NO: 268123 - DNA, 403 bp, Glycine max
  unsure (1)..(403): unsure at all n locations
ataatcacaaccatcacttttctgtcttgtttttcattatgctntagaaataagctatttgtacatgtgcatgatttggtgtgttagggctccaactccaagttccgttcacatggtgtcggtttgatattggttctcaagtttccatataatgttcttaagcactaagcacttaatattatttgggtatagaggttactttcaggtctactgttttctgtttgtgcagctacctctggtactattttatnattgaatataatatttttgctgagcaaaatatatatatatatatatatatatatatatatataattggagtaccacaggtactaagaatacatagtttggaaggaccatacagatggtttctcgaatcagacacaacaaagtctgaatagga

SEQ ID NO: 268124 - DNA, 462 bp, Glycine max
  unsure (1)..(462): unsure at all n locations
nnagctttaaataagttttaagatcatattttataaaaaaaaatgccaaataataggtcagatttaagctttatctttttaattagtgaattccagaatgaaacctactaaaaccttacctagtttcacccagctttgtttggtattggccaaaaaaatttcataattaaagtagaaaagtgaaagatttatcattttctttatttagaagtatcatgcaataacaaagaatcataacttatttgagttaaataaaaaataaaaatatataataagttcataaaattaaagttactttatcatctgcctaataaaaaaagattaattaagtttttagtttttaaatatttttcaaaatttggtgttcctgaacaaaagtttgataattagtcaaagtccccaattaattattnttgttaagaattttaattcttaaataaaagtttgacctctaaattttaa

SEQ ID NO: 268125 - DNA, 249 bp, Glycine max
ggagaatgcgtatgagttagagatcgagaccgagattgctatggaaatggcttgagcaatggtggctgaacccagagaagaaagtgtaagcggaaggattatctgcacagattctcctagagcacactagatctgattatgtcgaacagagccagctatgagcgcaagtgagaacttatatgctgaggacgcatgacagagtgtatggcaaatgacccatgatagagtggaagctcacatacgaaactt

SEQ ID NO: 268126 - DNA, 369 bp, Glycine max
gacttgtgaatgtttggctacggtagcgtttttattgtgcctgcaaagagttcagaaatggggtgaagaagaatgccatgaatctgacttgggtatggtggaatcgcagtaggctccacacccatttatacaactgttaaatcttgcagatggtctctatgatttcggcatttggatttgcatattttaagctcttccttttttcatttcttttttttaaagttggcttcgattaagatagtccacactccagagcgagacgtggtgttttgtactttgcgggggtgtgtgtgacatggcatagggactaacgcgttgagacttgagattctaacttatgggttatttttccctctcttttgaatcgtt

SEQ ID NO: 268127 - DNA, 277 bp, Glycine max
  unsure (1)..(277): unsure at all n locations
agcttgtgccacctacatagcatatttgtttcatgtttgatcaacctaggctgnnggggcaaannngagaannanncccataacccacaacaaaccaannagtaacagggcgacccaagagttacctctcatcatcagccaaaccaactatgtgagtctcaactacacctaaatcaattcacatgcgcgcttagaaaatcggtccccaagccgactatctacaccaaggaaaacaaacctgctcacgaagccctcgggagaggaatgactctctgcc

SEQ ID NO: 268128 - DNA, 360 bp, Glycine max
gactcacacgggttctctgtatctataccagcagcacaaatacagcttaaccatgaaacccaaccatcatctgctgttcacccttcgtgcgtatatttctaagtgtaaagcaaataagcaagctatacaaaaaagccaacccttaccaactccttcaacattcacgtaagtcctgtatcatcatatcaatcgatctcctttccttcacaaagagatcgaaacaatcataacgttaaacaattcaaacaagccctgggattcatctcccattcacaataagagaagtttcttcctttccctttcgcattaatccatgcccaagctctatgtttggcagatcccatgcggccacacaacaca

SEQ ID NO: 268129 - DNA, 247 bp, Glycine max
cagcctgaaccacacacaaccagatacagacacaccccggcgcgccttatatcagccaaatctcccatagcaaagaaccctacacgcatttctaacgaggcaacaaacagacagacatgcgacacgcgccagaagagcaacatgctaggcccatgaaaagactcaccttgagaaccacatcgaccgcacgcgcaaaataaaaccgaaccccgggcctggaagcatggcgcgccacacaccagcccca

SEQ ID NO: 268130 - DNA, 360 bp, Glycine max
ttacagactaattagaagttattagaaacagactcttaaccaaggatgggatggagtaagcacccttctcttctttgtggtgctctctcatcttttcatggtgtcttttggtttggcattaattctcttcctcctggctctctggtctttcatatatttcagcaataatcctctccaagtgtttttgtcaataattttatcacagatcttttagatatggtatatggatagaattgaaaatgttctcttttaatagtttctatctgcttccattagacacacttaaagcgggcttgaggaagtgtgacgaatagtgagaagtcctctcttgactatggtctatagcacaataaagacctc

SEQ ID NO: 268131 - DNA, 416 bp, Glycine max
  unsure (1)..(416): unsure at all n locations
tacaaaaaaaagtataaggtacacatattgataaaaatgaaaacataaatttaaagtgtgcaacaatgtcatttccttttagtatttcaagaatcataccgttgtttgatgcgagacttctggcacagtaaaatgagatgtattttgtttttcctgataaatctatgaattgaagagaatacacaattgaaggttatataaaatatacatgcctgaaaagatattcatgaaaatcagcacaaaaatttaaagtgtgaaaatatatgacgaggtgttttacatgcattattaaacaaattaaatgacattttcaaatgaatttttggaagaaatggaatttgtctaanacaaatttaatgtatcatagtctagtaatcctaaaactcatatatatatatatatatatatatatatat

SEQ ID NO: 268132 - DNA, 416 bp, Glycine max
  unsure (1)..(416): unsure at all n locations
cggggaactgagtgttaggagcagcttttactcgtgatgttttagccaccaccatgttccatgtttccaccgtagcgttgaatcctcaacctcacaattttctctttcaccaccatgctccatgtttccaccgttgcgctgaatcctcaacctcatatttttaagctattttcgattgtgatgttcagccatgttccatgctccatcttttaaattatctttattntattacaatttaatttaaaaacataaatatagtgaacagttttactattcacaagcaaaaactcccacaatttaacaatttaacaccgtgagtttaattggacgaacataatcaaattaatgcattttttntaaaaaaagtactaaattaaatcttttacagtaaatttgaaatcaaattgataattaag

SEQ ID NO: 268133 - DNA, 382 bp, Glycine max
  unsure (1)..(382): unsure at all n locations
ttccgagtactttggatttggtaccaccatgccctcctgatttccagctgggaaattggcgaggggaggaacgccccggcatttacgcaacaagcataatgtaaacctttacggttttaaaagctctatagttgggcctaggctttagagtttttccttttgttaaggctttgtgtcttttgtttttgaatttataatacaaggatctttcttcatctgttcctggtctctacccattctcattcatttgcatgtttacttctttttctgaaacggcagatccgatgacgagttccccgaaggtactaatacctgggacccgtctatcgacttcgagcaagaaatgaatcanacggaagatgaaggaaatgaggatgtggga

SEQ ID NO: 268134 - DNA, 378 bp, Glycine max
  unsure (1)..(378): unsure at all n locations
aacaatgtcattactcagccaataaacaaacctcctccttacccaccacccagttatccacaaaggccatccctaaatcaaccacaaagtctgtctaccgcacttccaatgacgaagaccacctttagcacannccttttnnnaatanttnaaaaaaaaaaaaaaaaaacaccaacaaaaaggaattntgcagcaaaaagcctgtagggttcaccccaaattccgttgcatatgctaaacttgatcccatatctacttgataattcaaatggtagccataaccctagccaaggttcatcaacctccatttctccgagaaacgactcgaacgcaacgtgtgcttgtcacggagaaaccccggggcgttccattgagcat

SEQ ID NO: 268135 - DNA, 475 bp, Glycine max
  unsure (1)..(475): unsure at all n locations
ctgcggcatgcaagctttagcctaaggtggnctttatgtttcattttgttatgtngangctccacctatctctaacacaacaagggtttttgtggaaaatattgatctgattgtgtctttctttagtcatttttctgtgtatggtagtacacatcttttggttacgcatgaatcgattagatacccaaagcatatggaaagttattctaatgtttttcaagtgattttgagtcattctaaaccgttatgatgttcgtagagtcagattcatgtcttcaccattataatgtagactctaatgcagcttcagtttaaagttgtttgttcattgtagcctttgantaaatttatatgtaaggccttcttgaagtttttgcaacagggtaagattgagatcttcaaaggaagcactgaattcatcaaaagatgggcttctttcaaatcttcttaagcttctcacttgaaagtataattg

SEQ ID NO: 268136 - DNA, 438 bp, Glycine max
  unsure (1)..(438): unsure at all n locations
ctttcgatattcatgtctctgaacccttacaatcagtatatgtgtcttgaanaataattaaatttgttcgatctattatttaaataataaaaattagagtagatacctattttgttcttgagaaattagatgataaagatgttggtaaaaactctatcataattcttataattaatcacatatataagtcatatggtccttttttataaattatgtatagcatatgtatgaattaacgagactaataaaaattgatattttgtttatattttgtaaaacacataagtgccaacagctatttggtttaacttttattcatgtattcaatatgttttagttttggcataatcaacaacctttatatttttatatttcaagttttcaaaatttaataatataaggtgaaaaaaacgtaacattctatatgatgataccaat

SEQ ID NO: 268137 - DNA, 180 bp, Glycine max
caaaaaaaaacccaaagggggggaaggaaatcaacagccaaaaaacaagaaccaaaaggaaccgtcttagccaaagaaccaccacaggcgcaaacccgccacactccaccgaacagaaaccaagatcaccaacttcattactggccaagaaaacacaacaaacaaaaacaccaccacagg

SEQ ID NO: 268138 - DNA, 345 bp, Glycine max
  unsure (1)..(345): unsure at all n locations
tttttttttatacgaaatgtcaacgaattgtgcacgatatatttaagcaccacatcttgtacagctttctgagtctctgttgatggtgcaatgaaggatctgtatacagntttttttttatcagccataatatttatattaatgaaggaccaaaggtactagaagtacaatatataactcagaaaaggtccagaaacaaataaaattttcactggaccagaactgattttatagacaaaataacacaagctctgctctgatgagctatgttgctctatatagaaactctatcctgatattggaagatcactgattatagtgggtagtgaaatccttctccaaatt

SEQ ID NO: 268139 - DNA, 380 bp, Glycine max
gcttcttaagaagattcctaaagaagctagttcttatctcacatacctttctaatagctaagctcacctccttgagatgagaagctagaacttagctacacaccccctataatagctaagctcacccccatgacaaaaaccatgaaaatacaaaaaaaggtccttactacaaagactactcaaaatgccccgaaatacaaggctaaaaccctatactactagaatggccaaaatataaggcccaaacgaaggaaaaacctattctaatatttacaaagataagcgggctcatacttaacccatgggctcgaaatctaccctaaggctcatgagaaccctagggcctacccttggatctctagcccaatctacttggagtc

SEQ ID NO: 268140 - DNA, 406 bp, Glycine max
ttacacaattttggtgagaccatgcctgtgtttcacgagtctctgctttaatcgattaccagttatctataactgattacacaattttgttgagaccatgtctgggtttcatgagtctctgctttaattgattactaggtgatcgtcattcattacatcattctttaaaatgttgccaagagtgatcaacatcactttaatcgattaaatcaagaatctaatcaattacattgctcttgaacgttttccaggttttgggaagaacactttaatctattaaaatgataatctaattgattacttctttgaaataatcaattactttggcaatttaatcgattatagatggctataattattttatctataaataaccacctttgtgtctcactttcaataacataac

SEQ ID NO: 268141 - DNA, 360 bp, Glycine max
  unsure (1)..(360): unsure at all n locations
aaagaggaaaaggngatcatcatactatgacgaatgacaaaactggggcaaatgaagagggtgagaatgagggacaggcccatgctgagactgccattcctatacagccaagtttcccaccaacccaacaatgtcattactcaaccaataacaaaccttctccttacccaccgcccagttatccacaaaggcaatccctaaatcaaccaccaagcctgtctaccgcacttccaatgacgaagaccacctttagcacanaccaaaaaacaccaccataaaggaattgtgcagcacaaagccctgagggttcaccccaaattccgtttcatatgctaaactcgatcccatatccactcgata

SEQ ID NO: 268142 - DNA, 418 bp, Glycine max
acctataaaactaagcttaggagaaccattaaaccaaggagttcctaacattaatttttgatgaagcttcgcgaatatccccattgaaaaacctttattcaaacctttcaaaggtagtgagaaggataaacgaataattagggaactttgaaaaactaaatccttaattgaaagcgtatgtgacaaccatagtgaaatactaaacaagaatggtagtttacttaaggtcattccagataccctcaagcctcggaaaatacttccaaaatggtaacaagaagtacctccaaattagttaatgttattaatgaagatagtgaccaaaactcagattacacaactgagataggatcagtgtcagaaaagaatataaatccaattaatttcaaacacctgaaaacatcctcccattatatta

SEQ ID NO: 268143 - DNA, 404 bp, Glycine max
  unsure (1)..(404): unsure at all n locations
ttcaccacnaatgtaggagatgtcattctgtccttccttcatcctgagaacatagtccttgaggctggtcatctcatcaccacttagtggagtcatacctgagcaattcagctagctttgtcttgttctgagaatcctcatgaataccaagtttcaggttcttagagaatccttcataaaacttgttatagtcttccttgttccaatgaaatttcaaagaacatctcaatgcccttcttgaccaagttcatcctgatgactttcaggatcttgttttgctgcaacatttctctaaaaatgttcagaggaagatcctcataacaaaggatacccttaacaaagctaagatattcaggcatcaactcctcacagntgtccatgatgaagacacggcgaacatacaa

SEQ ID NO: 268144 - DNA, 453 bp, Glycine max
  unsure (1)..(453): unsure at all n locations
tctcatctntagagtgtgcgcccatcttgggacagtatatctntagatggnntttgggacaagtcgtccctttatacttgtcgaagtccggcactttgaacttcggggggataacaacatcgggtactaagcgaagatccgtcatgtctgcgaacggatagtccccaaatccttccacggccctcaatctttcctcgaggagatcgagctttctcctttcttcagttgccggnggcggtccttccgtggacaaaactattggttgtgtcgcgatgttgggttgaggcaacgtgctgggtgccggcccttcggggatcggnggataaaactcgacatcccttcgagcatagtcttgagggtctntgtggacctcgtcgggctgtngaggaggctctctntcaaggacgggagaagcaatatggcccgcatcgtctttgcagatgggtggtgagt

SEQ ID NO: 268145 - DNA, 289 bp, Glycine max
aaccaaatataaacacaccaccaattgaaaataatagtaattgaatttatgactttcaaataaatgaataatttattgtaccgatttggataactgtatgcagcattatttttatagtataaatgtattaacaatgtacactcttattgtatcttaaaatatttcttattgtggtttattaatacccttatactaaaaaacaataatttgaccttagcaaaatcttgtattatacatagctcaattgccatatgtatagacaaatacctttatttatttgtctaaattt

SEQ ID NO: 268146 - DNA, 427 bp, Glycine max
  unsure (1)..(427): unsure at all n locations
atgctatgctgcaagattggatgagaaactttgaaatgacgattcctcttcttgaggatggaatcaagttgcttgtgtatgtaggggaaaaagatctcatatgcaattggcttggtgaatctactaatttatttatttgaaacaaaatggttttagtgttggaaaagctatatgtgattataaattangaggaatgctagtaattctcttttgacactctctttctttctattactggttactattgaccaaaatttactgaaaataaataattttgattagtatcagttctaaattggaaagaaaggtcattaaatggaaaatgaaattcattaaaattaataatcttcaataaattttaactaatcattaaaatagtagtggttgaaagacagtgtcaggaaaagtatcgttacattctcataat

SEQ ID NO: 268147 - DNA, 197 bp, Glycine max
tcccatatatatatgagggataacctctacattgtccgacacgtgtacacccccttaaaatccccactcttaagagcactagcagactattaataaaaaaacccaccaaatatcacgcgggcaactcctaacatcctcatgtcaggagccttatatttttctcgccctacccgcaaaactcctcctcttaagagcaa

SEQ ID NO: 268148 - DNA, 450 bp, Glycine max
  unsure (1)..(450): unsure at all n locations
agcttgtagaattatggggtacccatacttgtgttactaggtggcggncgggcgatggtgcacaacaagttttccacatccacaatgcgcgcataaacccaccatcccctgttgcccacctccaactgagctcacgtactcccacgtagcccatatcctcgtttctctcaacaccgggtccccatcaatcctcccaagcttccccaacatcaaagtaatacaacattcacacagcacaagctaccacagccaagcaaaacagagcaaaggcagaaaactctgccaaaacaccaaccaaaaatcacagcttttcccactcaaagaccccagtaacaattccttcgatccaattcgttaaccgttagatcgactccaaaattttactggaagtctatagtgcataagcctacattntgaccgttgggatctactagcanacatccagaactc

SEQ ID NO: 268149 - DNA, 436 bp, Glycine max
  unsure (1)..(436): unsure at all n locations
taaatgcatgtgaaggagaaataaaagaagtggttaacatattattattatacgtactatgatttgtgccttgatttcctgtgtagtcaacatcgggttattgttggcatctttgagtgagataaggatatcaaggaaatcctctccatgaattttggacccttcatcccattctttgattcgctgctcaatgatgggatcatgatacttgcccacagtttctatggccttcttcaccttgccctcatgaccatctaagtcaagtcccctcaagcaagggacatagtcagaaactctaaagtcataaatgtatttaagcattgtgaaaatggcatcaagatgttccacttcctcactaccaggccctccatccttcttaccctccccanagtacctnctactanagttcaatttcttcatcacattgcaacaatag

SEQ ID NO: 268150 - DNA, 329 bp, Glycine max
tctattgcttagtatacaaattaaaatttgggattgtcgtgggcaggtttttactacaatccatggaaaagctgcctttttgaatgtgaaacccataaaaggcgtgccatctgttctttatcgtctgaatgattgttgctaatttaaaccttatgcttatgcattgaaatttcatagtatcattacaaacggagtgaatcagctctcttcttgcaaccgagataagttaaacctgttatagctgactatgtcaaatgtatcttttttgcatcaatgaagggtatttcccctcctcttcttattatgcactcgcgtggataacacatgga

SEQ ID NO: 268151 - DNA, 395 bp, Glycine max
cgaataacaaatctgcacctggcgccagactctgaggaataagctcctctgctgaccaccacacagacctttgcccccccgtgcaataatcagaagcatctgaacagactaaagcttatgctgcagacatctacaacagacctcctcaacctcagctgcagaatcatccacaacagaataatgataacctctccagaaacaggtacaatcccgaatggaggaatcatgccaaccttagatggtcgaatccttcacaacaacagcagcaacaacaacaaccttattctcaaaatgatgctggcccaagcagaccatacgttccttcaccaatccaacagcaacaacaacaacagccccagaaacaacaaacagctgaggcccctccgcaaccttcc

SEQ ID NO: 268152 - DNA, 406 bp, Glycine max
acaccaagaatgagtttttactcccactaaacttgtggtatacacaatcatcaactatatttgcctcaaaatcatatgaggtaatgacttgatggaacttgtaataccattgacgggaagcttgtttcaaaccataaatggatttatttagtttgcaaaccatagactttgagtcacctgatacaaagttttcgggttgcatcatataaattgtttcttcaatgtcacaatttagaaatgcagtcttaacatccatatgatgtagctctaaatcataatgagctacgagtgccattattgttctaaaagaatcctttaaagatattagagaaaaggtttctttatagttaatgccttccttttaggaaatcctttagcgactagacgagccttatatctctcgaca

SEQ ID NO: 268153 - DNA, 444 bp, Glycine max
  unsure (1)..(444): unsure at all n locations
tcagaagaaagtgatgaggtacaagccctaaaggcaaagtttgtaagagcccgggtagtcaaagagaagttcaagtccatagccatcaaagtctgaaaagagtatgatgaactaagggacgtcaatatggccaccgctgaagccttggaacgagaaaccaagaaggcccgaaaggaagaacacgaccaaagcaaagttttgaggggctntatatggcagaaatagtgagctcaagctccgaagaggtgaaaggaatcatcatgggtcaaaggcatgatcttgaaggacgagctaaaggcttgccttatgtcgaaaagaaatttgtcccaacagttaaagcgagactgaagggaatatgtgggccatcatcgatgagtgcaaagagaagctaaatctagcggcgactcacgagcaaaggctagaggatgagtacgccaagatatc

SEQ ID NO: 268154 - DNA, 466 bp, Glycine max
  unsure (1)..(466): unsure at all n locations
agcttccttgagaagctagagcttagctacactcacccatttactcaaaatgcatgaaaatacaaaaaagtcccttgaaatacaaaaaagtccctactacaaagactactcaaaatgccttgaaatacaaggctaaaaccctatactactagaatggtcaaaatacaaggcccaaaagaaggaaaaacctattctaatatttacaaagaagagtggatccaaccttgacccatgggctcaaaaatctaccctaaggttcatgagaaccctagggccttctttagtagctctagcccaagcctcttggagtcttctaaccaatacccttggggggtaggattgcatcacgatcattgtgcagagcacaatactaacaagagaaatgatgaaggatgtgatccacagtcacaactctgcagcgcctcggctccaattntccttttcttcttcttcttcttcctctctc

SEQ ID NO: 268155 - DNA, 490 bp, Glycine max
  unsure (1)..(490): unsure at all n locations
tgtagaatggctagacatgatacatgtcanggtttggtttggctcaaggataaaagggatgccccacattatttccatgacacaaatgtaaaaatgatgattgggaaattttatgcaaaactggtcatgcatgcacctatgcggacactcaagtgtcaaatttttatggtcatgtgatgctagggctcaggattcatttcctctattttagtcaacccaatgtttccaaaatatgttggtttttcagctagacaacttatttttctttttccatctttttccttacttgctctcttttttctcatttcctctcttttccatttcattntttttttcttttctatttttatttttatcatgatttttggtgggtttacatatatttttttttgacgatgttcttaaacgaagaactctacacgggtccagaatttcaaacatcattgataataatgatataaacactaacgcaacaatccaaacaaaaatg

SEQ ID NO: 268156 - DNA, 465 bp, Glycine max
  unsure (1)..(465): unsure at all n locations
ctgcggcatgcaagcttgcttctacaatagattgttgaattttattattacacgatgctcatacatggtttagaattgttcatggttgtttcatacaaaaagtatgaattgttgttggatgaaaaaattctttttcttattatgttaattgattaagagagtgagagaggttttaaaatacttaatgagttggagccattatattattagtcaaaatattaaagtggtctaatcaatataaaattatggctaagggcatatatgttatgaaaggctaattgtgtagataccattagtgatattataatttgatgaggggccaaattataattatcaaatttgggctaactaatgacagttactactctaagaaattatggtccccatttatagagaggagcggcaattntgcttttcttttctcttaatgcttatcaaaagtacaactaattcacagaagaaaat

SEQ ID NO: 268157 - DNA, 447 bp, Glycine max
ggcatgatttacattctccccctttctcaagcaaattcttaattcttcttgacatcatcaaaatcttcatgagttacattctccccctttgtcaagcaaattctttttgatatcatcaaaacctgcatgatttaaaaaaacaagctagcaattctaatgaatcatcacttcatatcccttcccttttcaaccaagttagcactacttcctataccaaaatcccaacatataaaatttacaacaactttgtacagtttataacataatatgcttaagtcaaacatttatttattcacaaagaacttgtttccctttttctttttcttttctttcttttcttttctattcaataatttaatatttaatttaccttaataccctcatttaaaaatagagtatttacatcatattagccaccaaatgatagaaatccccaacacaacacct

SEQ ID NO: 268158 - DNA, 446 bp, Glycine max
cttaattgaaacacacttatttttgcttatctaaccacttgaaggttgtaaagaactacctcatccacatatttgaatacttttttctttacattgctttgcttaagctgaacttggatccaaaagacaatcatattgcaaaaactaccaaaggggctctcccttggttgggaaccattccaacttttattatgcaccactgtttcaataacatcgctgcaggttaaagttagactattattaagagaactggaacaaaggaatgtgtctcttaaagaatcacgataggaaaatgagaaaagtgtcctccatatattaaatccaatgtttgaacagagtcccatggcactgcatataatgtcagggattaactgcagacatgagacataagatagtatgtaaaggatggttaacattcaaatcaagcagtggattatcattgagtt

SEQ ID NO: 268159 - DNA, 467 bp, Glycine max
  unsure (1)..(467): unsure at all n locations
actcagcttgaggatttggaagatgttgatgactcttccaattatcttaactttctcgaagacccattggttttccaaccatgctttacgatatgtgatggtgtatccgaacttttgtcttacaaatgtgatgaatgaaggagtggccattgctcngtttcttcaaccatcgcaaggatactttntcctacaagtttcaaattcatcttattgtgatcttgtgaaatggttgtcatgacgcatgtgtgaggcccttttatcattctaatttcccaaacttttagattttttctttcggacgctctaagtttccactgacacctttcagctgggcaacataagacccatgtatccttcgcacacctcttggctttgaaagttacatggttcttaatgtgccatacttttactgcgtgttttaggtcctccaattgacggaaccactgaccaacatacaactcgtcatc

SEQ ID NO: 268160 - DNA, 236 bp, Glycine max
  unsure (1)..(236): unsure at all n locations
ccggggggaccaaaaacatggttaaatacaccccccccaaggaaaaggcggcgacacnnagcnccaaaacncaaaacaaaaacancccaaagacgagaggggaacncaccaacaacaccacgccaaccgggcanccaacccgggagccaaatcataacaacaaaaacgcaggaacccaaataccacgggaccacggaccctttcggaaaaaaacaccccacaatcgaaaagaaaaa

SEQ ID NO: 268161 - DNA, 323 bp, Glycine max
  unsure (1)..(323): unsure at all n locations
acaaaatcttnttcttttgactcctactcaaaaaaaattataaagacattaatttcctcattatttcgctaaaaaccataataaagcgaagaaattacaataattagtaactcaaattaactatcaaattaattcaaatttcacaattatcaataacaaataaataattggcagtcaacatttacaagatacataaattaacatttcgaattacgcacaagaattaaaactatggatcttttaaagtgggaaacaaaatattttaattaacaacgaaatgtctctgagaaactaacaatacaagcttaagaaaatagcatcac

SEQ ID NO: 268162 - DNA, 433 bp, Glycine max
agcacctgcggctgcaacttctatatagctcccctttgtttttttttacttaaacatgagttaattctaccttatgtgagaagcttatttcatgtttccttcttattttccttcactataaagtgttcatagaaaagtttatccaaacatggccttaatttaaagctttttgcgcacatttttgaagatgacttccgctgcaaattcagctgagccttttttgcgctgctttcttatattcctttgcgtttccatgctgcctctgctcgcataaatttatgttacattctatctggctctctatctgagatgctctctgtatgtctcctacaagtattattttattctcttgcccttttcggaattgaaattctaatgttggtattctgatgctctgtagattttatggaggccacatcaagtcctatgaccc

SEQ ID NO: 268163 - DNA, 472 bp, Glycine max
  unsure (1)..(472): unsure at all n locations
tactggtgctcangtacgcaccttcaattctctattctttctttaaacttcaagtcatttcatgtcttgtcttgtcttctatttaagatcttctcagccgcttgaggctgctcctgagtcctggttttccctatgaagatattctaaccacatttcacaatcagacaggcatagtcatgtgctcctacctcccaatgttcaccagctctaatagaacaaggggtaaacaatctttatttctattcttaaaaaaaatccctttctcttctgcacatcacattttccgattcttgttagttagttctaataggaataacgttgtattctgcaccaggtggcttgattcaattaaaccatggtaggcctcagcctctccaatatgtngtcaatgccgccttcttggctgccctttacagngattatctcgatgctgctgatacacctggatggcattgtggacccacattcttct

SEQ ID NO: 268164 - DNA, 422 bp, Glycine max
  unsure (1)..(422): unsure at all n locations
agcttctacttatgtggcagggcgttctttcttatctttttgnctccaacgcgagctctgaccactgttcttccttcccgcgatgcctcttttcatgtccgcctgagtgggcttatagcctaaaccatacttcccacgatttccttgggttttttatcagactagttatgccgccattgtctttgcctaaacccatcccgggttcataaccgttccctaacataactcgggccatcattaccgccgtatcggacagacaaggttgcccaaagagggagtccacggaggaaatgctgaccacctcaaaagactggaaagcggtttctaacgattcttctgcggcttccacataaggcatggaggatgggcagcttaccaagatatcttcctcgcctgacacgatgaccaagtgcccctccact

SEQ ID NO: 268165 - DNA, 481 bp, Glycine max
  unsure (1)..(481): unsure at all n locations
ntccctcnttgaacaaatacccctcagccaaatagaattcatcttgtgcctttntcccacaactctcataaatgggagagaaatgttcatctaaagcatacaagtccctaatattatcaaatcctaaaattcgagctcctagggagcaaaacaatgtgtgtctcctagagagggcatcagctaccacatttgtttttccctttttgtatttgataacatatggaaattgctctaggtactctacccattttgcatgcctcttgtttaacttgctttgccctctaatgtacttaagtgattgatgatcactatgaatgacaaattccttggaaacaaggtaatgttcccaagtttggagggctcttattaaggcataaagctctttatcatangtggggtagttgagggtggcactatgaagttnttcactaaaataagcaatagggtgcccaccttgtaacaatacagctccaactcccac

SEQ ID NO: 268166 - DNA, 275 bp, Glycine max
  unsure (1)..(275): unsure at all n locations
cacagaggggtacctggaaacatgnccccggggacaggaaaccttggggacgaaaggcggggggctattgcccaaaaccaagcttgaccaatcctgacccaacccgggcatagtcagtcagcgagaacctgtgatgtacctaagcaggcgagctcctgcgcttcaacagataaaaggaacaaagaccacaaagcaagggggcttgtgtggtggctggccagctgtgaatcttgtgggatatatgggacatggcctcctggaaactattaccaagg

SEQ ID NO: 268167 - DNA, 457 bp, Glycine max
  unsure (1)..(457): unsure at all n locations
aaaaggcatgtgccctgtccttatgtactatttcttcagagctctcccatgtgaaaagaatttgcaaccaactctaaacagtgaacgtattaagtatctgtaccacacaatgaactcttgtaatttgaaaaccattcaccatgtgaaattgaatcctggcacctgattccactntcttgctttactgtaccatccaacaacactgcaaaaaaacacccaaagtaaaaaataaagaaggaaatatctttgcatctcctaccagaaagctggaacagatattgaacacatagaccatgaagctaacagctacctattcagtgtacaccgactggtgagncaaacataatcaaaatgaactgaatcttacaagccatcggaattgacaaataacacctggcacctatatacatacagcaagaaacctcataacacttactcagactacaacccaaaaagc

SEQ ID NO: 268168 - DNA, 82 bp, Glycine max
agcttctgcatgtctagagagttctttttatatatttgtccaagttccagagagcttgagagattttgtcgtgtgaagatct

SEQ ID NO: 268169 - DNA, 456 bp, Glycine max
  unsure (1)..(456): unsure at all n locations
taattttctaagtcttaacagcttattttttatacttggccttcgnttaattgtctttgggcttggcgactacgatcaacaaagtactttcgacacctactatatgttgacttgaccaacgatgttattggaatactgcgacaatctttcaacaccttattcacacattctgataggttggttgtcatgtgaccatatcttcgtccagatgtatcataagccatgctccatttttcctttgaaatgtgatcaatccatgttgctatggctggactaaattgacgaaatttttctaagttntgatcaaacacatgcttgcaaggagtgtacgctgcatcaaatttgttaccatcaaaagttgtaggtagatatgaaactcaaattagcttaatgataaaataaaccttacccaattcttgacatctcttttgttcgtgttgtgaattgcgatgaaat

SEQ ID NO: 268170 - DNA, 428 bp, Glycine max
  unsure (1)..(428): unsure at all n locations
agcttgtggattttagggattgatgtctgtnttggtttgtgcnnacngnnngagtttgcgtttgaggtttgtgttttggaagaaaaactcaaagaaaaagttttgggtttaggtgtatgtttctcttcatagagtttggccaacgaaattgttctgaggagtcatgtaggtgattgtgcgacgacatcccttctgatatcaggttttaatcctcccacaaagcaatccaatagagcttcttgtgtaattccttgtactcgattagctaaagccgtgaactgcacgtaatatgactgaactgaaccaatttgagcgagtttaaacaactgagatctangacattcatacggtgatgggccaaattctgtctctaaggctcgcgtaaaagcaatccatgttttgaatgaattctcacgagtcatcatttg

SEQ ID NO: 268171 - DNA, 441 bp, Glycine max
  unsure (1)..(441): unsure at all n locations
cgcttctatagatatgatagagagggttcacatcaataatgtggacttatcatatgctaaaagntttaggattccatgcaaccatatacatcttggatacatgtggccatgtgcatttgacttttgcttaaaaaaaccttattttctatccagaagtcccatatgtgcaatacaattttcccaaagaaaaatcatatttttggtatattagtttactaaaagaaactttcttataaactattatgaataaatcaatatggagactattgtgttcatctattttttaatctttcaaaatcctttatgttgaatagaatgaatgaatggctaaagatcaatcagtcatatgaaatagccaaatgtactatgacaaatatcctaagaatgataaacatgattttaccaagccaaatgaaccaattctgcaccataattgaacat

SEQ ID NO: 268172 - DNA, 367 bp, Glycine max
  unsure (1)..(367): unsure at all n locations
aaatgagtttttctgacttactctatactcataattccatttttttttccaatgtgggacttcttcactcatatttgacttcccagcaatgatacaaagtaaaaacaacaatcaacagtgtagtataagagtaaacaaatccttgaataatattcatctttagtagttgggtttcacttggcaaaatattcatgtgtatcatgacagattatatggtatacgtaaatgaagcaatctttttattataacccccttcccctacataaaaaaaaggttntctattttcccttgccaattggtattatatcgactgatgaaaactttaaaacaataaaggggataacttatgtcgcctttaatgtaatct

SEQ ID NO: 268173 - DNA, 399 bp, Glycine max
  unsure (1)..(399): unsure at all n locations
ttaacaacgcaattaatcatatcaagcccttcgcatctttccttcagaatttgtatatgccattcgactcttaataagagaagttttatttaatagaatctctctctctctctctctctttttaggatgcttcttcctgcaccctataagtctcaaacgtcatctgctctttttccattctaaaaaaataatccaagatgtaattctattggaaatttatggattgcaccaagttgcagccttgtctttttttttttctttttgaagttgcaacgaaggtacgggtggaaaaccagaagtccaacccgatgttgaatagagaaaaaaagatactagcccaccaacaacaaacattaccactagtccacaaaatggtgcacggcttacagntcttttatt

SEQ ID NO: 268174 - DNA, 452 bp, Glycine max
agcttgcttctacaggttcctatcaaaatattcactatcctaggggaaaattgcctaaaattattacacacaatggaagtttggtatcctattggaggctcccaacacacttccaatgaaaggcctttttgttacaaaatttgaaagcaatgaaggtaagtaaatttccaattacaaaattactaaagggtcctcaattttggtggttgttctccctttgatgattcacttaatttggagtgcttcttattccaatagctcttaaggtggttggccccttgcttcttgactcaaattcttcaagggatgacaccaatcctcctttccaattccctatatgacaactcacaaacaaggaaacaaaaagacaagcaaaaaaatgaaatgaaagctaaaccaatagagttttaacaagacaaatcttcaaggagtattcaaaaattaaataatga

SEQ ID NO: 268175 - DNA, 459 bp, Glycine max
  unsure (1)..(459): unsure at all n locations
tatagagntaagtctcgcattgggttaatcgattacgatagtactttaatcgattacactattgtttgagacaattactgatttttttcaagagtctctattttatttgattaccagatgaattaatcgattacttctctcttgtttaagttgttcagaggtgaacaagaatactttgatcgattacttaggtcatccaatcaattacattgttcttgagtgagtttctagatgttgtatgaacattntaatcgattacttggataatctaattgtttacttcattgaaatatttgattatcttacagatttaattgattacagacgattataattattttctctataaataaccagcttgtgttcacatctacagataatgagatcattagagaatactacacatgtcttanaaattacttcttagtctcaaatgaacaagatctcgtactntttttg

SEQ ID NO: 268176 - DNA, 381 bp, Glycine max
ttaatttccgagagcctaagttgtcaatttcgaggctctcgatatattatgcgcctgaatcggacctccatgttaaaatttatgaccatttgaatttctcgagagcttccgttgttgaatttcgagcgtctcaatatgtgatgtgcctgaatcggacatccgagtgaatagttatgacaatttaaatttctcgagagcttccattgttgaatttccatggtctcgatatattatgcgcctgaaacggaaatccgagtgaaacgttatgacaatttaaatttctcgagagcttccgttgctcaattctgagcgtctcgatatattatgcacctgaaccgcacatctgagtgaaaagctatgacccattaaatttctcgcgag

SEQ ID NO: 268177 - DNA, 291 bp, Glycine max
gaacaacaccatatctaaacgcgccgaatgggatccctatcggaaaagatacgaatctataacatatggtgaggcatacgagactcaataacagacgatagcctacatgtatgttctgaaataacaccatgggcgtgcatagatggatgaccatgttgaatatgtagcaagttatcgatgataactctggcaccgccgactatgtcatgtccgctgaccaaacatacccgagtctattggtgactactcaccattcttcctagacttcgtaggacagtgaaaggacacact

SEQ ID NO: 268178 - DNA, 361 bp, Glycine max
gtttgagctccaaggaatgtgtggctgaatggcggcaggcaagggaaggttggtggttggtgtcctaacctacccttcggcgggagggcgacacgtgacttgcaggtgcttcttccaataaagcaatatgcgcggagtcgccaccaacgtttatttgaggtaaacgtcgaaaaaactggaaaagacgtggtctacgaactctaagtgaaaggctcgggagttgtatttatgcacggggaaggtattagcaccccacgcgtccgtcacaagagacgacaaccttcaatcaaatatgccaatatgacttcaatctatgttaccttccccttttcacgctcttatgccttctatattttctatc

SEQ ID NO: 268179 - DNA, 362 bp, Glycine max
  unsure (1)..(362): unsure at all n locations
gctcaaaaagtactttgaccctactgacgtgattgacaagctgtatgggaatgttgcgacaatccttcaaaaccttattgatacattctaataggttggttgtcatgtggtcatatcaaccgtcttctctatcaaaagccatccgccatttttcctttgaaatgcgatcaatccatgttgctatggctggacttagctcacgaaattcttctaaattttgataaaaaaatgtgcttacaaggagggtacgctgcataaaattagttatgaataacaatnttaagtatatatggaagttaaataaacgtgaccatcaaatatgaaatcatacccaacttcttcaacatttctttctgtttgac

SEQ ID NO: 268180 - DNA, 453 bp, Glycine max
  unsure (1)..(453): unsure at all n locations
aatacctaattttattctcgttgtaagncggaatcaaggtcattggatttaccgatcctattcggatccatatccaattgtccactcccgccatcaataataatggtcactaggttaacaaatcgcaaaggaagataagaacaagacaaattctctgttataagaaataaaaaatctttgctctaaattgtgtttctccgaaaatttctggttatagttacaccttcctaaattagaatgtgtacctctcctagaaattcagctatataaattattaaaacttcgtctacagtctgtttccgactaaaacaagaaatatagaaagttaatctgctagcatgtcttcgccatgatcattactagcatatttgattatcattcttagctcatctcatgggatgaacatatataagttatctaagtatacttatcggagccctcaacctacaacct

SEQ ID NO: 268181 - DNA, 347 bp, Glycine max
gcagtgatattattgaccaaccctccgaaaccttctaccgagatgtcttgggccacatgggcctcattcagaacttttattaacaaagcccgatgaggcttggagctcatgagtaactccaacagcgagacccgggccggagttttgttgagctgttcaataaccctgaattcgctctgctgaattatacggaggaactcactggcttcctctagtgatacctcctttttaccatcctttttctccggaagacctttcgccggaatatctttattcgaagcgtggggtgcttcaccatcttgttcctccaccacttttcctttccccttgacgttcgcgggttggac

SEQ ID NO: 268182 - DNA, 272 bp, Glycine max
  unsure (1)..(272): unsure at all n locations
tatgctgcanacatctacaatagaccttctcaacctcattttcattatcagccacaacagaacaattatgacctctccagcaacaggtacaatcccgggtggaggaatcatcccaaccttaaatggtcgaatccttcagaacagcagcaacaacgacaacaaccttattttcagaatgttgctggccctaacagaccatacgtttctctaccaatccaacagcaacaacaacaacagcaacagccccagaaacaacaaacagttgaggctcc

SEQ ID NO: 268183 - DNA, 402 bp, Glycine max
  unsure (1)..(402): unsure at all n locations
agctttgtcagcgcgggttggatgtgcgtttgtgttgtcaccatganacatgaagaaacccccaggagcaatcaaattgggtgtgatcgtgccctccgaagttcgaattggggaactagcgaattgtcaaacaacccagaatttccgtggcaaacacaatgtaattcgttagtcctaaccttatcgctaggcctaggctttaggatttttcctccctgtttgggcttgtcttttgttaccataaatatatgaatatacaatccttcttcatttgttcttgccctttcatccattctcattctgctgcatgtttatttttgttgcgattaaatggtacaaatttgacaatgagtcctatgaaggtaatgataccgaggacccagacatcaattttgagcaact

SEQ ID NO: 268184 - DNA, 425 bp, Glycine max
tcctcggggccattcctgcgaaggcaaacatttggaaagttattttacaagaaatataacaatcattacaaacaagggccaaacaacacttctcatggcacgagtgtcaacatgcactttataaaataatcatattggggtcgtgctattttatgacacatacgtatttgcacacataaaaattttgtgtgaaacattttacaacacctatccatgtacatatttttttgacaaaccttttcaatgctacatcctatatatatacacacattttttggaaagcttcttttgttacctactcacaaatacacatattttgaaaaacacttttacgctacccatccaacactttgtaaggcacttcatgctatatatattcatattatgcaaggattttcatgctatatgtattcatatatatacat

SEQ ID NO: 268185 - DNA, 460 bp, Glycine max
  unsure (1)..(460): unsure at all n locations
agctngtangaatatggggcacctaatacatgtggtactaggnggcggtcgggcgatggtgcacaacaaattntccacatccacaaatcgcgcataaacccaccatcccctgttgcccacctccaactgaactcacgtactcccacgtagcccatatactcgtttctctcaacaccgggtccccatcaatcctcccaagcttccccaacatccaagtaattcaacattcaaacaacacaaactatcacagccaagaaaacagggcaaaggcagaaaactctgcccaaaacaccaaccaaaatcacagcttttctcactcaaagaccgcaataacaattccttcgttccagttcgttaaccgttggatcaactcgaatattttactggaacgctctagtacataaagctacatcttgatcgttgggatctactagaaaacacccacaactcattctgcata

SEQ ID NO: 268186 - DNA, 461 bp, Glycine max
  unsure (1)..(461): unsure at all n locations
taccagaagcgccaatcagtggactntgttgctgttgattttgcctgagctatcatgagtaaagatcgtttacccactcattaatacaactagcttattgctagcaaaatcgagtcatattcatagtcctgatgctttcaatgttaatttccttattgtggtaatgcttcttctgatgatgagatggctcttgatctgaggatgaatcttcttcaccctgaanaggatcctgcagtgcacgattgaccaaagttgaccaaaaaaagtcatctgtgtccattttttttacaaaggagtacactntttcgaatggaaacgaccttctaaggagactgcattccctactagcaatgtgttgattgatattgtagccaaattctattgctaaagggtaaaatttgcagctctatctctattgtttttagtcaaattctatcgtttaagagaaccatgaaataccc

SEQ ID NO: 268187 - DNA, 454 bp, Glycine max
  unsure (1)..(454): unsure at all n locations
agctnttatgtgaaaggatgtgactctttatttttgaatttgaatttcaatgttcaaaggcactggtaatcgattaccaaaacattgtaattgattacagctttttgaaattaattggaacgttgtaaattcaatttgaaaactttttcaaaacaattttgctactggtaatcaattacagcaatctggtaatcgattaccagagagtaaaaactctttggtaaacatgttttgagaaaaatcatgtgctacttaatttttgagaaaaactttttatacttatcttgattaagccttctcttgattcttgaatcttgagtctagaatcttgatcttgatttttgagatcttgaaccttgaatcttgattcttgactcttaactttcttcttgagtcttgaattcttcttgattcttatcttgaactcttgaattgttcttgattcactcgagtt

SEQ ID NO: 268188 - DNA, 485 bp, Glycine max
  unsure (1)..(485): unsure at all n locations
ggaccataaaactcagctgaccattgttacccctaaaggcaaagcaactttcttactatcagagagaagctcacacgatgcnaaccactcaagacagcagaaaccaataacagtgcnaaccaccatataggagaagcaacatagcttaaccatcgagagtagaagctaaacatggtgcttaaccactaagacagaagcaaaacaatatttgaatgcttaaccaccataaaggcagaggcaacacaccaatgcttaaccaaaggcagaaatttgacatcaatacttaaccaccatggacagaagcaaatgactgttttttttataaaaaaaaataaacacctaaaacctcttgatgaatggaggggacagcaatagtaaacagagaatatatatacagcagaggcaacacaccaatgcttaaccatccatggcagaaatctgacatcaatgcttaaccaccataaaggcagaggcaacacaccaat

SEQ ID NO: 268189 - DNA, 292 bp, Glycine max
  unsure (1)..(292): unsure at all n locations
agcttcattgtctaacaagccaacttacatcnagttgccccaagagactcagcataaggatgcacaggtcaaagttgagtatgtgaaaagattgtatgaccaagtgaaggtgcaaattgcaaagaagaatgaaagttatactaagcaagccaacaagaaaaggaaggaagtggtacttgaacccggtgatgatcctggacatttgaggacaaatgttttccaagaaggagggaatgatgagaatcntcancctcgccttattcactctttcggcccacgtggcgaatgacga

SEQ ID NO: 268190 - DNA, 456 bp, Glycine max
  unsure (1)..(456): unsure at all n locations
tagggatggaacacttacttgttggtgatgaacttaatctctaaacngaatcaaaaaatgcacaaaaggatgaccctatggctgcaaactcgtcaatcccgcgggtatggcttttgaaaggggggaaaagaagttcttgaatgcaaaaacgtcccccctttcgtcattcttataattcggtgcacgggtggctcgcccaggcgagctaacctgcacactttttattttttttgagaggaacattaaccatgtcccctccttgcttttagcgtcttgcttaacttgaacttacttaagctagagntaggcattgattacttatttttaaaacaaacaaaaagtaaaagaaaactgcgaatacaaaggatacggggctgccttgcagcgacgttctccgcttgttagcgtggagaaaggggccacgatctgtctgtcgtgaccccatcctcacttgca

SEQ ID NO: 268191 - DNA, 452 bp, Glycine max
  unsure (1)..(452): unsure at all n locations
agctntacattgtgtcaccaaagtctggttatacttactatcaaagngnagatcccttgagccttgaggaggtatactaagctcttggatcaattgtttgtttctcctaaaaaattgtaagtatcaaaacctcactgatcaaaatcttaaaatcataagctgagaaatatgtgcatcttagggcccgtttacttcaattttcgtttcctattttcatcttcttattgcactttttaattacaaatttttcaccttgtattcaatctatttttcattttcaaagatttatacgtgagacaatgaacgcaactcttttttgtttggtttctttgtttcctggtataaatttttgaaagtagaaaacatattaaaaacaacttcatatttttgtcaagtcaaaagtgaaaacagacaaatgaaaacanaagtaaacaaaatgaacttgatagatt

SEQ ID NO: 268192 - DNA, 491 bp, Glycine max
  unsure (1)..(491): unsure at all n locations
cggacactatgaatactcagctngtccgatttattggtataatttgcctgttccattatgtctttaatgtctttagaggttacttcctcgttgacatcttttgttttgaatggaattgccatgacaggtttattattactgtctttgatatttggtagttgatattgtgttgtgggaggtaattccgattggattaactcaccatctctcacttgccagtttgttatgacatttgttgttggatcacctatgatttcttgtttccaagggtaatctatatcctttctgatggcataagcatgaaaccaatcaaagaaaaggacattaattntgactctttcgacaaattcgtagaacttgtcttggatttgttntctgtttgtacccttgtaatgttggaaaaaccatctcctttgaggttcattctccggagaatagaaatctttcctgagggtttccttatcaatgctaaagtngtcagataacatcat

SEQ ID NO: 268193 - DNA, 436 bp, Glycine max
  unsure (1)..(436): unsure at all n locations
agcttaaggcttgagctcttatgttttttgatatttcttatccttcttcccttgagcttggttgagctcctatgaatagaaagcctctcttcatctccttccttcctcttgcttaacccatgatgtgtttcggtataaaaaccctcataagtgttgtttttggtttgtattctatgggtttggtgtgttagcacagttgattgaaggaaaaccttggatggagctcaatatcatttcattcccttatcttcttcaaaacctagctcggatgaaaacttgtaagggaagggaatcttgcctttatgattggcatacaaaacttgtgctttgggtgggattcaaattgggatngaattntggggtccttatgcagactttgtgtcgcttaagtgtgaggtatttctcgcttaagcgagactagctccanaggaaattt

SEQ ID NO: 268194 - DNA, 381 bp, Glycine max
tccatcacaaatgttgactccatcctacctagttgttctttattatagagcgtaacactcgtaacgctaggaactgaaaatttccaagaatagcgtccaactgacacgatcaaacaaatccttcatagcaaaaccttcttccatcagactttgaaagttcacccattttttaagaatgaaccaatctttaggagaagcattctttgcgtctttaattatgtgatagttgaaaccctaacaagatcacttcttttgggggtcattgttcacaaaaagattcaacctttgaatgagaaacaaagaaataatttttgaagaactaagttctcaaacgatattaaggacaccaaagatttctaagagttcaagtttttcaaaaga

SEQ ID NO: 268195 - DNA, 415 bp, Glycine max
  unsure (1)..(415): unsure at all n locations
agctttgagggtgcgcaaccctccatntttttccatagnagaacaccggtcatgtgtctactatcattgcgataatctctttctctgtttttgggggtgctacttgagttgccaagtctctccatctttgggcgtattctttgaaagattcgtgccccctttttgcacactttttgtagttgcatcctatccggagccatatcagaattgtactgacactgcctaatgaaggcaaccattaggtccttccaagaatggactcaagaaggttcctaagttagtataccaggtgacagttgtcctagtaagactttctcaggaaaaatgtatcagcagtttctcatcttttgcgtatgcccccatcttccgaccgtacatctttagatggttcttggagcgagtagtccccttgtac

SEQ ID NO: 268196 - DNA, 374 bp, Glycine max
  unsure (1)..(374): unsure at all n locations
ccaccgatcatttgtgttgtaatctcgtttaaccactggtaaaacaaaatctaactgatcgttcacgctgacagaataataataaaataatcaaaatatctttgaataaaataatcaaaaaaatcaatcggacgtttttctttagaagtttccttgaatgaattgactaataaccaaagtgaaactaaggctaanatcaacccacaaatcaagcttcgtccgcaaaagtcactcaaaaccgttttaaagtccaacgccttaaacgatcctctttgcttttatcggttaacatggaccgttcaaaagcataaaatcaacacataactttaccactntngcaagaactacgtangtctgagttcctcatcgcaatt

SEQ ID NO: 268197 - DNA, 263 bp, Glycine max
aaactttccaactccgtgacgaactccgtgactgatccccgctgcattaacttgaataacggtccacgaggatcattataaaatgatggggcaaaacaattctaatatcttgaacactgcaaaccaggaagtgatgaaaccgttcctgtacatccactggaaccagctgacagctgttccatcgacgtagaaagaagcaaccgtgaggcgaaactcctccggcgtccttgtattcaaaaaattggagatttaaaaatcatccc

SEQ ID NO: 268198 - DNA, 391 bp, Glycine max
  unsure (1)..(391): unsure at all n locations
aatttggtattgtttcttcatgagctagatgcagcaattcctgcaaggaccatgcctgttgttgcaccaccatcacaagacacgggttagtttagattttgttgatttgcatgatatggagaaagagagatataaggggtggtgtatggtatgataagagtggaataaaaaaaagtgggaaataagggcttgaaaaacgaataggtacttgaacaaatatatatatatatatatatatatatatatagctattgataaattcttggtttttctccttccaattttcttgcatacctagcacatcctaatccaaaacntaatttgatttgcttgatatttgatattttataacctttcttcattttaaattacgtatttataaattattctt

SEQ ID NO: 268199 - DNA, 481 bp, Glycine max
  unsure (1)..(481): unsure at all n locations
ctcagcttggtagaaaatggtggatatatattcacaattaanaaaaatcatttaattttttaaataaaatattagtcaaggaagttaaaaaatatttattttaaaataataagagaacataaaaaattataaataatacaattttacacattttaataaatattttttttctaattccttaactaatatcttaaggacattttgtcatatactttctccgctcttaaatataaataacaaaaatttcttattttttatttcaaatataaataaatatcaattatttatgacttatttaatgagactatctccaaaatatcattcatttatatttgatatcaaattctaataaatgatagtttaggaaaaagtttatcttttgattgaaaatgantataacttaataaaataactaattctcttaataattctgaagtatggcttttctttggcttantaatgagatcgaatggatatatat

SEQ ID NO: 268200 - DNA, 446 bp, Glycine max
gcttgagaaattaaacgacaaaactttttctttttgtccgaacgagccccgaaagatatcgagacgctcgaaattgaataccgaagcgctaagcaaattcaaacgacaaaaactttttactcggatgtctgattgagtcccgtaatatatcgaaaagctcgaatgtgaatgtcgaagctctgagcaaattcaaacaacaataactttttacttggatgtctgattgagtcccgtaatatatcgagatgctcgaaatggaataccgaagctcggagcatattcaaacaacaataactttgtactcggatgtccgattgagtcccgcaatatatcggaacgcttgaaattgaatggtgaatctctgaacaaattcaaacgacaataactttttactcggatgtctgattgagtcccgtaatatatcgaaaagctcgaaattgaatgct

SEQ ID NO: 268201 - DNA, 449 bp, Glycine max
  unsure (1)..(449): unsure at all n locations
tctacattcaatntcgagcttttcgatatattacgggtctcatttggacatccgagtaaaaagttattgtagtttgaatatgctcatggcttcngtattccatttcgagcgtctcgatatattacgggactcaatcggacatccgagtaaaaagttattgttggttgaatttgctcagagcttccgtattccatttcgagcatctcgatatattacgggactcaatcagacatccgagtaaaaaagtattgtagtttgaatttgctcagggcttctgtattccatttcgagcgtctcgatgtattacgggactcaatcagacatccgagtaaaaagttattgtcgtttgaatttgctcagagcttctacattcaatttcgagcttttcgatatattaccggactcaatcagacatcccgagtaaaagttattggtcgttgaaattgctc

SEQ ID NO: 268202 - DNA, 282 bp, Glycine max
gcagctttctcggagctttcgaatttttgactttttgttcgaggaggaggccttcttcttagctttggttttgttatgcactacattaaggtaggttagtgtaacgttaggttagtggaaccttatggtagaagacgaaacctaaggtaaaagacgagaggggagaaaacgataggaccccggaaaaaatggcggaaatcgctgacggaggagtcttccggaagaccccttaggggttcttccggaagttccggaagaacgttttccggatagttccggaag

SEQ ID NO: 268203 - DNA, 395 bp, Glycine max
  unsure (1)..(395): unsure at all n locations
catttttttcaatttcttgngaggaagaatgtggcatttacctgtggtgaanaacacaaacaagcctttgctntgctaaaaaaaaggcttactaaggcacctgttcctactctttctaaatattctaacacttttgagctaaatggatgccttgagtggagtggagttttttgttacagggtggaccctattgttatttaatgagaacttatgggccaccttaataccctacctatgaaaagagcttatgcctaatagacactccaaattggaacataccttgcttcaggaattggcattcaagtgacatcaaaacttggttcttaagggaaacaagtaacaaaggatgcaaatggtgagtactaagaaatcatatgtatcaatccaaaaggaaa

SEQ ID NO: 268204 - DNA, 293 bp, Glycine max
  unsure (1)..(293): unsure at all n locations
gctatttgtacccccattattactaaatgcactccccttctttttttttgggaattctttttccgctacgttacgaaacttcacgaatttcgtaaagatacttagttttcttcagcacgggtacgaatccttacggattatgtatttactcttttttagctttcgaagaagttacggaaacttacggattgcgcaaaaacaccttttttcgattttcgccacattacggaattccacggattgcgcaagcctgcttccttttgattnttgacacgtctcgggacttcattcat

SEQ ID NO: 268205 - DNA, 333 bp, Glycine max
  unsure (1)..(333): unsure at all n locations
ttcataagtganatcaggtgcaaccatctcccttagagtcctctcacgaagtggaataaaatagaataccgcactaacacaacacaaacacactaaacaaaagaagtaaacataaaacaactaaacataaaacacgaatcactagttattatgaacctttggcccactgctccccggcaatggcgccaaatttgatcgaggccatacccgaatcaaataaacattaaaatgtagtaactaagaagtgatcctaggtcgtctcccaacgagcaatgattaacccaacgttcataacaaatagtaggaaaatagtaacgaattgggggggggggg

SEQ ID NO: 268206 - DNA, 426 bp, Glycine max
  unsure (1)..(426): unsure at all n locations
agcttgccctggataatggcaccgntattttttgggtttatggttccacagttatagtgttttacccgtgtcactcaagtcaatcccatcaattttctccatgtgtatctaaaattctgttaacatcataatttgatgtaagagggattggtttcaggcatagttaggagtaaaaacagtcacaatcttaatccagatcttctaatttgaaggtttgattaaacataacgaaagcttggactttaaacctgaatttcaatagaaaaggcttgttatacataaagtctcgaggatcaatttgaagactggaagcagattcggcatgtaaaagattaacacttaagaatggacatggcaggaatttctacaaacttttagtttcaagaatatagtcaatatctctgtatttagtgaaagtngtatgtg

SEQ ID NO: 268207 - DNA, 445 bp, Glycine max
  unsure (1)..(445): unsure at all n locations
actaagcttacagatgaggcaatagagggagatagctatttctaaataggcttcttttatgtactcttgnaatattggtacaaaagaaattttgaatggcttacaggggctctgggtgcaggaactgatttttcaccacctgcctttcccactgaagatgatatttctgcttcagtcttttttacaggagcagcatttttagactccacttctggtttcatagcaagtcctttctctctttgctgctttatgtccacaccgaaaggaagagagaacatttataaagcatatcagtacctggtaagtaatgttctcaacttaatgtacagacatgacaagtgcaaacctcagaatntacagcatgatcttctaattntgatgcatctcttctactggatttccccttgtggaatatattcaatgcatgggacaaactgtttcacaa

SEQ ID NO: 268208 - DNA, 378 bp, Glycine max
  unsure (1)..(378): unsure at all n locations
aaaagaggcaaatttaatcatcctgcttagacgaatgagaaaactggggcaaataaagagggtgaggatgagggagaaacccatgatgtgactgccattcctatacggccaagtttcccaccaaacccaacaatgtcattactcagtcaataacaaaccacctccttacccaccacccagttatccacaaaggccatccctaaatcaaccacaaagcctgtctaccgcacttccaatgacgaagaccacctttagcacaaaccaaaaaaaacaccaaccaagaaatgaattttgcagcgaaaagcctgtangattcaccccaaattccggtgtcatatgctaacttgctcccatatctacttgataacgcaatggtag

SEQ ID NO: 268209 - DNA, 485 bp, Glycine max
  unsure (1)..(485): unsure at all n locations
tcaccttctggtcctcctcatagttgtggcatgagattatatgctctattttcatctcccactccaagtaggcctccggatcattctttcctttaaatggaggaatgttgagtttaataccatcaattcggttttgtctaggaacaccatcattccctcttctcctcctttcttcttcattatgatctctattctccatttgatccaacctctcatggagcgcatcatctcgttgtttcattaacctctccatatgttgcatcaaagcttgcatttggaattgcgaaagccccactccatcattaggattagtacctgacatctcanacaaacaaatcaaacgtaacaagacaattatagttgctgtttgaatacctcacccactcaagtgtatcacacaattatggctnttctctaatgaaacactcttgccttttaccactctacattcacttgagttcttaggcaattcaagagattatggc

SEQ ID NO: 268210 - DNA, 410 bp, Glycine max
  unsure (1)..(410): unsure at all n locations
agctttgatctgcctctatattntcaacattcttatcttccctccagaaatgagnttctggtggagggtagatggcacaaccccaactccatgaatccattcccttcctaatagcaagttaaaattagccttagactgtatcaccaagaatagagttggtcgaactatactgcctacagcaacatctacttgaatggctcccaaagaatagccagttttaccctcataattcgaaagcacaatgttgtgggcagatagatcagtgtcatgtttcccgatcttgtggagcatagatcgaggcattaagttaacagcagctcctccatctatgagcactctgttgattccaatattctcaacttttgctctgatgaaaagagggttgagatgacttttcatctganaatctg

SEQ ID NO: 268211 - DNA, 362 bp, Glycine max
  unsure (1)..(362): unsure at all n locations
ataaacttgactgagatgagaaaagatcccatagactggaaagaccgtgagttgagtgattcaagttgagtttcatcaactgacattggcctganatgagaaggaggtgaatcagcaccaaattntcctttagattcaatcattccatttctagaagaagacacctcggaaatcttctttcccaaatccacctcttggaaattcatgtttcctgaagcaggcacataggaagtcttcttttgttccatttcctcctctgggaaattcacaatntctgaatcatgcacataggaagtcttcttgggtccgatgtcctcctgaaaaatcatattntctgaagtatgcatatgggaagtcttctt

SEQ ID NO: 268212 - DNA, 430 bp, Glycine max
agcttctatggaggttggatcttttatcttattggggtccttcaatggtgattcttagccatggagttgtagtggaagataaaaggagaagaagtgagaagaggcaccatccactagggaataagccatggaagaagaaacttcaccaccaagagagtgtcttggataagaagcttaaagaggaagcttcaatggaggaagagaatgagagagaaagagaaagagaaaaagtggcatgggaatgaaggaaaaacagggagagaagttgaactttgaagtttgtctctcaagattctcattcatcaaagttgccacaagtgttacacgtgcttctatttatagcctaggtagctctcttgagaagcttccttgagaagctagtgttacacccctccaatagttaagctcactcccatgccaaaatacatga

SEQ ID NO: 268213 - DNA, 463 bp, Glycine max
tcatcttctattcaagaagaaagtgacaagaggtcttgtttgaaatacaagaagatggtgatttcagactttttgtgaagagattcaataaatttcagagaaacaaaggaaattaaaggagatcaaacttcaatcaaagaagaaaggagaagattcctccttagttctgaaatgcaatgaatgcgatcaacccgggcacttgagatttaattgtcttgtctttaaaagaagaatggaaaaatccgacaagaaaaatttcaaagataagaaagaaaataaagcatacatcacttgggaagataatgacatggattcatcaagtgattcagaaaatgaaatcataaatctgggcctcatgaccaaagactatgaaagcgaagaagaggtaatgtcttctaactatgacttatctatttcttttgatgaacttcaagtgcattcagtgtcttgcataaagaatcta

SEQ ID NO: 268214 - DNA, 424 bp, Glycine max
agcttgacaaatcggctgggttaactatttatattttaataataactttattttatcaaatcttatcttatccagattttattctatctagattttattttatcctgattttattccatctagattttatttcatccaatcttatcttatcttgtccagattttattttattttgtttatgggcttggactcaaaatagatttgtgagctttggggttgaagacctatataacaacaccaaggttttaggttagagagttttttttttcggagaggagaataattttaggattttagaattccagtttttattactgttcatgcacactgttcacgtagaataaaatttgttttctacaatttcgtttcggcttcaatctacaatttcatttctactgattaatggaaggctaagtctccaaca

SEQ ID NO: 268215 - DNA, 474 bp, Glycine max
  unsure (1)..(474): unsure at all n locations
nnttctggtgcctgctatntctcctcttctatcagttatactatctaacttgancgggtatttgtccagagctgataagcatggggttaatataataaagcatgtcaaaggaggcttgaatccaagttctcttcaccagttgcaattctatggtccacatgttggacaagcagcaaaaattgggttgatttgttctgttattgccctcactgtatgttaattcattttctgattttctccaaattattattattattattactattatttcctcagttctaagacttatgacagcaatttgatcttctgattcaggaagcaatagcggttggtcgatcttttgctttcatcaagggataccatcttgatgggaacaaagaaatgttatcaatgggattcatgaacattgcaggatctttgagttcatgctatgtggcaactggtgatttcttttgccattaatttgtgatctct

SEQ ID NO: 268216 - DNA, 391 bp, Glycine max
  unsure (1)..(391): unsure at all n locations
agcttggcaagcattttcgagggcacggattcatgtcactggncctnnngcganagctaaaaccatgtccccttgttctaaaagattctcagcctttgatccagccaaacaacctttaacacgtaaaacctgacgtcttactggatctttcttaacaagcgcctacaatatgtgaccaaaaacgattaataccaaatcaagacgatggtaacatcaaagctagttctttcatgtttcaataagtgaaagaaggtaagggaatccattaagtaaacaacaaacaaacaagagggcaacataaatgccctctactctgcttgtttgaaatacttcttgaggtaaagatggacaatagaanaaactcacaaactgaggacttgtcaccaatacc

SEQ ID NO: 268217 - DNA, 473 bp, Glycine max
  unsure (1)..(473): unsure at all n locations
gggctttactgaaatgaccatcatacccattatgacctatatatttgttgccatcacattcccatatcacctgtttcaccttctcctctgagaattgcgccacttgtagaagcaaagctttcaagattgttttgatgatgccaaagattgttcaaacaagattcaagagaaaactcatgatatgcaagaacctcacgaagaacattcagataggtataaaaaaaattgttcaaagaagaatcttttattagagtttttactctctggtaatcgattaccataaggccgtaattgattaccagaagcccaaaacagttttataactgttctacaaagtagtaatcgattactatgggcatgtaatagattaccaatggttttgaacgttgaatttcacatttcaagagtcacaacttgtgataaaacattctcaaacttgtttaatcaactacacaacantttgtaatcgatta

SEQ ID NO: 268218 - DNA, 419 bp, Glycine max
  unsure (1)..(419): unsure at all n locations
agcttgtgcctcttcacgtcttatatattaatgtagaatataganccaaagacccttaggtgctttgctgatggcttcttcccattccaagcttcaattggagtcttatcttttacagacttagttggacatctgttgagtatgtaaacagcagtgtagactgcttcagcccagaatgtgttaggtagtcccttttccttgagcatcgatctagccatttccataactatgcgattctttctctcggataatccattttgttgagaagaatatgcgactgtaagttatcgctcaatgccttcatcctcacaaaatctttcaaacttgcgagaggtgtactctttgtcgcgatcacttcttagtacttttatccattttccactntgattntcagcaagggccttgaaatttttgaatac

SEQ ID NO: 268219 - DNA, 410 bp, Glycine max
tctttccaggggttattcatatcattgacttgggcaatgactatttcttggtttctttctctaatgaagaggataaagaataaggccatgactgagggactatgtctcatttatgatcattatctagtggtcaaagaatggtcccccattcatccatccatagaggcaattgagaaagtagtagtttgggtccatgtctttagactaccgattgaatattacgatgccaaattgcttcatgctattatggatagaattgggaggacaatgcgtgttgaccgaaccactctgtatcaggaaagagggaaatgtgctagactatgtgtagaggttgatctcacacaacccttattagctctttttgaattgaacaacatgtactgcaaaattgaatatgaagagcttcattt

SEQ ID NO: 268220 - DNA, 432 bp, Glycine max
  unsure (1)..(432): unsure at all n locations
agcttgacaacccaacattatttattcttattgncgaggctggccacagcacagttaggggaaggttcgattgacctggagtctataggaaacatagaagttacttcagacggcgctgcattgtttggtgatggagaagataaccacaatgattctgaagccgccaattgaaaaattgagctcaacaaaagtccattgtctaaaaattggtgttttggtggggggtttaagtggataactcctaatagtaagaggagcaaataatgcaatgcttcaaggaacgttgctagtcaattggttgaggaattctcaattctacatggtctctgtgattttctaatgcatgccaactcgatagtgtttttatgtctcaactgaatttgtctccagcttgtggctattttatgttattgcattcgggaatgtatatat

SEQ ID NO: 268221 - DNA, 476 bp, Glycine max
  unsure (1)..(476): unsure at all n locations
tatatggatntatggaaatgacttgtgaccttatttatttgtagntntctttagcttattaaaataagcttcatggagaacctaatccaaataaactcgttttaacttggttcagtaagctccaaagttaaactcgtaaataagcactaatttgatcagagcttatagaataagttcttaattaaatagtttacctaagagttcccttaaccatcttaaatagtaaatgttatagacttccaattttgttccgcatcattntgtttatttcaattaagtttaaagtttaatcaatcaaatcctaaaatttttaaatttggtatctatggtattacatagacatatctctatcaaatgactttactggtatggagcccaagaaaatagcctattaaccatcaatttattcagagaaacccaatataaaaataaccaattgaatatttaagctactaatttctattttatttgaaatc

SEQ ID NO: 268222 - DNA, 455 bp, Glycine max
  unsure (1)..(455): unsure at all n locations
ttattctagactactaattctagttctaaatatgtttatttattaantaaactcgtcatcaatatctatatactaaagttggagtatgatgaatatactaaaatgcccatggctgagagcttgacagttgtccattttcttgactttttggtcattttatgcccctccagcttggcttggttttgtgccaccttgctgccatgtgtcatttcatggttatggtagcttggtgtgttgttgagtgattagattgccatttctagtttgggtgtgtcgcaacctacccttcggcgggagggcgacgcgtgactcgcgggatgcgtgttccacgaaaggaatacgcgcggagtcgccaccaacgtttatttgaggaaaacgtcggaannaaccggaaagacgcgatctacgaacttttaagtgaaaggttcgggagtngtatttacacacggggaaag

SEQ ID NO: 268223 - DNA, 464 bp, Glycine max
  unsure (1)..(464): unsure at all n locations
cctatagacactcaagcttgtaacccatggaagcttctaatatcttctacactctntggtgtgggccattcttggatggcgttgattttctcaaggtccacttggaccccatttctacaaactacaaaccctaagaaaactatattatctacacaaagggtacaattctctatattttcatagagggtggttttcctaaggactgaaagaacttgcctgagatgtcctaagtgatcatctatgctcctactgtacactaaaatatcatcaaaataaacaactaccaatatacttatgaaatcccttaagacatgatgcataagcctcataaaggtgcttggtgcattagtgagcccaaaaggcattactagccattcatacaaaccaaacttggtcttgaaagcgngttttcactcatcaccctctttcatcctgaattggtgataaccacttttaagatcaat

SEQ ID NO: 268224 - DNA, 451 bp, Glycine max
  unsure (1)..(451): unsure at all n locations
agcttgtggactataccttcgaccgaacacggttgcgtttttgtctangcccggattcaaggcgggctgcaacaccggctccgcttccctaactgtactggaggcggntgcggtggctttatcctctatggttttctggagttttaacatgacatccgagatggaagccatttgatcttttaaggccgatagatcagccttcatctgttcctgcacgccctcttcattatccatttttctggatcgagtggtataggggtgccttggtgttttcttagttatgatgaaattcctaaagaaataaacaatggtgagtatgccaccaaaacatgagtatgcaaatggatgattggagcacttggatccaccccaagaattttagataacgtaatgagtccagaacttctcattttataaaaagaacanagctttcatctagccaagaatatac

SEQ ID NO: 268225 - DNA, 379 bp, Glycine max
  unsure (1)..(379): unsure at all n locations
gaagcaaatttaatcatcttgcttggacgaatgggaaaactggggcaaatgaagagggtgagactaaaggggaaacccatgctgcgactgctatttctatacagccaagtttcccaccaacccaacaatgtcattactcaactaataacaacccttctccttaaccaccacccagttatccacaaaggccatccctaaatcaaccataaaacccaccttccacacaaccaatgctaaacaccaccattagcacgaatcaaaacaccaaccaaggagggaattntgcagcaaaaagcctatagaattcaccccagttctggtgtcctatgctaacttgctccattatctacttgatactgcaatggtagccataacccct

SEQ ID NO: 268226 - DNA, 344 bp, Glycine max
atactctcaagtgatcaactcttggcttcactccactccatgcttcttgtggtggttgatctttgacattctttgttggggagcgattggacaaataaacggcacatgcaacagcttcggcccaaaattcctttggcatatttttcgccttcaacatacatctaatcatattaagaatagttctattttttctctccgctaccccatcttgttgtggagatctaggaaccgctagagggcgacgaatcccatatttttcacaaaattcattaaattctcttgatgtgaattcgccacctctatcggatcttagagctttgattacataaccactctccttttca

SEQ ID NO: 268227 - DNA, 479 bp, Glycine max
ctcatatgttgctgaataattgcggcaccctatgattctcatatgggaccatctactacacagtgatcattgataactgctaaatatgagctcatttcgaaataaaaatatattgaaaatatctttaaaaatatttatttagcagctatctttcacttaaatattaagatttgatgttttttttatttatggcttgcacatttgaataagaaagatttaaagagaaaaagatcgtaaaaatatcccaaatatcaggaaatctcaagaagatatgattacacagcaaacaaatccaaaagatatcagaaatatcaaataggaagaacccctctcctagggtttcatttactcactttctttctttcacccgtcttaccccaagtcttataccccaaaagcctcaatgaccatgaatggctaaaccctttagtagggctgacacgcttaaaagtcaagcaatgtatgatgtactattcatc

SEQ ID NO: 268228 - DNA, 414 bp, Glycine max
tttcttgaacatttcttggacattccaatttgataacgtgttaatatgtcgacttttcagtttgaaatgatctcccttgatgaagctgcaaagttgttgcttggaaatgccaataatagaagtgagtgatactaaactctggtctgtttaagtaatagcttaataaaacactttcggaacaagtgcttatcctataaatattcatgtataaactatttttatataagagatataagagaagtgctatcaacacactgttattggttaaaatttacttgaactacaaaatcatgagcaaggcttattaaatagaaagtggaactcacaaaatttggtgattctcaataaatttcagtcaacagagaaactatcatgagtgtgttatggagtgtggctagcgtttctcttttatat

SEQ ID NO: 268229 - DNA, 382 bp, Glycine max
  unsure (1)..(382): unsure at all n locations
tactcaactttcaaacttgcattctaccctctgatcccttaacatacttatttctntctctaattttggttacagaaggaccggctactttcaacccctcttgaacaataaggtttaaaatgtgagcacaacattggatatgaaaaaattcaccaccacttactaaaccattagcatgcaaaaaaagtctttcccttcaataatctngcattttatcattggaagaagcattatctagagttaatgaaaatactttctgctcaatcccccattcttccaaaaaaccatatataactttagccttctcacgccccgagtgtggaggaggaaaatgagaaaaattaagccttttactattcaacttccaatttgcatcaacata

SEQ ID NO: 268230 - DNA, 408 bp, Glycine max
  unsure (1)..(408): unsure at all n locations
gctttgatgatatggtcttcgccggcaaatgttcttttgggtctgaaaagaggcaaatctgatcatcttgcattaataaatgcaaaaaaaaaaataagctggggcaaataaagggggtgaagatgaaagaaaagcgcgtgctgtgactaccattcctatacagccaagtttcccaccaacccaacaatgtcattactcaatcaataaccaaccttcttcttacccaccgcccagttatccacaaaggccatccctaaaacaatcacaaagtctgtctaccacacttncaatgacaaacaccacctttagcgtaaaccaaaacaccaaccaagaaatgaattctgcagcgagaaagccttataattcaccccaattccagtgtcctatgctgactngctcccatatcta

SEQ ID NO: 268231 - DNA, 423 bp, Glycine max
  unsure (1)..(423): unsure at all n locations
tgtgcaaatcaaatcactcctacatctcatctctagcatgcattttctttctttacccactcctcacgtttgggtttttatggaaaacactataactaaacgcgccgcaagggatccctatcgcaccagatccaaatctaaaacgatgggtgatcaagaggagacacacgaacagatgaaagccgacatgtcggctctgaaagaacaaatggcctccatgatggaggccatgttaagtatgaagcaactcatagagaagaacgcggccaccgccgccgcttgcagttcggctgccgaagcagacccgactcccttggcaactacgcaccatcctccctcanacatagtangacggggaagggacgcactgngacacgatggtagccctcacctgngatacaaacgagcggcttaccttatgga

SEQ ID NO: 268232 - DNA, 421 bp, Glycine max
agcttgctatgggtgaccgcgacttcatataattgactaaggcctgtaattagagcaagaaatcccaaggccctattggacttctctgggtccaccgggtgtctcgtaggcgcaatccctacaaactggtaaatagcatcagagattagctgagccacatgtacattcacctatgtcagtatggtgtagaccacctgacacatcggtagggggaggtctaagttatggtcgctagggagaatgttgctaagcaacaacattatccagatttgcgtgagagtggtcatgctggtgcgcatggtccccacccttctccccactatggtctgggcaaagtcctgcctcgacacgtacaacatatgggcgatagcctcttcatcgaagcgtgaagcttgacctcttctctggctatactcgcact

SEQ ID NO: 268233 - DNA, 485 bp, Glycine max
  unsure (1)..(485): unsure at all n locations
tcttatcaaggctcatcttggtggcgaagcttcttctttcttggcttattcccttggggatggggtctcctctctcctcttctcctttgccttccgctgcatctccatggtggaaaatcaccattgaaggacctcattgaagcttaaagatccaacctccatagaagccccacaagcaagcttccatcaaacactctcacacatgaatatgaactgttcaaactggttcaatatgagaccatagaagatatgcataagagatttactcgtatcgctaatcatcttgtatcattgggaaaaatatttcctagtgaagatcttatcaacaaagtgttgagatgtttgagcagacagtgtcaaccaaaagtaacagcaattgcagaatcaagagatctcactaatatctctcttgccactctctntggaaaactttaagaacatgaaattgaacttatgagactccatcaacatgaagagaatgatat

SEQ ID NO: 268234 - DNA, 436 bp, Glycine max
  unsure (1)..(436): unsure at all n locations
agcttctaggatntaggtctctcttggttttattattaagaagaggaaaagaggaagaaagcctcttgcatatgcaaaatctgaattgtgaggattaaggaagggtttatgacccttataattctccttttcacacccatgctttcactcaaaacacccaccccctaacacacatcaagacccatcaactcccaaactcattgaacattatgaaaaaccaattaattaattatgacatcaccacataaataattatttacttcaaccacttaatttaaatttaattacacaggataatttattaaaaccaattaatcaaacattatgaaaaacacggtgttacaattctccccaacaagaaaattttcatcctcgaaattttcttgtgaagaaaatatcgtaagcactgattaagcacacaactattttcctttct

SEQ ID NO: 268235 - DNA, 403 bp, Glycine max
  unsure (1)..(403): unsure at all n locations
ttctcctttgtcttccgctgcatctccatggtggaaaatcaccattaaaggacctcattgaagctcaaagatctagcctccatagaagccccacaagcaagcttccatcatatntgcaaggtatttttgctacctatctaacatatacatattggcaaggtattttggctacctatctacttcatatacatattttcaaggtatttgctacctatctaacatatacatattggcaaggtatttttgctacctatctactnccatttgaatggcattnttttgctattttattcacatatatgtacatacacttgagaggcaacttcatgctatatattcacacatattcacattcatctgaagagaaatctcatgctatacattcacacatatatacattcat

SEQ ID NO: 268236 - DNA, 460 bp, Glycine max
agctttgccaaataaacaagttccttgtgttatatactcggatcattccattttaattgtaaatacttggcgttcccctttgatataagtgtttgtaaatttcagaaaaaggaactgtgtggggaggccaacatattctcaaactcaagtttgagaaaaataaattgtgtgaagcttgtcaaaaagggaagcaagttaaaaactcttttcaaagtaaaaacgttgtttctacttcaaaaccctttgaactacttcacatagacttatttggtgcctctagaactatgagtttgggtggtaattactatggcttagttatagtagatgattactcaagattcacatggactctgtttttgaaaaccaaagatgaagctcttgatggtttttgcaaacttgccaaggtcattcacaatagaaaaaggtcttaacattgtttcacttacaaggtatcatggag

SEQ ID NO: 268237 - DNA, 355 bp, Glycine max
  unsure (1)..(355): unsure at all n locations
gatgaggaagtgctgaagggtgaaacttcctgcttttattgttgaccacagagtggtacctggagatatgtcgcggnggtcacgagaccttggggacgtcaagtggggtgctattgcccaaaaccaagcttgaccaatcccgacccaacccgggcatagtcggtcagtgagaacctgtgatgtacctacacaggcgagctcctggcagtctacagatataaggaacgaagaccacaaagcatggaggcttgtggtggctggccagctgcgaaccttgattgatatgtgggttatggcctctggtaataattaccaagggtgggtaatcgattacaacgctttaaaatgaagacag

SEQ ID NO: 268238 - DNA, 349 bp, Glycine max
  unsure (1)..(349): unsure at all n locations
agcttataagaaattcaaattgtcttaatatntatctcggatgtccgactcaggcgcataatatatcaagacgctcgaaattgacacaacggaagctgtcgagaaattcaaatggtcataacttttaactcggatgtcagatacaggcgcataatatatagagacgcttctaattgaacaacagaagctctcgagaaattcaaatggtcataacttttcacacggaggtcagatctaagcgcataatatatagagacgctcgaaattgaatagcggaagctttcgagaaattcaaatggccataacttttaactcggatgtcagattcatgcgcataatatatagagac

SEQ ID NO: 268239 - DNA, 418 bp, Glycine max
  unsure (1)..(418): unsure at all n locations
tctctatatgtgatgatcttaatcggtcatccgggttattagttatgaccatttgaatttctcaagagctctcgctgttcaatttcgaacgtcttgatatattatgcgcctgaatcggacctctgagtgaaaagttatgacctttntaattgctcgagagcttccgttgttcaatttcgagcgtctcgatttattatagacctgaatcatacatccatgtgaaaagttatgaccattcgaatttctcgaaagcttccgttgttcaatttcgagcgtctctatatattatgcgcctgaatctgacctccgagtgatatgctatgactatttgaacttcacgagagcttccgttgttaattcccaccgtttgatatattatgngcctgactctgacctccgagtgataagtcttgaccat

SEQ ID NO: 268240 - DNA, 421 bp, Glycine max
  unsure (1)..(421): unsure at all n locations
agcttgnggncaattatagttgtcactttttactaagcacttaaccaagcatttgctcaaaactcgggaccctatcttctccttttcaacttcattttctgggtgtggccacactaactgaagccacgccgttatctggttaaatatcatattcacgatgccactgtattgccttggaagttgcagatctaatgatacccttagttttattctagggatgtcgcgatctctatctgttgaacctgtgggtctagccatcttgttgtcactatgcaatggaatgtgactttgtgttatttccctgactttgatgcactttaatatttaactcttcatgggaacggcgagtgatcgatggaggaaagcatgattagtccaacaatctcaaataatcttatcaaggaatagaaggcctaatgac

SEQ ID NO: 268241 - DNA, 431 bp, Glycine max
  unsure (1)..(431): unsure at all n locations
taaggcagcatggcagagatatcctccattgtgtttctataaaacaccgaanataactgtacagtatatatgacattcgctgcaaataacatctgacatttgtatgtcagctgatatattatacaaattgtttaatacatcaatcatgcacatgtttttaagccaaaggctaccttctgttgaaatttaatatggaaatacaaaangttcccactaatttaccacatatgacttttaactatttactacctatcaaagatagatgtatattagaagtcatgaaaaagaacaatgaacaagatacatattaagatcattgaagtatccacgtgaaaaatgaaattataaattatcattcaagaatatattctcattagcaatctatccatatcactaaccatgctatattaaaaaaatgtaacatttaaaac

SEQ ID NO: 268242 - DNA, 436 bp, Glycine max
  unsure (1)..(436): unsure at all n locations
agcttaagttctaagagatctctcatccttggataaacnctnttcattttaatttccagcttcacttacttgcctctcgacacttaactnttctttttcttagataacaacacacacactttttattctttatatgtacagcttttttaaacgaagaaactgcttatttatttactatgtgtgttgttctcttcttaccattattgatgtcacccaacaaactcccccaaatttgggacaaatttgctttgaaccacaatcttgttatgaatgatgctctcctacaacctaagacaaggtagaaggagacataatttacaagctcagggttcaatcaagtaatcaaatttttcaactcaatcatgggtggcagggatatatcaattattcacagggtaagcttttggctaagtggcttggttcaatcaatcacgac

SEQ ID NO: 268243 - DNA, 429 bp, Glycine max
ctctctctctctgataaaatatcaattatgtgcgagcccgtgacagaagtcacacttttcatcatcattaggcattatctacttcaactctctctagaactggtgcttgtccgtttaataacctctgaaagattaaaacccattattgatatttttgttagtcttcacagcacatcaagatggggttatttgtccttgcaaggtgaggcagagcttactgaactaccagctgaagaacgacaagaatatttgcaatctctcggtgttagtgaaagtggtcttggcaacctaataagggcaacatatgaccttctgggtctcagaacttactttacttctggtgagaaggtaagaggacaactggcatattctctggagataatacagctagaatatcccattaaacatgtatagtgtgtaacaatattc

SEQ ID NO: 268244 - DNA, 460 bp, Glycine max
  unsure (1)..(460): unsure at all n locations
acccggatcttaagcgcctgggctgcagcatgccattgtatctttgttttatacttgtgcaatggaaattcaggtctttcatttacttcgttacacgaagcagaataagagggcgaaggctccaaatatgtccttgtgtttgcatttgtagactgaacagatggacctcccaaatgatcaatgaactttccagtgcaactaacagcttcagattcacacgcttgtgtatttataccagaagtctgccccccttgaaattctgaaagagatctagaaaagtcaccatatggagaaacaagcactggagttgtgttgcctctatcgaaccggtctaaattattatcaccaatcgtcacattggataatgattcagacttctcttctaagtgctttgatttctcttcactggaacatggctttaacaatntttgtaccgcaacatgttctagagtattagaaa

SEQ ID NO: 268245 - DNA, 406 bp, Glycine max
  unsure (1)..(406): unsure at all n locations
tagaaacaaatacttatccttcatttaattgtcttntttcttggcgaccacaacaacaacaacaaaatactttcgacacctactatatgctgatttcaccaacgttgttatgggtatgttgcgacaatccttcaaaaccttatttatacattctaagagaatcggtgtcatgtggccatatcgacgtccttctttatcataagccatggtccatttttcctttgaaatgcgatcaatccatgttgctacggctggactcagctaacgaaatctttctaaattttgataaaaaatatgcttgtaaggagtgtagcctgcatgacattagttagcaaaaaaatctgtaagtatatatgaaacttaacatagcatgaccatgataaattaaatcttacccaacttcttc

SEQ ID NO: 268246 - DNA, 273 bp, Glycine max
tccaaaaaaaattccatatggattaccttcttcaagaggtattgagcatcaaattgactttcttcctggggcttcacttccaaacaaactatcctattggtcaagtccaaaagaagcaaaggagaatccaaggccagttgatgagttcctgcaaaagggatttctagggaaagcttagcctgtttttgttctgtgacttggtccaaaaaagacaacatggagcatgtgtcaaactgtcggccataaataaatactgtaattatcatatatatc

SEQ ID NO: 268247 - DNA, 380 bp, Glycine max
  unsure (1)..(380): unsure at all n locations
ttttattgaggcaatagacttaagtatttgggaagccatagaaatggggccatatatacccaccacagtagaaagaattacaatagatggtagcacatcaagtgaaagcataacaatagaaaaacctagagataaatggtctgaagaggatagaagacgagtacaatacaatttaaaagccaaaaacataataacatctgccttgggaatggatgaatatttcagggtttcaaattgtaagagtgctaaggaaatgtgggacactctacaattaacacatgaaggaactacagatgttaaaagatctangataagcacactaacccatgagtatgaactgtntangatgaatgcaaatgaaagcattcaagacatgcaaa

SEQ ID NO: 268248 - DNA, 440 bp, Glycine max
  unsure (1)..(440): unsure at all n locations
ctgcagctggattgagaggacaaactctcagtatcttttagcatagaaaataaattgtcctctaagcatgaagaagagtattanctagcttgaaaaatttacaaagaaatactatataagcagcacattgtccactccagatccaaggccaagcaatctaacaggtcttattaccttaagaactttagaatccactgtcttaactgcaggtggcacggggaacgctaaagcacaatttggaagagggtgaattagcaccaccaccacatccttcacaatctcccttgaaatcattacatgatccatagcttaagagcttcttcttgccaaacttggccatagggacaactttggaggagcttgaagaagatgagggccacnnaaaagggtatgatgatggggatgagagaatcattttcttgataaggtcatcttggtag

SEQ ID NO: 268249 - DNA, 494 bp, Glycine max
  unsure (1)..(494): unsure at all n locations
ctataaatactaagctgacatttgatcctgggttgggtacacataacacaatgcatggtnttggtttactaactccattttttagacgccaaaattggatgacctcaatggattaaattggatgttgactaagctgcaaataactttgataagcacgcaattaacatcaccaagttaccctaaccgtttttaattggataaaattttcatttcgctttcacaattttaatttagaaatcatttaattggcaagctgatttttttccccctgtgtataagggctcttcaatttcacttttgcacttttggttggccccattcattgagaacgatcccaattttgatactggtttattaaccgtgggaatatctgaggaaatggttcgttgctttttgtgggttgtgcctttcaccagctaaggaatcatgttcatgtatttgttgtctaaaaagaagtaattatgtttagatgttttaattctaaatcaagcatt

SEQ ID NO: 268250 - DNA, 393 bp, Glycine max
  unsure (1)..(393): unsure at all n locations
atttaaacagcccttctagggttaaactaactgaaactaagcttcatccttaaatgttggactagacttaaaacaaacagcattattggaacaacatatataaaaccaaaacttaatctgtagatcccacttgtaagactaagtttcaatccttcttcaatcaagttctaaggcaacaatacatttcccaatgctaaagtcacctaactatgcatacaaatgggtgatcaaaccaagagcatacaaaatttaagcactgaaagaagcattgaacacaataaacacaatcaattagatataaagtaattacatcagctattctttagaaatccccaacaagggtgtttagctagccattacagaanaacccctaacaataatgaaattacaaaa

SEQ ID NO: 268251 - DNA, 455 bp, Glycine max
gtgatcatcaattccaaaacatatggggagtgaacacgctatatattatgcatatacattgcttgcttgtatcttgatttcacgactaatattgtcatcatcaaaaagggggagattgtagaagcatatgactttgatgttttgatgatgatcatgatgattagatgccaatgcgcttttcaagtttaaattcaagacaatgattcaagaatacacgacacaacattccgatgatcactagtattttatgaatggaattcctaaatgatatagcaaaaggtttggcctattaatgtaaggtaaaaagtgtttttcaagagatctactctctggtaatcgattaccagaggatgtaatcgattaccagtagcccaaaatggtttacaacagctattagaaatttgaattcagattttagactgtgtaatcgggtacacaatattggtaatcgagta

SEQ ID NO: 268252 - DNA, 450 bp, Glycine max
  unsure (1)..(450): unsure at all n locations
tgcaagcttcctcggggccattttctgcgaaggctattattttgaaagttagctttaccaagaaatgctactcttaaaacgaaaatggcatacaacctncctccaataaacacaaacatcaatgtaaatttagagcaagctcatgcacatactttcttacgaacattcactcgcacaagatattcttctaactaaaaaaaatgcacccatgcataatcaaggcaccttcgttacctagatcacttatatgcacttgcaaggtgtatttgctacctacatcacatgcattttctttgcgtaaattatatacatgcatactcaaggcactttggataccanaaattgcatacgtgcacattcaggtatttctaatacctatacatacacaaacttcgtgatgaatcttggctacctacacaataaggggctaccattcatgctttattcaag

SEQ ID NO: 268253 - DNA, 493 bp, Glycine max
  unsure (1)..(493): unsure at all n locations
ggacctataaaactcagcttaaagttctcctcattgataactttcaatgtggagagccaatctaatcctcgcatgtgaactcttagccatccatgataaccaccgatgacgccattttggatgcctctaagctccttgtctttcctcaacggacttctccacgccttgtggactctttgtatcaccttgagactttgcgcgcctagatccctcacaaggaaaggcgagagactttcttttgttggcgctcccctcatggggtaccctagctgtcttatggcgagtgcgggattataattaatacaacccgtagtccctatcaatggaacagtagggtagtccccacacgagaaaagaactccttgtatagaagttttaaaaacattctatacacatttcccttntaaaaacattctatacacatttcccttttaaatggtttaaaatcaaatcggacgtttctctttgggatttctcattcttaattgaactg

SEQ ID NO: 268254 - DNA, 281 bp, Glycine max
gacctttgtcacattgaacttaatgttgggtactctacaagggatacaacaggcagcgagttcaaacggcattaatacattactctttaccataatcacactaaaaaaactaaaatacctgtctttagatgcagtaataacaataggcaataattctgaacgagtgatttcagagcccatcacaggagcaagtagagagatagcatggagtatggtcactccatacaaatagtgaggattgctaatcatctccaaaacctgtttcatgcatgccaatatgt

SEQ ID NO: 268255 - DNA, 466 bp, Glycine max
acactatagatactaagcttaattcatcgaaaaaaccataatataaacttatcttctttgtacatattatcttaattatttgaagattaaccacaaatgaaaaggaggctgatatggaccaatgggtgaatccgatacgaaggcatgggcaagttttggatggtggcaagagaaagcatatgtgtagaatgatcaagttaatgatgatgttgttgctgctatgcactatacatatgttaaccatctagaaagggtttgttattatgttactgaaaacgctgcaggaaaattgtggcagcaattgatgatctgagtttgtctgtttgagtgaattctatgtggcgatgtcccacaaatcacgtggagggggctcctctattggcagttgtacaagacaaaggagtggtcatttacaatctcctctaatcccctctcagccaattatcatctatctctcacgtgggac

SEQ ID NO: 268256 - DNA, 328 bp, Glycine max
ggaccttaagcgactgggctgcagcttttcatgcctgaacacaccttatttattatatctatggcgcgcagacgctctccattcgaccgacaaaatcctttacactattcttctgaggaacccgactactaaaagacatataggttcacgacatgcgtgtgccataccattcaaagaataatgaagctcaccttatctctgacgcatttcctttatatctgaaattctgcttgtgactgcatgcgcgtccctcgctttctaccaattcttgattgcttttgcccccctgtgtccctaagctgttgagattgtgaactatcatcagaca

SEQ ID NO: 268257 - DNA, 360 bp, Glycine max
  unsure (1)..(360): unsure at all n locations
agcttatatgggtcgggtatgggtcaagtgagtctagttggtttagtgtttggggctcgagttgtgggtcaagttgatttataaaaggggaattagggtccccttcttcaaagataaggaggaaagccctggaggtgcatctatggcctcgatgatatcgntcatcataattaaagcatagcccacgctttctacgagaggcgatttcctcttgggtcaggcgcctcacggcacgaggcgggggatgagtgggtgaaggaaggagaagggaaaatggtggggttatggttctgaggggaaggggttggacaacggaatgggatggcacacgtggtggaggccgaacgagtggtattgggc

SEQ ID NO: 268258 - DNA, 476 bp, Glycine max
  unsure (1)..(476): unsure at all n locations
tagactgtaaaatgannaaaaataaaaaatcgaacgatcacttgtgaacgtgaacttatcctatttgattattccgctactttatttcattcactcatttaaaccataaacactctggtatttcatttcattgttctaaaataaaaggctccacgaacttggatatagctaataatttcattttgaggcttatggataagttgtttctatctatttctagtttaaaataattacactgaacattntatgtcatttatataatatatttaatgttatttttcattgtgtccgaatcttacaatttgaaacacattataattcacagttcaaaaattagcatggcaattcacgatatgaatcttgatttgacaaccttgctgtacttgtttatatagttgattnttcgaaaatgttattttntgttttctattttgtaccaatctggtgtacgggctatatgcttgattatgatatgc

SEQ ID NO: 268259 - DNA, 425 bp, Glycine max
  unsure (1)..(425): unsure at all n locations
agcttgcatgcatgaagacaataccatactccgatggttcaattctttgtttttgctgattactatgttgncaaactcaaccttacttcagtgccagtcatggtgagtactatatttgtttgggcctatgatttgtggagctataactccagaaattataatgagtctaacttttacgataattattataaaaataaataaatttatcatcataattataattaaataattgtataaaatattaataaattgttgatacaaatgttacttattcgaatatcatgcataaaacacatgataagaagagatattattataaatgattattcgatatagacaagtctattgtctcattgatgtttcatatccacaacgggtgtatctatatctatatatatatacccctatatatatatatatatata

SEQ ID NO: 268260 - DNA, 426 bp, Glycine max
  unsure (1)..(426): unsure at all n locations
taatgaatggctntgtgctttatctgcatgggttctcatgttgagttactttctatttcgagtcttttttaaatttgtagtttctgttcatctttgtcattattaatttgcaattggcatattcgcgatttacaatggagagttataacttacaaagatgcttcattctcgtttacctattagaaacttgcaaagttgcaagcttagattatttataatttggggattagtattacttatttaattatcatacgggtgtgctttgtttgatagagataaaagaaaggaaaatatttgcccaagtagaaggaggttgacaatgaagaagaaataagagatcttgagcgtgaggggcgtttggaaaaatccgtggtcattgagaattttgtgattcaattcatggatctcagaatganacgtgtgagt

SEQ ID NO: 268261 - DNA, 462 bp, Glycine max
  unsure (1)..(462): unsure at all n locations
accggatcttaagcacctgggctgcagcttggttcaatctatcgcatgatttgctttttcggttctggtttttgattttcaaccaaaagatcctgaagatatatatgtggcactagcggctctatatggtagagcagtgccaggtgagattaattaccgagattactagtctcacgtttacagaaagttaacttcttctgaatgctattgaatattaattaccgagattgtgcatgcatgatcaagtgtaaacagctattatttgcaaaatcttgaagatcatgatactgaagatttgtttaccacaggcagtataatactaatgctattgacctctttcacatgccacaaatgcatacaaccttatacccttaaaacatacacacatggacacacaacctcttcagagacatttattcttttatcgnttgttgctcttcagataggtgacacatactttgt

SEQ ID NO: 268262 - DNA, 465 bp, Glycine max
  unsure (1)..(465): unsure at all n locations
actcagcttctgcccaacttgccagtaacaaaccattggtgtatatgtttatgacacaactaatgcatctgcaccaatcacaatgtatggtacagatgttgctgacactggcctactacacataagcagcctagattttggggatccgctacgaaaacatgagatgcactgcaggttcgctttcacacccaaaaaaaaatcgtgttgtgtccaaacaattgaaatctcataccagcacaattccttcttgttttccttttcttttgcaggttcaagcagaggccttcattaccttggacagcaatcaatgcatcagtgggggtggttgtattactttgcttctgggntcatatttttatgcagcaattaatagaatagcaaaagttgaggcttgactatcgtcaatgagagagctgaaagttcgtgctgaagctgcagatgtggcaaaatctcaggtgtgatatc

SEQ ID NO: 268263 - DNA, 358 bp, Glycine max
aaataaggtgtgggtaaaaccttataaatcacactacattgaacatttgtatatgatattaacaatgacatctattttgtaacctagaatatctaataaaagacacatttaatagcatgtgcaagcaacttatcttaaccaggagcaaggtcacgaaccaaaccaatacacccaaatgcacatagaggagcatggtataatggacctttgaggaaataagttgatagggaattgatcaaataataagcagttaaaacaacttcaccacaaaataataaaatgatattttcatgtaacaataaatgagcacagactttgaagtttgtattgataagcagttttgataagatggggattc

SEQ ID NO: 268264 - DNA, 470 bp, Glycine max
  unsure (1)..(470): unsure at all n locations
tcctttacacaatgagaagagaaaatgaatgatagaatatatacaagaagtggagatgtctcctccaactctagaaacctcacaatctctcanaatctcatacaaagctccgcaagatggcttccttttcaagctcagctctctctcagtctctccatagccaaaaactctcaaaaaactcaaaaacccccttcagaaaatgtgatttcatcttanatacgcaatcttgtcggtggacgcgcgcttagcggatgatgagctagcttagcgcatgtaagtgacttttggcttagcgccagtcacactggctcagcctgaaggtgaagacggtgtgcttagcaagttggctntcactcaacgcctttatacaactcatccttcttccagaattgtccatgcgcttagccatcagatggcgcgcttagcgaatgatgtgcttagccagaagatgagtggcttagtgagttcat

SEQ ID NO: 268265 - DNA, 400 bp, Glycine max
  unsure (1)..(400): unsure at all n locations
atgtattaacttatggaagaagttatatgtacacacttctttcatcatattatgattcttctgaaatcttgcaagcaacttgatcagcaatgtttttctagctggcataacataactctgctggctatgcatcacaatgaagttaagagtaaattacactgatatcttctgaagtttttcagattgcacacattacactgacaccccttatacattacactaactgacatcgtgtacccctagaaagttgttttaaacgttacagaagtttgggaattatgtgcaataaaaaatctctggggtatcattgtaatttactctgaagttaattcaagaatcagggatgcacgttgcatgcggataatcaactggattntatttacttatatcnaagttgaat

SEQ ID NO: 268266 - DNA, 449 bp, Glycine max
  unsure (1)..(449): unsure at all n locations
tctaaatattgcttaacaactaaactaacgttcgtttttaacattgaaagagtaaattacgtctaaagtttttacaggacaaattttatttaatattactgttctgggtaaaatgcttggtaaatttggattttcctgaaacttgatctgagatatagtatattaaaaaaaaccgagttttttttaaaaaaaatctaccgatcttttcactcgctttctttcacgcatagttcatttgttataagaagctaacaagactntataaatgaaatgccgtttttttttttaattgataaagaaggtgacaaaacaagttgctactttgtagaccgaagaataggacagagagaaaagcaaattgctataactattaacactattttngacttattggctaattntttctggatttactaaatatgtgaattntactgaatatgagggtactc

SEQ ID NO: 268267 - DNA, 380 bp, Glycine max
  unsure (1)..(380): unsure at all n locations
atgaattgattatggcttgagagcccgtagctagaaatgttgatgagataaaagaagatgtcgaagctgaagctcaacatgagcctacacctcaatggagttcttttgagttccttatgattcaaaagatggatgctatgtttcaccttcattcagagcacttagctaatagtcacatttatttggagaacataacttccaggctagaaaacattgagactaggctgacccttagcaacctccttaactttgatgataatgaagctagttgtgtttaagggcttttttctgttggtctttctgtttgaattcaatcttatctttacttctctagtaagntattatgatggttggataagtagttatgttttcttataatg

SEQ ID NO: 268268 - DNA, 394 bp, Glycine max
cacataaggcatagaggatgggcagcttaccaagatgtcttcctcgcctgatacgatgaccagatgcccttccactacgaatttcaacttttggtggagtgtagagggaacaactcccaccgagtggatccacgggcgccccaacaggcagctgtaaggggggttaatatccattatttggaaggtaacttgacaggtgtgagggtctatctgtacagggaggtcgatctctcccttaacctctcgccgggtgccttcgaaggcacgaaccaccatggaacttggctttatgtgggaagcattgaatggtaatttctccaaagtgctcttgggcatcacgtttaaactggaaccattatcgatgagcaccttggctacaacgtggtccatacac

SEQ ID NO: 268269 - DNA, 474 bp, Glycine max
  unsure (1)..(474): unsure at all n locations
gatcttaagcaccgcggctgcagcttaccataagagtaaagtaaaataatatttaccactcaatacagaagcaaaaatcataacatttcaatgcttaatcacccatcgcaaaaactcaaaatagtgcttaaccaccatggttgaaagcttataatggcaataaattaaaccacaatagtctaaatttgtattgaaagtgaactttacacgaacaccttgtaggcacaattgtcaggtcaccaaaccaaaagaaaacttcaaaataatagcatcctcaatcaatctttcttaaaaaatttcatgcacattntatcaaacatctttcaagcattagtaccaatgaagagcaatgaccaagatctcaaaatcaagaaacaccaaaaacacctctacatcaaaccaaatagatttaatggaagaaaaaaactcttccaatgctacaaataaaggatttcatgacagttatttaaagtc

SEQ ID NO: 268270 - DNA, 464 bp, Glycine max
  unsure (1)..(464): unsure at all n locations
ttatagcaaatgccactctactccaagttcttaaaggatatgttaacattgaaacacaagtatattcacaaggaaaacattgntgtggaaggaaattgtagtgttgtgattcaaaagatccttccacccaagcataaagaccctgggagtgaaaccattccttgttcaattggagaagtcactgtgggaaagactcttattgatctgggagccaatattaacttaatgccactctccatgtgtagatggttgggagagttggagatcatgcccactaggatgactttacaacttgctgaccactccattaccagaccatatggagtaattgaagatgtgctggtaagagtaaaacattttatcttcccgatagactttgtggtaatggatatctgtgaagataatgacattcctgtaattttgggaaggccattcatattaattgcaagctgcatagttgatat

SEQ ID NO: 268271 - DNA, 464 bp, Glycine max
  unsure (1)..(464): unsure at all n locations
gatccttaagcaccgcggctgcagctttgaataaactgttcactggtaatcgattatgggaaacttgtaaccgattactagagagtaaaaactctggtaacttagaaaattttgagaaaaactcttttgaaaaacaaaactatgctatgtttgttttttgaaaaatattttcaatacttcccttgtgaagtcttcttgatttcttctcttgaatcttgaattcatcttctcttgaatcttgaaatcaaacttctcttgattcttaaatcttcttgatttcttctcatgaaacttgaaattaaacttgatcttgaacttgttgactcaatcttgaaatcattctcttaggctttttgtcatcatctttgttatcatcaaaactacttgaatcaacttgattcatcatcatgaagctggtttctacaagagggagagaaggagcacgaaattntgtacctcaaaag

SEQ ID NO: 268272 - DNA, 342 bp, Glycine max
  unsure (1)..(342): unsure at all n locations
taagctctcattcacttagtgacctatgctatcaatagaaacatgtgtcacactttttctaactccgatnaatgtgaaacttgtgagacacacttcataattcaacttctctacctcttattctacctcaatttcatgcttcctctctctcattattatactacattggaacttcctctctaagcttcttatccaacgcattctgttggtggagaagctccttattccctagtggatgacacctctttccctttatcttacactgcatctccatggttgaaaatcaccattgaaaaacctcattgaaactcaaacattcaccctccatagaatcttctcaag

SEQ ID NO: 268273 - DNA, 459 bp, Glycine max
  unsure (1)..(459): unsure at all n locations
agctntgatnaagatgatcagttggctgtataatttgttactgcagctgcaaacataagggctgcttcatttggcatccctctccaaaacctttntgaagctaaaggtattgctggtaatattgtgcatgctgttgcgactacaaatgctgtgattgctgggttgattgtcattgaaacaatcaaagtgctgaaaaatgacattaaaaattataggtatgatgtgatttctcctcctgtgtattctctattttggattggttctagtgacgaggaagtggtttcgttaagaagcattgttaaattttaaccaagatgccttgggggaaatgcttcctactttcctctgacaaattttggcagggtaaaacataattcatagtataatcatgatctggtgctaaatcagagcttacaccctgttcacttttttttaanaaaatgcttgataattatcatt

SEQ ID NO: 268274 - DNA, 408 bp, Glycine max
  unsure (1)..(408): unsure at all n locations
cacgagcttctccaggtagatattttggtagatattggaaggagtaccaaaaaatgacgtcatgtagcgggttcgtggtcccctagggtggttgtgagattgcttctttggccttagagcgttcgtatccgggaaaattccgccacttaatcctcaaaatgcccttcgctaccttttctcagtttactctgtgaagcttggttccaaagcgtgttatggctgtcctgtggaggatggaatgggaacttggaaagagaaaaaaagaaagccaacaccgcattattatgatgctgaggatattaagttaaaanagatgatggctcttgtaatttcttctgtagatcgagcagcacatgtgactcactcagggcacccatgtggtggagtttgtggatgccaggaatgatg

SEQ ID NO: 268275 - DNA, 314 bp, Glycine max
catcgagcagaggtgcatggtatacttgcgaatccctctaagcacctcttcctagtctgccacatgttgggccatgttatgagacttgacgaccatgtcatccatgtagacttcaatatttcatcctatctattgttgaagacctgatccataagcctttggtgtgtagcccttctgtttttctgtctgaaaggcacgaccctgtaacaaaaatgagtgtctttatagatgaaggcgggttttccttccctaaagggtgcattctgatttggtggtactctgaacaaatgtctatgaagctcaatatttggaac

SEQ ID NO: 268276 - DNA, 381 bp, Glycine max
tggaaagattgatcgtagaatgaatgattgaatatgcaaaacaaagccttggctttatagactcttcatgtttggtcaagacaaccatttagaagagttataacttttagaaaaacttagaaccaatttgaaaaagtcaaaaaccttttgaagagttacatcttttgatttattcagaaacagtcactggtaatcgatgtaccaaataagtgtaatcgattacacaaagcttttatgtgagaggatgtgactcttcacatttgaatttgaatttcaacgttcataggcacttgtaattgattaccacaacattgtaatcgattacaactttttgaaattaattggaacgttgtaaattcaattcgaaaactttttcaaaca

SEQ ID NO: 268277 - DNA, 386 bp, Glycine max
cgaacacgcctaatatgattattatggatgaaaatgttgtcttatttactttcttatgttaatagatattgtatggcggtataataacttgttttctgattattacctttggactatgatatttgttcttgcaggttgacacaattcctgtccttataagaaaagatgagttaaagacatggatattgactctaaaggagaacaacacttatatgatgcacaactttataatttttaacaacgagggccattataagctatgtttgcatccatataagttgatttttactggtgtcactattgtcatagaagtggaccttcctaatatcccttctaaggcatatgagtatgttaattttgatgatatcctcgctagaacctaccga

SEQ ID NO: 268278 - DNA, 385 bp, Glycine max
ttatatctaacgcaccttgtaagcaaaagaatctacagtttgaagtgtagacaatgcacaaacccaatttactgtatcctaaaatttactttaattatgaagaacggtggtgacaaggattgaattcttgaccacttggtcgtaaaatccttggtaagagccaactcttttaatagtttaagctcttagtagaggttattcatttgtagcactaaatgatgtttataagtcatatctatggtgcatatcgatgttggtaactacataccgaaaacttgatttggtgcaaacattcttgattatttgagaattggccatatttgcttatcttcttgtagggagttacacaaaataaacaataatttatatagatttatgccatttt

SEQ ID NO: 268279 - DNA, 411 bp, Glycine max
tctcaaatgctgaaacagtctcagctagggaagaacttacacatgtaaagatagaactggagtttcgttctcagagactagaaaaagaaaacaatgagatgcattcaccattggataaggaattggacaggaggtcaacttactggtcatttaagcttgagaagtaccagttacaacagcaatggcttcgtgaacaagttagagaggttgcagagcagaatttatcacttcaaagggaagtccctaactagattgaccgtaagacagacataatgtaaaacactatattattgatttgcataaacatagcagaagaaaatagggactgtgtccttacaaattctgaagacgaggagaaggagtgcaaatgttacacaagtccctaagcagattattaacaactttgcagac

SEQ ID NO: 268280 - DNA, 460 bp, Glycine max
  unsure (1)..(460): unsure at all n locations
tcaaagcccaatgatacaggtaccaaaaaattgtcaaattgtatataataattggcttacataagaaacatgttgaggaaggacaaaaagaggccaaatatcaaagaaaaatatcaaaggaagtacatcaatatatctatacaaacaatcattaatcaatctctttaactcccaaatcttcatcatttaccaaacaaaacaagttgtcacgatagctagcggaaaaaatcaaagacagatattactactactaatcaccattggtagtggtagtggtagtgacaatgctggggtggttacaacattgttcaaccatgaccacctactactaattaggttcaacaatcagcacaaccataatcacaaactanagaaagttgaaaagtttctcctacagtgcanaaggaggaagatactcacaatccacanagctttgagaaaaacataccatgagagcgag

SEQ ID NO: 268281 - DNA, 446 bp, Glycine max
catgcagcttccaaggagaagtatacctaccatctttattgtgcttaacggcatcacacagtggattagctgttccatcttcatttttgacaggcacaagagctacgggtatgcgatcataacctttattaatgtgcttgaataaatacttgatagacattgattgattgcaccattctatgttgaggtgagctcgatatttcaacaatacgtatggatcgcatggcaccatgtatttgttgtctagagctacaccatttctgtcaatatatttaccatcattacaccttctataaataggatagccatgttggtcaacaacaatttcagcttgccattttttttgggaaatatctagaacatttttcatctttcatgcatggtgactgtctggttgcaagaccaaatggaccatgcatcatatgtttcttgacacactcatagag

SEQ ID NO: 268282 - DNA, 439 bp, Glycine max
actcaagcttaactgaatttcaacgttccgaagattctaaatgtgtgtatcgattacaatatatcgcgaatcgattaccagtgtatgtgaactctgaaattcaaattcaagtgtgaagagttacattttttcttaaaaatgtattgtgtaatcgattacatgattatggtaatccattaccagtgataagttttgaataaaaagtctagagatgtaactcttccaatggttttctcaagattttctcaagggtataactcttccaatggttgtactgaccagacatgaagagtctataaaagcatgaccttgaattgcattttaacaacttttagaacttcttgaacaacttttgagaaatcctgaaacctttgcttctcaattttcttcttcttcctgtgacaaaaagccttctaagttttcttgtatctaaaccttg

SEQ ID NO: 268283 - DNA, 450 bp, Glycine max
  unsure (1)..(450): unsure at all n locations
agcttccatcaagtggtaatcagttcactttagcttcaagtaggtgttccttaaacctccattaatattttttctttaccttctcttccattgttgtttcttcatttttctccatgtatctcctcacatgtcttgttctaaatgttgttaacatgattctttagagtttccaccgattaaacttgctatagaagttagatttgattttctatggttcaaatttcttgttcttgttcttgaaccatgaattgtgttgagtttaggttcctttgagttttgtcttgttattttttgtggctgaaagctaaaccataaaattcttacaaaaatattaaagtagaagacaacctcaaaaatctagagtgacttgttcacctattgtagttntgtcatagaagtcatgtctagtcatgaaacttgtcacataagaattcttatgttgtgctgaat

SEQ ID NO: 268284 - DNA, 423 bp, Glycine max
  unsure (1)..(423): unsure at all n locations
tctccccaatttctataatagggggagaagtgaagtgaataagggttcagccccttatgcacttctctctctttcgaatttgcttggaaaaatcgtttccgtgaagaaaatccaagccgaggcgcttccgaaacgtttgcgtaacgtttccgagaggaatttcgcgaaggtttcgaccgttcttcgacgtacttcattcggtcttcattgttcttcgatcttcaacgggtaagtacctcgaaccaagcttttcgattcattctatgtacccatggtggtccacattgtgtttcgtgcatttttattctcgtttcatttactttctatacccccttttgacgtgcttaagccattntatttaagtcatttctcacttaaactaaaaataaaataaatatccaccgatcgtttgaattgtattat

SEQ ID NO: 268285 - DNA, 431 bp, Glycine max
  unsure (1)..(431): unsure at all n locations
ccttaagcaccgcagctgcagcttaaagacagtacacataatctttgtttctacaccccnccactcaatgggtgtatatatgtttgataagtgaaatctacaatgaggtgaatttgagcaaactctcacctcacacaagtctataacatcaatctaaacttgctcaaactggatttacacctaaaatctcaccgaatcaaaatttgactcctcaacacccaattttgccctaaacatggctcttggttcactctggttatttgcttttccctctacacagcctatcctttcttataagtcctagatgacatttcaagctaagattaactcactctaacctctaaatactaccaattccagatttggccttccagccctcaaaaattcactctttttacactcataacaccacattgtaacttcttacccta

SEQ ID NO: 268286 - DNA, 319 bp, Glycine max
  unsure (1)..(319): unsure at all n locations
cacgcttatcggtactatacacttcanatttacactaagtatgggatttgccgtaacgaaatgcgcttagctcaggtaagcttggcttatcgtgcggcttccaacaaaaaatttgactaagttacctgggcttagagattcagcttcgcttagccatatgcatcttagcgtggtaggcgcgcttatcgaagtctttcaagaacgcgtatttccatgaatactaatgaactctcttagcgtaacatgctcgcttagcaaggtcatcgggtgttccgaaaagacgcagaaaacacagttcattttctggacttttttgagc

SEQ ID NO: 268287 - DNA, 448 bp, Glycine max
agcttcaacattccatttcgagcgtctctatatattacgagcctcaatcagacatccgagtaaaaagttatggtcctttgtattggatcaaagcttcaacattcaatttcgagcgtctcgatatgttacaggactcaatcagacatcagagaaaaaagttatcgtcgtttgagttggctcagagattcaacattcaatttcgagcgtctcgatatgttacgggactcaatcagacatccgagaaaaaagttattgtcgtttgaattggctcagagcttcaacattcaatttcgagcgtctcgatatgttacgggactcaatcagacatccgagtaaaaagttattgtcgtttgaattggctcagagcttcaaagttcaatttcgagcgtctcgatatgttacgggactcaatcagacatccgagtaagaagttattgtcgtctgaatc

SEQ ID NO: 268288 - DNA, 454 bp, Glycine max
tcaacctagaggagacggaccattctaagtgttggagaatatcaacgacaatgcctacaagattgacttgcctagtgagtataatgtaagtgccactttcaatgtgtctgatctatctctttttgatgcagatggaggagccttggatttgaggacaaatccttttcaagaaggagggagtgatgaggacataaccaagggcaaggaccatgaagcacttgaaggtcccatgaccagaggcagacttaaacaagcccaacacgtcatagagacaaggctagtcatttgtatagctgccattgatgatgattgaaggcccaaatggagaaagatgaaggcccagaggcagaggcactaccaagactactaattgttgttgaaggcccaaactaacttgaaggcccaagttaaataagtttttagttataatttatatttattggaattttggctc

SEQ ID NO: 268289 - DNA, 394 bp, Glycine max
  unsure (1)..(394): unsure at all n locations
tgttgagctgagatgactttattatntatttggacaagtttgaatatgatgtanaagaaagtgaatgtgagctttttatccctttgaaaggcttgtatttaaaaatatttttaaaatacttttaattaatatttgaatttttatttctttattagtatatatgtgaggggtagagggtgtcacattttctctcattataaaactgataagaaatcctaaatttttctccccctcaggtccagtttttcagagatggaagttatttatatactggaggaggtaagaattgcacattttcttctctaggtctagagtttgtaacttcactctttcattgtggattttcttggactagggaaaatcaagtttgaagatgacacaactgccttttatg

SEQ ID NO: 268290 - DNA, 434 bp, Glycine max
aaatttaaacagagtgttcacgcacccagtaaaaaagaaaggcaactaatatgccaataagcaactacaactttgaccggttgtgattgatccattaaatgctaaggttataacattatagttagcttactcaaactttcaagtttcaaaaattcgaataagaaccccttccatcccaaaagcttcaatttataaaccttaaattaaaattcaatttatagaagaaaaaattgattcaccaaacttgttggtcatgataaccatattgatcaattcaaggctagtttagctgctaaagacaacattcatatacatgggtaagattattgttacatttcatgcttcaggccaacccacaaacacaaggtattgttgtctattttaacaaagagactactcctactcattacacttcacgaagctaatatgtgaca

SEQ ID NO: 268291 - DNA, 454 bp, Glycine max
  unsure (1)..(454): unsure at all n locations
gcttcttatccaaggctcatcttggnggtgaatctccttcttccatggcttattccctagtggatggagccttctctcacctcttctcctttgtcttccgctgcatctccatggtggaaaatcagcattaaaggacctcattgaagctcatagatccagcctccatagaagcccccacaagcaagcttccatcacaaatcgcttggttcttttttttttataattttggtccatatgtctagaaaattcagtaaaaatttcagctcaaaaaacgtagtcactaattcccagtaatttatacaagttcgcatgttcaagctgccagcaccagagatttcaacctagaaatcaagagtagtggttatgttgcttaaggcttggatagttacaatttgtgtttgcctatgctcaattatcttgaataaaacaattcgagagagcttaagacttattt

SEQ ID NO: 268292 - DNA, 481 bp, Glycine max
  unsure (1)..(481): unsure at all n locations
acttcaactagctgccatttgttgataatttcttgtacaagctaatatttattggtttactctgataaaatagtttcaactcaagacaaattgtagacatagctaaaaagtgaagatgatcatgttggctgagaatgatggctctgaacttaatagtaggatttattaacttatagatggatgaaaagactaggtagatgctgagaactatttccctttggatgatctcctttctaaacttactcttttttcctctattatgaatgttgnttttcctctattcatttagttaattctttgctttcataattaatagttttgtcctttgtggatttttctaatatatatgaccgagaaagaattttttgcattgacctattaaaaaatcatactaccattttcagctaccactattatgccttgatttattaatgtcatgtgaagtataatcttggatgaggattatttatgtctctactct

SEQ ID NO: 268293 - DNA, 428 bp, Glycine max
  unsure (1)..(428): unsure at all n locations
acgtgatcaatacatacatttgtatttattgattgatgaagnncgggcgcgtgaactgttctggtgtcacccaaatgcactatagttatgccatgcatgtcatctggtggtttttttatagacactacctactaaacaaacagggacaagcccactactttacttttgtggggtgacaccaacggcgatgacattactctgtctgggtttgtatatctggaggctgagcgtgttaataatattgtatgggctttggaacgatttcaaggcctacttataagaaacgatcgcctccctgttgttattgtcatttgcagagacctatcactgatgaatgcagtgaaaactgtgttccagagtgtcaaatttgtgtgcacgtttatatctataagaatggaagtgggtgcaatctctatcgtgaaaatgct

SEQ ID NO: 268294 - DNA, 388 bp, Glycine max
  unsure (1)..(388): unsure at all n locations
ctggaggaatcttcnggagggcccaagtgggcctggttgctatttgtaccaccattnttactaagtacaccccctgccttttttggtgattcttttttcgtaaagttacggaaacttacgaatntcgtaacgatacttgttttctttccgtaatgttacggaaccttgtggattacataatcatccctttttgacttacggaatgttacggaacctcactaattgtgcaacgatgcttccatttgattttcggtgtgtcacggaaccttacggattgtgcatcaatattttcttttgctttccggcatgtcccggaatttcacaaactgcctaatgatgggtgccaagcacctcataaggaccaaacaaaagttgcatgtcataaaac

SEQ ID NO: 268295 - DNA, 457 bp, Glycine max
  unsure (1)..(457): unsure at all n locations
agcttctaaacttgttaagatatcaattgtttgacattgtgcctcanatatcttaagaaggggggttgaattaagatatcacaatcttttcttaatcaaaagttctattttgattttaacccaaaaacccaagattgctttcaaaatgaactcctaaataataatgcaaattaatcttactgaatagaaataataagaaataaacaataaagaagtttaagggaagaaagattgcaaactcagatttatactggttcggccacacccttgtgtaaaatttgaattcaaatttctaatagctgttataaatcattttggccactacatcgattaccagagagtaaatctcttgaaaaaagtattgaacaaaaactcttagaaagatgaagagaaatgaatgaaagaaatcagtctttttgaatgaaaggaatcagtcttagttgtatatgaaatccat

SEQ ID NO: 268296 - DNA, 481 bp, Glycine max
  unsure (1)..(481): unsure at all n locations
tcagcttatangcgcgggtctaggagacaaagggcaagggttcgcgatatgcgtttatgatgttccgagtactttggatttggtacgaccatgccctcatgatttccagttgggaaattggcgagtagaggaacgccccggcatttacgcaacgagcataatgtaaacctttacggttttaaaagctctatagttgggcctatgctatagagtttttccttttgttaaggctttgtgtctttggtttttgaatttataatacaaggatctttcttcatctgttcctggtctctacccattctcattcatttgcatgtttacttctttttctgaaacggcaaatccgatgacgagtcccccgaatgtactaatacccgggacccgcctatcgatttcgagcaagaaatgaatcaaacggaagatgaaggaaatgaggatgtgggacttcccccagaactagaaagaatggtcgcccatgagg

SEQ ID NO: 268297 - DNA, 343 bp, Glycine max
agcttgtatggttgctggatctttcagcgttcttttcttacttgtatggagatctacaggcatggtattcggtcgccataaccctgacaagaggttatcggcctccttttccactagaatactactcatgcacagagtatccttgccaccgagagaccgccttgcattccattcttcatgaggaggctctcgtggcggaagagcatcgcctaatagaggcggctgggtgcgtctagggagactgcgggtagattctgacatagaaatagatcccgcacatggggccattttgaaagctttggttaggatgtcctaatgactcattatggttatcaggtctatg

SEQ ID NO: 268298 - DNA, 268 bp, Glycine max
tcacctatatgaacatatacccgtcagcgcagtttgacctttcttcatcttgtggaccatatttattataacatgggcagatatgatcacctgcattgccttccctatgaacgttcagggactgtcgctcattggtcctcagccaccacactgtaggaattctactcctattgcggcgtgcctatgagaagctactgcttagaggctttatcttagctcgtctgggcgaactatctgtgctcttaatgccatgtttggacataaatca

SEQ ID NO: 268299 - DNA, 405 bp, Glycine max
agcttctcccctattgtgctatatttagttgggagaagtgaagaaaaaaagggtgcagccccttaggcacttctctctctctctaaattgctgaggaaaattattttcgtgaagaaaatccaagccgaggtgcttccgtaacgtttccgtgagtaattacgcgaagattctcgaccgttcttcaagattcatcgttcgttcttcgttttcttcagtcttcaacgggtaagtaccttcaaccaagcttttcaattcactatatgcacccgcggtggtccacactttggtacatgtatttttatcctcgttttcatttactggatatactcccttttgacgtgcttaagccatttatttaagtcatttctcgcctcatctaaaaataagataaatttccaccgatcg

SEQ ID NO: 268300 - DNA, 460 bp, Glycine max
tttattcttcaccaactactccatggcttattaccttgtttttgcagacactacactctcaggtgctacaggtttttgctacagatatcccttatatttcaaaggagcttcaattcaggtcacgttgtaaacatgaatctaaggattacactcatagtgtacaggagccaatatatttctatattttataggaaacagagcaccaattttttaagaggcatcacaatgtataagatcacatgtaaaaccagctttcttccataacatgtaaaactgaagcataacaaaacttgagtgagaatcagcttttccttaaatataggggaggaaatattaccgatagtgatttatactcaaatagttcagctgaaaaaggtctttttcttctttaacattttcggctaagtcaatggacctaatcaagcctaagagagaaaaaaatttttaatcattttcagta

SEQ ID NO: 268301 - DNA, 443 bp, Glycine max
  unsure (1)..(443): unsure at all n locations
agctttacatatagaagataataaatattttctaaacataatattnttagatactaatttgtaaaaaagtatattttactttgataaggggaaacagttatttttttgcaataattgaatataagttaatattaaacattcgcattgaatttgactctaagcataatatttttttgaagaaaataaataaatgacaatcaaacatattttgtaaaatttcttaagaatatttattgaaatgtttactctgagaaaagtaatttagtttggaatatttttttgcatcaaacataaaacccaacttacaactaaactaaagaaattcaatgttataataaatattcaattacttgattntaagtntgtatttctatatcagttgcatacacaaattacaattatgtatgttgctgcaagaaatattttcgcaaggattattgatt

SEQ ID NO: 268302 - DNA, 456 bp, Glycine max
tcatgggactacctggttagtagaagtagttatacagaatctgtcagcgactcacctagctagaccgacttccaacgaaaactacatagttaagaagaaaactcaagcaaaaattaggtcaataaacagcatagaacttgatcccattgctgagaaaaagccaaatttcaaggaaaaaagttaattaaactgaaaggtgacaaagaaaaaaaagttaatcaacaatcatccaacaaattaaagtaacggtacaagtacacaaaatattagatatccaccagatcatgtgccatattactagatctgataaatctaccatcccttacaaaaaagatcaaattagaaatgaactcttactattctaatggagcaatgaagcacatatagggcttcttacaaaaagccacaagttcacataataataaatataaaaaatgaggagtcactaaataattt

SEQ ID NO: 268303 - DNA, 479 bp, Glycine max
  unsure (1)..(479): unsure at all n locations
cgggatcttgagtcacctgcggcatgcaagcttcaatgttatgacactgtcaacaatgttcatgtcggatactntgggaagatcagtgacatatttccttagaaccacttgattgttcttcacttgggtcattatagtttgtagcttagcttctggttttgacggtgttgtgtatcgtgttcaattatgttattggggataaatatctttatagatggaatagaaggaagaaaatggtaaaatcgaatgtctactatttattggcttaattaagtntttgagaatatagattggtttgaatattactatctaatattcattntttctacttaagtatctggaaaaaaaaaaaattcactttatcacatatcgttagttgtctttcattgagtgatgatgtgatagataaagtgtcatatcatcatgtcttgtcacatgcactttattgtcatatcatcaccttcaatgacatggctcgc

SEQ ID NO: 268304 - DNA, 387 bp, Glycine max
ctatagaaactcaactacctgtggtcgaatgataatgtacaccgcatgaatgtattctgctaaacgacgaattcatctatatatgtgagtccctgctgaatccaatttcatccctctgtgtagaacatgactcttatactaataaactagccgacttggatctatagcactcgcgcatgacagaacacctgtaactgcatataatgcaactgacatatatgacagttcatactggacaaaacgaagcgccacatgaggaagcctgaataagattggtatttgcagaaaaccaaagttcttgttacaccattccgcagctttatgtctgaaactttacactaggaaatgtatcaataataaactttgattagagcgcactctctatac

SEQ ID NO: 268305 - DNA, 450 bp, Glycine max
  unsure (1)..(450): unsure at all n locations
agctngtaatgtggccgggctaacaaagatatcatcattnttcttggattcaaagcttaggttctacgagagcattcattccccattttcttgacaaaccataactcattttttcacagccccaaccttattgttttgctacacttaataacacacatacttttctttgcacatggttgcttctagctctcattccacaaaataaacaaacacttttttttacaagaatgaacaatcaacaataatactggactggagcaatttactgtatactacaactcacattagcttgtgttgttattaatgtttcagcaacaaaagtttatcgaaaacactcccccaaatntgggacaaatttgtcttgatccatgagtgctctcctacaacctaagatagggtagttactcagtatcaatttcattcggctcggatttcaaattacgcttaata

SEQ ID NO: 268306 - DNA, 473 bp, Glycine max
tctcagcttcagaataagatcagattaaggctcatgattcattaatcaagagaagaattaatcaagataagtatgaaaaagttttttcaaaaactgagtagcacatggattcttctcaaaacatgtttaccaaagagtttttactctctggtaatcgattaccagattgttgtaattgattaccagaaagcaaaatggttttcaaaaagctttcaactgaacttacaacgttccaattgatttcaaaatgttgtaatcgattacaatattttggtaatcgattaccagtgtgcttgaacgttgaaattcaaattcaaatgtgaagagtcacatttctttcacaaaaaatctttgtgtaatcctttacactgatgtggtaatcgattaccagtgatagtttctgaacaaatcaaaatatgtaactcttcaaattgcttttgactttttcaacattggtcttaagttttctaaaa

SEQ ID NO: 268307 - DNA, 458 bp, Glycine max
agcttatatgatacattctctaagtgtccttttagtggaacttgatttattaaagttaacatacaatgtccaatatgctgtgaagaaacaaccatcgaaatgcattatgaaaatcaataccaaagtactaagaagctttgcatgtccaaaaggacataactaacttacataaatgctttatactgtgttagttaacttccatatgattacacagtacacatggaagcatctcgaggattattgttgttctagaaactcttatcatttgaattatcctctcgatgatcgatttgaaattttcctaatatttgaatttcaagtttctgtgttcttatagacagagaaggagaatattctggcaagagcccacaatagtacaagtagtggagcagatgatgtgttgcaacaaaaagcaactatactattagtttcctctctttctcctctccacgctacca

SEQ ID NO: 268308 - DNA, 408 bp, Glycine max
  unsure (1)..(408): unsure at all n locations
taatactgatggaagatctctttggaaccccaacattgatggctntggtggtcttcttcgtgactccttangacaatggatttcatgctactctggttcttgtggaattgctacttgtctcttcactgagctcatcgttntataccatggtgttaaccttgcatggaataaaggtattagaagtcttgcttgcgaatcagattctaaagtctctcttgagcttatcaagtttgttaatcctttgacgcatctgtattctgctagcattcaaactataagagtgcgtttggatagagaattntaactgaggaaagtaatttatcaaagaatttaaattnttgtaatctaaaattcattgtttggattnttttatgaagaatttaaattnttggaattntaaaacaaaat

SEQ ID NO: 268309 - DNA, 372 bp, Glycine max
tgacttcaatgtgtgtaccacacacagcactcagggtccaagaatcttgatcaaaaaagttcaccatctcgatcccggtgttcttcgacatatctcccactacgtttggattcaaagtgggggatgctaatgcacccctatcgatcacagacctgatatatactcttcccctcgggcaccttggtaatgagcaaagaccaatatctaacatagcccccacatgaagaactcggtcggagccatgatgatttgagtcgttgttatcgcgaaatctggtgatattggaaagattggattgagacatattccaatgattatagacaaatatttgattttggaaacgaaaatcgtttgttaccagtgcaagtccac

SEQ ID NO: 268310 - DNA, 317 bp, Glycine max
  unsure (1)..(317): unsure at all n locations
tcgtgcttacgttgtggtggcttcacaagtataatnattatttaggattatatgtattacacacacgtcatcgatcttatatttatataaatttaattcattagtcgatcatataacttattgtacttgccgtagaagaaatcttaatttacttcatattttacgcacataaattctagtgctggcacctatctaaaagagatgcattggacagacgtaaaaaataaataatgcctaacaagcattttcttaatttaaaggtgactatagaaaacagaagttttgatgggtagcgaaccactgctaaacaaatctag

SEQ ID NO: 268311 - DNA, 448 bp, Glycine max
  unsure (1)..(448): unsure at all n locations
ngctntgatctcacgagtatatgaacattatgttcaacataaattccaatagtcatacgattcccattaaaaacgtgagatgtaacctcattaccattataaagacaaattctcttaatttgataacttgaaaatgagatctaactcagattaattgagccaacaatatcataaatgtttgattacgagtaggtaacaaggaaacatgtgaccatttagttgatgcatcaattaaaatcatgaaatatctaactaattcacatggtgagtgtattggtccacaaatatcaccctatattcattctaaaattaaaatgaattcatccctatttgttcttggcactgatttaattattgacttcctttgggaacacagtacatgataaatcattgaagtgaagaatctttcgactcttcactaggtgtccacatgaaattctaaatattt

SEQ ID NO: 268312 - DNA, 448 bp, Glycine max
tcagcttctgagcagtagctgacttgacactatatgagttgcagcttgtaaaccattctgaggtattctttttgaggttcccattttgaggaacctttctaatgagcattctgaaggatcattaaaataattattatgatgtttgctgagaaaaaaattcatacttgatagattctgttgatgaagttcacgttgataaacctttatgaagtagtacaacttcatcaaacttgacacttcttcatagctccaaacatttagaagtagattgcttcaaaaacactaaatgaagattcaattgttggtgtgatagtgttttgtccaaagttagacagtgtagtatcttcagtcttctattatgatgcttctcatcaaagcatgaatcgtatcttcctcattatgcccacaccttgggcaaataacatcaatgtccaaaccttcccttctc

SEQ ID NO: 268313 - DNA, 431 bp, Glycine max
tgctagcaagactctcttatcactgtctaacactatgatcggctgaaatttattggaaatcaccaagttggtggatcccacttttaaatcaagagagccattaaatgagaagtgagtcacaccaaaattggtgatgtccaataaatttcaatccatagttaatagaatagtgtcaaaaagagtgttagagtgtagcaatcctcaagctttatttatattaatcccaccatgattttctctaaaatacctttagatactaatttttttattatgaataagtgataaggtatattcttaaaattttgatttggataaattaatttagtttggcctgtaaaaaaatttagttgaagttgtgctgcaactcaaactagaagaaaattacagcaacttacagatttctgattcagtaaataattcaatcaataatg

SEQ ID NO: 268314 - DNA, 465 bp, Glycine max
ctagctgtgtgtgtttgttacttactggggttttacttactgacttatttactttcttattaggcattaaaagtattattgtcataaccttaggttgagtgattaaaatattggatcaaacttaaacgctagtactaacttaatacatataaggttatgtaattaaaatattgaattaccaagtgacttgtatctgttagtcctacttattccacctcgtgtgtggttccttggaaagcccaacaatgtttctacttcatcaagctctaatggagcaacctaattccttcccctccaaaccaaattccatttcctacactgatgaagagcatacttttgtgcactttcaaggtacacaattaccacatctaaattattagtcttgctttgctcttagtccacatatttgttaatgtagaaattgtagaaaatgtaaattattagtcttgctttgctctcagtcat

SEQ ID NO: 268315 - DNA, 408 bp, Glycine max
agcttcaaacttgcaacaaaggagatgagcaggtattataagattcatcttcaaactcttagaggtgactttgagcgtttgtttatggaggagtccgagtcaatttctgattatttttctcgagtattggccgtagtcaatcaacttaaaagaaatggtgaagatgttgatgaggtgaaggtcatggaaaaaatacttcgaactttaaatccaagttttgacttcattgttaccaacattgaagaaaacaaggatttaaagaccatgactattgagcaactcatgggttccttacaagcgtacgaagaaaaacaaaagagaaaaattaaacaaatggaggcttcggagcaactactacaactcaatgtaaaggaagcaaactatgcaaattacaagagccaaagagga

SEQ ID NO: 268316 - DNA, 470 bp, Glycine max
  unsure (1)..(470): unsure at all n locations
tgcttgtggagcttctatggagggtggatctntgagcttttatgagttcctttaatggtaattttccaccatggagatgcagcggaagaaaaaggagaagaggtaagaggcggcgccatccactatggaataagccatggaagaaggagcttcaccaccaagatgagccttggataaaaagctcggagaggatgcttcaatggaggaaaagaaggagggagagaaagagagagggggaagcacgaaattgaaggaagaaaaagggagagaagttgaactttgagttgtgtctcacaagactctcattcatcaaagttacaacaagtgttacacatgcttctatttatagactangtagctttcttgagaagctatcttgagaaaacttccttgagaagtntctttgagaaaacttccttgagaagctagagcttatctacacacacccctctcataacttagctcacctt

SEQ ID NO: 268317 - DNA, 444 bp, Glycine max
  unsure (1)..(444): unsure at all n locations
atgaattacattctcgccctttctctatcaaantcttaattcctcttgacatcgncaaaatcttcatgaattacattctccccctttttgatgatgacaaccacctgttgggtaggagcaacaacaaagaaaaaatatcttattgcatataatttactcccccttggttttgcaatgattgcttatatgaaacagatgaagatttcatatttttcatatgtaaaccttattgtctcataaacaatagataattnttcttactattttatcttttatctttctctccccctttgtcaacatcaaaaacaaatcatgaatagagaagaaaaagatgtttccacttgttgcaatgtatgagaatcaagtgacaccaaaaggcattaaaacaatcatttcatatttatcaagccaaaacaagtacaatatcacatcaatctaacacaa

SEQ ID NO: 268318 - DNA, 292 bp, Glycine max
  unsure (1)..(292): unsure at all n locations
tgtctctggcaaanacaccaaaaggggacagttctacaaattatctacttttatagggctcttttgaaattatttccgcgggggtgaagggtctgttttcttattacacagcgccgcccaaacaggcgtctccattgattggcccacacatggcacaagcgccacgcacgaaggatcaacagggtaacgccctgccattggctccactggtggccccctgaccatgcccaccccagcgcctaagaccatgtcgaaccctttattttttcattattaattaatgtaactcaat

SEQ ID NO: 268319 - DNA, 486 bp, Glycine max
  unsure (1)..(486): unsure at all n locations
ctcgtcccggatccttaagtcacctgcggcatgcaagctngtgttgntatgttgtaaaaaaattccaaagcttcttccctattgaagcttcaccgggttgcaggtaatcttcttcatcatcctcattgtcaactccaccagcatcttccccacgggattcactcctatactcagcatcattctcctccacatcatctgctgttccattcacctcctcactcaaagccatattgttggcaaaggtctccgtggtatcaccaccataaccggcccttgtctccacacctttcagagactgaaaccaataatgacaagcaatttaacattagcttgataccgttcaccaggaggggtaaaaaacattaaactgaaatccaaaacttgttaagatctggatcctactatcaaaatcccaattttcaataactcagtgattcataagacacacatacacacacacacataggggtttatgaggcaaggtat

SEQ ID NO: 268320 - DNA, 465 bp, Glycine max
  unsure (1)..(465): unsure at all n locations
catggatttggattctggtgctacagatcatattgcatcctcattgacttgttattctacatatagagaaataaattccatagtagttcgcctgcctgctagtcaacaagtcatagccatacactctggaacagtcaaatttattgaatttttacacttaatagatgtgttatacttgccatctttcaatttcaatttaatctctatatcaagttaactttcttttctaattcatgtttgattcaggatataagtagctagataggtacaattgatgtagtggaaggtctatacaagcttagagtacttgctgccaattcatttcccaaggctagcaacaatttcattnttgttaagtctgtgttaataaagaaatcattgatgtttgacattttcgtttaggtcatccttcatatgatatgctgcaattgntaaaacaaacttgttgatttgtggtaaaacttt

SEQ ID NO: 268321 - DNA, 370 bp, Glycine max
  unsure (1)..(370): unsure at all n locations
agctnttaagggcagaggaccttaaattaatatttttgtggatatggngccccctgagagtgaggacacgtagtcctctaaaggcgagggcgtgtagccctctgaagttcaggacgtgtcgccttttgaaggcgagggagtgtactcctatgatggcaaagacatgcaatcctctaaaggtgagggcatgtccccctttgaaaatggggaacatgtagtcctttgatggcgaggacgtgtattcctctaaaggtgaggacgtgtagtcctctgtaggtgagggcgtgtagccctacaaaggtgaaggcacatgaccctntgacggcgaggacgtgttttcctctgaagntgaaggtacatgacactttga

SEQ ID NO: 268322 - DNA, 475 bp, Glycine max
  unsure (1)..(475): unsure at all n locations
ctcatactttcaatacaactttctcattgtgtttgagataatggttttatagttacgctangaatatgattctgtagaatatttcttctttttgttgaagaagaaaataaaatatatatgcgttgtagtaataaaaaaaaaagaaacttgaggacaagagttagccatatcacaaagtatcaaatttagactatgacaaccatgtggagtataaaatgatcaaagattaatgtctaaaattcttttttgcaccccttgatcttttcctttcatatttgatccatcatcatagcctttgcctcttaagttactaatatcaaatccaatattatttatttcattcgtgatagcatccaagaggagttttccacttgtatcatctacttttaaaaattattaaaaaatattcacaaacttggatttgagtcgaagaaacatctacagaccataatacacaagggtttttgtcttgatg

SEQ ID NO: 268323 - DNA, 442 bp, Glycine max
  unsure (1)..(442): unsure at all n locations
agcttcttgccctctgattacgatgacattgtttcacgtgctgtgaatcccttcaccctcagtttctcttcatacaaacaactcttctattcactttgccaccccctcctcattgaccagggcaacaaggtacttacgctaccttctttcaattcatcaatgaaatgtttaatctttttttaatatctgatttgattatacagagctttaacttggaaaagtcttcgggtaaaaaatcttatatcatatctgcaagggaatngtcaatagcatggagcagcgacccaatgatgtggagctggaaaccaattcctgaatcaaggtaattattattttttagttaaaaaaattgtaacttgtaagatatttatttgagttaattgggaaaatttgatttgcttgcagattcgcagaggcggctgagctgagaacagtgagttgg

SEQ ID NO: 268324 - DNA, 468 bp, Glycine max
ctaagctgatgggcttgttagttcagctgtatgtattgttttgtattcacaatctgaaaataggttcctctgttgatggagaggggtggcgctgatatataagagggagagggagagagtggtatgtgttttattattattttgtaaagagcaaagggaacacttaggtagataattcctccttatttttcacattcaataatacttcgttcatctggttgagatatggaagtggatgccgaatagtgattttatgaatttccactgataagaattccttgaatttcatcattcttgttaaactgacagaagataactcttttggaaggcatttaaagtcctcaacttggttgaagacttgtctaaattatgcgtcatccattaatggctttggaagttatcatattcagcattgctaattctcagcccaaaacaaaatgatacattggttttgatgagctgggaaat

SEQ ID NO: 268325 - DNA, 447 bp, Glycine max
  unsure (1)..(447): unsure at all n locations
acctgcagctgcagcttgatgattacatctccctatttctcaagcattattttcttgatatcatcaaaatcttcatgatttacattggtaatcgatttccagtgacaagttttgaataaaaatcaaaagatgtaactcttccaatggttttcaggttttctcaaggtcataactcttccaatggttttcttgaccagacatgaagagtctataaaagcaagaccttgacttgcatttaaagaatacttacaactttttcatatattcttttacaacctttgaatctctttgaacatcttcttgaacttcttcttcttcttcctttgccaaaagctttctgagttttctggtttccaaacttttttctttcacaaaaaacaaaagngtgctattcatctttttcattctcttctccctttgccaaaaagaattcaccaaggactaact

SEQ ID NO: 268326 - DNA, 408 bp, Glycine max
  unsure (1)..(408): unsure at all n locations
ngaaggtgcaaactccaccatgtnnttcatagtaaaacattggtaattngtctactattattgtgatcatctctttctccttcattggaggttccacttgagctgccaggtctctccacctttgggcgtattctttgaaagatttgtgcccctttttgcacatgttctatagttgcaccctatccggagccatatcagaattgtactgatactgcctaacgaaggcaaccattaggtacttccaagaatagactcgagaaggttccaagttagtgtaccaggtaacagctaccctagtaagactttcttggaagaaatgtatcagcaattcctcatcttttgcgtattcccccatcttgcgacaatacatctttagatggttcttatggccagtagtccccttgtact

SEQ ID NO: 268327 - DNA, 449 bp, Glycine max
ggctgcagcttgtggggtaaagtctcacgtttttctcttgctcatgcaacaattgttagtcgtggctatacgaaacatcttgccaaacaaagtcaggttaacgataactcgcctgtgctttttcttccattctatatgtaacaaagtcattgatccagtcatgtttgatgagttggaaaatgaggctgcaattatactgtgccagttcgagatgtattttccccctgctttctttgacatcatgattcacttgattgtgcatctggtcagagaaatcaaatgttgtggtcctgtttatctacggtggatgtacccggttgagtgatacatgaagatcttaaaagggtatacaaagaatctatatcgtccaaaagcatctattgttgagaggtacattgcagaagaagccattgaattctgttcagaatacttagagaaggctaaacctg

SEQ ID NO: 268328 - DNA, 489 bp, Glycine max
  unsure (1)..(489): unsure at all n locations
tacggacctatgaaactcagctttaatttcatacaaggaagcatgacttacgcctatgtatctaagttntggttttgaatgaaaaaaggcatgaatattaggacatgtttgagaggttgttattagaatttaagtttggctgccccatgaggaataccttgcacctaggtagcatggaaaatacctttcaacggtatgtatatatgtgaatatatatagcatggaaatgccttgcaaaatgttgaataaaatgccttgcaaaaagttgaataaaatgccttgcaaaatatgaatatatatagcatggaaatgccttgcaaaatgttgaataaaatgccttgcagaaagttgaataaaatgccttgcaaaatatgaatatatatagcatggaaatgccttgcaaaatatgaatatatatagcatgaaaatgccttgcataatatgaatatatatagcatgaagtgccttataaagtcgtggatgggtagc

SEQ ID NO: 268329 - DNA, 444 bp, Glycine max
tagacatcaactgtgatcatgatagtctatagatactatattcacgctgtcttgtgtgtcttcttgtagtcacttctcatgcgcaagtagtggacatgtttacgtttactatggcgtctacatcatgagtatttctaatgaagatcacctttctaaactgagaatgataataaacatcttccatccttcaacttaaggggggggattagttccttcgagtaatatgtaataaaagcacgtgaccaaaagtttgttgagatgtaacttgtaaccgaggtctgttagacaattacgagaatcataggttcattatctttcttaattaatcatatatgacaatcataattcttcaatgtaaaattcctaactaaatgaaaaattttcgtctaccaaatacccatgtatgactaatttgcaacaattagggccacctatcatatagta

SEQ ID NO: 268330 - DNA, 445 bp, Glycine max
  unsure (1)..(445): unsure at all n locations
agctttgagcaaattcaaacgacttttattttttactcggatgtctgattgagtcccgtaatatatcgagacgctcgaaatggattactgaagatctgagcaaattcaaacgacaataaatnttttactcggatgtctgattgagtcccgtcatatatcgaacagctcgaaattgaatgttgaagctctgagcaaattcaaacgacaataactttttactcggatgtctgattgagtcccgtaatatatcgaaaaccttgaaattgaatgtagaagctctgagcaaattcaaacgacaataactttttactcggatgtctgattgagtcccgtaatatattgagatgctcgaaatggaataccgaagccctgagcaaattcaaacgacaataaccttttactcggatgtctgattgagtcccgtaatatatcgagatgctcgaaa

SEQ ID NO: 268331 - DNA, 408 bp, Glycine max
  unsure (1)..(408): unsure at all n locations
tcttcattcaatttcgagcgtttcgatatattacgtgactcattcggacatccgaataaaaagttattgtcgtttgaaattntgagagcttcggtattccatttcgagcgtctcgatatattacgagactcaatcagacatccgagtaaaaagttattgtcgtttgaatttgctcagagcttctatattcaatttcgagcgtctcgatatattacgagactaaatcagacatccgagtaaaaagttattgtcgtttgaatttgctcagagcttcggtattccatttcgagcgtttcgatatattacgggactcaatcaaacatacgagtaaaaacatattgtcgtttgaatgtgctcagagcttcaacattcaatttcgagcggttcgatatattacgggactcaatc

SEQ ID NO: 268332 - DNA, 440 bp, Glycine max
  unsure (1)..(440): unsure at all n locations
agctaacatatntcttntttctgataattttatttattatatccaaagagactactaggggttctactcctacccggctacaaagttaagccatcatgactttgaggattggagaataggtatagctaaatctctgatttattgctttcccataatttctctacaatattctcttatattaactataggcgaattgtggaacaatttctatataagtatcagagattgagttctaaaatctaaaagtttgtatctctcgctgtgttctaggagcttttgcatcttgtttgcacacttcaacctaaaattcttttgggttcttggtatatatgatcagattttcgaaatcctgtgtggtgggaatccgttcctctcgattaaatatgtctagataaaattccattgtttgaattaatgagaagaattattttagttagaag

SEQ ID NO: 268333 - DNA, 390 bp, Glycine max
actaagcttgtggtacaatggtagcgattggactagagacgaatttgattggacaagtatcactggattcgtgttttcatgagaaatacaaccttcacttggaagtcaaaaaagcagtcgatagtcactcttttgacttgtgaggcagaatacatagcagctatttcatgcggttgtcatgcagtatggctaagggatctcttaaaagagttgggcatgtcacaataagagctgaccaagatttttgtggataataagtcaactattgctctagcaaagaatctagtgttccatgatcaaagaaaacatattgatacccattaccactacataaggaagggcgtaacaagaaaaacaagaaatgatggttatatagaatatgggaagtct

SEQ ID NO: 268334 - DNA, 445 bp, Glycine max
  unsure (1)..(445): unsure at all n locations
agcttcaacattcaacttcgatcgtctcgttatattatncgactcaattagacatccgagtaaaaagttattgtcgtttgaatttgctcaaagcttcaacattcaatttcgagcgtctcgatatatgacgggactcaatcagacatccgagtaaaaagatattgtcgtcttaattggctcagagcttctacattcaatttcgagcgtctcgatatatgacgggactcaatcaggcatccgagtaaaaagttattgtcgtttgaattggctgagagcttcaacattcaatttcgagcgtctcgatatgtgacaggactcaatcacacatccgagtaaagagttattgtcgtttgagttggctcaaatcttcaacattcaatttcaagcgtctcgatatatgacgggactcaatcagacatccgagtaanaagttattgtcgtttga

SEQ ID NO: 268335 - DNA, 411 bp, Glycine max
  unsure (1)..(411): unsure at all n locations
acgacaataactntntactcggatgtctgattgagtcccgtaatatatcaacacgctcgaaattgaatgttgaagctctgagcaaattcaaacgacaatatatttntaatcggatgtctaattgagtcctataatataacgagacgctcgaagttgaatgttgaagctttgagcaaattcaaacgacaataacttttcactcggatgtctgattgagtcccgtaatatatggagacggtcgaaattgaatgttgaagctctgagcaaattcaaacgacaataactttttactcggatgtctaattgagtcccataatataacgagacgctcgaagttgaatgttgaagctctgaggaaattcaaacgacaataacattttactcggatgtctgattgagttccgtaatata

SEQ ID NO: 268336 - DNA, 387 bp, Glycine max
aagcttgcgagaacaaaggacctatgatcatctgaatctttacactatcagcttagatacaaatccatattatgtcccaccacccaaaagtgccatagacatgaaagcatttcaaagggacaatgacaaagaataacacagtaaaatcaaattatttgtaacataaaccttggggagaatcggtttcacaaatcttctccagtttttatgtttatcaagtacacatattgataggctcatgaaggccatgacagaaaaataaaggaaaataagccaaagtagctagagtagatatagaagtagttaggtttcggttaatattacgtagctactgaattaatttggaggctaagcttaatagcaaaacggaagtataagatcacctat

SEQ ID NO: 268337 - DNA, 411 bp, Glycine max
cacttcaaactcagcttatgatagctgatgaatgcatatgtactatgtagtattgatgtttgctatgcaatgcaaaatgagtgtttagaacaacctattgatttgattgtcttttattgtataatctctttgcaatcttttcttttattgccaatttatacatgtcagcaagaatgcgaaatatcaaaataatgttcgttgatcaggctagtatgttcccactacttatttaagcctgcaaaatttaaatactcgctctacgacttacaaaatactgattataattaccttagcatttctctttaattacactgatttgttggtaattgaataattaaaaatgcttttgttcttatcatccaagtattccgtgccaactagacacatattacctcaacatgcttgtgtcat

SEQ ID NO: 268338 - DNA, 371 bp, Glycine max
ctaatctgcagatctcgctaagctacaacattcttactctaagccaaattttgtgctaaaaaaacatttgaattttttaatttggctaagcgcgggaccgctgagtgggaagaaaaattgagaaaccaaacgtcttgtcttttcactcagcgaaccactccgctaagtgaaaagaacgaaacgttcttagtgggtgtaatgtcagttacccccactcttcgaaaatgtgcgccccttctgctgcctttctctatcaaactgctctctgtggcgttttgcatctcttactctgcatctacttattttcatcaagcatccgcacgcccaggttctttgatctctatccttgggattccaacgaaccttacgtt

SEQ ID NO: 268339 - DNA, 460 bp, Glycine max
  unsure (1)..(460): unsure at all n locations
agcttcctttacaacaaagagaagagaanaatgaatgattgaagaaatacaagcggtgaggatgtctcttccacctcacaatcactcataaactcatctcaagctctcaagatgaattcctcttcaagctctgttctctgcaggtcttcacacagcaaaatctctcaaaactctttggactcggacccttctctttttagaatctggcacatgcagaaactcttcgagaaaatggccaaaatcctctccaaaatctgatttcaggattaaataggtggttttgttcgtgctagcgtgtttagcgcgaatatgaaccgctcagcatgcattattggatttaggcttagcgcgtgcttttctcgctcaacggatggactgaagtggtgcgcttagcgggatgaccctgcgctaagcgcaaatgcacaactcatccttcttccaaattcttcctcgcgctcag

SEQ ID NO: 268340 - DNA, 475 bp, Glycine max
  unsure (1)..(475): unsure at all n locations
gtctagctnttcattggtgtatattgatctccttctggtgctctaaattgtgggagtgtgctcaaatatatggggcaattttggtttgttttcttgcttgattaagatgaattaagggtgtgtatgggatggccctatgcctataatgcattttggaacaatgggacatgccacattgtccccgttctcttgctattgacgcctaaacgcgcgcccaccaagtgttcgatgaaatgcctcaatggcattagcgcgtgacttttgtaaggaaacaacccatggggcattttggtttgtacatattttctatttttggaatatgtattcattcccgaanaaggctagagtaattgccccacatatatcctaggcctatgaactaaaattgtatgctcaaagaacacaagaggaggtgcatattgggtaaagttaccctttttggccagcaatcagctatgggccacgctacaataat

SEQ ID NO: 268341 - DNA, 445 bp, Glycine max
agcttgtctgccattagttggagatatgtgttatggagagaagtcactgattttagtttgtacagggaatatcggcagtgatgatgttgaaacaacactctattccattggctcacgaatgaaagctttctcagattggctactcaaatacatggtgtcaggtaacctggatacaatatttccagctgctacacgtgaatatggaccaatggtggagggtttgtggaaggataaagccattcaagcaacatatgataggcgaaatgaactaaaaatgctacccagaagtgcaaactattttctggatcgtgtgagttaatgcttggttgtctatctgctcatcctcacatgcatattcaagatcattcatactatatttttaatattaatgaagccaatatgatttttaatttgttcaattttttgtctgatgtcatatcctcta

SEQ ID NO: 268342 - DNA, 475 bp, Glycine max
  unsure (1)..(475): unsure at all n locations
tgaggaatctcanganattgatagagatgtcgctatcactgtctgaatacacacgtgagaccgcttaaaggtaagcgatgagtttatcgcaattggggttaaaacgaacatgtgtagggatccttaaaggattaaattggggtttattttgggatgtttattgaattataatttttcctttatgattctaaatacaatattgatgtcctgatgcgaattggttgataaaattgagtgctcttggtgttttcatttttttatacctatgattttgattaattgattttgatataattgtgtgaaattatttgaggggttttactccccatgttgtgataaaccttttatataaattgttatattgagattatgaaattgtgcttcaaattatgagtatgtgataaattgaacctgtgatgaatggagaaatacatgtgaattgatttgtgagctatgaactgtgcaatcacacaat

SEQ ID NO: 268343 - DNA, 420 bp, Glycine max
  unsure (1)..(420): unsure at all n locations
agcttgtagaatggctagactgtatctttttggtttggttnggttcaaggataaaagggatgccccacattatttccatgacacanatgcaaaaatgatgatttggaaactttatgcaaaactggtcatgcatgcacctatgcgaacactcaagtgtcaaatttttatggtcatgtgatgctagggctcaggattcgtttcctctattttaatcaacccaatgtttccaaaatatgttcttttatcaatttgtgcattcatccgagtccatttcgggcgtccggggaaatttcacagcattcacccttcaggtgtagacacattttccaaaaattggttatgatcaatgaactttttaaagaaaagttggaaatcgtctcttttcaaaagcatgctgtgttttagctagacaacctattt

SEQ ID NO: 268344 - DNA, 347 bp, Glycine max
  unsure (1)..(347): unsure at all n locations
tctacttatgtggcagggcgggcttccttcactttcttgtctcaaccgcgagctntgaccatcgctctttctttccgcgatgcttctctatatatccgtctgagtgggtttatagcctataccatacttcccacgatttcctttggcatttatcaagctagttatgccgccgttgtctttgcctaaacccattccgggttcgtaaccgttccccaacataactcgggccatcattactgctgcatcggacaggcaagcttgcccagagaaggagtccacggaggaaatgcttaccacctcaaaagactggaaagcggcttctaatgactcctctgcggctttcacat

SEQ ID NO: 268345 - DNA, 448 bp, Glycine max
  unsure (1)..(448): unsure at all n locations
agcttattgagcttgaggcctaggatcttcttcatcaatggattcctttgtttcttggaagatgaatgacagcggaatggagaaaggaagagagagaggagacgccacttcaaggagaagatgagtctagaagaagctcaccactataggaggccatggataagagcttggaggaagaaggagatgaatgaggggagagggagagaagagcacgaaattttgtgctctaaatgagctttgaaatctgaagtttaatattcaaaggatcaaagttgaaaaaaatgcacacgcatgacctctatttatagcctaagtgtcacacaaaattcgagggaaattcaaatttcacttgaatttgaaattgaatttgtggagccaaactntggagccaaaatttcactaattatgattagtgaatnttagttatggttcagcccactaatccaag

SEQ ID NO: 268346 - DNA, 418 bp, Glycine max
tagacgatgtttcttgaagaaaaggatgatggaatttattattctgagaaattgtaaattctaagaatttcaaatacttcaattaaaatgcttttattttcaaaattttgtgtttgaataaaaaaaattaaaattgtgaaggtaaaagaaaatgcatgcaaagagaaaataagatatggttggtgtgcttccaaagagaagaatattgatgcggtatgagagtcgcagaggaacctgggcacaacaacgtacaccaccacacccgaccacaacattcagtcaatgacgcaaggcatggcccaagccctccgcgccggcgagcatctccgctgcgtgatgggtagcaatggctactcccctgactggcaagtacagtcctatgtgttcccctatgcacacacctaattgatgtttcacg

SEQ ID NO: 268347 - DNA, 466 bp, Glycine max
  unsure (1)..(466): unsure at all n locations
ttaagtcacctgcggcatgcaagcttttaaatcaaactttgcctctggttatctattacaggaaactggtaatcaattatcagagagtaaaaactctggtcacttagaaatnttttagaataactcttttgaaaaacaaaattgtgctatgtttgttttttgaaaaatcttttcaatacttctcttgtgaagtctttttgattacttctcttgaatcttgaattcatcttctcttgaatcttgaaatcaaacttctcttgattcttgaatcttcttgatttcttctcatgaaacttgaaattaatcttgatcttgaacttgttgactgaatcttgaaattattatttgggctttntgtcatcatctttgttatccgcaaaactacttgaatcaacttgattcatcatcatgaagctggcttctacaatatccgccttttaaaatcaagaaacacatacacattctt

SEQ ID NO: 268348 - DNA, 458 bp, Glycine max
  unsure (1)..(458): unsure at all n locations
ntcagatgctccagaggaaggagaaacgatgatgaactttctaaatctttccctatcagncaaccaagcaaatgatcaaaaccattcaagtgatcagtctgactcaagttcacttatcttccaacttggtcgggacatctcaattaattgtctcctacgatgctcaaggtctgactatggttcgattgcctcattgaaccaaagttttcgatctcttgtccgaactggagagctttataggctgaggcgacagatgggtatcatagagcattgggtttacttctcttgtaatctccctgaatgggaggcattcgatccaaacacccgtcgatggatgcgcttgcctaaaatgccctctaatgaatgctttatctgttcagataaggagtcattggctgttggtacggagcttcttgtctttggaaaggaaataatgtctcctgtcatatacagatata

SEQ ID NO: 268349 - DNA, 455 bp, Glycine max
  unsure (1)..(455): unsure at all n locations
agcttgtttgtgcanaattaaaaggtattatatataaaataaaaaggatacgtctaactcaaaggccagtgcattcacaggttgcctcttggatatcacttgtttaacatcccaagcttggcagtcgaaaaggagataaatcaaccacctttgaataggctgatgtccctttctcgcaacaatcccttagcaagatcatccactatacaactaggtgcttgagtggaggtgtcatctttctttttcttattcctctttccttttctaggttctttggagtgacattatcctttagaggagttttcctccccacacttgggtgaggtctagcttgcacaaaattacaggaggaggaagagctttgtgaagaaccaagtattataagcacttccacctcatcaccttaacctcgaagtcaatttccttctctgacatcaatcaaggcccctcgagtg

SEQ ID NO: 268350 - DNA, 464 bp, Glycine max
  unsure (1)..(464): unsure at all n locations
ntgacttattntaattgtgttccaaaccatcaattatcattgtttctttcaacaatgccttatttatgaatttaaccttgtctaatactagttccctgagtttgatactcgaattcatccattttaatttaaatacttgacgatccggtgcacttttcggcgaatcgtatttcccttgaacatatttgtataaagaaaaattggaccaaagcgtaactgcaggggaaatccaacaaagtatttatggcgccgttgccggngaactagattcattagaagagtttagttcagttttacggcattgctttatatttttctctttgattcgttgattctttttgttcatattttagttactatacattcattgttcttttgaactggatacttgcggttctattttattgtatgcaaagaagatctattgcaggtgantttgatcccattgatttggagattaatgc

SEQ ID NO: 268351 - DNA, 458 bp, Glycine max
  unsure (1)..(458): unsure at all n locations
agcttccttgagatgctagagcttatctatatacacccatctaaaaactaagctcacctccttgacaaaatacatgaaaatacaaaaaaaagtccctactacaaagactactcaaaatgccgtgaaatacaaggctaaaaccctatactaatagaatggccaaaatacaaggcccaaaagaaggaaaaacctattctaatatttacaaagaagagtggatccaaccttaacgcatgggctaaaaaatctaccctaaggttcatgagaaccctagggccttctttagtagctctagcccaagcctcttgaagtcttctatccaatacccttggggggtaggattgcatcaaatgatcagtggaaatttattntatttttgattaggcgagaaaatgacttanataaatgattaaatcacgtcaaaaggaggtacggaaagcaaacgaaataaaaataaa

SEQ ID NO: 268352 - DNA, 460 bp, Glycine max
  unsure (1)..(460): unsure at all n locations
ctcacgctgtatggtaagaaaaaagcaacacacgtctttgaaaagcttgtgtttgagtgaaacagtagctgtgaggctttggttaatgatccttccttgatatttgtcattcttactagcttatttcagctgtgtttcttaataatcatgttcacatctttgaaaagctgcatgtcttctgagaagctttggagcaaacaccttgtaaataaccattgtggttttgtcacttgaggacaagtgaactgttctttcttcgcttgaggacaagaaaaactgtaaatttgggggagtttgttagtcatcttatatgactaacttttgtatagaaaacttttacaaaatgtacatattttccccaatttatggttctttttgtaggattgntaaataaatttgctttctttttatctgtgcacaatagaagccttgtgaatggaantaatgtcaatttctcttc

SEQ ID NO: 268353 - DNA, 450 bp, Glycine max
  unsure (1)..(450): unsure at all n locations
agctngtaggattatggggtacccgtcacatgtggtactaggtggcactcaggcgatggtgcaagtcgactatccacatccacaaatcacacataaatccaccatccccagttgcccaccttcaactgagctcacgcactcccacgtagctcttatgctcgttcctctcaacaccgggtccccatcaatccctccaagcttccataacatccaagcaatttcaacatccaaacatcatgaactatcaaaactaagcaaaaatagggcagaggcagaaaactctgcccaaaacacaaaccaataccacaacttttattattcaaataccccagtaacattctcttcgttctaattcgttcaccgttggatcgactcgaaaattntactggaggtccctagtacataagtctacattttaaccgttgggatctgctagaaaacatccagaac

SEQ ID NO: 268354 - DNA, 466 bp, Glycine max
  unsure (1)..(466): unsure at all n locations
actcagcttggcatccaataccctgatgaggatgtcccatatgttcttaaaactggactgatgcatttgcttccaaagtttcatggccttgcaggtgaagacccgcacaaacatctgaaagaattccatattgtctgctccaccatgaaacccccagatgtccagaaggatcacatatttctgaaggcctttcctcattctttagagggagtgacaaaggactggctttattaccttgctccacagtccatcacgagttgggatgacgtcaaaagagtattcttagaaaaaattntccctgcttcgagaaccacgaccatcaaaaaggatatttcaggcattagacaactcagtggagagagcttatatgaatattgggagagatttaagaaactatgtgccagttgccctcaccaccagatttttgagcagctttgtcataccctaatttcgtccggggaccttt

SEQ ID NO: 268355 - DNA, 466 bp, Glycine max
  unsure (1)..(466): unsure at all n locations
gatcttaagtcacctgcggcatgcagcttcactggncaatctgtttgtgctgaatctgtaactgttctgaatcttgctcagggaacacctcaaactgcaacgacggagcaatattcttcatatgttgccatgccagttccaacaaactattatctcctgagccactgctgtgcactagaatgcccccagctttcataacaagcaaaatgttcttcagaagctcaggcacaagctcctgaagcttctcacttctctttccctgaattttcatcttcacacatttttccatacagcctagcatatcctcccatagtttgcagaaggtttcaaattgcgatagttcttggagtaactggaggaaaaccttagacaagagtgtcaaggcaataacaagtgttccttctatgttcctgtagtccttctgagagtgtgcctgtgcaatttcaagcaggtcatccagcacagt

SEQ ID NO: 268356 - DNA, 437 bp, Glycine max
  unsure (1)..(437): unsure at all n locations
ccctcganaacgttcgaatggaaatgtccttgtatggtgtgaccgaaaattatatttattatntaaaaatatatttatcattttattaaaaaaaatgatgagttcaatatggggatttattagggtacgacaagtctcaatcaagattcatacagtgtttacaagtgtaattatcaaggttttcacattaatagcgatctttatgatatttatcagctaaactaatttttgttgggaattgaaaattatattattcttcaatttggaaggctaagaaatatgtgtatgcgtgatggtattattgtccaaggtgttgtaattgcatacttgcaacgtttcgacttccaaatacattgcttcaaaggaaatgtcaaatgttggaaacaaaacagagaaataataatttctaatactcagatgcagctttattaatattt

SEQ ID NO: 268357 - DNA, 452 bp, Glycine max
  unsure (1)..(452): unsure at all n locations
agctntgcagctggaatgttagaaagatattatagtctttccgagaatggaacattagaaagcttcaaagaagattttgagatacttacagggaacaaaagatcatatgattacatataggaggtcttatcaccttgaggtgattgggtattcagacttagactttgttggatgtgtggatacaagaaaatctactcttggctatgaatttcttttaatcagagcaatattgtggaagagtgcaaagcaatcagttgttgctacatctatcatgtaagctgaattttgtagcatgttttgaggctataattcaggctaattggctgtagaactttatttcaaggctntgaattgttgatagtattgctagaccactgaaactatattatgataactctgcagcagtatttttctctaagaatgataagtactctaagagtgataagcatatg

SEQ ID NO: 268358 - DNA, 475 bp, Glycine max
  unsure (1)..(475): unsure at all n locations
tatcaaactcagcctttcatttttttctttgaattatttttaccgctcttggtggtatcaacacggcactgtgacgggatatcttatccatttctccgggaaaatagatatccccggaaaatatttttaattcaatctttntttttcttctccaatcggaccaatccccttactcgacttcttatatttaaagtgattagtgtatctacttcaacgatactattgttccgtaccattatggaagaagattctggtaaaatatgcacttcctcgggaatgaaaaaaaattgatctactttaatttggtattttgtcttaaattctttaactccttgatactcaattaaaaaaatcctcttttttaaaaatggaatctatacctatagtcctatatttagtaattcccgagccctgtgttccgtattgaggatcatcgaaataagcaagaatgctatttctacgagaaataccattg

SEQ ID NO: 268359 - DNA, 299 bp, Glycine max
gctcactactcctgtgattcttcccaaaatctttcttttcctttcttcatggcataactcattcttatcatttcatcaccaagtttaatcatttccgctatgagccttgcggtttttaaagtttatcatagtctttttgagtttcttactggttggacaagagagtttactataagacagtacataacattgattctcataatgggggatggtctttgattttagcacgttggacgctagataaaaaagagaattctctctttgagtatggacaatactgaataatgttaattccttta

SEQ ID NO: 268360 - DNA, 468 bp, Glycine max
  unsure (1)..(468): unsure at all n locations
tgtgtaggaagttctacagagagaaaggtctaagttccagatagttctaagagattctgttgcgtgaagatctgcagaggcgagagctcgaagcggaagccgttctgagagcttgagatgagtntgtgagtgattgtgagatcttagaggtgaaggagacatcctcatcacttgtatttttgcaatctttcatcttgttcttctctgtgttgtaaaggaggtttccagactatgaaaagctaaatcctctgttggatcttccctgtaggtacctgatgttaatatatttctatctatgtaatgatgttttgtgtgttctctgtgctatctgcttttcattccagtatgcctttaccttgatcacatagatgcatgctttgttagggtcattcaacagtgganactggtgtgattctaaagtccttgatagtacggcgctaagttgttgtactatcacgaggaatcggg

SEQ ID NO: 268361 - DNA, 450 bp, Glycine max
  unsure (1)..(450): unsure at all n locations
agctntgacttgactcatcaagagattattattatttgatcatggcatgaatnncatatcatctttttcaacatctctttcaacaatcaagaaatctatctttcaatcttctctctcaacattattcaactctttcaacaaatttttcctgaatcgtcttctcttcatctttctaaacttttttgttcaaaactttttctttcaagaaaaaatctttgatcaaaaacttgtgttattcatctttttcattctcttctctctttgccaaaagaacgaaggactaaccgcctaaattcttttgtgtctctcttctccctttcgaagagaattcaaaggacctcgactgagaattcttttgattcttccctttcccttaagcaaaatatttcaaaggactaatcacctgagatattttttgtttcccctttacaaagtgtcgcaacatgccct

SEQ ID NO: 268362 - DNA, 457 bp, Glycine max
  unsure (1)..(457): unsure at all n locations
ccttaatcatttccaaatatgcatgtgaattattactcatcaaccagaatcaagccgaggctattgtgcaagcaatcaatggggcaaaacacaccaaatgattataatgatggatggctcaaattctcacaaaagtaaaatcatcactttcaaattgagctttcaaaactatcatgacatgtagagaagaatcaaggatttcaagtcacaaaatgtcaaaaacttttattttcaaaacaattacccatttcttgaacatatcctataattcaaagaaaaacatgcaaagtcgtacgtgcacacaaaattgacccaaaatattaaactgaaaatccgacgaaactaacaacattaacaaattatcacaactaacaaattaacaaaaccaacaaaactagcaaaaccaaagaacactcccccnccatacttaaacaacacattgtcctcaatgtagcac

SEQ ID NO: 268363 - DNA, 272 bp, Glycine max
aactcggatgaccgacggagacgggaaataaatcgagacgctcaaaatcgagactagatactctgagctaatcgatatgacaataactctatacacggaggtgccgggtgagtcctaaaaaatatcgagacgctccaaatcgagaacagaaactcttagaaaatgcacacgacaataactttttactcggatgcccgacaaagcgtccgtaattatcgagagaggctccaaaatgaaaacggaagctcgcatcagatgcaaacaacaataac

SEQ ID NO: 268364 - DNA, 408 bp, Glycine max
  unsure (1)..(408): unsure at all n locations
ggccacccagctcgcccaggcgagcagggttgcttcctttagatgcaacagccttctggaggaatctttcggagggcccaagtgggcctggttgctatntgcacccccattnttactaagtacaccccctgccttttttggcgattcttttttcgcaaagttacggaaacttacgaatttccgaacgatacttgctttctttccgtaatgttaccgaaccttgtggattacataatcatcccctttttgacttatggaatgttacggaacctcactaattgtgcaacgatgcttccatttgattttcggtgtgtcacggaaccttacggattgtgcatcaatattttcttctgatttccggcacatcccggaatttcacaaattgtctaatgatgggtgccaaacacc

SEQ ID NO: 268365 - DNA, 432 bp, Glycine max
ctgcagcttctagataagacgtctttcttttattgatcttacaagataccgcaggaatatcatttccaagtaactaacaagaacatacaatgcttcttttaaacatatggcagaacacagtatctaagaactactacatttatgaactttgcatttaccatagaacaaattgaacacaaaaataacatgtgccatccaacatactgaaattatctagttgtgactatgagtctcatcacaattctgagcgcaatatgaagaaaatgactttttctcatcttctatagaaggggtaaaaccattctaagatcccagccatttataacatgcatatatttcgcatacacagtgtattaagatatgttgtgtcaatgccatggattgttatgatatatcaaagaaagatttgataagcacaatataactctcttt

SEQ ID NO: 268366 - DNA, 456 bp, Glycine max
  unsure (1)..(456): unsure at all n locations
tttcgcttaaccacctttcctatctaccaggcttaaaccttatgtacccacattatcagaagggaagtatggtagaagtaatacaactcacaagtggggtatgacattcaaggcaaaatcagcaagagtntattgtttttactctgaattaactaatactaaattntcagtcttcaacggtacaattttcagatttcagaaacaggatgtacactcttttctcaccaatttaaaactactataaatttataatggaataaaactatgtacgtcattgcaaaagagaaactatacatgtgatgtgtcattaacttaaaagacaatgaattaacacaaaccagctgcctaataggtggagaataattggaccactagattaattaattttgcttcacactcaccaatgacgagagttcaccatcaagccaattgaccaaatttaagacatctttaata

SEQ ID NO: 268367 - DNA, 470 bp, Glycine max
  unsure (1)..(470): unsure at all n locations
tgcaagattcacattctcctccttttaagcanattcttcttgacatcatcaaaatcttcatgatttacattctccccctttntgatgatgacaaccacttgtaggttaggagcaacaacaaagaanaaatatctatttgcatatagtttactcccccttggttttgcaatgtttgcttatatgagacaattgaagatttcatatttttcatatataaaaagttgtctcataaagaatagagaatttttccttactattttatcttttatctttctctccccctttgtcaacataaaaaacaaatcatgaatagagaggagaaaaatgttaccacttgttgtaatgtataaaaatcaagtgataccaaaaggcattaaaacaaactattttgcactcacaaaaacacaatcaatcaaacacacaatcaagagccattaacaaaacataatcaaatacaattatcacagaca

SEQ ID NO: 268368 - DNA, 395 bp, Glycine max
gaaggtgtatattataagtttacatatgccctctattcttaatagatatttgacttttgtgtttgtttcctaataaattttagttttgcattgagtccctactaaaataatatttttattttttattcttgatatttcgttttagtctctcataaattaaaaaaattgtgtttgtctcctaataacttaacaaattttattttagtttgtattaataacacatgagaaatatttatcatggatcaaatataaaatatgtttatttattaacggctacaaataagtgtcgatgaccaaaaataacattatttctttatctaagactaatcgctaaacacaattttgtaaaaatcatattcaaatcgactatttattacgatcaaaaatatttaact

SEQ ID NO: 268369 - DNA, 463 bp, Glycine max
  unsure (1)..(463): unsure at all n locations
tgtagtttctatgcgaaagttcatgaagcataactaatctataaagaatattttcctccagctaagcagctttgtgattgcattgtgcaataaaatttaggttccatgtctttatttgttactcaagccaagcactgagtgaaaaatgtcgatagaatttcagaaataaaattgaccaaattaaaagtcaatcacttcaccctcaacacaccgaagtctaagaaaaatcaaaattgacatatccaagaatcatgtcacaagacaaatttggcaaaattgaggcagagaaacttacttgagcctcacttaatctctcgctgcattcgttggttttctttgaggaagccacagaaccactagatttattgcttgcagaattgtcttctgaggcagttntaagctttttcggtgaaaaggttgtattttgagtaggagtgctaatctgaataaatattatacagca

SEQ ID NO: 268370 - DNA, 458 bp, Glycine max
agcttgaagtgaggaagtgtggaatggtgatacttcctacttttattcgttgaccacagagtggtacctggagatatgtcgcgggggtcaggagaccttggggacgtcaggtggggtgctattgcccgaaaccaagcttgaccaatcccgacccaacccgggcatagtcagtcagtgagaacctgtgatgtacctaaacaggcgagctcctggcagtcaacagataaaagaacaaagaccacaaagcaaggaggcttgtgtggtggctggccagctgtgaactttgagtgttacatgggatatggcctctggtaatcgattaccaagggtgggtaatcgattacaaggcttaaaagtgaagacatgaagctaagatggcctctggtaatcgattaccaaggggtgtaatcgattactagggcttaaaacgagatcaggaaactaagagtgcttctggt

SEQ ID NO: 268371 - DNA, 219 bp, Glycine max
ttcataagtgaaatcaggtgcagccatctccctaagatttctctcacgaggtggaagttaagccatacagtaagtgatcaaggccgtacccgaatcaaataaacattaaaaatgcagtatctaggaagtgatcctaggatgtctcccaatgagcaatggtcaaccaacgttcataatagatagtgataaaatagtaacgaattggggggggggggaggg

SEQ ID NO: 268372 - DNA, 440 bp, Glycine max
agcttaacaaacttataaatatttgatcataattccgaaatatagggggagtaaacgcacattttatctatatacaactgtttgttgcttgcttgaatcttaatttcaggtattgtattgtcatcatcgaaaagggggagattgtagatgcaattgcctttggtgttttgatgatgatcatgatgatatgatgcaattgatgcaaatgggcttttcaagattaaattcaagacaatacttcaagattacaagtcacaacatcaagatgatcactagtatattaggaagggaattcctaattgaattagcaaaaggtttggccaagtaatttaaattaaaaaagtgtttttcaaaggatttactctctggtaatcgattaccagaggatgtaatcgattaccaatggccaaatatgttttataacagctactaaaatttga

SEQ ID NO: 268373 - DNA, 436 bp, Glycine max
tggctgcgcacgagctccgatttcgtgagtatttatttaatatgacgcattgtaatcgattacaggtattggtaatcgattacaggcccaataagccttctggtaatcgattacaggatgttgtaatcgattacaggcggcctgttcatgtgtaatcgattacactgattggtaatcgattaccagagcctatcctaggctagtttctctaaaataacctatgtttatgctaaatacatctaacactatcaatcatcatcactaatatgtatttaattcattcaaccaagtattaatcaaacaattaacacacaccaatcaaatataatcaaatatttacaattaaacacagtcaaacaaaagcaatcatcaaaacataatcaaagacaacaatccacataactatcaatccaaaacattaattgaccatcaaatc

SEQ ID NO: 268374 - DNA, 402 bp, Glycine max
aactcattattgtaattaaacaatagctatttaataaataacaatataatacaagtgatggactcttatttaagaaataaaaaaaaaaaaaactagagttgttggcacagatataaaatggttaagagaaagtaaaaaattaaggtcccattaggtattcaactcgtaaccaattaagggcccattttgtgtgatttctaatttttagtttcagggtgagttttctttttttttttttttcaattttgaaaagttgttgtccatcttataattttactttgacacagatttattaatgaaatctaagtcacttgaaattaaaatataatttacttggcaaatacaccaaatgaatgttaagaacgcattcttccatggtgacctcaaggaggaaatttactt

SEQ ID NO: 268375 - DNA, 448 bp, Glycine max
tgttctttattgctgccatgcttgtgcaccactcttcttaagttatttataaagagtaaaccatgatacctagttcgattccaacaaataaaaagttatatgcaaaaagagagaaatatgcacacattatatatgcaccttacaataatcccttctctttctctaattcattaagctgatttcctgattcattcagtgagaattaattaattgatttataattaattagaggttgttacatgcagtgcaccttaccttttttggtaaccatgtttggcgtatggagtctcttcgccttttgctgctaaaggttgtgttaccaattaccacaatctgtgcactgtggttagaagactgttgcagcactccaatttggcttcgtcgacctgcttttagttccatttccaatgtcaaaactgccttatccagttacctaattttattattt

SEQ ID NO: 268376 - DNA, 396 bp, Glycine max
  unsure (1)..(396): unsure at all n locations
ttactatgtctgtcctaattagattatataaatgatgcatgttaatgtgtgcagtcctacaatgccacaaccaagaataatctattctaatcaccaaacaacttagctcatgagaagatgcatgatcaacattcaacatatagatattacctattctcttaccaaggtggacaactttaccagatatggcttcacttataagacaacaatttttgttgaattcgatcttgaaacctttatcacaaagttgactaatgcttaggagattatgctntaatccatccacatataacacattcattatttaaggtttgtgttgatatcctatattttcttctcccattacttttcctttgttattggttccgaacgtgaaatatccttcactttttgaca

SEQ ID NO: 268377 - DNA, 454 bp, Glycine max
catgaatattagaggctgtgaaatcaaactttaatgactacttgaattatatttctcttggtcccttaagaataattcctgctttgctacccttggggttacacgctccatcaatgtaaagcatccaccaatcatcaccataaatgttgcttgctttagagaaaagcttgacaatgaagtcagccaagcattgtgcatttataggtcctcaaggtttaaacttcaacccgagttcagatagctctacaaaccatgtgaccatccttccaacaagttttggttttctaagaacttgtttgatgagatgatcgattttgactcttatttgatggttatggaaatatgggtgcaagctccttgctaatttcatcgacgataatactaagtgttcaatcatttggtgtctttgttcggtcccttgtaaaactctactagtatagtagattggcaattg

SEQ ID NO: 268378 - DNA, 338 bp, Glycine max
attcatatccaaaccgataactagattacatatcatccaatatacaaggacaagatcacaagaatgtcttgcaaagattttgagtgtcagaggaattaatacatgggggactgcatacagcagcataatcacaagacaattcccatagatctcaacttctttgctaccacaataaggctagcccgatataaagaagtaaaccgctttctgatccaagtagaaataaacaaagtggtttgtttcatgagtcacatatgagcctgcaaaaaggaagagaagtccatgagttcactctaatgataactgtaacaagaatataactaagctaagcaagaaca

SEQ ID NO: 268379 - DNA, 474 bp, Glycine max
  unsure (1)..(474): unsure at all n locations
tatcgcccaaaatatctggctgaatgcttcttagatcgagacgttagttggatagccgcgttgactcaccaacaatgaatagaaagagacccaaatgaccaagaataagcttccatggatgccattctcttctctggattggaggacattcaacttacacaaacaacccttaacgaagccaacccaacactatgcacgggtgcaccactatgaatcttagaccgacatactccttttctttattgcgatcgatgaccagtgctacgggaagaagacacaagcttccttctattcttaaacgacaacattttcgttataaggaactctaatcttctattttctattataatttaattaaaggatgacgtcatgttatatgacagatggtcaacttaaaacaccaatnggtctagaaaatattatgccatatgaaagaagaganaagttgatttagaataaaaattcataaaacat

SEQ ID NO: 268380 - DNA, 471 bp, Glycine max
  unsure (1)..(471): unsure at all n locations
atccttaagcacctgcggcatgcagcttntagtttcagtgatgaagatgatttctttgtctctttatgcattccttgaatgaccatagcaatatttttggtactaaattgttgggagttggaagccatcttctcaattatattcctggcttcagcaggggtcatgtcttcaagggctccaccactggcagcatcaatcatacttttctccatgttactgagtccttcataaaaatattggaaaaaaagctgctcataaatatggtggtgagggcagctggcgcatagtttataaatctctccaatattatataggctctctccactaagttgcctaatgcctgaattatcctttctgatggttgctggccctgaagcacggaaaattttttctaagaatactcttttgaggtcatcctaactcgcgatggaccttggagcaagggaatataaccagtcctctgccactccc

SEQ ID NO: 268381 - DNA, 461 bp, Glycine max
  unsure (1)..(461): unsure at all n locations
acttctggctgtcaatactagtgaaaatagggctcatatatttaaaaatccttcaggttactcttcttggctcttcagccatgattgtatcttcaactggttctatatgagaatgccctgcaataaaaaaaactagaagatgcctcggaagatcgaggttcttcttctggangtgctgttgcttctaaatcctgcaaaaaaaaatagattctctctgaattatgccttctacaggtggcgttaatctccaaatcaacgggaatcaaatcacctgcagtagatcttctttgcatacaagaaaactgaacaaaaattatccagttcaaaagaacaatgaatattcgataactaatatatgaacaataagaatcaatgaattaaagagaacaatattatgcaatatcgttaaactgaactaaactcttcttaaatctagttccccggcgacggtgccataaata

SEQ ID NO: 268382 - DNA, 461 bp, Glycine max
agcttgtaggattatggagtacccgacatatgtgttactatgtggctatcgggcgatggggcaagccgactctccacatccacaaatcacacataaatccaccatcccaagttgcccaccttcaactgagctcacgtagtcccacgtagcccttatcctgattcctctcaacaccgggtccccatcaatccctccaagcttccataacatccaagcaattcaacatccaaacatcatgaattatcacaaccaagaaaacagggcagaggcagataactctgcccaaaacacaaaccaataccacagctttccttactcaaataccccaataacattctctttggtccaattcgctcaccgtaggatcgactcgaaaattatactggagggccctagtacataagtctacattctgaccgttgggatatgctagaaaatgtccagaaccgaatatgtactac

SEQ ID NO: 268383 - DNA, 410 bp, Glycine max
  unsure (1)..(410): unsure at all n locations
gtggtgttccgcaaaggagcataaaccacagagtctggcaacaggtgcagatttttgattcatggctagttgggttaccaggttaactaaggcatctagtttaccttcaagcttcttagtctcggctgatgaagatgaattcgtggctgcttcatgcactcctctaatgacaatagcatcacttctggcactaaattgctgggtgtttgaagccatcttctcaattaaatttctggctttagcaggggtcatgtctccaagggctccgccactggtagcatctatcatacttctctctatattgctgagtccttcataaaaatattggaggagaagctgctcanaaatctagtggtgagggcaactagcacataattctttaaatctctcccagtattcatataggatct

SEQ ID NO: 268384 - DNA, 461 bp, Glycine max
  unsure (1)..(461): unsure at all n locations
ccttaagtnacctgcggcatgcaagcttgatcttgaataatcgtgaagcattgtttgttttttaaagcaaccttgcattaaccttgaagtaatacttaacctttgaatgtttgttaaaggaatcttgaatgcaaccttgtttaattattttttgtcatcatcaaaatcatgtattcatacattcacattctctcccctttgtaatgatgacaatcattatcaagtgaattcttttcagcattatcaaaacctgcacaattcacatacacttatttgatgtatatatcctatttgaaagttttattcttaatattctttaaggttatgttgggtgaaatattttagttagtttttttttattagtaaaaagttcatttaaggattcgggaaataagttatttctagtatattcttactagttaacaacattttttgaaactgtacttcgaaataatattttt

SEQ ID NO: 268385 - DNA, 402 bp, Glycine max
actccacaccggtggaagtagaggagaccattcatcctattacgctgacatggtagacaacagtgggcacttaacttgaatggtcattattgccaatgcggaaggtattctgtgcttcactatccatgttcacaccatattgcagcttgtggttatgtgagcatgaactactaccagtatatagatgttgtttacacacatgagcacatcttataagcttactccacacaatggtggcctcttggaaattaagcgactattcctccttctaatgacgcctggacactaattcctgaccccactaccatttgtgcgaaatgtcggcccaaattcacactgataatgaatgagatggattgggtctaaccatctcaacactgacacaaatgtaatatatgtgga

SEQ ID NO: 268386 - DNA, 436 bp, Glycine max
catgcaagctagctatagatagacattctcactttcttctatccacttaaacaagcagacacacgtcagacctcggaaagaatttctacagaaagaaagaaacctactcggggagaaacaatcagaaaaattcacatctatataaaactccgggactcactttcttctgtccattcgttaatcaagcaaacacaattcagacataagtaagaatttgaaaagaaaacaggagacaaggaaagaaatctagaaaccaagcacgcaagaaagaacgcatgattgccagaatgagagcaaaaaaaaaaaagcaagcaagacacttagtaatcgggaaaagaatgataaattcatatctatataccactgtggactcactttcttttatccattcaatcaagcaaacacgatgtagacataggcaagaattggcaaagaa

SEQ ID NO: 268387 - DNA, 468 bp, Glycine max
  unsure (1)..(468): unsure at all n locations
cgcttaaccagcaatgacaccttccttttccctgctggagcatgttatgngacagcctgtctgagtgcaaaatcaagcatccattcctctgcatcttttctttcatctatcatttggtgcttcagctcaactttctcaagttctggctcagcaaccaagggcaggaaatttggattttgtgggctgatctttctcatttcctcatcctctttcacagatctcttccgcttagttccccattgccaattcttgcttgtgtgctgctcttcaccaccatctgtactcaggaacttactacccttaacttgattttcctccaataatttctgctcctgaacaataatggtggtttcctcaagcacttcagatgagtgaatntggttctcttggctaattccatcgtcgtcatcattctctagccttgcatttctgtcttcacagctctcatcaatcttgcaactttcacta

SEQ ID NO: 268388 - DNA, 450 bp, Glycine max
  unsure (1)..(450): unsure at all n locations
atgcaagcttgncactactatcttgaacttagttttggatgtttccacacaaagacacctacccttagcccaatctaaaaaaccctattctagcatgcctttagaaattcatgcatacactaacaacatgtaaaacacacaatgttaacaacttacttttaccatgaatgcttcaaaaaatgaagtttagaaggtgtgagtcgcacaaacttattcttagaactttttcttttctcttaaaagtgagaacataaggtcattatttatagagaaaatagttataaccgctgtaatcgattatatcaaagaagtaatcgattagattatcattttaatcgattaatgcgttcttcccaacattggaaagctttcaagaacaatataattgattagattattcatgtaatcgattgaagtgttcttgatcacttatcgttagtcggttaatac

SEQ ID NO: 268389 - DNA, 429 bp, Glycine max
  unsure (1)..(429): unsure at all n locations
tcacaagaaagcttacatcaagtggtaatcagaggtgcttcttatacctccattaattntcagctttaccttctcctccattgttgggtcttcattnttctccatgtatctcctcacatgtcttgtgctaattgttgttaacatgattctttagaatttctaccgattaaacttgctatagaagctagatttgattttctatggttcaaatttcttgttcttgttcttgaaccatgaattatgttgagtttaggttcctttgagttttgtcttgctattttttgtggctgaaacctataccataaaattcttacaaaaacattaaagtagaagaaaacctcaaaaatctagagtgacttgttcacttattgtagttctgttatagaagtcatgtctattcatgaaacttgtcacataagatttcttatg

SEQ ID NO: 268390 - DNA, 452 bp, Glycine max
  unsure (1)..(452): unsure at all n locations
agctttcacgcattgtatggctatttntgttttcttgttccttccttaaaagtatgcgttggataattacttataaaatagaaacatttacttacccaaggagccatgtcctactatgacttagtcttgagaccaagtatagttgttggtgagtaaaatagtgatgcacaaggacaagtatacactacacaatagtatcgaggactaaaagttcagatatcagacccacgtaatcaattgtgtttccaaataaatatttttgctaatgaagcaattgacaaaagaattaaaattaacatgtgatcaaacagttaaatatctagtttgagaaagaaatcaaacaagaaagataagtttagagataagacatagtgaatattcagggattatagtatcacgcataccaaatttcataatccttattctagatagatgcttaccaaagccaatta

SEQ ID NO: 268391 - DNA, 466 bp, Glycine max
  unsure (1)..(466): unsure at all n locations
ntccanagttttctggttntctaaaccttgataacttgtgctattcattcttttcatctcttctccctttgccaaaaagaattcaccaaggactaaccgcctgaattctttttgtgtctctcttctcccttttccaaaagaacgaaggactaaccgcctgaattcttttgtgtctcccttctcccttgtcaaagaattcaaaacgacacagtctgagaattcttttgattcttccctttcccttatacaaaagtattcaaaagactaaccgcctgagaattcttttgtatccccattcacagagtatcaaaggtttaaccacctgagatctttgtcttaacacattggagggtacatcctttgtggtacaattagagggtacatctacttgggtttgactgagaacaatggagggtacatctcttgtggatcagctctagtggagggtacatccactatggtttca

SEQ ID NO: 268392 - DNA, 439 bp, Glycine max
catgcaagccttaaataggcagtaaaatctcgactttgtgcttattgccaccctcgtgcttagccacgagtaagtgaaattgggcttatcgccaatcgtgcgttgagcctggttgaaggtacctgttgcgcttaacgcactgatctcatgcttagagcgcgactttgatgctgatgctctaccagattctccttggcgctaagcgcgctgaagctacactcagcgatggatatgcgcttagcccaactgttgagcttagcccaactgctactttttgaattcaaaacttagactctttttcacctgaaaatgcacagatttcatcattaaatccaatggaatttgtttagagacagccataaccataaaacaatatttatttacagaatttactccaaaataccattaattggggaactatacaagctttgaaaatgat

SEQ ID NO: 268393 - DNA, 471 bp, Glycine max
actcaagcttattaagaggcttcctccagaagcttcctcgtggcttctttgagaagctttctcaagagacttctttgagaagctagatccttatctatccacacccctctattaactaaattaacttccttaaaaataattacggatgaaaataacgcaacaaataatcaaacatcaaacataattactaataatatatagatatatatatcagggtgttacactgtcgccccttgtgacgaatatgtggggtgctaataccttccccatgcgtaaatacaactcccgaacctttcacttaaagttcgtagatctcatcttttccggtttttccaacgttttcctcaaataaacgttggtggcgactccgcgcgcattcctttcttggaagacgcacccgcgagttacgtgtcgctctcctgccgaagggtaggttaccacagttggcgactccactggggaaggggacta

SEQ ID NO: 268394 - DNA, 301 bp, Glycine max
  unsure (1)..(301): unsure at all n locations
attttggacttgacgaattgtttgggcacgaatggatgagaggaagtgtgattttcgaaatctgcacttattgcaaatcttgctgtcaaaatgggtgcagcatgattttggtttggtgcagaaaaatgttatgcatttactggctgtggaaagagcagtgcacaatgagttctggatgttttctaatagatcccaacggtcaaaatgtaggcttatgtactatagacttccagtaaaanttggagtcgatccaacggttaacgaattggatcaaaggaattgttactggggtctttaagtg

SEQ ID NO: 268395 - DNA, 470 bp, Glycine max
ctcagctttacttatgggagggcgggctttcttcactttcttgtctccaacgcgagctttgaccaccgctcttccttcccgcgatgcttctcttcatatttgcctgagagggcttataacctaaaccatacttcccacgatttcctttggcatttatcaagctagttatgccgccgttgtctttgcctaaaaccatttcgggttcgtaaccgttccccaacataactcgggccatcattactgctgtatcaaacaggcaagcttgcccagagaaggagtccaccgaggaaatgcttaccacctcaaaagactggaaagcggtttctaatgactcctctgcggcctccacataaagcatagaagatgggtagctcaaccagatgtcttcctcgtctgacacgatgaccaaatgcccctccactacgaatattaacttttggtggagtgtagagggcacaactcccactgag

SEQ ID NO: 268396 - DNA, 410 bp, Glycine max
  unsure (1)..(410): unsure at all n locations
agcttcaccaccaagagagtgtcttggaattattcttacagaggaagcttcaatggaggaagaaaatgagagagagaagcgtgggaatcgaaggagattanggagagaagttgaactttgaagtaagtctcaaaagtttttcattcaccaaagttatgacaagtgttacacatgtttttatttattgcctatcatatgggaaactttctttggaaacaaagaaggtgagcttctttggaagcttaaggaataaagcttccttgttaaactatagaggggctatccacacacctccaatagctaagctcaccccatgccaaaatacttaaaaatacaatgggaagcttttttgagaagcaaggaaggtaacttccttgggaaacaaggaagaaagcttccttgagaagcta

SEQ ID NO: 268397 - DNA, 377 bp, Glycine max
gctctagcttctcaaggaagttttctcaaagaagcttctcaaggaagttttctcaagaaagcttctcaaggaagctacctagtctataaatagaagcatgtgtaacacttgttgtaactttgatgaatgagagtcttgtgagacacaactcaaagttcaacttctctccctttttcttccttcaatttcgtgctcccccctctctctttctctccctctttcttttcctccattgaagcatcctctccaagcttctaatccaaggctcatcttgatggtgaagctccttcttccatggcttattccttaatggatgacgcctcctctcacctcttttcctttgtcttccgctgcatcttcatggtggaaaatcacca

SEQ ID NO: 268398 - DNA, 446 bp, Glycine max
  unsure (1)..(446): unsure at all n locations
agcttccatcatgtacctagtataaatngactcaaaattgtaaatgtaataccaatctaaaaaaaatttagaaaatttaaatgtaaatcaaattgtttaaattacagtggtgtatgtaatcatcagaaagttaaataaatattaaaatacaaaaaaggtggcaaaaatataattattttaaaaattttgggaaaattaaattaaaaaaaaaattctaactaatcttaaagattatgaaagtttaaaacagtcacaaacattcttaaaagagaaaataaaaaacattacgacagttctaaaaccgtcgcaatacttttgtaaaaaaaacattaccacagttccataactattgcaatattttttccaaaaaataatattacgacaataattattgtgaattgaatgaattaaaaatgaaatgaaaacattgaggcagttgaaaacta

SEQ ID NO: 268399 - DNA, 412 bp, Glycine max
cttcttcaaccttggtgattcttgactccatctcattgaagcacatgttcacttgtaattccaaagtgtcaaacctttctccaacaatggtttgaagaccgtcaaacctgtccaaaatctttgaaagaagagatgaatcttctccatcatgtccttcttcaccaacatgtcgagcaccttttttcactcaagagccatcatgctctatttgataaccaaaggatgcaatgactgaagcgcctattaggaaggatctcttgattggaacataaggttcagaatcaagagggatgttaaagtgttgaaggaagagagtgactatatgtggatatggcaatggagcattcaatcgcaattccttatgcatgcgatatctaacaagatgtgcccaatcaatttgaagaactttatg

SEQ ID NO: 268400 - DNA, 344 bp, Glycine max
  unsure (1)..(344): unsure at all n locations
aaccacgcagctgcaacccagaaaagaacaaagagaagaattattaactctctttaataccnngctccacccaacatctccacaacactaagttcaaggggtcacaattcctatcaattaataaaacaaacaaaagcgcaactctaatacataacaattcaaaaccttaagagaagaaaacaaattaatgaacgacacggntaacccatgatgttcacaaaggagaaataagagacggaaaacgatgatctaaagagaaatcgaaaaatcgaacagagaatgacaaacggaggagggaggcacctaacttctaaggaacaagagagagaaaccaagacttaagg

SEQ ID NO: 268401 - DNA, 468 bp, Glycine max
  unsure (1)..(468): unsure at all n locations
tcagctatagtattgaggggaatanacatcagaacattgttttttcagtacgaagattctgttgcggcctctacatgaggagaggtaggagccttcgtaaagcgacacacaactcccaccgcatatagaatatcgggccttgtattggttagatagcttaaactccccacaagactcttgaagaccgtggagtctaccttctctccttcatcaaactttgataacttcaagccaccttccataggtgtgttcacgggattgcaatcaagcatattaaatgtcttcaacacttcttttgtgtagcttccttgtgagacaaagataccattctctgtttgcctcacttccattcccaagtaatatgacatgagtcccatatctgtcatatcaaattcacgagacatggacttcttgaagatcttaaacaaatttgggttattgtccgttaagataagggcatccacataa

SEQ ID NO: 268402 - DNA, 440 bp, Glycine max
agcttcatgatgatgaatcaagcggatcattgttttctgatgatgacaaagatgatgaccaaaagcccagagaatgattccaagaataagttcaaggtcaagattaatttcaagtgtcatcaagaagattcaagaatcaagattcaagactcaaagattcaagaatcaagagaagacttaattaagataagtattaaaaagtttttcacaacattgagtagcacatgaagttttcacaaaatcattaccaaagaagtttactctttggtaatcgattaccagattgtaggaatcgattaccagtgtgttaaaatggtaagatattcaaaattcagaatctaagagcccatctggtgatgtgtaatcgatcacacttttatggtgatcgattaccagtgactggtttcgaaaaatgcattctcaaaagacacaattcttca

SEQ ID NO: 268403 - DNA, 482 bp, Glycine max
  unsure (1)..(482): unsure at all n locations
atactaagcttactcgacataagttggtaattatatgaggtcttgacttaatccccactttctcttcgcctttggcatcaacaaanagccaaagtgcgtatagagacataaaatcatacattcatccataatcatccaagcaaggaagacaataatgcatacataaactaagcaagtatgataataattcattcataaactataatgtcagataatttagagagtcatccaagataacttaattaaaacaactaaattagaaagtaacatactaataagtgtttcagaacatagccaaatacacggctagaaatcaaaatactaataataatagtaatgtctaaactgatggtggtggtggaggtaaatcaaggcagtcacgaatgatggtgacatcttcttcacctttgcaatccttgagttcatctcctcgaatcgtgtgtccacttgacgttccaaggagtcaaacctctcaccaacat

SEQ ID NO: 268404 - DNA, 455 bp, Glycine max
ggatccttaagcacctgcggcatgcaagcttctacttatgtggcggggcgggcttcctttactttcttgtctccaacgcgagctctgaccactgtccttccttcctgcggtgcttcttttcatgtccgcttgagtgggcttatagcctaaaccatatttcccacgatttccttgggtttttatcaggctagttatgccgccattgtctttgcctaaacccatcccgggttcataaccgttccccaacataactcgggccatcattaccgccgcatcggacagacaaggttgcccaaagagggagtccacggaggaaatgctgaccacctcaaaagactggaaagcggtttttaacgattcttctgcggcttccacataaggcatggaggatgggcagcttaccaagatatcttcctcgcctgatacgatgaccaagtgcccctaccactacgaac

SEQ ID NO: 268405 - DNA, 384 bp, Glycine max
ccttgctcttttctttgatatttcattgaactttaggatagatataccttagataagttttagattcttaggggtttactgttttacaagttagtaacaatttatgacttggcactcggtttgcattatgtacattgtactaagggctgcgcatgttagatatgccctggtagaggcccggaaaaaggaagaaaacgagctgcattttctgaattttttctggaaaacgtgatgaactcgctaagtgagcatgctacgctaagcgagttcatcaatattcattgaatatatgcgttttctggaagaacttgctgagcgcgcctaccgtgctaagcgagtttatcttttgaggatgaatattcattctcttgatgaagtacatgt

SEQ ID NO: 268406 - DNA, 455 bp, Glycine max
  unsure (1)..(455): unsure at all n locations
agctnggaaaggctttttgaaaggatactttggtagagcttatagaggcttagagaatattgggtgaagagtctgcaaaggcttatagaatattggagtgaagcctatagagactttttgaaagaatactgtggtcaagcctaaaaggcttttcaaaagaatactcgagtgaagcttaaagaggatttctgaaagaatatttgggggagcctgcaaaggcttatagaatactatgaaagatcgaggaggcttgaggaaaaagagtaccttggtgttggtgcttatgttagtggaaatcctatagttttagggactagacataatccaaggtattgggagaaccaacataaattggatgttggctcttttcttttatgcttctcattcacatgtttggagtattatttaatattttgataagtctttagatntaaactaagctaacatctcaaaat

SEQ ID NO: 268407 - DNA, 495 bp, Glycine max
  unsure (1)..(495): unsure at all n locations
tacgtacactatcaatactaagcttagacaacaagtattctccatcatgcacacacacacaaacatatcaagagaaaaaggacattaatccttttccctccctagggtcacaatcaacatggcccttcaagtggaataatccactttacaaaatcacacaccaccacatatccaatcaccaaatcattacaagacattcaaagtaaattttttctgagggttggacacccttggacctaaccctaaagtgcgacgattcttaattaatatcattaataaactcatatacataacacacaacatcctttaccaagtggtcacactcaattggtcttaaaacatatacaatagcaattcttataatttcatattataaagtctccatcaaagtaaacaatacattctacaattcacatcattaatttcatgcatttcatatacattcatgactaattcccatttggagtcacacgtcattgcccacttaanaaatca

SEQ ID NO: 268408 - DNA, 382 bp, Glycine max
  unsure (1)..(382): unsure at all n locations
agcttccatcatatggtcactgggcagaatgttgttttattatcccctcctccatatctgcgtgagagaggtcattgtggtgcgcatgatccgcactcgtctcttngcagtgacacaggtgaaatcttgcccacgtatgcatagaagttgtggaaacccaccccctctggttgtgctcgaatagttggtcgccctctaatatcagggggtggcccaggaactgataatagaaaactactagcccctcacccgggagcgcaggcctcgattgacattaagggcagaggaccttaattctcttaagtgaggattggagcccactgatgtaggatgctatccctctaaggcgaggcgtgtaccctctgaagcaggactgcatcct

SEQ ID NO: 268409 - DNA, 434 bp, Glycine max
  unsure (1)..(434): unsure at all n locations
agcanctaactggagagatgcgatttcttttgttaataccttaagaaagaagacattaagttagcaatttgatttttaggtttaaattgtaaatagaatagataaaaattaggactttgttaaggattgtgttgcgtaggtaattttgatggttttgcatgtttgataggtgccttctaaaggcctaaaaaaggaagaaaacgaagttcgttttctgcattttttctggaaaacgcgacaaactcgctaagcgcgtctgatgcgctaagcgagttcaactaggttgttgaatgttcatttacattatgaacatcgcggctaagcgattgtcctgtgcgctaagccactgtacaaatcattaataacaaacctggggctaagcgagggttgctctctaagcccaagtactatatacagatattgtttgttgactg

SEQ ID NO: 268410 - DNA, 466 bp, Glycine max
  unsure (1)..(466): unsure at all n locations
tccgttcccgagagcatctcttatgtaagcatttcagcctttgctttcttgcagcttaagaaaaatgccatttcttcttctttctttcttccaaatccatctctaaagttacaagtactttctccatcacccacatccaccattagccaccacaaaccatcattgttctccattgaaaacccacaccgagaggaacccttcaaccgaagcagaatttccaacttggcttgcggtttcggtagagaacgaaaaccctaatctgatctttcattttctttcgaggtaactatggttctatgcttgtttcttgatagattcatcttgtctttgcatcttttctaactttgcaaccgccattgcatgtcttatgcttcctttgaaaaaccttagagaanaagactttgtaaacatgatcctttcatgaaatgcatgttattttcgtaacctacactgaaccccggtcaca

SEQ ID NO: 268411 - DNA, 448 bp, Glycine max
cagcctgcagcttttatccaggcaggtgttggtggtgaatctcttattccttggctgattccctagtggatggtgtctcccctcttctcatttactttgcctttcgctgcatcttcatggtgaaaaatcaccattgaaggacctcattgaagctcaaagaaccagtcctcatagaagctccacaagcaagcttccatcaagtggtatcatagcacaagagcttcaagtaggtgctccttaaacctccattaattgtttgctataccttctcttccatagtttgtatcttcatttttctccatgtatctcctcacatgtcttggtctaaatgttgttaacatgattctttagagattgcaccgattaaacttgctatataagtaagatttgatcttctatgagtcagattacttgttcttgttcttgaaccatgaattgtgttgagttt

SEQ ID NO: 268412 - DNA, 430 bp, Glycine max
  unsure (1)..(430): unsure at all n locations
taacttatatacacactcggactagtggtcatactcttgtatgcttaantattttcgccagcactaattacaccatccatgcattatgctatattatatacttaaatacttaatatttaataaagaaaaataagccaggcatccccaatccaaacataaactaacctatttctaccaaaaatcttcattcgtttctctaaaaccccttctcaagagctttccaagaattattatctgtgattattttgagttcaaaaaaatgagtaaaacactacattgtccttaatttagcattatttaattattagaatattttgtattatttatgaaaactaatattctatcattagaatatttctattcactattcttttccctttaatcataacaacgattggataaaaaaaataagggcttaaggttgtggcag

SEQ ID NO: 268413 - DNA, 428 bp, Glycine max
  unsure (1)..(428): unsure at all n locations
ttaagtcacctgcngcatgcaagcttgccactgcagcagtgaagtgaacttatgatgtgtccacagtcattggatggttgcttggtacaggtacatgctaataactaattagatttcctgtgcagggtatcattgtttatgcatgactgatggctaccttggggctggagattttggttgaatctgcctcaagcgttattttgaaggtaatggagataatcttttgttgttgtttgtctattatatacctaaatttgggttgaagactagttattcaacatgtggattatctaccataataagtgattttatcatttgagcagatgatattatcatttgaccttgcttttgcttggattccgctcctaaagttcagtcgcagcaaagtgactaccagcacacgcatttgagaggtgtgtttcctcctt

SEQ ID NO: 268414 - DNA, 459 bp, Glycine max
tatagtaagtacacttaaatatgacataccatttgtttggtctcccaccattcatttggtgcatcaatagtgttcctgatattgtctcatcctaaaccagtttcttttctaaataatttgtatcatacacaccaatcttttctcaagttatcatacttattttttaattgtgccttgttataagtccttccagttaattgtgtaaacttggattgaatacctttccgccctaccttagtaaagctagaaccaaggcgttcccctctagtaatttgctccaaacatagcttcaataaaagcttcatttgcttttggatcccaagtagctttttctttgtcaatattttgtgaaggattcgcaatagcttttcctctaatagtactcataatctaaataaatctttatgaataaataaatattaatttattaaacacaagaacaaaaaatagttaatcggt

SEQ ID NO: 268415 - DNA, 403 bp, Glycine max
gcatcaagctgttggataatagggcaatgacacttctgtatactgaggtcaaagataatggtgggaaacatttctccttattagctatgggaattctgtatgaaataacttacttgctctcgaatatgcttagatgtctaaaactctgagtggcgtttcttatatatcaggttaaatgctacatgcagcagcttcttagtggattggatcattgtcatagtcgtggtgtcctccaccgtgacataaagggctacaaacttctcattgacaataatggcatcttaaagatcgccgattttggtctggcaaatttattgacccccatcacaatgttccatagcaccaccgtgtataactctgtggttataccaccagaactttcacttgagcatctaatatatgg

SEQ ID NO: 268416 - DNA, 388 bp, Glycine max
ctgcctcaaataatgacataatggcttcataaaaaacaatatgacctctcaaggagtcagacctatacagggtggtgggtgggctttgcttactgtatagaggaggctgatgtagttaccctgtgaagtctctttgtaccatctttcccttgctacaataagccttcataggaagggtcattcctaacaatatacaacatttgcttcatgtgagtcatctgaaaaaaaaaagagtcaataattcttcataataaaaaattataattaactgaggcaataaaataaaataagaacattagatttgtctaaaagttatataatatataaaatataaataagaataaaatattccatgaacatacaatctttttatggggttcatcataat

SEQ ID NO: 268417 - DNA, 447 bp, Glycine max
  unsure (1)..(447): unsure at all n locations
agctatgagccaatttatacgtattttattttntactcggatgtctgattgagtcccgtcatatatcaagacgctcgaaattgaatgttgaagctctgagccaattcaggcgacaatatatttttactcggatgtctgattgagtcctttaatataacgacacgctcgaaattgaatgttgaacctctgagcaaattcaaacgacaataacttttttttcggatgtctgattgaggttcgtaatatatcgagacgctcgaaattgaatgttgaagctctgagccaattcaaacgacaataactttttactcggatgtctgattgagtcctgtaatataacgagacgctcgaaattgaatgttgaacctctgagcaaattcaaacgacaataactttttattcggatgtctgattgagggtcgtaatatatcgagacgctcgaaattg

SEQ ID NO: 268418 - DNA, 434 bp, Glycine max
  unsure (1)..(434): unsure at all n locations
tgacccactaacctagaatttaataacttaatgccattaacctagggaattaaaaaaacttaatggctgagtgtaactgaaattgtggcaaccaaaagtcacccccaacagccaacaagtcagccaccatttggtctcccaaaaggctgatgcctaggttgccaattgggcccttattacaacttgaactaaacctaactaaagcccttttagttgattaacccaaaacatatttttggtcagccaactttacaaggattgggccattatttagacaaactaaacactctaaaattgaaacaaagtggtgtcattttggtacgaaaattgaccaagaggagttgaanatcaacacaagtgacattcaaagggaagttaatggcgtgggggctggttggaatcctcatcaagggctgagttaattacttggctat

SEQ ID NO: 268419 - DNA, 409 bp, Glycine max
agcttctgtttacatttcgagcgtctctttattttacggggctctatccgacatccgagttaaaagctattgtcgtttgattcttctaagagcttcccttttcaattacgagcgtgtcgatatattacgggacacaatcggacacccgagttaaaagttattgtcgctcgaatttgctcagagcttctgttttcaatttcgagcgtctcgatatactacgggacacaatcggacacccgagttaaaagatattgtcgtttgaatttgctcagagcttctgttttcaattacgagcgtctcgatatactacgagacacaatcggacacccgagttaaaagctatgggcatttgaatttcttagaacttttgttttcaattcgagcgtgtcgatatattacaggactcaat

SEQ ID NO: 268420 - DNA, 422 bp, Glycine max
actcggatgttcgattgagtcccataatatatcgagacgctcgaaatggaagacagaagctctgagcatattcaaacgacaataacttttgactcggatgttcgattgtgtcccgcaatatatcgagatgctcgtaattgaaaacagaagctctgagccaattcagacgacaataacttttgactcggatgttcgattgagtcccataatatatcgagacgctcgtaattgaaaacagaagctctgagaaaattcaaacgacaataacttttaactcgggtgtccgattgagtctcgtaatatatacagacgctcgtaattgacaacggaagctctgaaaaaattcagacgacaataactgttaactcgaatgttcgattgagtcccaaatatatcgagacgctcgtaattgaagacagaag

SEQ ID NO: 268421 - DNA, 449 bp, Glycine max
  unsure (1)..(449): unsure at all n locations
agctagcatgagttacattcttcccctttcttaagcaaattcttaattcttcttgacatcatcaaaatcttcatgatttacattctccccctttttgatgatgacaaccacctgtaggttaggagcaacaacaaagaaaaaatatctatttgcatatagtttactcccccttggttntgcaatgattgcttatatgaaacagctgaagatttcatatttttcatatataaacctattgtctcataaaaaatagataatttttcttactaatttatcttttatctttctctcccgctttgtcaacatcaaaaacaaatcatgaatagagaggagaaagatgttaccacttgttgcaatgtatgagaatcaagtgataccaaaaggcattaaaacaatcattcaatattaatcaagcaaagacaagtacaataacacatcaatcaaacaca

SEQ ID NO: 268422 - DNA, 448 bp, Glycine max
  unsure (1)..(448): unsure at all n locations
atgatttcctttgttccggtnactattcttttctcatgtgctcacaaacccaatctccgggttcgaagacaaccttctttctccctgtgttggcttgtttagcatagcttttatttttcctctcaatatgatctttgactccctcatgaagcttcttcacataggccgcctttgcttgaccttctttatgcttaaaaacagaaacattatgcatatgcaaaagattaagcggagatagtgggttaaaaccacaaacaacttctaaaggagaacaattagtggtgctatgaacagatctattgtaagaaaattcaacatggggttaacaagctctccaagtttttaagttcttcctcaaaactgtcctaagcaaggttcccaaagtcctattaacagctttcgtttgcccatcggcttgtgggtgacaagtggttgaaaataacaattt

SEQ ID NO: 268423 - DNA, 312 bp, Glycine max
gttttgtgttataatgactcttcacaggacaaagggttaaattttttggcattcttgagcctttttcgacataaatttgtcaccgagagcaaatagtgttccgcatttgaacgacatgtctgagatgcatttcatttctccttttgatttatggcgtctttcagcatcaaagactaaatctatttttgagttccttagacttatttgaccgtggttaacccaatatttcttcttcttcacacaacaatcgttcacattttatgtccgatccattacatgttcatacctcatccttcatattatcgctgcttt

SEQ ID NO: 268424 - DNA, 448 bp, Glycine max
  unsure (1)..(448): unsure at all n locations
tatgcatcatgctagtgacgttaaagaagtgcctactgggaggcaacccangtctttntctttatttttcttaatcattgcatatagttaggtttcaactcatttgtgattgctagagtaagtcatcaacatgttttgtatgataaatggggttgcttaagtttctctaaagttgtggatgaggaataacttagaaatttttttcagtcatccattcgctcaacgagccctgtgcgctaagcgaatcattcttcatgcacagaatgagccacaactcgcgctaagtgcaccaacccctacccattggctgaatggggcctcgctaagtgagaccattgcgctaagcccaaaaacctctctagaattgcatttattggaattgggctaagcaagtcatctcgctaagcacgtaacacagtctcgctaagcacatttgtgtgctaagtgc

SEQ ID NO: 268425 - DNA, 477 bp, Glycine max
  unsure (1)..(477): unsure at all n locations
tgcttctacacccatgcgtagcttccactctgactgaggtctcgaaagacgttcaagaacaccacatgcacatgtgttgcactcttattagcaaaaatagtgtaacctaacaaatgcagcaaaaaacctcgagttgctacagtccagtgttcggcctcacatttactatgataaatctctcgtagccacgataggtgtacgtatgccccatgacaccgtactgtctcagctctagcttcatctccagtgacttcaagtaacttcactaacatcaacactactttgtcgacatgaattgtgtcaaagctgtggaatgcgcctatgatgggcagatgaagcaaagacaccacatcatcgaaggtgatggtgacctctccaactagaagatggaaactgctcgntttcatatgccaccactccataaaagccgatataagtctacggaagcgatggcttccaaggttattctgatgatgc

SEQ ID NO: 268426 - DNA, 465 bp, Glycine max
caagcttcataagtgaaatcaggtgcagccatctctctattagtcgtctcacgaggtggaggttgagccatgttctcaatatgaaaattagtaatcaaatgctcaaaatcagaatattcaaaatcaccagcaacagaatactcaaaatgctaaaaatgctcacaatgctcaaaatgcacagaatgatcaggatgtacactatgcctaactaatctatgaaaggttctatctatttcaggatcaaagggttgtaaataacctggattttccctagtcatgcactatatgtaacaaatcatgtatctcttaacaagcacctagcaagggggtaaaactatatctatactcaaacgatatccaaataagctgaaattttatgagcaataccctaaaatcatgaaaagatagcacaaaaaatttcaaaccaaaattcatagtttaactatgaaaactacctgagcaaag

SEQ ID NO: 268427 - DNA, 464 bp, Glycine max
  unsure (1)..(464): unsure at all n locations
accgacatagtcaacatcacactaacttactaacttgaaaccctttccttaatgcatagaccaaggttaggagttcgaataagatatctaaatattcttttaacagtagttaaatgaacttcccttgtctcaaaatcttgcacgtaggcatacactgaacatgatgtcaggtttgaacacaattagatatatgagagacgttatcattgctctatattgggttttgtccatcttcttgaattactcatccattctaagataagttgtcgcaacctacccttcggcgggagggcgacgcgtgactcgcgggatgcgtgttccatganaggaatacgcgcggagtcgccaccaacgtttatttgaggaaaacgtcggaaaaaccggaaaagacgcgatctacgaacttttaagtgaaaggttcgggagttgtatttacgcgcggtgaaggattagcaccccacacg

SEQ ID NO: 268428 - DNA, 452 bp, Glycine max
  unsure (1)..(452): unsure at all n locations
tcaagcttagaagggccgattgggactaatcatatgtggnaagcatggtgttaaaggataagcttgaagcttgttaaaggtcgaagagaagtttgactgaaaagctaagcaaaatggaagaaaatatgttgacaattatttatcagtataaggaaaaggcaaacctagctgccagtcatgggcagaggttggaggatgagcatgcgaaggtatcgactttgcaaatggaaagggaagcaagagagagggtgatagaatcattgcacatggaagctatgagatggatggataggttttatctcacgctgaatgggagtcaaaagcttccaaggttgttggccagagccaaggcaatggccgacatgtactcagctcccgatgaagattgtggtcttttcgattactgccaacacatggtcgaactaatgacccacataattaggaatcgcgga

SEQ ID NO: 268429 - DNA, 461 bp, Glycine max
  unsure (1)..(461): unsure at all n locations
tacggaccttaaaactcagcttacaccattcctctttttatatatatatcacccaataactctatcaattgttcaatccaattggattcatgccactctttcttttcanaatgaatcacaaattnntatttcttctttttattttcccccttttttttgaaggattgggatttacataaactactagctctaaattaaatttacatgagagtgacctataactgtttccaaattgattttcccaagtactcccccaaacttattcaacttaacacataattgcttgcatactctatgtaagattatgtctgcttcttaatagatataacattgaaatagttgagtagaacgttagtcatcacataaacctatcagtttgtacccactgaagatcaacttgctaatacacaaccccatactaaagaaagaatgatttatttatgaatcaacttggaataaac

SEQ ID NO: 268430 - DNA, 122 bp, Glycine max
gccagacccacaacctagaggaacagcaaacctccccgagcaagagggggagaccccccccgggggccggaaaggcgcctaaaatcaggggggcagaacgaaaaaaacacacccccccggac

SEQ ID NO: 268431 - DNA, 463 bp, Glycine max
gcttccttgacctgagcagcagctgacttcgtttttttaccatgctatgcgctccagactgcgctttgtctccccttcgaagcttgagctcattgttgctgccccataaagctccacggaattagactcagccatgctcttacttgcgagccctattggtttctcgttcaagggctattgcgcgagctgcattctcttctcagaacctgtacactctttccggacatctgtagcgattaacttgaatatttctttggcaaggcttgctttccctagatttgttcttagagctcggacttcttcatcctctttcggagcttcgaagatcttcttgttgataattttcaacttggagagccaatctaacccttgtgtaccaactttcaaccattcatgataaccaccgacgatgccatcaccgatgcccctaaattctttatctttacttaacggactttcccac

SEQ ID NO: 268432 - DNA, 450 bp, Glycine max
  unsure (1)..(450): unsure at all n locations
gctggnctgttttcatttgtagtttacttatgaaacatgttgaagtttgtctctattaaatctatagactgcttggagcaccagtagagataactagtgataaggatcttgttattgtgagtggtttgatccgaattgagagtggcatcggataataaagaaaagggttttgtttgcgattctacaggctccgctcacgtgcgtgtgttgctgggttctcttgatcaaggtaacactaacttctatacttcatttgacctattttattttttctgggtagtaataagtaatgttgcatgagttttagtaacgtgttattctgtttgcactataacagagaatcaaccatgatttctgtagatggatccacaggggtcttgaaattcccctgcattgctttaacattntactgtccaacagggggggctttgatggaaacttgcttgtggg

SEQ ID NO: 268433 - DNA, 447 bp, Glycine max
  unsure (1)..(447): unsure at all n locations
ctcttctcagatcctactctatatgagatcagagttggagctctccaatactccaccataaccagaactgagctaagttttgctgtaaacaaagtctgtcaattcatggtcatactcttgaaactcactgagcagtagtgaaaagaattctcaagtatctaaaaggctctttacaccatggcctacttctcaaagctgctactccaggaattaccattcctattaaggccctatgtgatgcagattgggcttctaaccctgatgatcacagatctactttaggagctgctatttattttggtcctaaccttatatcttggtggtctaagaaacaacagattgctgcaaggtcaagtactgaagctgagtatcgaaacctatctcangctacaactgaagtagtgtggatntattagaattctaacagtatcatagagagatattttg

SEQ ID NO: 268434 - DNA, 448 bp, Glycine max
  unsure (1)..(448): unsure at all n locations
agctgatgtatgctaagcctcgcatctcttactaagcgcatattgcagaaagatttttggtgntgaaaaaagcgctaatcgtcgctgccgcgctaagcctaaattcttactgaattttacaacctcaagttgggcttagcgcgaggctaggctaagcgctagtgttctaaactcaaacgtcaaattggcacgctaagagcagttgtgcgctaagcatgccatccgaatttcaatttttaaaaagtagaggcagaggcacttgggttgctacctttgcacccaaacctctacaacctcttatccctgagcattcttttgtttatgttatgtgcttactactcctctgcatcctttacttcctcatactctacattacacatccaagaaagtttctggatatccttttgctttgtattaatgcttacaccttaggataaggatttatgtt

SEQ ID NO: 268435 - DNA, 469 bp, Glycine max
  unsure (1)..(469): unsure at all n locations
ntaacttttcaatctctctgcgaataaataacaacattgcttaaatatcatatcgagacgaatctgatatctcaagattacatttgaataaaattaccctccccaaacccacaatgaatatggcctaaggaatacatcaacaaagagtgcaagtaaggtattttgcgttagagtcaacagctaaatgattcaggagtgaattctaatttacattagagcttccttgctttagttttattcattcaaacaattagaagcagatattaaaataatgaaaacaagtgaaaaaattgaagtaacacattatcagtaggttttctaataattatcccacaaataggataaactaagagatgttactaagaaggtctactgctatcttgcttaagcttcagcagcttggtgccataattcacaagcctagatcccacataacagcaactcaaagtagttagtattagatagcatg

SEQ ID NO: 268436 - DNA, 471 bp, Glycine max
  unsure (1)..(471): unsure at all n locations
ccggatcttaagcactgagctgcagcttgcttctacactggatcatctatgtattctaatgtagcggntgatgttttgagcacaaagtctatgggtagcctatctcacattattgaagttaggagacctgtattgaaggagttccaagatcttgtagctactggagtgaggtttgaggtcttacgcaccaaatcacttctagctcatgtacatgctcgttcaaatttagtggataccattaaggtcactcaaggtgaagaccctcatttaaagaggattatggaggagacacaagtatgaaagatttctgattttgtagttgattctgaaggtgtgttgcactttgccactcgcctatgtgtacctaattcaggaagcttgatggagaagattatggaggaagttcatcattcctcttacaccattcatncaggttctactaaaatgtatcaagacctaaaggagctcttt

SEQ ID NO: 268437 - DNA, 462 bp, Glycine max
gctgagctggtcaaccctatatccaaggaatggcaattctgatcgccaatacttcaacaacatctcgtagggatgaatgactcgggcatactttaagcttatgcacggaaaatgtaattatgaaattgagatgcccaaagaaacaccattttctagttaaccatgcattaggtaccatgttcaattattttggtttgttgctgtgtgtttttttttatttttagaaatgggtttatgatcccaacatggttggctcatggtgcctaacacatgcaactaagaatgtagtgtgaaatttcacgcttccccttctttgtttttttagaggaaaacacaaggatgagcaaacatgaaaacaaatggtatgcaattttgtagatcaaaaagtttgttgaacgcatatgcatgatgatgccatgactcatgcaaaaattgaggctggaatatgataacggacaaatg

SEQ ID NO: 268438 - DNA, 449 bp, Glycine max
agcttgataggaaattcactctttggaaattcactagtatcttggaattacaagaaacaagcttgtgtagcactatccactacaacagcaaaatacattgtagttggaagttgttgtgctaaaagtctctagatgaaacaacaacttgaagactttggggtaacccttgatcccattcctctaaaatgtgacaacataagtgctattaatctgtctaagaatccggtcatgcattctagaactaaacatatagagattagacatcattttctaagagatcatgtatcaaaaggtgattgttgcattgagtttgttgatagtgaacatcaactagctgacatctttattaaacctctttctggagataggttcttctttattagaaatgagctaggtatcctagatggatcgagtattgaaaggtgttgtgctatagtatgtgcatcttg

SEQ ID NO: 268439 - DNA, 449 bp, Glycine max
  unsure (1)..(449): unsure at all n locations
ntgttgtgaaaggatgtgactctttataattgaattgaatntcaacattcaaacacactggtaatcgattaccaaatcattgtaatcgattacaccattctgaaatcaattggaacattgtaaattcaattgaaagccttttgaaaacaattttgctactggtaatcgattacaataaactggtaatcgattaccagagagtagaaactctttggtaaaaggttttgtgaaaaattcatgtgctattcaatgttttgaaaaactttttagtacttatcttgattaagtcttttcttgaatcttcaacttgattattcttgattcttgattcttgaattcaaatttctcttgatttttgatgtgttcttaactcaatcttgaactcattctcttggtgcttttgtcatcatctttgttatcatgaagtgatcttgacttttgagcttttt

SEQ ID NO: 268440 - DNA, 443 bp, Glycine max
  unsure (1)..(443): unsure at all n locations
agcttgtaccaattggtcctttgttganaatttatgatgatacaattgcaactgcaaaaacaatcggacaatattgggaagaagatctatcctgcatgagttggcttgatcaacaacctcatggttctgtcttgtatgttgcctttggtagtttcactcattttgaccaaaaccaattcaatgaactagctcttggacttgacctcaccaatagaccttttctttgggttgtgcgtcaagacaacaagagggtataccctaatgaattcttggggtgtaaaggtaagattgtgagttgggctcctcaacaaaaggtgctaagccaccctgctatagcatgtgttgtcacccattgtggttggaattctaccatagaaggtgtgtcccatgggttgcctctcttgtgttggccatatattggagaccaaatatgtaacaaaacg

SEQ ID NO: 268441 - DNA, 405 bp, Glycine max
cccaatgagcatatacatccttcaatgtttgaatggctttttggccttctggggtctccctgcctccaatgaggacacggtccggattgaaaagatcttggattgcagttccctcagcaaggaattcaaggtttgaaaggatatggaacttgattcccttgccattgtgagtcaaaattttctctatggcctcagcagttttcacagggacagtggatttctccaccacaatcttgtcactcttggatacatcagcaatcatgcgtgctgcactctcccagtacgttaaatccgcggccttaccggctccaaaaccgcgagtttttgtcggggtgttgacagagacaaacactatgtctgcctcatagacatgtttctcaacatcagtgctgaagaaaaggttct

SEQ ID NO: 268442 - DNA, 218 bp, Glycine max
acaaatgcctcgcagatatcatgagttaattatactataaacattcactttgggaactgccgatcaatcacagcgtttttgctacgactcactcgccatgactaatgcgaatgacaccacgttcactaagacacttcctccaatttatttccatgcatatgaagactttatggattacgcactggatcatccagcctcgaccaattcactcctcttat

SEQ ID NO: 268443 - DNA, 85 bp, Glycine max
acattcggggttacatatgttgaagcgaccgattactgaatgagtgtccacgatagtcttccttaactacttcaaaagttgctca

SEQ ID NO: 268444 - DNA, 258 bp, Glycine max
caagagaaacacggcgggattaccctcattatcagaaaaacgagaaacttgattcccttcaaaccaaaagagactaaacaattggagagcactctaactacacgaaaaggagaagaccctaaacagaacctgggtgtatatagtctaccccagcttcaatctgttagcccgctcataataataaatcgatagaaagaagacaaatctaagaatgatttaatgaaaaaactaatagatagatagactaagaatatatct

SEQ ID NO: 268445 - DNA, 473 bp, Glycine max
  unsure (1)..(473): unsure at all n locations
gcagcttctaagggaagtttctcaagagagcttctcatggaagctacctagnccataaatagaaacatgtgtaacagttgttgtaactttgatgaatgagagtcttgtgagacacaactcanagttcaacttctctccctttttcttccttcaatttcgggctccccccccccccccctctctttcttttcctctttcttttcctccattgatgcatcctctacaagcttcttatccaaggcccatcttggtggagaagctccttcttccatggcttattccctagtggatggcgcctcctctcacctcttctcctttgtcttccgctacatctccatggtgtaaaatcaccattgaaggacctcattgaagctcaaagatccagccaccatagaagccccacaagcaagcttccatcaagtggtaatcagagcacaagagcttcaagtaggtactccttaaacctccattaa

SEQ ID NO: 268446 - DNA, 437 bp, Glycine max
  unsure (1)..(437): unsure at all n locations
accctggatatgccactgatgggttaacatttggtggcatacctcaaccaaacactttggcgggccctcaatatcgcccactaccttaactacaacccttacattttttggtgggaggactacnctctgccatggtggtgtcgcaacctacccttttgtgggcgagcgaggcaaggctcacgggtgcgtcttccatgggaagaaaatgcgcggagttgccaccaacgtttattgaaaggaaaatgttagaaaaaaccaaaggaaaccggtcataaagaatattccagattcgggagttatgtttatgcttgaggaaggtattagcacctctcacgtttgtcccaaaggacaacagccttagattagagttgtgtgaaatcatgtatcctanaaattttgtctctttttatttttgaggtcgacaaaagcgggacttt

SEQ ID NO: 268447 - DNA, 382 bp, Glycine max
  unsure (1)..(382): unsure at all n locations
tgaagagaatgtcatggatcactgtatataccacaangcagtgagagtagatttgtttctttgattatacgtagatgatattctgcttgcgactaatgataagggtatgttatatgaggtgaaataatttctctcaaagaactttgatatgaaggatatgggagaggcatcttatgtcataggcataaagatccatagagaaatatcttgaggcattntaggcttgtctcaagaaacctatatcaacaaagttttagagagatttaacatgaaaaattgttcaccaagtgtagctcccattgtgaagggtgacaaactcgctttgagtcagcgccccaaaaatgattttgagcgagaacacatgataaatattccatatgct

SEQ ID NO: 268448 - DNA, 447 bp, Glycine max
  unsure (1)..(447): unsure at all n locations
ctcagcttgacgccaggttgcagatgcatactatgagcagattacacatgatttctatcgccttgggaaggaaaatgcttcacatattagatctcaatctggatggcggacaatttcatcactgctttccatcactgctagacaccttgaagcatctggggctggatttgatgccctgatattcattatgtctgatggagctcatttgctccctgctaattacgttctatgtgtagatgttgcgagacagtttgcggagtctcgtgtaggactggtagatcggtctatagttgcactagatcttatggcaggttctgttaattgtttagaaaagtggtctaataatgctaagaatgcagtcaaagaagatgaagtggaaaagatgttgcaagatattngggaaatgtggtttaggctagttcagggactgaggaaagtatgtctgga

SEQ ID NO: 268449 - DNA, 409 bp, Glycine max
acactaacattctacaaaatatagagctttccttcttccatatttaaacttaacagattccaaatatcttctttaatagatgtttcaatttggtcttccttattccatataaaaataaaacttggtgtaaggcagaaagacaattttgccttatattaataaaaaacaaataacctatacacacaaaaaattcatacctggctatcaaacaaaatcatttcaaacctcccaattgcattcccattaacatggtcaactgttttccacagcttactaacttaagccttcacagcccaacaggtaatagaaggagtaatagccttcaatgggattaacatgtatcctgaaactgccatcaccttagcacaagggtgtttcgaaggcaactgtgttgtgtgctcctaaaatc

SEQ ID NO: 268450 - DNA, 410 bp, Glycine max
  unsure (1)..(410): unsure at all n locations
atggagtggttatccaaacatcaaacaactttcaaacttggaaggcattaaaaataaaacccttcaactaaacttatcagcaatgcaacaagtaactaaggcatcctttccaaatttgacataaagatgggtggaataacccaaatgtaatcagcgagacagacaatgttgttgctgaagtaaaaaatcacgaacgcggttgaacttcatgaggtgtggcagtcattgacttaaaaggtttatccggngtgtcccacgcaaacctcccaggatacaacatgaacgtagctacggttatagaactcgcaaagaanaaatgattgacctgngagtaaagagggagaaggcttaatagaggaaaagagaaaacaaagagaagcaaagaagaaggaaagaagaanacaaagaag

SEQ ID NO: 268451 - DNA, 413 bp, Glycine max
agcttacagccacaaactgtgacaaatggcttttgctgacactatatattcatctccacaagaggagagcgctactacactttgcttctttgaacattaggatattggagcatccagatacttaaacaagtatccacaggtacctttttctttcaaccttatcaccacaccaatctaaatcacagtaggctctaatgcatgaattgctctgatcattccctattggaaacaataaaccaaaatcacttgttcccttgagatacctcaagatatgcttacttgcagtcatgtgacgagctcgaggattacccatgaactttctaagcaatcccactccataacaaatgtcacgtctgctgttgcataggaatatgagtgagccaataatttgcttgaacaatgttgcatcaact

SEQ ID NO: 268452 - DNA, 381 bp, Glycine max
  unsure (1)..(381): unsure at all n locations
atgagntacccttttcacaagcctgaggaaaaccatcctccacggaaggactcaaccaaaaaaatttcaaacataattggaaaagcagcaaattatgctggttccgcaaaatctaagaaggttaaatgctaaccatcatgcaactgctaacaaaactggttatatttgatacattttagtcattgaaattcagttgtgttgatgtaatgataattagttttaagatgactataattcaacaactcattcttttccaaacgatttaagctagaagctcactttcttcatccagttatagaaactgcctgtttacttgctaactgctacatatccaatatttattttatgacttaaactattggcancatatgcatcacctat

SEQ ID NO: 268453 - DNA, 300 bp, Glycine max
  unsure (1)..(300): unsure at all n locations
tgatcactagagcagtttcgaaaatttttttttttgagangaacccttgttgacctagctttacccttaatccaaaattgcttgaccaaccctttatattagtaatgaggcagaccgactgaaagtttgagaacaatggatgatcattatatttacacttggtgaacaatctttatggaatatattgttattagaaaggcgcatgaatcggtattgtttaattatacaacatgaacttatgcttcacaagctattacatttatgattaccataaaagataatttgcacgcataaaaaagt

SEQ ID NO: 268454 - DNA, 295 bp, Glycine max
tggaacgactcaagcacacaatatgacaatttcctttctaataaacagctacaattgaaattacactttcaatggaaaacgagagaacacccctctaataattcgaaaactcattatataaattgtgtacaaacactcgcacttaattgaggtcgagtactcgttgtagcataactagtaaaaacccatttcatgaagacttataccaattagacttgcgcaacaatacgaatcctaatatattcccacaactacaatcatcatgctacacactgaagatgaaacagcctataac

SEQ ID NO: 268455 - DNA, 410 bp, Glycine max
gcttagcgagcatccgctaagtgcaacactcatgtgctatgcgcgaggaagaatccagaagaagatgagctttacaggttcgctaagcgccctgcttcagttcatccgctaagcgagaaaggcgcgctaagacaaaaatcactaacgtgggctaagcggtccataagtgcgctaagcacacgaacacgaacaaggctacctatttaagcctaaaataagattttgtgaacaaagtgtggactgggattcagagctttgcatatctagggtttctggagagagaaaggtccaagttccagagagttctgatagatcttgctgtgtgaagatctgcagagaccagagcttgaagcaagagccggtttaagagcttcagatgagtctgtgagtgattgtgagatcctagaggt

SEQ ID NO: 268456 - DNA, 429 bp, Glycine max
  unsure (1)..(429): unsure at all n locations
gctcatcttggtggcgaagctcgttcttctattgcttagtccctaaaggatggcgcccnctctcacctcttctcctttgccttctgctgcatctccatggtggcaaatcaccattgaaggacctcattgaagctcaaagatccagcctccatagaagccccacaagcaagcttccatcacccatataacatggggtactatctttcaaatgacacttatcctgattacgtcacttttttaaagaccaccccaatgccacaagaaaaaaaaaagaaagttatttccaaaatgtcaagatggggtgagaaatgatttgtgatgcaatcccaccccccaagggcactggatagaagacccaagaaaattgaccagagatgcaagagaggccctatgattctatgagccttaggagatttcgagccatgggct

SEQ ID NO: 268457 - DNA, 469 bp, Glycine max
  unsure (1)..(469): unsure at all n locations
gaccttaagcaccgcggctgcagcttgattacctgtgcttttctttaactatcttatacattntctngggaagagcaatttgtaaagtattatgtttctttctgtttattccccctcgtctacctactccatagctgctcctgtctaaggagtgaggattacgtgtacttgaactggaaagcgtatatnttatcactattaaataattaattttttaactgaaggtttccattaaaaaataaaagaccaaatgaattttacaagaccacgtaacaccggtgatggccagaattattgagtttctacttgtaaacacatgcacaaatgtttcattatctttttactttttattttgatctatcttccctaagtggtaatgctatgagtttacaccatcaacattacggtggttacttcttaagcaaagagttttatagccaatataacgaagcaaacaaatgaatatacc

SEQ ID NO: 268458 - DNA, 460 bp, Glycine max
  unsure (1)..(460): unsure at all n locations
taaaaccaactccacaactactcaaatgcgtgcacgaggatattctttatttatctgcgcnacataaatatgattaaaaaactcacccaaaaaaagtttgttacaactatcaaatacgctatgcgttacatagatgtatccgtaaatataagtaaaatgcaaaaaaaatataaatttaaaatatatttaaggaaatattgctttattactaataaaaatatctattaaaatatacaaatgattagaaaaattatcttaaaaatttaattaatagaatctcattttaattatgatctgttaatgtttttatatttaatattattcgaagacattcaaatgttaattaaaatagttatataaatatttcttatttgataattaattaaaagaaatatatattaattttcttattcataagactcgaacaaatgtattagaaaatttaataactcattcacac

SEQ ID NO: 268459 - DNA, 435 bp, Glycine max
  unsure (1)..(435): unsure at all n locations
aagctttctcaaagnctaaatgcatttttgctataataactcactctaacctccatttaccacaaaattcagacttagccttccaaccctcaaagtctcactctttttccactcataacatcacattctcactttctaaccctaggttagttctacccttcgtctctaatagatttccatcagcaatttcagcatataaacaccacatacatcatcacaaaaaccctaaaacagaatgggtatgtttaactcacccaaacatggcaatttcaacaagttttcagcaaatgtcttcacaaataatcatcacacagcagataccttgcaagactacccatcatatctcccaaaaccccatacccacgaaaatcataggagaaagaggtccacccaaacctgaaatttcgaagtcccactcatagccacgcacttcac

SEQ ID NO: 268460 - DNA, 448 bp, Glycine max
  unsure (1)..(448): unsure at all n locations
tctagactntatacaagaatgaagctgtgagccacttgttttatagtggcctcagatatcataagaggggggggggtggaattaagatattacaaattatttccctcgattaaaaattctatttaactttctattcaaggtgtaaattcccttaataatgaatttcgtaagtattgattcacatagagcaatttgcgtatgaatataaaatgatactaaataaaggagtttaagggaagagaaaatgcaaactcagatttatactggttcggccacacccttgtgcctacgtccagtcctcaagcaacccggttgagagntgcactttcttgtgggattcttttacgagttctaaacacacaaggacaatgcttcctttatgtntagaattctttcacgacaagagaccctgggtctcttaatcccttttcagaatacagaacaagag

SEQ ID NO: 268461 - DNA, 458 bp, Glycine max
  unsure (1)..(458): unsure at all n locations
agcttagcccacaatgttctctcaaaatggtttatgaactcggnatccctatcacttactatgctcctaggtagtccatggagtctcaccacttccttgaaaaataagtcaactacatggcaagcatcatcaacctttttgaaacgtataaaatgcaccattttttaaaacatttcaacaaccacaaaaacaaaatccttgccactctttgttctaggaaattgcaaaacaaagtccatagatatgtcaatccaaggaaaatcaggaactggcagaggatgatataaaccatatggcttcacttttgattctttatttttacaaacaaggcattatttatgtacatcatgtntcatatgagaccaataaaaatgctcatgcaatatttctaaggtcttttgcaccccaaaatgccaccatcaaatcatcctcgtgtgcctcatttaccaacaaatctc

SEQ ID NO: 268462 - DNA, 433 bp, Glycine max
  unsure (1)..(433): unsure at all n locations
ngggtttgggcatagcaccccacctgacgtgcgcaatgtctcctgacccccgcgacatatctccaggtaccactctgtggtcaacgaataaaagcaggaagtttcacccttctacacttcctcttttcaagcttgtaggattatggggtacccatcacatgtggtactaggtggcggtcgggcgatggtgcacaacanagtttccacatccacaaatcgcgcataaacccgccatcccctgttgcccacctccaactgagctcatgtactcccacgtagcccatatcctcatttctctcaacaccgggtccccatcaatcctctcaagcttccccaacatccaagtaaaacaacattcaaacagcacaaactatcacagtcaagaaaacagagcataggcagaaaactctgccaaaacaccaaccaaaatcac

SEQ ID NO: 268463 - DNA, 391 bp, Glycine max
  unsure (1)..(391): unsure at all n locations
ngcaaccgatatcaattacctacaccggttaggatgtcttgattcatgaacaatagttaatttaggtggcatatattttatttttcttaatattaagatattgagtttaaattttgtatatataaaaaaaatgcacattaaaggtgaaaatttcaccatattatatatgttcgtgtcccgaataaagttttttttttctttctttcaaatgaagttgttgtttgtttctcataaacatttgatntaaaaaatactactccaacactaagacaaagngatttagggtgcatttaattgcggctatggttttttaattttttaaatgagcttttaagacaattcttattctttagaatctaatttctaggaaataaaaatgagaaaatataac

SEQ ID NO: 268464 - DNA, 410 bp, Glycine max
  unsure (1)..(410): unsure at all n locations
agctngnagaatggctagacatgatacatgtcatggcttgngttggttcaagggtaaaaagggatgccccacattatttccatgacacaaatgcaaaaatgatgatttggaaactttatgcaaaactggtcatgcatgcatctatgcggacactcaaatgtcaaatttttatggtcatgtgatgctagggcccaggattcatttcctctattntatatcaacccaatgtttccaaaatatgttcttttatccatttgtgcattcatccaagtccatttcgggcgtccgggaaaatttcacagcattcacccttcaggtttacacacattttttcaaaaattggttatgatcacatgaattttttttttttttttcaaaagcatgttggcttttcagctagacaacttatt

SEQ ID NO: 268465 - DNA, 480 bp, Glycine max
tgctattacggacctataaaactcagcttcaaagcatagccttgtaagaggacttccaaagttattatatcaagatgattctctttgtgaagcttgccagaaagggaaacaagtgaaaagttattttatagccaaaaaataccgtttgcacttctaggcccttaaagcctatttggtccaactagaactacatccctctctggacacaaatatggtttggtcatagaggacgattacaccagatggacatgggtcaggttcctaacctacaaggatgagtcttttgataccttttataaattctgtaaaaagactcacaacgaaaaaaaatatttgtatctttttaatcagaagtgatcatgtgggagagtttgaaaacgatctttctgaacaattatgtgaagagaatggcattcaccataatttttccacttcaagaacaccacaagaaaatggattttgtgagaggaaaaatagatc

SEQ ID NO: 268466 - DNA, 341 bp, Glycine max
aacttaaacttaatacgtccactaaaaataaaatgtatctaaagtagaacaataaatgggaaatcctgtcatggctcctcctatgccggtgtctgcttatcttgggctggtgcaagctcgccatgaggtgaggagggagcatcctatgctggctggggtgtctcctgatctgtaacaggccaagaatcccaggtgctctatgttgcggtcatatcagctgcataatctgcatcagcaacgccatcctcctcctcaaagacctccaaaactggtgaagtgactagtgaggtccgtggagtagcctctggagtggcctcatgaggtacctccagttgtaactg

SEQ ID NO: 268467 - DNA, 370 bp, Glycine max
  unsure (1)..(370): unsure at all n locations
ataatgaagaanataaaactcattgtcgtcataccttagttcttcagatttctgaaatacagtgtggaactagtctgtctgaagatgctgattcaaatgctgatgtccttggaataagccggttaacaaactttgtaaaatttcatggagcagttattgagcttctgaaaatagataatgaggatatataccaacatgaatcaggagcaggacgtggtgaacctgttttggggtcaaatatagcaacatgtccagtcattactgggaaccaaggtggatttagtggaaatataaaattaagtattccttggaagaatggttctttggacgtttgcaaggtggatgctgatgtttgcgttgatcccatagt

SEQ ID NO: 268468 - DNA, 366 bp, Glycine max
  unsure (1)..(366): unsure at all n locations
ctgcaacttcacccctcctctcccaaggttcagcttcttctcattgagacctagcttgggagccattctaactcttgcgctgaccttaaccacttggatatcctccgatgatcccttngtgcttccctaagtccttatccttttttgcatcggctccatgcctttggacccttgaaaatccttgcattgggcactgaaccctggcgagaaggggggactttctttgacggctctctatggggagccaatgcttatgaggacgtatatatgatactgcatacctattcgccgggacctgttgagacagcatttgtggcctggagggctgcatcacatagcattggaatccgctatccgaaaaaaaaa

SEQ ID NO: 268469 - DNA, 370 bp, Glycine max
  unsure (1)..(370): unsure at all n locations
aaaacattggttccctaactgaaagatatttttataggaaaacattctatacttcatgataggttctgaaattcaaggggaatttcctgggggttgatctttgcaatatcaaaaacactccttcatgtgcgttgggaagagtttgggctctgttctggttttggctctcttattcaagcatgtggcatctcaacaaccgaatactgatgaattctttgtgtctgaattcttgaagaagatgggtttatcatcttcccaggctaaacttctctgcttctgtctgtcatgcaaggggtncttggatgccatggaaaatattgtgattatctttctggatggacctttggctatcctgacaacacatggcact

SEQ ID NO: 268470 - DNA, 457 bp, Glycine max
  unsure (1)..(457): unsure at all n locations
ntaacttgttaatttagaggagaaaaatagggaagaaaattattgatactcacttatttggtgacaaaattattaggaagccaagagacgacagcaaatctcaagctttttatctaataaatgttttccaaactgaagaaaaaaattataagtcaaagtaatcctcaatttactttttttataaagttatcttttcactgtcaaaaaaagttatctttcattaaatattcattttcttaaatgtattttttattcgttcgaacaatgtaataatttacacacaaatatatatatatccctttttcgagttgacatattagtctgactcactccagttaacccatgtcaatcagtaggttaactgacctgaacaaaatcaacactaaaaaattgaataacatttgtataactcgattaactcacgagccaaattcaactacatctactcatagcataa

SEQ ID NO: 268471 - DNA, 362 bp, Glycine max
accacacaagggacctggagatatgttgcgggggtcaagagaccttggggatgtcaagtggggtgctattggccaaaaccaagcttgacaatcccgacccaacccgggcatagtcagtcagtgagaacctgtgatgtacctaaacaggcgaagctctggcagtcaacagataaaagaacaaagaccacaaagcaaggaggcttgtggtggctggccagctgtgaatcttgcgtgatatatgaggttgtggcctctggtaatcgattaccaacggtgggtaatcgattacaaggcttaaaaatgaagacaggaggctaagatggtctctggtaatcgattaccatggggtgtaatcgattacc

SEQ ID NO: 268472 - DNA, 121 bp, Glycine max
gcagcttaacaatcattcaagcgcccgatttctcgggactcaacctaatccgacaaaaagtattgacgttgaattgctgacgccttaacattaatttcgagcgtctcgaatattacgggac

SEQ ID NO: 268473 - DNA, 301 bp, Glycine max
atccattgagacgctcgaaattgaattctgaagctctgagcttattcaaaccaccataatgttttgcatggatgtctgactgagtcccgcaatacatcgagacgcttgaaattgaattctgaagctatgagcgtattcggacgagaataacattttgcttggatggttgattgagtgcccgaatctattgcgatgctcgaaattgaatgcttgacctccaagctaatgcaaacgacaataactattctctgggatgtgtgatgaaacccgtaatatatccacacgatcgaaattaattgtg

SEQ ID NO: 268474 - DNA, 289 bp, Glycine max
ctaatataaatgcaattataatatcctttaattcgctatgacattctcatattcttaataactgatatctctcgtgctatctttattatgactaattcaagtagtatcacgatttcccatgggatagtgcctgcccgcggtccatggatgtttaaccttaaagtaaattctattacggatatcaagtatcagtaactgtcactactactctcttctctaaacgaacatttttagtgaggtttaaaaataaaaatgcacttaaccgataagaaactgactctattcatat

SEQ ID NO: 268475 - DNA, 409 bp, Glycine max
  unsure (1)..(409): unsure at all n locations
ctatgaaactcagcttgactgagtcataagagatatgagaggtgaccttgtattgattttcaaatatcatccttaaacaatcaatcatcaatcatctttgaatcatctatctttcaatcttttcaacatcatctctcaacatctttcaatcaatctttcaactctttctacagaattttctgattcatttctcttcatctttctaaaagtttgtgatcaacactttctcttccaagaaaangtctttgttcaaaaacttgtgctattcatctttttcattctcttttccctttgccaaaagaacgaaggactaaccgcctaaattcttttgtgtctctcttctcccttacaaaagattcaaaggactaaccgcctgagaattcttctgattcttcccttccccttaagc

SEQ ID NO: 268476 - DNA, 343 bp, Glycine max
agggaggcatgttgcctcaaaaccatgtgattgtgaaacctacattatgaaagcaagtgataaagtggccccataaagaattttgtttataataagaaaccgaatcgcgacaaatgggtttagaataattctcttgggtgatgatcgacatgctacaaattttaaggtggcgtctcaaactcataattttattttttaaccaccactcagtcgcattgacaatggaataccacaagacctataaaagtctaatcccaacgggaagagtcgttgaggagttactccttaaagtcgttggatgagcataaactggcacctgggaaatgattgcaagactctacta

SEQ ID NO: 268477 - DNA, 369 bp, Glycine max
ccacatcctaccatagagctaaatgccctatatcaagaaccttacttggccgcacataaacaaaattgaacaaagaatataacactcacgggtcgaaaaaggcccagatcacctcatataacataattatcttgaaaaaaaggaccacactctcacacataacccacaaacaatgcacatatttaattaccagtccattaaaaaggacattacaaccatacgaaacaacgacttattacaaaaaaaatcgcattccattacacaagatatccgtcatacatgattcaacttacgataatacaccaaatagaccaatcaactcatccaacaacttatccagccacttatccagcaaaaccttagatagac

SEQ ID NO: 268478 - DNA, 454 bp, Glycine max
  unsure (1)..(454): unsure at all n locations
agcttcaatgatacaagtaagttcactgctttcttttntctacaattgngctgaaatttaggttatacaaccttaaatctagctttaagaattataggatattaatccttttacaagtagttcgagtttacgactctgcgtaggttgtcttgtgtaaaatatgttgagaactttgcatctgtgatatgcctattaaaggcctcaatattggaaaaaaaatgcattgcgctttctgtgttttttctggaaaacgcgatgaactcgctcagcgcgcttgctgcgctaagcgagttcatcaatattcattgaatatttgcgtttttcgaaagaactcgttgagcgagcttatcgcgctaagagagtntatcttttgaggatgaatattcatcctcttgataaagaacctgtggctaagcgaggatgatccgctaagaccaggtaacttactcaaatt

SEQ ID NO: 268479 - DNA, 449 bp, Glycine max
  unsure (1)..(449): unsure at all n locations
ctctatgtgaaaagatgtgactcatcaagaggaattngttattcaacgctcaaagacactggtaatcgagtaccaaaacattgtaatcgattacagcttttcgaaatcaattggaacgtcgtaaatatcattgaaaactttctgaaaaacatattgtgatactggtaatcgagtaccataatctggttatcgattaccggagaataaaaactctttggtaaacatgtattgagaaaaatccatgtgctactcagttcttgaaaaaaccttttcatacatagcttgataaagccttctcttgattcttgaatcttgagtcttgaatcttgatcttgattcttgaaagtttgaaccttgaatcttgactcttgattcctgaaatcaaattttctctcgaaccttgaaacgttcttgattcaatcttgaacatcttgaacatcctaaacttc

SEQ ID NO: 268480 - DNA, 411 bp, Glycine max
  unsure (1)..(411): unsure at all n locations
agcttgtcggccgcgattgacgaagggcgcttattacgacggtagtctctgcgtgctatatggcttttcgtcttacagacaacaaaaagtttatacggataaccactcgggtatttccggccgtcagcgtgactcanaagtcagtatgacatatcttgtgagcgcgggagataacctaaatctccacgtgtcaacgggcttgtcggccgcgattgacgaagggcgcagaagacgacgttagtctctgcgtgctatatggcttttcgtcttacaggcaacacaaactttatacggataaccactcgggtatttccggccgtcagcgtgactcaaaagtcagtatgatagatcttgtgagcgcggaagatgacgtatatctccacgtgtcaacgggcttgtcggccgcgattg

SEQ ID NO: 268481 - DNA, 427 bp, Glycine max
  unsure (1)..(427): unsure at all n locations
tcagtccctgagaaactgattcccagaagacaacagggtgtgaagattgctgaaaaccctagccctgcaacaagtcctagggaagtagacacggagatggacaagaaaatccgcagtattgtgagtagcattctgaaagatgcttctgtgcctgatgctgagaaagatgttccaacatcttccaccccaagtgtttccgtgcctgatgctgagaaagatgttccaacatcctccgctccaaatgctgaagccctcccttcacccagtgaagaggaatcaacagaagaagaggatcaagcctcagaggagactcctgcaccacgggcaccaganactgctccaggtgacctcattgacctggaagaagtcgaatctgatgaagaacccattgccaacaggttggcacctggcattgcggaaagacttc

SEQ ID NO: 268482 - DNA, 417 bp, Glycine max
tagggaaagaagggaatgaaattctgagagagaaaagagggagaatgaggtctgaactttgaagtctaatttctcaaaaataaaagttgcaaaatacacatacaaggtctctatttatagcataagtgtcatacaaaattagaaggaaatttgaatttctattcaaatttcacttgaatttgaatttgaatttatggagccaaatttggagccaaaatttcactaattatgattagagaatttcatctatggttcaacccactaatccaagatcaaatccaagaatctccactaactgtgcttaggtgtcatgaggcatgtaaagcatgaaggacatgcacaaagtggtactatatgatgtgacaatgggatgtagcatgcaaatcctcacctcccctttagcgtccgaaatataat

SEQ ID NO: 268483 - DNA, 436 bp, Glycine max
ctctgggctgaaaactatataacaacaccaaggttctagttattctctctctccttcctgatgcaagctccattggagcttgtaggcctaggatcttcttcatcaatggattccctttgcttcttggaagatgaatggcagcggaatggagaaaggaagagagagaggagacgccacttcaaggagaagatgagtctagaagaagctcaccaccatatgaggccatggataagagcttggaggaagaaggagatgaatgaagggagagggagagaagagcatgaaattttgtgctctaaatgagctctgaaatcttaagtttaatattcaaatgatcaaaggtgataaaaatgcacacacatgacctctatttatagcctaagtgtcacacaaaattggagggaaatacagatttcacttgaatttgaaattgaat

SEQ ID NO: 268484 - DNA, 454 bp, Glycine max
  unsure (1)..(454): unsure at all n locations
agcttgcttaccacagatttaggaattcaatatacactcaggatcaaaatttcgccagttattcagtcaccaaaactcaaattcacaatagacacaatcataaggaaacttaaaagttcaagaaaaggttcacaatcaaagactctctaagaattatacatgaacatgttaaggactaattaacatgcaagatttgactcanatcaaataataggctaaaaaatttcatacactcatgaataaatgagttagacaaagaaacaagaaaaataaaattcaacacaacataaggaatcttatgtgacaagtttcatgactagacattacttctatgacaaaactacaataggtgaacatgtcattctagacttttgaggttctcttctactttaattcttttttaagaattctatggtttaagtcttggccagacnaaatagcaagataaaactca

SEQ ID NO: 268485 - DNA, 420 bp, Glycine max
  unsure (1)..(420): unsure at all n locations
tgtcaaanagggaagcaagcgaagagagccgttcaaagtttattcgttgntcctactncaaaaccccttgaactacttcacattgatttatttggtccctcaagaactatgcgtttaggtggaaattactatggcttagtaatagtagatgattactcaaatttcttggactttggttttgaaaaccaaaaatgaagcttttgatgattttcacaaacttgccaaggtgattcaaaatgaaaaaggtctcaacattgcttcaattagaagtgatcatggaggtgaatttcaaaatgacttttatgaaaaaaatgaaattcaccataatttttctgccccaagaacatctcacgagactggtgttgtggagaggaaaaatagatccattgaataaggtgcaagaaacactttatatgaaac

SEQ ID NO: 268486 - DNA, 444 bp, Glycine max
  unsure (1)..(444): unsure at all n locations
gatgctctagggagaattgctgataaattgtagagcaaggaggatccgaatagaatagtgtacataacaatttggagtcaacaatagtgattcccataatttatctcaggatagtttttagaagatgaacatcatactagttacccttttttttttaatcttctggctgcattttgccacttttttgtggtttactactgcactaaggcattntatacacaaatttggaggttactgcattttatttattttcttctttcagtgaggttatatgaatctttcctcggtcaataatagcggttgtacagataaagttactattactaattaaggtacatttttattagaggtatctctttgcgggctcatgcaatattntgcttctcttgtataagtcatctttccacaaatnntataatttttntggtgagttaaccttactat

SEQ ID NO: 268487 - DNA, 439 bp, Glycine max
  unsure (1)..(439): unsure at all n locations
agaagaaaagaacaatccaatcatggagagagagagagagtanagagagaaacagtgggtgggagagagttatgactaagaaagagaggagagctagagtcagatttcgagagtcagagggttcccatctgaccatcgaagggttagccacaagacagcgtcaatcctacacgcgagcgaactggagagaccataaggacgttatatccttttactttacgaggttcccggaagacgcaacagcaaaggatttgtggttccattttaaacagcaaggagacgtgagagaggttttcatacccagganaagaaacaaccaaggaaggagatatggttttgtgaggtataagggggtgagagatgtgcatcaacttcagcagcatttggacaatangttcttcggaggaatgaagatgaatgttaatatccctaaatatgg

SEQ ID NO: 268488 - DNA, 403 bp, Glycine max
ttatatatatatatatatatatatatatatgaccttaatagcccaaaaagaacaagcaaattaaccacttattttttggagcaagggtgctacaaatccaagccgaaattgcttgcatcaatgccaaattaaccacttattttttgtgttcttatcaagtagactttacatgctctattaggctgtaataaaatcacatatcctttactcatggttcctagagatgcaagagtttcagatgtatgttggtagaaatcacatatcctttatggaaatggaaagtgaattggagaattcagataacagggttcaattagtttgtactcatcaagaatttaaggtcaaatgagttctcaacaagagaattagtgtttactgtgtctgattcatgggactgttatgc

SEQ ID NO: 268489 - DNA, 401 bp, Glycine max
  unsure (1)..(401): unsure at all n locations
ttagcctttaggttattcaccatgttgctccctctatctctatttatgatgtactctntataagagattcattatacgattattattttatgcaattctttgctggtctattacttatcattatcattatggtaatgtcaattttgaggcttaattatgactcaattagtcatcagaatttatattgcatattntntagttgttaaattaaaaaaaataaaatcgtataaaatatttttttcactcattagaaaaaaactattaaaaataaaagatattgatttagtttgattcaatttcatattgcatttgaacaatcaaacaaaattacctattaagtttatatttgatttcaatgacttttcatctaaaattttgaccaaaacctatcgtgaacaccc

SEQ ID NO: 268490 - DNA, 473 bp, Glycine max
  unsure (1)..(473): unsure at all n locations
agcttnctccatggtttcctccatacctaaaactttataccttcgattctcattcaattcttcaccaaatcacgttccgtaaagcccaatctttctcttttttacttctgtttcacttgcaccgatcaaaatgcagaaaaacttcatcaaatggcagagccatcaaagaagagaaagggatcattctccactgctaccgctgctgcccatcgccgtcacggtccatccggagcacccacagcacctattcctccttctttgtcatctccaagatcatcaacattggtttcatccgatgatcaacgtctacggtacctttctcaattctcttctagaataatcttagaccctaagtacctagacgtagagttctttaatgatgaaacgtttgattgctatcaagtgtttcaaaattctggtcttggtgatttcatgtcatttaaattgccatattatcatgaacttcgaaaggg

SEQ ID NO: 268491 - DNA, 453 bp, Glycine max
  unsure (1)..(453): unsure at all n locations
tgtcccgcaagcctctncaacatctggtccatgaatggcatattgtttatggtctttccttggggcttcgntgagcttgtggtagtcgatgcatattctccaaccagtgacaatccttgttggaattagggcattctttttatttcgaatgactgtcatgccccctttctttggtaccacctggactgggcttacccaagcactgtcagaaatggggtagataagcccaacctttagaagcttgagcacctctttccatacctctctcgtcattgatgggttgagccttctctgaggttgtctgactggtctgtaatcttcatccatcattatcttgcgcatacaataggcagggcttctcggatggactccctcttttcaattcttcaaaactggtcccccatacaggaatattntcttcacaatctaagtcttccaagcaagcccttagat

SEQ ID NO: 268492 - DNA, 204 bp, Glycine max
ctcgatgccctaggggaagaacctacctttctaagttttatcctattcctcaattcaaatgtcaatctgcgcagattcacacgaagcagcaaaatgggggtaaatacgaaatattgaggaaacaaatttgcggaaaggatggcccgtataatattccctgtgatttgagagcctttccaaggatggtgggactgcacatacctt

SEQ ID NO: 268493 - DNA, 415 bp, Glycine max
  unsure (1)..(415): unsure at all n locations
aactcaagcctttcgatcattctatgtacccgtggaggacgacattgtgttttttttatttccatnnccaatncatttactttgtatacccccttttgacgtgcttaaaccattttatttaagtcatttctcgcttaacctaaaaataaaataaatttccaccgaacgattgaattgtatatccgtaacttcggtaaaatgaatttcgaccgttcggtcgtgccgtaatcacgttggaaatcaacaaagaggtaaaataataatataaataatcaaaaataccttttagtgaaataagagcgtaagatcaatcggacgttttctctctgggacttctcattcttaattgagttgacaataactaaagtgaaactaaggctaanatcaacttgcctagtcaagctcgtccacaaaa

SEQ ID NO: 268494 - DNA, 450 bp, Glycine max
  unsure (1)..(450): unsure at all n locations
ctactgaagaangaaaattgagacatttacttcatattattttaattatgttgtttngcgtttntgggctatcgaacaatgatcaacgaattttgtgaaccaatattagggtatctagaaatttcctttttttgtcgtagaaggatgcattaaattaatgaagtgattttgttctcgccgtatgattttgttcttgccacatactgcttcaaggatggaaattctggctaaagcattattgcttctcgatttgcatttacattaaacagtgatgcttatgacngcgttccttattcctctatctctcctgcaacctttggtttccacattctttagggcctccttttgcatttatgaatgcaattcaatctattactgttattctattattaatataaattatgtctaaatttcattattagattcttcttcttagaaggtgtaattctc

SEQ ID NO: 268495 - DNA, 432 bp, Glycine max
  unsure (1)..(432): unsure at all n locations
actcagcttggaggtnctttagtagggaatcgaggcggcctattatgtatctctaacccagccccctcattaagaactagctccttgtttcctctattgcccttaggttaatacacctctgtttggctctctatctgggtcttaaccctctcatgcaacttctttacaaactctgacctagattccccttctttatgtataaaagaagtgtcaagtgggaggggaatgaggtctaatggtgttaagggattgaacccatagacaacctcaaaaggggattgcttggtggttctatgaacccccctattgtaggcaaattctacatgaggaagatactcatcccaagacttagggttgccttctagaagagcccctcaaagagtggataaagacctattcactacctctgtttgcccatcagtttcgggatga

SEQ ID NO: 268496 - DNA, 431 bp, Glycine max
  unsure (1)..(431): unsure at all n locations
acctgaggcatgcaagcttatcagaaatcgtattaaaatcaactatattctattaattnctaataaggtaacagtcaattgcaatgaatgaagttttttcaccaaaaaatatttatttctcaatacaaattatntgtttatttttcttttcagatgtacctaggataataataagactattttatttaatattaagaatattcatgagaaaatattatgagagaataaaatatagttttcaataaatcttataaacaagacataaatctatcattcaataaagtaaattataaactttaacttgactatttcatatagatcaacatacttaacatttaaaaagataaacacatctaatattctaatacattaaagtaactttgttataataattaaatactaacaataaatatgtatttaactctttaaat

SEQ ID NO: 268497 - DNA, 455 bp, Glycine max
  unsure (1)..(455): unsure at all n locations
tctatatatgctatgacataatgaagagaaacaaaagctctttaatttagaaacagaanaacaacaaagagaagtggagactccatcattaatcatgacttagtctgaccaataaggacatccttgtaaggagtgggaagaggtaaagtaactttggtctcttgaggttgatggcttatatttgtttgatgttccatgatcaggggaatctgtgcttctctcgcactcagcagtcgttcatgtgcttcacctcgcagtttctccagcctaattccattcatttgttgcatcttgaacactttgattaagtttgtcaatccaccaataaagaacattaggcttccaaagatgcctagccagatccaagtaccaccctgtgtcaataatcaacattgtctctctcattagtacacatattgcaatcactgccgaagtntattttagttaattgaatt

SEQ ID NO: 268498 - DNA, 392 bp, Glycine max
agacatgcaaggctctggtaatccattaccaagaagtgtaatcgattacccgaagacaggattgagaaatagctgttgaaaaaggttttgaatttgaattttcaacatgtaatcgattaccatatgtctgtaatcgattaccagcaacgaaactttggaaattcaaattcaaaagttataacccttcaaattataattgtgtaatcgattacacaaacattgtaatcgattaccagtggaaagttttcagaaaatctgccaacagtcacatcttttcattagatttgtgaatggtcatcaaaggcctataaataggtgacttgggcacgaatcttagacagagatgtttgcttggcaaaaatgtcttatcctctcaaaagacaatgagagag

SEQ ID NO: 268499 - DNA, 453 bp, Glycine max
  unsure (1)..(453): unsure at all n locations
actcagcttatcttcatacaatccattagagtgtggatctatttatcaccataantaacattngaaattataagagcaaaattaactgtcgttgatagcacctcaaggccgagaagaatcatgaagaagccctcaggacgggaggagttcatccactaagttccttctgcaactacccagtctgttagcaaaagggtggtataggaattatcctctgtagtgattgtagtgcttgtccccctcgactatccattcggttatggcttgttccccttagtgctggtgaggccgttaggattagtaactatcctctctatttcactagctataaatacatatacatgtaatgaataagaggaagacaatgagaaatctcagaaattctagcttcttaccttaattntggaggtaggttctggcctctaatttaggaaacataagcatactctatca

SEQ ID NO: 268500 - DNA, 438 bp, Glycine max
agcctatcaacatcaaacttggagaaagagtttttgtgtctacacacgagaaacaaacaagtataatgctacttcctatactaaagcggtgatccatctccacacatattttatcaatagcaacataaaaaatctctgcacggtaatgatgaagattagtgatagtcctcccttctgctcttgaacgaccgcgaactggtatttcgtcattcataatttggcaccagaatactttcaccaccacaaaatccttggacatcggcaaaaaaattattccagccactctctctcattgtgcccaaccgagctttgacaacatcaactaattccatggcatttacaatattaagatcttttctttgcaatatatttgaaagctcgttctgtcctatgacctggatcaccacaatctcatttggttaactcactaacacatta

SEQ ID NO: 268501 - DNA, 442 bp, Glycine max
ttatcccgaacaatcgctggaatactgcaagggctatgtatttacagtctccctcgcttttatcggcgaatatgaacccttcaaaagtttaaaatcaaccctacgcgtaactttcttgcttttaagaactatgtaggtttgagttcctcttcgctctcgaggatacgtaggaataagagccacactcttgtcaaccccaaaagataaaaaacatgaaaaagggaaaaataaataaatattgaaggcatggttttgcacacttgattaaaggctgtcgtcccttgtgatggacgcgtggggtgctaataccttccctgcacataaacaactcttgaaccttttattcttaaaattcctagacccctgtttggtgtttctaacgttcttcctcgaataaacattggtggcagctcctgaccattccctttcttgaaaacacatc

SEQ ID NO: 268502 - DNA, 457 bp, Glycine max
agcttagacctaatataatattttgttctctcggtgctccagcgtatgagccaaagaatgtattcaaatgactggaaataggatctggatgctcttttgtgagcttgcatgagtgatgaaataagtagtttggggagggatttatttttttttacgagagggaaattcaatccaagagaaacatggtttagaaactttgttcaacgaaggagtctaagcctctaaggatatatccaaaaccctcaaaatgagattaaatgataattgtaactcaagtgataaattttaaagaagttagagagataggctgaactaggaaacatactatgaggatggccttgatctcgttcatggtcattgatgctgaatcactatcactctttgtaagctccaacagatattgcagtaaatctttcttctttgacttattttctccctctcctgtcccattcattcg

SEQ ID NO: 268503 - DNA, 456 bp, Glycine max
  unsure (1)..(456): unsure at all n locations
tatcccatgcatagnatctcatcgcctttcattaaacattctttcattccttatatgagttataaatgggtcaaagttattataatttgttttaaatccatttaaaataaatttatctgtatgaattttgaattaagtttacaatacatagaaaactatataatataatataatatttttattattaaattgaaaaacatgcatgaaaatattttatttgtctaaatttcattaaaatgtaaattagataatatcaattatcgtttgaattttgcttgaaacacacaagtaaaataacattaaatcatttgaaacttgtcctanacatgcaagcaaaagcaaaataatatatatcattntgtaattgtatctgaaatatgtaaataaattaatattattttttttgtaattggtatgatataaattaatataataagcaatgtgttacttacatat

SEQ ID NO: 268504 - DNA, 405 bp, Glycine max
  unsure (1)..(405): unsure at all n locations
agcttgntnaataaaatttaatcgtattcatntgtttatntcttcaaattataataattattcacaatctactattaacatttgaatatatttgtcgcatattttacactttcgaagactaaattttatattttcatcattcagggccgcatttgttagccagacgaaaagtcaaaaaaatattatatgacaaatatgttcatatgctgacaattagagatagtcacgttagacacacatattataaattttggaaaacttctttgaagactacactagtggctgtcttcaatggtttgttatcatgtattaatatcttcaaaccatgtctacttttaactcaagaaacaactaaatacagttgatcatgactaaatactggcctagtgattgaacatttgtagt

SEQ ID NO: 268505 - DNA, 448 bp, Glycine max
  unsure (1)..(448): unsure at all n locations
ntaagaggaacttctgtacaacacgggagtgtatgctttatttatttagtanaaatgataaactgctaaaaatatgtttaaagagattaatctatgaaaggtcaacttaccaggggttcaggagcattgagcatttcctgagtaaaccgaacagtcgagatatgctttctagatgaatgcctctgcctgtcacaagtttgccgctccaatggtggtatgaagtgtatgtcaaatacgcactgatggtcataggcaaaaaagttaatggtggttgactcgtagattttcaactttcttgaaatttttgagtccatttgccaaatacactctntctttgtgtcgtctgacctgtatttcgtaaatgactccatcatatctcaggtgaacagactcgtgatactgtggtgcccattgtgtatggtagaacgttggaagtgtatgatgttct

SEQ ID NO: 268506 - DNA, 73 bp, Glycine max
taacatgcttttatttaatacctttctgcaccataaaaggtgccaattttgtatgctttggactggagtgacc

SEQ ID NO: 268507 - DNA, 240 bp, Glycine max
taactgggcttgggcttggcggccacgctcaacaaagtactttcgacacctactgtacgttgatttcaccaatgctgctatgggaatgctgcgacaatcttttaaaaccttattgagacattctaagagggtcgtctgcatgtggccatatcgacaccccttctctatcgcaagccatggtccattcttcctttaagatgctatcacttcatgttgctatggctcgaactcacctaacca

SEQ ID NO: 268508 - DNA, 415 bp, Glycine max
atcgaagtggatctgaaaagacgcaaatttaatcatcctgcttggacgaatgaaaaaactggggaaaataaagagggtgacgatgagggagaaacccatgctgtgactggcattcctgtacggccaagtttcccaccaacccaacaatgtcattactcaacccttctccttacctaccgcccatttatccacacaggccatccctaaatcaaccacaaagtctgtctaccgcactctccatgacgaacaccacctttagcacaaaccataaacaccaaccaagaaatgaattttgcagcaagaaagcctgtagaattcaccccaattccagtgtcctatgctgacttgctcccatatctactcgataattcaatggtagccataaccctagccaaggttcatcaacctccatttc

SEQ ID NO: 268509 - DNA, 451 bp, Glycine max
  unsure (1)..(451): unsure at all n locations
gaattatggcctcatcaaactacttgtttcccgagggattctctataaatagacctcccatctttaatggagcgggttaccactactggaaaacccgcatgcaaatctctatagaggcaatagatttaaatatttgggaagccatagaacaaggaccttatgttccctctataatggccggaagtgcaacaatagaaaaacctagagcagaatggactgaggaagaaagaagattantacaatgtaatttaaaggccaaaaatattattacatctgccctaggaatagatgaatactttagggtttcaaattgtaaaagtgctaaggatatatatgatacactacaagtaacacatgaaggcacaacagatgttaaaagatctangataaacactntaactcatgaatatgaacattttaggatgaatgtaaatgaaaatatgccagacat

SEQ ID NO: 268510 - DNA, 453 bp, Glycine max
  unsure (1)..(453): unsure at all n locations
ctacacctgaaaaagatgaccagatagttgaacaatagagaatgcttcctaacaaaaattttcatgcaagtggacccttttctagtaattctgaattacagcagccctcctattcctttttcattcccacctagagcaaatccaaacaaaaagatggaagaagttcaaaatgagatcctggagacctttagtaaagtagaggtgaacatacctctgatagatgccaacaaaaagattcccagatatgccaagtttctaaaggactgtgcacccacaaaaggaagctcaaaggcaatgaaaggattagcatgggcagaaatgtgtcancattgataggtaaatctgtcctcacattcctgagaaatgaaggacccangtactctctgtataccttgcattattacgaacacgtaatttgagaatgccatgctagatctaggagcatcagttagt

SEQ ID NO: 268511 - DNA, 330 bp, Glycine max
actaagcttggacctgtgctgaggccatacattggtaacctaatcctctttgtttcctcatgaaacgtgcaggtcgcgttggggttgaccactttgagaatggggactgataaatccttctaggggttactgctgcccatcggttagcgaacaacgatggcaatacgtctccatatgtctctcggactggggcacactcttatagcttcttatccgacgggttcttcccacgttggaaattatgccacgacgtgcattatctctcggaccaggctgcgccggaaacccacctctctcacggaccttttgcatggcgcggacgcccattcc

SEQ ID NO: 268512 - DNA, 417 bp, Glycine max
  unsure (1)..(417): unsure at all n locations
tgagtatggtttgtcagaaaatttttaatgaatgctctcttaaaacctaagctttgaatccaacaaaaaccatgatttctttgctatctcgaccacattacaagcttaataaagtccttagtgatccacattgggtatgtatgactgcattgaatgaaatgacgtgcaaagttaggaatnttaatctcagttggtgtaattgaaacactcataaccaagacacttgtgtgcttgagagaaacattatccttgtgaggaatgaagcgtggttgatccccattgatgcttggcatacttgctaacctattttatcttctaatgcaattttgcatacttctatcatgaaaggtcaacanaggggaactcgtgagttggcaattgaagttgttgaaatggtatgcagttatcttatgtatt

SEQ ID NO: 268513 - DNA, 390 bp, Glycine max
gtattcaatgctttcatccctcattcttctaaataaaaactttgtagcaggaagtgttttagtttctattgttcacgaaattattcgataattttatactcatgatcatggctcacgcctttaaggatttggaataaccgatcagacaggatatcatgttatccttatttatcttggatgtctacttccgttagttatgtggtctatcctgttcctattcattgagatattcatttaattgaatcatatatgcaataattgcttaatttattgcttagtcgcgtttgctatttttcttctggacttatataaatgtttcaattttccttttgtttaggagctggagagtcacggaagtccacaatatttaagcaggtaagaaaatgcata

SEQ ID NO: 268514 - DNA, 448 bp, Glycine max
  unsure (1)..(448): unsure at all n locations
gcttcagtatcttgacctttcacattctggagggtatgctcagtatgtattcatatcactccatctgatatgaaaatctagatatcggacctgatgcaaataatcaaatatcctcaagttattgcaaaatccaacatgctggtgcaaaaaaaaatgcttatgccgaaaacaaaactattataataaataagaggaaacctgaaggccagctgagatcattcctacttatttgaactgcagctctccaaactagctgtctgcttcttttaggaatctcagagccttcagcatagaatatacccgaaattttcctcaaaccacctgctgcccataacagtcagtgattgtgctttaattcccatacaaatttaaattacttcaaaacaatcggcanatagttgtcaacaggtacgggaggacaggatggcaatcaaataaaactacatag

SEQ ID NO: 268515 - DNA, 436 bp, Glycine max
agctttaagatttgaattataacgttcagaatctgctggtaatccattaccatatatgtgtaatcgattacacagtgtaaattttgatttcaaattttaatagctggtgtaaataagttttggccactagtaatcgattaccaaagagtaaatttcttgtaaaagactttttaacttaaatttcttggccaaaccttttgctacttcaattggaattcccctcctatttaatataccctttctaagactagagacttgtcttgatcatccatcttgaatatctttaatttctttgtcttgaataaagctttgagacgcatgtgaaccttgggcatcatcaaaacattcagcttgatcctttgtctacacgtaggaggctgaagggaaggggtctaacaccctttgtaagcatatttcacttaagattagtgaggag

SEQ ID NO: 268516 - DNA, 446 bp, Glycine max
  unsure (1)..(446): unsure at all n locations
ggatcaanacanagtctatacattccagtccactcaatttattaactctcattcatttcaaacacaaccattcatttcaaacaaaacacaccactgaaacatgattcaatcatttcactgttcaaacaagctttttgtacaagcaatcaacactaaaacaacagaaatttaaatgattgaaatttaaataactgataaagcataaactaaataactagcatgaactaaataacggataaaataaattgttcataatttgcaaaattttaaaaactatgcagaatttaaaactcctaatcatcttgctgctaatcttctgcatgctcattcagatccaacaccggagcagctggtaggtcctgaagaataggttactctaactgatcgaggccgtacccgaatcanataaacattaaaatatagtaactaggaagtgatcctaggtc

SEQ ID NO: 268517 - DNA, 454 bp, Glycine max
agcttaggacacttggcaggaagttccagaaataaggagtcagcatttttaagaaaaagccttagctcaactaaattctcaaaatttggaagatcaagaatagaagggtccatctcttccctaaaatcacccaatgacagaaattcaacattacacagtccttggagaatgttagaaacaatttggttcgcataaagattcttagcgcagtgatgcactgtcaaacaaaccttggctttaagaatgttaggccaacgatgagtgtacatacagtttgagataaaatcataatcacgatcatcttgtataacaagaccataaaaagagctgtggtgaaatacttggataacttgagagttatgcttaagcaaaatcttcaactgactctcccaccagttctgcttcagatcaaacagttcaagagctggagatccagatataagcttgttaatac

SEQ ID NO: 268518 - DNA, 432 bp, Glycine max
ggagcacgccattaatggctctgtcataaatagcaaggaccattaatgttagttgtaagaaaattagtaaatacaggttgaaaagttttcactaatttaattatttaattatgtttgcaattttgcgtcctattttgattttttattcttctaatagtatcttctcattttcatgatgttgttaaataaaacttatgggagcgctttaaataactatttgccgggatgtgttgacttaataaatgtagaaaatgttaaaagtgtttattcaactttttttttgtcctttttaatttgaattatgtttatattctgcaaagttagcaagtatttatttttggcttggttatataaaattaggaataaattaagttagacaaaataataacaaagtgaacggagataaagaattctccttaaggacaaaaaata

SEQ ID NO: 268519 - DNA, 443 bp, Glycine max
  unsure (1)..(443): unsure at all n locations
gcttaacatcaaccacttccaggtgcttgaactacntcacatggacttgatggggcctatgcaagttgaaagccttggaggaaagaggtatgcctatgtgggtgtggttgatttctccagatttacctgggtcaactttatcagaaagaaatcagacacctttgcaactgtcaagcacttccacatctttggaagtccatgttacattttggcagaaagagagcaaaggagaaagatggatcccaagagtgatgcaggaatattcctgggatactctacaaacagcagagcatatagagtattcaattccagaaccagaactgtgatggaatccatcaatgtggttgttgatgatctaactccagcaagaaagaaggatgtcgaagaagatgtcagaacatcgggagacaatgtagcagatacagctaacagtggagaaatac

SEQ ID NO: 268520 - DNA, 453 bp, Glycine max
  unsure (1)..(453): unsure at all n locations
gacctataaaactcaagcttnagtatgcccgagtcattcatccctatgagaggttgttttttattggcgatcagaattgccattccttggattatagggttgaaccaagctcatgcttttacaaaaaggttcatcaagtcaagttgaaatatggaagtaaccgtcttgcaaaattggggcaaaagatgaatcgagtcacatcactgcttcatctactgccaaacatatttaggattattgatgtccttgttacttccagtttcaccttgacaaagatgtcatggaccatgttgaaaatctaaattgattcaaccccatatcttgcgtaaaaattcgcaatacttcatctgtacatcattcgcatgcatccatgcttttcattggttgcattgctcgttgcattctttccttgaaaaataaaataaaatgaacttaatcattgttataaaaaag

SEQ ID NO: 268521 - DNA, 481 bp, Glycine max
  unsure (1)..(481): unsure at all n locations
cttagagncacctgcaggctgcaagctcttcctacagagatattgacacanagctagttttataaaaganaacgcaaattccaactttgtcttctttaaatttcctccccctatatgtcttttaatcttgagacgatcagtgtgtctaccttgcaagggaggttaccacgaaaacatgaagtggtggggcaatataaatcagcgtgttttaatgtcatctgatacaaaatatcagattccctacgagaattaaacattttttccatataaaaaaatctttggacaccttataaatgtagacacctaaagagaaataagaagaggagaaaaaaaaagtggataacataatataacgtaataaaaaaaagagagagaacaaagatgagaaatacaaatacggtatctatatttacaaggtgaggtgggacaggagtgaggaagtctgtgtgtcagcatgcaatcacagatttcagttctatat

SEQ ID NO: 268522 - DNA, 446 bp, Glycine max
cttgtgaagttggcaggctaatgtggctactttttgggatattttgcatgctcgcgagcaaggaatattctttgttaacctatcatcccatggatgatatatcctgagttcttcatttgacaaatctatgtatgatcagatactcaatttcttgggagtcctattcgtctacaacgaattgtatgcaaagtgcatccaaagttctaatcttgtggagggggcttcagaaggtgtatatttgaagattctactgttcatgctaataaatgggactccagattttgtgattctaacatgataaacataccactgattaagtgtgttggtcctgatggggaatctgtcccatttcagtattaacgagtgcaaacagcaacaaggtgccaagagagatttcctagctgataaaatctgtctcatcttatgtcatggctgattggtggaac

SEQ ID NO: 268523 - DNA, 444 bp, Glycine max
  unsure (1)..(444): unsure at all n locations
agcttctcaaggaagttntctcaagaaagcttctcaaggaagctacctagtctataaatagaaacatgtgtaacacttgttgtaactttgatgaatgagagtcttgtgagacacaactcanagttcaacttctctccctcttttattccttcaatttcgtgctccccccttctctctttcttttcctccattaaagcatcctcttcaagcttcttatccaaggcaattcttggtggtgaagctcctttttccttggcttattccctagtggatggtgcctcccctctcctcttctcctttgccttccactgcatctccatggtgtaaaatcaccattgaaggacctcattgaagctcanagatccagcctccatagaagctccacaagcaagcttccatcanaagccatgggtaggagactccagaaagattggactagggatg

SEQ ID NO: 268524 - DNA, 450 bp, Glycine max
  unsure (1)..(450): unsure at all n locations
tcacaaaagtttatatggcttggaacaagcaccgatgtatttgttttagaagtttaatgagtttatgagcaactcaggattcaaaagatgtgacatggaccattgctgctatgttaagaaatatactaatagttatgttattcttgtcgtgtatgttgatgacatgttgattgcaggatctagtatgacagaaattaacaagttgaagcagcagttggcagaaaactttgaaatgaaggatcttggtccagctaaacaaatccttggtatgagaattcttagaaacagatcagaaggaatcttgaagctgtctcaggagaaatatatacacaaattgcttgacaggttntaccttggagattctaagaccaggaatacccctttgggatctcatttgaagttntcaaagaagcaatctttgcagacagatgaagaanaatgttacatgtc

SEQ ID NO: 268525 - DNA, 443 bp, Glycine max
  unsure (1)..(443): unsure at all n locations
agctctgagctaattcaaacgactttaatgttttgcatggatgtctgatngagtcccgtaaaatatcgagacgctcgaaattgaatgttgaagctctcagcaaattcaaacaacaatatcttttaactcggatgtctgattaagtcccgtaatacatcgagacgctcaaaattgaatgttgaagctctcagcaaattcaaacgacaataacttttttactcagatgtctgattgagtcccgtaatatatcgagatgatcgaaattgaatgttgaagctctcagcaaattcaaacgacaataacttttttactcagatgtctgattgagtctcgtaatatatcgagatgatcgaaattgaattctgaacctcagagccaattcaaacgacaataactttttcctcggatgtctgattgagtcccgtaatacatcgagacgctcg

SEQ ID NO: 268526 - DNA, 345 bp, Glycine max
  unsure (1)..(345): unsure at all n locations
acactatgatactcagcttaacaatcaatttcgagcgcctcgatattntacgggactctttctgacatccgagtaaaaagttattgtcttttgaatttgctcaatgcttcaacattcaatttcgagcgtctcgatatattacgggtctcaatcagacatccgagtaagaagttatcgtcgtttgaatttggtcagagcttcaacattcaatttagagcgtctcgatatattacaagactcaatcagacatccgagtaaaaagttattgtgcgttgaatttgctcagagcttcaacattcaatttcgagcgtctcgatatattaccggactctatcagacattcga

SEQ ID NO: 268527 - DNA, 414 bp, Glycine max
  unsure (1)..(414): unsure at all n locations
aataaccaagtgaatcttgagcagtcttctaccaatgtaagggaagatctctgcccctcatatgtagggtgggcatagggaccccatatatcacattagagtaaatcaaaaggtaaataagataaattggtagagttaggaaaggataatcttctaagtttagcaagtggaaaaatagaacaattagaagaaaagaaattaggagagaattgtaaactaattctattattcaaatgattgaaaactttgtcttatatatgaccaaacctagaatgccaaatatgagcatttttacaaagagtggaatttacgtgtgaattcataacaganaaagtaaatctgcaatcatgagtgtccttgagggttaagacataaaggccttggatgagataccctttaccaatcctcttgcaa

SEQ ID NO: 268528 - DNA, 402 bp, Glycine max
  unsure (1)..(402): unsure at all n locations
tttaaaacaagtattcttcatgcctaaagaaaccttgatgagaccccttttcacattactcaaacaatttaaagaagtcatggtcttgagaatacaaatcttttatgtgatcaaatccaaacatctttggttcaagcatggagattagagcatatctncttgaaagtgcatcggccacaacattagccttgccttgcttgtgtttaatcacaaaaggaaattgttccaagaactatacctatttggcatgccccgtattaagctttccttggcttttcaaatgtttgagtagctcatggtcactatgaatcacaaactccttgaaggaggtagtattgccaagtttgcaaagctctaataagtgcatagagtgccttgtcataggtggaattgttcaagatg

SEQ ID NO: 268529 - DNA, 422 bp, Glycine max
  unsure (1)..(422): unsure at all n locations
agcttgccacccagctcgaccaggcgagcatagttgcttccttcataaggctgntgcttctggaggaatcttctacagggcccaagtgggcctgggtgctatttgcacccncatttttactaaatacacccctgtccttttttggtgattcttttttccaatgctacggaaacttatggatttcgtaacgatacttgttttcttcccgtaatgttacggaactttgcggattacataatcatccccttttttgacttacggaatgttacggaacctcactaattgtgcaacgatgcttccttttgatttccggtgtgtcacggaaccttacggattgagcatcaatacccttcttcgatttccggcatgtctcggaacttcacaaattgcctaatgatgggtgccaagcacctcacaaggac

SEQ ID NO: 268530 - DNA, 393 bp, Glycine max
  unsure (1)..(393): unsure at all n locations
tacttcctcggtgacatcttttggtttgaatggaattgccatgacaggtttattattactgtctttgatatttggtaactgatattgtgttgtgggaggtaattccgattggattaactcaccatctctcacttgccagtttgttatgacatttgttgttggatcacctatgatttcttgtttccaagggtaatctatatcctttctaatggcataagcatgaaaccaatcaaagaaaaggacattaattntgactctttcgacaaattcgtagaacttgtcttggatttgttttctgtttgtacccttgtaatgttggaaaaaccatctcctttgaggttcattctccgaagaatagaaatctttcctaagggtttccttatcaatgcaaaa

SEQ ID NO: 268531 - DNA, 419 bp, Glycine max
caaggaggaccttttagggctggagaggattatttactatgcccataggggggacctcccaaaagagtatggagtcccaccacttttaacatttctgatttaattccttttgcagatggagctcatattgaggaggaggaactaatagatttgaggtcaaatcctcttcaaggggaaggggatgatgcaatcatccctaggaagggaccagtcactagagccatgagcaagaggctctaagaggatcgtgctagagctgctgaagaaggccctaccgttctcatgaaccacagggtatatttctgagcccatgggccaagtttgggtccaattctctttgtacatattagactatgatatcactatatttggtccttgtatttagggctccatactgtacgtagggaccctagaaatat

SEQ ID NO: 268532 - DNA, 437 bp, Glycine max
  unsure (1)..(437): unsure at all n locations
ncatggggatgaaccaagccatgaagaggaggccatatttcttgtgatngatncaagaaagattcaagactcaagatcaagcatcaagaatccaatccaagaatcaagattcaagagaagaaatcaagaagcaacaagtcaagacttcatataggataagtattaaaagaattcttcaaaaaccaaatagcatagtctagttctacaaaagaattttctcaaattttctaagttactagagtgattactctctggtaatcgattactaggtggctgtaatcgattaccagtgaccagttcggttctcaaaatgttttcaaatggtttgcaacgttccaaaacgattttcaaatagtgtaatcgattacactatattacgaactgatcacaagtgaatctgaacgttggaattcaaatccaattgcgaagagccacaa

SEQ ID NO: 268533 - DNA, 457 bp, Glycine max
agcttgccaacattcaagtaaaacaacatttatacagtacatactatcacagccaagaatacagagcaaaggcagataactctgccaaaacaccaaccaaaatcacagctcttctcacttaaagaccccgttaacaattccttcgttcccattcgttaaccgttggatcgactccaaacttttactggaagtctctagttcataatcctacatcttgaccgttgggatctactagcaaacatccagaacgcattctgcattgctctttccacaaccagcaaatgcataacatttttctgcacttgtgcaaaattctgctgcacaatttcacataaaaaatctgcacagagagcatatttcgaaaaccacacttccccttatccaatgttgccaaatcaaatccacaagtcctaaatatgtatcaatcgtgtctaaacaaagtcaagcttcaaacaca

SEQ ID NO: 268534 - DNA, 447 bp, Glycine max
  unsure (1)..(447): unsure at all n locations
ggctaacccatggaagctcctaatatgtgccacactgtttttggtgggccattcttggatggccttgagtttctcagggtccacttggaccccanttttaccaactacaaaccctaagaaaactatagtatctacacaaaaggtacacttctctatatttgcatagaggttgtatttcccaagtactgaaagaacttgcctgagatatcctaagtgatcatctatgctcctactgtacactaaaatatcatcaaaataaacaactacaaatctacctatgaaatcccttaagacaagatgcataagcctcataaaggtgttcggtgcattagtgagcccaaaaggcatcactagccattcatacaaaccaaatttggtcttgaaagaggtttttcactcatcactctctttcatcctgatgtggtgataaccacttttaagatcaat

SEQ ID NO: 268535 - DNA, 460 bp, Glycine max
  unsure (1)..(460): unsure at all n locations
agctntaagatgcaaccgattactcaaaatttgtcgtgtaatttgtctaagaacacactatcaataaggcaatattgctttttaaaatcttcacaacatctaagagcaacattatgaggtgaattacgattatttcctatatgagataaaaatgcataatcttttccactattcacctttttccaatttctaaatcctttcagagtaaatgaacttgattttctagaaaatagataacatggaaagcaaaaggcaacatcttcttctagtgaatactctaaccaaggaaaagttctaaatgaataagcttgaaatcgatgaggatgatcttcttgaccagaaagtggaaatacacccatcaaaaattgatatggtccaaactntatatacgctctatgaatntaatctttttgattagcatgataattccaattggtggatgttttccatgatcacatat

SEQ ID NO: 268536 - DNA, 468 bp, Glycine max
  unsure (1)..(468): unsure at all n locations
ggacctataaaactcagcttacactcaatcttattgaanatgattatattgtgtttgtattgttacaaatggcacaatcatgccttcaaaaatgaatgtagagatcaacaaatgaatccaaaataagaaaaagaatcatgtatgaataattttgtatatatatgtgtcaggtatgggtgggtaggaacatactcatcctcattctcatccctggttaaaaaaattggatattatttatatctatatccgcgtccaatcaaagaggaaattttccatcaaaattggaatggatgcagagagagatattcgtgggtatgaatttatttgtcatgtttacttgtgaatcatgtgaaatgaagttttaacatatatacaagatccctatagnttttttttccttcttaatttgatgtatatcattctcattagttcatcgatcttaaattattgtgagtttttaaattcttg

SEQ ID NO: 268537 - DNA, 459 bp, Glycine max
  unsure (1)..(459): unsure at all n locations
agcacctgagctgcagctcgatagntccctaatatatgggtatttttgtttttntctttgaaataaatcctgttctatggctaatgctgtctcacaacatctccattggatttagtgaagaacatctgtgcatttttacacgaacaagaggctaagtcttgaattgcaaaatgtagcagttgggctaagctcaacaattgggctaagcgcatatccaccactaagtgcagcttcagtgcgcttagcacaaaggagaatctggcagagcatcaacatcaaagccgcgtgctaatcgcgagatcactgcgctaagcacagcaggtaccttcagccaggctaagctcgagactgacgctaagcccaatttcacttactcgccctaagcacgagggtggcgctaagcgcattgccgcgatttcatagcctatttaaagtctcgcttgtgtagaattagggtac

SEQ ID NO: 268538 - DNA, 449 bp, Glycine max
  unsure (1)..(449): unsure at all n locations
actcagctttgcttaacggaattaagttgccgagaatggcaaattttttctccaagagctcacgccttgggagaaccccaatggttgggtccctccgggatgaagatgacatggatggctctgttggttcccccatggcaacgccgatggaaaaatcatgatataatgagagagaaatagagagagagagaaagttgccgatctttgattctagaacaaactgagggagaacagagaaatgtgggtgtgctctggcgagtttaatgagagaacaatgagtgaggtgcgacaacaatgaacgaaaggagagaagaagcttacgcacaagtgataggaaaggtgtagtgtgtgagagagagaaagagagttgcatgaaagacaagtttcttaatgcacgtgtttattatgatggtttcatnaacccgtctttgtagtcactctccaatgat

SEQ ID NO: 268539 - DNA, 436 bp, Glycine max
  unsure (1)..(436): unsure at all n locations
agctnnttggtcttaaataaaaggttgctcctctctttctattattngatgcaagctctgccacatgtccctatttgattggagcaaaaagggcccactttctctttttgactgtgacccatactcagtcacaaaagtgagaaaaatttgacctttgaaacgctacaatcctgcctcggtttgcgtgccgcttctctgattccagtttctcgcgtttctttgcgtccgtcggggccagttttcgaaagcaagcaatatatatatcaaaacgctcagaataaaaccccgagcgtggttcagaggttggtttcgttaaattctaagttgcacgcaaaacgatgatttttaaactaattaattaagaattaacccataacctctcagttatggatctctcttccttaattagtctaacccgcgtatcttgcccccacta

SEQ ID NO: 268540 - DNA, 365 bp, Glycine max
  unsure (1)..(365): unsure at all n locations
ntagaccttngatagcatgttggcatcccctgcattcttgtttctttctgcttcaaacttattacaagagaaatgacctatacctacagacaaaaactgtcactataaataaaaaatccgtaggtaaatgtatgatagactttgttctacggacgtttttttcgtcaactttgagcgacatataatgacggctaattgtctgtcactataggttttacctactatgtatagtggtgagggaaaagtcattaacttctacttacatctcctaactgtaggtaaaagtctttaatatgtacatatcatcttcaactggaggtaaatggttagatcttatagaaagcttataacatacattattgaat

SEQ ID NO: 268541 - DNA, 459 bp, Glycine max
  unsure (1)..(459): unsure at all n locations
cctgcggcatgcaagcttntctttgtgggttgatgaactctgttctctcaaaaggcatgatcataggctgacttattctcaattagctcagttgcctcttcaggggtcttcagctttatttttccccctgctgaagcatctaacaattgcttggtttatggtcttagcccatctataaacatattcaattgaattggcttagagaacccatgggtggaagtctttctcaataaacctctaaacctctccaatgcttcactcaaggactcgttagggaactgatgaaatgaagagattgcagctttcccttctgcaatctttgactctgggaaatatttttttagaaactnttcaacaacttcttcctaggttttcagactgttacccttaaatgagtggagccacctcttggcttctcctgccaaggaaaatgaaaatagactgagtctaatggcttca

SEQ ID NO: 268542 - DNA, 336 bp, Glycine max
  unsure (1)..(336): unsure at all n locations
tccttgagaagattcctaaagaagctagagcgtttctncttactctctcctataataagcaagcacaccccctgccaaaatacctgaaaacattcaacaagctcctattacatagactactcaaaatgcctcgaaatacagggcgctaaaccctatactacctataagggccatcatacaaggcgccataagaaggaacaaccaattttaacatttaccaagaagaacggatccaacactgacccatgggctcaaaaatctaccctaaggatcatgagaacccttcggccctcttagatgctctagcttatctcctggagcttctatgcataccct

SEQ ID NO: 268543 - DNA, 448 bp, Glycine max
  unsure (1)..(448): unsure at all n locations
agctctgtgtggagcttcaatggtgaatgattatataaaaagctacgtgagagagggagagaanaggcttctgaacttctttcttttggctgagtgaggagagagaacagctttttggttttaaataaagggtttttctctttttttttttattttatttaagcaatgccacatgtctccatttgagtggagcaaaaagggcccactttcccttttgactgtgacccatactcatccacaaaagtggggaaaatctgaccttagaaacgctaaaatcctgcctcgatttgcgtgtcgtttctctggttccagttcctcgcgtttctctgcatccgtcggggccagttttcgaaagcaagcaatatatatatcanaacgctcagaataaaaccccgagcatggttcagaggttgttttcgttaaattctaagttgcacgcaaaatgatg

SEQ ID NO: 268544 - DNA, 449 bp, Glycine max
  unsure (1)..(449): unsure at all n locations
tgcccagagaaggagtccacagaggaaatgcttactttcttttagactggaaagcggnttctaatgactcctctgcggcctccacataaggcatagaggacgggcagctcactaagatgtcttcctcgcctgacacgatgaccaaatgcccctccactacgaatttcaacttttggtggagtgtagagggaacaactcccactgagtggatccacgggcgccccaacagacagctgtagggggggttaatatccattatttggaaagtaacttgacaggtgtgatggcctatctgtactgggagatcgatctctcccctaacctctcggtgggtgccgtcgaaggcacgaaccaccattgaactcgattttaagtgggaggcattgaatggtaatttctccaaagtgctcttaggcatcacgnttaaactggaaccattatcgatgagc

SEQ ID NO: 268545 - DNA, 241 bp, Glycine max
taggatttttgcaatataatagacttcttgtaacatatgaagcacttttggcttgtaaaactaataacaaataaattgttttggtacacctaaaatttgcttttaattgtttaccttgacttgatagaatatgtatccaaacacagccttaagctcccgattaatacaactatgacttacccgcaacggaacacgtacttttgtggtattaagatttgtggaggaaaaagttttataccga

SEQ ID NO: 268546 - DNA, 393 bp, Glycine max
  unsure (1)..(393): unsure at all n locations
ctgctcttgcttatgatgaagccgctaaggccatgtatggccctctgtgcccgttgaattntcccgagccaatagactctaatggatcatcatcttctagtggaagtgataaaaaatcaccaagtggttcttccgagaatggtggtgatgttgcaatagctgaggagttggaggtgaaccatcgtcggtgtcatgaagacagaccaagattctctaaggttggtgtctttgagaaagcacaagagatgccggttctttctgtaggttgtgtggctgatgactcaatacaggagttgaaggaaatcagtaatggctctgaacagtgtcaaacaagtgaagaatgtaaggcaacatctctgaatgatgttaagtctgaagtaccgagagaaaatg

SEQ ID NO: 268547 - DNA, 444 bp, Glycine max
  unsure (1)..(444): unsure at all n locations
tatgaatgtagcatatatatctcttagacccttagatgctttgctgatggcttcttcccgttccaagcttcaattggagtcttgtcttttacagacttagttggacatctgttgagtatggtaacatcagtgtagactgcttcagcccagaatgtgttaggtagtcccttctccttgagcatcgatctacccatctccataactgtgcgattctttctctcggacactccattntgttgaggagaatatgcgactgtaagttgtcgctcaatgccttcatcctcacaaaatctttcaaactcgcgagaggtgtactctttgccgcgatcacttcttaatactcttatccgttttccactttgattttcaacaagggccttgaaccttttgaatactccaaggacttctgatttttcctttagaaaatatacccatgtcattcta

SEQ ID NO: 268548 - DNA, 404 bp, Glycine max
  unsure (1)..(404): unsure at all n locations
ttcggcttcaaatggagggtggcattggagttccaacgtccctacaaacactacgtgacatggatgcagaccatgatgcaaaagaagtaatgaaagagctggaaagacttacacaattaagggtgttgggcttgaccgatgttcgtcgagaattcataagttctctgtgctccttgataaacaagttgcaacacctggagaagctatacattaatgcacaatatatgcttggggtcaatgatttgcaatttgatgtatgtgcacctgtacttcagaaggttcgcattgtaaggaggttaatggagttcccaaactgggttgccaagctccaaaatcttgttacgttgtccttgagtaagtcccgtttcactgatgatccattgccactacttanagatctacca

SEQ ID NO: 268549 - DNA, 406 bp, Glycine max
  unsure (1)..(406): unsure at all n locations
catgcaagcttgcaagctggggaagccccttaactagtgtgagatggttttgtttctnngggatgaggcgaatttgagnttatttgtgcatcctttgaggatgttcacaatgtttggatggtggaaacatagagcttgcatcgactacatcacatgtaatctttaacaacattttttgccttgcactaattaaaaatgttgctataaatcgttgggaagaattaaaaaatgttttcaaatagaaataaatgttactaatatgtttttccaatattttatcaagtgttgtgtatagcccatgttgctaaatattcacaagggtgctagcgacatgggctacacacattatttgataaaatgttgggaaaatattatataaacatctattcatatgtggaaacatgtt

SEQ ID NO: 268550 - DNA, 392 bp, Glycine max
acttaaccctaaggcacatcatatcgagcattctgtcccaacgtctttcaacacaagggtccttaaagtaattcacctaatcatctgctcccccgaacacatagttcaagatcataacaggatcaaaacacaaacaatagagggagtgagttatcacattcctaactattagagaaaaataagacaacatataggtataaatatcatataacaaaatacaatttacttgagcataactcacgttatttcaccacacgtctcattcgttttcacaacatttgcatactcaatagtcaaaacataatatcatcaaatcaatcaatatagaacaatacacaagcattatgcaacagatacactaagactcaattctatatgcagtgtggtaccat

SEQ ID NO: 268551 - DNA, 456 bp, Glycine max
  unsure (1)..(456): unsure at all n locations
agctntacagcagatnttagtaatgacccacttacctagaatattttaatgccattaacctagggaattaaaacaaactaaatgactgagtgtaactgaaattgttggcaaccaaaagtcacccccaacagccaacaagttaaccaccatttggtctcccaaaaggctgatgcctangttgccaattgggcccttattacaacttgaactaaagcccttttagttgattaacccacaccatatttttggtcagccaactttacaaggattgggccattatttagacaaactaaacactctaaaattgaaataaagtggtgtcatttagtcctccatttgggccatgatacaactcacaaccttggacttttctccttgaaactcgggctcgtattcaaatagtatggacaacacttgttgaagagcttccttggctttcttgctctacccttgtat

SEQ ID NO: 268552 - DNA, 369 bp, Glycine max
tgcgagatcaagcgatatgtcgtaagcaaagaatacccgccagagattgccgacaacgataaaaggacattgaggaggttggcagccggtttcttcatgagcggaagcatactgtataaaagaaatcacgacatgacactcctgcggtgtgtggatgccaaagaggcaaatcacatgatcgaataagtccatgagggctcgtttggaatgcacgccaacggacatgctatggccaggaagatcctaagagcaggttattactggcttaccatggaaagtgatcgttgtcgccatgtgaggaaatgccacaaatgtcaagcattctcagatatgtcaatgcccacgacaccctctgaatgtgatgtcctc

SEQ ID NO: 268553 - DNA, 286 bp, Glycine max
acaaggggccacatccacaaagcacacataaacccaccatcccctggtgcccacctccaactgagggcacgcactcgcacgaagcccatatcctctgttcacccaacaccgggaccccaacaaaccgcccaagcgcccccaacatcaaagtaatacaacattcgcacagcacaagctatcacagccaagccaaacagggcaaaggcagaaaactctgctcagaacaccaaccaaaatcacagctgttcttaccaaaagacaccaagaacaaactccttcgtccaaa

SEQ ID NO: 268554 - DNA, 318 bp, Glycine max
  unsure (1)..(318): unsure at all n locations
tctttgattatacaacattcatctttccagcggattatacagtgttgtaatagataaaaaatatattatatttttgataaagaagaactacacatatgcatgttaagtattgcctgccgtaagtccttggacatgctactcaagtagatattactactttagtacacgaaatattatattggaatattaatatagctatctaatatatatttattagttttgaaggggaggggacaaataaaacatgctggtcttgcttaagcaggaataaaattagattctagagaaacgtgagaataatnaagaaatatgtacttt

SEQ ID NO: 268555 - DNA, 260 bp, Glycine max
cgccacgtctctccacctttaggcgtattctctgaaagatacggaccccattttgcacacgttctgcagttgcagcctatccggagccacatcagacactgatactgcccaataaaggcaaccattaggccttcccaagaatggactcgggaagggtccaagttactggactaggtaacagctacccgagaaagacttccatggaagaaatgcatcaccagcccctcaaatgcgggtatgcccccaacgtccgacaatac

SEQ ID NO: 268556 - DNA, 457 bp, Glycine max
agctagtaggtagaatggttcatagtctctctatttataagcgcgggttgaagttcaaaccataaggcctgtcaaagggaagctcttatttgacctcattgtcgaattccctcctagtgaaagcaacaacgaagggtggggattttttacgtagatgaagcttcaaacaacaaaagtagtgatgctggagttactttggaaggaacaaatgacatctcaacaaaacagccattgaagttcgattggaaagattcaaacaatcggcagactatgaagcacttatagcaagactgaagttagcactagaggtcagtgtcaagaaaataaagtgcagaaacgactccaaactcatcaccgagcaagtcaacgaagtcttccaagctagagaaacacaaatgcaacatattatcgttcggtcaagaaactattggaacactttgacaaccatgaactcatt

SEQ ID NO: 268557 - DNA, 447 bp, Glycine max
  unsure (1)..(447): unsure at all n locations
tgtagaattatgggggacccatcacatgtggcactattgttgttgtcgggcganggcgcacaacaagctttccacattcacaatgcgcgcataaacccaccatcccctgttgcccacctccaactgagctcacgtacttccacgtagcccatctcctcgtttctctcaacaccgggtccccatcaattctctcaagcttccacaacatccaagcaaaacaacgttcaaacagcacaagctatcacagccaagcaaaacagagcaaaggcagaatactctgctcaacacatcaaccaaaatcacagcttttctcacgtaaagaccacagtaacaattcctttgatccaattcgttaaccgttggatcgactccaaaantttactggaagtctatagtgcataagcctgcattttgaccgttgggatatactagcanacatccagaact

SEQ ID NO: 268558 - DNA, 251 bp, Glycine max
gtggtagggaattttatgtcgtctccccgagggttcgaaacacatgtacatgatgaggtggtcggctctcaatgagcatgggagcagagtcattgacatccttaatgacagtgtacgccatattgggtggcgtatggttgggaggcaagccatatggcggaaaggcatgctcggtatgaatatgcacatcatggggccgtccgtactacctaaatcttgcataccatatctgaggttggatgatccatttg

SEQ ID NO: 268559 - DNA, 327 bp, Glycine max
  unsure (1)..(327): unsure at all n locations
tatgtgggaatcgagcactcacataattcttccccattgggngtgagtctaagctttacttgaaattaagttatttaattatatgagttcttgatttaatcccaactttctctccccctttggcatcaacaaaaagccaaagtgtgttcagagacataaaatcatacattcactcataatcgttcaagcaaggaagacaataatgcatacataaactaagccaggatgataatcatctattcttaaactatatttaatgtcagatactttagagagtcatgccagataaccaaattaaaacaactaaattagtaaagaacatactaa

SEQ ID NO: 268560 - DNA, 447 bp, Glycine max
agcttgataaaaacttagactatatcacatattatttctattctaaaacattcaatacaaatgtcacatctattaaacgcccagagattggatgagtacattccataagaatttatgttattaagtgaaacacaacattttggtaagaaacgtggtgttgttctatgttgagtcatcccttgagaagtgggcctgattattactttttgaaagcccaaaaaccattcataacctccttctcatccatatttgatgtcacttcacattcctgcaacattcaatatctcaaaatcgtttcaactcctctaatctctctctttgaaaaatttccaccatcatccatggcttatgaaaaccaaactttagagatgttcattatggtgattgaagtgatgtttgttcgcgttgaaggagaaccaaacattcatgtcgaacactactttgaat

SEQ ID NO: 268561 - DNA, 375 bp, Glycine max
taagacaatgaccgagttattcaatacgctttgctttaatcgagtaccatgtgacataatcgagtacttctctttctatgagtagctcaaaagtgaacaagaacactttaatcgattactttgagtatctaatcgagtacattgttcttgagtccaggtgtttggaagaacactttaatcgattaaaaagataatctaatcgatcacttcattgaattaatcgattaatatgtagatttaatcgattgcaaatggctataactattttctctataaataatcagcttgtgttctcttcataacaatctcgaaaataacacaataagcctctaaatgagctaagatcaagtgatgttatcagttaaagaatgaaga

SEQ ID NO: 268562 - DNA, 378 bp, Glycine max
tccaacgcgaactttgaccattggtcttccttcccgcgatgcttcttttcatgtccgcctgagtgggcttatagcctaaaccatatgtcccacgatttccttgggtatttatcaagctagttatgccgccattcttttttcctaaacccatcccgggttcataaccgttccccaacataactcgggccatcattaccgctgcatcggacagacaaggctgcccaaagagggagtccacggaggaaatgctgaccacctcaaaagactggaaagcagtttctaacgattcttctgcggcttccacataaggcatggaggatgggcaacttaccaagatatcttcctcgcctgacacgatgaccaagtgcccctccacta

SEQ ID NO: 268563 - DNA, 338 bp, Glycine max
cctataaaactcagcttatgttcctctctacggtaagtgaaagacttgcttttttctttgaaacagcgataagcctatcggagtcttaaatgcagttctatatgcccataaagcatcatccagtttgagtgaccaatcattcctagtaaaggccccaatattttctaaaatcttcttcaatttcctaattgacacttccgcttgaccattggtctaagggtgatagggtgatgctacccttgtgtgttacattatattgcttcaaaaccttttgtagctgattattgcaaaaatgtgtgccttcatcactgaataaaatctaggtaccccaaatcggg

SEQ ID NO: 268564 - DNA, 346 bp, Glycine max
  unsure (1)..(346): unsure at all n locations
agcttgtaatcgattaccagatgtcattnttataaaattatttccaagagtcacaacttttcaaatggcttttacatggccatcaaaggtctatttatatgtgacttggaacacaaatttgctcaaaatttttcagaacaaaaaggttttatcctctcaaaaagcaaaatcttcttatcctcttaagattccttggccaatacacttgcaattcaataaggatttatttgagtgctcaaattgttcaatctatctctttcaagagagatttcttcttctcttcactctaattctcaaaaagggattaagagaccgagggtctcttgttgtaaaaaaatctgaacac

SEQ ID NO: 268565 - DNA, 439 bp, Glycine max
  unsure (1)..(439): unsure at all n locations
tcanagaatttgtttcagataaggacatattgactgtcttatacatgttacagacaaatacaatgataaagctcaaagtcgaaactctcaggatgtacaaggtgttttgagagttgcgttcgaagttagaacaaaatttacaaagaatttgaatgcttaagaatgctttgtccacacgttggtttctctaagttcagctcatcaaatcttcaactatttgtagacttcagtaaaaggtaaccattgtgactgtaatgacctccatcctcatcttcgtctattggtaaaggtgttcgttgaaacatttaatgcatattaccaacttgccaaactaatatgataaaacatgttgcttatcttcatttacctacattccacaagtatgttggtgtgcactcaagtacactgcaacttgctttggtataccattttatggagt

SEQ ID NO: 268566 - DNA, 454 bp, Glycine max
  unsure (1)..(454): unsure at all n locations
gcttatgatgctgtntacatacaacggttatgttggagctcacctgnggttaacactgaggtttctcanagtgaattagttaatcgggcaactgtgattccatacctgtacctatttgatggtgactttgatgaaaatgagtaaattctttgtgctggttttctcatgtatttgctttaattgctacctgagtagcattggagaaatttcttcacacatcaatgagtgctattgatcctttccggttactgcagaaggtgcaaattctccacccaagggtgtaaagttgtttaacatatgtttgtttgtttttaaaataatttcatggtctagattntatgcaattgtgacaaaacggcagaggatccttttcaacgttaatagcctgattatttaagctcttatacatttgcccactttcaaaaataaataaataaacaaagcattttctcat

SEQ ID NO: 268567 - DNA, 455 bp, Glycine max
  unsure (1)..(455): unsure at all n locations
tgaagccnctcanagcttcaaaaacacacaatcaatttaaattaagaaaaagctggtaccttaagggtagagtacttattaggttgacttttcaatatgtaatcagaagacttttccttaggcaaggaagttctctgtaaaatcatctttcgtctacttcgtttagttggtaaactaacttcattcaaaagtggaacttctgcagttgatactgtcaaatctttctgatcactgcaaaaggaactctctgatgatttaactgtcttcaattgctttggtagggtaaaagcctggtcagtgtgttttcctttaaccactggtttgttatcgtcatctaaggcctacagggcatgcacaactatgatgagtacaataattggacacattattatgtaatgtaaaaaaaaaaaaaaaggactggtgtgtagcttcacatgaaagcaatttcatgtgta

SEQ ID NO: 268568 - DNA, 410 bp, Glycine max
  unsure (1)..(410): unsure at all n locations
ttatacagggaagcctccatgtgtctcattttctgcaaagcactgtgaactttgcgtgttttcagattgaaaaatattgtcaacttttgttaacaatttatttcacatcaaatttctacatgaatctttttctatatgattaattttgtactggaaaataagctatcactactcactacttgctagtttctaacgtattataaatttataattngaatttttgagaaaaaacttgtgtgctggtcctggaaaaataaaaggtttcttaatgtcatctttccatttctaagtccctcaattaaatcctccttgtacatttaattagcttcaactaatccttctgtatacctatatatatgctcagncaggatgaggataggaggaccacatgaacaaattaaataaataag

SEQ ID NO: 268569 - DNA, 444 bp, Glycine max
  unsure (1)..(444): unsure at all n locations
ctttctttcaactgtatagcagcagcctcccctccctcagttcttatggagaatgtatgaattattttatcatctgcagttgaaacattaaagtcttgagccacaatttgatgctccctgaacgttttaacaacattcgaaacaaggtgaatatctaaggggcatctcactgtcacaactgtgtcatcctctctttcctgaaaatccatatctggcaatgacaatttttggtccttattgttacccatgttcttctcagcttccaacaccttgatcttcatctgcagatcagtgataaaggtaatggcatcaccaagcaaagatgccttgtccattntagatatattagggacaacagctctcaaggcataaaacctctgattaagcttctcacgtctttgtctctcagcttcaacatggttcagcggctcctctctcccattg

SEQ ID NO: 268570 - DNA, 467 bp, Glycine max
  unsure (1)..(467): unsure at all n locations
agcttctacttatgtggcagggcgggcttccttcactttcttgtctccaacgcgagctctgaccactgtccttccttcctgcggtgcttcttttcatgtccgcttgagtgggcttatagcctaaaccatatttcccacgatttccttgggtttttatcaggctagttatgccggcattgtctttgcctaaacccatcccgggttcataaccgttcccaacataactcgggccatcattaccgccgcatcggacagacaaggttgcccaaagagggagtccacggaggaaatgctgaccacctcaaaagactggaaagcggtttctaacgattcttctgcggcttacacataaggcatggaggatgggcagcttaccaagatatcttcctcgcctgatacgatgaccaagtgcncctccactacgaacttcagcttttggtggagtgtagaacgcacaactcccactg

SEQ ID NO: 268571 - DNA, 443 bp, Glycine max
  unsure (1)..(443): unsure at all n locations
catcacaagtaaggccttgctctattctttggtattttattgaactttaagaaagagaaccttagattaagttttagatttttagggttttactggtttagaagtagttaacattttaggacttgtcactcgttttgcattatgtacattgtactaagggctgtgcatgtttgatatgcctgttagaggcccggaaaaaggaagaaaacgagctgcattttctgaattntttctggaaaacgtgatgaactcgctaagtgagcatgctacgctaagcgagttcatcaatattcattgaatatatgcgttttctggaagaacttgctgagcgcgcctaccgtgctaagcgagtttatctnttgaggatgaatattcattctcttgatgaagtacatgtggctaagagaggctgattcgctaagcccaggtaacttagtcaaaat

SEQ ID NO: 268572 - DNA, 330 bp, Glycine max
  unsure (1)..(330): unsure at all n locations
gaaccatagggtcaacattgctaagcatacaatgatggcccaatgcccatgcattnagccagcatctacaattcaatcttaacgcattttaatcatcgagccttcacaaaggcatttgggagataggcaattgaaataggcttgtcatcgtgaggcatcaggggcacgtaaactgacaaatatgggtataacacgctccattacattgcgcatgaaacatcataaattcatgcatcatatgccaattaggttcgtccggacttaacatcctcatcttaattaattccttaattacttgactttaaaaattactcttgctcttattcttgc

SEQ ID NO: 268573 - DNA, 409 bp, Glycine max
  unsure (1)..(409): unsure at all n locations
caactcacttatcaccaaagatcttcacaatataaaagatntgaaggtgtaagttacttcttctaagaacttttcttctcttctttcttcaactaataacaacacttgatcttagctcattcagaggcttgttgtgttatttttgagatcgttatgaagagaacataaactggctatttatagagaaaacatttataactgcctgtaattgattaaatctacaagataatcgattaattcaacaaagtaatcgattagattatctttttaatggattaaagtgtccttctaaacacctggaaacaactcaagaacaatgtaatcaattagatactcatagtaatcgattaaagattcttgttcacttctgaactaattatagaaagagacgtattcacttatatcatat

SEQ ID NO: 268574 - DNA, 448 bp, Glycine max
gcaagcttatgctgcaaatagttataaaagaccctctcatatgcaaaccaacaacagcagaataattatgacctttcaagcaacagatacaatccacgttggaggaatcatccaaatatgagatggacaagtcctccacaataacatcagcctgtccctcccttccagaatgttgctggtccaagcaaaccatatgttcctcctccaatacagcagtagcaacaacaaagacaacaagcagctgaggcccctcctcaaccttccttagaagagttagtgaggcaaatgacaattcaaaatacgcaatttcagcaagagacaagagcctccattcagagtctgacaaatcagatgggacagatggctactcagttgaaccaagctcaattccaaaattatgacaaattgccttcacagactgtgcacaatccgaaaaatgtgagtgcca

SEQ ID NO: 268575 - DNA, 453 bp, Glycine max
ctgatggtgtcgagaagagatcacatgtgtgtcatcatctatttggggagaatgggaatgtatgtatacatgattttgatgatttcaaagaagaatctaacaaggcttcttcaaatgataagcatttgcttcaagaataattcaagattgcttcaacaaacaaagccttgtttcaagattcactaaagacaaagccttgccttaaaacaaagtgctttcaagacatgcaaggctctggtaatcaattaccaggaagtgtaatcgattaccagaagacagggtcgagaaatagctgttgaaaaaggttttgaatatgaattttcaacatgtaatagattaccatatgtctgtaatcgattaccaacaacaaaactttggaaattcaaattcaaaagtcacaacccttcacattataattgtgtaatcgattacacaaacattgtaatcgattac

SEQ ID NO: 268576 - DNA, 437 bp, Glycine max
  unsure (1)..(437): unsure at all n locations
agcttccaatatggacaaattttatgctcttattttgcaagtccacccncgcagagcctccaccctacaccctcacagatctggttgtcgatgtagaggcatccatcggaggaagaggcagtggtgcacagtgtcagggttgagccaatagaggaggtggaagggccgacttgatgaggaggaagtcatcgtcgaagtcctacatttggagggagagagaaagaggggaaggcaaaccacttgtcatcgaggttgtcatggaggtgagaggaggagggacaagggcaataaggcttcggagtanaaacaaagaggacgaagggtagagaaagagaaggaagagaggctggatcgttggattacagagagagagagaaagagaacgggaaagacaaagaacaagtacgatactgcctatattttagtggacacacatg

SEQ ID NO: 268577 - DNA, 446 bp, Glycine max
  unsure (1)..(446): unsure at all n locations
cgtggntattagatcatttaatgcttgcattaaacgcatattctgcttcatgtaggaaaaccactatgattggctttcgtgttgatcactataacaaaaaatccgttccttttagtcaaagtagatctatcacagtaaaacacatcttttgatgttgtttggaaacttttagaacttaaacttcatttattcttcataggattcgacaaatcctgaaagaatgtcttgtgagacaatttctgcgaaatgaacctcagacacaaagtactaaatgaagtcttaaatgtcatctttaatattgtatcagatcatgacttattcatatttctgtctgaaatatcaaacagaagatcatgaagcataatctgatatcacataagacaaaacttttaaccgttgtatttatttgtatctcaataaaataattaagggtcttgattcatctt

SEQ ID NO: 268578 - DNA, 455 bp, Glycine max
agcttcgtacttcttatttaataatgtattttcacccaactctgctaatgcatcaacttgttcgtccgtccattcatctagcttcagtgatagaacctataatagcttcaaattatgttaggatttctttgtttagtgtgccagttattcatgcacaaataacttggtgaaatggggacaagtggttcaatactctcccctttcatcactttagaaagcagataaagtcaacatggagtgcttccgtattaacgactaagatctagtttggataatcttcttaataaatatttataagagaagacaataaaatgaatcgaggaagtaaaataaattaagtttctctcataagttaaaattaatttatgcacctcaactctttctaaagctccctcatctaacttttcttataagttgaagttcataagttatttctaatctataggagaaatttg

SEQ ID NO: 268579 - DNA, 454 bp, Glycine max
  unsure (1)..(454): unsure at all n locations
tcaaatgatgatgagggactcaaacatgaaacacattgtttattttcagtattatcttcatcaaacctagcattgagctcatgcaactgcaaatctaaaacactaaataaaaaatcatgcttaaaatgatgcaaattagaaacactagaagtggtagcatgtcgtctaggtttcttcccttgcacatacagtgcatccaaatcaggcacatcaatatcatgcttattgcaaatttccataaccttagatataagttcttcccatccatcattcctcatttcttgtaattcttctttggtggctttgacaagtgataaagcattcaaaatatcttgatcacgcttttgtagcgctacacttaaatcatttgtaaatcctaaaatcccaaccatcatgtataacatgaaaataaaattaaaggactgaagcacatctagcanaatcatagttttac

SEQ ID NO: 268580 - DNA, 373 bp, Glycine max
  unsure (1)..(373): unsure at all n locations
agcttctcgatatattatgcgcctgaatcttacttccgntggacaagttatgaccatttgaatttctcgagagctttcgttgttcaatttcgagcgtctcgatatattatgcaccggaatcggacttccgtgtgacaagttatgactaattgaatttctcgagagcattcgttgttgaatttcaagcgtctcgatatattttgcgcctgaaacggacttccgtgtgacaagttatgaccattggaatttctcgagagcttccgatgttcattatcgagcttctcgatatataatgcgcctgaatcggacattcgtgtgacaagttataaccatctgaatttctcgagagctttcggttttcaattcagagcat

SEQ ID NO: 268581 - DNA, 441 bp, Glycine max
  unsure (1)..(441): unsure at all n locations
tctcgatatattatgcgcctgaatcagacttccgttactattgtttgaccatatgaanttctcgagagccttcgttgttcaatttcgagcgtcttgatatagtatgcgcctgaatcggacttccgtgtgataagttatgaccatttgaatttgtcgagagcttccgattttcaatttagagcttcttgatatattatgaacctgaatcggactttcgtgtgacaagttatgaccatttgaatacctagatagcattcgttgttcaatttcgagcgtctcgatatattatgcgcctgaatcggacttccgtgtgacaagttatgaccatttgaatttcttgagagcatccgttgttagattttgagcgtctcgatatattatgcgccaaaatcgaactttctcgtgagaagttatgaccatatgaatttcttgagagcattc

SEQ ID NO: 268582 - DNA, 455 bp, Glycine max
ttcttgagaaactttcttgagaagctagagcttagctagacactcttctctaatagctaagctcaccttcttgagatgagaagctagagcttaactacacatacctctctaatagctaagctcacttccttgagatgagaatgctagagctgagctacacaccctcaataatagctaagctcacccccatgccaaaatacatgaaaatattaaaaaagtccctactaccaagactactccaaatgacctgaaatacaaggctaaaaccctatactacaagaatggacaaaatacaagggcccaaataaagaaaaacctattctaatatttacaaagaagaatggacctaaccttggcccatgggctcaaaaatctaccctgaggttcacgagaaccccagggccttctttagcagctgtagctcaatcttctggaggcctctattcaataccctt

SEQ ID NO: 268583 - DNA, 436 bp, Glycine max
  unsure (1)..(436): unsure at all n locations
tcacatatgtaaatggatgataccttgtatattatagcctcaaaaggtgattatcatgactcaaaattaaaagcaacactttacattagcacaagttttgtcggtaataaccctacagttaactacaaattttgtagtacttccttgaaaaccatattggttgatggatttagtggttttcgttctttatcgagaataagaattttcaatccgaatttgctctgaactcttaggaatgccacataaagctgaccatggctgaaaactgtgtgaggaagatataatccaacacactgaagagattggccttgagatatattgattgtcatggcatatgacacaataaatgggaaccgtattctagtcatcttgataggccaaggagatngaaatagtgataatgaaattcgttgaatgtaaatcacacttcctacac

SEQ ID NO: 268584 - DNA, 443 bp, Glycine max
  unsure (1)..(443): unsure at all n locations
gcttcaagaagaccaacatattacatatatagatgattngattatgcaactcacagaanacacaagttaaggatgcacaagaaaagaagtcatgttgctcaatcataatctacaagcaactgacaaagttggtgcttcttcgattagtcaattgatgaaaagaacaatcaactaatgacagtagtcaagggttttattcttttctattttttttggatatgcgagcaacaatattctacaaaacatttgcaacacttccaatcacggcaacattaaaatgtttaaatatttatagatttactgtatgaaagacaccctacattattttgcacatggtttctagggtttataggctactgaggcaatacccgtgcaaaagcagttgtagaagtcttcttttaattttcaagtctgacttgggttaactgagaaacctttttttt

SEQ ID NO: 268585 - DNA, 421 bp, Glycine max
gattacactgtctcttgccttcaaattcaaataacctttttataattcccgggtgttagatacttcaacgaaaagacgagggaaataattgccactggttggaaatgccaatgcctttgggggtttgatgatgatcatgatgatatgatgccattgatgcaaatgggcttttcaagtttaacttcaagacagtacttcaagaatacaagtcacaacatcaagatgatcactagtatattaggaagggaattcctaattgaattagcaaaaagtttggccaagtaatttaaattaaaaagtgtttttcaaaggatttactctctggtaatcgattaccagaggatgtaatcgattaccagtggccaaatatgctttacaacagctactaaaaatttgaattcaaattttagactgtgtaatc

SEQ ID NO: 268586 - DNA, 453 bp, Glycine max
  unsure (1)..(453): unsure at all n locations
agcaagcttgagggtgcgtagcccaccatctttttctagtagagnatcgataatgtgtctaccatcacgattatcgtctccctttccatcattgggggtaccacttgggccgccagatccctccaccttttgggcgtgttctttgaaagatccgtccccctttttgcaaatgttctgtagttgcatcctatccagaaccatatcaaaattgtactaatactgcctaacaaaggcaaccattatgtccttccaagaatggactcgggaaggttccaagttagtgtaccaggtaacagctaccccagtaagactttcatggaaggaatgtatcaacaattcctcatcttttgcgtattcccccatcttctgacaatacatctttagatggttcttgggacaagtagtcccctagtacttgtaaagtccagcaccttgaacttgcgaggggtgatg

SEQ ID NO: 268587 - DNA, 452 bp, Glycine max
tatagtatgcccgagtcattcatccctatgagatgttgttttattgttggcgaacagaattgccattccttggattatagggttgaaccaagctcatgcttttacaaaaaggttcatcaagtcaagttgaaatatggaagtaaccgtcttgcaaaattggggcaaaagatgaatcgagtcacatcactgcttcgtctactgccaaacatatttaggattattgatgtccttgttacttccagtttcaccttgacaaagatgtcatggaccatgttgaaaatctaaattgattcaaccccatatcttgcgtaaaaattcgcaatacttcaactgtacatcattcgcatgcatccatgcttttcattggttgcattggctcgtgcattctttccttgaaaaataaaataaaatgaacttaatcattgttataaaaaagaaaaggacacgcttta

SEQ ID NO: 268588 - DNA, 460 bp, Glycine max
agcttataataagaaagtgaagtctaaaacttttaatgttggagatttagttcggaaggttatcctgcccatagatagtaaggatcgagccttgcgcaaatggtccccaaattgggaaggaccgcttaaaataattcagatctattcgaatggtgcttatgaattagaggaattaacccctcagaaacgtactttgagtataaatggtaaatatttgaaaaaatataaaccaacattgctcgaagttaaaataagcatagaatagacagaaataatggaaacataaaaatggcgataacagtaaaattgccacgaaagggcatgtgtcaatattacatcaagagtagaatcgaaatacagaattcgaaataaagaaattataagttctactaatgcatgactaagtcctcatatagtttcttcagggtggccatctctttgctcaagacctggtcagcac

SEQ ID NO: 268589 - DNA, 455 bp, Glycine max
  unsure (1)..(455): unsure at all n locations
ntgttagatcaacaacagcctccttgcgttcagaccatttgtgttctnnttgaatattaacaagacagattcaaactcatatagctaaaaagaaattttacataccatcagatatgttagcatgtctgagaaaaagaaaagcatactccggatactaaattttacataccatcattcccagattcttcagaagggccaggacccacaacctctaacacagcttcctgttcaggttccttatcttgctcagatctacaacatgagagaataaaatggtaatcatacactgattcacgcgactggtgtaagcatcaactgtgtttgctaaaagttggtcacagtccagtggctaatgccttttgttactaanataaaaccttactaagcatgttggaatctggaactaccacctagaattatgtcatttgacttcagaanaaaacattatatttata

SEQ ID NO: 268590 - DNA, 447 bp, Glycine max
  unsure (1)..(447): unsure at all n locations
gcttcttttggaccttgaacaggcaactaactcctctttcaaaaccatgctatgtgctcgcgactggtccctttcctcccttcgcaacttgagttcattattgctaccccatagggctccacgaaatttgttccggccatactcttccttgcgagccctcttggtctctcgttcaagggctcttgcggtaattgcattctcttcccgtaacccggcacactccttccgaacgtgtgtagcagccaacttgaacttctccttggcgagttttgcctttcctaactcgcttttgagagcttggacttcctcgtcctcttccggtgcttcaaaattctcttcgctgacgactnttaacttggcgagccaatctaaacctcgtatgcgaactttcagccattcgtggtacccaccaatgatgccattacgaatgcctctaagctcttgatc

SEQ ID NO: 268591 - DNA, 450 bp, Glycine max
  unsure (1)..(450): unsure at all n locations
tctcggctcataccgggaacgcctctagttcaacacccgtgcatcctaatgcactcacccagagggaagctccccaagttccaactccaaacacgactcgcccggccggtaattccaacacgacaaggaatttccctccgaggccatttccggaattcaccccactcccaatgacgtacgaagacatccctcatcgccaatcatttggccgtcgtaactcccggaagggtcctcgaaccccctttcccgaagtggtatgaccctaacgcaacatgcaagtaccatgggggtgtcccggggcattccgttgaaaaatgcttggcccttaaatacaaggtccaacatttaatggatgctggatggctgactntccaagaggatcggcccaatgtgagaaccaacccgctcgccaatcatggagggggagcggttaatgccattgagcccgat

SEQ ID NO: 268592 - DNA, 457 bp, Glycine max
  unsure (1)..(457): unsure at all n locations
agctgtgtttcaagattcactaaagaccaatctttgccttanaacaaagtgctttcaagacatgcaaggctctggtaatcgattaccaggaagtgtaatcgattacccgaagacaggattgagaaatagctgttgaaaaaggttttgaatttgaattttcaacatgtaatcgattaccatatgtctgtaatcgattaccagcaacgaaactttggaaattcaaattcaaaagttataacccttcaaattataattgtgtaatcgattacacaaacattgtaatcgattaccagtggaaagttttcagaaaatctgccaacagtcacatcttttcattagatttgtgaatggtcatcaaaggcctataaataggtgacttgggcacgaattttagacagagagttctgcttggcaaaaatgtcttatcctctcaaaagacaatgagagagattccaaa

SEQ ID NO: 268593 - DNA, 452 bp, Glycine max
  unsure (1)..(452): unsure at all n locations
ctatcttcaatacatatccaattcagatgatggcatctatgtttaacaccataattaacatttgaaattataagagcacaagtaactgtcgttgatagcacctcaaggccgagaagaatcatgaagaagccctcaggacgggaggagttcatccactaagttccttctgcaactacccagtctgttagcaaaagggtggtataggaattatcctctgtanngattgtagtgcttgtccccctcgactatccattcggttatggcttgttccccttagtgctggtgaggccgttaggattactagctatcctttctatttcactagctataaatacatatacatgtaatgaataagaggaagacaatgagaaatttcagagattctagcttcttaccttaattatggaggtagttcctggcctctaatntagganacataagcatactctatc

SEQ ID NO: 268594 - DNA, 404 bp, Glycine max
  unsure (1)..(404): unsure at all n locations
agcttagttggtcaattgtgtcatcttggttatccaattagactggacagtgataaccgctgaatatgaatagttggaccgcttctcggtctttaggtttggcacctggtttgattgagtcgattaaatgaacctaatctgggtccatgcattccttctgatgcacgngtgcaattctagttgatgttcatgcctctatatattacgcccaccccattaatgacagaaaagagatacattcttttgacagaggcttgttgagcacgctcactctttactgactttttacactcgaaggtgattcatacttgttcatcattcacttatggccaccatttcttaccaaaattcatgggtatcattggtgaagatcatggagacttctcttcaactttttacgatcc

SEQ ID NO: 268595 - DNA, 331 bp, Glycine max
tgccccaatgcgattgtatgcctgagaaccgcatcctttaatttcaatgccaggaaacgtgacttatgccttggaatgtccattgtggcttcgaatgctaaaaagccttgcttttagtgacatgttcgagagggttgttattacaatgtgggtgccccatgaggaataccttgcgcctatgagcctggaaaatacgtttcaacgggatgtacatatgcgaatataagtggcgcgagaatgccttggcaagcgcgtgaatatatggcataaagataccttgcggagtgtgaatgaatagcacaaatgccttgcaaattatgcttatctatgg

SEQ ID NO: 268596 - DNA, 446 bp, Glycine max
  unsure (1)..(446): unsure at all n locations
agctntaaatctattctgtgagatgcaatctcatgacatcaaacctgattccttcacattagtgagcgtaattattgctcttgcggatttatcagtcacccgccaagctaggtggattcatggacttgctataagaactntgatggacaagaatgtctttgtctgcgcagcactcattgatacatatgcaaaatgcggagccattcaaactgcaagaaagctntttggcatgatgcaagaatgacatgtgataacatggaatgcaatgatagatggatatggaacacatggccacgaaaaagaagctctgaatctcttcaatcaaatgcagaagggatctgttaagccaaatgaagtaatatttctctctgttatcgcagcttgtagtcactcggatttaatggaagaacgcctctactactttgacagcatgaaggacaactatg

SEQ ID NO: 268597 - DNA, 328 bp, Glycine max
  unsure (1)..(328): unsure at all n locations
tagagntacattnnttgcttgtatgaagagatttctttcttgtctaaaaacaagaagcaatttaatttctttcaaatcttcacacattttgggtccttcttagggtcctttaattntgtattaaaaaacaagaaacaacttattattcttttttattccatcgcatgggatgcccaaatttaaaacaatagtgagaggtaacatgttcattatacacttatcatattatttaggatcatcattttttggaatttctaataaaaggttggattgtaaatgaaatctaatagaatggaaccacttaagttactaatataaccttaatttt

SEQ ID NO: 268598 - DNA, 438 bp, Glycine max
agcttgaaggcaaactggatgcgttggtcatcttggtaacccagctggccttgaatcagaaatctgtacctgtcgcaagggtttgtggtttgtgctcctctgctgaccaccatatagacctttgcccttccatgcagcaacctagagcaattgagcagcctgaagcttatgctgcaaatatttacaatagacctcctcaacctcagcagcaaaatcaaccacagaagagcaattatgacctttccagcaacagatacaaccctggatggaggaatcaccctaaccacagatggtccagccctcagcaacaacaacagcagcctgctccttccttccaaaatgctgctggcccaagcagaccatacattcctccaccaatccaacaacagcagcaaccccagaaacagccaacagttgaggcccctccacaaccttccc

SEQ ID NO: 268599 - DNA, 416 bp, Glycine max
ggccacctagctctcccaggcgagcaggggtgcttcctctagaagcaacagccttctggaggaatcttctggagggcccaagtgggcctggttgccatttgcacccccatttttactaagtacacccccctgcctttttttggtgattcttttttcgtaaagttacgaaaacttacgaatttcgtaacgatacttgttttctttccataatgttacggaaccttgcggattacataaccatcctcttttttgacttacggaatgttacaaaacctcactaattgtgcaacgatgctttcatttgatttccggtgtgtcacggaaccttacagattgtgcatcaatattttcttttgttttctggcatgtcccggaatttcacaaatttcctaatgatgggtgccaagcacctcaca

SEQ ID NO: 268600 - DNA, 279 bp, Glycine max
agcttgagactgactgtcgacaaccagaacataatatagagctgtccgttgaagaagatcttctaacttatagaagaagcttcacctatacgacgatggagtatgacgcgaatcctttcctctatgatctgacaacccgcgtgctatatacctaccaatacacctgtgactgcattgtatgacgcatgtcatagccataatgcatctttaacctacacatcatgcgttaaccggagggtactgaccatgaggctcccgatatctctcacagagtaccgg

SEQ ID NO: 268601 - DNA, 384 bp, Glycine max
tcgtgctatcaatcacggtgaggattgcactgggaagaaccttttcgtgaccaaagtgtgaaacattgtgtctgtgactggtttaagtttcaattgagaaattgtgctgggcctggtttttttactgtttaatactttgactgttcctagagagctatgcgacatgtatagaggacttcgacttcggaatgctatgtggtacccttccacaactaacctcttaagacttcagtgtaatcattctgctccgcgacggccttgcgcacctgatactagtcgctggatataaagcgatgccatcaatgccgctcatatctctcccgaggactaaagaatctacctccctaggctatggtatgtaagcgatcatattggatttacctt

SEQ ID NO: 268602 - DNA, 469 bp, Glycine max
  unsure (1)..(469): unsure at all n locations
agcttgtcttaacgtttatgcgagacggagatcaacatgctagctatcatcgccaagtaccaagaagagttaggtctagccacggcccacgagcatagaatcgtggatgagtatgatcaagtatacacggaaaaggaggctagaggaagggtgatcgactctttacaccaagaggcaaccatgtggatggatcggtttgctcttaccttgaacgggagtcaagaacttccccgcttgttagccaaggccaaggcgatggcagacacctactccgcccccgaagagattcatgggcttctcggctattgtcagcatatgatagacttaatgacccacataattagaaattgttaggaaacttgtatggtctctcagaccttgactagatacgactntctttttgaaataaaatgagttggtctcatgtttctactncaaaaagcttgtgcaaatcaaatcactcctacat

SEQ ID NO: 268603 - DNA, 436 bp, Glycine max
  unsure (1)..(436): unsure at all n locations
tgggacgttactcttaaagcaaaaatggcatgtaacctccttccatcaatacaaacatcaatggtaatttagagcaagcttatgcgcctatatccttacaaacgttctcttgcacaaaacatttaaccgaaaaacatgcgcccatttacaatcaaggcagcttcgttacctagattatttacacgtacctccaaggtgtatttgttacttacatcacacacatctccttggctaaactcacatacatgcatactcaagcattntggggcaccaaaaattgcacatgtgcacatcttggcatttctaatacctacatacgcaaacttcatgatgaatcttgactatctacacaataaggtgctacatttcatgctcttttttcaagttttgctacctaaagccgcatggcaattcaagcatatttttctttgctgac

SEQ ID NO: 268604 - DNA, 402 bp, Glycine max
  unsure (1)..(402): unsure at all n locations
gattaataaatcttggtntatggttcatgttgnctctaaaacatttccattgaatttaatgatgaaatctgtgcattttcaggtgaaaaaaaggctaagttttgaattgcaaaatgtagcagttgggctaagctcaacaagtgggctaagcacatattcaccactaagcatagctttagcgcgcttagcacaaaggagaatttggctgagcgtcagcatcaaagtcgcacgctaattgtagtaggtgccttcagccaggctaagcttgagactggtgctaagcccaatttcacttactcgcgctaagcgcgagggtggcgctaagcgcaacgtcgcaatntcagagcctatntaaagcatgntcttgtgcagaatagggtaccacttttatgacaacttcta

SEQ ID NO: 268605 - DNA, 424 bp, Glycine max
  unsure (1)..(424): unsure at all n locations
aaccacacttggagactcacaaccttctccttctcacaatacagctatcggatgcagatggatttaccagaataaataccgggctgatggttccactaaaaggtataaagcatgcttggtcgccaagggttacactcaaatggaagggttagactacctcgacacattctctccggtggcaaaactcactaccggtcgtgttcttcttgcattggctgcgcaaaatcaatggcacttgcgaaaattggatgtcaacaatgcgttcctccatggagagcttgaagaggaagtgtatatgcaaattccacctggacttgcagttgagaacccganacttgtttgtcgtcttcaacggtccctctatgggcttaaacaagccaaaccgacatggttcacaaagctatctagtttcttagtctctcat

SEQ ID NO: 268606 - DNA, 172 bp, Glycine max
ctaaaagttcaaaccttaattttcattgggaagagttaaccccttttattagatacaaccctccgtgaagaaataggttatatgattctccttttcattaagctttattttttaatcaagatctttcatttttgaattcttaaagaagcattttctttggcaacattgaatg

SEQ ID NO: 268607 - DNA, 352 bp, Glycine max
tataactcgggcctctggccaaataccaatcaagtaaagatgttcgagttattcaataaccacatcatgcaacatgctgaatcatattgaacatgttgtgtttagaaaagcacagatcctgaggtggcacaagtataacatgcagatgggtcatttaaaaagctcacaatacaaaaggttaagtaaaagaaaaaatcatttcatttgaagatagacctataaataaagagagaactagaaatggaaaataccatcttttaagcatctagacaaaataacaaagatagtacagaatatgaaacagcctaatcagagtcagagagaggcagagcttttggcagatgtacattta

SEQ ID NO: 268608 - DNA, 396 bp, Glycine max
  unsure (1)..(396): unsure at all n locations
acattatgcttggtgcgtaaatgtccgggcgctcctccactcgccaatttcctagtcggaaaccaggagggcatggtcgtaccaaatccgacccactcggcgaatcatcttcgcatatcgcaacgacttggccttcgtgtcctagacccgcgcttataaagcttcttcgactttttgtcccaatcgcgagccttgacctccactcttccttcctacaacgcttttccttatgtccgcttgtgtgggtttatggcctaacccaaacttcccacggtttcctctggcgtttatcaggctggttatgccgncgttgtccttgcctaaacccattccgggctcgtaaccattccncaacatcacttcggccaccattactgccgtatcggacaggcaagg

SEQ ID NO: 268609 - DNA, 456 bp, Glycine max
gagtatgcttttccctgttctggtcagttaagatgttagccaaaacttaatttgtttccatttgaccaaatatttaaattatccttatttcacttaaaataaacctctttactggttgtactattttataaacctcaaacatgatgcattgttatttgagtatgattgatccagctgatagtttcccccattgatggtacagattatatgtcgtcattacaacatttgtgttagtgtttccctgtaactgcatccccgcactcattgtcgttgacactgagcatctttcgaggtatgtctctatttttaaaaagtggtatgattgtaacgtgtcattgttcaaatatcggtattgtttcatgttactagttagttgcattatgagtgaaccttagttccccgttcgagattcgatacatcgattaatacggatagtttgaattaatcgatgtattg

SEQ ID NO: 268610 - DNA, 356 bp, Glycine max
  unsure (1)..(356): unsure at all n locations
catacttatgctatgcataaaaaatgtaattatgagattgacctgcccaaagaagcatcattttctagatagcaacacattaagtaccatgctcaatcattttggtttgttggttttttntttcgaaataggtttatgatcctaacatgggtggctcatggcacctaacacatgcaactaaaaatgcagnngaaattttcatgcttcctttnctgtttttgttntgcagaggaaaatgcaaggatcatgcatgagtaaacatgaaaataaatggtatgcgaaaaacatgttagatgtggatgcatggtgatgaaatgacttatcaaatgcaatgcatgaatatggtatgtgacaaa

SEQ ID NO: 268611 - DNA, 431 bp, Glycine max
  unsure (1)..(431): unsure at all n locations
tgaaacaccttatgcactcctctaatgtctatggcatcatttctggcactaaactactgggagttggaggccatcttctcaattaaaaatctggcttcagtatgaagtatagtttcaagggcttcaccactggcaacatctatcatacctctctccatattactgagtccctcataaaagtattggagaagaagctgttctgaaatctgatggtgggggcaactggcacatagcttcttaaatctctcccagtactcatacaagctctcatcactgagttgtctaatacctgagatatccttcctgatggctgtggtcctggaagcatggaanaatttttctaagaatactctcttaaggtcatcccagctcgtgatggaccttggagcaacgtaatacagccagtcctttgccactccctctaatgaatg

SEQ ID NO: 268612 - DNA, 439 bp, Glycine max
  unsure (1)..(439): unsure at all n locations
gcttattactatatgcaacccttatttttattggtgtcctgatatgtgtacagatgattttggatgaatttctatttgccataacatatgattcatggttatgatctaggcattctttctttccttacattttaagcccctggcccaacatttatcccaatatataatatttttgccatttgcaagccctctgagccaaacacttgatatttttggaacactaacctaggataaaaattttctaccttaccataggttaggagagcaaggngtgtttttatgggaatctctatcatttggtggctaatgtaatgtgatactcttgttttacgggtgttaaagaaaattatatatttattctaaaagaagagaacacaccgagaaatgattaagaacaaactcgctctttatggataaataaatctctgaatcatgtaca

SEQ ID NO: 268613 - DNA, 415 bp, Glycine max
  unsure (1)..(415): unsure at all n locations
attatcattgaatgaaagttaacttacaatgattagctattacagtttatataatcagttataagagtaactaacaattgtaactaactaactaattccaactcaggttacatgatgatcaagctaactcttatcaactaagctaactctaactctagttacatgataatcttgattggaaaatagaccaacacaataacaaattctataataaaataataagtaattaaaataaattctttcaaacttataaaaactgtgagaaatacctataaaatatagaaagtgaaatagaaataaaaaaaaaaatgaaagacataatttgtaaaaaaaacctctacatctaagaantaaaaatacggatcatccaagaaaaaaaaatagtttcactataatcaataaagaataaagagaa

SEQ ID NO: 268614 - DNA, 440 bp, Glycine max
gtgcactgagcataaaagatttggttttctcttgaatactacgaaacggggcacaattacacatgacttaaccagtgaatattaccagaagaacatcgaaagttcatctaacagaacatgggaaccaagggatccgtgcttaccttcatcattatatttgaatcatgcagtacatagagcaaggtcgacggcataaagaggtcatgtcttgtacaatagtactttcacatgtgaactgtaatgggtaacttgccaatattttcttttccttatcgaaaagtgttgctatcatttcaatatgttgtctttttctatcttggtcaatagatattactataaaaatattatttattataatttcttttctaggacaattatacagggattaattgatgcccaaattcttgttctctatacatgcagaacatccgatcgacatt

SEQ ID NO: 268615 - DNA, 464 bp, Glycine max
  unsure (1)..(464): unsure at all n locations
agcttcatgatgtggaatcaagattgtttcttttgttttgatgataacaaagatgatgacaaatagcccaaagtatgatttcaagattaaatccagaacaattcaagaatcaagagaagtttgatttcaagattcaagaaaagatgaattcatgtttcaagagaaaaatcaaaagacttccaagggaagtattgaaaagatctttcaaaaaacaaaaatagcacaattttgtttctcataagagtttttctcacaattttctaagttactagagtttttattctctggtaatcgattaccaatttcctgtaatcgattaccagcggaaaagtttgttttcaaaagcttttaactggaattacaacgttccaattgatctcaaaatggtgtaatcgattacaagatattggtaatcgattactagtgtatctgaacgttganattcacattcatttgtgaagagg

SEQ ID NO: 268616 - DNA, 420 bp, Glycine max
  unsure (1)..(420): unsure at all n locations
atgatgatgacaaaggtgatgacaaaaagctcaaagatcaatcaaagaacaactcaagtgaatcaagaataattcaagagtttaagataagaatcaagaagaattccagaactcaagaagaaagtctagagacaagaatcaagattcagggttcaagatctcaagaatcaagatcaagattcaagaataaagagaagactcaatcaagataagtattaaaaagttttttcaaaactttgaatagcacatgaatttttgacaaaatcttttaccanagagtttttactctctggtaatcgattaccatattgttgtaatcgattactagtagcaaaatgagtttgaaaaagttttcaaactgaatttacaacggtccaattattttcaaaaagctgtattgattaccatggtttgatatcg

SEQ ID NO: 268617 - DNA, 462 bp, Glycine max
  unsure (1)..(462): unsure at all n locations
agcttctgcttattaatgcacagcttcttctttaatttaacatatcttggaattagctttattgcatccagtaaaggtatgtttacctctacttttctaaatgtttccaagatctccttctttggctcttccatttttgtgttggaaatcgctcttggagggaatggaagagggatatgtttgctttctttaaattcacctgcataaaaattgttaggtatcttactctttaaatttttgtcatcatctttttctggagtagagtgaagttgggcaggttcatttgcagatgaggaagatgttgctggttgaggttcttgacactgctttcccgacctcaaatgcatggcactcacatantttggattctggacagaatgagaaggtaatctgtcagaattctgggactggtgtagattaactgtgtagccaattgtcccatctaattggttaagctctgag

SEQ ID NO: 268618 - DNA, 299 bp, Glycine max
aacgatgggtgatcaagaggagacacaggaacagatgaaagccgacatgtcggctctgaaagaacagatggcttccatgatggaggccatgttaggaataaggcagctcatggagaataacgtggccaccgctgccgctgtcagttcagctgccgaagcagacccaactctcttggcaactgcgcaccatcctccctcaaacatagtaggacggggaagggacacactggggcacgatggcaaccctcatctgggatacaaccgagcggcttacccttatggagtggccgccactactc

SEQ ID NO: 268619 - DNA, 448 bp, Glycine max
agcttggatgaataatttttttttgaagttattgaatgggactccatgggtgaagaagaggtttgcaaaatagtcaaaattgcattcaacaagactatgtcaaagatggtgaaacatttgaggcctttatacgtgagggcacaaataaatggaaagaccctagaaagggtatctctagatggaggcacaactctaaacatcatgcctttaattacgttggagaaagtcaacaaagaatagcaggatttggtacctaccaatatgaagatgacaaatttcattaaaggagccacaactacattgggggtcgaaatcacagtaaggccaataaccaagcactcaaccttctttatggtggatgccaagccatcatacctactatatggtagatgtgacaaccgatcatcgttacatggaactaagaactaactcaagtggaagacttcat

SEQ ID NO: 268620 - DNA, 536 bp, Glycine max
  unsure (1)..(536): unsure at all n locations
actcagcttaaacaacttgtgtaatcgattactataaggctggaattgattaaaacagagagtttttccttttaaagaaattntctaacttcgaaaattttcttcttactcacacatgatgatgcatgatgcacatatgatacgatagagactaagatgcaacattcaatataacaatcaataaaagtgccactcaagagagttgagcatttaaaagacaaaacttcttcaagctcttctttatgcttcgaggctaagtcttcatgttgctccccttgtctctaacatttgatagactaattagtctttaattaaacatccctagaattgattttatgttttgacttanattgataaatctattatcattggggtattgacttaaggcaaaaagcatcttctgaccttaatcataggcttcagttgattntggaaatcaataattaactaggaaatgaatttcattaggactagggatggnggtaatnggtactagttagtcataatccctggtcattcttatcattggtagacaa

SEQ ID NO: 268621 - DNA, 448 bp, Glycine max
  unsure (1)..(448): unsure at all n locations
agcttaaagtgaagcataaaatgttttattatggaacttttcctacaaccataaccatcccattactcaaatacgaaatttaccacataaaaatgtaagccttgcttgcacattgatgaaataattagatagccattttcatgataaaatatatattctcatttttacaattatccccggtcatctccctctcggcccttaaacaaattagcatttagcactgtgcttatacaattagattgatttataatgttaagaatgttttctaaggtacaacagctttatccctaagctgaatgccatctggtgtggggtcgtgtggtccctgtggactcatggaaatgctattgatgagaaagaagganaagcaaactcaaataagtatgagctttgttttcaatcaatcactgcaatctgattactttggctcaatggccanaaatatata

SEQ ID NO: 268622 - DNA, 379 bp, Glycine max
  unsure (1)..(379): unsure at all n locations
tcctatatatagaagagtgccgggcatttatgtcactttcacccgcttcttttctattgggtcttctcgaataggacaaattttaatattttgaagataaaccaagaaaaaatagtctatcgttttaggttataatctaattaccaattattatgtttaagtgccattgtgggtcaatgatttgaatagtaaaaatccaatctgaagcaaacatccacagcttttgagntttcacatgaatttgattcgaaaattggaaaatataccaatggtcattataatgaaattccaacaaatgaaaaatttattgacttttntttaataatttatgtaaaaaatatgcanagcatgaattctgataattgatagtataactttt

SEQ ID NO: 268623 - DNA, 405 bp, Glycine max
aacccagcttgccatgaatcagaaatctgcacctgttgcaagagtctggggtctatgttcttctgcaaatcaccatacagatctctgtccttctttgcagcaatttggagtcaatgagcaacctgaagcttatgctgcaaacatttataatagacctcctcagcaacaaaaccaacaacaacagaataattatgacctttcaagcaatagatacaatccaggttggaggagtcatccaaatctgagatggacaagtcctccaacacaacaacaacaggctggccctccttttcagaatgttgctggtctaagcaagccatatgttcctcctccaatacagcagcagtcaccacaaagacaacaagcgactgaggcccctcctcaaccttccttagaagaagtagt

SEQ ID NO: 268624 - DNA, 478 bp, Glycine max
tggtgcctgaaatggtctttttgatggcagcggtcctaaatgcagggaagaatttctccaaaaacaccatcttaaggtcatcccagctgataatggacctatgagcaaggtagtatagccaatcttttgccactccctccagagaatgaggaaaaacctttagaaagatatgatcttcttggacatcagggggcttcatggtggaacaaacaatacggaactccttaagatgcttatgaggatcttcacctgcaagaccatgaaacttgggcagcaaatgtattagtctagtcttgagaacatatggaacaccctcatcaggatattgaatgcacaagctttcataagtgaaatcaggtgcaaccatctccctaagagtcctctcacgaggtggagggtgagccatgttctcaatatgaaaattagtagttgagtgctcacaaatagaatattcagaaatcaccagcacagaatactc

SEQ ID NO: 268625 - DNA, 454 bp, Glycine max
  unsure (1)..(454): unsure at all n locations
gccctcatcagngaacgaaccgcactcaagctcccactttcttgaattgatttgccccacacattcaaccattagaaagtagttaatacacttcctttagagagatatatgtgtgtcctttctctttcaatcttcataccttcactaaacactccttcatcttagcgtgtgagattttccaatctttctggtgttatgtacgccacattcttctctgtagaaaaagaagaaaaacagttatntaatactaaggaagcatcatgctgagctatttagtaatatgtataaataagaaaaccacacaaccaaaaccaatatttttaagatatccacataaggatttactaaaagaacagtcttcagagaaaatcattcctgttgaaaaacaatacaagggtatggttataaaatcttagttgacagagctaaaaggtgaatggttgttaacaatgat

SEQ ID NO: 268626 - DNA, 375 bp, Glycine max
tgaccgaacaaactctcaaaacaaaaacctaccggccaggtatagaaccacctctataagaaagagaacccacttgacgaattcttagggaaaactatttaaaaagtcaagtcattggagaacgcttaacaaaaatctaaaacagaggatttcttagaaaataaggttacacaacttttcatttcaaaagaggaacccaagcatattgatgatgctatggaagatgaaaatcacgcaaaaatcatgcaagaggaactaaaacaattttagaagaatgatgtctggaagcttggaaaactaccaaaaggacagaaaaaaagtggttgctaagtaagtgttttgaaacaagtggatgaagaggtaaggtatgaaaac

SEQ ID NO: 268627 - DNA, 181 bp, Glycine max
caccatgaagacctatgagctaaagatcaactgctataacctaaagcagcttccatcacacacttacccctcgaatgattggaaaagctgattccaaagattcctccgctgccttacatatggagctgaggaggagcaggttactaacatatgctctttgcccgacactatcaccaagagt

SEQ ID NO: 268628 - DNA, 446 bp, Glycine max
  unsure (1)..(446): unsure at all n locations
ctacttttgatgaatgagaaaaattcagctttgatggtgtacttgagcttcaaaaataaattgaattacatttgtttggtcaaattttatcttatattttgctggttcaatgtgatagttttcaataccatatataactcttgcaagaaaatatttacttctagtgctggagagcacctcacaatcaggagatgcaaaaaaaaaaaaaactctcttagacaagcttttactccttaattacanccaagcaaatttatggcttccctttctagatgccattcatgagaaatttagtagtttctcttggagactaaagaagctatgatngacaaacataccatttcaaagtgatttgagaagtacgttttcttgaaaacggagtcatgattactaagagtagttgcagaccttgatcaagatagatgtctagcgtttaagtccatagt

SEQ ID NO: 268629 - DNA, 400 bp, Glycine max
  unsure (1)..(400): unsure at all n locations
cattatttttcggtcttggacttctgaaaggagcaaataaaggctttccttattcttttgtgcagtgggcatctaatcccggcatgtgcattaagaacatagtttgatttgaatcctttggggggacaatagttttcgcttgactatgctggagttatatatctctatgcattctatgaatcctttgggttggttaacgagtttggtgggcttaacaatcattgggtcatttaagtccaaaccttacatttcatccaacaagttcggaatagntacatttacgcattttgcctgtcacctctaccgggaacgttcctattttttaattagttaactctttagttactttgtctaatataacctatctcacctatgcaaataaacattctctattacactt

SEQ ID NO: 268630 - DNA, 470 bp, Glycine max
  unsure (1)..(470): unsure at all n locations
agctntatctccaaggcaaagaaggagtgttcttctggctctatcaatcatctctgatttctcctttaagcttagagattcaggcatcctttcttctcctttaagagcttctgcccaaccatgttgaatcaagattgcttccatcttgattctccataacccgaagtcattttcccctgaaaacttctcaatatcgtactttgttgtcccatctttcttgatcttgatcttgccccccacagacgacaccagttgttggttcttttggctctataagctgtagaacctacacaagatcaaagaaaagaaaaaaaaaacaagaaaacacaactagcaacaagcaagaatctacaccatgagtttatgtggttcggcaatgtgcctacatccacgggaaatgcaactcatcatcatcacattgatcatgaaacattacaagttcaatacaagcagaagctagcttgatccct

SEQ ID NO: 268631 - DNA, 421 bp, Glycine max
  unsure (1)..(421): unsure at all n locations
ataatagtctaccccttgagcaaaagtcattatcatccatgagtttccacgatggccattagagctcacatgctctaaatattgcatcgccgctccacccatgggacatgctgcctggaccttccttaggagactttaatacaagggatctccaccatcatcatcttacttcggtcggaagccgggacccaccaaggttgaacccattcggctttgataccaattgatggaacctaaattgcanatctaatttttagcatcaacaaactaggggacctatttgagactctctgaaattggagaaaataatanggaaaaaacaaaattagaaaggatatggaaataacaatgccacaatcttagaagattgataagttgaggatgattcgccacaaagaatagaaattattgataagaacct

SEQ ID NO: 268632 - DNA, 422 bp, Glycine max
  unsure (1)..(422): unsure at all n locations
tgtgcttatcggataagcaatttgaaaanttttctaagtcatttttctgcttatctcttcacatataatttaaaaatcctttttgttcattactaaacaagctaaaataaatcacaatcataagcaagatgtcctaacttcttacaagaaataaaacagaagatagagaagtgaaagaaaagttgggttgcctcctagtaagcacttctttaacgtcactagcttaacgcatcatcctgttatccaggatccaataaagttcccacttcaaggaccttcttcttaggtcttctttcctccatcacgtgaactttanaacagacattccggtcaggtggctctttatcttcatgagatagatcagaagctgatttctgatcttctgtgcccatttgcaacatcttctttcccatatctactac

SEQ ID NO: 268633 - DNA, 421 bp, Glycine max
accatatatggggaagcgatacttagtgcaaatttgaattcaacttttaataagtggtggtaatcagttttggccactggtaatcgaatacatcctctggtaatcgaataccagaagagtaaaatctcttgaaaaagacttttaacttaaatttcttggccaaaccttttgttacttcaattggaattcccttcctatttaatatactcttgctaagactctagagactgtcttgatcatccatcttgaatatctttgatttctttgtctcgaataaagctttgagaaacatgtaaccctctggcaccatcaaaacattcagctggatcctttctctacacctagcacctgttagtacctaccctaatgctttgacaagaaagtgtatcatatatatgtgaaaatactacaagatacttat

SEQ ID NO: 268634 - DNA, 461 bp, Glycine max
agcttgaatgaattcttaagagggtgtgttttctaagttatactttactctgatcctcttgtaatttcagggttcaagtgccatctccagcgctgatctttttggtgactcaagagacaacaacatcgatcttactgctggtgacctcatcaatcgattatctttccaggtattctttaccttttactggatgtgggagattcattattcatgtcattggtcatctgaacaacaaaatgataattgaattagtgacattagtttctgtattcatgttggatgggttgctgtacgcctccctcccctctgtgttgcaggcacaacaggatctctcttcccttaagaacattgcaggagagactggaaagaagctcagctcactggcctccacattgatgacagatcttcaggaccgaatcctctataatgtgtatgctctgtatttaagagaatctttggag

SEQ ID NO: 268635 - DNA, 438 bp, Glycine max
  unsure (1)..(438): unsure at all n locations
ctttgggttctcttattgtcttttaatctcattaaaagacaacttgcaaagtaaatgaccggctgaaatcttattttacattaataaaccgagattacaacacaaaggatcggctgaaattttattttacaatgataaagtgggattatgacacaaacaatcggttgaaattttatttntacaatgataaagtgagattggggcacaaacggtcggtcgaaactcgctatacacaaagaaatgagatcactgatagtagaagaatgaagatgaagatgtacaaatcaacaaaagggacccctaagggtgcatagagcgaatacaaaacttcaaaataaaaactaaccgctcgatgaacgaagaacaatgtatgaattggtcacgaaagtacctcggcctcatatttctcttcnttctccttctctcctaaattcattg

SEQ ID NO: 268636 - DNA, 434 bp, Glycine max
agcttgggaggattgatggggacctcgtgtttatagaaacgaggatatgggctacgtgggagtacctgagctcaaatggaggtgggcaacaagggatggtgggtttatgcgcgcattgtggatgtggaaaacttgttgtgcaccatcgcccgaccgccacctagtaccacatgtgatgggtaccccataatcctacaagcttgagatgaggaagtgttgaagggtgaaactttctgcttttattgttgaccacagagtggtacctggagatatgtcgcgggggtcaggagaccttggggacgtcaggtggggtgctattgcccaaaaccaagcttgaccaatcccgacccaacccgggcatagtcggtcagtgagaacctgtgatgtacctaagcaggcgagctcctggcagtcaacagataaaaggaacaaag

SEQ ID NO: 268637 - DNA, 470 bp, Glycine max
actcacgctttcgattcattctatgtacccgtggaggtctccattgtgtttcatgtattactattcttgcttcattgactttttatacccccttttgacgtgcttaagccattttacttaagtcatttcttgcttaacctaaaaataaaataaatttccaccgatcgtttgaattggattatccgttaacttcggttaaaatgaattccgaccgttcggtcgtgccgtacccacgttggaaatataaaaagaggtaaaaaataatataataataaaaaacgtcttctagtaaaataaagcggaaaatcaatcggacgttttctctttgggatttctcattcttaattgaattgactaataactaaggtaaaactaaggctaatatcaattcgcctagtcaagctcgtccacaaaaataagcttttgaaggttgtcatttcaatttcttaataagtaaaatggatcatttg

SEQ ID NO: 268638 - DNA, 259 bp, Glycine max
gaaatgtacgcctatctcaaaatcaattgcctcatttacattctatgagagcgtcggatttatcatggggcggatcaagggagaaactcctggacccaagagggggaacacaaaatggggatcacctacacaagaaataacttgtacacttcacaattctcacaatggttccctctgagttaattccaccggtcttagctctcttgattggtctatggataaactcaaaagagaaaatccacagcgtggacttatgaat

SEQ ID NO: 268639 - DNA, 483 bp, Glycine max
  unsure (1)..(483): unsure at all n locations
ccacccntatgatgaaattgccacaagccatatttgtcaattctatacttctcattacaacacaagggaagaggaaagcttcagaaactaaaaagccaactgctaacagtctccatgaattgtgaaaactttacaatcatcatatatccattaatttgattaacaggaaaattaacgagtagagtctatgagcatacattagttaagccacccgtgaaaagtgcgaatgaaaagtcagatctctgattaatcaactgaagcttcaggaaccttttcctgtgttttgaaccatgactgggaaattggctattgttctgaattaaaacagaaagagaaagttacattaacttttactttaagctttctaactagggtttgtgctgacacacttataggcgctaccagaatggggattgcccattgtttctgcaggcaggacagccctgaaatgtgaacatttgctccaataatgcacacctttta

SEQ ID NO: 268640 - DNA, 430 bp, Glycine max
  unsure (1)..(430): unsure at all n locations
tataagntttcacatagcagaaaatgattgttcaatactgaaggaataaaaaaaaataagtgattgtatgcataattacataccagaacaagtccaataatatttgtaggctgctcataatagacaggaactctgctatgccctttctccaatattggattcatcaaatccctgcttaataataagcattcagttggatgacaaaatgctgtataagatacaaaagctcagtttgaacttgtaattttttgagtcacaaatagagtccttacctatcaagctttgcattaatatcaatagaaaatatatcagttatgggagtcatggcatcactagctgtcttttcatagagtccttacctgtaggctgtaaggaatagaatagaagaaaaaccaatacccttcaataatagatgagaaactcacctaat

SEQ ID NO: 268641 - DNA, 470 bp, Glycine max
  unsure (1)..(470): unsure at all n locations
tggaaacacaacaaccaatagctacttaaattcgttcacattgattattagttaacatttcattttgttgattgcatatttttttacatttcattttgttgattgaatatttttttacatttcattttgttgcataataggattgaaggcacacatgcaagattgaagaggttgtttcatgatagcatgggagatttgtgtagttgttgggatgcaatgaataacatgcttgtcttgcaacttatgatgatcaagactttgtttcagaaaaacataaatgtggttcagcacgggtttaataccccggtatataagaagttacatgactttgtatcaagagaagcacaagacatcattntccatgagttgcaatgggttgacaccatatgtactaaccaatttgcttgtggctatagagttactcatggtctaccatgtgctagntgaacttgtgagtttatcagtatata

SEQ ID NO: 268642 - DNA, 466 bp, Glycine max
  unsure (1)..(466): unsure at all n locations
agctntcaacaaatgccttcacaattaattatctcacagcagaaaactaacaaaaccacccatcatatcttccaaaaccccatacccacgaaatttaagagagaaagaagtccacccaaacctgaaatttcgaagtcccactcgtagccacgcacttcacgactccaaaaatgctctcctttcacgatatggggcagaaatggtggccaaaggttgaagctttgcttgaagcttcaatggagaatgaagaagaagaaagctacgtgagagagggagagaaaaggcttctgaatttctgctttggctgagtgaggagagagaaaagctntttggttttaaataanaagggttttcccctctttttttccattattntattcaagctctgccacatgtccctatatgagtggagcanaaagggcccactttctctttttgctgtgacccatactcagtcacaaaagtg

SEQ ID NO: 268643 - DNA, 491 bp, Glycine max
  unsure (1)..(491): unsure at all n locations
gtggcttagctcattcttggccagcttaacggactaaatcagcctcagatgcaagggttgggagctaagcacttgagactcgcggcttatcgcatgaacaaatatgaacttaacgcgaggcttgcacttagcgaaaggactgatttttcagaaaatattttctaagttatttttcagtcccttcctcaacaaattgaaacccttatagctaacattcaaagataggctgatatactcctatgtatatattatgcagcaagttcccaatgatctaatgcatgaaaacaaaaattacaaaaattaaaactgggttgcctcccaggaagtgcttctttaacgtcattagcttgacgctnttacctcactgggcgatcttatgttttggttcttactttcagaaacctcttgacctctttcattacctgtaagcagacattgtgttctggagcangcttgttttcaacaaacaaatcanaatcaattntctgatc

SEQ ID NO: 268644 - DNA, 203 bp, Glycine max
actgcatgggtcgtgcacgctgagcaaggagagattccactgcatacatctccatgtcaaacatcccaaacatgagacttggattatgagaaagaccaaccagttcaccacaacccgatgacccttgaccactgcccaagacatgggcaaaacaaccactcaagtcgggtgcgccatcgaacctaattgtatagccccaaacc

SEQ ID NO: 268645 - DNA, 408 bp, Glycine max
gtcctttaactatattgtgcctaagaaggcaaatttactcaataaatattccaatattaagtttctttaccggtaacttgaacttagaattgagagagggccgatcatcgaaatccgatcttatggggagagggggcacaaagaacttctttttaccagaccatgtttgcctaaacgacatcataatccagagatatagtctttaaataatattaacagtgtcgcctttgttttatcagtatctaaatacactaaaatgtgactaacgtaattataaaaaaatctacctgtttatatttcggtctataataaatttgagttacaaaagatatatccgtctgtgtgataatatttaatatatttacatgtcaattgatatgctcaaagattattttgacatcattttat

SEQ ID NO: 268646 - DNA, 436 bp, Glycine max
ctgcagctctacttggaataattttttttcttttgaaatcaaaggagggatagttgagtttcttcttctcttttaaagcagccatataaattttaactcaacttttctactaattacatattctcaaaattgaataaattaattttagttcaaaccaacaaattatgctgatacaataaattaaagtcacatggtgtttttttattattttatttcattcctacctaggtacgaatctttgattatgaatgaagttatataaggtcctttttgtcaaaaagaaataaataggtttatatattgaacattattctggataagcaagcaatcaagacacgttcaactttgattcaggatttgcaaacgtatttcacactgtgttcattcttgtgcctctcattccaacatggcaacattccacgaccatgtgtacact

SEQ ID NO: 268647 - DNA, 481 bp, Glycine max
  unsure (1)..(481): unsure at all n locations
atatgttatgctatgagagcctaatattcgttttatctctgttcgttatatatatgcccaaaatactccttatgttgactatggaaatccttccggtctgaactagctttgttattcagcaccttgtaccagtttaaatgccagcaacatggatgtctttgccatagaaatctaaaatactaatgttgtagaactgtatgatccatcattcagtagatgcaaaaggaaaatttatgccacaaatttgtaagagaataccacattttaacttcatggatgaaaaaggaatgacctggttttgcagaanaaaacttaaaaacaatatggaatttcatgtgattgaaaaacactgaaataactgacatataagtaccgtaggggatttatactcgtaatggtcaacgtgtaaagaagttgatgaggaacttagtaacctacacaatgtctatccccaagttcgaacaaccaaaatctccactct

SEQ ID NO: 268648 - DNA, 431 bp, Glycine max
  unsure (1)..(431): unsure at all n locations
aaaacctactaatcacaaaagagtaaattaaaaaaaaagggtcaagtcatatacaaatatggttaggccccttcaagtcaacaaataagaaattattaattcaaagaaacaacatttgaataaaatagtaaaacaaagaaattaccatgtagtatgtttctttataaaaataagtgtaaaatatacatgacattaagtaaaatccccagcctatagatatagaagaaatgaacaattctaaataatgaagatgaaaaaacaatctttggaactaggttaaatagcaagcatatgcagctaagtttggtttttgtttcttattagtccaacatgcaattcgagttcggtgactnttcagagcatgagctncatactctagagtatagaaaacaaaattcaataacatgatggagacccacaatagaaaaata

SEQ ID NO: 268649 - DNA, 450 bp, Glycine max
  unsure (1)..(450): unsure at all n locations
tctatggctcttattcatctttacttgggctatctcagaccttntatttttgntgtctaagattttgcatacacccccttcaagtgaagtgtgtagcctctctccattatttggctaatgcttanaagaatttcttttagactgggaactagtaagacatcatggatgagtcgcgtacctttatctgtctccaccatgacagtgcctttgccttttgattcaaccacacttccatttcccagtcgaactttgactttgacagactcgtcaatgcttttgaaaatagtctcatccttggccatgtgattgctacatccactatccaagtaccagcttcctcccttttcttttattgagtcttgagtggcatagaacatacattgttcttgatcatgctcctctacgatattagcttgatgccctattttgttacatcaattttctatatgt

SEQ ID NO: 268650 - DNA, 356 bp, Glycine max
  unsure (1)..(356): unsure at all n locations
gatataaatattcgtatatctatttaaagatggtttatgtgttctctgcgctatcagtacgtcgtatcagtgtgtttttgccttgatcatgtagatgcctgccttgttaggatcattcaacagtggaaactggtctgattcttaaaacttgataggacaaggctaatttatcgtattatcataagggatcggngtacggtaagctagttgtttgatggttgcttaatgggttctggcaagtnagtccaacagaggaatatgagatatgctcattngataggctaatatatgtggaataggtacctttaggaacacctaaacacatgacatgtaataagatatctttacatagcact

SEQ ID NO: 268651 - DNA, 366 bp, Glycine max
  unsure (1)..(366): unsure at all n locations
atcttgtaatcgattaccagaggagaattttcataaataatttccaagaatcacatctggttcaatgattttttaatggccatcaaatgtctatttatatgtgacttggaacacgaatttgcttaaagttttttagaacaaaaaagtcttatcctctcaaaagaaaaatcatcttatccacttaaaaattccttggccaatacacttgcaattcaataaggaattattttagtgctcaattgttcaatctatctctttcaagagagatttctttntctcttcatcttatttctgaaaagggattaagagaccgagggtctctttgtgtatagcaatctaaacacaaaggagggtttgtccttgtgt

SEQ ID NO: 268652 - DNA, 426 bp, Glycine max
  unsure (1)..(426): unsure at all n locations
ttcgggagacaaagtcaagcgttcgttatatgctatgatgatattccgagtactttggatttggtacgaccatgccctcctgatttccagctgggaaattggcgagtggaggaacgccccggcatttacgcaacaagcataatgtaaacctttacggttttaaaagctctatagttgggcctaggctttaaagtttttccttttgttaaagctttgtgtcttttgtttttgaatttataatacaaggatcttttttcatctgttcctggtctctacccattctcattcatttgcatgtttacttctttttctgaaacgacagatccgatgacgagtcccccgaaggtactaatacctgngacccgtctatcgacttcgagcaagaaatgaatcaaacggaagatgaaggaaatgaggatgtgggac

SEQ ID NO: 268653 - DNA, 234 bp, Glycine max
caaacacttaatgagcaacattgccactcaccaaaccaaatagcttcattaaaagccataatgggacaaagcaaatcattatcaaatacaagaaagaaagaaaccagggcaaaaataagcatagtacctaaagatgacaatgagtgggaaagggagccttcatgtaattaaaagacttaactatctcctaaaaagattagagaggctccaccaatctattgtctatatagaggg

SEQ ID NO: 268654 - DNA, 357 bp, Glycine max
cttctttatataagtgaagtcctttacttcttaaggagaatatgaatcgagaaccaggtttcattataacgaaccatggataacagccttaagataggataagactacttgcgggaaatggacataggaggacacaaattatgtatacataagactaaacttgaatcaatttttaatgatcaagctgagaaaatgctcacaccagtctctattaaagccaaggtccacaaatggagaaaataaattttatcaattccttgattgattgaattgggaccaatttggccaaattattattagaatagtattcaccggatcacctatctccatgctaattcaatttcctaagcggctagt

SEQ ID NO: 268655 - DNA, 344 bp, Glycine max
gattcatggcaagctgagttactatgttgaccaacgcatcaagttttccctcaagcctttttattctctgcagacaatagcatcattacttgcactgaattgctgggagttgaaaagccatcttttaatcaaattcctagcctcaacaggagtcatatcaccaagagctccaccactggcagcatcgatcatacttccctctatgttgctaagtccctcatacaaatattgcataatgagttgctcagaaatctggtggtgaggacagcttgcccacaatttcttgaatctttccgtacttatacaatctttcttcactaagttgcctgaggctgaaatgtctt

SEQ ID NO: 268656 - DNA, 455 bp, Glycine max
  unsure (1)..(455): unsure at all n locations
gcagctgaccagcagatatctttcagtctataagcctcgaancncgaatatagacagagtcattctgcgcatcactttttagatttgtaagaaaattcaacattacaaagtttcaacttaaatgtgactcagtcacagccacatgaaaaggcaaaaatctataaaaaacaagtaagctcgaaaggcaaaagcacaaagtgatgagagttgtttaactttacacattcacattgaggtggatttgacagaggggcctggcaatgggattatatatagacagatgaagcgcaattcaaagagatggatctggatttactgagaacagaagcctgatacaaatcttacaggtatatatgggtttcagtcatacttactaagaagtaaataaaccaagttcaacaaactaaagtacataccaggtcactcttactgattgcggcaccgaaaacttcatt

SEQ ID NO: 268657 - DNA, 439 bp, Glycine max
  unsure (1)..(439): unsure at all n locations
tttttataatatgatcgaatcgtaaatcccgtagtaatcatatattttattcacaatatttatatatgtgcatgactaatatataaatattattttcatcttgttagttttggatgtacgtgcttgatctattattgtccatatgttagactattttatttagtggtaataaatatatgtgcatattttgttctcccatgctcatatttaagttatataatatattttgaattcttacaatatatttttgatctctcaaattattataaatattaattgtactcctataaaaattaatatatgtttattctttacattgtaacaaaaacacatgttgtcagtctttaatgagaacttaaagtctctctactgctcanattaacgaaaacactggtgctttgattcaatgtnatttaaaataaatatgaaaatttacatt

SEQ ID NO: 268658 - DNA, 458 bp, Glycine max
  unsure (1)..(458): unsure at all n locations
agcttctnttggaccttgaacaggcttcttatttctctttcaaaaccatgctatgtgctcgcgactggtccctctcttcccttcgcaacttgagttcactattgctaccccacagagctccgcgaaatttattccggccatactcttccttgcgagccctcttggtctcttgttcaagggcccttgtggtagttgcattctcttcccgtaacccggcacactccttccgaatgtgtgtagcggccaacttgaacttctccttggcaagtctcgcctttcctaactcgcttttgagagcttggacttcttcgtcctcttccagtgcttcaaaactctcttcgctgacgacttttaacttggcgagccaatctaaacctcgtatatgaactttcagccattcgtggtacccaccaataatgccattacgaatgcccctaagctcttgatcttttcttaac

SEQ ID NO: 268659 - DNA, 362 bp, Glycine max
agcctgcgtagtcgaagagaagttcaagtccatagtcatcaaagtctgaacagagtatgatgaactaaaggatgtcaatatggccaccgatgaagccttggaatgagaaaccaagatagcccgaaaggaagaacacgaccaaagcatagttttgaggggctttatagggcagcaatagtgagctcaagctccgaagaggtgaaaggaatcatcacgggtcaaaggcatgatcttgaaggacgagctaaaggtctgccttaggtcgaaaagaaatttgtcccaacagttaagcgagactgaagggaatatgtgggccatcatcgataagtgcaaagagatgctaaatctagcggcgactcacg

SEQ ID NO: 268660 - DNA, 365 bp, Glycine max
  unsure (1)..(365): unsure at all n locations
ggcctatatatatgcgtgtccgactttgaaaagtaagagagagattttaagagagaacttaattgtcaaatactctctaaacaactattgaccaaacactctgaaaacaattgagaattcttctaggatcttcaaattgattatcatctctagaagaaagaaattcttctgtacattcaaagacattgttgggatcaagagattgttcgtctcttgacttgtgagaatcttgaacacaagggagaggaatcccaaggtatgttcaaagtctgtaaaggatttacagagatattgttaaatctcaagtgacgttcttgaggactggatgaangcacgagaagtggccaaacttttgtctcatcaat

SEQ ID NO: 268661 - DNA, 381 bp, Glycine max
cccttgagtattcccacatccttccgcaatactttcttataagaatcttggggaaagtcgtccctttgtacctatcaaaatcatgtaccttgaattttggggggatgacgacatccggtactaagcataagtcagtcatgtcggcaaaaggatagtcattgaaccctacaaccgctctcaaactctcttagatgagatcgagtttttctcttccttccactgccgaaggtggtccccctacggataagaacattcgcgtgcaacggtgtgggctgaaagactcctgcgatatttgggctgagcaatgcattaagcaccagtacctcactagtgaaatggggtaggagattatgtccccttgagcatgctctcgagggtctt

SEQ ID NO: 268662 - DNA, 469 bp, Glycine max
agcttccatcattttatatctcaatctttctgtcttctcatatagaatgatttgaacccacccctataatataaagggacgagtgcctaaagaccgtccatcttcagattgagccctattttttcctattactttcttttttgattttatactcccttcgtggatctcccctcttatccaatcaaccaactgtcccaggccgagaaatagcgttcccggaagaagcgccacccctagctcgactgtcttcttttgaagaccaacgagactactaggtgaggaaggaattttgtacaaactcagactttgaatggatcacttttcatcctaactctcagaagaccaagcatgaatagacgtaggcagtgcataagaatctctaattcctaaacaccctagggaaagatgaataaccttttcatggagccgcactcgaaagaaagattagtaaccttccaaatcctctacc

SEQ ID NO: 268663 - DNA, 371 bp, Glycine max
tctctaactacttggacacatggttcacttatgaaagcatgaagaatgactacaagatgatttatgttgtaaaaaatgtaaggatcaccaagtatttgaacttgtaatggttctctcggtaaggcttcaactttcccaatctactcgaagcacaagattgtcaaagttggtggaaatgaaaggagcctttcatccacagctagtcaaggttttctacagctatgcacttgttgaccttgaaggtaacctctcttctacaataaatggagtagaaatagtcattgatgctattgtatggaaggaagtagctggtctggatatgggtggagtccacaagttctatgaaacgactgatgggtacaacaagatgt

SEQ ID NO: 268664 - DNA, 176 bp, Glycine max
aaaaaaggaacgactaggacaagaactgaggaatccagaaacatacagaaatatccaaagcgtacatttgaaaatgatactgaaacaacttaaaaaaccatcacgaaaaaaaaacataaccctgagaaacaaagacttctaaaaaacaaagaaaagaataaaacacgaacaagaag

SEQ ID NO: 268665 - DNA, 186 bp, Glycine max
tgtgaggcccattgtagactcaagggacttcagaggagccaaggagcctgttgttttggaggagaagtgacatgtttgaaccaacttaaagattgccactcgccatgggaacaagactttttggcgggatggtgtggacttcggacattgaattgtgttgagcgagcgtgtagcggagtgtttaac

SEQ ID NO: 268666 - DNA, 453 bp, Glycine max
  unsure (1)..(453): unsure at all n locations
aagcttctgtggttggggccttttcattattcatagaatgnnnggtgggaaaatcaagagcataatgcaggcatttgtccaaccaggaatagatcttctcatgaaaatagaaaatacattagttttaggtttaattagtgttaggtatgtcggggtctctctttgtcactgcaaagttttgatatatcctagggtttggtaaataaaggttagggttggtagacttgagcatatggacccaaatgtctttttatgtattcaccttttttatttatatatgnttggactctattttgagtctggcgtagcatctccttttttaattatgtgacataagaaactaattaataatagtaataaaaaaattaatctataactattaataaaggaaattattctcttttggggttatatttcttatttttacattactttctaataaatataattatt

SEQ ID NO: 268667 - DNA, 460 bp, Glycine max
  unsure (1)..(460): unsure at all n locations
tcacacccctgtgctcctcatgtggacactatatgacatccaactataggccatctagtctacccctaattgaaaaggcaagcttaaaacctctcaagcttccatccggtggctagtaggtccttcacaatgtaagccttcacctctgagtagccaacactgggcaaatgcgcaagcacccattattgtaaaaatcaaattttgtttaagtaaagtaataaaaaaatgtgaatgaaaataattaaaatactaacaataattcattactatgagtaatattatataatctccacactgtttgttatcatactagctcacatacaagaaatgtgtgtagagatatgccagtgcaactacttcacatgcatactcatggcaagaattgatgtttgtgaggtactggaggtatgcaacattgatgngaagtcaagctcttgtcgaccaatattatactactaat

SEQ ID NO: 268668 - DNA, 342 bp, Glycine max
aaacaacattattgtaacaacatacttaaaaccaaaacttaatccgcagatccctcttgtaagactaagttccaattctgcttcactcaagttctaaggcaacaatacattttccaatgttaaaatcacctaactaggcacacaaatcattgatcagaccaacaacatacagaatttaagcactgaaagaaacattgaacacaagaaacacaatcaattagatattaaaataattacatcagctgttcattagaaatccccaacaagggtgtttagccagccattacagaagaaaccctaacaataataagcttacaaaacctaggtatctttgcaaaagct

SEQ ID NO: 268669 - DNA, 441 bp, Glycine max
taactcgcttctcggccattctgcaaggcaacatttggaaagttagttttaccagtgggacactactcttaaaacaaaaatggcatacaacctccccccataaatacaaacatcaatggtaatttagagcaagcttatgcgcatatttccttacgaacgttcacttgcacaagacattctattaactaagaaaaaatgcacccatatacaatcaaggcagcttcgttatctagattatttacatgtacttccaagctgtatttgatacttacatcacacacatctccttggctaaatttacatacatgcatactcaaagcattttggggtaccaaaaattgcacatgtgcacatcttggtatttctaatacctatacatacacaaacttcatgatgaatcttgactatctacacaataaggtgctacatttcatgctcttt

SEQ ID NO: 268670 - DNA, 378 bp, Glycine max
  unsure (1)..(378): unsure at all n locations
aactaaaaaattaataatcaaatagtatggataaaaaaagtgcataaatcaagtgcaaacccttcaaaacaaagtaagaacaaatagtaattttagctgaaaagagaacaagaagccaaaagaaagaaagggatagcaactaaagttggaagctaaatgtaagaacaaaaccaaaacccttgaaatttaaggcactattagaaattacactttcaacatcggttatttagagcattctacatcggctctaaaaccgatgttgaaagtgacgatgttgaatgtatcatcgttaacatcgaatttcaaaaactgatgttaacataaatatgataacatcggttntctaaataaccgatcttaaacaccaagaactacaac

SEQ ID NO: 268671 - DNA, 409 bp, Glycine max
  unsure (1)..(409): unsure at all n locations
gtgtgggcggctggataatggtagaaagagtttgtttcttcacctgtacctcataaagaaagccaaagggatgtgtactttctgaaacatggttagttctatctgactctataaaatcaatctcaagaggtaaaacatcaccggacatgttatcaatatcaaatncagattcactctcagcatccaatttagatatatgatccagtacaaattccgaatcaatgcatgaagagtgaaagacatgcatattagaatgaagatcagtcatgtattcatcaacaatatgggcaattatttcaacacgaaatacagaaagatctttagatgggtgtatcatagcctcaagaatattaacaatgaacagtatatcaccaaactccatagatagtggttctgcatatacctctat

SEQ ID NO: 268672 - DNA, 399 bp, Glycine max
  unsure (1)..(399): unsure at all n locations
accatggagatgcagcggaaaacaaagggaaagaggtgaaaggaggcgccatccactagggaataagccatggaagaaggagcttcaccatcaagataagccttggataaaaagctttgaaaggatgcttcaatggaggaaaagaaagagggagagaaagagagaggggggagcacgaaattgaaggaagaaaaagggagagaagttgaactttgagttgtgtctcacaagactctcattcatcaaagttgcaataagtgttacacatgcttctatttatagactaggtagcttcctttagaagctntcttgagaaaacttcctttagaagcttctttaagaaaacttccttgagaagctagagcttagctacacatacccctctcataactaagctca

SEQ ID NO: 268673 - DNA, 425 bp, Glycine max
  unsure (1)..(425): unsure at all n locations
ttgatatatatggttggtgaagcttcttcatctttttctatcaataacaggttcccttgtagcaattagcctttctgaacaaaacaagcttggccactactatcttgaacttagtggtggatgtggccacacaaagacacctacccttagcccaatctagaanaccctattctagcatgcctttagaaattcatgcatacactaacaacatgtaaaacacacaatgttaacaacttacttttaccatgaatgcttcaaaaaatgaagtttagaaggtgtgagtcgcacaaacttattcttagaactttttcttttctcttataagtgagaacataaggtcattatttatagagaaaatagttataacccgctgtnnatcgatatatcaaagaaagtaatcgantagaatatcattntaatcgata

SEQ ID NO: 268674 - DNA, 396 bp, Glycine max
  unsure (1)..(396): unsure at all n locations
ccaagcgncgtcacagcaagaaacttcagcatgcatttaggtactattcccatcaatggaggacatgggcttcttgcttcatacaagctgcttggagacggcatcataagagaaaagcaacaagggagttatccctcaaagagggtctctactacctggcattgtctgaggctgagagggatggaagtggaaattatgagatcgaggaatcctcagggagtgtgaaaaaggttcagaatctaggtccaactgtttttgcctcaaagtttgctgccaatacaaagaaaggaaaccataagctacaagatcctgtgccccaattggtcaagccagatgaacctgtattttctctagaccacgaacaagtttagtgagcacaagaaccaatcaccagct

SEQ ID NO: 268675 - DNA, 489 bp, Glycine max
  unsure (1)..(489): unsure at all n locations
ttctgtccctaatacgtatcatgcacaattctatttttctacctccntaaacaagaaaagtatgggaattacacaggagaattgataccagtgatacttttaatctaaaactactaaaggtgatagtgacaccagccaaaatattcataacccattgaagtcagttctaccttcacattganatgagatccttacacttttactcaaacagacaagtttggagacccaaactaagacaaanttagcttaaatatgttttattcccttgaaaattacacaattttgatttagtccctatgaaaaaaccatttgattcccagtcttttacaaaatacatgttgagagggactaaaaacatgtatttcaatgtatacagtaatatacacgtgagcttaagtcttatggaaactcattagctatttttaacatgtgcgtacttacaacatttaaaccgaattaaagtacatgcataccacatagactagacta

SEQ ID NO: 268676 - DNA, 427 bp, Glycine max
  unsure (1)..(427): unsure at all n locations
ctctngactactatccttgccttattcctagtgatcaaaccatgttcattcaatttatttttaaacactcatttagtgtaaatgatgttcatgtttttaaaataaggtattaattcccatatatcatttcttttaaattggttcaactcctcatgcatggacatcatccaaaacttacatttgagtgcctcttctatagacaatggttctacttgtgacacaaatgcagtatgctcacaaaataagttcaaagagtgtctagtagttactcctttntctatgtcttggatgatgttgtctatagaaatatccattggtgctctccattccttaagaagataattgtgttgtgatgagagccattcttgatgtttatttctcacaacctcttcactcctcggagaagcttttctaggactccttacat

SEQ ID NO: 268677 - DNA, 436 bp, Glycine max
  unsure (1)..(436): unsure at all n locations
ntgcttccacaagagacactggaatggattacatatattttgtaatcgattacacaagtttgaaaatgttttatcacaagttgtgactcttgaaatttgaaatctcaacgttaaaaaacattggtaatcaattacatgctcatggtaattgattacgactntgtaaattagtttgaaaagaatgttggctactggtaatggattactgccttcaggtaatcgattactagagagtaaaactcttggtaaaagatttttctttgaaaaattgttttggacaaatagtgctattcaatattttcttttgaaaaaatctttttatacttatcttgatgctttacttcaagttcttgtatatcttgagtattctattgaatcttcactttaatcttgaatcttgattgaacgactctttgattcatgatacttgcttgac

SEQ ID NO: 268678 - DNA, 377 bp, Glycine max
tttggagaggatcaataacaatgcctatatgttggaccttccagaagagtatggagtcagcaccacttttaacatttctgatttaattccttttgcagatggaactcatattgaggaggaggaactaatagatttgaggtcaaatccttttcaaggggaaggggatgatgcaatcatccctaggaagggaccagtcactatagccatgagcaagaggctctaagaggattgggctagagctgctgaagaaggccctacggttctcatgaaccacagggtagatttctgagcccatgggccaagtttgggtccaattctctttgtacatattagactaggatatcatttatattggtccttgtatttagggcttcata

SEQ ID NO: 268679 - DNA, 509 bp, Glycine max
  unsure (1)..(509): unsure at all n locations
gctttatttctgtcttacaacaancnatctattttgtttatcatattgnaattcattctgaccgatgtggatttgtctggaacttcaatcatgggaagaaattccaatggctggctcttgtgatattacttattattacttaacgagtgatcctggtaattttcagtgcattttattttaaatattttagatgctattgacttaaatatttaaatgatttttgcgatttcgcattgtaaatcataaattttattgttgtttcaggaagctggattaattcaaagtctatgacgtttgcgatgccattaaattgtcctaagtattgctttagaattctattntaatttattgttgttgggtgctgttgtgctgctgctgctgctggtgttgttgtaattatattattatagagaatgtacgctctaactgaacgcccttctttatgttgtgctgacaggaagtaacgctgatatttcctatctcttaaattttttttgctgtcatacatg

SEQ ID NO: 268680 - DNA, 388 bp, Glycine max
cccctaaacctccattaattgttttgctttaccttctcttccattggtggttcttcatttttctccatggatctcctcacatgtcttgtgataaatgttgctaacatgattctttaaaggtttcaccgattaaacttgctatagaagctagatttgattctctatggttcaaatttcttgttcttgaaccatgaattgttgtgagtttaggttcctttgacttttgtcttggtattttttggggctgaaacctaaaccattaaattcttacaaaaatattaatgtagaagacaacctcaaaaatctagagtgacttgttcacctattgtagttttgtcatagaagtcatgtctagtcatgaaactcgtcacataagaattcttatgtt

SEQ ID NO: 268681 - DNA, 506 bp, Glycine max
gagatgacgaagtgttgaagggtgaaactttctgcttttattgttgaccacagagaggtacctggagatatgttgcgggggtcaagagaccttggggacgtcaggggggtgctattgcccaaaaccaagcttgaccaatcccgacccaacccgggcatagtcggtcagtgagaacatgtgacgtacctaagcaggcgagctcctggcagtcaacagataaaaggataacaagaccacagagcaaggaggcttgtggtggctggccagctgtgaatcttgtgtaatatgtggattgtggcctctggtaatcgattaccaaaggtgggtaatcgattacaaggcttaaaattgaagacagggggcttagatggtctctggtaatcgattaccaaggggtgtaatcgaataccacgcttggaaacaaggcatgaagctatggagcctctggaatcgataccaagggtgtatcgataccagcttaataggaaagggagatgtgaacctct

SEQ ID NO: 268682 - DNA, 461 bp, Glycine max
  unsure (1)..(461): unsure at all n locations
agcttaaaccaattccctatgaaggctgtgttttttttctgtgaatttcatgtctgaagcccatctgaaatgaatagaaaaagctttattgttgtagaacctcttttttttttaatttatttaggcacattagagtaggaatatcttacacatgcatcaaattcctaagatttgcaaatgtggaaggaattggaccactaattcctaaactatcaaagtcactacaagaaaatattttttgaaattaatagtgtaaccacgataaagatatactttgtagcaaactgtaattntgaattaaaaaaagacctaacaatttgcattatccagaatcaactcattattcacaacaatgtatgcttatgacaatagacaagtctcattgatgagtatcaacaataataaataattatttgttacatgtagttgagtatgggcctaacatgtacttcgtagggata

SEQ ID NO: 268683 - DNA, 539 bp, Glycine max
  unsure (1)..(539): unsure at all n locations
gtgacctatgaaactcagcttaagaaaaagatggcctcagcaaattccttatttccagaatggaattctatcaatagacctccaatctttaatggagagggttaccactactggaaaacccaaatgcaaatttttattgaggcaatagatctaaatatttgggaagccatagaaatagggccttatatacccaccacagtagaaagagttacaatagatggtagttcatcaagtgaaagcataactatagaaaaacctagagatagatggtctgaagaggatagaaaacgagtacaatacaacttataagccaaaaacataataacatctgccctgngaatggatgaatacttcagggtttcaaattgtaagagtgctaagaaatgtgggacactcttcgattaacacatgaaggaactacagatgttaaaagatctaggataaatgcactaactcatgagtatgaattatntagaatgaatgcaaatgaaaatattcaaagcatgcaaaagagatttacacatatagtaaatcatcta

SEQ ID NO: 268684 - DNA, 438 bp, Glycine max
  unsure (1)..(438): unsure at all n locations
agctggggctcttgcctcactcacttgttttttggtttcatttctagctatcttatacttatcccaagtttcagaatttctacacctagaccactccttgaaacactccttttttactctaactntgctctgaacattttcattccaccaccacgattctttacccctaggtccaaaacctctagattcacccaacgtctctttagccactttaataatctcttgggacatcttgttccacatatcatttgcacttccttgtgattgtccacaccaaccctcccatatctttggttggaagatcaacatgttaaccaagcactacaacataaaagagagagagagagagaagaaagaaccacccgacactgacctgagtttgaaggagagaaatgngaaggtggttactccataatccatattacgtntcataaccat

SEQ ID NO: 268685 - DNA, 465 bp, Glycine max
tatttaaaagatactttgaattatatgaaatgaatttttttattgataaatattaatttattaacttttattagaaatgtcaataaaagatattcaaattcaccatctttttttaaaaccatcaattttcaattactcaatcttatatctcctttaatcaatgaagttaatcaatcaagtagattgagtggatctactcaataaaaagacaaagctctattaatatatacttcattaatactcattatttatttatttcactcttttcttttcacattatatcatgtatatcatacatatattttggtacctaccaaaattttccctaatatttatatcaatgatgtttacaattatatattattataaaatatctattattttataatctatgtcaatataaaaaaatatattatcaattaataaaatcctgagtataatttttaaaataattatttgaaagat

SEQ ID NO: 268686 - DNA, 424 bp, Glycine max
  unsure (1)..(424): unsure at all n locations
ataacatgaacattgagatgatctccagataagagacagagagcacgggaataaggtaaaggcagtacagtttccttcagcataaatattccttcaaaccaaaagagcaagtatacttcatcacttgttgttagctgatgaaaaggaaaatcataagatcatttggccacaacaaagccttatcccaccaagtgaggttggctacatagattatacgacactatccaactcaattaaagaccaaaacttcaaggatattatttaccatgagatcatctgcccacaacagagagtgaaaaattgatgacgtgagagatgcacttttatacagtactctagatgagaatcgaggatagaatttaatgagctaatgacactcaaatngatttgcacgggtgtgaatatttctggtttataaattgcg

SEQ ID NO: 268687 - DNA, 509 bp, Glycine max
aactcagcttgtcttactatatgcatgttatgctgtaagcatgacttttttggaaatttatcatggtaataaatcccgatcatatatttccaatgagaagttaactactttgtttagtggaatgatatctggggtcataattggcagaacatgtataggtgttacttttatgtcataatcacaatcttctttggaattttttttttttttattacatcttctacattctttgactgctagtaataatgtgtttaatgtacatagaaccaagtagagagtgcctctctaaaaaaaaagggggtttcaatgcatcttgtgatcaaatgagaaacaaccagctgtgtattaaattgaacaaagtatctattcaaatgatatgtctaacaaattgttttgctaggtcaatgctctaatctcattttatctaactcgctactgctgtttgttaaataaaatatagcagaatacgattctctatgaattagtttcagtttcttatcttttctgat

SEQ ID NO: 268688 - DNA, 412 bp, Glycine max
gaagcgtttcaaatgagtgatgtgtgtgtgaggttgtttaaagaagggtggttcgagacggaaatcaaggaggacgatgatcccaagttgtctaaaatgaagaaggatgtggttgttggggttaaggatactaaagaggttgacaatgatttcttcttggtcgttgtcaaaatcgctgatcatcaggtatgtatggtaccctgtaattccttctttgacttcatgtcaatgtgattgtgattttctcttagcaattaccatgtgcccctaagctgttgtatgattctttaattcctatcgctaagataccaaaacaatttatttttttaggataagcatcaaaagagtttgtttcatgaggggataaagtttaacatggagtagggcaaactggtataatatattattaaaa

SEQ ID NO: 268689 - DNA, 395 bp, Glycine max
tctccccctttgttgatgaatgacaacatccctgaagatcaaagacaaagctatatacaaagatgatagcacgttcacacaacccttactccccctatcttttggcatgtatgcctaactttaagggattgatttttaatgatagaattctaattgaaattgatttctaacccaagttctctccccctttggcaacatcaaaaagaactaagcaaaaaaatcaatatccaaacagagccaaacattaaaccaaaataagtccatacattgtcataaccaaccaaagcaaagtcgagaaatataatagaagtgcaagattacaataacaagagcaacaaaaagcccaatacatggcgataaaacaaagtactaataatacttaatcataataaaaa

SEQ ID NO: 268690 - DNA, 438 bp, Glycine max
  unsure (1)..(438): unsure at all n locations
ctaagcttaaccgatcgnttaagccgttttctcgcctaatcaaataatataatttattttcactgatcatttgaattggaatatccggtaatttctgttaaaatgaaattcgaccgttcgaacatgccgtaaccacgttggaaatcanaaaaagagggtaaataataatataataatcaaaaaataccttttagtaaaataaagcggaanaatcaatcggacgtttctctttgggatctctctttcttaattgaattgactaataactaaagtgaaactaaggctaaaatcaaccctcaaagtcaagctcgtccacaaaaaatcacttaaaaggattngaaagttcaatatctcaatttttcttaccaagtaaatggatcattnttaaggtcaacgcctaaaatgatcacctccaagaatagaatcgcttgttcaccc

SEQ ID NO: 268691 - DNA, 405 bp, Glycine max
  unsure (1)..(405): unsure at all n locations
attcctagacacacagagtggtacctggagttatgtcgcgggggtcaagaaaccttggggacgtcagggggggtgctattgcccaaaaccgagcttgaccaatcccgacccaacccgggcatagtcaattaacgagaacctgtgatgtacctaaacaggtgagctcctggcagtccacagataaaaggaaccaagaccacaaagcaaggaggattgtgtggtggctggccacctgtgaatcttgtgtgatatatgggttatggcctctggtaatcgattactaagggtgggtaatcgaatactaagggtgggtaacnattaaaaggcttaaaatgaagaaggaggctagatggctctggtatcgatacagtcttaaaacaggtcagagccatgaggttctggaat

SEQ ID NO: 268692 - DNA, 479 bp, Glycine max
  unsure (1)..(479): unsure at all n locations
ctataattttgaaaaggataatgtacattaacattagtgacaaataataatggagtagttataccccatccaagaaatatttagcaacattgggaagaatatggaattccttttttgtcttgatgtttcttgaacagcaggatcttttcagatttcatctaccataggagcatactcacgccttgcagcagggaagaaggcctccaaatctccgatggccataatattcagtaatcagtcagaaaagtgcttgaatctttgttatagagtaaacactcaccttgttttcgtcagctgctgtctctgctanatttattatacacatagatncattcacataactctagccttcgctttttattantacattagagacacaaattaacgcccaatatatatatatatatatatatatatatatatatatagacaccttgcataccctaatttcgtctggggattattattngatgatatac

SEQ ID NO: 268693 - DNA, 460 bp, Glycine max
  unsure (1)..(460): unsure at all n locations
tttttgggggttaatttcacaatgcttcctctttattgaatcaaagggttcgaataaaatcctaattttccgacccttgaacacagtctctcatgtaaacccactcttctcaagtgacagtttctggccacgggtgacatttgtcaacagggatgatttctggccatcccttacctctaaggtgctgtgggcctatacttcacttctggtatttggaagttggatccatccctgacctctggccattttttgttcatcccttctctttctctaactactttcttttccctttcttttgatcttgtttttnntttgggcatttattctctaactggtatcagagccatgacatcctncatgaacaaaatcatcttccgctgccatgagagtgnttttcttcaatctcttccagtttttattttcttcttaatccaattctttttcccactaatttcagttc

SEQ ID NO: 268694 - DNA, 506 bp, Glycine max
ctaagcttctcttacacacctagccttgtcacgtgcttcctcaactatgctcctcggcggcccaactcactccttctcaccatcttgctcttcatcgcagtgaggatttcccaagggcagtgactgttacagattgagaatctataatacatttgacgagaaaagttgttaagttcggtatgtttcacatgtgagaacatgagatcatgtggctcaatatttgattacttaagtgtgagcgttactcttatcccaatatttttgggtaagtgaaaggattgaaaaaaatggctgttaatacttgacataacttgaatagtgattttcaaataattcacttatcatattttaaattatcatctttaaaattagaatcacaattagaataataattctattttatctcatttttagatatttggattaaataaaataaacgggtttatattataactttggcgatttatattatataataattatatttgatcagagtgcgagaaagt

SEQ ID NO: 268695 - DNA, 456 bp, Glycine max
tcctaagggttgaaaggtaggaagaatcacgagtgccaacatattgacctcacacaaaaaatattagtgtgaagggacaagaaatcatgacttagccttggtaatgaaagtgacttgtcagatgcctttgaacgaatggtgatgctttatgggaaaatgtttgaatgaaactggttttggaaaggagacagagaagctgtagagccaggtggagtgaagggcatcctaagaatccagcgataaacaaggaaacaatacatttgaagaagtctcttatgatgtgttcacaatctgtgtatgccaatgacaaaagagctgccaacaaatcgctaaagcatattacgcagcacttttctccctccggggatgcattatagaggttggctcattacttctccaaagatggcaggaagtgggaccttatgtgtatgaacatctttgtcaagtagtcatctt

SEQ ID NO: 268696 - DNA, 413 bp, Glycine max
  unsure (1)..(413): unsure at all n locations
atcctaactaccttaacatatcttaattacctctaacattacgttgttatattttattataaaaaaaatagtgatggtttttagttcccattattttaatttatttattttaaaatttacaacactaataaaggtaaatgttttggacaaaaaactataaaagtatcgagatgatatatttgaaaaacataaagaagcaaaataaaaaaatttaaatttaatgtaccaaaatgaaactaaaatctaatttaatgcatcataactaaaacttaattaccttaacatatgtcatgtaatattgagtgtacttaccaaaatccagagttaacacacgtcaaggtgaacatggttaaagtgggctcccagatttcacacatcgactntgagaggaacatcttgtaagaggacgggag

SEQ ID NO: 268697 - DNA, 429 bp, Glycine max
  unsure (1)..(429): unsure at all n locations
tttccttactcactttatcacacaagaaatgtgaacctgttttcaatatggaacacctgggccattagatgcttggctaaatcaattgctgattgtatcaatatcaacctcataggctgcgatctctcatattcaagtcttccattaaaagctgtcancccattagaagcttgaccaggttgccatagcaacaacaatatattctgcttcacatgttggcaaagcaactacactctgcttctttgagcaccaagagattggtgttgttctaaatntgaaaacataccaacagtgcttttcctatcatccttatcaccacaccaatctgaatcactataaccaaacacttctccttctatanttctttgaccataacgatatanaatgtcaagatccaatgttcctttcacatacctcaaagtactcttt

SEQ ID NO: 268698 - DNA, 374 bp, Glycine max
  unsure (1)..(374): unsure at all n locations
gcataagtgatcaaaacataaatcatgtgtctaagacacttgcatctaaaagtcctaattctcttctaatggtgtagaaagagtctatggttagtggttgtgtaaagatatctacaagttggtttttagaatctacaaattgttaaaacacagtcacatttttcctaagactaagtgctaattgactatcaacatttaccaagatgagcgnttattatcatataaggttttatcatatcaaaataattttatttgacacacaatataataatttcgaagagcataaaacaatattgtggacaatcaatcaagtaattcaaacatatcagagcaggattgaaggatatatagatcacatgcattatcaaacattc

SEQ ID NO: 268699 - DNA, 288 bp, Glycine max
gcaaattgaagtgccttcaccagtatcagcacctgcacctgcacctgaacctgtcaagcctcattctacacctgaaaaagaagatgagatagttgcacaaaagaggaagcttcctgattaaggagctaacaaacattttcatgcaggtggaccttcttctagtagctctaacttgcagcagcctcctatccctcttccattcccacctagagcaattccaagcaaaaaaatggaagaagtggaaaaggagatcttggagaccttcatgaaagtagaagtgaacatacc

SEQ ID NO: 268700 - DNA, 400 bp, Glycine max
  unsure (1)..(400): unsure at all n locations
agggggagaatgcgaatgaatgcatacacgatttcgatgacgccaaaagaaaaatcaaacaaggctcattttgcctcaagattaatacaagaaggttccaacaaacaaagccttgaatcaagatttcctcaagaacaagccttgcctcacaaggaaaggtttcaagtcattaaaggcccatgtaatcgattaccaatacatgtaatcgattaccaatggcttgaaagtgtgtaatcgactacacatcgtatgtaatcgattaccagagactctgaacgttgggaattcaaattctatatgaaggggcacaactgtctaagataaacaactgtgtaatcgatacactaattctgcaatcgactaccagagaggattntcaaggaatatcgtcaacagtcac

SEQ ID NO: 268701 - DNA, 459 bp, Glycine max
atgaatgaaagtcttatgagacacttcaaagttccacttctctccctcttttattccttcaattccatgctgcccccttctctctttcctttcctccattaaagcatcctcttcaagcctcctatctaaagcacattcttggtggagaagctccttcttccatggcttattccctagtggatggtgtctcccctctcctcttttccttttccctccgctgcatctccatggtggaacatcacaattgaaggacctcattgaagttcaaagatccagcctccatagaagctccacaagcaagcttccatcaattacttttcatgtctctaacgttttcccttcatctagtttgcatgttgacttcttcattgtaatacaccaaccaggacactttggggctttctttgagcttgaagcttatcatcctttgtgagcactcatgatagtcttgagttactt

SEQ ID NO: 268702 - DNA, 383 bp, Glycine max
  unsure (1)..(383): unsure at all n locations
acaaccccaactccaagaatcccctccctctctaaaagcaagttaaaattagccttagaccggatcaccaggaaaagaagtggtcgaactatactgcctacagcaacatctacttgaatggctcccaaagaaaaccagttataccctcataattcgaaagcacaatggtgtgggcagatagatcagtgtcatgtttcccgatcttgtagagcatagatcgaggcatntaagtgacagccgctcctccatcaatgagcactntgttgattccaacattctcaactattgctctgatgaaaagaggttgagatgaactttcatctgagaatctggcttctcgaaataagctaattgttcttccacacagccattattcataacat

SEQ ID NO: 268703 - DNA, 459 bp, Glycine max
gaactatgaaactcagcttgtactcttaaacttttctcgggtactatctttaatttttgttgttaagcaacacaacttaactaatgataaaaaacaaatattgatagttcaataatatgtgaataagatattaaaaatacagtgtatcaaaaaatgtatacatgaccaggttattaatattggtgttacgctcatcagttaacggagttcgaaataaaaattaagaattttgggcgatcaatatctaactaagtgaattaaagccagaatctaaaataaattaaggacaaagacaatatataattacacacacgcacgcacacatatatatatatatatatatatatatatatatatataattctgcatgaacaacattattctatgaaagtgagataataaattgttgtgatatgaatactgaggtatggtgggaaaatattaatattcaattcttaa

SEQ ID NO: 268704 - DNA, 368 bp, Glycine max
agcttgatgcggcatatggagatgttgtttgatcatcgagacgatgcgctacatgagagggcggatcatatggagaatagagatcatattgtaaaatatcggctgagaagagggaatgatggtgttcctagacaaaaccgaattgaggtgttgaactcaacattcctgcatttactggaaagaatgatcccgaggcctacttggagtgggcgatgaaaatatagcatgttttctcatgcatcaactatgatgaggaccagactgtgaagcttgccgccgcggagttttcccactatgctcttgtgtggaggagcatgcttcctagagagatatcatgaattgtggtttgaaagaacaatggtgatgat

SEQ ID NO: 268705 - DNA, 349 bp, Glycine max
ttccagcatgtcattggtgaggcttgatctactttcgttgctctaacacgagggaatatgctcaaatatgcgtggcaatattggtttgtttatatgcgccgaaggggtgaaatgggggattgcatgggatggacctatgcctatgatgcattttgaagcaatgggacatgccacatttgtcccgatctcttgctattgatgcctaaacgcgcgcacaccaagtgttcggtgaaatgcctcagtggcattaacgcgtgatttttgtgaggaagcaacccatgaggcattgtggatcgcccataattaccatttattttgggacatggactcatttgcggactggctatag

SEQ ID NO: 268706 - DNA, 464 bp, Glycine max
  unsure (1)..(464): unsure at all n locations
agcttgcttgtggagcttctattttgtgcttgttctttgagcttcaatgaggtcctttaatggtgattttccaccatggagatgcagcggaagacaaatgagaagaggtgagaggaggcgctatccactagggaataagccatggaagaaagagcttcaccaccaagatgagccttggataagaagcttgaaaggatgcttcaatgcaggaaaagaaagagggagagaaagagagaggggggagcatgaaattgaaggaataaaagagggagagaagtggaactttgaagtatgtctcacaagactctcattcatcaaagttacaacaagtgttacacatgcttctatttatagactaggtagcttccttgagaagctntcttgagaaaacttccttgagaagcttctttgagaaaacttccttgaaaagctagagcttagctacacacanccctctaataact

SEQ ID NO: 268707 - DNA, 498 bp, Glycine max
  unsure (1)..(498): unsure at all n locations
tagtggatgaagaatgttcttcattagctctggtatccaaagtaattatgtagttgttgaggcgatggttctatattcaacttttgtggatgacttctcaacagtaggttgcttcttgcatgaccatgatataggaattgaaccaaaaatagactatataagctccagtagacttgttgttcgtcctgtcccctacccaactcgagtcacaaaatgcttgaagtgaggaacaacaccatgatcgagagttcccttgagatatcataacgcatattaagtagcctgcatatgtagtctgtggggcgatgcagatgctgtgagagacgattcacggcaaatgagatatcaggccatgtgagtgagaggtattgtagagaccctaccatgcgtttataattagtaatataacgatgatttttttatataattaattacaagtgatttaataaattacaagaaaacatanttaattcagtgctaanataaataactacatgt

SEQ ID NO: 268708 - DNA, 454 bp, Glycine max
  unsure (1)..(454): unsure at all n locations
agctttgtggtggtgcaaggtactatcatcttctagaaaaaaggccttttacgatgattgtaacgtacatttaaagacagtcttagaaaaggatatccttctaagacgggtgttagctaaaaaccgtcttaaaaagtacacattctaagacggtttttataagatgatttttatgtaaggaccatcttagaaggatacccttctaagacgatcattagctaaaaaccgtcttagaaagtatttctaagatggttttttaaagaaccatcttagaatgcatttttttttcaaaagttagaaaatttgaagattntaagacgatttttctaagaaccatcttagaatggtattttttataaaaaaaattaaaataataaaaatgttatcattaanaaattgaacatcttaccccaacaaggacgnctgatagaaataaatacaaatttcacctata

SEQ ID NO: 268709 - DNA, 522 bp, Glycine max
  unsure (1)..(522): unsure at all n locations
actccgcttctgatgatgaatcaagctgtttcaagtatttctgatgatgacaaagatgatgaccaaaagctcaagagaatgatttcaagattgagtcaacaagttcaagatcaagattaatttccagtttcatgaaaagaaatcaagaagattcaagattccagagaagtttgatttcaagattcaagagaagatgaattcaagattcaagagaagaaatcaagaagacttcacaagggaagtattgaaaagatttttcaaaaaacaaacatagcatangtttgtttttcaaaagagtttttctcacaattctctaagttaccagagtttttactctctagtaatcgattaccaatttcctgtaatcgattaccagtggcaaagttggatttcaaaagcttttaactgaaattgaacgttccaattgatttctaaatggtgtaatcgattacaatatattggtaatcgattaccagtgtatctgaacattgaaattcanattaaatggtgaagagtcatatc

SEQ ID NO: 268710 - DNA, 339 bp, Glycine max
  unsure (1)..(339): unsure at all n locations
cttacgaaatgttagcctaatttagcctaaagcttgttcgcagaatcctctttgaagactaagcctagactaaacaggattattgtaacaacataactaagtttcgatcctacttcaattaggttctaaagcaacagtacatttcccaatgctaaagtcacctaactatgcacacaaatggatgattagaccataagcctacanacattaagcattgaaggaagcattgaaggaagaanacatattcaattagatattaggtatttacatcagctgttcattagaaattcctaactagggtgtttaaccagccattacagaagaaaccctaacaataat

SEQ ID NO: 268711 - DNA, 455 bp, Glycine max
  unsure (1)..(455): unsure at all n locations
atctaatcttccattccactcaaattatacatctactcatttcaaacaatctcaaacactcatttcatacaaaacaatccactgcatatcattttcaaccaattcattggtgaaacacactttttgtactaagcaacaactcagagtgctgaaatttaaataactaaaatttaaagaactgaaacataaaaactgaaattaaaatggctgaacataaatcataaaataattggaaataaactaaaatgttcaaaatgcacaacattaaatgtcctgctcctgtggttgctcctgtgcatgctcattaagaaccaacacctgagcagctggtgaatcctgagagataggctgctctaactcagatgctggtgcagatggtatggcatcattacgtatggggtgtacggatgactctgggatatggtctgtanaaatctccttctcttgagccatgt

SEQ ID NO: 268712 - DNA, 124 bp, Glycine max
ctgaatatccagcctccccatataccacgggaaacagtctgacctccgagcaaaaagggattggagtttggattttctcagacgttatgagtccaatgttgagcgtgtcgatatattacgagac

SEQ ID NO: 268713 - DNA, 245 bp, Glycine max
tggtggcggccgcaaatcaccccccacagccaacaagtgagccaccatttggacttccacaatgctgatgcctaggctggcaatagggcccttattacaacttgaactaaagcccttttaggtgattaacccagaacatatttttggacagtcaactttacagggattgtgccattatttacacaaactaaacactctaaaattgaaacaaagtggtgtcaattagtcctacattagggccagtg

SEQ ID NO: 268714 - DNA, 426 bp, Glycine max
  unsure (1)..(426): unsure at all n locations
tatgactcgggaacgatatctttagttatgcacccgtacctgcagtttggacttaaccacaaaacacatctaccaatcttctctttctcgtcgatcgcatatatgcatgggtgaattattcaactggcactgatgaaccgttatctctgtatgttatttagcctaatcatatacctgaaacatgacgttgcatgtgtttccttctattgagaatgctttggcatgataatntatagagcgttccatagtctatatttaactattttatgatggatttctactttatacacgtggtgtgttcattgaaataaaatgtaacattacttttctaaagacaacctatttgatgagacttgtaatattatagatataagttatgatttattcgccttttttactttgaaagtttaaatttgtctcaactcc

SEQ ID NO: 268715 - DNA, 395 bp, Glycine max
  unsure (1)..(395): unsure at all n locations
gcattcttaatttgagcttgaaaaatcttgcaacttaatctgaccttccataagccatattgcacaggaacctccaaggttttattaatatgtatatccctaggaattactttaccagacacttcatctaaaaaaattggcacacaccaaggtgcaacagcccccaaattcaaattttgaatacttaaagagatgcagcaattgttccaatttatgacattatcaaataaataaatcatttatcaacaataatagggtgaatgctaagttcttggtaccctcattnttctatgttntagtttacataaatttaagaaagccaaaaagagaagaanatatatttaccagctcagtaagaatgagagtataccctgtatggagtctccataataaat

SEQ ID NO: 268716 - DNA, 348 bp, Glycine max
tctgattatcatatggaagatacttataaacacagatatatacacccagacatacgaggaaagagatgtctgaccttcaaatgacaagttggagacacaaatggtggaaccgctgtgcaaaaaaaaaaatattgcaccaaagtgctggtcaaccaaaaccaaacccttcactagcctcatggatggcaagtaacaaacgttcttgaagctgttccttagaggtatactcaggaaggtcaagttgattgaagctaaagagcaattgaaagaagagataaggaattaggatggctgaaactcaatttgcagtaatcatatggacctgaacagaatatatataatgtttac

SEQ ID NO: 268717 - DNA, 437 bp, Glycine max
  unsure (1)..(437): unsure at all n locations
tttttttcaagtaaaaacattggttctaggtcaaaaccccttgaactatttcacattgatttatttggtccctctagaactataagtttgggccggaattactatggcttatgtataggagatgattactcaagggtcaaatggacttttgttttgaaaaccanaagtgaagctcttgatgcttgtcacaaaatttccaagatgattcaaaatgaaaaaggtctcaacatcgtttcacttagaaatgatcatcgaggagaatttcaaaatgagtcttttgaaaacttttgggagaaaataaaattcatcacaatttttctaccccaagaacacctcaacagaatggtgttgtagaaaggaaaaatagatctattgtagaaggtgcaagaacccttantaatgaaaacaagttacctaagtacttttaagctgacaat

SEQ ID NO: 268718 - DNA, 297 bp, Glycine max
agcactattcgatcgagtggcccttggccccccatggtatgtgcaggtcgcgctatggttataccattttgggaatggggaatggtagatctttcccgggaccaccacgtccaaatggttggcgatgaaaaatggcaagagctcctcatatggcatttgggatcggggcaaaaaacggtgcctgccttggcaaaaagctccttgccgtttttgcgcccaagtgagcatttgtggccgggtgatgtccagacgaatctggactccggagagctcccccctgtgggggtgtggacgccc

SEQ ID NO: 268719 - DNA, 460 bp, Glycine max
  unsure (1)..(460): unsure at all n locations
agcttgcatttaaattatgtgacatttgttattanttttgtgagaccaccaatgtctctgctatcaccattagtatcattattatttttattatcattattgatcatggccactatcattgatagagacaatgatggtgatggtgatagtaataaaggtgatgatgatagtgacaataataataataacatatgaataatttacatataaaaaaacatattaatgattccttagaggttgttaacaagtatatcttaatctcaatgatatattatttttaatcttgatacatacattattaattattaattattcatgtattctcatataaataagtattcacatatacaagtcactttttctatgtatatacatattaaattaagaataaatagaaatatattttaatcttaaaatttgttaacataagaggctaaggtgttatttctcgataaaatat

SEQ ID NO: 268720 - DNA, 431 bp, Glycine max
  unsure (1)..(431): unsure at all n locations
atatttccctgccccataattaaaattcaagataataagtaaatagtttcattttggcttttttaacaaaactcacttgacaaaatangaagttcacctatccgatctacttatcatttttatgtattcaactaatatattaacctagtaatccacataattatccatacattgtggtggatttaaagtgaggctatcaatatatntttttaaaacattatcattcttcaaatttcaagttctcttttttggtatacaatggttattagacaccttagatcctgtgtatactctctaattaaagggttgataaggactaattttagttttccaaaattatacgttgggaccttaaattttcatattgggattattcttaaaaaaacattcatgacaaaaaaataatcagtttccaccgaaattttcttatg

SEQ ID NO: 268721 - DNA, 485 bp, Glycine max
  unsure (1)..(485): unsure at all n locations
cgggatcttaagtcacctgcggcatcaagcttagaccttgatggatgtttgtttactcgcattcttgtcttgcagcttcaaacttatcaattgctacctacagttcattaatgcctccaacaaccctcatggtgtaaaagtagcaccaaagacaaaagttgtcaaacccccaacaactaccaaattctttgccttaggtggaaggctcatatatcccaaaagtccagccatcttgatcaatgggggaaaaagggttagcacaatttcacacaattacaattaccctttgttgatgcatgcatactgattnttataggttcaatgctaaataaaatcctaaattgaaaacgtttttaaatcaattacaaagttcaatgctaataaaatcctgaattaaaaacgtttttattatttgtaaatgagatgacaaccattttttaatcattaaaaatggttattttttatcatcgtatatgataacacat

SEQ ID NO: 268722 - DNA, 414 bp, Glycine max
  unsure (1)..(414): unsure at all n locations
agtttacttaaagccatccttgaaactctcgaactcttggaagaaacatcaaaaatgaaaacaagaagcaccttccaattaattaatgttattaatgaaaatagtgaccaaaattcaaaacacacaagtgaaataggtttagtatctgagaaggatattaatccaataaattcaaaatattggaaaacaccctctaaactttattaccaaagaccaaccgcccctgacctcctgttaaaagaaagaggcgaaaantaatttaaaagtttcagtgcaaacaacatctatgaatggaatataatgcccaaacaaactataatattatgaatacactccaacacatgatcatggtagccacaacataccagacattccatgagtgttcggaggaaacaatcattgatatcctagtga

SEQ ID NO: 268723 - DNA, 464 bp, Glycine max
  unsure (1)..(464): unsure at all n locations
agcttaccttcttgagaagcttcttttttattatttctaaagaagctacggcttagctacacacaccctctataatagctaagctcacccccatgccaaaatacatgagaatataaaaaaagtcccaactacaaagactactcaaaatgccctgaaatacaaggctaaagccctatactactagaatggccaaaatacaaggcccaaaagaaggaaaaacctattctaatatttacaaagaagagaggacccaaccttggtccatgggctcataaatctatcctgggattcatgagaaccccaaggccttctttagcagctctagcccaatcctcttggagtcttcaatccaatacccttgggcggtaggaatgcatcagaaatttttctacanttctaaccaaatttagcccattctaagccacttgcatgtgaaatgaccaaaattcctctaccactaaaac

SEQ ID NO: 268724 - DNA, 395 bp, Glycine max
  unsure (1)..(395): unsure at all n locations
ttcaattcattctatgcacccttagnggtctattcttgttttgtttgccnncctcttcatattggtatccttttctttcatttttaacgagctttgactgaatcgttaattcgttacctcacctaataaatgaaaatgaatttcaaccgatcatttgtgttgtaatctcgtgttatcactattaaaataaaattcaaccaatcgttcacactgtaacctcggttaatcaagaaaaggtaataagctccaatcggacattttactttgaaaagtcttttaaatgagttgataaataacccagtgaaacagaggctaaaatcaactcacaaaccaagcttttgccatggaaaggtcatttgaaaccgtcttaagggccaacaccttaaacggtcgcg

SEQ ID NO: 268725 - DNA, 227 bp, Glycine max
cgagcagcactcaccaaacgaaagttaatttaaccgaaaacgcaaagggaaagagaaagacaccgccccaaccggacacaaacgacgagaagcaaaaggaaaccctaggacccaataaaagaaggggtaacccaagcaccagcagccaaaacccaaaccaagacaagaccagcaagaccaacctaacaccaaagagaggccaatcacggcccacaagagaccccacc

SEQ ID NO: 268726 - DNA, 382 bp, Glycine max
cttcaaactagcgggacattactacatgcccacttttggggttattaagattcgctccgccagaaacgaatattatgttctcattcatttaattaccttcactttaaataaaggctcatttatgtgatacaaacatcacattacacaaaccctattttattattcagattaaaaaaaaagaaattggtggaaagggatatatagatttgatagggggaaaggatctaaatcaaggccacttttgtgatcacaagctccttattcaacagaaggttatccaacgaacacagtctccataaaagttcaaatcctacattagtctaacttgcagcaatcatggcttgtacaactggaagagcatggccacaaaatctaaccaatc

SEQ ID NO: 268727 - DNA, 428 bp, Glycine max
  unsure (1)..(428): unsure at all n locations
agctntgatgcaacatttggagaggttattgtattatcgagatgatgcgctccatgagagggtggatcaaatggagaatagagatcataatgaagaaaaaaggaggagaaaagggaatgatggtgttcctagacaaaaccgaattgatggtattaaactcaacattcctccatttaaaggaaagaatgatccggaggcctacttggagtgggcgatgaaaatagagcatgttttctcatgcaacaactatgaggaggaccagaaggtgaagcttgccgccacggagttttccgactatgctcttgtgtggtggaacaagctacaaaaagagagagcaagaattgtggtttgaaagaacaagggtgatgatgaaaggaaggaaagaatcactctttccagcgagggcaacacacaaaggttgagaaagt

SEQ ID NO: 268728 - DNA, 378 bp, Glycine max
  unsure (1)..(378): unsure at all n locations
gaacttccactcagctttcagctttattggtgtatttgatctccttctggttctctaaaatgtgggaatatgctcaaatatgtggggcaattttggtttgttttcttgcgtgattgggttgaattgggggtttgtatgggatggccctatgcctataatgcattttgaagcaatgggacatgccacattgtccccgttctcttgctattgatgcctaaacgcgcgcccaccaagtgttcggtgaaatgcctcaatggcattagcgcgtgattnttgtaaggaaacaacccatggggcattttggtttgcccatattttccattntttttgggacatgcattcatttccggaagggctagagtaattgccccacatata

SEQ ID NO: 268729 - DNA, 354 bp, Glycine max
agatgaacaagttggttgatgagtatgtgggtggcggcataaaaagagccgagaatttaatatgtgcggtgctctcttctgatcaagtaattcggtatgaaaagaaccgagcctttttctgaataaaattaaagacaatactttggacttattgaatttgtaggcaatcactgaaacaaatatagcgaaaactttcagattaaaaactttgcagcatgaatagtgcctatcactgaaatgatatagtgaactttctattagaagaaggaatctatatatatgatgctatgaaaatgagtaacctagtctttatatttaatgaagagtctcctgaaaatgaaatttttgatatct

SEQ ID NO: 268730 - DNA, 463 bp, Glycine max
  unsure (1)..(463): unsure at all n locations
agcttctcaagcaagcttccgtcaaggtcttctcccccttggaaaggatttgacctcaaatccataggttcttaatactctgggcttcttccctcgatacttgtaaaaagaataaaaacatatattttagtggtgttaggtttgttagagtagggtaaggtctgaaaacccctttcctgtgcatcttcccatgagggaacatcattcctcaccaacccaatgagtggtgctacaagtatagaaaaatatgaaacaaaccttttgtaaaagtttgttaagtcatggaagccccaaattttctttatacttggtggagtaagccactcaggaatgacctttattctcttagggtccgtggaaacctcttgatcactatttaaaaaattaaggaaagtaatgcaataaaacatatctttttctatattttcatgtngattattcctataaaaaagtacaacaaacc

SEQ ID NO: 268731 - DNA, 501 bp, Glycine max
taaggatggaatatttacttgttggtgatgaataaaagcgcaaaacggaatcgaaaaatgcgaaaagtagtgatcctagggctgcaaactcgtaaattccgtgggtatgacttttgaatggggggaaaagaagtttttgaatgcaaaaacgtccccctttcttcattttttatattttggtgcaggggttgctcgcccaggcgagctaacctgcacttttttttttaggggaaacataaccatggcccccctctctttacaggttaacgtttgcctactcgaacttacttaagttagaattaggcatcgttttacttatttaaaacaaaaaatagtaataatcactgtgaattcaaaggatactgggctgccttgcagcgacgttctctgcttgtccagcgccaggaagaaacgacgatcggtcagtcatgaccctatcctccatttgcgtccgttcctaagtacctacaagtaggaaacaaacaatgtgcggccaatcgt

SEQ ID NO: 268732 - DNA, 335 bp, Glycine max
  unsure (1)..(335): unsure at all n locations
ctttattcagatttttgtgctccttctctattttttctcttcatgaatgtgcctttcttctttcaatgatcatggctaaatttgactactatagaatatctttccactatcttgttgtcatttgattgactttgacagagactatctttccactttctcttaggaatttcatcgtcagatggggggttgagataataaagcttaagctcgtgaacgaaagacatcctataagtacattgcataaggtacatgcatcaattaataggtattttatcattatggactntgaacttttctcgtctccgaaagtggtcaataagtgaacatatcctata

SEQ ID NO: 268733 - DNA, 315 bp, Glycine max
  unsure (1)..(315): unsure at all n locations
ttttagcattgggaaatgtcgaattttgatggaaattttttgcacgaacccttaaaaaaatgatatctcggagttccccaaggctcgtaatttaacttggtaaagcaagctataaatctgtatgtataagaatgaagtgcaaggatctagtttatattatgttgtaggctaaatgcaactcttttagactaagtttgttgagggatcaacgaccaagtttaaagagagttaggcttattcactagagagatcttgaattgagtagtttctcagcataagaacactanggtaacggtaaatagagaaaaataccta

SEQ ID NO: 268734 - DNA, 453 bp, Glycine max
  unsure (1)..(453): unsure at all n locations
ctgcagcttagacaaatgagctcaatggatatttatatctcagggagatggagaacaaagagcttcaaggtagatagagaacagagaccttaaatggagaaaaagagagcgcgagcaagatacggctcacaatatttttcaaaatctaagttcaacatcatttttttaaaaaaaaaaaaaccgatgttaacaaactgatgttaacattaacattgattttccgaaaaaaaccgatgttaacaaacttatgttaacatcggttcttggaaaaccgatgttaactaattaatgttaacattggttttccaataaccgatggtaatgtcacttcgntaacatcagattttcacaaaaccgatgttaacggatacacagtatttacaattatgccaccatggttacgttaacatcggttttgtaacaaccaatgttagccgccgatgttaatctact

SEQ ID NO: 268735 - DNA, 433 bp, Glycine max
  unsure (1)..(433): unsure at all n locations
ttttggctctctgtttttttgcttaaaagggctcactgaccctgttgagcgagtaagtgaaatttcgctcaatgccaaacttgcgcttagcctggaaggtgaccaatgactcgctgagcgagctgatgatgcacttaacgcatgcctgggtgacaaattcccttccagattcctnctatctgctaagcacgtngatgcctcacttagcggatgacactcgctaaacacattgagctcgcttagcgagacatcacacttatcatttcttcanaataactccttttttgcttgaattgaagagaaatgacattatattcatacacaaggcttctactgagcacagataaaaacaaagcaaaaattatttaccattctacaaaaagaaccataaatggggaatatatatattnntgtaaagttttctatacaaaat

SEQ ID NO: 268736 - DNA, 388 bp, Glycine max
  unsure (1)..(388): unsure at all n locations
gccttctggggaacttcctggaaggccctaatgggcctgggttctatttgcaccccctatttactaaatacacccccttacctttttttgctgattctttttcccgaacggtaccgaactttaccaattacgtaacgatacttgttttcttttcgtaatgtcacgacaccctacggattacgtaatcatcccttctttagcttccgaaatgtatgaaactttacggattgcgcattaacactccttttgacttccgacatgtcacgaaacttcacggattgtgcaacaatgcattctttngacctccagcatgtcacggaactccacagatcgcctaacgatgggtgctaagtacctcgaagtggtcaaacgatggtcgcatcccaac

SEQ ID NO: 268737 - DNA, 416 bp, Glycine max
  unsure (1)..(416): unsure at all n locations
gaatgtactttaactatgactcttaagtaagaaggtacattttatcactacccaaaatatctttccaaaataacacatactaattttcaaaaaatgtattnttagaactattcaccagttttggaaatacatttctagaatatgtatgttattccaaaaaaaagacattttcaaaagaaaaaaaggggttccaactttattttttgtataaatatacgtgtcacaatagaaaaacacacacactttaatagttttacttctaagaccaaaattggaggccattactcattacactatggctttgtcttcctgtaccaactattnttcttatatgaatgttttgttaaattatatatgtaaaaaaatacattattagatcaaaattaattattacaaaattattatataaattatat

SEQ ID NO: 268738 - DNA, 381 bp, Glycine max
  unsure (1)..(381): unsure at all n locations
cattactcagccaataactttccttcttcttacccaccaccagttatccacaaaggccatccctaaatcaaccacaaagcctgtctaccgcacttccaatgacgaacaccacctttagcacaaaccaaaacaccaaccaagaaatgaattttgcagtgaaaaagcttgtagaattcaccccaattccggtgtcctatgctgacttgctcccatatctacttgataattcaatggtagccataaccccagccaaggttcatcaacctccatttctccgagaatacgactcgaacgcaacgtgtgcttgtcttggagaagccccggggcgttccattgagcattgtanggccctaaagcgtaaagtgcaagggctaattgatg

SEQ ID NO: 268739 - DNA, 466 bp, Glycine max
  unsure (1)..(466): unsure at all n locations
tgcaactgctggaaatatttcattccagatttctttatatcacctactattgaaaggtgnaccttattttcccgagagaattcaataatatttgaagatggtgataacattgatgccttgctgtccaagccaaccgttaaatagtccatgttcacctcttggctgcaagttaatggcaattttccaacaaaaaaaagatcttacatatttgcaattcataacaaaatttacatacattgccaataaaagatgtttgaagccacgtaaaggaggctatacaattggaaggcttaactgggtgcctccaactactagagaattatattatcttaagatgatgttggctttggttaaaggaccaacaacttatgggccaaatgtgaaagtcaatgatcaacttgattctacatttagagaagcttgctttgctatgggtttcttagttgatgataaggaatatattgag

SEQ ID NO: 268740 - DNA, 301 bp, Glycine max
aatgttttaaccctctctctcaggtatacagtcagtttattatttgccttattgctatcttgtgcttttatgcaattgagaccagcagtataaggtttttgatgaagaggacaacaaacgatgaatcggcttggcggcttagacattcatttatagttgagaagaagaaccagccaaattaaccctaatccaatgaaaataaaacattaattatacattaccgattcaattgaacttgaaggaactcaactgatacaagacaagtgtatctgggatattatagttatctaaacccttattg

SEQ ID NO: 268741 - DNA, 358 bp, Glycine max
tgatatccactccacaaggctagaagtgaggagaccttcaatcctattacccaatggggtaaacaaaaatgggccgctaactcgaatggacactattggcaatgcggaagggattttgcgcttcactatccatgttcacacattattgcagcttgtgggtacgtgagcatgaactactaccaatatatagatggtgctaagcaaatgaagtgaaaccttaataatatgaaccatacattaagtgcaaagtcaatccaaacgtaaacacaatatagcgagacataaacatcatatcatgccggggacggaggaggccacaggcgacccatctccctgacataggatactctgcacgaac

SEQ ID NO: 268742 - DNA, 419 bp, Glycine max
  unsure (1)..(419): unsure at all n locations
caaagagcaccagcttgatttttttntgacccctgaacccagaatgcagatttaatgcttccactctcaaagcctcacttctttgtcactcataacaccacattctcactttctatccctaaggttaactctacccttcatctataacagtttccgaagccattcaggtataaacatcacatgcatcatcacaaatctcctaaaacagaatgggtatgtctaactcatccaaacatggcaagttcaacatgctttcaacaagagtcttcacaaataactatcatgaagcagaaaactaacaaaactacccatcatatctcccaaaacctcatacccacgaaaatcaaaggagatagaagccacccacacctgaaatttcgaaagcccactcgtagacacgcacttcacgaaccccgaaa

SEQ ID NO: 268743 - DNA, 461 bp, Glycine max
agcttggaggggttgatggggaccctgtgtttatatgaacgaggataagggctacgtagtagtacatgagctcagttgaaggtgggcaactggggatggtgggttcatgtttgatttgtggaagtgggaaaagtgatttgcgccatcacccgatcgccacctaataccacatatgacgggtaccccataatccaactagcttgatgtgagaaaacgtggaagagtcagtcttcctacttttgtttgttgaccacagagtggtacctggagatatgtcgcaggggtcaggagaccttggggatgtcaggtggggtgctattgcccaaaaccaagcttgaccaatcccgacccaactcgggcatagtcagtcagtgagaacctgtgacgtacctaaacaggcgagctcctagcagtcaaccaatataagaacatagaccacaatacaaggatgcttgtgtggt

SEQ ID NO: 268744 - DNA, 508 bp, Glycine max
taagtgacaggattggactggatatgaatattatcgttaagtactagcggatttgtggtgttcatgggggaacacaaccttcacttggatgtcaaaaaattagtcgatagtcactctttcaacttgtgaggcagaatacatagcaactacttcatacatttgtcatgcagtctggcttaagaatttgttaaaaaagttgggcatgtcacaagaatagccgaccaagatctttgttgatagtaagtcagccattgttcttgcaaagactccagtgttccatgatcgaagcaaacatattgatacatgttaccactacataagggagtgcatagcaagaaaggatgtacatgcagaatatgtgaagtctcaagaccaaataactgacatcttcaccaagctgctcgagtaagaagacttaatcaagttaagaagcttactcggaatggtaaatcaagtttaagggggggtgttgaataatataaacttgatttatcccattaatcatgtg

SEQ ID NO: 268745 - DNA, 461 bp, Glycine max
  unsure (1)..(461): unsure at all n locations
agcttggagcatataatttatatgctccttctgaggggggatgttagattaatatgtgttgttagactttttcttttttttctttggtttgatcggcaaaagtagatatatatattaatgaaagcagtacaagtggtactgatatacaaacagcctaacatcaacgagagcagacctatggttagctaatacaatatacagaataagtattagagaaccaaagatctggctattagctaggtaaccacccaccatcaaaactgtacattttatatactattcccccgagtacaaaaaacctccctaatactactagaccatgagtgaaatgggatatcaaatcctttnttttaaaccaggtccagcagaagaataatgcatcctccatcaatttatgaccattaaagctttcatttaggaatacaatntattcctatgatgccaagtacaccacgtgagtg

SEQ ID NO: 268746 - DNA, 430 bp, Glycine max
  unsure (1)..(430): unsure at all n locations
tgcttctacttaagtggttgaactgatttatgatattattctttaacctaagataagagacttgcttgtgaatcaaggggaaacaacatgttntaattctgttattttctaattcaaatttgcttgctgtttaatttacaaaaacaaacaaccccgcccctcccccccccccccaattcgttactgttttattactatctgttatgaatgtttggttgaccattgcttcgtgggagacgacctangatcacttcctagatactgcatttttaatgtttatttgattcaggtacggcctcgatcattttccttttttagaatttttaattttttggggtcgacaaggggatgcccttgctcctacgtattcttaggtgcaatgaagaattcagacctacgtagttctttaagtctgaaagtttgtgtggta

SEQ ID NO: 268747 - DNA, 447 bp, Glycine max
  unsure (1)..(447): unsure at all n locations
agctntctcttttggcaactatctcattctctttttctggngaagaatgaagcttgacaggttcatgtgcaggttctgctactgggggaggcacttgaatttggttgccaaaccgcacagtgatggcactcatatttttcggattccgcacagtttgtgaaggaaatttgttagaattttaggactgagcttggttcatctgagtagccatcagccccatctgatttgtcaaactctgaatggaggctcttgtctcttgctgaaattgcatattctggatggtcatttgcctcactaactcttctaaggaaggttgaggaggagcctcagttgcttgttgtctttgttgtgactgttgttgttgttgatgttgttgttgctgcattggaagaggaacatatggctcgcttggaccgcaacattctgaaaaggaaggacattgctgta

SEQ ID NO: 268748 - DNA, 280 bp, Glycine max
tagcccatgtgagtgattgcacgattgagtcaaccccttccagattaatttcaagtttcgtgagaagaactcaagaacgttcgagaatcaatagaagattgatttcatgattcgcgaggcgatgaattccagattcatgagaggaaatcgagaagacctcacactggaagtattgtgaagaattttcagaatacacacatagcacaattttatttttcgaaagagcttttctcataatattctaagttaccaaagttgttactctctggtaatcgattac

SEQ ID NO: 268749 - DNA, 392 bp, Glycine max
  unsure (1)..(392): unsure at all n locations
agatgcagcggaagacaaaggagaagaggtgagaggaggcgccatccattaaggaataagccatggaagaaggagcttcaccaccaagatgagccttggataagaagcttggagaggatgcttcaatggaggaaaagaaagagggggagaaagagagaggggggagcacgaaattgaaggaagaaaaagggagagaagttgaactttgagttgtgtctcacaagactctcattcatcaaagttacaacaagtgttacacatgtttctatttatagactaggtagcttccttgagaagctttcttgagaannacttcttgagaagcttctttgagaaaacttacttgagaagctagagcttagctacacacacccctctaataactaagctca

SEQ ID NO: 268750 - DNA, 236 bp, Glycine max
caatctaaaatggtacatgggaaagatgtgtttgtgattaggacaccattgtcttctatttttgtggcaagactggtcacatgacattcaagtgtaaagatctaccaaagaagggtacaatcaatacctttatggctaacacaaaaggacccaaaaatacttggttacctaagaaaaagaatatttttggtacagatgtccttgatagtatgaacaaacacctatcatgatacttg

SEQ ID NO: 268751 - DNA, 461 bp, Glycine max
agcttcgtacttcttatttaataatgtatttccacccaactttgctaatgcatcaacttgttcgtccgtccattcatctagcttcagtgatagaacctataatagcttcaaattatgttaggatttctttgtttagtgtgccagttattcatgcacaaataacttggtgaaatggggacaagtggttcaatactctcccctttcatcactttagaaagcagataaagtcaacatggagtgcttccgtattaacgactaagatctagtttggataatcttcttaataaatatttataagagaagacaataaaatgaatcgaggaagtaaaataaattaagtttctctcataagttaaaattaatttatgcacctcaactctttctaaagctccctcatctaactttttttataagttgaagttcataagttattcttaatttataggagaaaatttgattat

SEQ ID NO: 268752 - DNA, 505 bp, Glycine max
  unsure (1)..(505): unsure at all n locations
actcagcttcaatgatgatgagggactcaaacatgaaacacattggtaaagttcagnattatcttcatcaaacctagcattgagctcatgcaactgcaaatctaaaacactaaataaaaaatcatgcttaaaatgatgcaaattagaaacactagaagtggtagcatgtcgtctaggtttcttcccttgcacatacagtgcatccaaatcaagcacatcaatatcatgcttattgcaaatttccataaccttagatataagttcttcccatccatcattcctcatttcttgtaattcttctttggtggctttgacaagtgataaagcattcaaaatatcttgatcacgcttttgtagcgctacacttaaatcatttgtaaatcctaaaatcccaaccatcatgtataacatgaaaataaaattaaaggacttgagcacatctagcnaaatcatagttntaccattattttcanatgacgtatctttcccgacttcttcaagtacc

SEQ ID NO: 268753 - DNA, 490 bp, Glycine max
cccggatccttaagtcacctgcggcatgcaagcttgcagaaagtcatggcattgctttatttttctttgatgagggacactgaggttctaaatggggtcatgattttcgtccaaattacaggtctgttttatcccttctgtttccttattgtttatgcctattggagatgaactggattaataagtatacttagaacatcttaaatgattgtaaatgtaacttgtggtttgtatattcaccaaaagtaagatcaggtgttggttgttttgattgattatcatgcatgtttgctttgttccttgtttggtgcgcactttacaatttcctgaatgtctttagtttacggtcataagtatgacccgtttttaaatgtctgctcttgtttcagacgactgtctgtgctgagggaaaatttcagtgctagcaagctaaaatccctgaaatttgatatacctctgatggccttgacagctacagctacaaaaagag

SEQ ID NO: 268754 - DNA, 415 bp, Glycine max
ttacatcacaaagctttttggactaaacaaaataactttctctataacttgcacgcaaagggttctagttgcttggcatctaatatggctcgcacatggtttatttttgaatggtcttacagtgcaattgattatccatggcttgccaaaagggaattcatggagtacttaaatcatgttggactagggaatatcccaaggttaactcgtgtcgagtggagtgtcataaaaaggtatgaaactcagttgcggttattatgatgttctgcttaatcttgacaacagtagattatgtaatcataaaggatgtatttgaaattgtcatgttgtacttgtttttgcagatcccttggcaaaccccgcaggttttctgaacactgtctatgtgaagacaggcataaacttgaacagtatc

SEQ ID NO: 268755 - DNA, 388 bp, Glycine max
catgaaacctggtatttataaaagtggagctttttaagatctggtatagtctttgtagataattttcaacttatagataatagatgatagctttgtagataatattagagataaattgtaacttatagataaaagctaaaaaataattgtactttgtagataaagtgtgacattgtagataattaactacttgtcaatagataaagatattcaagtattaatatgaaagagataacctgtcagttggggagcccaactgctaagggttgagtgtctgtgctcttgttgcatggttgatgtggagggttaacacgtgtctcagagtgccatgtagtgtgccacgtgtattttgtagacccttgacagtatataagtcccccaatctctg

SEQ ID NO: 268756 - DNA, 465 bp, Glycine max
  unsure (1)..(465): unsure at all n locations
agcttgtcttcttagggacctcttttactgttcttacccactggctgtcaaaaatggggtagatgattccagcttgtaagagcttggtcacttcctttttcaccacatctagaataacggggttgagtcgtcgcttgggctgcctcattggcttanctccatcctctaaaagtatcctatgcatgcaggtagatgggctaataccaggaatgtctgctaaagtccatccaatggctttcttgtgcttcttgagaactagcaacaacttctcctcttgcttagcagcaagggaggcagagatgatcactggaaatttttccttgtcctccaagtaagcatacttgagggttgctggtaagggcttcaactctagtgtgggtggtggctgaatagtgggaggaaccaangtaggagaagaanaagggtcctcagcctgtacctcataaagcaagtcagaagtatatg

SEQ ID NO: 268757 - DNA, 368 bp, Glycine max
  unsure (1)..(368): unsure at all n locations
cacttggttatttatcaactcattcaaaagaactttcaaagtaaaatgtccgattggagcttatttacccctttttgattaaccaaggttacaatgtgaatgatcaattgaattntattttaacaatgatttaatgagattacaacacaaatgattgggtgaaaatcattntatcatttattatgcgagataatggcttaaacgatcggtcgaagctcgttaaaaatggaagataaggatactggaagtaaacgagatgaagatgaaagcatacaaagcaagaatggaccactaaaggtgcatagaatgaattgaaagcttcgagatcaaaaactaaccggttaaatctcaacgaacgatgaagaatg

SEQ ID NO: 268758 - DNA, 431 bp, Glycine max
  unsure (1)..(431): unsure at all n locations
ctcttgaactttggcatcatcaaaataatcttggaaggcgttgcttccacattaaacacaaaaaaaaggaagaccagctagaaaccaaaagatgaaatgaaagctaaaccaatatgaaatttaacatgacattaattcaataagattcaaggaaaaataaagcaaaaggacagcaccacaagccaaggtggaacacaaaggaagtccaagaatgacactagattagattgacaaattaaaaacaagactcaaagcaaaattctagttatgtcaatttggaaacacatctaaaagatggaaaactccaagaagtcaaataggcttgtaattcaactcanaataacgaacatatttcaaacaaattaagcatacacattgntttttanaacaattggttgtgttctggacgtgtaatttgacgttaatctcta

SEQ ID NO: 268759 - DNA, 316 bp, Glycine max
agctctcaagttgaaactgcttactaagtattcttgaagaatctatgaagataactcccttcatttatgaaagaattgcaaatgtggaaaaacaaagggagatccaaatggaaaaactcctccaaaagagtacctcaggataaaaaagataaatacatccttcatagtatgctatggatgcaagaaactttgaccacttcaaatctgaatgcccagagttggagaagtcactagacaagaagaaaaaagacaaaaaaaggtcttatgagcacataggaagatctagatgacactttgtctaatgaagagagtgaat

SEQ ID NO: 268760 - DNA, 459 bp, Glycine max
  unsure (1)..(459): unsure at all n locations
gcttcttttggaccttgaacaggcaactatacttctctttcaaaaccatgctatgtgctcgcgactggtccctttcctcccttcgcaacttgagttcattattgctaccccatagggctccacgaaatttgttccggccatactcttccttgcgagccctcttggtctctcgttcaagggctcttgcggtaattgcattctcttcccgtaacccggcacactccttccgaacgtgtgtagcagccaacttgaacttctccttggcgagttttgcctttcctaactcgcttttgagagcttggacttcctcgtcctcttccggtgcttcaaaattctcttcgctgacgactnttaacttggcgagccaatctaaacctcgtatgcgaactttcagccattcgtggtacccaccaatgatgccattacgaatgcctctaagctcttgatctttccttaacg

SEQ ID NO: 268761 - DNA, 427 bp, Glycine max
  unsure (1)..(427): unsure at all n locations
ctcggctcataccgggaacgcctctagttcaacaccctttgcttctatngcactcacccagagggaagctccccaagtttcaactccaaacacgactcgcccggccggtaattccaacacgacaaggaatttccctccgaggccatttccggaattcaccccactcccaatgacgtacgaagacatccctcatcgccaatcatttggccgtcgtaactcccggaagggtcctcgaaccccctttcccgaagtggtatgaccctaacgcaacatgcaagtaccatgggggtgtcccggggcattccgttgaaaaatgcttggcccttaaatacaaggtccaacatttaatggatgctggatggctgactttccaagaggatcggcccaatgtgagaaccaacccgctcgccaatcatggagggggagc

SEQ ID NO: 268762 - DNA, 465 bp, Glycine max
agcttttctttacaatcaatctgtctattttcttacaattctaaatgcaagttcacattcttgttctttctttgttcgacatgcacatttgctgaacttcatgaaaggaaacacaaatctcatcttaagcatgcattcaatttaaaacaaagtcatacacccattttcacaaaaagataaaagtgtttcacaaccatgtcatctaaaataagttaaattgttcaaaatgcttcaagataagcatactaactattcatatatagaactagcaatatatagacataaaggaaatattatacgaaaaccaaaattataataataataaatcaaaaagcaaaaagtgtcatcaggaattaaaattcctgtgactggtcctgattgtcctatatctgaacattcttcttatttgttatatgtcatactggagtagctggaggagaagtgtccaaaggcaaaactggtatg

SEQ ID NO: 268763 - DNA, 388 bp, Glycine max
  unsure (1)..(388): unsure at all n locations
tcaaggaagttttctcttagaaggttctcacggaaattttctcaagaaagcttctcaaggaagctacctaatctataaatagaagcatctgtaacacttgttgtaactttgatgaataagagtcttgtgaaacacaactcatagttcaaattctctccctttntcttccttcaatttcgtgctcccccctctctctttctctccctctttcttttcctccatagaagcatcctctccaagcttcttatccaaggctcatcttggtggtgaagctccttcttccatggcttattccctagtggatgacgcctnctctcacctcttctcctttgtcttcccgtgcatctccatggtggaaaatcaccattaaaggacctcatttgaactc

SEQ ID NO: 268764 - DNA, 384 bp, Glycine max
agcttagcttggacacttgtgtcatctttgtatttcaaatgtaccggaagatgttatcctctgaatgtctatgggtggcccagctcacattatttaagttaggagacctggtttgaatgagtaccataaactagcctcttctggggcgatgcttgacgtcttatgcccaagtcacttctagctcatgttcatgccctttcaaattaatggataccagtaaagccactaaggtgaacaccctcatttaaagaagatgtggaggacacaccacttgaaagattctgacctcgagtggattcagaagtgtgatcacttactactggccatgtgtcctacacaagaagcttgggtataatatgtgggagaatgatgactctctacacc

SEQ ID NO: 268765 - DNA, 218 bp, Glycine max
gatgactgactaccgcatactttaagcttatggacgggaaatgtgactattacatagggatgccacaagaggcaccgtatgctaaataaccatgcatttagtgccatgttcgagaaggttgttatgatgatgtgggtgccccattatgaatacaaatggcgctatgatcccagcaaggatggctcatggtgcctaacacatgcgactataagtgtcgc

SEQ ID NO: 268766 - DNA, 371 bp, Glycine max
tagaagcaagcggatgcaattcctttgccacagagacatcaaatatcttatggtctcaagtttactaacacttcttttactgatatgtatttacataatcagatattctttaattaaaaaaataaaataaaactaatatgttagtcattaaggaattcataatttcatttccattccttcctctcattttatttcattctcaacaaaagaaaataacaaagtatcatgatagtaaaacataaacatagtttacaatggattattataattctgtttcttgtttgtgggatgtgtcacaggtccgtaaagatatgaagagaatagaaatgtccaaaaggaagattccagaatggttcgactatgttaacgga

SEQ ID NO: 268767 - DNA, 250 bp, Glycine max
atcatacatgtgatcatctgagtggggcccttgcaacatcaaacgctgttccattcttgacagaattaattttccctaagctattttgccttcaagcagggcccatcatcaccacagtcccctcaccgttaggatttgcacatttctctggcctacagaataaattataatttatatattcgcactataaataatcccttagtttagaatgacctgtgcgttcaacaggattcccccagaaaaccttatt

SEQ ID NO: 268768 - DNA, 416 bp, Glycine max
gcagcagcaacctgacccaagaaagcacgattatcttttctcctcaaggccgcccatccctaacaagacccacttcttccaagagaggatatctgcaaaatccgggctgcttcttgctcatagcaacaatgtcttcacacgaaaacccaacattcaagaacaaagcaatgaccttctgcatgttcccacagatgggcctagtaacagacctaatcgccattgccaagtactttgacctatacctagagccaatcttcaccagcgacaccagcttataagcgatgttctcattgaatgaaatgctcagaaacgtgggccctttaatcaagaacttggagatctcatcagactccaacccacattccttgagaaactgcatactacgacgcagtttcctctctatgtaatagaaacaa

SEQ ID NO: 268769 - DNA, 261 bp, Glycine max
cgtgccccaaaatgggtctacttttcacctaacaaatatgtatgatataaccccaatacctccataagtcttccttcaacactgtcagatctatggagcacttcacgtgccacgtagtaggcactgccaacaatgtcattgaggccgtgatctgcatgtttagtagaaatcagtgctggtagtcaaaaaattaataagaggatatcacttgttacaagacaattaatgataactatttatttctaaactggaggcgatcct

SEQ ID NO: 268770 - DNA, 499 bp, Glycine max
tctagagattctatagagagaaatgtccatgttctatagagttttgagagaatttgctgtgtgaagatctgcaaagactgagcttgaagcaagaaccgttctgagagcttgagatgaatttgtgagtggttgtgagatcctagaggtgaaggagacatcctaaccacttttatttttacaatctttcatcttgttcttctctttgttggaaagaaggcttcctggttatggaaagctaaatcctctgttggatcttccctgtaggtacctgatgtaaatatatttctatctatttaatgatgttttgtgtgttctctgtgctatctacttttcactccagtatgcctttaccttgatcacgtagatgcatgctttgttagggtcattcaacagtgaaaactggtatgattctaaagtccttgatagtacagggctaagttgtcgtactatcacgaggaatcggggtgcgataatttaattatgtatgcgtgtcttaatg

SEQ ID NO: 268771 - DNA, 447 bp, Glycine max
  unsure (1)..(447): unsure at all n locations
cgtcccggatccttaagtcacctgcggcatgcaagcttatntaggaattatgggaatttacgttatcattaagggtgtcccggaatcccattgttcaacaaaacggtgggtgtggtatccacctantaggcgagctatgttgcttcaaccttaagcaagaagtggcccagaaacctctagaaggacccagattcaaaaattactatttgcaccccccccattttactaaatacacccccctttaccttttttttggtaattctttttccgtaacgttacgaaactttacgaatttcgtaacgatacctattttctttccgtaagggtaccaatccttacggattatgtatttactcttttttacctttcgaagaagttacggaaactcacggattgcgcaaaaacacctcttttcgacttccgccacattacggaatttcacggatc

SEQ ID NO: 268772 - DNA, 264 bp, Glycine max
  unsure (1)..(264): unsure at all n locations
aattgcaaagatccatgtgcattcaacttaccttggatcatagggaatattaattttgacaacgccatgctatatttangaacctatgtcactgggatgcccattgatattatcaattccctatgtctaagtacgttgcaacctactgacgtgcaactatctaggtatagagatgtgcctatcctgacggtttcatagatgatgtcttaattgagttggagaaatgatcatccctgatggttttatatattgaaatggaggatg

SEQ ID NO: 268773 - DNA, 458 bp, Glycine max
ttaagtcacctgcagcatgcaagcttcacacttgataatggagaacacatgatcattgttatgcaatgacattcatggtgctccgaacaaaagtggagtatggaggattgccttgagggtccgcacttaagcaatcatgaaactgagctccaaactcgaaagtggaggacacatgaacagccctaaacaagaacattcatgtggctctagaaaaggacgagaatggaggattgccttgaggttcctctcttatgcaatcatggaatacagctccaatactcgaaaatggagaacacatgaacaaccctaagagataacattcatgtggctccggaaaaggacgaaaatggaggattgccttgatgttcctctcttaagcaatcatggaatacagctccaatacttcaaaatggaggacacatgaatgacaacccaattcactcactccgctccgagaa

SEQ ID NO: 268774 - DNA, 315 bp, Glycine max
  unsure (1)..(315): unsure at all n locations
caatgttctcacaacatcattcaatatttttcaacgctgtctacgaaaatttggggagcattactctgcatctttctaaaagatgttgttcaacactgtcctctccaagaatagccctttcgccagaaaacatgagctatacatctgtttcatgacctccttcctttggcataagaacagaatgactaaccgcctgaattctgttgtgactctcttttcccttacaaaagatacaaaggactaactgcctgagaatactttgagtcttaccttnccataagcaaaagattcaaaggactaaccacctaagatatc

SEQ ID NO: 268775 - DNA, 437 bp, Glycine max
  unsure (1)..(437): unsure at all n locations
gcagcatgcagcttctcactcacaccggaaccctctttatatcanctgttttgactaaggcacccacccagatggaagcttcctcagttccaactccaaacactactctcccggtcggcaattccaacacaatgaggaacttccctccgaggccatttcaagatttcaccccactccctatgacgtatgaagacctcttgccgtccctcatctccaaccaattggccgtggtaactcccggaaaggtcttccaaccccctttcccaaagtggtatgaccctaacgcgacttgcaaataccatgggggcgccccggtgcattccattgaataatgcttggcctttaaacacaaggtccaacatttgatagatgctggatgactgactntccaagaagatcggcccaatgtgaaaaccaacccgctcgccactcatgga

SEQ ID NO: 268776 - DNA, 417 bp, Glycine max
  unsure (1)..(417): unsure at all n locations
agctnntgatgcaacattggagaggttaatgaatctacgagatgatgcgctccatgagaggttggatcaaatggagaatagagatcataatgaagaagaaaggaggagaagagggaatgatggtgttcctagacaaaaccaaattgatggtattaaactcaacattcctccatttaaaggaaagaatgatccggaggcctacttggagtgggagatgaaaatagagcatgttttctcatgcaacaactatgaggaggaccagaaggtgaagcttgccgccacggagttttccgactatgctcttgtgtggtggaacaagctacaaaaggagagagcaagaaatgaagagccaatggttgatacatggacggagatgaaaaagatcatgaggaagcggtntgtgcctgctatttactc

SEQ ID NO: 268777 - DNA, 435 bp, Glycine max
  unsure (1)..(435): unsure at all n locations
actccatcattatgttttttctcttgcatctcanacaaacaaatcaaacgtaacaagacaattatagttgttgtttgaatacctcacccactcaagtgtatcacacatttatggcttttctctaatgaaacactcttgccttgtaccactctaattccccttgagttcttaggtaattcaagagattatggccacaacaaagaacaattcaccaatatgtgtaaggtaaggctacagagacaaggaaaaggttaaccaagaaaaaggctaacaatgtgtttatgcacaaatgaaggaaataaaattcagaatttaagaattcatgtaacaatccttcatgcaaccaatatattaccttaaagagatttttttttaagttcttcagcatgaccattcccccaatgtttttgttttaatttgctatatgaatccgct

SEQ ID NO: 268778 - DNA, 471 bp, Glycine max
  unsure (1)..(471): unsure at all n locations
atccttttagtcacctgaggcatgcaagcttcaacattcaatttgagcgtcttgtttattacgggactcaatcagacatccgagtaaaaatttattgtcgtttggattggctcaaagattcaacattcaatttcgagcgtctccatatattacgggactcattcagacatccgagttaaaagttattgtagtttgaattagcttagagcttcaacattcaatttcgagcgtctcgatatattacgggactcattcagacttccgagtaaaaagttattgtcgtttgaattagctcagagcttccacaatcaatttcgagcgtctcgatatatgacgggactcaatcagacatccgagtaaaaagttattgtcgtttgaattggctcagagcctcaacattcaatnttgagcgtctcgatatatgacgggactcaatcccacatccgagaaaaaattattgtcgttgaattt

SEQ ID NO: 268779 - DNA, 402 bp, Glycine max
ttcatacgactataactgttacatgaatttctgtttgttcctgccacatatcgagacgcgtcgaattgaatgttgaatctttgaaccaatccaaacgacaataactctttactcggatgtctgattgtgtcccgttatataacgagactctcaatattgaatgctgaagctgtgagctaattcaaacgacaataacttttaactcggatgtctgactgagtcctgtaatacatcgagacgctcgaaattgaatgttgaagctctgagccaattcaaacgacaatatacttttacttggatgtctgattgactctcgtcacatatcgagacgctctaaattgaatgttgaagctctgagccaatgtatacgacaataactttttactcggatgtctgaatgat

SEQ ID NO: 268780 - DNA, 454 bp, Glycine max
  unsure (1)..(454): unsure at all n locations
gatccttaagtcacctgcggcatgcaagcttcatgatgatgaatcaagtttgtttgatgatgacaaaaagcccaaaagaatgatntcaagattgagtcaacaagttcaagatcaagattaatttcaaaattcaagaaaagacatcaagaagaatcaagattcaagagaagatgaattcaagattccaaagaagaaatcaagaagcaacaagtcaagaattcacaagggaagtattgaaaaggatttttcaaaaaccaaacatagcacagttttgttttacaaaagagttttctcaaattatctatttactctctggtaattgatcaccagtttcctgtaatcgattaccagtgataaaatttgatttcaaaaagtttttaacagaaattggaacgttccaaataatttttaaatggcgtaatcgattacaatatattggtaatcgattaccagt

SEQ ID NO: 268781 - DNA, 269 bp, Glycine max
ccattttctataagaaattattgtgatgaaggtctatgtgatataattcctatggaaacagggcacatttggtttattagaccatgttaatttgcaagaaaggcatcacaatggtctcacaatgaaaataccctcacccatggaagcaaaaggtcaaactttgttccttgacaccttcacaagggctggggatcccatacaaataagactcaaacgggatgaagaaaagaatagaataagaaaagaagaacaacccttaatgggttaag

SEQ ID NO: 268782 - DNA, 435 bp, Glycine max
  unsure (1)..(435): unsure at all n locations
gatctctaagccctgagctgcagctttacttatgggcgggctgtctttcttcactttcttgcctcaaccgcaagctttgaccaccgctctttcttcccacgatgcttctctttatatccgcctgagtgggtttatagcctaaaccatacttcccacgatttcctttggcatttatcaggttagtcatgccgccgttgtctttgcctaaacccattccgggttcgtaaccgttccccaacataactcgagccatcattactgctgcatcggacaggcaagcttgcctagagaaggagtccacggaggaaatgcttaccacctcaaaagactgganagcggtttctaatgactcctctgtggcttccacataaggcatagaggatgggcagctcaccaagatgtcttcttcgcctgatacgatgaccagatgccctt

SEQ ID NO: 268783 - DNA, 377 bp, Glycine max
acctctagaaacctcacaatctcttcaaatctcatccaaatttccacaagacagcctcctcttcatgcctcagatgtctctcagctgctccacagccaaaaactctcataaaactcaaatcccccttcagaaatcgtgatttcagcttaaataggaactccaatcggtggacgtgcgcttagcggaagatgagcttcgctatagccagttacacacgctccacctgactgtgaagacggtgcacttaacaagttggcacttgctcagcaactctatacactcattcgttcttcagaatttccatgcgcttaccattatatgggcgcttacgaatgatcacttagccagaaataagcggctaatgagttataaacccg

SEQ ID NO: 268784 - DNA, 403 bp, Glycine max
  unsure (1)..(403): unsure at all n locations
gcaagctcgatgatcagaaagagatatatttgtcattggctatgatgcaagctcaaaaggctacaaatngtacaatccaaacattggaaagacaatagtgagccgagatgtcgagttctatgaagaaagcacatggaattgggaggataataaagacacttatgattttgtcccgtactttgaagaaatagatgaagaagccttgactccaaatgattcaactccagcactttcaccaactccttcaaccaatgaagcctcatcatcttccgaagggagttcaagtgaaaggccaagaagaatgagaaatattcaagaattatatgatgaaactgaagttataatgatctgttttgtctctttgtgacagtgaacccttaaactgtgatgaagcaatgaaaga

SEQ ID NO: 268785 - DNA, 416 bp, Glycine max
gcctaaacaactattgtatcttggtggtttggacttaatgatgatctgaattctctttttcagcttaagaataggtacttcagttgattattgtctgcattggatatcgtctcattttaattcaagaaatatagttgttcgctttttttatatagggaaaaagagtggatctattatctggattgagttatttggattttggataacatgtggagagagactttggattttttcagactataccataatatcttgtatttttcatacaatcaatcatgtttaaatcagataatattattatggatgtaaaaaatcgtttctaatgttaacataattacaacaaaatttagactgagatctttatgactaaaataggcacatttactgactgggttctttggatgactaccattttg

SEQ ID NO: 268786 - DNA, 435 bp, Glycine max
aaacacatatttccacccaaaacagctgaaatgcatagccaagggggttgggatccttgaaactcagcctcctccccctatttataggaaaaatggggaggtgtttgccgcccacaggcttcttgaggaatatttctgagcgcaccccaattactaagttcaccccttttttgtactttacgaaaaagttacaaaagccttacggaagtgtttcagatttgattttcattttttttctcttccctttcaccaatattaagtgaaatatgcttacccaaggttttcggaaattttacggaagcattacggaagccaaggaagccccggaaaccatttttcaatataacgtggaggagcttaaggaacccaacttacaatatgttcctgaagggcctagattcaaatttctttttacacccctatcttgatagttca

SEQ ID NO: 268787 - DNA, 432 bp, Glycine max
cttgagatgaggaagtgtataaggtaaactttctctctttttcgttgactacagagtgtgaccaggagatatgtcgcgagggtcaagagaccttggggacgtcaggtggggtgctattgcccaaaaccaagcttgaccaatcccgacccaacccgggcattgtcagtcaatgagacctgtgatgtacctaaacaagcgagctcctggcagccaacagataaaaggaacaaacaccacaaagcaaggaggcttgtgtggtggctggccagctgtgaactttgtttgatatatgggatatgggctctggtaatcgattaccaaggtgtcgcaacctacccttcggcgggatggcgacgcgagactcgcgggatgcgtgttcacgaatggaatacgcgcggagtcgccaccaacgtttatttgaggaaaacgtca

SEQ ID NO: 268788 - DNA, 387 bp, Glycine max
  unsure (1)..(387): unsure at all n locations
cacctgcagcatgccagctttgacttgtttcatcattagattatatatatgcgaccatggcatgagntttaaaacaatcaataatcaattatcatcatcaatcatctatctttcaatcttctctcaacatcattcaatatctttcattctcttcttcctttgccaaatgaacgaaggactaaccacctgaattcttttgtgtctctcttttcccttacaaaagaatcaaaggactaaccgcctgagaattcttttgattcttcccttccccttaagcaaaaaatttcaaaggactaatcgcctaagaattctttgtcccaacacatttgagggtacatccttttgggtacaagtaaaaggtacatctacttggggattgttatactc

SEQ ID NO: 268789 - DNA, 404 bp, Glycine max
tcctaagtctagagagagtagatacctccttggatatttcacctattacgttgtccaaggagaggtctcttggagttcttcattcctttgggaggtctttaggacgtgcgacagtgatttccttgttctttgaagatccttaaccttggtttcatctttaagtgcaatgtccttatcctaaaagcatgcatttccatcttccaaagcattttcttgaacaagagagttagtttcatcacacacaacatgtacagattcttccacacacaatgttctcctattaaacacgctatatgccttgctttacaatgaataaccaatataaattgcctcatcgactcttgcttcaaatttttcaagagacttttttccattgtttaaaacaaagcaattatatccaaaaa

SEQ ID NO: 268790 - DNA, 408 bp, Glycine max
agctcttactcgagtttgtgctctaagctcatttaatatagcctattctggtgtttattagtggaggttgcctcattgtaatagcgtgatatgatgttgacctgaaataatgtagcttttttctagaatactagtagcaactgtggctatagccaaggcatagatatagataccaaagaacacatgccacgacaataaggcagctctactatttcttgaccctctggggtaccaaaatgttgcaaagccagcacctcgctaattaacattgtagctaacaattagatgcatgaaatgatggaatccaagttctggagaccctgtttggataagcttctttataattactaatacaagaagaaaatatgaaacattaataaattaagattcttcaataaactaaaatta

SEQ ID NO: 268791 - DNA, 434 bp, Glycine max
  unsure (1)..(434): unsure at all n locations
tcaagcattaataaaccatgcacaattaaacttttatttgatactctaangaaaggaacaataatgcatttctaataaaaagggtaaagtactaataaagaagtaacctatacacactacacacttctttaatctatatttttaacatcgggtattcggaacattcaacatcagttttaaatagatgtggaaacaaacatcgataaaagtaggttatttttaatactatttataaaaatcgatgttgaaatatactatacaacatcgattcttctcaaaaccgatgtagcatagtagtagcaaataataaaaaaaaagcatagaacatcacttctaccaaaaccaatgttgtatagtacttacaacaacgatttttagaaaaaaaaccgatgttgtgctatacgacatcgattttggcataactgatattgata

SEQ ID NO: 268792 - DNA, 85 bp, Glycine max
taaaggggaaaaaagaaacacttttggtttacaaaacagcctggaaattactgaaccacttagagtgtccggaaagcacattatg

SEQ ID NO: 268793 - DNA, 443 bp, Glycine max
  unsure (1)..(443): unsure at all n locations
tcgtcccggatccttaagcacctgcggcatgcaagcttgtaggattatggngtactcatcatatgtggtactangtggcggtcgggcgatggtgcaagtcaactctccacatccacaaatcacacatatacccaccatccccagttgcccaccttcactgagctcacgtactcccacgtagcccttatcctcgttcctctcaacaccgggtccccatcaatctctccaagcttccacaacatccaagcaattcaacatcccaaacatcatgaactatcaaaaccaaggaaacagggcagaggcagaaaactctgcccaacacaaaccaatatcacaaccttttctcacttagagaccccagtaacatttccttcgttccaattcgttcaccgttggatcgaactcgaaaatttactgggagtccctagtgcataagtctacat

SEQ ID NO: 268794 - DNA, 456 bp, Glycine max
  unsure (1)..(456): unsure at all n locations
taaaaatagcactgacaactcaattcagcctggtttcattttcatccaacatagaaccataaccatgattgcataaataaattggtgatgataaaaattaaaattaacttgaaacttcattgaatgcaccaaaaccattttagcatgttagaaagatatgattataagaacaatgtggtagttgcatgagttaataaaccattgaatgtggacactntaaagcattttgtaaagaggtggtgtcaagccttgcatgtgtgaacaaaccgttgagagaagaagcatttgagaagagaaaacttctttttcaattttttgttagcttccgtgtgaaatgaaaattccccaacctaatataaataaaacacaccagaagggggttaaataatgtgtatatgtaatacttaaaaacttctagcaaagatggtgacttccttaaaatagatttcacaaaga

SEQ ID NO: 268795 - DNA, 431 bp, Glycine max
tggccttggaccaactttatgaatgatgatgaccactgcttacgtattcataaacctaaggagataagttctgatggttgataaatagttaaacttgacatgtttatgtatcactactagaaataatatttactaagtcagttaaatagggcatttcatgatggttttgaactgttgtaaaaggtgatgtcgaaaaatggcaaaaaaaataatgacggtctcgataaccgtcttagtatactcaactttctaagacggttattccaataaccgtcttagtatgtctttggaatctaagtataaccgtcttagaaggttaaagatactaagacggttattggaataaccatcttagtatgtctttgatgtcagtgtctttctacgacggttatactgataaccatatattagtatgtatcctattctaagat

SEQ ID NO: 268796 - DNA, 310 bp, Glycine max
cttttaacttatatgcttaataactcgaacatttctttacaagaatggcaatttattgtctatggatgccaactgcattctagaactgactatcaagtggagaactttcttctactaatatcttgacgctctaatataaaaagggcttccaataaattaacctggtttattgaagtaatatatagttgtaattttgtataacagaaattagctttagaggttcaaattatgtttcttcagttctgaactataaatgcgattattcaaagaaactaaattcggagctatttgcttatgctgcaatcactca

SEQ ID NO: 268797 - DNA, 482 bp, Glycine max
gtcacctgcggcatgcaagcttctacaattagcataactagaagcatgtgtttgcagaaatggctggcattaataatattgtcagctatcccagtgacattgctctaatgcaagacagccacctttgtcatcacattgctttaatcttcacagattcaatagtctctcaatcaacaacaggaagtaaatatgatattccatggaacaataaactgatgtatatgaaaacacggtgcatgcataatatttcaaagcggtatgtatcacgaaaatgtttgcaccctgtaggaatctataacaaaacatcaactttttgatgttaccactttaccaggaaacttaacgattcaattaaaattcaatatcaaacctaaatagaccaagcattccatcctccacttaaaatttccaagcagtgtgcggaaggatagtatttccaccctctaaagaaaagagtttaacagtaatatgtgccattacta

SEQ ID NO: 268798 - DNA, 396 bp, Glycine max
  unsure (1)..(396): unsure at all n locations
accgaggctgcagcttnttgtttgtgttgccaaaaatttactatgtatgttggctaagggtcttcgcgcgagctcaaccgaggatgggtttcgagcgacataggcatgttctcatgcactcagccaagaaaacattagcccacgtcgtaaagaaaagaaaaacattaatcaccgatattgatcggaaaagatgctggttgacgtctgccaggaaagatgaccgatcgaggcctgatgataaatcaatcaccgtgtgacgccgagcgagcatttcctaagggacatcatccaaatattatccagggattggattgaaaaaacaatatctgtataccagcgatgtgtaggcccgaatgacatatttcaaccgacattgcacaggatttattcaaacgc

SEQ ID NO: 268799 - DNA, 282 bp, Glycine max
ctctctagcgtactgggccaccttacagtttgaccttgaccagatatgtcacaatccgctaaagaggtaggtctttaccatgtcacattgcttctcatactatgcgcatgtttgaaaatcctttacaaaattatgtttgaagcaaaagtaatttcgtaaatggatcagaattcttactttcgcatttattttgcttttctcacacggatatatattagaatgcctgtcacaacatatccaattacaaaccatacatgcactatgtttctttcatactaaaac

SEQ ID NO: 268800 - DNA, 455 bp, Glycine max
  unsure (1)..(455): unsure at all n locations
agtcacctgangcacgccagcttacttaaggaaggagaatttttttctaaatttgtgggannncgagagctggatctgctagatgatgactacataaaatccagagagtctttatggacattgctcaaatttatataggagtcgattaagtttttaatcatcaaattatatgaattccgagttggtgggctttacactatttattatgaatgtcatcataccatattgaatcatatatgaggaggatagatnctcttcttagggtttataagatcatatgtgtggccaacatgacactttaagaactacaacttctttagagaccagattcttaataacatattgttgaaactaggacttaaaattttgaggcctacaaacataactaaacccttataaattaagaatgttttcagcctatgattgaatggcttcattacatagtacttttcttc

SEQ ID NO: 268801 - DNA, 451 bp, Glycine max
  unsure (1)..(451): unsure at all n locations
agctttgtataatctgagatacttttcttttattctaccagagcgaatttataaaaccatctttcttaaataattgaggttcataatcattagntttttcttaaatgatatatgaacagtgcagcttttttgtcttggttataattgcattgatccataccacttggttacgagcttgcttagaaatttcaataattatgagctactggatattattgtgtaatttttttgaaactgattgcgaggacactgtcagcaactcagcatatattcttcttcttttttcattaactatcagcatatattctatatttccatattttagtggacgatatataatagtgtgatattttgattcatagtcttctatgtgtcagtgtatatattatacatgccccggccttttctatctccgtgaccatattctacgtaattacaatatatattttat

SEQ ID NO: 268802 - DNA, 373 bp, Glycine max
tgatgccctatccagtggtgttggtcaactttcgaagagcggagatagaggttcgagattgtgttgatctggaaacaaaaaccagtgataaaagtatccttactctgtatttgggcagcaacgccccttacacctacaacatcttgctcaaacaaccatgagttaccatatttggaacgattgttttgatgacccatttgaaggtgaaattcccgctgaatgatgggtctgtcagtgttatcactgtgaaccatgaaattgctaacaagtgctctcaagaaagccttaaatccatgtaaggactttacgaactgaccaagcaattcgtggtcctctttgggaatctagatccctgtagagattcatctattga

SEQ ID NO: 268803 - DNA, 267 bp, Glycine max
tcacgaacaagaggctggcggccacaatatagagctagaaaaaaagaaatattgagaaacttatcgatttttcacaagtgataattacttgtttgttagaccaaaataacaactggtatgacttttgttggctaaataataatttgtttttataaaaaaatgcattctaagatggttctctgaaaaaccgtgttaaaatgtacaatcatctctaaaaccttctttaaaaggtgtcactagaacccgatgtaaaatcatctttttgat

SEQ ID NO: 268804 - DNA, 106 bp, Glycine max
  unsure (1)..(106): unsure at all n locations
gcacaatacaagccccaaacgaaaaaccaggagcgcaccctaaccgcaaggaatntgggaagcccggaacggacgagggaacaagcgagagcgggggggggggggg

SEQ ID NO: 268805 - DNA, 432 bp, Glycine max
  unsure (1)..(432): unsure at all n locations
gctgcagcttactagcaagaatatcctagattatattcttcatcngacntaacatcaaactttcctaagatttcttttccatggtntaatacannaacattacaaccaaaaacatgaagatgtgagatggttggttttctaccattgaacagttcagatggngttttctttaaaatgggtcttattaaagccctattcatgatatatcatgcagtattaacggcttcagcccaaaaatattgtggaagaggagtatcatttaataagggtctagcaatttcttccaaagacctatttttcctttgaacaactccattntgttgaggggttctaggtgcagaatagttatgttcaatgccatgcttttcacaaaataaatcaaattctttattttcaaactcaccccatgatcattcctaatagatataattt

SEQ ID NO: 268806 - DNA, 406 bp, Glycine max
  unsure (1)..(406): unsure at all n locations
tcattggtgtattttgatctccttttggttctcttaattgtgggaatgtgctcaaatatgtggggcaatttaggtttgttttctcgcttgattaacttgaattgggggtttgtatgagatggccctacgcctataatgcattttgaagtaatggggcatgccacattgtccccgttctcttgctattgatgcctaaacgcgcgcccaccaagtgttcggtgaaatgcctcaatggcattaacgcgtgattttntgttgggaaacaagccttggggcaatttggtttgcacatatttttggggacatgcatgtcattttgaaagagctatantaattgccccacatatatcctattcctatatactcgaaatttatgcaaaaagagcacaaatggaggtgcatgttg

SEQ ID NO: 268807 - DNA, 384 bp, Glycine max
  unsure (1)..(384): unsure at all n locations
agcttgagcncaaagcaccatccttatcttttcatatccngagccctaaatagtttttatttttctacatacaaaagcaaagaagcaaagcatcttctcttctcgtacacatccacattgtcttgctttttcccttgcaagtttcaaccttttccttgctgaagagtttagctccctccttcttccccgctntataagtccattgatgcactattaaaactgtcggggtatcttctttctgcataaaattcacttaagtttggaatctctacgtaatccaacgattaatgtggtcaaaatgggtcaagaattccaactttttggttcttgatggcccgaaatttatgcacctgttcatattgtgagatgcatgtgaaacccatg

SEQ ID NO: 268808 - DNA, 345 bp, Glycine max
gaatcaaagagttgtgcgatattcttacatgttaccttaattatttaccatgctaacgtctgtgtgggaaacctagcttgggaaagttagatttccaccccccccatggtaatgtttttgttgaaacctagctaataactttgccaataaacattctttcctaggaatgctatacttttaaaagacatactacacatgaaaactaagattttcaacctaagatctctacgaaaataaaaatttatcccctatgaaactcgcttaacggtttaggcattacctttgtagcacgctttcaataacggagagttctcactaattacttagattgaatatgacaatgtc

SEQ ID NO: 268809 - DNA, 427 bp, Glycine max
  unsure (1)..(427): unsure at all n locations
agctttgagaatattgttgcttccattgttcaatatgagccacattngcccattcctagctatcatgactgatgcaagctccattggagctcgtaggcctangatcttcttcatcaatggattcctttgcttcttggaagatgaatggcagcggaatggagaacgaagaaagagaggagatgcctcttcaaggagaagatgagtctataagaagctcaccaccatatgaggccatggataagagcttggaggaagaaagagatgaatgaagggagagggagagaagagcacgaaattttgtgctccaaatgaactttgaaattgaagtttatattcaaagatcaaagctcaaaaaatgacacacatgaccttatttatagctatgtgtccacacaattggagggaaatcaatttccttcgatttgaa

SEQ ID NO: 268810 - DNA, 434 bp, Glycine max
tcagctttcacttctatgcaggaatttgttttcctgtcatacaacggagggggatctatgtgcaagaatgcaacaccctcttgtattaactgttgagggtagatttatctttacatcattaatgttggaccaattaattatgcatatattgcttacttttctgcagcttaattatgtttttatcactgatcctttacttatttacaaatttttgtgatgtagttaacacattttatcacctaatttttcaaatttggcagattttgttactcaacctaattacttttgcatattttgatgccatattttcaaaatttcatgcaatattccctttatattataattaaacatatttgttctgaatatcggatggaaaatgcttacaattgtaaagttggatgataaatgtgaaaaaatagctgatgactaataca

SEQ ID NO: 268811 - DNA, 479 bp, Glycine max
  unsure (1)..(479): unsure at all n locations
gcaagctttcatatgcacaaacatgtgnagcatctttctattattttctatatactttngaataagtactactagaaaatagactttntacatcggctattaacgacttttaacatcgattattaaccgatgttaaaactatcgacgttaaagtatcaacattaacattggttgtttaaaaaccaatgttgttttcttctcaccaacatcgattgtttaaaaatcgatgttatttcctaaaatccgatgttgttttatggtttatttttaaataacctatttattttttaattatcaacctgtaattaattcatataacaacttatcattcaatgttgtaaaaaaacatataaaatttaccatgcaccaaaggttataaacaaagcacatcaatatatcatgcaccaatgtttctcacaaaataacttataaacaaaaatttaccaatggtaatactagaggagaatgttcttaatcac

SEQ ID NO: 268812 - DNA, 452 bp, Glycine max
ttggagtttccaagggccaattcgtcctcttctttatttagtcttcttctggcttcaattcatcagagggctttccttctgtgtccagcatcttgggatgttcccagcctttgatgacagctttccaagttctgctatccagtgatttgaggaaggccaccattctcgctttccagtattcatagttgcttccatcaagaattggtggtctgttcactggtcctccttctttctccatgttcatcagaatttatctccccagatctcactctgtgatttcgagtgttggctctgataccaattgaaattctgataccatgggacagatgtcgtacaggatgtcacgacatcacgcttcagaacatgcagtttatgtgtgtccgtatgaacagattatacaagtaaataacacaagagaattgtttacccagttcggtgcaacctcacctaca

SEQ ID NO: 268813 - DNA, 460 bp, Glycine max
  unsure (1)..(460): unsure at all n locations
agcttaaaggatcactcaaaccgcgggtctctctttttctacacttcgaagaagccgtcagggcctctccctcctgattcaagtccaacccctaaaatcattttagcacacagacactgctagtgaattatacaatacccacgacctcacactcgtgtcttatacacgtacaacatattgcgctacaatgtaacactggtttctaaataggaacctacactttctgtttaacactgtgcatttacacttttctcaagataatattggtcgggttatggtacaattcacagtttacaacacaaataatgtcacatcaagagttaatcgcacacttatttccaaccaaaactcattcacaatttcacatctcataatgtcacaatccaccatcacatgtnttcacgtatttcacaacttcacacctatattactttacactctgtactccatctaataacaa

SEQ ID NO: 268814 - DNA, 429 bp, Glycine max
  unsure (1)..(429): unsure at all n locations
tctattatcncaacgaagcaaggccacatgtctccatttgagtggagcaaaaagggcccactttcccttttgactgtgacccatactcagccacaaaagtggggaaaatctgaccttagaaacgctaaaatcctgcctcggtttgcgtgccatttctctagttccagctcctcgcgtttctctgcgtccgtcggggccagttttcgaaagcaagcaatatatatatcaaaacgcttataataaaaccccgagcgtggttcagaggttggttctgtaaattctaagtcacacgcaaaacgatgattttagactaattacttaagaattaacccataacctcccaagtatggagttctcttccttaatagcctaacccgcgtatcttgcccccactactcctatttctaccaataacatatatatgcatat

SEQ ID NO: 268815 - DNA, 270 bp, Glycine max
cctaactctgtatagctctttttcgcactcccctgcgagtaaaatacatgacttattgttgcatgctgccgtgaagacttttttggccaattggcggcatccagactctgttctcactggatctcaaatatccatcccttttccgaccgattatgggcgatttctttactgtggtggcctattcacaatcaacattctttaaaaccaactactctgtttcttctgtgttctggcttcaaactctctaaaaaagtcaaaacaacaaggact

SEQ ID NO: 268816 - DNA, 434 bp, Glycine max
  unsure (1)..(434): unsure at all n locations
agctntcaactgaatntacaactttccatttgatttcataaagctgtaatcgattacaatgttttggtaatcaattaccagtgtgcttgaacgttgaaattcaaatgtgaagagtcacattctttcacaaaaaagctttgtgtaatcgattacactgatttggtaattgattactagtgatcgtttctgaatatatctaaagatgtaactcttcaaatggtttttgactttttcaaattggttttaagtttttctaaaagtcataactcttctaaatggttctcttgaccagacatgaagagtctataaaagcaaggctttgttttgcattttatcaatcaatctatacatccatcttttccaattcattctatacacaaccagttttttcacattgatttctgagtctctttgaacttcttcttcttcttcct

SEQ ID NO: 268817 - DNA, 443 bp, Glycine max
atcatctctcatagtctttagatttgtgttctctttcttccttgcgtccggtctcttagccacttatgatagccgccgatgatcccattactgctttccctaagctctctgtcctttcttcacaccgcatcccatgccttgcgaactacttggagtaccctcgcgttgtggtcactgaaaccccgtgcgatgaaaggcgtgatgctttcgtctgatggcactcctctcatggggtagccaagctgtcttatggcgaggacgggattataattaatacaaccccttgttccatcaagggaacatttggacatccttcgcatgaagatagaatcctgattcttccttccttctagcgagggaaccaattaacagacgcccctccatgttagccatgagttggtcccaattcgcctttcctttttcgacgcacgagcggtgacctt

SEQ ID NO: 268818 - DNA, 475 bp, Glycine max
agcttgtctcagcgtttatgcgttacggttaccaacatgctagctatcatcgccaagtaccaagaagagttaggtctagccacagcccacgagcatagaatcgcggatgagtatgcccaagtatacgcggaaaaagaggctagaggaagggtgatcgactctttacaccaagaggcaaccatgtggatggatcggtttgcccttaccttgaacgggagtcaagaacttccccgattgttagccaaggccaaggcgatggcagacacctactccgcccccgaagagattcatgggcttctcggctattgtcagcatatgatagacttaatggcccacataattagaaatcgttaggaaacttggatggtctcttagaccttgactagatatgacttcctttttgaaatataatgagttgtgcccatgcttctactccaaaaagcttgtgcaaattaaatcactcctacatctcatc

SEQ ID NO: 268819 - DNA, 295 bp, Glycine max
atcaatggggctaaacacaccaaatgattataatgatggatggctcatattctcacaaaggtaaaatcatcactttcaaattgagctttcaaaactatcatgacatgtagagaagaatcaagaatttcaagtcacaaaatgtcaagaacttttattttcaaaacaattacccatttcttgaacatatcctataattcaaagaaaaacatgcaaagtcgtacgtgcacacaaaattgacccataatattaaactgaaaatccgacgatactaacaacatttactaattaacacaac

SEQ ID NO: 268820 - DNA, 407 bp, Glycine max
  unsure (1)..(407): unsure at all n locations
gctgcattgcagtacatcaatttcctccaacgcataacctcacccttatttttcctaagttccatgtagatgtctgtcataccaaaatctctctttcatcatcatgtcttcccacttcccttggatagatgacactttntctctgttatttaaatcactttcattatccaagtactatctggtttcatattctcctccatcacgttcttatttttgaaatagtacgtatgaacccaacggacccataaactatctgccttcctgcaaagattctagagaagttaaagcatagtgactgtattccagatttccaagtcaataatattcacacccccatttttagttggtttacaaacatctctccatgcatttgggcatttctactaggctccgcactacctgttcac

SEQ ID NO: 268821 - DNA, 273 bp, Glycine max
  unsure (1)..(273): unsure at all n locations
aaaaaagcagtctacaaatgaaataaaaaccatgaataggtgaagcatcggctaaactaaaattgaacccagaattttgacgtatgatttngacgttcaatcttataaataaatacaatacttaaataagaaaattctattaaaaataaccaggtaaattcttaacataaactaataatcgatgaagtcaaaatactttgtagacaaacggacatgaataggtggaattctctgttaactgtgtgcaacctgatgaaaagcacaaaccacaca

SEQ ID NO: 268822 - DNA, 315 bp, Glycine max
cgccttaacgggctcttttacttttatcgggtaaaatgaacctttcaaaagtttaaaatcaaccctacgtgtaactttcttccttttaagaactacgtaggtctgaattcctcatcgcacttgaggatacatatgagcaagggccacgctcttgtcgaccccaaaaaataaaaaaaacataaaaagggaaaataaaataaatatcaaagtcatgattttgcacactcgattaaaggcggccatctcttgtgatggatgcgtggggtgctaataccttccccgctcgtaacaactcccgaacctttattcttaaaa

SEQ ID NO: 268823 - DNA, 322 bp, Glycine max
tcaatggagcttacatcattggccgaggatatattagttttactgttatcagaagatcacacatgtgggctaaaagaagttggttaagaaccaaattggagatatatatgagcaagtgtggtgatgccaattttcaaaaggacaggtctctaattatgagtgggcttggtgctgataaaaagtaaagtcgaaaggtgattatatgaaggctcggatgagggggtaactacttactaaggcctttgattttcttcataaagtttaaagggttaagcgtctttcgttatatcggacgtagaaatatgaattttggttacaccaa

SEQ ID NO: 268824 - DNA, 376 bp, Glycine max
gggagaagtgaagaagaaaggggttcagccccttaggcacttttctctctctcaaaattgctgaggaaatatatttccgtgaagaatatccaagccgtggtgcttccgtaaagtttccgtgagtaattatgtgaagattctcgaccgttcttcaagattcatcgttcgttcttcgttttcttcagtcttcaacgggtaactacctcataccaagcttttcaattcattctatgtacccgaggtggtccacattctgtttcggaattttattctcgcttcatttgattttatacccccttttgacgtgcttaagccatttatttaagtcatttctcgcttaacctacaaataaaataagatttcatcgatcatttaa

SEQ ID NO: 268825 - DNA, 416 bp, Glycine max
tgaagaggatgctttaatggaggaaattattttagattgtgggagcatgaaattgaaggaataaaagaaggaaagaagtgggggagcacgaaattgaaggaataaaagaaggaaagaagtggaactctgaagtgtatctcataagactttcattcatcaaagttacaacaagtgttacacatgcttctatttatagactaggtagcttccttgagaagctttcttaagaaaacttgcttgagaagctttcttaagaaaacttacttgagaagtttctttgagaaaacttccttgagaagctagagtttagctacacacacccatctaaaaactaagctcacctccttgagaagcttccttgagaagctagagcttaactacacacacccatctaaaaactaagctcacctccttga

SEQ ID NO: 268826 - DNA, 352 bp, Glycine max
tcccaaggaactcataagactaacaacatcagatagttggagacccaattggtggataggacaaagattgtggcttttggtcttcaattgctgtcaaaaactacaaaaaattgagaatcttcactttcgaaaggtcacaacgtgaaattaagagaaccaaaaaaaataaaacattgtcaatcatgctaaatacccaattgagcaattggataaaagcttgttgcttttggccttaaattgtgtttgggaacaagaaaatatgattcttttatttaattgaaaccaaataattggaacatgaaacggcgcgttttggtgtgtttgttggttccatgttggtgctctgctatat

SEQ ID NO: 268827 - DNA, 405 bp, Glycine max
aaactattgagaacaacaaacatatataattttaaaaataaattgttaaatagaaaaatcaaaattagtattttttattctttgagagaaataaactaattaagagattatatatcacttttaaggatatcatagtatattccaatttaatgaatagaagtagacatgtaaatgaatcgattatgacgttaattcaagatttaatagttcaatcactatggtcgaactgagatcaaactaggattaataaaacaataattaaataatatacatatgaaataatattaaaaacacgatatcttaactgtataatactaaaaactaaatgaaacatagtcttatagggtcttaacatgtgaagtacaattcatagggtaaatcaaatatattataatactaatagtc

SEQ ID NO: 268828 - DNA, 462 bp, Glycine max
atgaagcttatcattgtagctgagctgcctctctatattgcatgttaatgaactgagatgaactattcagctatttgaatgaggctttcgcaacagataatgaagcaaaaggataaaatgtggcgatttcctatctatcttcaactatataccctaaccatgtctcaaatttgaagtaaatcataaactgaatagacaacaacaacgccaccctctatcaagtcatacataaaaacacaaaaaacaagacataaacacaacaaaaaataaaagtagtccttgaaaattggttagtgtagggtaggcaacacagatcctgagatccaagagagaatagatctcaggggatgaaggcacaagagaaaacctggtgaggcaatctcaatgcctcatatttagagaagcacatgtcatcaaggtcctcactggtgcaccacctgcactttgagttctctgagcact

SEQ ID NO: 268829 - DNA, 214 bp, Glycine max
aaatttcaatgaaaatgacaaatctttcttgatttccatgaaaacattctccacaccatttggctgtagagattacagttcactaagatttaacttattatgggctgctggcatatctgtatatccaaaacaaattgtgtgtcctttgaaatgatacaatattgcatgactaaagcaggacttcatactttattttctgcaattattgtacact

SEQ ID NO: 268830 - DNA, 470 bp, Glycine max
  unsure (1)..(470): unsure at all n locations
tgcagcttgcaaacttatatattgagttttttnctgntatgcacaatnctatatagngtcattgtgtggtctagaaattgagttttatttgattgtataataaaacttgcaggcaacgattaaacaaccagttgtcaagaacatgatgaaagccttgtactttcagtttaccgttggagttctaccattgtaccttgttgcctttacaggatactgggcttatgggtcttccacagaagtgtatttgctgaatagtgtgaatggtgcagtttgggtgaaggctttggctaatatcacagcatttcttcaatctgtcattgcattacatgtacatacatatacatttaaactagaattctccctactcttgaatgtattacttgaattatttccttggcttaacattaataataacaactccggttcttgttctactatatctttgaagtacaatgacgagttttggatac

SEQ ID NO: 268831 - DNA, 469 bp, Glycine max
  unsure (1)..(469): unsure at all n locations
gcttccacaacatncaagcaattcaacatcccattcatcatgatatatcaaaaccaaggagaatagggcagaggcagaaaactctgcccaacacaaaccaatatcacaacttttctcacttaaataccccagtaacattctcttcgttccaattcgttaaccattggatcgactcgaaaattttactggaagtctctagcacataagtctacattgagaccgttgggatctgctagaaaacatccagaacccaatctgtactactctttccacaaccagcaaatacacaacattttatgcacaaagccaaaattctgctgcacatatttgacagcaaaattctgcataaagtgcagattntcgaaatcacatttgccctcatccaattgttcccaattgaatcctacaagtnctaaatcatgtatcaatcatgtctataccatggacaagcttcagaccaaagcaactc

SEQ ID NO: 268832 - DNA, 430 bp, Glycine max
tcactcgcgcattgtaatctctaactttcgttctttctttctttacccactcctcacgtttggttgtttatggaaaaacaccataacttaacgcgccacaaggcatccctatcgcaccatatccaaatctataacgatgggtgatcaagaggagacacaggaacagatgaaagccgacatgtcggctctgaaagaacagatggcttccatgatggatgccatgttaggaatgacgcagctcatggagaaaaacgtggccaccgctgccgctatcagttcggctgccgaagcagacccaactctcttgtgaactgcgcaccatccttcctcaaacatattatgacggggaagggacacacttgggcacgattgcaaccctcacctgggatacaaccgagcggcttacccttatggattgccgcccaactac

SEQ ID NO: 268833 - DNA, 468 bp, Glycine max
  unsure (1)..(468): unsure at all n locations
tcacctgcggcatgcaagcttgtagaccataattaaatatacctattgctttaaanaagaaaaggccatatatatatagagagagaggaaagggtctgcttcaattttgatatgtttaggcaaaaaataatgaataaacaggataagaaaatataattaataacttgactcattaaaaatgctatagaaaacatatattggtttcatcaagatttaatccttcaaagatgaacttgagaaaacttgcctaccttttcttagtgtaatggagggaagaaagagatacaacaacaacagtgcgttagggaagagagtgctttgttagtttctatttacaagtgagtttggtattgaaaatttgcaaggaaaatagcaatgtgccccaatttatggttctttttgtagaatttgatatattttctttattgggtgaatttatagaatagaaaactctattttgaacttaat

SEQ ID NO: 268834 - DNA, 385 bp, Glycine max
taagctagcgctatgaatagatgggaatgaatacaaacgccgattgttgtttttttagcatgattcgggtaaaggcctgtgatatggtgtattgagaacttaacatacaagaaattgagtgggccagtctcaaatgagcacttgcaagcgttagaaattaatagatacctgactcacacacacactcacacaaagcaagcataatatgatgtaatttgaatacctccttgttttcttcttatgcttgtaccgcaataatgcagaatcattgtattggcttggtaactcacatgctgcagcttggggagtagttgatagggtttcagacttgagagaaatggatggtttccctccattgtcaccataggtgtgagtttgcacaacc

SEQ ID NO: 268835 - DNA, 432 bp, Glycine max
  unsure (1)..(432): unsure at all n locations
agtcacctgcggcatgcaagcttctaaggaagctacctagtctattaatagaagcatgtgtttcatcttgttgaaccttgatgaatgagagtcttgtgagacatacttcaaagttccacttctctacctcttttattccttcaattttgtgctcccccctctctctttctctccctctttcttttcctccattgaagcatcctctccaagcttcttatccaaggctcatcttggtggggaagctccttcttccatggcttattccctagtggatggcgcctcctctcacctcttctcctttgtcttccgctgcatctccatggtggaanatcaccattaaaggacctcattgaagctcaaagatccagcctncatagaagccccacaagcaagcttccatcaagtggtaatcagagcacaagagcttcaact

SEQ ID NO: 268836 - DNA, 481 bp, Glycine max
accttataatactcaacctaagagcattcctttctttttcttatcattctcctttttttgattcaatctcatcaattccatttcatgttcctataactgtccaaacgaagtagcaagagacatgttagaaagatctcttgatttattaatggttgttaccttgggttgccattccttgcttaagcatctcaaactttattgataagatcttcatttggaaagatgtttcctaatgatgcaagatgattaattatgtgtgtgaatctcttttgcatgtcctgtatggtttcattatgattcattctcaataattcatattcatgagttaaagtatttatcctatatcttttcacatatgttgacccttcataggttatgttggatattccctatggatacatcttggtccactatttcttcgttaacaatattcaacggatatctggtttgccgtaaacgcaccgatcgtcaatattaaaat

SEQ ID NO: 268837 - DNA, 409 bp, Glycine max
  unsure (1)..(409): unsure at all n locations
caagcttttctatggntactctgttattgttttcaagcattanagagaaggaggagggattggagcctccatttcactctctctgtgcaagggatatttctcttactgcatacattattttgcaaatcccaacggtggttatgtgtggaaacaagtttctaacctggtgttcaaattttacgataatccaacggttaacgagtccaacatcatagctttaatgggacaagttttggtgtatgtgggaaaaatagagcactgtgcgagggacattgctctcagcacatacattattttgaaaatcccaatggtggggatgtgagaaaatgatgtctgaacctgtgttcaaatatcacgatgatccaacggttaacgagtccgggattaaatttcactgggataagtctac

SEQ ID NO: 268838 - DNA, 245 bp, Glycine max
  unsure (1)..(245): unsure at all n locations
tcatcntcgagaaagtcattatatagacattaaagtgtaactacagttcaatgtcttatatttcttatacaatcatgacaaaatttgcataaataaaataattgttgtaaagccccacggctacgaattttatcgaaaaacttgcttaaactatattcccaataactaattacttttgccatgcatattacatgtgtactcttattgagaacttgactgataattatttttatattgtaaatgac

SEQ ID NO: 268839 - DNA, 300 bp, Glycine max
acctgaggcatgcaagctttgggagcagaggaagactttatttctgtatttttattcaatcgggactagaccttgttgtggaattctatatgtgaggcttatattgtgaccaatttaaacattgtttcgggtgaaacaagatcttttcacatgtatgtcctataatcggtacaaatagttatgtttgaagtactagcgattctatagacatatgttgttgggaaaaaatcttaggatattatctttaaagaatacttttcggacagtatctatttaattaaccagcgccttttattactt

SEQ ID NO: 268840 - DNA, 403 bp, Glycine max
caacacagacagattttttttacaatttgaacgaaaggctcaccacctggcgtacgccctacttacctcccttatccgcactgttcgtcaactcattctgaatacccatggatactcgaggaaggtggaatatataatggccctaccggtaaagtgcatataactacaaacgtggtaagacacaattagacattatttcagtatctccatggaacatctgcagatgatatcacgtaggttcaagctgtcattgaaaaatatttcccttatcaatcgtagaaagggtttacaataatggttcagactgctttgcgatggtttcaccaaggtactagaggtatgaactaccgcataacatctgcaattgcattcactaatttaaataatatcacgaacacgactc

SEQ ID NO: 268841 - DNA, 435 bp, Glycine max
cctcttgtacgcacaggaataggattttagcttctagtgcaagcttagggtccttgatccacctatcaggatgccacttcttttaatccaaaagaacaacacatatgcaccaattaattagaacccttgttaaataaatagtagtaatcataataataataataaagttatatatagtacaatgtttaagtgcagggaataaatatggaaataccagagccatcttacgataagcgcatcgaatttcgtcgtcggtgcaatgtttgacaatcccaagctctgaataataacaaacggcaccgttggactcgacggtgcccaacatatttgcaacaaggaaaatcaaaatgttctcgctatttcagttacgagtcaccagatggaagagatataatgttatgggaggaaccttttgatgcataacaactatataat

SEQ ID NO: 268842 - DNA, 369 bp, Glycine max
agcttatatgtaatcagccattttatttgtttggttcctattaagaaagactagcctttggaagattcaattatttgttatacgtggacgggttggcattccaatcctcaaaagattaacaaatctcgaattacaagtttccgcgacaatcattggcgcataaattagaatacatggatggcatatttctaaaccaaattatatttccccattccaactaaggtctaaagctctttttgtgtgtttgtttctcgtaatgaacaccttctatacggaaagaacataataatagtacacgttcggattggaacctctcttctcatctgcaatggcaagataagaattaaatgacaatccttaatcagctga

SEQ ID NO: 268843 - DNA, 203 bp, Glycine max
taagagtgattacccacggctttaaatgcttgcagtgaaaaaaagactactttagctaattccgtcaaactggactgtttatcgctataagatgaccagtggaacatgcagcaagtagatacatggcagtccagaacttgaaaaggtaactataaccgaataattaacggattgtgagaatcttcatttatttcgactgggag

SEQ ID NO: 268844 - DNA, 444 bp, Glycine max
  unsure (1)..(444): unsure at all n locations
cttaagtcacctgcggcatgcaagctttntggtcttaaataaaaggtgttttctctntttctattattntattcaagctctgccacatgtccctatttgattggagcaaaaagggcccactttctctttttgactgtgacccatactcagtcacaaaagtgagaaaaatttgacctttgaaacgctacaatcctgcctcggtttgcgtgccgcttctctgattccagtttctcgcgtttctttgcgtccgtcggggccagttttcgaaagcaagcaatatatatatcaaaacgctcagaataaaaccccgagcgtggttcagaggttggtttcgttaaattctaagttgcacgcaaaacgatgatttttaaactaattaattaagaattaacccataacctctcagttatggatttctctctcttatatagtctaacccgcgta

SEQ ID NO: 268845 - DNA, 184 bp, Glycine max
tcagcttcaaacctattacaagaaaaatgacctattcctacagacaaaaactgtcactataaataaaatatccgtaggtatatgtatgatagactttggtctacggacgttttttccgtcaactttgagcgacatataatgacggctaattgcctgtcactataggttttacctactatgtata

SEQ ID NO: 268846 - DNA, 467 bp, Glycine max
  unsure (1)..(467): unsure at all n locations
tgcaagcttggagaggatgtcttttggaggttattaaagagggagagaaagagagatgggggagcacgaaattgaaggaagaaaaagggagagaagttgaactttgagttgtgtgtcacaagactctcattcatcaaagttacaataagtgttacacatgcttctatttatagactaggtagcttccttgagaagctttcttgagaaaacttccttgagaagcttctttgagaaaacttccttgagaagctagagcttagctacacacacccttctcataactaagctcacctccttgagaagcttccttaagaagattcctaaagaagcttgagcttagctacacatacctctctaatagctaagctcacctccttgagatgagaagctagagcttagctacacacccnctattatagctaagctcacccgcatgacaataaaacatgaaaatacaaaaaacaagt

SEQ ID NO: 268847 - DNA, 474 bp, Glycine max
  unsure (1)..(474): unsure at all n locations
ttaaatactaagcttatcattaataatctcggaaataatttactttacctctctgnngagaggacttaatagtgtgttaatcaaagataaatcattttgtcagcatttatcacaaagcatactgcatatgtatgttgagtagtccactaataagaaaaattagttctgataaagacaagtttcatcattaagtgattgaataagataaactttcaaaacagattttcaaacaagtactcagtatgagaagaatgataaaaaaatgctacgagaatacctaatatacctaataaatagataaacaaattaacaaatgttcatttcactaccctaaattaatttttttaacatctacagcgggaatgagatgacgatgatgacccaccatttccattcattctttctcccatcaaccgaacaacttctgttagggtgtgaaattcccaaatccctccacatagtcttatggctcaa

SEQ ID NO: 268848 - DNA, 337 bp, Glycine max
  unsure (1)..(337): unsure at all n locations
agcttgctngagaatcttctatggaggttgtatctttgagcttcaatgaggtccttcaatggtgattttcagccatggagatgtagcggaagataaaggagaagaggtgagaggaggtgccatccactagggaataagccatggaaggaggagtttcaacaccaagagagttccttggagaagaagcttatacaagaagcttcaatggaggaaaagaatgagagagagagagagaggaaggggcatataattgaaggagaaaaagagggagagaagttgaactttgaaatgtgtctcacaagactctcattcatcaaagttatgataagtgttacac

SEQ ID NO: 268849 - DNA, 398 bp, Glycine max
tgccacccagctcgcccatgcgagcattgttgtcttcttctataacaacagccttctggaggaatcttctggatggcccaagtgggcctgtgtgctatttgcacccctatttttactaaatacacccccctgccctttttttgggtgattctttttttcgtaaagttacggaaacttacgaatttcgtaacgatacttgttttctttccgtaatgttacggaaccttgcagattacataatcatccccttttttgacttacggaatgttacggaacctcactatttgtgcaacgatgtttacttttgatttccggcacgtcacggaatttcacaaattgcctaatgatgggtgccaagcacctcataatgaccaatcacaatttgcatgtcaccaatc

SEQ ID NO: 268850 - DNA, 257 bp, Glycine max
tatgatctgaggatagtttggcaggtattgatcatctttgtggctttcatataaaagcaataaaaataaagtttttagctgttgttataacagtaataatggtaataagaaaaatggaagtgactctcaataacactttattttggatttttctaattaattaaaatttattaaaaattatcaatattagtaggtttcgttcttaatctaacataaacgagaaaagagaaattttattgtaaaacataccttattaa

SEQ ID NO: 268851 - DNA, 436 bp, Glycine max
agctttgagccaaaatcctgactcaccatttctcttgacccaggtgagaatgtcaatccttaccctcggaagcaaaaaagaatagaagggaaatttccaatcaaaaatgaatagaaggaaattttccaatgaaagcaaaaaaagaaaagaaggaaaattccccaatcaaagagtgggagaaagcaaaaagaaaagaaaggaaattccctatctaagaatgggagaatgttaaaaaggatgaatatgaaggaaagaaagctcctgatcagggatcgaaggaaaaacagaagatatgtgcagagaggtctttatactggacaatatctgaacaatacagaattgtcaccatatgaacaaaaagaaggaaaggaaaccacgacctaaaatggtcttctccctttgataccaaccaatatcccgtgcgctagcgactttt

SEQ ID NO: 268852 - DNA, 404 bp, Glycine max
gaggtacttacccgttgaagatcgaagaacgtttgttatcgaatgaagaacgaatgaagaacgcgtatacggttgaacctttgcgagatcctacggattttttactgatacttttctgatgcgcctcggcttagattgtccttacggaaaccaactttgccaagcaaattctaggagagagaagtgcctaaggggctggacccctttcttcttcatttcctcccctatttatatcaaaatatgggaggtggttgccgcccagctcgcccatgcgagcttaactcgcccaggcgagcatggttgcttcctccagaagcaaccgacttctggaggaatcttctggagggcctaaatgggcctgggtgctatttgcacccccatttttactatttacaccccctctg

SEQ ID NO: 268853 - DNA, 387 bp, Glycine max
  unsure (1)..(387): unsure at all n locations
agcttgaacgaatgtaagacacaccntcttcnctcttgttgatcttgactccatctcattgaagcgcatatccacctgtatatccaaagtgtcaaacctttcaccaacaaaggtttgaaggccatcaaacctgtccaaaatctttgaaagaagagatgaatcttctccatcatgtccttcttcaccaacatgtcgagcacccttcttcacccaagagccatcatgctcttnttgataaccaaaggatgctatgactgaagcgcctataaggaaggatctcttgattggaacatagggttcacaatcaacagggatgttgaagtgttgaaggaaaagggttactacatgaggataaggcaatggagcattcaatctcaatgccttatg

SEQ ID NO: 268854 - DNA, 245 bp, Glycine max
cgaaagaagaaaggaaagccggttttctgcacgaggccgggaagggggggcagaaccgggcgcagggggcaggccaaacacagacaccgaccaccggcaagcgcaggaaccaggagaccaaacagcaccggcagccaaaaaggacagacaaaaagagcaggggcggcacggaaacgggaaaggcgggccggaacatacagggggaaagacagcaaagaacagagcaaggccggaacaaacaaggg

SEQ ID NO: 268855 - DNA, 407 bp, Glycine max
atgaataatattatatgtacacttatgcatgtgtcatccgctcaagcctacaaacgttgatgtagattccttacctatttatttgttaagccacttaaataaattggttgtggctatggacatcaaagaaaaaaggtgatacaaacatgatataaataaatgttactgggcaaattttgcgatcttaacaaaaatagaatcgtattggaatttgtaagcgtaagcagcaagctcatcatcaatggtaagttgaaccccagaatcgaaatcaaatctgggggcattaattgcaagcaatgcatccatggttctcctctatctattacatcaggtatgcataattgcttcttgacgatcgagagacaccggcctgacatatgcatatatataatgcaatgtatctcatt

SEQ ID NO: 268856 - DNA, 328 bp, Glycine max
  unsure (1)..(328): unsure at all n locations
aaaaaaaaatannaagaaaaggattatcggctgcaaccggaaaaannacgagagcacaacaagaaagttattaacaaggaaaacagacggcggacaaaagacaccgaagcaccgagaggagaaccagacaagaggcgaggcaaaagacaagaagcacgcgggaaaggaaaaagacaggccccaccaggaggaaaccggcaaaaaagaaaaccgaggagacaagaaagaaacgggaaggacaagaaaagaggagcagccgcagagacaaaaagggagaacagagaagggtaccgaaaaaaaaaggggggaaagagacaaaaaaaaaaaa

SEQ ID NO: 268857 - DNA, 407 bp, Glycine max
agctttaacgaatgtaagacacttcttcttaacctttgtgattcttgactccatttcattgaagcgcatatccacttgtaattccaaattgtcaaacctctcaccaacaaaggtttgaagaccatcaaacctgtctaaaatctttgaaaggagagatgaatcctctccatcatgtccttcttcaccaacatgtcgagtacctttcttcacccaagagccatcatgctccttttgataagaaaaagatgctatgactgaagtgcctataagaaaagatctcttgattgaaacataaggctcataatcaagagggatgttgaagtgttgaaggaaaagggtaacaagatgagggtaaggcaatggagcattcaatcgcaatgccttatgcatgcgatatctaacaagat

SEQ ID NO: 268858 - DNA, 400 bp, Glycine max
gatcagttcacccacattttgagtttgtggcttatttcatttcaaaacatcgcgaaatcttatggatcgcgcgacaattggctttaagcaactcaacgtgacctgcaaaaatccgcatgtcgacaaatatttgtctctagacgaaattagggtgtgacacaagccatgaactccaacaagtaactatatcctgataaatgaaaattaaaaaaaaaaagagttaagctaaagaagcgttaccaaacatgtagtccttcagaagttgcaggatgagaaaagatagaaagtaagaaacttcctaaaaaataacatcaagaaactttgtcattagaatcacaaaagttataatgataagaaaaaaataatggatgataatcaccacatacccccagcttctaat

SEQ ID NO: 268859 - DNA, 381 bp, Glycine max
atatgaaatgacatgggtactatccaaagaaagtgagccacaagggacaatgtgtcatagaatatcacaagatcctgctatgttaatacatattcatttcaatcattaacacccggacagaattactagaaactgtctacatcgtaactgaaaaaagataaaccactgttgcggagtcaacaaaatatggagtctcaatttccccttcctgtattctttccattactataggcctctaatgcttacaatggcatgggtgacaggagatcctttagggttcataaggtaggaggaagtgaattcatccggtttttctctcgaacaaaagatgaagatgttgtttagacagatggagattattatgaaggctcacgtgtatat

SEQ ID NO: 268860 - DNA, 413 bp, Glycine max
  unsure (1)..(413): unsure at all n locations
agcttcaatggtataagcgcggtctctgtctatggattcttntgactggnggtttgcccctaatagttttcgtctgattttttattggaaccacctatcaaggtatcccacaagtttcagtcctttgaccgacaaaggatcggttatgagtcgggacatagtcacacctttgcccctaccaaagagtgtatctgggggtcgaacccaagtcttcccctggtttttggttttgcttactataaaaaattcaactagataaaagcctatagtaggcaaccatattaagaagcacatcaaaccggataaagtagtttgctatcaccaaaactaatggtgcagacctcattgttgacagtaagtatcagatggatcactttgcagcccatgaagagcaacttgcttccctgagaatg

SEQ ID NO: 268861 - DNA, 451 bp, Glycine max
acttgatagtgtcgagaataaacacaaggttgcatcattttaatgtggagaataggaatgtatgtatacatgattttgatgatgtcaaaagaagaaccaaacaaggctcatttgcttcaagattaatacaagattgcttcaacaagcaaagccttgcttcaagatttacttaagatcaagccttgccttaaaacaaagtgcttttaagccattcaaggctctggtaatcgattaccatgtagtataatcgattaccataagacagggttgagaaatagctgttgaaaaggattttgaatttgaattttcaacatgtaatcgattaccatatgtctgtaatcgattaccaacaacgaaacttttgaaattcaaattcaaaagtcatgacccttcaaattataactgtgttatcgattacacaaacattgtgatcgattaccatagaagagtt

SEQ ID NO: 268862 - DNA, 380 bp, Glycine max
agctttacatgcatgttcataccatattttctatacttcgagcaactgatgcaatctatttgattgaaaagaatagctatattactcttctaatgtagtcgacaactaaaaaaaatataacagaaagtaatgcttaagccattcaaatcaagtcattttgaatctcatcattactatgatgcatctcaaagagaatgagaatcaggcatcgtattgcatagcacaccaaaacattaaaagaaaacatgtcttctatagccaaccaaggtaaaaatgtatttatatttgtgaacttcttcaaaattatatcacatatataaaaacatggtggaacaatctgaccacatgcacaacacattccacacattatttctgaaaat

SEQ ID NO: 268863 - DNA, 451 bp, Glycine max
tatcttacctatttatctcccagtgtctttgttagtttcaatagataaaaaacatgaagctctaattcaagatgttctctttgttgcatgggcataatgcaatcactctatgtctagcaatgattttattaagatgtccctacctttgagttctactaaaaattatcctctctcgagcgactaatctcttaaactgatgcatataaaaccttcaatgtatttctactaaggattaccctctttcatgcgccaaacccctaaagatgatgcaaggatgaagcatataatacatttgttggcattttatgcctgccaagccctaactaaaggggtttagcctttcattgtcatgagagaactttacactttaaggggttgatatggatggaagaagatggatggattgaagaagaaaagatgataatgacatatacagaaagtgggtttccat

SEQ ID NO: 268864 - DNA, 467 bp, Glycine max
acctgaggctgcaagcttgtcttctaatcttgagggggttttatgttatctttttctgttctactactggcttttgggtagctttagcatcttagctgtttaattggttggtggaacagggatcaaacgaacttgttcttctttccaaggtgtgtaataaactaaaatttgaatgcattctctctctatctccccctctctttctttcgcgctttattaattatatataattgtagtctaatgtttcccattgattcatggcagattatggcagttactgtccgattcattataaaagatgcagaggagaataatgccttgtttaatccaaggccagttttcagattattcatcaactggcttctagatcttggtttgctagaacctgttactgatggtgcaaatctccaggtgtttgtcactttcagttacttcttcaatagtatttgtattatattaattattgg

SEQ ID NO: 268865 - DNA, 229 bp, Glycine max
  unsure (1)..(229): unsure at all n locations
ataccttgacacaatttatgcaagtctctatcttgtttctctatatcacagagacagcaatcaattaccttgaattgccatgttgccaacttgaagagaantctctttgtggaatttgtggctgacaccgagaagaaccccatggaggaatataacggtctcgcttacatgtagcaaaaggaaagaatgaacttgttggtgacgaagttaatggaccgggtacgtctaa

SEQ ID NO: 268866 - DNA, 339 bp, Glycine max
acagctccagtatgatgatttctaccctcattctaaggagtacaatgcattgtgtttgtccaaagcttttcttccaaattgtgcgttacgaaaaaccaagattttgaccggaaagaaccaaaagttaagcttaaatatatttttaggtatttaaatttaggcatttaaaaacgcagtacatgtcattaatcgcggtgcatacgtggcaaacgtgaattttgggagtgaattgttcggctagattctcatttgtgaattgggtagatatttgaacagatatatgattggactagagagatatttcaaataaaatgaatgacagagcgagagctaaactat

SEQ ID NO: 268867 - DNA, 486 bp, Glycine max
agcaccgcagctgcagcttaacttacagtgagtgattcaggcttagctctcctacctacgctaagcgcacttccaataatttcaaaacagaacgatgttggcgcttatcgcatcctttcccgctaagctcaacttacataatgaatctgtggcttggcgcaggatggcgcgcttatcgcagctataataaattttcacagagaggaagtggcacttagcgcatcatccacgctaagcccactgcataaggtgcaacttacagtgaagatattgggcttagcgtagcgatgtgtgcttagctgaaccattcagccaatcaatcaggggtctttgcgcttagcgtgagcaagctcggcttagtgcatgaacagatggcgcttagcacaagggttccgattagcggataagcaatctgaaaaattttctaagtcatattctgcttatctcttcacacataatataaaacccctttttgttcattactaa

SEQ ID NO: 268868 - DNA, 469 bp, Glycine max
tccgttcccgagagcatctcttatttaagcatttaattcttgttttcttgtggcttaagaaaaatgccatttcttcttctttctttcttccaaatacatttctaaagtttcaagtactttatccatcacccacatccaccattatccaccactaaccatcattgttctccattgaaaacccacaccgagaggaaccctgtcaccgaagcagaatttccaacttggcttgcggttttggtagagaacgaaaaccctaatctgatctttcgttttctttcgaggtaaccatggttctatgcttgtttcttgttagtttcatcttgtctttgcatcttttctaaactgtgcaaccgacattgcatgtcttatgcttccttcgaaaaaccatagagaaagagactttgtatacattatcctttcatgaaatgcatgtatatttcgtaacctacactgaaccgcggtcacattg

SEQ ID NO: 268869 - DNA, 465 bp, Glycine max
  unsure (1)..(465): unsure at all n locations
cacgagctgcactaccgataaaataaaatcttttttttttgggataaattattggtagngatgaataatattatatggacatttatgcatgtatcatccgctcaagcctacaaacgttgatgtagattccttacctatttatttgttaagccacttaaataaattgtttgtggctatggacatcaaagaaaaaaggttataccaacatgatataaaaaaaaggtactgggcaaattgtgcgatcttaaaaaaattagaatcgtattgtaatttgtaagcgtaagcagcaagctcatcatcaatggtaatctgaaccccagaatcgaaatcaaatctgggtgcattaattgcaagcaatgcactctgtttctctcctatctatttcatcagctatgcataattggcttcttgacgttganagacaccggtcctgacatcatgcatagatcataatgcaatgttatc

SEQ ID NO: 268870 - DNA, 427 bp, Glycine max
tgctcgctaagccagtgcggtttaatagagtagtacacttagttctccttgccacgctaagcgcagatcgttctttgttttgaaaatttgtggaattgggcttatcgagcctgcttgctaagccaattctgcagaaaaaattggatctgtgttcactcgctaagcgtgtggctatcgcgcttatcgcatgagtcattttttctaatgcgcgctaagcgccgaatctaatgtttagttttattttctgctttctattttgaataaattaccgactaatcttgcgttttgaatcttctgtattggagatgccttcccgtataaaaaagccattactctagtgtctcgaaccggatatgatagatcaatatttgtttcacacgaaggctgggaccgttactcatataatgtgctcgccaggaattttctg

SEQ ID NO: 268871 - DNA, 228 bp, Glycine max
ctttttttgttaaagagagccgatatatttgtgtcacctgagcacgaatgagcaaccctgtttttggtgtttgatacacacacttacaaaaaactggaacaaacgcacacacaaatagcggggtggaccaatgggatacattatctgcggtctgcatgatgaaatggaacgcccaataattggcatggctttaaacacttcaagcctattttaaaatgatgccctcct

SEQ ID NO: 268872 - DNA, 464 bp, Glycine max
  unsure (1)..(464): unsure at all n locations
agctntagaccttngatggcatgttggtttcacccgtattcttgttcttgtcagcttcaaacttatcaattgctacctacagttcattagtgcctccaacaaccctcatggtgtagaagtagcaccaaagacaaaagttgtcaaacccccaacaactaccaaattctttgccttaggtggaaggctcatatatcccaaaagtccagccatcttgatcaatgggggaaaaagggttagcacaatttcacacaattacaattaccctttgttgatgcatgcatactgatttttataggttcaatgctaaataaaatcctaaattgaaaacgtttttaaatcaattacaaagttcaatgctaataaaatcctgaattaaaaacgtntttattatttgtaaatgagatgaacaaccattttaatcattaaaaaatgtttattgttttatcatccgatatgataacaca

SEQ ID NO: 268873 - DNA, 443 bp, Glycine max
  unsure (1)..(443): unsure at all n locations
ctaagctgatgttacttaagcctccttgaactctcttcttttgtatatacatcaaaatgaaaacaagatgcacctccaaattaantaacgttattaatgaatatagtgaccaaaattcaaaacacacaagtgaaatatggttagtatctgagaaggatattaatccaataaattcaaaatattggaaaacaccctctatacttattaccaaagaccaaccgcccctgacctcctgttaatagaaagaagacgaaataattttaaaagtttcagtgcaaacaacatctatgaatggaatataatgcccaaacatactataatattatgaatacacttccacacatgatcatggtatccacaacataccatacattccatgagtgttcggaggatacaatcattgatatcctaatgacatgattttccggccaattaaagggatg

SEQ ID NO: 268874 - DNA, 316 bp, Glycine max
gcgagagcgtagctacacacacccctctcataactaagcgcacgcgccggagaagctgccttaagaagacgccgaaagaagcgagagctgagcgacacacacctctcgaaaagctaagcccaccaccaggagaggagaagctagagcgtagctacacacccctacaatagcgaagcgcacccccatgacagaaaacaggaaaagaaaaaaaaaagtccggacgacaaagacaactcagaacgccccgagaaacaaggcgaaaaccctacactactagaatgggccgaagacaaggcctagacgaaggaaaaaccca

SEQ ID NO: 268875 - DNA, 289 bp, Glycine max
tcaaattttctcagagcttcggatcaatattttgagcgtcttgatatattacgggagtcactcagacgtgcgagctaaaaatgattgacgccacgaattgatacgagcttccgttttaaatttggagcacttctccctaaattgcgataaggtatctggcatccgagaaaagaggcactggtgaatcatatatctaagagtctccggtttaatttggagtgttcaatatataacaggactcaaccggacatccgtgtataaaagtattgtcattggattgggtcaagct

SEQ ID NO: 268876 - DNA, 395 bp, Glycine max
gtcgagcagatagaaaagacaataactttatactctgttgtctcgttgtgtcccgtaatatatcgagacgctcacaatttatatccgaagctctgagaaaattgaattgacaataactttatacacggatgtccggatgagtcctgtaatatatcgtgacgctgcaaattgagataggaaactcgtatggaattcatacgacaatatctttgttcttggatgtacgattgagtcgggcaatttatctagacgcccataatggagacatgaagcgctgagcgaaattaaatgagcataacattatacactgatgtgcaggttagacccgtatatatcgagacgctccatattgtaaccgaaactcttagaaaatgtaagacaatacttttttctcg

SEQ ID NO: 268877 - DNA, 380 bp, Glycine max
  unsure (1)..(380): unsure at all n locations
agcttcaacaactatggctattgctactgttaccctctctctccatttcgccaaaattcccattcgtcaaacgcattcatcttctccaatacgccatcgcatcccttctggtcgacggttgaatctctattaccctcgcacttcccacaggttagttnttttttttttttttgttcctcgttaaatgaaattaaaatttcgaacttggattctgggttaaacgttaattgttaacggntttatgttgttatctctttctgcttttttgagtacagatttgcgtgttttggttccaagtgttcactgacagacactgatgtngcattggttcatgtcaccacggatgaggatgaggctcanggaagaggggtggttgaacc

SEQ ID NO: 268878 - DNA, 461 bp, Glycine max
  unsure (1)..(461): unsure at all n locations
taatgtatttcagttttgatctacatattaatgataatttttcatttttgtccctcaatatgtaatttgctgacaaangcattcctaatatataaaatgtaaaatttagtccctaaatgtgcaacaaatagattcgactgttaacttctatctgtcaccattaataaaatagcttacgtgtggcacggagagacaaatttgttattgacataattgcgaacatggattgtcggcatatttgtcataatggtttttttttttacttttcatcttcccatttcattgacaaatgcatttctaaaatatgaaaatacaaaatttagtttccgagggcataaaaaagtgcaataaaatatattcagacgttaataatagatcgtgactaattatcattattattattattattattatgtgtttgcaattattgctcctactccgttagtacatatgtaatatat

SEQ ID NO: 268879 - DNA, 350 bp, Glycine max
  unsure (1)..(350): unsure at all n locations
cctggaaaggaanagacctactatccataggttctcaatactctgggctgtcttcctcgatacgtgcaaatagaataaaaacatatattggccatggtgtcaggtttgccacagtacggtgaagtctgaaaatcccttttctgtgcatcatcccatgagggaacatcattcctcaccaccccattgagtggtgctactagtttttacaagtatctaaccttcctttacgaaatgattgataagaatggaagccccagatctttttatacctgtgggcacgagccactcacgaatgaccttcatgctctcaggggccggggacacctcttgatcactatttagaaaattat

SEQ ID NO: 268880 - DNA, 326 bp, Glycine max
cggaagtgcgattagcattgatcctacggctggcaatctctaagctgcacacgtatgacttttgactggagggaaaagaagtcttcgaatgctataacgccccccgtgcttcattcatgatattttggtgcacgggttgctctcccacacgaactttcacgcactgtctttttttacggtatcatataccgtggcccccccttctcctcatgttaacgttcgcctgctctaacttactctagatataattaagcatcgttgtactgattcaaaaccaatgactgtatttctccctgccaactcaaaagtatctgggctggcttgca

SEQ ID NO: 268881 - DNA, 488 bp, Glycine max
  unsure (1)..(488): unsure at all n locations
cacctgcggcatgcaagcttctcatccttagtaacagctactactggactctcacaacttcatattgtgttccctctctgaatntcggaagtaatagtcccttgactactcttctaatttctttccctctaatcctaagggatggactctacactttttgggatatcttttacttaggctccattgatgaatntatttacatgcactcttttagatttgaatctactaactccacctagagcgttttggctatagaagttccttctaataaggggttaattatctcacttgacattaccctcactttttggcacttattccttgcaattctctccttcaaatttgaacaatttatagagtgatatggagctagtcgttgttgtgaccattggacgatgaattcaacattcaaatgttgcatgagttatctacgttcatatangtaatcattttgcacacactcaanatgtatctcctacaactcattg

SEQ ID NO: 268882 - DNA, 338 bp, Glycine max
agtatgacagtcaccgctttatgagcgctgtacaccagcttcgttttctggtcatcaagggatggccgattctccgggaacgacacgtccatctcaaggacgacgagtataccgatttacaggaggaaatatggcgccggcggtgggcatcactggttactctcatggccaactttgatccagaaatagtacctgagttttatgccaatgcttggccaacagaggagggcgcgcgtgacatgagatcctgttaatgggtcagtggatcccgtttgatgccgacgctttcggccaactcctatgatatccgctggtcgtggaagacggctaggaatgtg

SEQ ID NO: 268883 - DNA, 470 bp, Glycine max
  unsure (1)..(470): unsure at all n locations
gtcacctgcggcatgcaagcttgctctgatctgaaaaggttgaatatgatttatatatagctgctacagccatggcactgcactctcctttggaaaaatcattgattaatcatgtagaatgccttactacagaggatgaacatgaaatgcaaacttgtattaaagagntggatggcgcatgagaaaaatctgagggacattctgcatttgaagaattgaagaacgatgggcaaagagaanaaccaagagtagaattgaagaccttgcctgcacatttgaagtatgtattcttggaagacagtgactcataaccagtggttattagcagctcgttgaagaaaatagaagaagatcagctggtgcacatcttgaagagacacaaagctgtaattggatggcacatatctgacttgaaaggaattagtccatcttattgcatgcacaaaatcaatatggaagctgactacaaa

SEQ ID NO: 268884 - DNA, 286 bp, Glycine max
ctgaagcatgctagcctgactgctgccaccataaacagcatgctgtctctttttttccgcacctaaagccaaggcgccagtgagagtggcgagaactggccacaccaaaactaccagctacacgtagcgggatctacactgaaatcgccagctccactggcggtatcaatccaatgtgtaaacagctcgcgaatgtcagcattcatgttgtcgaaacacttgcatggatacagacaaaacatacacaacttggatagagtttgagaagagacctatattgggaata

SEQ ID NO: 268885 - DNA, 474 bp, Glycine max
  unsure (1)..(474): unsure at all n locations
agcctgagaggacacccacactncctagttccagtttctctttttactaaacntncttcctacacctatactcaccactcctttcacagccaattaacacaaatgagggtcttcctttactaccaatgtgtgtgttagaccttataatgaccgccacaaatccattttcatgagcaatggattgagcccattgcataacattatctcgggtaccaaacacctacaacgcaacctagacaattttagttntctacaacacattcattatattgaatcactcacaataatgaacattattacctgagaagattgaacgcatttgaacaatcaacatgtggttcattcacaccaaattcttggtcatcttgaacatccatatcaactctttcagacattatactgtcatacatccattgtatctcgtccatcttaacaataatcataaattgaacaacatagactacaacacctaac

SEQ ID NO: 268886 - DNA, 405 bp, Glycine max
  unsure (1)..(405): unsure at all n locations
acctgaggctgcagctnggagggttgatgggacccggtgcgatagtaacgaggataagggctacgtagtattacatgagctcaattgaaggcgggcaactggggatggtgggttcatgtttgatttgaggaagtgggagagttgatttgcgccatcacccgatcgccacctattaccacatatgacgggtaccccataatccaacaagcttgatgtgagaaaacgtggaagagacagtctgtctacttttgtttgttgaccacagagtggtacctgtagatatgtcgcaggggtcacgagaccttgtggatgtcaggtggggtgctattgcccaaaaccaatctcgaccaatcccgacccaactcgggcatagtcagtcaatgagaacctgtgacgtacctaaac

SEQ ID NO: 268887 - DNA, 384 bp, Glycine max
  unsure (1)..(384): unsure at all n locations
ggaacactttcttctcttggatgttctaaaantatgcgacaggcaactccttcaactagtgaggcacaatacatagcaacgacttcatacatttgacatgcaaacgtgcttatcgaattgataaaaaaagtgggcatgtcacaagaatagccgaccaagatctttgttgatagtaaggcaaccattgttcttgcaaagactccagtgttccatgatcgaagcatacatattgatacatgttaccactacataagggagtgcatagcaagaaaggatgtacatgcagaatatgtgaagtctcaaaaccaagtagctgacattctcccaagctgctcgagtaagaagacttaatcaagctaagaagcttacttggaatggacaatc

SEQ ID NO: 268888 - DNA, 440 bp, Glycine max
  unsure (1)..(440): unsure at all n locations
agcttctattntcaatttcgagcgtctctttatattatgggactcaatcagacatccgaatcaaaagttattgacgtttgaatttgcttatagcttctgttttcaatttcgagcgtctcgatattttacggggctctatccaacatccgagttaaaagttattgtcgtttgatgtttcttagagcttcccttttctattacgagcgtctcgatatactaagggacacaagcggacatttgagtcaaaagatattgtcgttcgaatatgctcaaagactctgttatcaattacgagcgtnttgatatattacgggactcaatcggacatccgagtaaaaagtcattggcgtcttaatttactcaaagcttctgtttcaattcgagccgttctacttatatgggactcaatcctacatccgcgtataaactatcgtcgttga

SEQ ID NO: 268889 - DNA, 407 bp, Glycine max
  unsure (1)..(407): unsure at all n locations
catgcaagctttctctttttgcaactatctcattttctttttctggtgtanaaagaagcttgacaggttcaggtgcaggttctgctactgtgggaggcacttgaatttggttgccagaccgcaaggtgatggcactcatatttttcggattccgcacagtttgtgaaggaaatttgttagaattntaagactgagcttggttcatctgagtagccatcagccccatctgatttgtcaaactctgaatggaggctcttgtctcttgctgaaattgcatattctggatggtcatttgcctcactaactcttctaaggaaggttgaggaggagcctcagttgcttgttgtcttttgtgagactgttagtgntgtcgntggtgttgttgctgcattggaggaggaacatat

SEQ ID NO: 268890 - DNA, 198 bp, Glycine max
gaagttgtttcagattcaagaaagatgatctcgattcagaatgaatcagaaacttccacggaagattgtaagattttctattacaccatgcacatttttttttcaaaagagttctctcaaattttatttaccaagtttactctctggtatcataccagttctgtatcgatccatggctagttgattcaatactttact

SEQ ID NO: 268891 - DNA, 357 bp, Glycine max
ctgcaagggtgtgcctccatgaccttgccacctgtgagtcctgactacctaaacttcacaccatgcttgtgaatgatgaataactaattaggtgaatttttcaatctgatcaagaactaataatgcgctgcataaaccagatcacattctgatattgcggcaactaccaaaggaatttactataatatgattggtgaaatcattaaaaggccactcttcattacctgaaccatgtaacacatgcttatatttcatttctaatgtcctgcttttgtatttgtattcgttcatggactaattacttaatgatatgtaccatagactttggcatattattactagagatcaagttgagtg

SEQ ID NO: 268892 - DNA, 398 bp, Glycine max
caagccatcgtaatcgagtatacagtcgcttgttagacattgtttgatacattaaagagtcttcgggtaatcgactccacgtgaataattgactatttctctttctataagtgttccagaagagaacgataacaccttaatcgatcagaaagataatataatcacatacttcatcgacataatcaagtatctcgtagatttaatcgatgacaaacggctatgattgattgctctatatatagtcaccttatgttctctcttataacacttagaagaacaaggttttatgagctacaatcacatgctgacattaggtaaagaaaagcgcttataaataggtactcacaacctctaatctatgactatcaagatctctatgcgacacgtgagtggtgata

SEQ ID NO: 268893 - DNA, 429 bp, Glycine max
  unsure (1)..(429): unsure at all n locations
agctttatgaagagaagtatgttggtaaaccaagatcttatccttcccaaccttggcctanaacacataaccatcccaatagcctacctattagccaatccatcaaatccacaagcctaccaccactccttccctcacccaaccagtcctaccctacaaataacctgaaacctacaaatgtcaaaaaaatgactccagcagaaatgcacatccgcagagaaaaagggttatgttacacttgtgatgaacggttcacactgaaccatcggtgtcccaacaaacaataccttctcctgtacatggacgatgatgacttgaatgaattgcaaccagacccccctgatagtagtgcacctactgatattgaaaattcatgggatcaccatctgtcttataatgcacttaaaggatcttgtgggctcgacacta

SEQ ID NO: 268894 - DNA, 462 bp, Glycine max
  unsure (1)..(462): unsure at all n locations
tgacacctgatccanaactacaatntataaactcatgtatacttggcccaagagataaggtgtccctaggtacatccaattttgttttgtttgctgttttgagntttgacgtcgaatgcgctaagagatggactactaagcgtgtgtttggattacggttatggaagtgtagtatggttgaactttgtaaacttatgttcagttggttaatataacttaatctatgtttgaagttgtctaagttcaagggaaaaggaagagagtagttttaaggtaaatcttagtttgggtgaaagtcacctcaaccaaactgaaaaaattgtttgtcaaacaagcaaacataactgttcatgatggtcgatctcaatttaggtgttcatacttcgtaccaaacacaccctattaccctaattagtttctaactcaccagaacatttctattgtaatatcccattggtcaag

SEQ ID NO: 268895 - DNA, 400 bp, Glycine max
ctttgctgatggcttcttaccattccaagccttaattggagtcctggcttttacagacttaattggacatctgttgagtatgtaaacagcagagtaaactgcttcagcccaaaatgtgttaggtagtcccttttgcttgagcatcgatcctaccatctccataactgtgcgattctttctctcggacactccactttgttgaggagaatatgcgactgtaagttgtctctcaatgccttcatcctcaaaaatctttcatactcgtgagaggtgtactctttgccgcgatcacttcttaatacctttatcccgtttccactttgatgttcaacaaggaccttagaccttttgaatactccaaagacttctgattcttctttataaatataccctgccttct

SEQ ID NO: 268896 - DNA, 70 bp, Glycine max
tgatttaaatataatagaaatgtcttgaactgcatctaatttaaccaacggaagaggaacggacggggtt

SEQ ID NO: 268897 - DNA, 470 bp, Glycine max
  unsure (1)..(470): unsure at all n locations
catgcaagcttgcatacaagaatctccttggctttttcttttaaccttctggttgggtcatatagatgacttcctctaaatacccatgcacaaatgcagttttaacatctaactgctccaagtgaagattctctgcagctactatgctcacaataactctgatggtagtcatctttacaactggagagaagatctctgcgaaatcaattccttgtttctgctgaaaccctttcaccacaagtctcgccttgtatcttcttctaccgtcagattcttcctttagcctatagacccacctattctgtaatgccttctttccttctggcaatttagttaaagaccacgtcttattctcctgaaaggatgccatctcatctttcatcgctagctcccactcaatagngtcattcctctgtgtagactcattgaacattctggctaccaacatcagttaacacaaataatgcaat

SEQ ID NO: 268898 - DNA, 80 bp, Glycine max
cgccgcccgggacacaaccccttttgttctggaacgccccgccccgacacacagcggaaagaagagaacccgccaggaac

SEQ ID NO: 268899 - DNA, 437 bp, Glycine max
  unsure (1)..(437): unsure at all n locations
atgtgggtgggagcttgaggctgcaactaaagcattcccccaagaagccacaactaaggcacccctaaaagaatttagaaataattgcattgtgttgtgagaagctttgattaaatataccaatggatgagtaaggtatgaaaatgaatcctacccctcacccccnaaaagggaaagaaaacagtttccatgtattggctgccaccttatgtaggacagttatcaagaaaatttatagaggaaggaaataaattctctcatagcacaatactatagtattaataatggcttgatgaaatgttaaatcaagaagatggatacttcatatattagaacaaagacccagaattcaggaatttatcactggaaataaaaaagggcatctactactgcttgcactcttaagagggaaagcatncgacattgngcacatgtgt

SEQ ID NO: 268900 - DNA, 471 bp, Glycine max
aaacttatctctcttctatatcgtattacgtatcaaccggccctcagttgcatctatagggtattcctcgggttttttcactgaaacacatcaaaaggctcacgcagttttctcttctataaaaaaagctctcctaagacagacaaaaataggatacaacgaccgttgttgtctgtcgtataagcccacatcgtggaaagttaaacctttcaacgacgaatcataaaacaccatcttataaagggagcaattttcaaagacagtgcttacgtcagcactgtcctggaatcaaatattattcttaattattgatatttcttggaatgatatcccatcagaaaaaatatatataattataaataatttatattagcatgattgtaattaatattaatagtaaaatctatttattcaataaatatctaaatgatagattaaatcaaaataagatgtcacaaattattattattt

SEQ ID NO: 268901 - DNA, 374 bp, Glycine max
  unsure (1)..(374): unsure at all n locations
caatgtgaaattctctcaaatgtttgtgcgggtcttcacctgcaaggccatgaaactctggaagcaaatgaatcagtccagtcttaaaaacatatgggacatcctcatcaaggtattggatgcacaagctttcatatgtgaaatcaggtgcagccatttcccttagagtcctctcacgaggtggaggttgtgccatgttctcagaatgtgcaaaatcagaatgctcagaatcagaatgctcaaaattataatgctcaagatcaggatgttcaanatcaccaataacagaatgcacagattcaccagttatggaatgctcanaatgatcaaagggtaaaaatgatgcctaactaatctatgaaatgtcctatcta

SEQ ID NO: 268902 - DNA, 272 bp, Glycine max
cgtcatccactacggaatatgccatggaacattgatattcaccaaccgctattatccgtggataacaagctcggacacgatgcttcattggaagggaataactaagggagtgaaagatagaggggggagcctgaaattgaacgatgaaaaagggagagaaattgaactttgagttatgtctcacatgactctcatctaatcatagctacaacaagtgctacacatgcttctatttatagactaggcatcttccttgataagctttcttgata

SEQ ID NO: 268903 - DNA, 410 bp, Glycine max
tcaccgcagctgcaactttatcttttattgccaacttatttattgactccgagcaaacaagcacggacccaaaggtgaacgcgtgattttcttgtttgaaaaaaaataggatgcacagggttatcttgcctgggcgaggttagctcgcttgggcaaagttagctcgcctgggcgagcaccccctgcacgagaaaggttaaaaggagagggaaatggtgactttttcacccaaaacttctttctctcatccaaaaaacgtatgctcactggatcccttggatttccagccttaggtcagcatttctcaatgttttttgattccattttgcactgttattcattcccaacaagagatggctccgaagaagctctccacaaagaggtccaggagggacacccatggggaaagc

SEQ ID NO: 268904 - DNA, 417 bp, Glycine max
aagaactggcattggagatgttcgcttggaggtaatgttccgagaagccgatcaagataatgtgagtgtatacatatatgtaatagtaacacaacttattgattgtcacataatgaatgaaagaagaaaatgaaactatcaaattgacattggtctagctttcctccatttgataacataattctggaagactaccatttgaaggataaggtaatgaacatcgtcatcataatttctcaactgtggtgaacacattaatgttacttcttatggaaagaactaggtggctataatacaatgtttagattgatgttaaaataattctatgccatgatgaaatttcaagttccattcttctataatgactttggtaagcatatgttatgccttctcaagatggacgaataaactaccatg

SEQ ID NO: 268905 - DNA, 218 bp, Glycine max
ttttttccacggtggaaaatgggggagattcccttgtaagctggcacttcttttccccatctaaaaacgggggagcccctgggctgccattggctaccctcctctaaagatccatgctgcggtgagggctaaccagaagttgtaagccatccaggtttttggcttttgaaacacaacactttctttgttacacagggggagaatgacctggaattttc

SEQ ID NO: 268906 - DNA, 361 bp, Glycine max
tctcttggttatttatcaactcattcaaaagaactttctaagttaaatgtccgattggagcttatttacccctttctgattaaccaatgttacaatgcgaatgatcaattgaatcttattgtaacaatgatttaatgagattacaacacaaatgattggttgaatatcattttatcattctttatgcgagataatggtttatacgatcgtgcgaagctcggtaaaaatggaatataaggatactggaagtatacgagatgaatatgaaaacattcaaagcttgaatggaccactataggtgcataaaatgaattgtaagcttcgagatcaaaaactaaccgggttaatctcaacgaactat

SEQ ID NO: 268907 - DNA, 474 bp, Glycine max
  unsure (1)..(474): unsure at all n locations
agctngcaagtgaaatcgaatttcttgttttaagtacgcaacacaaagaataattacactagaatcataaggtacgggcaaaagagtattctatatgaaatatatctcgatacgagtcctcgaactatagagtatcaacattgctaagaacaagaaatcacgaacaaccatactattgatgcaattaaggcaaaacaccatattactaacatacccagaattataaggttcttataataagtatacaacgtacatataagaagtaagaatttaatagttattaaggatgtattaaagaatcacaaacttcaactactacattcacgactacacacaaaataaagtgagttaagtagtcatgcgtttacacatcaagaaagacatactcatccaagacatatatatggttcagaagggtttcacaacactaatccacacatcatgatagaaataatgttattaacaacataaacg

SEQ ID NO: 268908 - DNA, 353 bp, Glycine max
  unsure (1)..(353): unsure at all n locations
caactttttcttttcttataaatatnaacaaaccccgagtaaggaaacaatattatttgataacaccttagagaattataatacaatcatgtattttagaactctcaaacataaccaactaaatatatattttcaaataatatgacgtctaatatgtctatttcatattataaagaaatgacaaattagagaaaacaggagaatgaaagataattggaatatggatttttcaacataataagaataaatgaacatgtataatgaaataacgacaataaagaatattatatatataaaattgaaaatgcatggaaagactggtgcacacttacagcgacccacaaacgtatata

SEQ ID NO: 268909 - DNA, 388 bp, Glycine max
agcttgtttaggacctggaacatgtctttaactccttttaataaccatgctatgcgctcagtagtgtccctgtctcccttccaacttgtgttcattattgctcccccatatggctctcaccaaattagcttcggtcttatctcttcttgcgagccctctcgacttctcgttcaagggctctcgaggatattgcattctcttccggtgacacggtgcactccttacgaacgtgagtagcaaccaacacgaacttcatcttggcgagtttggccattcctagctaccttatgagatcttggagttcatcatactcttacagcgctatataattctcttagttgacgacttctatctcgacgagccattcgagacctcctatgcaaacttt

SEQ ID NO: 268910 - DNA, 95 bp, Glycine max
ttgactccatacagatctccttcttgtttaaacacaggaggacctaaggcctaacggatacccccctcaatgaccacaagactccctatggcatc

SEQ ID NO: 268911 - DNA, 340 bp, Glycine max
  unsure (1)..(340): unsure at all n locations
acctatgaataaaataacttaatgccattaacctatggaattaaanaaaaacttaatggctgagtgtaactgaaattgtggcaaccaaaagtcacccccaacagccaacaagtcagccaccattgggtctcccaaaaggctgatgcctatgttgccaatggggcccttattacatcttgaactaaacctaactaaaacccttttagttgattaacccacaacatatttttggtcagccaactttacaaggattgggccattatttatacaaactaaacactctaaaattgaaacaaagtggtgtcatttacgcctccttcatttgggccaagatacaact

SEQ ID NO: 268912 - DNA, 426 bp, Glycine max
tcgccggatgacgtcgatcgaacatttcctaatcgtcttcatgcaaatctcattcaaggatcgaagagaaaactcatttaccgacatcggtcatgaaatagccccgactgatttcttcttgaaaacgcttgctggccgatgatggttctctttacggcaaaggacgtgttcttgatctggagttgcataaaaaatatacaatgtaggccggctaggatctttcatgcgagctcaaccggagttttgtttatgccgaaactggcatgttcccatttattctgctatgaaaacattagcccacatcggcagataaataatattcaccgacgctcgatcgaacaaaatgacagacgacgtcggccaagaaagatgaccgatccctcatgtctaatgaagaatgttcgacggatgatgccgatcgatcat

SEQ ID NO: 268913 - DNA, 365 bp, Glycine max
  unsure (1)..(365): unsure at all n locations
agcttagcttctacacttgatcatttttgaatgcaaatgtacnggacgaagataagagcagaaagtctatgggtagcccacctcacattatngaagttaggagacctgtgttgaaggagtatctaaaacttgcctctactggagtgatgcttgaggtcttatgcaccacaatacttttaactcatgtacatgctcgttcaaatttagtggataccattaatgtcactcaaggtgaacaccctcatataaagaagattatggacgagacacacgcttgaaagatctctgaccttgagtggattcataagtgtgttgactttgtcatcgcccatgttacctaatcaggaatcttggggagaaatttg

SEQ ID NO: 268914 - DNA, 338 bp, Glycine max
caaaccacacaacgaagcgtatggatgaatgacaacggcatcctttaatctcatgcacggcgaaacgtgactatgaaatagagatgcccattgaaactccacttgctagataaccatgcatttagcgccatgttcaaaatggttgatatgatgaagtggtgtgccacattaacgaatacaaatgcggctatgatcccagcatggacggctcatggggactaacacatgcaactaagagtgtagcgtgaaagctcacgctcgcccgtttttgattggttagaggaaaacacgaagatgatcaaacatgaatacaaacgcgatgcaaatatgcatatcaa

SEQ ID NO: 268915 - DNA, 390 bp, Glycine max
caatggctctgatcttcccaatgatgccatgcccctttgctttgttcgcacgccactgggccactgctgtgcctcatcataaacatgtgtcccccaagtttttccaattacttttaagattaaatatttttttagtatacctaaaaataaacaaaacttgatttcactttttataatcttcctttttaaaaattattacgaatagaaggagtggcttatgtgtttatcagttagatatacttagatgcatgttgaaacgtgttgccacaaagtggatgatgaattagaaatccacagaattattgcttttagacattattaagtaaagaaaatattgttgtctcaatatataagcaaaactcaattatttgtatcttatctaattgaact

SEQ ID NO: 268916 - DNA, 366 bp, Glycine max
aatttgagaaaaaaaaggacagaagcctttccagcttattgtttacttcattgccagatcaacacgagggaaagatagcatatgccggattgtcctctctgttatctcaaacatccacggctgaattgatattaagaaaggatattgcttcggttgacccggttgtcttccctcccctgtgctgaaaagatagttcatacaaccctacagttagtgatcccccttgtaaattgtacatatgaaaattgctaactactacaaggtttgtcgagacatcagtgaaacaaggatcgcatctttttgaagcatttaagtacattatagtcggatgatgaagaacctggagaatgacacaagtattgatga

SEQ ID NO: 268917 - DNA, 458 bp, Glycine max
  unsure (1)..(458): unsure at all n locations
agcttgggcaccttttgaagctatttccttgcttctagntngggtctcactaatgttatatttgagacagattgtaaggccattgtggataacatctccaccacgatcaagggatgcttacactaccatttcatagctgactgctctttctaatgtatcaaactcaactcaagtgtgagttttataaagagacaagtcaattaattcatagtataacacggacttctaaattttattctaactctcaggttttttattgtatcagttgtattcgatcaattattatgaatgaaatgatatatcttctcaaaaaacatcacctattctaattatttnttcttctcttattttttaatttctttttacaacaatggactntggaaattcatctatcaataaaatactgcccncatgatcatgcaaattcctttgaacacgagctaatcgaccgagtcact

SEQ ID NO: 268918 - DNA, 421 bp, Glycine max
gaccacgacagttatatgtatatatatatatatacacacacacgataaggccaagaaagtgttttttgtgaaacacatcaattgcatggaattacgcaagtaacaactaacacagccttctcattaattcacatgaagcattctgtctagacagcgactaatgcgcatatataaaaattcataaccagagttgccacaaagtacagagagatcataaactactgttatgactcactgaagtacagacacttagagaagaagaaaataaaaattagataaatcaaacttggtaaataaagtaaaattaattaatgtacttgaaaatgcagagaattcagatgaaatatattttctatataaaaacgtaaaatgtgtaagtagagcggtaatacaaaaaaacataatatattcgatctcttta

SEQ ID NO: 268919 - DNA, 428 bp, Glycine max
  unsure (1)..(428): unsure at all n locations
agcttctcccctattttgctatatatagtgggagaagngaagaagaaaggggttcagccccttatgcacttttctctctctcaaaattgctgaggaaaattatttccgtgaagaaaatccaagccgtggtgcttccgtaaagtttccgtgagtaattatgtgaagattctcgaccgttcttcaagattcatcgttcgttcttcgttttcttcagtcttcaacgggtaactacctcaaaccaagcttttcaattcattctatgtacccgtggtggtccacattttgtttcgtgtattttattctcgttttcattggatttttatacccccttttgacgtgcttaagccatttatttaagtcatttctcgcttaatctaacaataaaataaattttcatcgatcatttaaattgtatcatccggtaattt

SEQ ID NO: 268920 - DNA, 407 bp, Glycine max
tgaagaggatgctttaatggaggaaattatatagagattgggggagcatgaaattgaacgaataaaagaaggaaagaagtgcgggagcacgaaattgaaggaataaaagaaggaaagaagtggaactttgaagtgtatctcataagactttcattcatcaaagttacaacaagtgttacacatgcttctatttatagactaggtagcttccttgagaagctttcttaagaaaacttccttgagaagctttcttaagaaaacttccttgagaagtttctttgagaaaacttccttgagaagctagagtttagctacacacacccatctaaaaactaagctcacctccttgagaagcttccttgagaagctagagcttatctacacacacccatctaaaaactaagctc

SEQ ID NO: 268921 - DNA, 453 bp, Glycine max
  unsure (1)..(453): unsure at all n locations
agcttggatttctttgctccgganacctctcctttctcatgtgaacacaaacccaatcttcggattggaaaacaacctttttgctccccttgtttgcttatctagcatagctctcattcctcttttcaatttacgccttgactatttcatggagctttttcacatagtccgctttggattgtccttccttatgcttaaaaactgaaatattagacattagtaacaaatcaagagcagttagtggattgaaaccataaacaacctcaaaaggagaacaactagtggtgctatgcacaaccctattataagagcaaactttccaattcttaagattctatttcaaaacgatccttagcaaggtacccacaagtctattcacgacctttgtttgtccatccatttgagggtgacaagtagtagaaaatagtaacttagtacccaacttttcccata

SEQ ID NO: 268922 - DNA, 243 bp, Glycine max
  unsure (1)..(243): unsure at all n locations
tcacatgctgatttgatggtcattattctagtgaaaatttcttttgagacaacagcaaacaaagagctcttcctttgactttcttgctttcctctccttnntgatttttatctgagccattgttggattggttggtaaaggaagaacttcatagtcttcctcaacaacttcccagagatcatttgcctccagatatgcctccattcttgctgcccatatttgataattatcaccatcaaacac

SEQ ID NO: 268923 - DNA, 232 bp, Glycine max
gcttcttatgcaaggctcatcttggtggcgaatctctctcttctatggcttattcactagtggatggcgcctcctctcagctcttctcctttgtcttccgctgcatctccatggtggaaagtcaccattaaacgacctcattgcagctcaaagatccaccctccataaaacccccacaagcgagtttccatccaccttacgacaagaacacaagtatcgttatcaaattcgt

SEQ ID NO: 268924 - DNA, 427 bp, Glycine max
  unsure (1)..(427): unsure at all n locations
tccatcacacaatatactaatgccacaatttgtagagatcaagttcatcatgtggntattatatagggttatgtttaatatactcttcattttgtctttatctttctttcaattttatttttgttcctgcttcttctttcatcactattagaaaaaatacttttaacatcgattattttagacattcaacattggttctttcatcacttatagttgggtatagtggcagaagcagtctctattttttaaaatgacttattttaagtttatacaaactgatcataaatatgtaaatatgtgattagtgattacttactggcgaagtccagtgctaatgtactcataggggatcttggtgttggggacccttgaggcaataaccttcttcaagctgctttccaaagaaggtgaactgggagttgaaact

SEQ ID NO: 268925 - DNA, 151 bp, Glycine max
  unsure (1)..(151): unsure at all n locations
agcttataatatatcgatacgctcganataaatatctgaaactctcgggaaatttaaatagtcataactattcacacggatgtccgattccgcgcgcataatatgtcgagaggctcgaaatcgaacaacccaagctcttgagaaattcaac

SEQ ID NO: 268926 - DNA, 119 bp, Glycine max
  unsure (1)..(119): unsure at all n locations
actaagctgagtcgactcgtggaaagtatgaccatngantttctatttttcannncaactcaacgtctcattattatgcccccgatcgacatccgggaaaaatataccaagaattttca

SEQ ID NO: 268927 - DNA, 338 bp, Glycine max
aatacatggaatgagatgtgtgacagatcgacagatcatgttttgggaaattagagatagggctaagacggggtggactgctgcaagaagaaaacgaagctctggaaatggggggaggcgctcttcgcgccacataccggagcacccctggtcccctcccaacccctcgggccgcggcccaccgccccccatcttccccctcccccctccccccctaccacccaccccccacccctttctctcccccctcccccccccccctactgctccctccccactcctccccttcccccccccccccatccctcccccctccccaccccccctcccccctcccc

SEQ ID NO: 268928 - DNA, 432 bp, Glycine max
  unsure (1)..(432): unsure at all n locations
tctatgattnntggaataatcaattatcaaatgtgataattgattattttgaaacacatagaactattaagtttccaaacagaatttaatcgattacaatatgtggtaatcaattatcttgagctacaaatattgtattcttttgaaattagcttggctaatcgactacaaaacttggtaatcgatcaattcgataaaacttaccaatatttcaacagaagtaagttatgttgcttgttctaacactttgtaattgattacttaacgtaggtaatctatcatacaaagttgaacttattgcttcttataaactttgagatcaatccatatatcttctcatgtttgataaccactaagcatgaataaagagaactaagtccaaaacatcaacattcctagtctaaaaatattcaatacaaatgccacatcttt

SEQ ID NO: 268929 - DNA, 286 bp, Glycine max
gcagctagtgttattgatagtggcacagaattatacttgctgaaggtagtggagcttagtggctacccaataattggacgtatactctatggtctactccaaccaacataaatcggcgtcttatatgctatcaatctcttatgctttatattgacctatagtgtaaattctgatgctgtaagaatactctctatattctaaatcacattccatagcctaaacgtgaatgtgacaaaatttgttatttgtcttacaaagtttctcttcaaacaacatccttgttttt

SEQ ID NO: 268930 - DNA, 368 bp, Glycine max
  unsure (1)..(368): unsure at all n locations
nccagcggtgacctagcctgcgaccctgaaataactctagctcgactgatggtggcgtccgcagatctgttttggaacaaaangacctccttggtgaataatagactggagatcaagtaggttggggacaggccaaccacttctgcttagaactgacattcttgactgaagagcggtctacattggaagaaagcgagctcaaaggacttgatcctaaaaatgggacgggttacgatacaatgatttaaaatcaataaaaacactgcttgtcccttatacactatcttctaaatgacctacaagtttacattgggattcagatattggcaatatctgcctcttatgtttgcctttctgtaattatgata

SEQ ID NO: 268931 - DNA, 513 bp, Glycine max
  unsure (1)..(513): unsure at all n locations
cgacgcgacgtganccnttcgtatanccggttgacntccatgtaactctccgggattctatacagtcgatctgcttgcatgcaagcttcccaatgtatgtgaacttgcacaacaactgtgataacccgattgctgcatatatagtaaaatcactctgagtaagcatgaacatcttaaacgaaatgaaatcttattaaatgaagccctcctttcttcatctctggcttgcgcttctcttgctcctcttgcggtcctttctcctcttacgcgggtggctctgggatctgagagagaaatcaaacccctctatggcttttcttccgtaacctctctataaccgtcaacggatcctgttgttctgctttcacaaacaccttgagagacttgtaatctgtgagtatttcttccacccctgaatttccacaggtgccacactcacacacatacgatacctcaacgttccataaaccgacacatccatcaattaaaacaaaacccaccgtcgtctaaccg

SEQ ID NO: 268932 - DNA, 323 bp, Glycine max
  unsure (1)..(323): unsure at all n locations
tgtcgtgtctgtcagcaaacatgtgcaccaaatctttatgatttctatgaatcaactactaatggcggatgttctcatcagtaaatgctacagtcggtggcggagatatgtgtgtttgacgtatgcaaatgcaacccctcgttttaataaagctgcatgtatttttcttaaaatctaatattttgcacccactaattgtatggtttcatgtgctagatctatttttcaaaatagttagcccccattgaccttgggtcttagatcgaccactggctacagctacagctccttgatgcttatgccatgcnctagacctcagaatg

SEQ ID NO: 268933 - DNA, 508 bp, Glycine max
  unsure (1)..(508): unsure at all n locations
gcgtggatgagcnttgtagagcggtgatacattgtagaccgggatncntacaatcacctgtaggcatgccanctctcctatttatattatgtcatatcnccttatacaccggacctacttgagttatatatcaacgaatgaacgcccaacaacatgtggcctcaattattattctcaaacagaacgcctgtatatgatctaattaaatcaactcttatataagactatcaatacctatcagacaacaacactgcgtgttcctacagcacntctactttctcatgaaatctcattggtcttgtgtcgtgatcatttgtgctcaaagcaatttacttcataacctatctatttttaacgtactaaatgtgtgcgtgtgcatggacaccgttgtgtttatttatcaatatcacagactttctgtacacaaataaccaaaatcaacgatcgtgaccagacttgttttatatacatttaccatacaaaacacaaaattgagaacttctctccg

SEQ ID NO: 268934 - DNA, 450 bp, Glycine max
  unsure (1)..(450): unsure at all n locations
ntcttctgtcccttcactgatgctatcttaaatgcttttatgttctttgattcaaccccatagggagggatttgatcggaataaggttcctttatttcatactgtattaaaatttgaaagattgatctctattattgtgactgttctttgacccaatatgtatctaacttgtatgtttgatcgtatttgggtattttagattttgatattccttttcccatcatcttataatatgctacgatgtttnttcattccaatgctgccatcgaatggctaaggctaattctaaggattgaattacttcaaaatttgacactcttcactatagctctgctgcttgttctactttcaaaaggatatgtggcccatggtattgttattcattacttanaacaatatacgatattacattctcatcgtatgttccatatattgaattatttgtatgct

SEQ ID NO: 268935 - DNA, 147 bp, Glycine max
  unsure (1)..(147): unsure at all n locations
tatgaaagcagaattgcctcantcatttccaaatattcatgtgttttacgaagcatccacaagaatcaagccatggctatggtgcctgaaatcaatggggcccaacacaccatatgattatgatgatggatggctctaattgtcaca

SEQ ID NO: 268936 - DNA, 421 bp, Glycine max
  unsure (1)..(421): unsure at all n locations
agcttgttatatggacttggggaaggttactctacctgccattgacaacatataagcctaccacgagctcaacttactattgactgtatcgaggataaaatcaaatgtatgattagtaaatttcttgtcaagaattgaaatccgggtacttatctaagtcctcgatttacttaaatccacttggcaccactatatcctacttgacttgccagctaacattattatagaaaaagatgcgggattattcatcactctctttagcttcagaactatcacaaaacaatctaagggtcaacttgatggcatctatctaatccgtcgaggcttcaacanatagcagaatatcattcgcaaagacaaggtatgaaattacgagcccccttttgtttaactggatgggtttccaagctttttggttgat

SEQ ID NO: 268937 - DNA, 359 bp, Glycine max
  unsure (1)..(359): unsure at all n locations
acagccctaccattttatttatgttggagatagtcatttctagattcaagtattgagattgtcatttgtaattgcttcatatgtggactttaaatttccaggtgattttttttaaaatgctctttgtttgaaacctaattggcagcaatgtagtcgaagacagcttcagtatgagacaatgnttgttggagtcaacctacttgatcgttcctaagcataggatacttcaaagccaaaagaaaccttcaaatttgtggaatagctttgctcacattagtgaccaagctcanagaanattagcaatataacagggtcatcttttattctttacatttctttctcatcctccaagttatctt

SEQ ID NO: 268938 - DNA, 417 bp, Glycine max
  unsure (1)..(417): unsure at all n locations
tggctgcctgtctctcggtataatggtcacgctgaataatcctatcgaaaagctctccacctgcacataattccatcacaacatgaacagccacggcatcctcatatgcacctttgatggatataacattangatgcccggccaagtggtgcattatctgaatttctcttctcacatcctcgacatcatcatcggtgacgagcttcctctttgcaatagatttgcaggcgcactccagccctgttgccttttccacgcacaagaacgttgtcccgaactgaccctgtccaagttttctcccaagagtgaagaactccttgaaattatcggtctctctttgcaacacagaatcaacacgaagccctgcgctagaaactctcttcactgaaccacgtttcttctgtttcttcttatcct

SEQ ID NO: 268939 - DNA, 234 bp, Glycine max
tgattgatacatgatttacgacttgtacgattcaatctgggcaaaattggatgacggacagtgtgatttccaacatctgcactctatgcagaattttgctgtccaatatgtgcaccacaattttggctttgtgcagagaatgttgtgaatttgctggctgtggaaagagtactacagattgggttctggacgtttttaacagatcccaacggtcacaatgtaaacttatgtgct

SEQ ID NO: 268940 - DNA, 414 bp, Glycine max
  unsure (1)..(414): unsure at all n locations
tgtcttagtacgaatagcgagttttctaatctgcagatctcgctgagcgacaaccttcttacgctaagccgaattttgtgctaaaaagacatttgaatctgttaattatgctaaacgcgggaccgctgagtgggaagaaaaattgataaaccaaacgtgttgtcttttcactcagcgaaccactctcgctaagtgaaaagaacgaaacgttcttagtgggtgtaatgtcagttacacccactcttcgaaaatctgcgcaccttctgctccctttgtctctcaaactgctccctgtgcgtttgtgcttcttctactctgcatctacttattttcatcaagcatccgcagcacaagttctttgatctctatctttagtatcttatcanaccgtcaggtagacaactctagagtatg

SEQ ID NO: 268941 - DNA, 214 bp, Glycine max
agcttccatgtgctatgctataaatagaaacatgtgtaacacttgtcataactttgaggattgagaaacttgtgagacacacctcagagttcaacttctcttcctaatctccttcaattcccatgcccccccccccccaccctctatgatgcaatcctaccccctaagggcattgaatagaacactcatagatgattggcccacacatgccaca

SEQ ID NO: 268942 - DNA, 243 bp, Glycine max
  unsure (1)..(243): unsure at all n locations
tcacattcattaaaagctcctctttttctctatacctttgtagctgctttttggtccacacaagatatatgctatntaattcagttaaaatctggcctatcgtttgggtggctatctaaatttaatcgngttctatgttgagcaggctatacttcattctgattataaagacactctnttggaagatgaagagctctttatgttggattcgtcattctgtccttcgttgtctgaatcatttat

SEQ ID NO: 268943 - DNA, 403 bp, Glycine max
tatatatattgttgtatatcactagcgaacagatgactcatgtagattattgtggctgagtcattgagcgaaagactatcgcattgctgatctatgcaataatctatctttaataaagcacctgtctcatcttacattgactaactaatatctcatgtgcatcattgctacatcactctaggcctcgtctgataagcaacgtgcgactctgccctctctctcgcattgttgccgttcttgataatagtgctcgcttctgctcggccgcctcgtatcgaatccttccttgctccacccccatcacctacacccattcctcttccccgtcctccctgcaaacgccctcggtcatccttactcggcctcccgccctcctcgccccctctctccctcctccctcccc

SEQ ID NO: 268944 - DNA, 511 bp, Glycine max
  unsure (1)..(511): unsure at all n locations
naaaaagcggttgaacttacacctcgcgacccatgatactcagctnatgcagtacattagcacaaaatagctgttcgcgcgggattcttacctttcttggccatgtgaaccctagtatcccatgacgaagtaacaatatgcagatctatcagatgacgccacatttgtgacaaaacaatacatagtataatagttttctatagagcacaaaacattgaatgaagaatatttatgctttgccccgtgcttgtgccaccggctgtcacttattgcatctccacgcgcttcttatttgtgagaaaaagatagctgctaacaatcacaagcgcgcatattagctagcatattnttatagggatttcagcgtgattgattctntcttccttcaacacggatagaataacacatgtgaatggaagtgtgtatatagcactctcatgtgtatgttgtgcggctacttattctattacacttgtcggactgtgaagtaattgattgattactgcgctcg

SEQ ID NO: 268945 - DNA, 385 bp, Glycine max
  unsure (1)..(385): unsure at all n locations
agcttgattcacgctaagccttacatctcaggctaagtgcatattacagaatatttgtgttgcagatagcgctaagcaccacctgctgtgctcagccctagatgctcactggaatatgaaacctcaagttgggcttattgctaggttacgctaagcgcanggttactcagtacccacacgtctcgttgacacgccaagcgcagctgtgtgctaagtgcgtcatacgaatttcagtttttaaaaccaaaggctgacacactgtgggtgctacctttacaccaaagcctcttccctttgctaaccctgagcttttgtgcttctttctgtgtgctgaaacctaattgcacgcatcgatcttgactcattccacatcgcaatcataatc

SEQ ID NO: 268946 - DNA, 421 bp, Glycine max
  unsure (1)..(421): unsure at all n locations
ntgcatgtctagtgattctagagagagaaagtccagttccataagtttgagagatttgctgtgtgaagatctacagagaccagagctttgagtggaagccgttctgagagcttgagatgagtttgtgagtggttgtgagatcctanaggtgaatgagacatccttaccacttgtattcttagaatctttcatcttgttcttctctttgttgaaaggaggcttcctggttatggaaagttaaaatcctctgttggatcttccttgtacgtacttgatgtaaatatctntctatctatctaatgatgttttgtgtgttctctgtgctatcagctatttattctagtatgcctttaccttgttcacgtagatgcatgccttttttatggtctttcaatagcggaaactggtctgattctgatga

SEQ ID NO: 268947 - DNA, 401 bp, Glycine max
  unsure (1)..(401): unsure at all n locations
agctntanacaatgagcagataactaattggagaagtatttgggctcatgcttgctacatgctatgtttctagaggaatcagcaagtccgtcaacctatgtttatcagacttcaaagccttgggagaccattntgtacctctccaaccaatataatcaagtgtaagcttcaagtattgttggttgagttataaaagggaagaagaaattatgattagatggaagtctcctgaagctgggtggtttaaacttaattctgatggttcagtgcatggcaacaatgggcctgcaagttgtggagtcattacagatgatagggggagatggtgttgacgctttgctaaaaagctagggaggtgttctgtcttcattgcggaattgtggggggttatcaatgagcca

SEQ ID NO: 268948 - DNA, 453 bp, Glycine max
  unsure (1)..(453): unsure at all n locations
ntaataaaattgagtgtgcagtatataagatanatatttagaggagaagtttttgtcttcgtatcaatttaattaatttgagtagaatggtcttttatggaaaatacaggtgatttggtataaaaaaatataattgactctaaatatattattnttagaaaattaatataattactatatatattttataaatattctttaagactctcattcctaaaaacctaatntagttttcaacaaaaaaaataataatntagtgagaataaaaaaaatcctaatattaagtgtcaccttaaataaaaataccatttaacctttntatttaattntaaatgattntaaaaaatcatganaagatntaatattatnntattggtataatatttttttcctctagatttttcanatangggtntaaacctcaaaatttctctctagtttaaaatactctac

SEQ ID NO: 268949 - DNA, 340 bp, Glycine max
agctatgaaaagcattgggcgcctcctaatttatttgtaattcatctatggtgggtatggggaatctatccttgacagtgatcgtgttcagagcgcggtaatccacgcagaactgccatgtgccatcgaatttacggacgagcaacaccggcgacgagaatgggctcgtgctgggtttgatgagccctttctgcaacatggagtccacctgagcttctatctcttgcttctgatagtgggggtagcgatatgggtagacgttcaccggcaatgagtggggaaaaagatgaatatggtggttcctccctcttgccggaggctaggtttgacgctgatggaa

SEQ ID NO: 268950 - DNA, 435 bp, Glycine max
  unsure (1)..(435): unsure at all n locations
ntagaagatttgaaagagactcatctattgatgaagctagtgctttccttcaaagatctcaatcttaccatgttgcaaagacatcaagaaggccttactcagaagatctatcaaaggctacattgagcaaacaacatcagaatgaagctgttttagagtcaagacaagatgaattctaagatgagtacatcaaaatgatgtattgaagtcaacatcatgcaatatctatgcatcagaatgaaatcgcattaaagtctacattagaatgatcaggaacttgactaagaaaactaaactttagaatgaagttcagaatggttcagaatgcatctaanagacaacattagttcttccatatgctgccacacatatagagggtacattagaagactgatgttgaaagcatctcactttccatatgctttcacacacacc

SEQ ID NO: 268951 - DNA, 479 bp, Glycine max
cgcgtgaattgaaccatctcgtcccggtatcttaagtcatctgcggcatcatcatcaccgcggttgttatttatatttactccgctcgctacattcgccgtgatacacggcccagaaatgattcaaagatgctccaccagttcccgatcatcattaatttcccgaccaatccataattcagagaacatgatttcacaaggaagtcttgaaaagaattcttccaaaacccaccatagcacaattttgctttaaaagaaaagtttctctcaccatcctataagtctccagagtctctactctctggttactcaatacccgtggcacagtttcgatctcaaatcttttaactgaatttgcaacattcaactctcttttaactgggtaatcgattccatatattggaatcgataccagcgatctgacctccaactcaattcagtgtgaggagcatatattccatacatgctctgtgtatcgat

SEQ ID NO: 268952 - DNA, 372 bp, Glycine max
  unsure (1)..(372): unsure at all n locations
tgcttctcctgaatatcannattcatttgggaaaaatatatggtcaaattaggattagttagtagggcactaactgaaattaaatngaatttgaatttaggaatgtaagcaacattatgcaagactaaggtgttggttaaacaaactgaaccaatggcaagaatgggtataatgtcactattaggtagagttacagttttatcataaacaagctaataagatctaaaatgatgaagagagcaagtaatatgaatgcttgcaccagaatctaaaagccaacaatcatgaagaaaattggaagtggaagtagaaagaatcataccacttatggaagaaacatcatgaagaatgacaacattggtagcatgactt

SEQ ID NO: 268953 - DNA, 203 bp, Glycine max
  unsure (1)..(203): unsure at all n locations
agcttatgacaatntgaaattcgcgagagctttcgaagattaatttctagcgtctcgatatattataagcatgaatcggacctacgtgtgaaaatctatgaccatttgaattatttgagagcttccgttgttcaatttcgagcgtctcgacatattatgcgcctgaatttgacttgcctgtgaagggtatgaccctttgaatt

SEQ ID NO: 268954 - DNA, 387 bp, Glycine max
  unsure (1)..(387): unsure at all n locations
ngcctgtccgatgcagcagtaatgatggcccgagttatgttgttgaacggntactaaccccgaatgggtttaggcaaagacaacggcggcattgttagacaagtggcctcagatatcttaagaaaggggggttgaattaagatattccanactgtttcccctaattaaaaatctatttcactttttactcaagttatgaattcccttaatgacaatcttcttaaatattaattcanatgaagcaactngaatatgaatataaagcaataataaataaaggagattaagggaagagaaaatgcaaactcagttttatactggttcggccacacccttgtgcctacgtncagtccccaagcaacccgcttgagagttccactatcttgt

SEQ ID NO: 268955 - DNA, 402 bp, Glycine max
  unsure (1)..(402): unsure at all n locations
gatcttaagtcacctganggcatgcagcttctttgataaaacttccttgagaagcttgtgcttagctacacacacccctctcataactaagctcacctccttgagaagctttcttaagaagatgtctaaagaagcttaagcttagctacacatacctctctaatagctgagctcacctccttgagatgagaagctagagcttagctacccaccccctatgatagctaagctcaccccctgagaaagaacatgaaaataacaacaatgttcttattacaaagacaactcagaatgccccgaaatacaacgctaaaaccctatactactagaatggccaaaataccaggcctagacgaaggaacaacctattctaatatctacaaagataagcgggctcatact

SEQ ID NO: 268956 - DNA, 370 bp, Glycine max
  unsure (1)..(370): unsure at all n locations
tggactgtgctagagagaaaaacaaatgaccaaagtgaaccattagccatttctagggcaaaattgagtgttgaggagtcaaattttgattcggaggaattttatgtgtaaatccagtttgagaaagtttagattgatgttatagacttgtttgaggtgagagtttgcttcaaatttgtcccattctcaatttgacttctcaagcctagaaaatccattaaattggggggttttggacacctagnttttttgttgctgtggtttgaagcttgactttggtttacacatgattgatacatgatttgggacttgtangatntgatttgggcaagattggatgaagngaagtgtggttntcgaaatctgcact

SEQ ID NO: 268957 - DNA, 355 bp, Glycine max
  unsure (1)..(355): unsure at all n locations
ntgacgtgttgtattataatcatgcgctatcttgtctcatggtataaaaangcaaatatatttatgagtatgctaaaaggactttctgtagtgaattgtcaacaaaagaattaagaaagtttatccactgtagtagttcaatatacatcaatatangtaaaaacactcagtttaagatttttttaagtagtggcacttctcgagcagaaaagttctatccctttaatatattgctataatcttttccagtattatataactcttgtattataaattttaaaatataaaatgttgaagtaattatcaaaaggttataacactattccttctctctgtgtatgtaaaaagaaaaata

SEQ ID NO: 268958 - DNA, 429 bp, Glycine max
  unsure (1)..(429): unsure at all n locations
agctttgagattattcaaacgacaataactntttactcggatgtctgattgagtcccgaaatatatcgagacgctcgaaattgaataccgaagcgctgagcaaattcaaacgacaaaaactttttactcggatgtctgattgagtcccgtaatatatcgaaaagctcgaaagtgaatgtcgaagctctgagcaaattcaaacgacaatcaacttttactccgatgtctgattgagtcccgtaatatatcgagacgctcganatggaataccgaagctctgagcaaattcaaacgacaataactctttactcggatgtccgattgagtcccgtaatatatcgaaacgctcgaaatggaatgttgaagctctgagccaatccaaacgacaataactttttactcngatgtcttgatgagtcccgtaatata

SEQ ID NO: 268959 - DNA, 314 bp, Glycine max
  unsure (1)..(314): unsure at all n locations
tctacatagaantcgagctnttcgatatattacgtgactctttctgacatccgagtaaaaagttattgtagtttgaatatgctcagggcttcagtattccatttcgagcgtctcgatatattactggactcaatcagacattcgagtaaaaagttattgtctgttgaatatgctcagagcctcggcattccatttcgagcatttcgagatattacaggactcaatcagacatccgagtaaaaagtgattgtagtttgaaactgctcagagcttctgtataaattagcagcgtcatgaattttactggactcaat

SEQ ID NO: 268960 - DNA, 205 bp, Glycine max
ggatctctaagtcacctgcggcatgcaagcttggagaggatgcttctttggaggaaaagttagagggagagaaagagagaggggggagcactaaattgcaagaacaacaacggagagaagttgaactttgagtattgtctcacaagactctctattcatcaagactacaacaagtgctacccatgctcttatttatagactacgt

SEQ ID NO: 268961 - DNA, 414 bp, Glycine max
  unsure (1)..(414): unsure at all n locations
tggctgcctgtctctcggtataatggccacgctgaataatcctatcgaaaagctctccacctgcacataattccatcacaacatgaacagccacggcatcctcatatgcacctttgatggatataacattaggatgcncggccaagtggtgcattatctgaatttctcttctcacatcctcgacatcatcatcggtgacgagcttcctctttgcaatagatttgcaggcgcactccagccctgttgccttttccacgcacaagaacgttgtcccgaactgaccctgtccaagttttctcccaagagtgaagaactccttgaaattatcggtctctctttgcaacacagaatcaacacgaagccctgcgctagaaactctcttcactgaaccacgtntcttctggttcttcttat

SEQ ID NO: 268962 - DNA, 360 bp, Glycine max
  unsure (1)..(360): unsure at all n locations
agcnttgacttgagacatcaaaagattataaatatgtgaccatggcatgaattttaagatgagatcaatcatctatctttcaatcttgtctcanacatcattcaatatctttcaactctntctacagaaatctctaatttcttttctttccatctttctaaaagtttttgttcaaaactctctcttcaaagacaagttctctgttcaaaaactcgtgttattcatctttttcattctctgctccctttgctaaaagaacaaaggactaaccgcctgaattcttttgtgtctctcttctcccttacaaaagagtcacacgactaaccgcctgagaattcttttggttctctcctttccctt

SEQ ID NO: 268963 - DNA, 388 bp, Glycine max
  unsure (1)..(388): unsure at all n locations
tcacctattacaggactgcgtgaaacaggcatattcctcaaactctngtttctttagagcaagtgcttatcaacttctaaaagtaactttttcaacttaaattggcaaatttaagctttaactatcactcgtactatggaacatttctgtaccatgaggtctttcgaagttttaaaagtgtgatcaaggagggggcaatgctaaaataactaatgatatatgaacaaaatatttntgaaaacaacaaaaaaggaaccactgtgaaagaagggaaaccatgaaccttaaattaaaaattattaatgatagctaaggcacaaatcattcacgttgcaactaccatntatcattaatgattattatcctaagacacacgaacatatgtatg

SEQ ID NO: 268964 - DNA, 436 bp, Glycine max
  unsure (1)..(436): unsure at all n locations
agcttcacaccaaagcaactcanaatctaggtatctaaaacccctcaatttaatggactttcaaggtttgagaagtgaaaatgagaatggggtaaatttggagcaaactctcacctcaaacaagtctatatcatcaatctaaactcgctcaaactggttttatgacgaaaactctaccaaatcaaaatttgactcctcaacacccaattttaccctagaaatggctcttgttttcactttggtcactcatattcctcatttgcacagtctacactctctcataagtcctaaatgacatttcaaactaggattaactccctttaacctccacataccactaaantcagatttggcttccacactcaaagcctactctntctcactcataacactacattttactttctaaccctagttcactctacccttatctcta

SEQ ID NO: 268965 - DNA, 297 bp, Glycine max
  unsure (1)..(297): unsure at all n locations
atttacaccctttttttactaaatgcaccccccttttatttttttggtaattctttttccgtaacgttacgaaactttacaaatttcgtaacgatacttattttccttccgcaaggttacgaatccttacggattatgtatttactctnttttagctttcgaagaagttatggaaactcacggattgcgcaaaaatacctcttttcgacttccgccatattacggaatttcacggatcgcgcaagcctgctttcttttgatttctgagacgtatcangacttcatttattgtgcaac

SEQ ID NO: 268966 - DNA, 451 bp, Glycine max
  unsure (1)..(451): unsure at all n locations
agcttgtgcanatcaaatcactcctacatttcatctctagcatgcatcttctttttttacccactcctcacgtttggttttttagggaaaaacaccataactaaacgcgccgcgagggatccctatcgcaccaaatccaaatctagaacgatgggtgatcaagatgagatgcacgaacagatgaaagccgacatgtccgctctgaaagaacaaatggcctctatgatggaggccatgttaagtatgaagcagctcatagagaagaacgcggtcaccgccgccgctgccagttcggctgccgaagcagaccctactctcttggaactacgcagcatcctccctaaacatagtaggacggggaaggacacactggggcacgatggcacccctcacctgggatacaaccgagcgngcttaccttatggatcgcccccaactattcaccacccgt

SEQ ID NO: 268967 - DNA, 427 bp, Glycine max
  unsure (1)..(427): unsure at all n locations
agtgccttcttggatttcaagggttgaatagtatgctttttctaaatcagagtaaacaggcaattttaaagacatgaaaggaataagattggagttttcaaatgcctgaatgcattcaaaactctcatttgaaaagagatccatatcaatgaattttggatcaataatggaacgagaagaaaagagatttgtgtatcgtattcggatgaaaacaatgaggaagagggaatagaggaaggaattggcgtttcctgagtctcagaatgccattgactctgattcgaagaaccctttcgcttctttgatggttacgccattagaagagattttttgaatttttaatcgggtcanatgaaagagaatgaaaaaagatgaagttcgggctttgtggggagtgatttggacaagaaatgagtgagatatggta

SEQ ID NO: 268968 - DNA, 443 bp, Glycine max
  unsure (1)..(443): unsure at all n locations
agctagaaagagcccgggtagccgaagagaagtttatgtccatagccatcaaagtctgaagagagtatgatgaactaagggacgtcaatatggccaccgctgaagccttggaacgagaaaccaagaaggcccgaaaggaagaacacgaccaaagcaaagttttgaggggctctatagggcagcaatagtgagctcaagctccgaagaggtgaaaggaatcatcacgggtcaaaggcatgatcttgaaggacgagctaaaggtttgccttaggtcgaaaagaaatntgtcccaacagttaagcgagactgaagggaatatgtgggccatcatcgataagtgcaaagagaagctaaatctagcggcgactcacgagcaaaggctagaggatgagtacgccaagatatcaccagaaagggaagcaagggaaagggtaatcgattca

SEQ ID NO: 268969 - DNA, 148 bp, Glycine max
gggggctactcacaccccttcaatatcttatctcaaccccatgccaaaatacatgaaaatacgataggaaacttcctgcatctctgacccaatcttctgggaggcttctatccaatgcccttgggggtgagaatgcatcatgccctcc

SEQ ID NO: 268970 - DNA, 370 bp, Glycine max
tgcaagcttatgcatctgtgcatctttagcaacctcaattcattgagcaacattaccttatcggagggatttgtgtgggtcaataatcgtcgtccacctcagtctcactctgaaaagcattttttttctatcatctcatgctctattctaaagttacactaatggtgttttaatgagtattaacaatatttttgtattaccgcgtttttttaattatttaaaaatctataaactttgcagctgtggggcaaacattaatggtggttggtaaggatttaaacatgtcactttctttttttacttatattaaataatgtagtggttcttattgatctaataccagtattctagatccattttgctgatgata

SEQ ID NO: 268971 - DNA, 382 bp, Glycine max
  unsure (1)..(382): unsure at all n locations
cttggaccttgtgcttaagggccatgcattgctcgatcgaatgcctcgaatttttgtaccactttgggaagggagactggtaaatccttccaggggtcaccactgccaactggttggcgattagtgacgacaatatgtccccatatgacattgggattggggcaaacttcggaagccttcttaccggagggtttcttcccatgttggaattcatgctatgattggcatcgttggagggacgaggttgtgtangagcccaagtctgagcacgggccctttgcaatggtgcaaatgtccttggctggacaggagctgagctggaagagtttcctgtgcgggccanaaaattcnggtggtgttgagcgtactgatgagtaccatg

SEQ ID NO: 268972 - DNA, 513 bp, Glycine max
  unsure (1)..(513): unsure at all n locations
aaatcagacgtttgaacctagcacnatccacaccggaacnntnaactctcagccttatatatcgtagtatacaagaaagatcctgtcattgttcccatctctatgcgctggagcacacacagacgatcagtcatatcttatctgtggaaaaccctcacttacaaatgaatttttgctaacacacattatccatatattgagataccattcatcattggtatctctaaaaaattccattcatcacttaattaattgttaatacaccgacctatataactaagcatactgatgaccattataagcgaagagacatacaggtgccatcgatcaaacttaattcaagaacatgtaaaacagggtctcgaatattgccatttccttgggaggaagagccactataagatttatcccttcatgccccctaccgacaggaggaaacacctaagttatgtccttcggtgatacacacgggaaacaatacttaggctacccacgatactcccctcctaaagg

SEQ ID NO: 268973 - DNA, 312 bp, Glycine max
  unsure (1)..(312): unsure at all n locations
agctttgcagatttggtcttcgccagcgaaatgtataatgtgggttctaanagaggcacatttgatcattctactacgacgactgagaaaactggggcaaataaagagggtgacgatgagggagaaacccatgctgtgactaccattcctgtacgggcaagtttcccaccaacccaacaatatctttactcaaccaataacaaactttctctacccaccacccagttatccacaaatgtcattcctaaatctaccacacagtctgtctaccgcactttcaatgacgaacaccacctttatccaaaccacaaa

SEQ ID NO: 268974 - DNA, 336 bp, Glycine max
  unsure (1)..(336): unsure at all n locations
ngagatgaggaagtgtnaagggtgaaacttcctgcttttatttcgtgaccacagagtggtacctggagatatgtcgcgggggtcaggagaccttggggacgtcaggtggggtgcttttgcccaaaaccaagcttgaccaatcccgacccaacccgggcatagtcagtcagtgagaacctgtgatgtacctaagcaggcgagctcctagcagtcaacagataagaggaacaaagaccacaaagcaaggaggcttgtgtggtggctggccagctgtgaattatgattgatatatgggatatggcctctggtaatcgattaccaaaggtgggtaatcga

SEQ ID NO: 268975 - DNA, 80 bp, Glycine max
caacatattaatggtggagacacttaatttgtgtacgaaaaaaatctgtgtccaccactaaaattcaagaactgccagac

SEQ ID NO: 268976 - DNA, 341 bp, Glycine max
  unsure (1)..(341): unsure at all n locations
tttgatgatgtcgagaagaaatcacatgtttgtcatcatcaaaacaggggagaatgtgaatgtatgtatacatgattttgatgatggtcaaaaagaatcaaacaatgctgcttcgaatgataaacatttgcttcaacaaacaaagccttgtttcaagattcacttaagaccaagccttgccttaaaacagagtgctttcaagaatttgcaagctctggtaatcgattaccataagacagggttgagaaataactgttgaanaagaatatgaatctggaatttcaacatgtaatcgattaccagcaacgaaactcctgaatttcaattccaaagtctgactc

SEQ ID NO: 268977 - DNA, 504 bp, Glycine max
  unsure (1)..(504): unsure at all n locations
ataactganncttcactggatgatttgataccatctattccgtacatntcaaacncagctatgcgaatgcgtctcttcggggcaaggcgggtatctgatttttaaagagtcttatcaaacattctgctttgatgaatgataatactagggcatnataataggatgacaattaaggataaacccctgctgatactgtccttcatatactgacgaatttcccacgcgtctcataccaaccttactctgtcattatcacccattcttattactcaccatctatttattcactaaggccatctttaaattctccatctaacccacctagctcaccacaatgcttaacactccctttattcctaaccacctcaccgaccagtaaatgaattttgcacggtatatcctgtgtgatacaccacgaatttcagtggggttgcctacctgctaccttatttcntgtaaagcaaagaaggctcaacccgctaagtctctatacccggtttgtag

SEQ ID NO: 268978 - DNA, 416 bp, Glycine max
agcttgtagactacactgcggttgcaacattctatgttgaccttttccaacctccgtcacccttgttgcccaaattcctttgatctctcagtacatcagccaatacatgttccatctccaaattccatgtaaaacaacttcttgtttcctgattattttttcctaaaactttcttttgcccgtcattttttcattagatgactccattgaagttaatgtcacttatttaacctgcaatagcaaattacatttaaaaagaactatccctaaccaaagtttcttctaacttgatagttagcaaacatattcatagctaatgtatctcgaaatcttgtccattcctcagtagcttgaatagttgtgatatcatctatgacattactttgaactccttcccttgattgatggactaactc

SEQ ID NO: 268979 - DNA, 385 bp, Glycine max
  unsure (1)..(385): unsure at all n locations
ccaccggtctttctttccgcgatgcttctttttatatccgcctgagtgggtttatagcctaaaccatacttgccaagatttacttttgcatttatcaagccaattatgccgtccgtggctttgcctaaacccattccgggttcgtaaccgtttcccaacataacttcggccatcattacttgtgcatcaggcaggcaaggctgcccagaaaatgaatccactgaggatatgcttaccacctcagaagactggaaagcgggttctaatgactcctctgcggcttccacataaggcgtanaggatgggcagctcaccaagatgtcttcctcgcctgatacgatgaccagatgcccttccaccacgaatttcaacttttggtggagtg

SEQ ID NO: 268980 - DNA, 249 bp, Glycine max
ctacaataaaatttacttttccatcaatagcttactgcctttaaaagtgaggggatttttttggctgaatcaactcatcgatagggaagctttctttgggctccactcttcatcattttcctccctccatgtgttgtgaggctacccatggaaatgggtagctaaattctccaccattgcggttagatgcaacccaactcatattctctactatcttttgaactctaatatcacttctatatatatata

SEQ ID NO: 268981 - DNA, 165 bp, Glycine max
agcttataatatatcgatacgctcgaaattaattatcggaaactctggcgaaattcaaatgggcataacttttcacccggatgtacgattctggcgcataatatgtcaagagtgtcgaaattgaacaacggaagctcttgagaaattcaaatggtcattactttt

SEQ ID NO: 268982 - DNA, 362 bp, Glycine max
tctacttatgtggcagggcgggctttcttcaccttcttgtcttcaacgcgaactttgaccattgttcttccttcctgcgatgcttcttttcgtgtccgcctgagtgggcttatagcctaaaccatacttcccacgatttccttaggtatttatcaagctagttatgccgccgttgttttttcctaaacccatcccgggttcataaccgttccccaacataactcgggccatcattaccgctgcatcggacagacaaggctgcccaaagagggagtccatggaggaaatgctgaccaccttaaaagactggaaagcagtttctaacgattcttctgcggcttcacataacgcatggaggatgg

SEQ ID NO: 268983 - DNA, 355 bp, Glycine max
agcttataatatattgatacgctcgaaattaattctcggaagctctccagaaattcaaatggtcattactattcacacggatgttcgattatggcgaatcacatatcgagacgctcaaaattgaacagcggaagctctcgagaaattcaaatggtcataacttttaacactgagttccgattcaggattataatatatacagacgctcgaaattaaacattggaaggtctcgagacattcaattggttatcacttttcacacggatgtccgattccggcgcataatatgtcgacacgctcgaaattgaacaacggaagctctcgagatattcaaatggtcataaccttttacacg

SEQ ID NO: 268984 - DNA, 342 bp, Glycine max
acatacacaatgcgcgcataaacccaccatcccctgatgcccacctccaactgagctcacgtactcccacgtagcccatatgctcgtttctctgaacaccgggtccccatcaatcctcccaagcttccacaacatccaagcgaaacaacattcacacagcacaagctatcacagccaagcaaaacaaagcatatgcagaaaactctgcctaaacaccaaccaaaaatcacagctgttcccactcatagaccccagtaacaattccttcgatccaatgtggtaaaccgtggatcgactccaaaatttatctggaagtctatagtgcataagcctacattttga

SEQ ID NO: 268985 - DNA, 356 bp, Glycine max
  unsure (1)..(356): unsure at all n locations
agcttgagatgaggaagtgttgaagggtgaatcttcctgcttttattgttgaccacagagtggtacctggagatatgtcgcgggggtcacgagaccttgtggacgtcaggtggggtgctattgcccaaaaccaagcttgaccaatcctgacccaacccgggcatagtcggtcagtgagaacctgtgatgtacctaagcaggcgagctcctggcagtcaacagataaaaggaaaaccacaccaccaagcacggaggcttgtggtggctggccagctgtgaattntgtgtaatatgtggatcgtggcctctggtaatcgataccaaaggtgagtaatcgattacaacgcttaaaattg

SEQ ID NO: 268986 - DNA, 297 bp, Glycine max
  unsure (1)..(297): unsure at all n locations
catgctttcccgaatgattgcatactgtacaggcatgaatttgaagaaatgtccaaatgccctgggtgtggggcatcaaggtacaatggtgaagatgatgangactgcagttctgatgaaaactcaaagaagggccctccagcgaaggagttgtggtatcttcccatcattccaaggtttaagtgtctttctgctaatgaggacaacacanaagaccttacctggcatgcaaatgggagaaactctgatggaatggtctgtcatctngactgatgctcccagtggaagaagaatgat

SEQ ID NO: 268987 - DNA, 391 bp, Glycine max
  unsure (1)..(391): unsure at all n locations
actggatgcattggttaacttggtaacccagctggccttgaaccagaaatctgttcctgtcgcaagggtctgtggtttgtgctcctctgctgaccaccatacagacctttgcccttccatgcagcaacctggagcaattgagcagtccgaagcttatgctgccaacatttacaataaacctcctcaacctcagcagcaaaatcaaccacaacagaacaattatgacctctncaacaacagatacaaccctggatggaggaatcaccctaatcttagatgggtctaccctcagcaacaacaacaggagccttctccttccttccaaaatgttgttggcccaagcagaccatacattcctncaccaatccaacaacagcaacagccccagaaa

SEQ ID NO: 268988 - DNA, 453 bp, Glycine max
  unsure (1)..(453): unsure at all n locations
tgttacttcaccatgacnattatttagtgtcccagacgatctatatgctagcctgggcgaagccagggtctaaaaaagcctccaaatgacccttttgccctcccttttgggtattttccctattcttttccaaaacatcaaaaaaccttttgaattgcacgacaagtggtgttaagccaactcaattggctagcaagaatcaaaatgttagcaaatgatagtccccagacgaaattagggtatgacagttgcccttctttacttatcttttattggaaataaaagggaagtaaagataaggacactaatttcgtttgagcaatcttgttattcgacagggcaaccaaggaagtcaaaccgagaaaacatgaggacattgaagttcttctcttttttttcttttttcttcatatgctntnttcanagcatagaagcagaggacgttgagtccta

SEQ ID NO: 268989 - DNA, 259 bp, Glycine max
agcttaagctccttcaactgcacaaggctcttattatttgaagagtatccttgtggaaccttcacccaacgaagacactgacaaaaacttatcttctccttcttggacaaagtatggcaggctgggggcaagtaaattttcttcccatcagaccttggatgcaactgtgatcgtatacccatatcagctagatctatgtgtgtggctgtgtgtgtatggctgtgcgtgtgtgcttctgtgtatgtgtgtgtgcgtgtgt

SEQ ID NO: 268990 - DNA, 461 bp, Glycine max
  unsure (1)..(461): unsure at all n locations
tccttaacaagaatcctaaagaagctagagcttagctactcatacctctctaatagctaagctcacctccttgagatgagaagctatagcttagctacacacaccctataatagctaagctcaccccatgacaaaatacatgaaaatacaaaaaaatccctactacaaagactactcaaaatgcctcgaaatacaaggctaaaaccctatactactagaatgaccgaaatacaaggctcaaacgatggaaaaacctattctaatatttacaaagataagcgggctcacacttagcccatgggctcgaaatctaccctaaggctcatgaganacctanggccttcccatggatctctggcccaatctacttggagtcttctatccaatgcccttgcggggtaggatngcatcaatntatccctaaccagttcaaccacttaatccaaccctannnataaata

SEQ ID NO: 268991 - DNA, 267 bp, Glycine max
agctctgtgctcaatttccactggaagatgacatgcctttccaaagacaacccgataaggagacattcctatgggtgctttgtaggcagtccgatgtgcccagagagcatcatcaagcctggtactccaatctttcctgcttggctgcacaatcttctctaaaattcgcttgatttctcggttagaaatttctgcctgtccattggtctgggggtggtatggtgtcgaccccccccgcctcccccttactctctccacaaatcctcc

SEQ ID NO: 268992 - DNA, 397 bp, Glycine max
  unsure (1)..(397): unsure at all n locations
gggggttatgtcttataagagaagctaaagaggtgggaattgaagttaaaagagtggaataaaaatcaatttggccatatccaaaagagactaaaccttatagaagaggagatgaagaatcttgacaagaaggaagagttaccagtcttatttgagggggaggtgcctttgagaattgaactacaagaaaaattanacaaggtgggaccgggtttagtctccccctgcctctccccattcctacccttgcttatggatcgggtttcctcgcccccaatcctatcttcttttttcattcataanaaatggagaaaataggacacaatttgttgtaatggactaaatctattactacatgcctaaatgaaatttcaagtaaaattacttgatcatgaca

SEQ ID NO: 268993 - DNA, 220 bp, Glycine max
tgcacttcattctctatagttcattctagagaatattacacacctgcaataaatattctgccacatctaacagatattactttttcttctttgcgcttaaaaagtgccagtctatggctattagtatctaaaggccgtccactttctcttctgtcttatctgtccgagcgaaaattcaaatgtgtcctcatgattaaggtacttggactcacacactgcc

SEQ ID NO: 268994 - DNA, 509 bp, Glycine max
  unsure (1)..(509): unsure at all n locations
nnnnaagcggttggatgagacgctgctattacggacactatgatactcagcctgaatgggtggattagaatggaccttacaatttaattaggtttattaaattacacattattttcagggttaaatatggttatcctttttaacaaaattgaatttttttaattttaaaatgcatcacctttgaattccaaagtgatttaaatatgattttaataagcgctattaagtgttaccttgaaccaaatgtgagatatatttcaaaattagagagactaaaataagacttattttaaatgattgaaatgaaactttaaaaataattatatttttgtctaacaataaactaattgcccagcaatgtataagagtgtttagatncatttgacgaaccaactaactaattatatatatatatatatatatatatatatatatatatatatatatatatatatatatatatatatatattatttntattaatgtgtgaatgcgtaactatatatatt

SEQ ID NO: 268995 - DNA, 379 bp, Glycine max
  unsure (1)..(379): unsure at all n locations
agctnttaactgaatntgcaacgttccaattgttttttaaatggtgtaatcgattacaatatattggtaatcgattaccagtgtatctgaacgttgaaattcaaattcaattgtgaagagtcacatcttttcataaaatgctttgtgtaatcgattacatggttttggtaatcgattaccagtgacaagttttgaataaaaatcaagagatgtaactcttccaatggttttcttaagattttctcaaggttataactctctcaatggttttcttgaccaaacatgaagagtctataaaagccagaccttgacttgcattttatgtacttgatataactcttttcacaactttttgaacatcttcttaaacttcttcttc

SEQ ID NO: 268996 - DNA, 407 bp, Glycine max
  unsure (1)..(407): unsure at all n locations
tgtgagattatggggtacccgtcatatgtggtactatgtggctatcgggagatggtgcaaatcaactctcccacatccacaaatcaaacatgaacccaccatccccagttgcacaccttcaactgagctcacgtaccctcaagtagcccttatcctcgttcctctcagcaccgggtccccacaacccctccaagcttgcacaatatccaagcaattcaatatccaaacatcatgaactaccctaaaccaagaaaacagggcagaggcagaaaactctgcccaaaacacattccaatacaacagctntccctactcaaataccccagtaacattctctttgttccgattcgttaaccgttggatncgactcgaaaatttactgganggtcctagtacataattctaca

SEQ ID NO: 268997 - DNA, 518 bp, Glycine max
  unsure (1)..(518): unsure at all n locations
cgcgcgggattgacaccatcgtanancngngtttgattcattctacgtgccgngatgctatagagtccacctgtagcatgcaagcgtgagacttgtaatgactggcccttcatctatagaccatttactttctctggaaccagatatgcctatatctattcaaaattgtcaaaatgaatgcctagaacacgagcagatgcatttcaaccctgatgatgtatgatgacacccatatggcatgcgagcatcatncttgcaaaaagtctaatacatgttatgtataaacctggcaaatgcaacattcgatatcatccctatgctcattacaacactcatgtgcatatgcagactgatatatacctcttttaagacattcagcaaatgcttccttcggcagagcggtgctcacagtttccatcctctcttctagagctaagaggtcctgtcatcaatcagacacttttggaggtcagataacactagacaacgaacacttatatattttaataccacggtcn

SEQ ID NO: 268998 - DNA, 432 bp, Glycine max
  unsure (1)..(432): unsure at all n locations
ntntgaagacacaacttgccactggtaatcgattatattaactattaatcgattaccagagagtaaaaactatttggtaaaagattntatgaaaacttcatgtgctactcaatgttttgaaaagctttttaatacttatcttgattgagtctcctcttgattcttgattcttgagtcttgaatcttgatcttgattattcttgaatcttgaaatcaaacttctcttgattcttgaattgttcttgactcaatcttgaaatcattctctagggctctgtgtcatcatctttgttatcatcaaaacaccttgaatcaatcttgattcatcatcatgaagcaatgaagcttgcttctacagaggcatgaccctagacttgacttgtaacaagccacacacctagtgcaatacctatggacantcttttttcatat

SEQ ID NO: 268999 - DNA, 396 bp, Glycine max
agctctaggaattatattctggagcacttatcctttcaaggatctcatactcacacaataattattgcacaacccaaaattctataatattaactatcttccaaacgttagctatctttactagtgactttccaaggtatgaaaaattgaaatgttacattacttgatgttttaaaatgaaagtgattggactacaaaaatattctacaatataaaaaatagattgcatctcataaaatataattcacaacaaaattttctaatttaaactttcataacatggaaagctatttcattgaatacattcaatttggtgctcgacttccatcttatggcaaaaatctaaagtcaagtattatggaaatttgtacaatatttttaccaaataaataaatc

SEQ ID NO: 269000 - DNA, 422 bp, Glycine max
  unsure (1)..(422): unsure at all n locations
tgaacatacaaaattgtataaattactgggaattggtcactactatgtttgagctgaaagttntactggattntctagacatctggaaaaaaattataaaaaaagaaccaagcgatttggattaaaggaaaataaaagaaaaatcacacaagttggcagaaaaatcaatgtccaggaaaaaaagtgaaagggaagtgtgcttgttgttttggctcanaaatttgttctataattggtgcctattttataccaatcctagttctgaaatttaaattgaaaattattgtgaaaacaagtgccaaaattagaggtttcttgagtctttttttttagtttttctactctactctagagccattctaggtttctctgagtcctagcttgctnnttttgtgctttcattgctttaaattgtgaataat

SEQ ID NO: 269001 - DNA, 387 bp, Glycine max
  unsure (1)..(387): unsure at all n locations
agcttgtgagctggacatggtgaggacccgattactaagatccttggtgtgagtaactggtctttatttattttttttgactaaaatccaaaacggaccaaaaaatagaacatatcaacacaaaaagaactctgactttcctttgcttgattgcacatttcatctaggattactaactcaatggacctaccatgtataatacatggaagaaaatgtacactattcattcaagtttgttcacactgtacagtcacaaagacagagagatatgaaaggcatttcatatcatcctttgcaaatntgaaaactaatataatctcaatgtttcaacatcaagatgatatgtaaatgacttacactcatcttccatgtgatcagagagatatg

SEQ ID NO: 269002 - DNA, 371 bp, Glycine max
tcattctacgacctaaaaagaggatgagatagttgctcaaaagagaaagctttctgatcatgagggagctaacaaaaattttcatgtaggtggaccttcttctagtagttctgacttacagcagcctcttattcctcttccttttccacctagagcaattccaaacaaaaagatagaagaagtggataatgagatcttggagaccttcaggaaagtagaggtgaatatacctctgctagatgcactcaagcaaattctaagatatgccaagtatctaaaggagttgtgcacccacaaaaggaagtgttgcttaccccgtacgtttcatagaggatgtgttggttcgggttggtgaacatatttttcctact

SEQ ID NO: 269003 - DNA, 315 bp, Glycine max
agcttcgaagatatggggtggttcgtgaagcattgtcgcggctttgataaaaaaatattaacgttgatgtttgcttatggtggttgcagggaagacgcgtgcagcttatcgagttgttgttgaagaagctggaaccttgtttactgggctgcaaatgggtcagtggccatttctaattttttgtgtggctcatggttgctggaattattttttatcactaaaatatatctattggatcgagtggcctcaaaataattaagaacgcgggctgaattaattattcctaaccctctactaattaaaaaattactcttt

SEQ ID NO: 269004 - DNA, 397 bp, Glycine max
atagggggagaagtgaagtagaaaagggttcagcaccttatggacttctctctctttcgaatttgcttaggaaaattgttttcgtgaagaaaattcaagccgagacgcttccgtaatggttccgtaacgtttctgtgagtgatttcgcgaaggttttcgaccggtcttcgacgctcttcattcgttcttcatcggtcttcagtcttcaacgggtaagtaccttaaaccaagcctttcaattcattctatgtacccgtggtggtccacatttggattcatgtatatttattctcggtttcatgtactctttatacccccttttgacgtgcttaagccatttatttaagtcatttctcgcttaacactaaaataaaataaattttcacccgatcgtttg

SEQ ID NO: 269005 - DNA, 279 bp, Glycine max
  unsure (1)..(279): unsure at all n locations
agcttgaagntgcaatagtgctcagggttcttgttttagctactcgatattgtcgacaattaacttgggctcctacctttatgatcttttaatttaatgtgctaagttgtttcaacgttggtctctggcaagtgtgtacaaagctagtacctatcgctttctatattttttgttgctcagatctcactatcaagactaaaagtttcaagtctttaatatgttagctcttaaatattgttggagatagatgttgaaggtacttacctctggccttgtggg

SEQ ID NO: 269006 - DNA, 429 bp, Glycine max
gctttacatgcatgttcacaccatatttactatacttcgatcaactgatgcaatctatttgattgaaaagataatttatattactcttctaatgtagtcgacaactaaaaaaaaaatataacagaaagtaatgcttaggccaatctaatcaagtcattttgaatctcgtcattactatcatgcatctcaaagagaaagagaatcaggcatcgtaatacatagcacaacaaaacattaaaagaaaacatgccttccaaagccaaccaaggttaaaatgtattcatatttggtgaactttttcaaaataataacacatatatataaacatggtggaacaatctgaccacatgcacaacacattccacacattatttctgaaaatgagtggcaggggaatataataaagcattgttattaaaactgtacatg

SEQ ID NO: 269007 - DNA, 351 bp, Glycine max
agctcgtagagttgagtctcgtattggtttaatcaattacatatatctcacaatacattacactgttatttgagacaatgactaatttagtcaagagtctctgctttaatcgattaccaagtggataaatcgattattatttctctctcattaagatgcttagatgttcacaagaacacattactacaaaagtcatttactacaacttaccaacaaggaccggccacagaaaaatggcatacaatctttacattgtaagttcaaggacggttatcttaaaaacccgtctatgaatcgggatgcttttttctctctcctatcttatattctcgggtacactactaacccttc

SEQ ID NO: 269008 - DNA, 465 bp, Glycine max
  unsure (1)..(465): unsure at all n locations
angggtctgattcccttgtgatttcctcataccaccaaagaagaagctatctttacttaggccgccacccagaatcaagaagtgtatgttgtgacccaaagctcattangggctttaatgggaaaatgatgtagcacccaataaaagggaaccctttccctactacngtgttagggtcacgtgaactcctttgagtgagctaggtcaccctacgagactgtggtggcaactacagaatctccaagagaagcaatgacaaaaaaagatgcanagaagatggcggatanggtaccacgaaatggccactttgatgacngcgacngangacatcagtgtaggtgacaacaattcatgtngatgttttgaaagttgtagtgggagcatangttgcangtgaaccatacaaaggttggngttagaggaaaatantgtcgagaataanggggaggtntgggtgagagagan

SEQ ID NO: 269009 - DNA, 235 bp, Glycine max
gcttagctccatcattaatgtcaaccgacatattctaaaacggtaacatcaatacgatcttatcacatcatattctctctattagtatagtctatattcaaatattatatttttgtttctcattcaatcacttataatctcatgcgtccttcgctcctcttatccattatttcgaaatctcctacgctcttgcttctcttgctcctttagattaacttattgacataatattctc

SEQ ID NO: 269010 - DNA, 342 bp, Glycine max
  unsure (1)..(342): unsure at all n locations
aatgtcttagctcatcattttttatatctcataccctccacaaacaacacgaaaaggatgaaagaataaacgtaactgaatcaatggaaggcaaaacaatccaatgatgatngaataaccactagtaaaaataattgggagaaaaacaagtacaaactcacaattattgctcttccaaaagcaccagcactgacataagcccatgttcctggaagcatccccaaccaactgcataacaattatcagttntaagacaganattcacgagaactatatgtngtcanatgcagttccagataatcatactgggatagttccaaatagatacacgacanacatatg

SEQ ID NO: 269011 - DNA, 276 bp, Glycine max
  unsure (1)..(276): unsure at all n locations
acaaaattgcctcaatcattcttttatatgcatgtgaattatgacgcacgaacattattcaagccaacgctattgtgcaagccatcaatggggcacaacacacccaatgattatgatgacggatcgctcanattctcaccaaggtaaaaccatcactttcaaattgagccctctcaactatcatgacatgtacagaagaatcaacgatttcaagttanaaaatgtccagaacttatattttcacaacaattacccatttcttgaacatatcctata

SEQ ID NO: 269012 - DNA, 389 bp, Glycine max
  unsure (1)..(389): unsure at all n locations
tatacatatgagacagtgccacaatcccaagcttacacaaccatgctcatatgtcattgatgcatttcaccgatcacttggggggcgcacgtgttggcatgaatagcacagagaatgggggcaatgttgcatgccccattactccagaatgcaacatagacctaaggccatcccttacaacccctcaatccaacagaaacaagcaataatttgaagataaatccctcacngtttttatccaatgcatgtaatttagagcacgcaaatacatcaatggagagttagaaagctcaaggatgagatacttacttgttggagatgattaatatcgcacaactgaataaaaaanatgcganaaatggtgatcctagggctgcaggctcgtgaaa

SEQ ID NO: 269013 - DNA, 490 bp, Glycine max
  unsure (1)..(490): unsure at all n locations
ccgcggtttgantcatcgagacccggtgcttcattcacctgagcatgaagctggcctcaacttctgatgatacgctgtttacactccagcttttagatattctccctactggaatctcaagataagagaaaggaatatccagcttgctatagtaaaaaattgactggttcctacaccaccctttgattttctatgccaccgaagcgacctttaacattacttatcgtgacgccagaaaccatctcaaaacacctcactatacattttaggactttaacattatccgtagttacagccccaaaaaacagagtgtcatctgcatactggagaactataacatcctccttttgacttcccacttgatagctgctgaacatattcttagaaatggcctgcctcatcanacctgtaagggctctcactactatattggaaagtaaacgtgccagggcggcaccctgccttgcccctttataaaggctttccaccg

SEQ ID NO: 269014 - DNA, 435 bp, Glycine max
  unsure (1)..(435): unsure at all n locations
nttanatgctagtatatacattaatgaggcacgtcataatctctttgcagactnggattaaaacaatttatatttctcaatcaattatcaattactttaggccttaccaccaggtggtacaattgcaagagccatggcattgctttcctccagttccatagcttttggatttatttcattaagaccctacaaaggtggacaaatgcatattttatcaagccaacgtcgcaaacatgcatacaaaacattgtttataaccaacacataccagcaaatcatttgtaccatcatcagttgatatcaaaggaggaggctctacctcctcctccttaggttgttcttcttcctcttccactgactcttcctcattgacttcttcaacttggtctttcattgcttgaagctctgcagattcatnggaaatctgatcttctt

SEQ ID NO: 269015 - DNA, 266 bp, Glycine max
agctttcttaacaacacttccttgacaagcttttttgagaaaacttgcttgatatactagagcttagctacacacacccgtctaaaaactagagctcatctccttgagaagcttcctcgagaagctagagcttatctacacacacctatctaaaaactaagctcacctgcttgacacaatacatgagaatacaaaacaaagggcctactacagagactactcacaatgccctgaaatacaaggctaacaccctatactactagaat

SEQ ID NO: 269016 - DNA, 206 bp, Glycine max
tgaaaatgaaattaagtacaagcaagacactcaaggttcttactcaatataacccttaaatactctttgagtctctctgatcgtttctttcatagccctcttacccatgaccacgttgcatgcccaatcaagcccatgtggatcaatgactgactaatgtttcttttaagttagaatatcgaatggaacgcgcacacacttgtgac

SEQ ID NO: 269017 - DNA, 522 bp, Glycine max
  unsure (1)..(522): unsure at all n locations
cgcgcgcatttgangctgtcgtagtagccgggtgantaccattctagatcgcgggatgctatacagttcacctgcatgcatgctatcttgtctctctatattcttgagagtctctaatcangctagcacaatatactcgttcttcatttaattgtgtctgggcttgacgatcactaccaacgaagtacttgcgacacctactatattgctgatttccacaaagctgttatcgatatgatgtgaaattcttcactcccttatttacacctgatgagagaatgcgcggcatgtgaccatatctacgtccttctatattataagtgatgctccattgtttctttgatatgacatccatccatgtatatgtggctggacttaactgatcaaactattctacactgtgatcaactgtatgtttgcatggagtgtaagttgcacttnaatgttatgttagcgacaataatctgaattatttttgagacatccattacctcgaacatacgctaggcttgacccgacccg

SEQ ID NO: 269018 - DNA, 348 bp, Glycine max
  unsure (1)..(348): unsure at all n locations
acctccattaatntattgctttaccttctcttccattgatggttcttcatttttctccatgtatctcctcacatgtcttgcgctaaatggttttaacatgattctttagaatttcaactgattaaacttgctatagaagctagatttgattntctatggttcaaatttcttgttcttgttcttgaaccatgaattgtcttgagtttacgctccttcgagtattgtcttgttatcttttgcggctgagacctaaaccataaaattcttacaaaaacattacagtagaagaatacctcaaaattctgagtgacttgttcacctatcgtagttttgcatagaagtatgtct

SEQ ID NO: 269019 - DNA, 302 bp, Glycine max
aaagatgttacatatacgtgaacaattaaacaaatctatttcagttctcgcttgcgatacgcaaaaatctgtgaaaataacagacagtgcctagacacacacagatgctgttcaactattaatatccctcacttacttatgttgtaacttgtagtatgtttggaaggccacaggcatgcatgtgggtctctcacctaattcaacaaaccaacacagaactcttaagttggttctctcacattatggatgttatgctgggagactcatctataaacgttcaaggtggtgcctcttggcttacc

SEQ ID NO: 269020 - DNA, 305 bp, Glycine max
  unsure (1)..(305): unsure at all n locations
tcctataaaagataaatganaatcaagatttgaaagtgccaaactctatcatagggcgagctctagaatgcctacttgctttgatatatagggaagcagttttggctgaagtactcaacatgaaagccaaccagagtggactttttgcacgaagaaatgacatgcatttaatgcaagcattaaatgcccagacgaccactatctataatgaagaacacaagacaaatctacctagtgtgagataacatatactcgaaaatgagagctattaatactataagctctgcagaacaagatatcatctt

SEQ ID NO: 269021 - DNA, 412 bp, Glycine max
cacagctggaccattttctcgggaatttatactggcagatggaataattatttcactcctctcccataaataattgtacctctaatgtcctatccaccatctactactatcacacagaagtcagaaaccactagacaattttccgaagaccatctcatagcccatcattagtggtcctactaaagacttaacacaataatcctcacttttggctttaacagtcacatgtgcattaatatcaaaacttgaccctaacaacatatatgattctatgcacgatgaaaattggcgaaaagccatgcaagattagctcgactaattgccaaacaatgatgtatcgaatctactcgagcttcctaaagacgagaaagtcattggacccaatgcggtattcaaaaaccaactaggaccg

SEQ ID NO: 269022 - DNA, 423 bp, Glycine max
  unsure (1)..(423): unsure at all n locations
tcgggctgctcaattgctccaggttgctgcatggatgtgcttttgtctgnatggnggncagcagaggagcacaaaccacaaacccttgctacaggtacagatttctgattcaaggccagctgggttaccaagttaaccaatgcatccagtttgccttcaagcttcttagtttcagatgatgcacatgggtttgtagctacctcatgcactcctctaatgactatggcatcatttctggcgctaaactgctgggagttggaagccatcttctcaattaaatttctggcttcagcaggagtcatgtcttcaagggctccaccactggcagcatctatcatacttctctccatattactgaagtccttataaatatattggagaagaaactgttctgaaatctgatggtgggggcaactggcacat

SEQ ID NO: 269023 - DNA, 194 bp, Glycine max
  unsure (1)..(194): unsure at all n locations
tgtngatganttctttntctctgttatacaaatatatgtttgtattgagaaacaaagatttagtctccatcggaggtagatgtgggtttttagttgttgattctcaaacttaaatttgaaaacaaaaaatgttcgaataaaatgaggatgaaatggctcttaaataaattgttaaaacaacttagctcactttt

SEQ ID NO: 269024 - DNA, 392 bp, Glycine max
  unsure (1)..(392): unsure at all n locations
agctctgcgaatttggtctttgncgacaaaatgtatcgaagcggctctgataagaggcaaatttgatcatcctactttgatgagtgagaaagctggggcaaatgaagaggatgagaatgagggagaaaccctagctatgattgccattcctacacgatcaaatttcccatcagcccaacaatgtcattactcagccaataacagtccctctcacccaatcatccacaaagaccatctctaaatcaaccacaaagtctgtctactgcacttccaatgatgaacaccacctttagcacaaaccacaacaccaaccaaaaaggaatcttgcaccacaaagcctgtaggatcaccccaattccggtgtatatgctaacttgctccatatctactcg

SEQ ID NO: 269025 - DNA, 331 bp, Glycine max
ttgacttgctttccaatctgacattcacttcagattctggcttcctctattttcagaatgggaatgcctcttacaacacctttggcaatgattttcttcatgcctcttaagtgcagatgttccaatctttgatgccatattttgacttcatcttcattgggagataaacatgtggaggaagtactgggtttcttgaagtgttcataggtaacaaatgtcctttgatctgctgcccttcattaaaacttcactcttctcatttgtcaccaagcattctgactttgtgaaagatacattgaatccttcatcacaacactgactgatgctgatc

SEQ ID NO: 269026 - DNA, 293 bp, Glycine max
  unsure (1)..(293): unsure at all n locations
agctntgtcctgagatccttcttggtggactatacttagaccaaacaacattattgtaacagcatatttaaaacccaaacttaatccgtagatccctcttgttggactaagtttcaattttgcttcattcaagttctaagccaacaatacatttctcaatgctaaaggcacctaactatgcacacaaatgggtgatcagaccaaaagcatatgaaatttaatcacagaaagaagccttgaacacaagacacacaatcaattagatattaaagtaattacatcagctattcttt

SEQ ID NO: 269027 - DNA, 417 bp, Glycine max
  unsure (1)..(417): unsure at all n locations
tctatgganggtggatccttgagcttcaatggtgatnttccatcatggagatgcagcggaaggcaaatgagaagatgagaggggaggcaccatccacaagggaataagccatggaagaaggagcttcaccaccaagaatgtgccttggataagaagcttgaaaaagatgctttaatggaggaaaagaaagagagaatgggggagcatgaaattgaatgaataatagacggagaaaagtggaaatttgaagtgtgtctcataagattttcattcatcaaagttacaacaagtgttacacatgcttctatttatagactaggtagcttccttgagaagttgtcttgagaaaacttccttgagaagaaatcttgagaaaactttcttgagaagctagagcttagctacacacacccctct

SEQ ID NO: 269028 - DNA, 307 bp, Glycine max
  unsure (1)..(307): unsure at all n locations
agctntgatgcctgtcgtatggtcagcaatgcttatgcggatgtgaccggcacactgcttgtcnggtcattgacatttgattatcacatcttgcactatatcattgtaagaattttgatgcctcgttcttttaatctagctcaagcctctgaggacgatttgattctgatgtgggatttcttgaccggtcggtaaatcgactgggcccatttgatttgttaccgcatgcataacgcattgcggtctantgcacctctaccctatcctcagttaatcactttatttctgcgtcatttcaatgaaccta

SEQ ID NO: 269029 - DNA, 413 bp, Glycine max
  unsure (1)..(413): unsure at all n locations
ntgacttgagtcatcaagagattataaatatgtgaccatgacatgagtttcaaacaatcaaaaaacaattatcataataatcatctatcatctatcatctatcatctatctttcaatctatctttcaatatcttctttcatctctttctacataatattctgaatgatttctcttcttctttctaaaagttttttatcaacactttttctttcaagaaaagttctttgttcaaaaacttgtgttattcatctttttcattctcttctccctttgccaaaagagcaaaggactagccgcctgaattcttttgtgtctctcttctcccttggaaaaagaatgaaggactaaccgcctgaattctttggtctctctttcccttacaaagaatcaaggactaccgctgagaattttt

SEQ ID NO: 269030 - DNA, 338 bp, Glycine max
  unsure (1)..(338): unsure at all n locations
agcttgagtgaaacaatgactgtgaggttntggttgatgattcttccttgatttttgtcatgcttactagcttatttcagctatgactctaatgcttatgctcctatctttgaaaagctgcatgcttgtgagaagtgattgatttaagaattccatgatattcagttcatatggttgaatttctttatgaatcagacaccattttcttttgattgaccactatctttgtcacttaaggacaagtgagttgttctttctttgcttgaggacaagcaaaactgtaaatctgggggagtttgttactncccttatacgacttacttttgatagaaatcatt

SEQ ID NO: 269031 - DNA, 413 bp, Glycine max
  unsure (1)..(413): unsure at all n locations
tctcgttcacgctactcacacagggaaccatacattctttcattccacttaaccctacataatgtgctctacatacccactttcacattcaatcttatttcaatgtcaaactcgtatcttctactaattatgaattaatcttttcttccacatcgtgcgtattgcggaagcgaacaatcatatgaagattggtatagttgaagcaaagcatggcctctaccatntgataccaaaccagataactaccaaagccatctgctctaccatcactcatcctaaatgcaacatcatccccatagacctatggcattttagaatgggacacccatcaaatgaaaggctacaatgtatgaaaaactattatcctcttttgagaaatgatncaaaatttgtctgcaacacgtgtcactatg

SEQ ID NO: 269032 - DNA, 212 bp, Glycine max
agcttggagaggatgcttcaatggaggacaagatagagggagagaaagacggatggggagcacgaaattgaaggaagacaaagggagagaagttgaactttgagttgtgtctcacaagactctcattcatcaaagttacaaccagtgttacacatgcttctatctatagactacgtagcttccttgagaagccttcttgagaaaacttcctt

SEQ ID NO: 269033 - DNA, 261 bp, Glycine max
gacgtctcttaattcgtcgcattatttttggacccttataagtgtcatcttgaaacttttcttgactgtttgcgccctttcaagttctacctttcaagcttgcacctcctcactctcctcaggggtttcagcctcttcctcactcgaggtttttagcttcgggagacaatctagctcttgcatccgagcctttagccacttgtgatatctactgatgatcccattgctgcttcccttaagttctttatcctttcttagtga

SEQ ID NO: 269034 - DNA, 285 bp, Glycine max
ttattttacatggttattctattttatttttgaatacgaataacatattatgtgaacaaatccaaacgtaaaatcattccaatcataaaataacattacattaacttaaagagagtggaaagaaataaaattcgcatcacatacgactaataagcgatgctaattatgcgaccaggacatagacttcgtcatatcaccgatcagtgtctctctatctttagtcaatcgcccgacatatggatgtgcaactaatgacttggccccatcatgattatgaatcccaca

SEQ ID NO: 269035 - DNA, 398 bp, Glycine max
tagactaagttcagcctaccatcctcagactgattgccaaactgaactgttcattcagtcgctaaaagaccttttgagggcatgtgtcttagagcaaaagggaagttgggagagttttcttccgctgatagagtttacttataacaatagttttcactctacgattgacatggctccctatgatgctttgtatggttaaaggtgtatgacacccctatgttagctagagcccggagaatgccttaccttatgacctgaaatggtacaacaaaccaccaataacgtcaagttgatccaaaaaggatgacgaccgctcacagttggcagaattgttttacgattagaagaggaaagatctgacattcgcgttggtgatcatgtattcttgaaagtcactc

SEQ ID NO: 269036 - DNA, 429 bp, Glycine max
agcttgtgtattgctgcattctactaatatattttattgcccattgctttgcctgagaataacaattgcttgaccacaacagcgctgggggcggcaacggacaatggtctttcaaataaacatgttgcacatgaacaaacattatatcatgcgctgaccgtgccaaacgaaccagcgaagtcattgcataattgttacactaactatattcaatgtacctgcaacaaatgatttcgaaacacgtgaccgacacatatgatgcggtggccacaagagccatgtggtggctgactcttaacagggaaaaatgtcatgctctgttgttgggacaacgatacaaggattacattataccgtgaagcaatcacatatcccatgtctgttatatccatccacttgttcacactaacctgaatgaataaacatacc

SEQ ID NO: 269037 - DNA, 234 bp, Glycine max
gatggtcattattgtcaatgtggaaagtattttgcgcttcactatccatgttcacacattattgcagcttgtggttacgtaagcatgaactactaccaatatatagatgttgtttacacaaatgagcacatcttataagcttactccgcacaatggtggcctcttgggaatgaagcggctactcctccttctgatgacgcatggacacttatccctgactcaactacaatttgt

SEQ ID NO: 269038 - DNA, 90 bp, Glycine max
gcatgcaagcttattaagctctagcttgttacaagaaaatttattcccaacacacacatattatttgagttccactaaacgagacactag

SEQ ID NO: 269039 - DNA, 432 bp, Glycine max
  unsure (1)..(432): unsure at all n locations
actaagcttgcagaagccctttgctatctaggtctnccattttcattggctcaatgatcctatcaaacaaggaaagaacatntatgttaagaagaatatgaaatacaactacacttctaagaaaaaattatataaggtcacaatcaataaaatgagctgaagttcaaatgtattcttccaaaggaaccaaaattacagggaaaattaccaaaaggacgttttgaaaatattntcaatttaggaacagttagccatntaactaattaacgatattcaaagaggagtaaaggagtaactactaattgatgtaattaattacttgagtggttcattgtccctaaattggaaatagntttttntaccttatttatttcctttttccataccccnaaagctattcatgcaaataccttgtttgaatattgtgatttc

SEQ ID NO: 269040 - DNA, 362 bp, Glycine max
  unsure (1)..(362): unsure at all n locations
taagatcctaagtgctgatagtataatacccttatgtatctaatctttgcttaacctttntgcactctactggccaggttctttaattcctttagactgagagagctaacagcatcacgaaggatgtgcctggaatgcaaaaaaatgacattgaatntttcatttcaatggagaattctactgaataatatttttaacagaatgtaacattgacctatttggattctgaatgtctctgatctgtctttttaatttggatatgttctgataaaactgttattcataaaaagtgtcaaccagttagagaaaccttgtggaggagcagtttttcaactaactgcagttgataccatttgttctac

SEQ ID NO: 269041 - DNA, 398 bp, Glycine max
caccatcttcttatattaccaatatgatacccaatctagtccatgtctgagagatcatacgaatttcgtaacgaatactaattatgagggacattaagtctatcatatgctgaccatagcctcataacccatgaatctcctctgcggcggattaggtgtctgccatccgctcgggcttggctcacaatcagtgaagtccctgactgccgtctaagtgagagcacacccatccttcacatggtcgccttttgagaaagagtgactaccctcctgtagcctgttctcccactatacctcggatatcccccagcctccaatgcccagggccgcggcctccactattctcctagttcttgcgatatacctacatattcgtctccgcccccgaacgctcacac

SEQ ID NO: 269042 - DNA, 476 bp, Glycine max
  unsure (1)..(476): unsure at all n locations
cggcatgancttgaggcgcgtgttcatctcgtcccggatctctatagtcacctgaggatgcaactttagtatattggccccttgttgaaattaagtataaactgcacttggaaacttgatttcaccatatgagccatacatttatattgaaaaagaaataaacccaagttcactgcgtgaataaaatacatacacaaagtacacgcaacgaagccgtaatgtcagatcatcataaggagtaacaacacttttaatgagagcactaccattaagtgatgaacacaatagacggctacaaacctgcagcctggcgaaattcattctgaccccttgaactcaagttgcaatacagttcctgaagatgattgacgataaaatccttaacgcatgaagttcctgtcccaataaaaagtcgtgagcctaatttattcttctcactttaccgacaaaaaacgctatgtttaactaatcacgac

SEQ ID NO: 269043 - DNA, 427 bp, Glycine max
  unsure (1)..(427): unsure at all n locations
tgaccaatcccgacccaacccgggcatagtcggtcagtgagattctgtgatgtacctaaacaggcgagctcctggcaatcaacagataaaaggaacaaagaccacaaagcaaggaggcttgtggtggctggccagctgtgaattntgtgtgatatgtggattgtggcctctggtaatcgattaccaagggtgggtaatcgattacaaggcttanaaatgaagacaggaggctaagatggtctctggtaatcgattaccaaggggtgtaatcgattaccaggcttgaaaaatgaagtcaggaaactaagggagcctctggtaatcgattatcagcctgtgtaatcgattacacagagggatgggtcactggtaatcgattaccacgtatgtgtaatcgattacacagtngcattttgcatattttatg

SEQ ID NO: 269044 - DNA, 160 bp, Glycine max
agcttctatggttgctggatctttgagcttctatgacgtcctataatggtgacttcccagcatggatgatgccgaggaagatcaacgagaatatgcgagaggacgccccatccattatggcgctaatcatggacgaagaacttccccacctatacagagt

SEQ ID NO: 269045 - DNA, 420 bp, Glycine max
  unsure (1)..(420): unsure at all n locations
tctccgaagggcatggttatttccagtttcctgaatatatctaataatctcgccagatgacaatctttttctttcttggaaggtaccacangatatggtacttccacaccttcatccacagctttttcactcctactattctttgcattcttattatttttttttctttttcatttntttcattttctacttctttntctttttcttggtccttcaattctttattcttgaccattatntgtttctctttttcttgattactttcacctctcacctcattattcttgccatcagtacttttttgtcagcagttttcttcttatgcacaacactatccttatcctcagcctccacaaaccttttactccttgtcatcacagctttgcattcctccttgggaatatgttctgtattttccac

SEQ ID NO: 269046 - DNA, 415 bp, Glycine max
  unsure (1)..(415): unsure at all n locations
agcttcttattattaaattctttatcctacatataatacaattatttaatgctaataaaaatttactgttctgaggcttatatttttgttaagattacatttttcttgtcatttggtttttcaatttacgtacctattatgttttatttcatgacaatttccatagttgtcatgatgcagggaatatgagcctgtatttttctaaatcatcaatcacttatttactctgcttgaaatgattgcatgaagcatggagggacctanttaggtaatctcaacccagcacttcgcactatggtagggatcttattgagcatgaatggatattctaatgtgtcatgtgaacaatgtatatatctatttttcatcatctaataagtgagatataatctaaatttatataacaaaattaaaa

SEQ ID NO: 269047 - DNA, 345 bp, Glycine max
  unsure (1)..(345): unsure at all n locations
tccttntagtgcgtcacgtttaanaccgagctcgatggtggtgcgagcctttgatggtactcggcgggaagtgatgggggaaatcgacattcccattcagataggcccccacacttgcaatgtggtgtttcaagtaatggatataaatctcgcctatagctacctcttgggaagaccttggattcatgccctgggagtggtcccttcaacgcttcaccagaaattaaagttcgcagtgggtggacttttagtgatagtgtcaggtgaagaggatatgttagtgagctgcccctcctccgcaccgtacgtagaagcgacggaagaatcattggaaacaagtatgga

SEQ ID NO: 269048 - DNA, 413 bp, Glycine max
agcttttgccatggtcactaatgatggagttctatcatgtaagaagacctggttgtggtgagggtgaatcaaatagtaaatggatcaataatgacaaggacgtaccaaactgatggtgcagtgaagaataacgtatcaaatcccacaaattgcggacattttaatgttgacgaccaaaaaaggaatggtttggttcttttcgttttcaaaaacccacaactattatctcctcctagtgtgctttccgcaaataaagatgctatcaatgaacatgatgagttgccacgacaaccacataatttaagggaaataacacacaataataaaacataataggttctgtggaactgatttcataagatagttttggaaataaaaacgaaatacactattcctgatttataaagtctata

SEQ ID NO: 269049 - DNA, 390 bp, Glycine max
  unsure (1)..(390): unsure at all n locations
tgtaataatcaattattggttcaaagacaagtttgaattgatataatcacataaggcttactctcatattcaattattggcttggataaagtgttccatagaggaatttgacgaataaagattatctaaaagaaattttaactttttttgaaaaccttaattatatttttaggtttcaaaatatttttaagccaatctagttcaattttgaagccttaatatttaaacgacacttagaactttcctcgttntttggcaaatagtcaaacaattcattatatttagtcattattaattgtaattatgtttctatgaaaatttgaatatattctcacaccatcgattaaattaaaatagtgatatttaatccaatgtcaatatatatgtgca

SEQ ID NO: 269050 - DNA, 396 bp, Glycine max
  unsure (1)..(396): unsure at all n locations
agctctacacctaatntatatcctanaaatttgttatcacaaactacttacatacatttgaagtacaccatacaaatttttgttgtttcactcctatttatttatatgcatattggaaagctaattacatcctgcacatatttgcattcaaaaagggcattccacactatcatacattcatttaagaaaacaattactcatactttgctaggaatttcatgctccttatatttacctatgtatacacactattgcaaggtgttttccacgctacctctatgtaaagtatcaaacatggggcagcccanattcgagcaaaaactctcacaagcaaatnctaattttcatggttttctaattctaaaaccaaattttggattcctagccatacgcatg

SEQ ID NO: 269051 - DNA, 337 bp, Glycine max
  unsure (1)..(337): unsure at all n locations
tgaaagagcccgggtagtcaaagagtatttcaagtccatagctatcaaagtctgaagagagtatgatgaactaacggacgtcaatatggccaccgatgaagccttggaatgagaaaccaagaaggcccgaaaggaagaacacgaccaaaacaagttttgaggggctgtatagggcagcaatagtgagctcaagctccgaagaggtgaaaggaatcatcacgggtcaaaggcatgatctggaaggacgagctaaaggcttgccttangtcgaaaagaaatttgtcccaatagttaaagcgagactgaagggaatatgtgggccatcatcgataagtgc

SEQ ID NO: 269052 - DNA, 414 bp, Glycine max
  unsure (1)..(414): unsure at all n locations
agctntagtgactatatgcaaccatagaatttatattgatatgttctatagttggttttgcatgaatttctaattgtcataacatatgattcatggatatgatctangaattctttctttctttacattttaagccattggccaaacaattatcccaatgtatattattttaccatttgcaaagccctttgagccaaacactcgatattttgttggaacactaacctacgataaaagttcctaccttaccttangattacgagagcaaggttgttttgatgggaatttctatcatttggcggctaatgtgatgtaaatactcattttttatgggtattaaaagaaattaaatatttatcataaaataaaagaaccacaattgaatagaaaaaagacaaaaatagaaaaaacaag

SEQ ID NO: 269053 - DNA, 449 bp, Glycine max
  unsure (1)..(449): unsure at all n locations
cttgatatttcancaccgncgncaccatcatcttagacttatattttaatattaatagtactttgattttcagccctgtattttggctatattattatgggatttgaacaaattactatttccttatttgcatggtatgggtgaacaagtatgttatttgactatgtggatttcatagttagtctatttatgattgttgcttcatggttcttacttcatgattngattgatggtttttcatgaatgcagtatgaatgtttagttatatttgcatactcaaatntactatgcactntggctttttgttgatgccaaagggggagagaaatgagattaanatcaagaacttacatgagtaatcaatttaattntaagatatgcacaaattcaaaaacaaagggggagaacttatgtgagtgattgactanngaaaagtgtgtgtgtttctc

SEQ ID NO: 269054 - DNA, 348 bp, Glycine max
agcttatgttttcaattacgagcgtctcgaaatcttacgggacacaattggacttccgagtgaaaagttattgtcgtctgaatatgctcacagcttctgttttcaattacgagcgtttgaatatcctacgggacaaaatcggaaatccgagttaaaagttattgtcgctagaattttctcattgcttccgttttcaactaaaagcatcttgatatcctacaggacacaatccaacatccgagtcacaagttattgtcgcttgaatctgctcggagcttctttttcaattacgagcgtctagatatattacaagactcaatcacacatccgagctaaaagttatcgtcg

SEQ ID NO: 269055 - DNA, 444 bp, Glycine max
  unsure (1)..(444): unsure at all n locations
tactcagcttgacaattaacacatacttaactcgatgtcttattgtgtcccgtatatatcgagatacctaaaattcagaacagaagctattagaaaaaatcaacgacgatgactttttacacggatgtncgattgggtcccataatatgtcgagacgcttgaaattgaaaacagaagctttcaagcaaatcaaaagacaataactttttactcgaatgttcgagtgagtcccataatatatcgagacgctcgtaattganaacagaagctcagaggaaattcaaacgacaataacttttgactcanatgtccgcttgagtcccgcactatatcgagacgctcgtaattgaaacagaagctctgangaaattcaaacgacagtaactntttactcgtatgaccgattgagtcccataatatgtcgagacgctcgtaattgaaaac

SEQ ID NO: 269056 - DNA, 307 bp, Glycine max
  unsure (1)..(307): unsure at all n locations
atctganaaggccattgtcaatttttattggagtaacggaacctttcacaatgagatgtataatttacatggaactccggtagttgcacatcaaagagttctccgatcatcgcttgatacaaaggacattactgaccacaattaaggaaatggtttcacaccgtgcgttagcactcactcctagatcactaataaataccttttaccgcaaacttcttttcgatgagagtcgaatcattactcctctctgaaatctgtatactcgaccacactcgacacacacgccttgtccgacagtcactttctg

SEQ ID NO: 269057 - DNA, 295 bp, Glycine max
aagcttaggtatcttgtgttctactactttaaatcctacgcttagaatcacaaaatctattagacttatatctttgccaattgagtttactgggcttgcttggagtagatgttgcttctaacaataaaacaattttatagccttctgatcagatatcgaagttactcttttgaaaataatttgttagcacacagcaacaaagaatatcatgaaacaacatggaaggaaacaatcgcactaatatattctacagattcacctccacctgagctatatctagtatctacacctataa

SEQ ID NO: 269058 - DNA, 64 bp, Glycine max
agcttagagaggaagcctcaatagagaacaagatatgagtgagagagaggaggggtgggggggg

SEQ ID NO: 269059 - DNA, 387 bp, Glycine max
  unsure (1)..(387): unsure at all n locations
gctgacacagagttgagaaagttggatgatctcactngtagctgtgtagtttcattgataaatnttacatttgttcaagcttgcttactcgagaatgtctctgaaattgctggttttttttttaccatatacttgatctgaaatttctacttaaatgtatgtttttatagaaaattggtaaggcgttaattacaaggattaagcaatatataatttaagtgcaaggttctaaggccagagtattattttgaaacaataattgttttctcaggactaccttttaaatagtgtagtaccctatacctagcctagagatgaaatagtcagaaattatgcataaattggctaatctcacactgatcagtgtactatatctggctttatatg

SEQ ID NO: 269060 - DNA, 486 bp, Glycine max
  unsure (1)..(486): unsure at all n locations
cgcggcctgntccttgagaggcggtgattcatctagacagggatcttcancgctgtagctgctgctaanatttaatgtcttcttagtttaaacaatggacttgctcaaagagtcttctcgttctcgtggtcaaaatatatatggctaacaataccaagtttgtttgacacaaagcttggagtttaggtgccatgtttgatggtgaatcagacgaattccacttctggcatggatgacggcgtctgcatctgcctttttatacatactgggaaatgtaaccttattgatgaataggatgggatcacacttactagcgactaatccagactgatttcacccagattgtagcctcttagaccattgtcttgtggcttgcatgagctcatacaaagnctcattcggctcgcgtaccatagatgaattacaccgtcggaaaccggagagttacacatgttatatttttatccagcacaccctctcaacccg

SEQ ID NO: 269061 - DNA, 223 bp, Glycine max
atgacaagaatactacctaaaacagtggggttagtctgacggttgaatctcaacactgtgctattgtacatgatgacaatccctgtgtagcttctatgccttactttggagtcaatgaagaaatctgcgagcttaattatgttaaattcattgtctgtgttatcaagtgtaagtgacttgatagcaatgtcagtgtgcgaaccgatgatttcatatttacttt

SEQ ID NO: 269062 - DNA, 210 bp, Glycine max
ctctacaagcatattggatggcctagatgacagcgaccagctctacatataggagagatcggaaacccatatcgcggacacacacccaatagatgcacccgtgtggttgctaaagatggccccgctgctatagtctgttccggagacccccccctgcataaacaaattattggtatttaagacttttgcatgcacagccgatattgagag

SEQ ID NO: 269063 - DNA, 264 bp, Glycine max
gtcttttaacccagagaatgggtttgggtgcacatgaaaaaagaaagatttccggaacaaaggaaatcaaagcttctaccaaggggagatggaccatttcaagtgcttgaaagaatcaatgacgatgcttacaaagttgagctgcccggtgagtataatgttagttccaccttcaatgtctctgacttatctctttttgatgcagatggagaatctgattagaggacaaatccttctcaagagggagagaatgatgaggacatg

SEQ ID NO: 269064 - DNA, 276 bp, Glycine max
agcttcgcatgttcttgacctctcacccccaatctaatggacaaacttatgtattaaaccgtgtcgttcagcaatatttacgggccttcatgcataataagccactctcttgcggcaagttcttaatttgggctgaatggtcctataatacgtcttgacatttaggaacaggggcttctccttacgagatcacgtatggtaagacacctcttactatcccacaatatgttataagaacatcgaaagtggcagccggggatgactttctgactaacc

SEQ ID NO: 269065 - DNA, 423 bp, Glycine max
  unsure (1)..(423): unsure at all n locations
ntgaggcagtaactgacaccccatagaactggcagtggtccattatcaaggttgaaaaccccagtgccctgttggacttcttcaggtccactgggtgtctgggaggtgtgatccctgcaaatttataaatggcatctgagatcaactgagccacatgaacactcacttgggtcaagatggcatagaccagctggcactttggcagaggaaggtcagaattatgatcgctggggaggatgctgctgagaagcaatgtcatccagaactatgatcgcacctgtctctctgtcacacttttgtagacaaaggatcaagctgaatgtnttgatgatgccaaagtntcacatgcgtctcanagtctanaagctttattcaagacaaagaaattaaagatattcaagatggatgatcaagacagtctct

SEQ ID NO: 269066 - DNA, 309 bp, Glycine max
  unsure (1)..(309): unsure at all n locations
agcttggtatgttactggtcctgcacggaaagttggcgatgacgacnaaggcggacctaaaccatctgcccttcttcgtactgaacatctcgacgtcctcttgtccgcgagaagtctcatatcttcttgagcctttagaagtttccttctgagtgcagcgtgaacgactccccgtgtgactaacattgtatcaactgcatcgttgccggaagagcccttgaggtagtctaagaccgcaggaggaggcttgccgtacacgacctcgtagggggtgaaccccgtgccggaatgctgcgatgtgttgtatga

SEQ ID NO: 269067 - DNA, 395 bp, Glycine max
  unsure (1)..(395): unsure at all n locations
ntacaagctcattcctanaagggcaaggaagagggatgtggttcactgataaaggaaagggaagtcgcaaaactcatagcaagaattttgaagaaactcaatcaaaaactagagaatcttcaggacaacacaagaatggaatgaagagttggaagaatgagggaaagaaatttgataaaagaaaggtaaagtttttcaattgtaataagtatggaaactntgcctcanaatttactcacaaacagaaagaagggaggaacaaggctggtgatgaggcaaatttagcagaaggagctgataatgactctgagcaggttttgctaatggtgactgagaaatctgacaaaggaggatcagaagtttggtatttggacacggattgctctaaccacatg

SEQ ID NO: 269068 - DNA, 252 bp, Glycine max
ttagctttgaccaaccccaatgttcctcttaaacgcctattctcacaggaattaccctctcatcgcgattatcgcttgtgttaccattgcgaggaaatgtaagtccaatgccatcgatgtaagctccatcttcccttattcattgttcaccaatatgaccttgcaccggagaacccatctactgaacacgaacctcctttcaccatttccaatgttactacaccttcactcagtctgaacgctttggctgac

SEQ ID NO: 269069 - DNA, 427 bp, Glycine max
  unsure (1)..(427): unsure at all n locations
ntgcttctacatatgttacttacatgcacttatnttcctaactttattttataaactatttcaattagcttataaatcactatttttttattctcgaccatttatttaaaataccttctaatctcaaataattaaatatgtcttttgttattttaaattttttagttagtttattagctaatgttattaaattagtttaatttaattaggtaacttctaattttttaactgtaactctttctatcacattagttttttatgttatctattgtatctatattattctttttctttctttctcgtaatattatgaatgcgtaattaaaggataaataattaattctatccttaacaatataagagggtgagaatttagtttctcacaatanaattgaatactcatctattatctatatactgtctataa

SEQ ID NO: 269070 - DNA, 312 bp, Glycine max
  unsure (1)..(312): unsure at all n locations
agctttagtcaaacagaataatccagaaatgtttaataattgngtgttgaaaaagcataacaagactttctgtgattggtttaaagatacaatctttagctgagagcatcaaaagagagcctctaatagtatcacctttggagtgcacaattgttaaacggtgagaagtatggttctgattttgtggataccatttcatgaaacccaggtgaggttctttaactaaactaaatgttattgccccaccacggcttataacggaccccataatcttggccatccatgacaccatttatggaaatgcttttcatc

SEQ ID NO: 269071 - DNA, 274 bp, Glycine max
  unsure (1)..(274): unsure at all n locations
aatgctctttgtagatcaaattaagtttgaccgcttcactctcaatataaccgtatgtaatttgntgtgccagcattacgttatataaatgatataatttaattttcctattggtatcctctgcataatttgggcagttcaaacactagctccaacttggaattagtttaccttttctatagcttcttctatgattcccttgaattctgaaatgattgccacgtggtgctattttctttgaccaaaggtatgtgggagagtgatgggtgtgaaa

SEQ ID NO: 269072 - DNA, 487 bp, Glycine max
  unsure (1)..(487): unsure at all n locations
nccccgagaggcttgatttgagaccattgataccctgcattacggacctataatactgaagctcacgctaagtggcgcactatgatcgttggtaacgttcttggccgctnattaacttacacactgacatcgttccatcgccgattgaagcgtaagcttgctcactctattatattggtctaccgagtgttattgcaccatatgaacagctgtattattgcacaacagcgtagagtacttatcttcattctatgccacaagtttcactccaatctccctgctaagacactgaatcaaaatttgtcatccacaccataatagagatgcatataggaggcaaactaatactaccaataactcccaagttccacgttgtaggtgggaatatactatgaccaaagggttctacacctctacagagcataactctgcaacacttaaatgataaaagaaaacttcaattctaaactccttcatgtgagaccat

SEQ ID NO: 269073 - DNA, 411 bp, Glycine max
  unsure (1)..(411): unsure at all n locations
agcttatgcacggaaaatgtaattatgaaatttgatatgcccaagaaacaccatttcctagttaaccatgcattaggtaccatgtacaattattttgtttttaagtgaaacgggtttatgatcccaacatggttggctcgtggtgcctaacacatganactaagaatgtagtgtgaagtttcacgcttccccctttttttgtttttgttttgtagaggaaaacgcaaggatgagcaaacatgaaaacaaatggtatgcaattntgcagatcaaaaagtttgttgaacgcatatgcatgatgatgccatgactcatgcaaaatgtgaggctggaatatgataacggacaaatgcaggatatgtccattatgatgctatgaagagatgcttatgccatgcatgatatgaatgc

SEQ ID NO: 269074 - DNA, 333 bp, Glycine max
  unsure (1)..(333): unsure at all n locations
gttaacctcattgtctctcacagtctttatatttgtgagccaattcaatccttgtgtccggactctcagccacttatgatagccaccgatgatcccattactgcttcccctaagctctctgtcctttcttcatgccgcctcccatgccttgcgaacttcttggagtacctttgcattggggtcactgaaaccccgtgtaatgaaaggtgtgatgcttttgtcttatggcgctcctctcatggggtagccaagctgtcttatggcgaggacgggattataattaatacaaccncatgttcccatccaaggaacatttggacatccttcgcatga

SEQ ID NO: 269075 - DNA, 446 bp, Glycine max
agcttcaacatcagaccacttccagggtgctggtactacttcacatggatttgatggggcctatgcaagttgaaagccttggaggaaagaggtatgcctatgttgttgtggatgatttctccagatttacctgcgtaaactttatcagagagaaatcagaaacctttgaagtattcaaagagttgagtctaagacttcaaagagagaaagactgtgtcatcaagagaatcacgagtgaccatggcagagaatttgaaaacagcaggttcactgaattctgcacatctgaaggcatcactcatgagttctctgcagccattacaccacaacagaatgggatagttgagaggaaaaacacgaccttgcaagaagctgctcgggtcatgcttcatgccaaagaacttccctataatctctgggctgaagccatgaacacagcatgttac

SEQ ID NO: 269076 - DNA, 390 bp, Glycine max
  unsure (1)..(390): unsure at all n locations
taaaaattcacttacgagccctctcgatatattaccggactcaatcaacattcgagaataaagttattggtcgttgaattttctcagaggttcaacattccatttcgatcgtctcgatatattacgggactcaatcagatatctgagtaaaacgttattgtcgtttgaattggctcagaggttcaacattcaatttcgagcgtctcgctatattacgggactcaatcagacatccgagtaaaaagttattgtcatttgaattgactcangagctctacattcaatttcgagggtctcgatatattacgggactcaatcagacatccgcgtaaaaagttattgtcgtttgaatttgctcagaggttcaacattcaatttcgagcgtctcga

SEQ ID NO: 269077 - DNA, 451 bp, Glycine max
  unsure (1)..(451): unsure at all n locations
agcttatcggagatggagctntggtggagagattagtccttgtttggctgatttaaagcatttgaattacttggacttgagcggcaattatttccttggagaaggtatgtcaattccttctttccttgggacaatgacttccttgactcacctcgacctctctcatagtggattctatgggatgattcctcctcagattgggaatctctcaaatttggtgtatcttgacctgagatctgttgccaacggaacagtaccctctcagatcgggaatctctctaagcttccatatcttgactcgacctacaatcatttacttggagaaggtatggcaattccttctttcctttgtgcaatgcttgactagtagtagtagctagtgaccaaacctaattcgtattatcatagccatcatacaaacctagctcacactgntcacttgcatccatat

SEQ ID NO: 269078 - DNA, 440 bp, Glycine max
  unsure (1)..(440): unsure at all n locations
tccacatacttgatacccattctacattttcagcttacagatctaactatctttcanggcccagatagaccaaattggagagattcccaatctgagatggaatcttccccatgaatccaacataagagaggtcgaggtgagtcaaagaggtcattgcacaaaggaaagaaggaattgccataccttcaaaataattgtcgctcaagtcaagatatcgaagcttagagagattcccgatctgagagggtactgttccgtangcaacatatctcangtcaagatacaccanatntgagagattcccaatctgaggaggaatcttccccctgaatccagtaagagagaggttgaggtgagtcaangaagtcattgtcccaacgaaagaaagaatngacataccttctccaagaaatccattgccgctcaagtccaagtaattc

SEQ ID NO: 269079 - DNA, 416 bp, Glycine max
  unsure (1)..(416): unsure at all n locations
agctagaaggcaaactggatgcattggttaacttggtaacccagctggccttgagtcagaaatctgtacctgttgcaagggtttgtggtttgtgctcctctgctgaccaccatacagacctttgcccttccatgcagcaacctggagcaattgagcagcctgaagcttatgctgcaaatatttacaatagacctcctcaacctcagcagcaaaatcaaccacagcagaacaattatgacctctccagcaacagatacaaccctggatggaggaatcaccctaacctcagatggtccagccctcagcaacaacaacaacagcctgctccttccttccaaaatgctgctggcccaagcagaccatacattnctccaccaatccaacaacagcaacaaccccagaaacaaccaacagtt

SEQ ID NO: 269080 - DNA, 463 bp, Glycine max
  unsure (1)..(463): unsure at all n locations
tccnctgcaccanatagctntttctatanatagtgatgtaagctccattgtagcttgtatgcctaggatcttcttcatcaatggattcctttgcttcttggaagatgaatggtagtggaatggagaaggaagagagagaggagatgccacttcaaggagaagatgagtctataagaagctcaccaccgtaagaggccatggataagagcttggaggaagaaggagatgaatgaagggagaggaagagaagagcacaaaattttgtgctctaaaagagctctgaaatctgaagtttaattntcaaatgatcaaagttgaaaaaatgcacacacatgacctctatntatagcctaagtgtcacacaaaattggagggaaatttgaatttctattcagatttcacttgaatttgaaattgaatttgtggagccaaattttggatccaaaattcactattatgatag

SEQ ID NO: 269081 - DNA, 421 bp, Glycine max
  unsure (1)..(421): unsure at all n locations
agctatttgaanatagttcttatcatcaataaattctgcaacatctgacatcatgacattgagagattgagcctaatacttaaaaatagtccaaaaggtgaaataaacaatagtataattggtgtatgtagatcatttatgttatggaccaaatatgaaaatgacattattttcttatataaaattgacttatatttattttaaaaaaatattgcttgttatcataagaataaaatctactaacttgggtgttaaggaatttataacaaataacacattatttctacctatgtgtgcatcaatatacttatatttatattcttcttaaacattgcttattagcactagaatcaaacttatgtgttaagaaatctataacaactaacacacattacttaactaactgatctaaattcttgat

SEQ ID NO: 269082 - DNA, 296 bp, Glycine max
  unsure (1)..(296): unsure at all n locations
tcatctatctttcaatctttttcaacatcatctctcaaacatctttcaatatctttctacagaaatttctgaatcatttctcttcatctttctaaaaagttttgatcaacactttctcttccaagaaaaagtctttgataaaaaacttgtgctattcatctttttcattctcttctccctttgccaaaagaatgaaggactaaccgcctgaattcttttgtgtctctcttctcccttacaaaagattcanaggactaaccgctngagaaatcttttgattcatcccttccccttaa

SEQ ID NO: 269083 - DNA, 167 bp, Glycine max
tcaagctcgtctgtacgatgctttaatgatgatgtttctatttatgttggggaaccgctaccacacccggatgggtttacgcaaacaccacggcgacataactaccctgatgaatgcctaaggaaatcgtgggaagtatgggttaggctatcagcccactcatgcag

SEQ ID NO: 269084 - DNA, 393 bp, Glycine max
  unsure (1)..(393): unsure at all n locations
gttgtaaaaaggaaatcaagttaaaaactctgtttaaagcagatatgttgtttctacttcaaaaccccttgaactacttcacattgatttatttggtccctctagaactatgagtntaggtggaaattactatgtctcggtaattgtggatgattactcaaggtttacttggaccttgttttcaaaaacaaaaaatcaagcttttgatgtttttcgcaaacttgccaaggtgatccaaaataaaaaaaaaggtctttacgttgtttcagttataagtgatcatggagatgaattaaaaatgagtcttttgaagacttctatgaagaacatggaattcaccacaatttttcagccccaagaatacctcaacaaaatggtgttgtggagaggaaa

SEQ ID NO: 269085 - DNA, 401 bp, Glycine max
aacggacttttgtccgaaaagttatgaccatctgaattgcgtcagaagttccgctgttacatttcgagcgactcgatataatatgcgacgaaaactgacttccgtgagacaagctatgaccatatgaatatttcgagagtttactctgttcccattcgggcagcatacatctgtttttccctcaatccgaacttcgcgtgacaagtgatgacgcatcgagaggatcgagagctcccgctgttctaattgaatcacttatgaattctatgcgcccgaatacgactactgagtgggatctctacacgaaggacatgccctaggcgacgctgttcggatatcaccacgccataaatctccgaaacctctggctcccctgacacccaggacttcctcccatcgcg

SEQ ID NO: 269086 - DNA, 405 bp, Glycine max
  unsure (1)..(405): unsure at all n locations
tctcatatattatgcccctgaatcggacttccgtttgaaaatgttataccatttgaatttctcgagagctttggttgttcaatntccaatgtctcgatatattatgcacctgaatncgattgtcgtgagacaagttatgaccatttgaatttctcgacagcatgcgttgttcaatttctagcttctccatatattatgcgcctgaatctgacctccgtgtgacaagttatgaccattggaattgctcgagggcttccgatgttcgatttcgagcatctcgatatattatgtgcttcaattggacatgcgtgtgacaagttattgaccattgaatttttcgagcccatacgttgttcaatttcagcctctcgatatatatgcacctgaatcggacttaatgtgaca

SEQ ID NO: 269087 - DNA, 299 bp, Glycine max
aatctataataaaataatgtaataaaagcgattcactgctctttgaaaaataaataagtttaaagtcatgttgtgcacactcgactaaaggttgttgtcccttgtgacgggctcgtggggtgctaataccttccctatgcgtaaacaaatctcgaacccttattttcaaaattcacaaacctctttttggtttgtctaacgcttctctcacataaacattggtggcgattctagtcgttttctacctaagagacgaacgtgtctttatgtcatgtattctctttcgccgtcccttcgtg

SEQ ID NO: 269088 - DNA, 410 bp, Glycine max
  unsure (1)..(410): unsure at all n locations
ntagttntcatgttgttcatgttgctcttcttatctctaacattatataaaaataatattcagatnttagagtttatctaaagcttaagtttatggaatgtaacatgaacaatcaaaacctattactccgttccaaaactataaatgctctacaaattcaacactaaattcatagtcctttctctattatacccttgtttacagttatcagtgcattgaatattttttgtcaccaatagctaaccatttatcaatgagaatattcacttaatattgtctctagactctacggtatctaaatatntgtggttaatggtgattccaacaacatgattaaataggaatattttagtctaaagttttatcaattaatatntagtaatgggtgtgcactaaccttaaacatatat

SEQ ID NO: 269089 - DNA, 303 bp, Glycine max
agcttgaagttccaaggtttgatggtacaaaccctctgggttggatattaagataaactcagtttttgaatatcattcgacccccgaccatgagcgtctaactatatcttctccaagaggagaaggttctcgatagtcgacggtctttccgcgacaaacctactccaattccaccttacaccaccttctcgtctcctttaccttcttccgcaacctccttctctcctttgttacctacaccgtcaaaacctcttccttctctacctaccaagagactgtttctggaggagctaaccttgagat

SEQ ID NO: 269090 - DNA, 418 bp, Glycine max
  unsure (1)..(418): unsure at all n locations
tacggacactataaaactcaacttatggcgcaccggatgtaggggggagatcgatctccttattcanatcaaaccccatgtgtgccaaattaccttccaagtaatggacttaaatcctacctacaactgcttattangccggccttggattcattcngttggggtggtcccgtcaacactgcaccagaagttaaaaattgtggtggagggacatttgattatagtttcgagagaataagacatacttgtaagttgtccatcttcaatgccttatgtagaggctgtagaggaatcattggaaacatcctttgaagcattagaagttgtgagcaatgcttacgtggagtctcccccagtgcagccgtgctcatctagtgccactttgatggtggctcangtgatgttanggcacggatat

SEQ ID NO: 269091 - DNA, 391 bp, Glycine max
  unsure (1)..(391): unsure at all n locations
agctttagagttnttcttttgttaaggctttgtgtcttttgtttttgaatttataatacaaggatctttcttcatctgttcctacgtctctacccattctcatccatttgcatgtttacttctttatttctgaaacggcagatccgatgacgagtcccccgaaggtactaatacctgggacccgcctatcaacttcgagcaagaaacgaatcaaacggaagatgaagggaacgaggatgtgagacttcccctacaattagaaaggatagtcgcccatgaggaccaagagatggggcctcatcaagaagaaacagaacacgtcgaattgggaattggcagtggaaaaagggaagtaaagataggcacaggtattaccgcacctatccatgga

SEQ ID NO: 269092 - DNA, 337 bp, Glycine max
  unsure (1)..(337): unsure at all n locations
tttcttctttctaattcctccttaaattcatcaaattcggtgtagtatactactacatttctctctggtagtagattccttggcaccataatatcattatatctgtcccaagcttcctgagaatggaatcttgatctgtcaaatctgatgtgagaagatgaagaagcaaaggactttcttttcttagatgccatctaccaaatataatatctaacacaagattatcacaggttattttcaacaaaactgaaattntgactgggcgcttatcccacaaagctatggttcgcgtgccttataaaattttactaataagctaagcgcaacaaactcgtgc

SEQ ID NO: 269093 - DNA, 425 bp, Glycine max
  unsure (1)..(425): unsure at all n locations
agctttgatcaaatgactaanattaattggcataaaagatatttagcagatagccaaaccaacttcactattcctagttagaaattccaatattctatattacctgctcattagctgtaggaggaaggcctccaacatacacccgcctagcatgtcatgtagcctgtaaattcagtacatcaaagataggccataatcanggaaagtcatgctaaacttaaaatgaaacttaaataagactgtagtcagtctcagcaagcctccatactcggaaagactaaacttaaaatgttgtgttgacgaagttagtgtgtttctactctttttctataatgactctttttcttctcaatgaaagagaatattttctcccagcagcacagtgatactaaacaaacaaaagcgcaataaaaagaaacacatgt

SEQ ID NO: 269094 - DNA, 364 bp, Glycine max
  unsure (1)..(364): unsure at all n locations
tgcccagagaaggaatccacggaggatatgcttaccacctcgtaagactggaaagcggtttctaatgactcctctgcggcctccacataaggcataaaggatgggcagttcaccaagatgtcttcctcgcctgatacgatgaccaaatgcccttccactacgaatttcaaattttggtggagtgtagagggaacaactcccactgagtggatccacggacgcnccaacagacaactgtaggggagttaatgtccattatttggaaagtaacttggcatgtgtgagggcctatctgtactgggaggtcgatctctcccctaacctctcggcgggtgtcgtcgaaggcacaaaccaccattgaact

SEQ ID NO: 269095 - DNA, 393 bp, Glycine max
  unsure (1)..(393): unsure at all n locations
agctntcaacaagcacaatattactttggttcttactcaatccacaagaaaacaaaaaagccacaagcatgaagaacctaaaattgaatttggcttcctctagctttatacctacccatattttggaaaataaaaaatttttttggtgcgagttggggcaggggaagcacggaaagccaaagtacattcaaatcaacttgaaaccttaaaaagtaaaaaggtgatgctatatggttttcattaccaccaaataaaccatgcggctagactcctgaattaaccaactcacatgttacaaagatagaatcattagcaaggtatctaaatcaactgatttagaatctgacgattaatgacatataaaacataaaacaacctctgatcttgaaagaa

SEQ ID NO: 269096 - DNA, 393 bp, Glycine max
  unsure (1)..(393): unsure at all n locations
cggacctataaatctaagctttgcattacccaacagaatatttacattaaaattcttttgaatcatgaacggcggaaaagaaagaaccaaactcttatctccaatagaaatttggtnaagcatcaacactagtgattacttatcacatatgtgctttcgcattggtgattcactcaatctaattacatacacattaaattaacagcaatgaggaaactggtagaatagaaattaaaatgcattctaacattgaatattatttaaataattaacatttagattgaacactattgaccttaatgttcatgtaacactactattactcctaaactaaaactgaacaaatcacaagatgtggagtgaatgattgttataaaaagttaataacattct

SEQ ID NO: 269097 - DNA, 491 bp, Glycine max
  unsure (1)..(491): unsure at all n locations
aggtacgtgcgtgagcctttaagaccctcgattacggaaacgctcataatcagctgtttttcagaaatggtctggtggtgaagactttgtccatccattgnctcaccacaccaagggtggtgtctcctctcacctctgtttcgccatcatgtcgctgtggatccattggtgagagtcacaaatctaagaccgatttggaacctcttgaccactcccttaagagtctatcgatgaagcatttgaatctatgaagcaccccatacgtcgggtggctttatgccgtcaaagccaacacttcttaaatccttaattgaacgcgatcattgacctatctaggctttaaagaatttatgataattaatacatccgcgtgaacatgcagttggttaaacaaaaacctttcactcttgaccatactgaaattgtttcttatgatgatttcaaacggacgaatgtactctttcctatatcaacatgacgcacttatatac

SEQ ID NO: 269098 - DNA, 286 bp, Glycine max
agctggcttctacaattagatgcacataaatacaaatggtaaaagttgcgtctgatgtgctatcatatcatgatttgtatctctatgtctgcattttcacataatacattcataagacaatctgacataacatttaagtagttcatttaacaccttcatttaatacttcgtgtctgagattctcatgcaaaaaaaattctcctacgatgtgtccatgtcctatgaagaataaatggagtccatagtctacaagacagcgatccttatcaaaagatgcactctattg

SEQ ID NO: 269099 - DNA, 478 bp, Glycine max
gcttaagactaggtttatgttaagtataaccaagctcttctagatcgctttgagtgtcatgatgtgattgatcctattactttaaatgatattgattatagcaatgagtggttattgggagaattggaaggagaagaagctgataatgatttggtttttgatgatgatgatgatttgaattggttagatgttgcttaggtaactggtgctggtgaacctttacaaaacacaaggagtcaaacacagataaacaaggcagcagctgcacctgcacctacaaatgaaaaaggaaaaaaagtggtggaagtggaagaagagaatggagataagggtgaaaaagagtacaattttaatgctagtgagagcgatggatttcaagaacataatgacttagatctttgaaatgatgaagattctgattagtcatttagtattaagaaacttattattattattattattattattcatattatta

SEQ ID NO: 269100 - DNA, 310 bp, Glycine max
  unsure (1)..(310): unsure at all n locations
cctgcacgcatgcaagcttctattgcanaataacaacacagcaacaatataaatagcatcataaagcataacaagaaataagcaatggatcaaagttgacaatctccttaatgaaattaaacatcaatctacacaacctatacgacaaatagatatgagattaaacatcaattgtttaatctcatggattgatcaatgagccatctaaatcaagccacaacattatttagcccacaaacacgaaacccaatactagaccaattacccaaacagacgtaaaagaactagccatactcaatgaaatgccaaa

SEQ ID NO: 269101 - DNA, 473 bp, Glycine max
  unsure (1)..(473): unsure at all n locations
gctgagagataanataacaatgatttagtggctgctttggttgaatggtggagacctaaatcacgcacatttcatcttcctgttgatgaatgcacgatcaccttggaagatgttgctcttcaattgagtttacacgttgatggaaaactaattactgacctaaaatattatgattgggaacaaatgtgcgcataatatatatgtgttctttccccaaagaatgcactaataggatcaacacttaaactaaaatggttaaaagaaaacatattaactctcctagtagaacccacatcacaacaattagtaactcattgtagagcatacattntaggactaattggtggggtgtcgatgccaaacaagtcagggaacaaagttcagctaatgtatctacctctgttagcaaattttgatcaagttggttggtacagagaaatgtgtagagcaacttatcccacattcaaaaaaat

SEQ ID NO: 269102 - DNA, 262 bp, Glycine max
  unsure (1)..(262): unsure at all n locations
agctctccacattcacaatgcgcgcataaacncaccatcccctgttgcccacctncaactgagctcacgtactcccacgtagaccatctcctcgtttctctcaacaccgggtccccatcaatcctctcaagcttccacaacatccaagcaaaacaacgttcaaacaggagaagctatcacagccaagccaaacagagcaaaggcagaaaactttgctcaacacatcaaccaaaatcacagtttttcttacgtaaagaccaca

SEQ ID NO: 269103 - DNA, 470 bp, Glycine max
ctcagcttgtaggcttacggtgggaaatgatagtgagactcaacttggatactaaccttgtgctacaacaattacaacaagacccactatccacaatgagataaatttttttgtttaaaaccttgcatcctgtatgaaagatgctctctctttgggtttgggttaggtcacaagattgactcccaaggagccttctcactattagaagatcaccttctccatcggggtaaacctcttcaatatgctcatcaaccttggcttcaccctcacttccacttgaggaaggaaaagaagtagcctcctcttggctactatagatgtcttgacccctcatgatcacggttttcattgtgggggcattgagaagcaatatggcctttcccaatacatttgaagcacttgatgttactagttctatcttgtgaactagccttggagtgattcctctatgttgtacccttatcatcttt

SEQ ID NO: 269104 - DNA, 175 bp, Glycine max
agcttggatcatggccaaggttggagtccaagatatccctcaacggacatggaaacaaaaaagattacaaaaattcatacttccttggtctttccttactattaacctcttccatttcaacaatctcatccccatgccattcgtgcgcccacaatacgagttcatcatatgttgg

SEQ ID NO: 269105 - DNA, 437 bp, Glycine max
gcttcttatccaaagctcatcttggtggtgaagctccttcttccatggcttattccctagtggatgacgcctcctctcacctcttctcctttgtcttccgctgcatctccatggtggaaaaccaacattaaaggacctcattgaagctcaaagattcaacctccatagaagctccacaagcaagcttccatcactttacatgtctcatgacacctaagtatactcatggacaatctagcattaggacttggaggagtgggctgataccataacagaaatggacaacaataatgaggaaataacagctctattgtggcacacaaacacggagaaacaagcatgcaaatttaaagaattcctcaaactgcctaacaaagacccaaggcctatacaactccgttgccatggttggggtgacagggtgaaataacaattag

SEQ ID NO: 269106 - DNA, 163 bp, Glycine max
gcaagctcttcaaacttatacaagaatgaagctctgatactacttgttagacaagtgatcttagtattttaagaaggggggccccctctccacacatctactcctgtcatctcgcgtcgtcctcatatgtgagcgcttctcccccctcactcctctccttgcc

SEQ ID NO: 269107 - DNA, 296 bp, Glycine max
tcttatccaagacactctctcgtggtgaaacttgtccttccatggcttattctctaatggatggtgtctcctctcacctgttctcctctatcattcgctgcgtgtgacaagctgaaagataccattctgagaccgaattggatcttgatgacgctgactatatagatgcgtttcatgctgcttacgtcactggcgcgggtgaacctttgcgatgcacaaggagtctaacacagataaacaaggcagcagctgcacctgcacctacaaatgacaaaggaaaaaaagtggtggaagtg

SEQ ID NO: 269108 - DNA, 385 bp, Glycine max
  unsure (1)..(385): unsure at all n locations
agcnttcttaagaagattcgtaaagaagctagagcttagctacacatacctctctaatagctaagctcacctccttgagatgagaagctagagcttagctacacacnccctataatagctaagctcacccccatgacaaaaaacatgaaaataaaaaaaagtccttattataaagacaactcacaatggcccgaaatacaacgctaaaaccctatactactagaatggccaaaatacaaggccttgacgaaggaaaaacctattctaatatttacaaagataagcaggctcatacttagcccatgggctcgaaatctaccctaaggctcatgagaaccctagggtctttccttggatctctancccaatctacttggagtcttct

SEQ ID NO: 269109 - DNA, 384 bp, Glycine max
  unsure (1)..(384): unsure at all n locations
tagtgacctatgaatctcagcttagcttcnagggccgagagagactagtcgagaatcgaaggcatgatattggaagacaagttgaaggcttgtcaaatgtcaaagagaagtatgtccgaccaattgagcaagacggaagaaaccatgtgggccatcattgaccaatacaaggagaagctaagtcttgcagcaacccatgcataaaggctagaggatgagtatgcaaaggtgtcggtcatgtaagcagaaagagaagtgagagaaagagtaatcgattcattacacagagaagcaatgatgtggatgggtaggttcactttcaccttgaatgggagtcaagagctttcgagactgctagctgtcgcaatgtgcccttttgcgggc

SEQ ID NO: 269110 - DNA, 125 bp, Glycine max
  unsure (1)..(125): unsure at all n locations
agcttctatagaggctggatntttgagttctaatggtgattttccaccatggagatgtaccagaagataaacgagaagacgtgaaaggaggggccctccactacggaataaaccatggaaaaatg

SEQ ID NO: 269111 - DNA, 309 bp, Glycine max
  unsure (1)..(309): unsure at all n locations
tccatcatcctcttaatcacccatcgtcatagatctggatttggtgcgatagggatgccttgnggcgcgtttagttatggcatttntcctaaaaaaccaaacgtgaggagtacgtaaaaataatgaatgcatgctagagataaaatgtgggagtgatttgattcgcactgatttttggagtaaaaacgcaggataaactcattttattcagaaagttataactactcaagatcagagtgacaatacaaacttcctagcggtttctaattatatgggccattaagtctatcatatgctgacaaatagctg

SEQ ID NO: 269112 - DNA, 335 bp, Glycine max
  unsure (1)..(335): unsure at all n locations
agcttaacacatgaatctaccataaaaatatgagtctccncaaactgtccaaacggacaattcaagattcaatacaatgattaatgcaaattgtccacaacaatcattataatcaatctcaaacgggaatctaacgttcactcatgatgaacataatttgaatagcatatatcaattctcattaatggtagtgaacaagtaataaaagcatcggtaacacacatcaaaagtctaaaaaaacaaacacttgttcttgtgatgatgaacaacatgtcccacaacagcaccagccaataaacaactgaatgaccacccacattcatcattcattccca

SEQ ID NO: 269113 - DNA, 461 bp, Glycine max
  unsure (1)..(461): unsure at all n locations
tctatntatagactaggtagcttccttgagaagctntcttgataaaattcctaaagaagctagagcttagctacacacacctctctaatagctaagctcacctccttgcgatgaaaagctagatcttagctatacaccccctataatagctaagttcacccccattccaaaaatacaagaaaataagaaaaagtccctacttcaaagactactcaaaatgccctgaaatacaaggctaaaaccctatactactagaatagccaaaatacaaggcccaaaagacgaaaaaacctattctaatatttacaaagaagagtggatcaaaccttgacccatgggctcaaaaatctaccctgatgcaatcctaccccgtaagggcattggatagaagactccaagaagattgagccagagatgcaagagaaggccctatggttctcatgagccttacgggtagattc

SEQ ID NO: 269114 - DNA, 360 bp, Glycine max
agcttgtccacaaaaatcagttcggtccagtttacgaccgatgcgggctattgttttctgtgcaatccctgaataattttttgatgatgacgactacgaactgttcggctggcttcatccggtgatgctttttggtatacctcgactggtaatctttcttggccgatgtcgcatcggattattttcgatcaatgcttgcaatggagtcttttctctggtgacgtccgctacatctttgtttcgctattcaattaccgcagtccaatgtcaccccaaatgaacatcggttgagtgtgcacaaaataccatacgcgaccttgaccgaaaactttttgagcgacaatgaataacaaaacatcc

SEQ ID NO: 269115 - DNA, 446 bp, Glycine max
gttgatctcctttgttccggaaacctttcttttctcatgtgcacccaaacccaatctccgggttcgaagacaaccttctttctccctttgttggcttgtttagcatagcttttatttttcctctcaatttgatctttgactctctcatgaagcttcttcacatagtccgcctttgcttgaccttctttatgcttaaaaacagaaacattaggcataggcaaaagatcaagaggagttagtgggttaaaaccataaacaacttcaaaaggagaacaattagtggtgctatgaacagctctattgtaagcaaattcaacatggggtaaacaagcttcccaagtttttaagttcttcctcaaaactgtcctaagcaaagttcccaaagtcctattaacaacttccgtttgcccatcggtttgtgggtgacaagtggttgaaaataacaa

SEQ ID NO: 269116 - DNA, 401 bp, Glycine max
  unsure (1)..(401): unsure at all n locations
tggcatcatcgacgacggtgaaattggagaaaganaccttgaccatcttctcatggaggagggcgttgttgtgaccttcaatgaagatgaggttggggtcagccttattggcacagtagatggcgcgatcaacatgatgatgattgttgtctaggacgaagaacggacccacagggagtggggctactcctccgtgtgatgtgcattggataagacacatggagacattctagtgaactaccttaagcttgtgtcgttgcaattgtcgccgacctttttgtcattgtagtcagaaatcacttaacctaaaaagataaatcactaaaagttttttttttcaattcttaaccgtcagaactgatattatcacaaagcataataatataacaataaaattagta

SEQ ID NO: 269117 - DNA, 306 bp, Glycine max
agcttcaatcttgggcctaaagtctcctactttctttcttccttcttctcgaagctagttctttgagtttggatcggtaaagaaagctcacatcatcatcaatctttgttttgtgggttgaataattgttataagtacattaaatgcatttcaattcaatattcattttgtactttgaaagattttgagttggagttaatttggaatcaattgaaagggatttaagcagcaaaattgtgacctcgtagacctatctatgaaatggcgcctaagttcactttgggctatgcttaatcatggtttgag

SEQ ID NO: 269118 - DNA, 460 bp, Glycine max
agaaccttgaatcttgattcttgaagtcaaatttcttcttgaccctttaagtgttcttgattcaatcttgattatcttgtacatcttgatcatcttaaacatcttgaactcattctttgattatcatgaagtgacctttgagctttttgtcatcacctttgttatcatcaaaacatctttgaatcaatcttgattcatcatgaagctttgcttctacaatgcaaacttttgagaaattgcaagaagttcagcatgaagacttgtactatgaccacagtagcgcgaaaaccccatgatgaaattgcccaggctatttcgaatcaatccaccaataccaacagctcttggattgtaaaggctactacatccgtattgagcttgaaccaatgatcatgaggaggacaccgactaatcaaacaaagagaagcaactgtagaaggacgaggataactattatgaa

SEQ ID NO: 269119 - DNA, 280 bp, Glycine max
  unsure (1)..(280): unsure at all n locations
agctntagagaagacacaagatcatttagatcaatcatgcactgttntcttcaccagatagattgtaaagatccttaattatgatagacataaaacaacatcttaattatgatagatcttaaagacaatatgatattacactcttagtgcataattatttttctcgaagtaaattaataataataatcttaaaaaatacgacttattcaaaaatgtttttttagtttttagttatgaaaaaaaaaccaaattcaaattaaaaaaaatcgaaaaaattgaa

SEQ ID NO: 269120 - DNA, 458 bp, Glycine max
  unsure (1)..(458): unsure at all n locations
cgcgctngagcctggttgtggttcgttttccctcattcccccatcgacccgtcgagtcgctatgcaacatgatatgaagtagtagggtggttctaaagatttgctagcttagccctcagggaacagaggaagagtttaggcttggcttgagaagtagggtcattctctgaaatgttattaataaatttcaatatggagctgtacccaaggtgagttagatcaatntaatttaatttgcaattntattggctccagttttggttatttcgttattgtatgttacaatgtattatcttttaaggtggtggagtcccgttgattctgcactgaaccatgatggagcaccattaacgacatatcagtattttgaaaatatgatgaatttcctggtgcatctgtccaagaaattggacttccttccttccttccttcctttgagacatctgatctgaaacaag

SEQ ID NO: 269121 - DNA, 272 bp, Glycine max
catgcaagcttatcattatatctaagctagagagatcacctgacagattattgtgagagagattcaatgtttctaagctttttaattctccaaacgttgaacgtattgctcctctcaaagaatttccactaagatcaagacttgtaagaaatttcagttcgcccagctctgaaggaatatttccctgaaatttattttggctcatactcatgtccaataaatagagcaaatttccaagttgttctgggattaacccacacaaattatttgat

SEQ ID NO: 269122 - DNA, 448 bp, Glycine max
  unsure (1)..(448): unsure at all n locations
tgcagtgtgttgttcactcaatgtgcaacaaagaataagccgaanacaatagtattttaatcttgtgaacctaccacatggcttccatttatgattcctgaacctaccaaggaaatagctaggactaaaaaagcatatgagcatgcagtgttttagtgtttgcacatggtagctttagaacaatatgctgaaaacaagctttgtaggctccaataattntcacccgtgaaggttgcacatgcatcaatagtataaaagtaaattggtgcgtaagaagcatgcacatgctactcacagttggtatatcatgaagcatgcttataggtacatgaaatgatatatgagaccgtgaaatgttgtcattcacagtacctatctcgtgaaggtatctcatgaagcatgcttatacggtcgtttatggtgaaatgatttatgataccatggaatc

SEQ ID NO: 269123 - DNA, 247 bp, Glycine max
agcttaaggggagggtaggccacacatctaaccatgactgatggcggaacgtacccttgaaacaacacaatgtcccaaaaaccctcctggtcaacaaggtcacccaccctccactggagaacgtcctttggcaaatcatgaataaaaacatcataaacaacattgccttcaagtcataaatctaaccaaaagtttacaaactatccatttcccactaaccttgctcttgatcaatgctggattgacg

SEQ ID NO: 269124 - DNA, 475 bp, Glycine max
  unsure (1)..(475): unsure at all n locations
agtccactntagcttcttgccatcaccttgaatttctggaaaactgagaacacctcatcttttgccttgatcaagtatgcccacatcattctgctatgctcatctacaaatgatgtgaagtacttgttcccacccagttatggtacctcaaaaggaccacacacattagaatgcacaacaccaagtgcactggaagctctcattggcaaatgggaattaaaggaatttcttggttgcttgccaatgagacacacatcacacaccttctctggtacatttaattttggtaaacctataaccatattattagttactaacatattcaaacttttgaaatttaagtgaccaaacctgagatgccaaagccagctcaattggttgatctttgtagccattaaacattgtacttctgctgccttaatgttggcttgaaaggttctatttcttgagagtggagatatcaagactagcttca

SEQ ID NO: 269125 - DNA, 289 bp, Glycine max
  unsure (1)..(289): unsure at all n locations
agcttctttaataagctattggcattatgactncataacatgttatcctaaatatcttgtatcgcgaataccaagatcaaggattcttttaaataaaatgaatgccttcattattttcttcaacaactgataacgattctgcagctgcctaccttgcatattgtgtctatattgccaatctagctattaataacattgcaaatcttgaaaatgacaaatgagaataaaattccaaaactaatgttcttggataagtttcgtaagccttcctttcttgtatatacaaata

SEQ ID NO: 269126 - DNA, 478 bp, Glycine max
  unsure (1)..(478): unsure at all n locations
ctttagatctttctctgttntaacaaattagagcatgttactgaatttccacgagtggttattatcatgattaagagtaaattatactgacatcgccgtgggtttttcgaaattcacactgataccctcttcttttttcgggcaataacccctcttaattgtttgaaatacattaccttgatatccctgttactccagaaaacacattaactttgtactcatgtaaagggttttttttttgtaaagttaaaacttaaaaaggaaaaagtttcgtgtgactttcgaagaagtcacaagggatgtgagcaaaatttgctctatattattaatagtttntgtaaggttcagaagaagaaagaaagatcttaaggtagttcggtttgcttatttctgtagtgcctataactgttggaatgagggtcctttgatgttttcaatactgagttaggcctttgggaaattaagccatctcaacact

SEQ ID NO: 269127 - DNA, 382 bp, Glycine max
  unsure (1)..(382): unsure at all n locations
agcttantagtttctccatgacacttactgaaataaactaaaaagagcccatgggaaggccataagccactgtaacaagcccaaataagccctctacaatccacactgggatagttttagatagaattatagaaacagcaaaatcgaagataattttaagaaataagctaatgctgctgaatgtttgcacgctcttagtgctcatttccgtgcttatatacaagcattggagaaactacaattggatatagcaacatataatgatttaattggtgtacagactagaagcagtggcctattcataagagcaacggaaccactgaagaatngatctgctgtatttgctcttggggatangaataatatattgaacgtatcaccc

SEQ ID NO: 269128 - DNA, 478 bp, Glycine max
cgattatgtagttcttacgaatcattccaattacaattattactataggaacgctcgcacggagaatttatattatacagtatgatatctgaaatttatacaatatgaaatagcccagcgatgttttgtattgaaaagtttaagtgatttgattttcgaggttcaacaaagttagacaaacctcggcttgattttcggggtccaacaaagtccttacattagccgcaggagtcgaatccttatctttatgggacataaattcgttaccaactagacaacctttgttggtagtccaaccatgtataattagaaagaattcttttttttttttctaaacaaaaaagtttacgaaaagggaatggtgatgaacttttaaaaggaataaaattgtcttgtcttgttccaacaataaattctacggaaatttctaaacatttaaataaaacaattcaaaaagaattccaggtacaaacgaagt

SEQ ID NO: 269129 - DNA, 157 bp, Glycine max
  unsure (1)..(157): unsure at all n locations
agctnttcaatttaatgaggttgaatgacaagcctgcttggtaccaaaagcgagcaatatgttgatgcaccttcaatacttcattcttatccatcgactttcttatgttcatttgccacaacaatttcattttttctccgattgatcgcattttttg

SEQ ID NO: 269130 - DNA, 463 bp, Glycine max
  unsure (1)..(463): unsure at all n locations
tatgcgcatatntccttacgaacattcactcgcacaagatattcttctaactaagaaaaatgcacccatgcacaatcaaggcactttcgttacctacattatttgtatgtacttccaaggtgtactacctacaccacatgcatttcctcggctaaatttacatacatgcatgctcaaagcctcttggctaccaaaagttgcacacatgcaaactttatgatgaatcttggctatctacacaataaggtgctacatttcatgatttattcaagtgtttttactacctaaagccgcatgcaaattcaagtatattttcttttgccgactaaaattgtattcaaattaaaaggtgtttttgtaaggtattttctttacataacatgcaacatatntatatatttttgtgagacatttngactaccaaaaattatatgtacatacatccaagtatttagctaccaca

SEQ ID NO: 269131 - DNA, 368 bp, Glycine max
agcttgtcgtttgttgtcaatttgcataaaaagttaccatctaagttctccttataccaagaagtgtggtctacttattgtagttaatttaattctccagttagtatgcaattcttcatagttaatgcaaggaaatatacaatttggtaatctgagttcatatgaaagatgtgcaaattattatattatgaattagactatctgaataaaattattatatttgttaaaaaagccacactgggaagacctgttctgtctgctaatcctttacaagcaaaacctaattttgtaaatgctatgagatctctggtaaaaacaattagaagtgttcatgatatctgttcactgaagttcttagtttcttacac

SEQ ID NO: 269132 - DNA, 442 bp, Glycine max
  unsure (1)..(442): unsure at all n locations
tgtgactctngganatttctctataacctagtcacttaaaagttgtgactnttgaaaaaatcttcagaaacaagtcacttgaagaattgtgacttttggaaatctattcttcgaaatcagtcactggtaatcgattaccattaaggtgaaatcgattacacatcaacagatttgactcttcattntaaattttgaaaattaaaacgtttagaagctctggtaatcgattacacaagtttaaaatgatttgaaaatgattaaacacaagttgtaactcttgaaatttaaaatcttaacattttaaaacactggtaatcgattactaccttctagtaatcgattaccagagagtaaaactctntggtaatgattntgtgaaaacttcttgtgctactcaatgttttagaanacttttttagtacttatcttgattgagtcttct

SEQ ID NO: 269133 - DNA, 235 bp, Glycine max
  unsure (1)..(235): unsure at all n locations
agctntatgatcaaactatnttctctctttttctctcaattattcttcattcttcttcctcttttcacttcttttttttcctttctcttatacaaatttccgggtttttccattagtgatgattatggaacgctaaacacttaatcaatccaacgatccactccaagcaacgcctgaattgagatctggcttaccatttctaatccttgtgaatgtctaactctttctttaatcc

SEQ ID NO: 269134 - DNA, 464 bp, Glycine max
  unsure (1)..(464): unsure at all n locations
tctgctgccaattntatttctaatggagaaagttgcctttccattaacgttatttacatattaaattatgaagaaagaatgaggcgttatgctgtgaattggttttgtaaagttgtgcggctgcatgtacctttctttcaattccaattgaaaagccgttgctacgtgtaccttccttgtaggggaattagaaattttggatattgctatttgcaacccattttgctatttccagtcccgttgctattttggataatgctcatgtatgtttttgaatcaaacttaactgtagtttcccatgatacatgatggattaattntggatgtatgactcgtgtttctaacattatgcagagattccttacaatacaaacaataagcccaaatgagaagttcattttcatggngaatgaagtgaaagctccagtggaaatagttgagacttatnngttaaaacgcaacac

SEQ ID NO: 269135 - DNA, 221 bp, Glycine max
  unsure (1)..(221): unsure at all n locations
tgccagctntgacaaagacctacacgtattcaacagcacaacattctcaaaagtgatcaagtccttactaaaacagagccatcggaagcaaagaatattattgcacaaagcactacaatcaacaaaagaaacaatgaagctatattccgcagaagaatcaatcttttagtgtagcaattcatgacaagctcgagaagatgtcatgaaccacctacaatagc

SEQ ID NO: 269136 - DNA, 454 bp, Glycine max
tggaagctctgcttccataatatgcgcacgaccacactactaagtctctagtacatgccacccatagcgagagacatttatacacgagcacaccattatgactttagtacatgccacccacaacgagtgacatgtacgcaagagcatactattacgtctctagtatatgccacccacggcgagtgacatgtacgcacaagcacgttatcatgactctagtagatgcaacccacagcgagtgacatgtatgcaagagcataccactatgtctccagtttgtgccacccacgacaagtggcatgtatgcaaaagcatggcgaccaaaacccaagtcagataattccctagttggtactccaaagggctcgcaaaacccaaggtccacccttggtgagttctattaatccgcaccaccatgtctccagtatgtgtcactttgtatgaggcacatatg

SEQ ID NO: 269137 - DNA, 268 bp, Glycine max
  unsure (1)..(268): unsure at all n locations
agcttcaacctttgttcatttcttatgattagtacaaaagcttggacctttgtttgttctacaatgacttcatcatttcgcataccaagctaacggatttctcttcactggttcgctcgtatgtatcatttacctngaaccatctattccttaatttccatcgtggtcattgttgtctacctgcttgactcgatcattagtccacctcattgcaatcctgctttcaccctcatctgttttttagaatctatctccatccacctcttat

SEQ ID NO: 269138 - DNA, 540 bp, Glycine max
  unsure (1)..(540): unsure at all n locations
cggattgaccccatgtatntacctgacactatatcgtaactctagcttatatctaaggacatgggctgaagaccttgcagtgagacacatcatatgttctntgtaagcatctcgaggacgtaacatatctgggagatgctcttgctatctaggagcctttccttctgatatcgcctccctacgacttagctttgcattgatataagcgtgtagaggcataccgttacacttgggcctacacacttatgaacgggactggaagtcctagtatttccttagaacatctgtacgtgtacaatatgtatatctaccggacataggcgcgtatgctattaagacatcgctaatggaggctcacccatgattatgagcagagacgtacctgatctcatgtaggccgacttgagactgcaccggggcgtggaggcataggaagcacagtataagatctgagtaggcctgtgacggctcccttagaccgcgccattcgtgactgctaagagtaggaataaccaagatcggttgtcactgctttacatn

SEQ ID NO: 269139 - DNA, 560 bp, Glycine max
  unsure (1)..(560): unsure at all n locations
gcaccctctcagccactcgttatnngnaanactttctagttttanntantnnnnnnncccgcacgcggtgaccntgtganaccnttgaattcctggagnctccgcganctncacaggcgacntgnnagtatgtaagcttcacatcttatgaacatatatacttgctacgagacagtcatcatctgtgaatataaaaatctcaaaaaaacaaataaaattctcccacagatcaacaatccatcaaatgaatgcttattattcttatgcctccaccattcttgcaattaacagaagacctctgtccatcaacacaccggcctgttctccgcgctcatcctttacaaaataaactggcaaaatcttctggaacgcgtgccaccccaacaagctgtcagacccaccctggtggcacttacctaccgcgcgttttcagttaagcgaccgcgcgacgccgaccaattccgccgagagtgtggtacacaacctcatcactgcgcttgagataataacacgctgtcccaaaaaaccaccttcatggtttctaggaatcctctcagccg

SEQ ID NO: 269140 - DNA, 486 bp, Glycine max
tgattggcctgtgaacctgtcacttggatcacgcgaacataactctgagcttggtactcccccaactctgcttaagttgtttgacctttcccgcctgttccgagtgaatgacgtgcatcacttgtgacatggctacatataatcaaccagaacatcacctggtatggagcaccacttaggcgaaatccatctcgacactagacagagtagtctgtccattatatgatctgcaaattaaaacttattcaagctctggtgatggattgcacacatttgaggtgattcgccatggactaatcactaattgtaagtctggatgttcccctctcatcaaattaagatctggtgatcgattacgaccgtctagtcacacactcacatagaatacatggctatagatatgatccccgatatctcgcgtgtgctgacgattagaaacattttacccttctatactgagactatgcgaggggttatcactttaac

SEQ ID NO: 269141 - DNA, 281 bp, Glycine max
ctcttatcttcctctctttgtgattctttatccgagccactgtaggattttcaggcggcggacaaactgcatagtcttcttctatcggctcccaaagatctagtgcttcaagatgggtagtcatccttgcagcccataggtcgtactcctcaccatcaaaaactggcggcggtattatgtgtgttgcgtctgctttcattatggtttctctcaactcacaaatccctcaagatgatgactctgataccaatttgttgaatattagatcaaaaacagagaac

SEQ ID NO: 269142 - DNA, 350 bp, Glycine max
  unsure (1)..(350): unsure at all n locations
cttgcagatttagtgttagctggcgagaggatcgaagtgggtctgataagacggaaatctgattatgcttctactatgagttttggcaataagaggcctgnggcgaatgatgcatagaaaaaagagggagatacccataacgtgactacaacgcccacatggccgagctccctgcaaacccctcacaacctcatgtatcactatcccccacaccagtagcactactcggtcaatcggtcctcccccctgccgaacgccccttcgaccaagagcacctaaacaaccgcagagacctactcaacatcacccactaaatccattccctatacaacccatgccagatgcaactt

SEQ ID NO: 269143 - DNA, 241 bp, Glycine max
  unsure (1)..(241): unsure at all n locations
agcttgcttgcttgcaccacgaacaatgaagactggagcctccttcttcttccttcaatctctcagccatcacctccaacggtagagaaaaatggttttcaaaatgtctaagtgttgtgtgtgggagagagaatgaatgagacagatgatgagggtttggtgttggggtcctggggtttacggtangattactggaattccacttgtccattacgtttaatgcatacgctacgcgtcatgt

SEQ ID NO: 269144 - DNA, 516 bp, Glycine max
  unsure (1)..(516): unsure at all n locations
cggatgaccatctattacggacactatgaaactaagcttacaggctnggatgggagggatttctagaaaattagagcataattacctttctatcccaattttcgtctntatttaatgaattcaacttcatctcattcgtcaactctatattataataaccttcctatcaagcataggttgtattacaagtcataaaacttatagataaatctatattttattctatcatttttttacctatagtttaggagttagtctttgccttgtttaatttagaataaagaatacataaatcaaataagaaagcaaaagaattcacagctcaaatgttatagttattattaaatttgaatgagctaattacattagttgattatatatacacagtatatatatatatatatatatatatatatatatatatatatatatatatatatatatatatatatattatatnttattattcttgtgtgggattaaatattttcttttagttttatacaattntattaa

SEQ ID NO: 269145 - DNA, 374 bp, Glycine max
  unsure (1)..(374): unsure at all n locations
catgcacagcttanaggataaataaactgttcctatctgtgtctgaaactattcttcctgaggttggatctatgaacagcttaattggaaatgatcgaagctcgatttgatgtttggcttacgcaaagccctcagtgatttggaaatccagcacacctctcgttcaaattcttgttaaatcagtcttatatgtgaataatatcaagacaacactcattaattgactattctgcacacacgagatattctgcattacctatcttattgtattgaatatactcttagtttgtaatatgtcactctccttgaaacaatcatactagtttctattcctgctncatctttttcaatgctcttcgttgctattttattat

SEQ ID NO: 269146 - DNA, 460 bp, Glycine max
  unsure (1)..(460): unsure at all n locations
tattagtaagagctntaagcttcggccgattcagagccaatgagactgctctatcttcatactctntcatgctacatggttccacaaaagttgaaaattaagtaaaagacagggagaagtttacaaaagtaagcaaccaaatcaaacaaaaaaacaaactggaaagtgctaacctgctaacaatcatctcgtcccctagtccagtggcaagacagagtgagcccgcaaccctagtagccattttttcaagaggcagagtaaccattggcaaacctgcccatagtatatctgttcctgttgtatgtgcattgcataaaggcctacaagaaaacaaagtccacgcacataagacgaagaanaactatataagcaaacaattgtaaggaagggggagagggccaattgtttgcgaacaggaaaatgaagatacaaataanatacaggtcagtaattacgagtc

SEQ ID NO: 269147 - DNA, 342 bp, Glycine max
  unsure (1)..(342): unsure at all n locations
agctttgtccctcgaaacctctgtgtaaatcaaatctttgtncctgaaaccctctatgtcaatttgacagcctcgtctctcccttcctgaaaacctactaaaaactgcctaacccccctgctgttacctcataatttattttgcaacaactgcttaaggcagttacatatggtcctaaatcactacagattcaattacgattaaccctttgtgcctaactagggtttcgaaacatcacaacagagacaaaccattgaacaatggattttcatcattaacatacaacagagacatactttcgatggaagcgcacgaactccacaaacacgaactccacaatgt

SEQ ID NO: 269148 - DNA, 470 bp, Glycine max
  unsure (1)..(470): unsure at all n locations
agtacatcaaatatccnctataaaagtcttttcaagagttgtgcatggtataatttatcagaggttcaaccctccactaggccacctaaaatcattgtttaaactaaaataatgataaaagaccaagataatagctagtaggattcatatgaggggtttcggtaattgatagttatatataagaaaaatattcaagttcagatacttttcaaatcttaaaatcatcttctaattacaatattaaaattaaaaaaaaattcaatacatattattgtcttaatttttaaaattagggaaaaaataatataggaaacatcctttatttatgacaaagaaatcttataacaagcaaggagacaatttataacaaacttacccttgttgtgaaggaaaataatatagcaagcgtcctttatgacagcgggagcgatgaagtattgattccagaccttcatccttgtgaattttca

SEQ ID NO: 269149 - DNA, 166 bp, Glycine max
agcttcttgtagtaaaaaatggtagtttcaatgtctctttccaccttctctgcatacaataccaattcattaaaaacaatgaacacgcaatgagataaacgaccacggaaccaacacaaaaatacaaataaaacacaatatgaatatgaaaaggaatggagaggaa

SEQ ID NO: 269150 - DNA, 457 bp, Glycine max
tattctatgtgatttaccaaccacacaatgatcacaaaattcaagtttatctagtttatcaccacctagtagattttgtttctcaagttcatgtaatcctctttcactaacatgacctaatctcaaatgccaaagttttgttttatcaatcaaagtattactagctaccgatgcatgtccaacaatagtggaaccttcaagaataaacaagccattacttttattcttgttacccttagctatgattaaagatccatttgaaatcttaagaacaccatttaaaattctagttgaatatcctagatcatcaaacatgtttatggaaataagatttcttttgagttctggaatgtaccttacatttttcagtagatactctctattatcaaacatcttcaatctcacaattccaatgccttgtaccttgcaggggtagttgtctcctagcagtacagct

SEQ ID NO: 269151 - DNA, 269 bp, Glycine max
  unsure (1)..(269): unsure at all n locations
atgcaagcttgtagaatgtttaaacatgatacatgtnttttgttggtttggttcaaggataaaagggatgccctacattatttccatgacacacatgcaaaaatgatgatctggaaacttcatgcaaaactggtcatgcatgctcctatgtggacactcaagtgtcaaacttttatggtcatgtgatgctacggctcacgattcatttcctgtattttaaatcaacccactgtctccaaaatatgttcttttatcaatttgtgcattca

SEQ ID NO: 269152 - DNA, 476 bp, Glycine max
  unsure (1)..(476): unsure at all n locations
tataatttctatttctagaccaaaatccaattattaacatctatgtcattaatgagttgaccattatttgaccagagaattttctctgaattatccttattctttctaacctttggcttaaaaacttaagattttaatcatgcctaggtatcctatggtaacatcttatttttttccatttcaacaatctaaaaatactacccaatcacacgacaaaacaataacattgtctaccacaccttcatggataattggtttgttacaagatatatcattccaacttccaatagccagaccacctcttttctgaatacttcttccattagaatcatatgcatgcaatacgaagtacttatacctttaagatcatacaaggtccagccaataactnttatgttctcctcanaaatcttcactgatttcttttcttggtgatcaaaaagactttgaactaatgataactggttttttgaata

SEQ ID NO: 269153 - DNA, 355 bp, Glycine max
  unsure (1)..(355): unsure at all n locations
agcttgctcttgatttttttgatgttctttaacatccctaaaacaatatacgtgtccttcattcaatcgcgtttgggctcgacgaccacgatcaacaaagtactttcgacacctactatatgtcgatttcaacaaagctgctatcgactggctgcgacaatncttgaatacgttatttacacattatgagagattggtcgtatgtgaccatatctacgtcctcttttatcataagtcatgctcgattttttctttgaaatgcgatcaatccatgtagatatggctggacttaactgaccaaactcttctaaattatgatcaaacgtatgtttgcaggagtgtacgctgtattaca

SEQ ID NO: 269154 - DNA, 422 bp, Glycine max
  unsure (1)..(422): unsure at all n locations
tccatcaagtggtaatcagagcacaagagcttctagtatgtgcttcttaaacctccattaactttttgctttaccttctcttccattgttgtttcttcatttttctccatgtatctcctcacatgtcttgtgctaaatgtttttaacatgattctttagagtttcaactgattaaacttgctatagaagctagatttgattctctatgggtcacatttcttgttcttgttcttgaaccatgaattgtcttgagtttacgttcctttgagttctgtcttgttattgtttgtggctgaaacctaaaccatataattcttaccaaaacattacagtagaagagaacctcaaaattctggagtgactngttcacctattgtagatttgtcatagaagttatgtctagacatgaaactagccacata

SEQ ID NO: 269155 - DNA, 345 bp, Glycine max
  unsure (1)..(345): unsure at all n locations
agctntgagccaattcaaacgacaataactntctactcggatgtctgattgagtcccgtcatatatcgagacgctcaacattgaatattgaagctctgagccaattcaaaccacaataactctttactcggatgtctgattgagtcccgcaatataacgagacgctcgaaattgaatgttgaagctctgagctaatctaaacgacaataacttttttctccgatgtctgatcgagctccgtaatatatcgagacgctcgaaattgaatgtggaatctctgagccaattcaaacgacaataactctttactccgatgtccgatcgagtcccctaacatatcgagac

SEQ ID NO: 269156 - DNA, 432 bp, Glycine max
  unsure (1)..(432): unsure at all n locations
tgtatcacattcaaacgacaataacgttntactcggatgtttgattgcgtctcgtaatatatcgagacgctcgaaattgaaaacggatgctcgtagcacatgcaaaccgcaataacttttaactcggatgtatgattgagtaccataatagatcgagacgctcgaaattgaaaaaagaagttctgagcaaattcaaacgactataactttctactcggatgtctgattgagtcccgtaatatatcgaggagcacgaaattgagaacagaagctctgaccataatcaaaccacaataactgtatattcggatgtgcgattgagtcccgtaatatatgaagacgctccaaattgaaaacagaagctctgaacaaattcaaacgacaataactttgtactcggatgtccgattgagtcccgtaatatatcgagac

SEQ ID NO: 269157 - DNA, 516 bp, Glycine max
  unsure (1)..(516): unsure at all n locations
tggattgacccccattagataccngtcgctattgcgtgccacagtccattactcaggcatttgacttcttcattccagctgcataaagattctttcacaaacactgtatgcgcattagcgaatacgtagcctgacatatatgagtggcctacttctagtgcacagagatccatttccaggtgcctccctgaggtgttgtctctcagagcatgaccatgtatgtgtgtatgtgtcccatcccgctcaaccttgagaatgctactgcttcttaagaacaccattgatgaaccacctgaatcattgataatcatgaagacatgttaaatcacctttacaacctcttgtggtgtatcatgaatgataccacattcttgtcatttacaatggaatatattacatggatgtacagacttatatgatcaatgctctatggtgtagacatgcaagtctcagcattcatcgtacataccatgccgacgagatacgcaaacaccaatctctgccgggttagcatgg

SEQ ID NO: 269158 - DNA, 569 bp, Glycine max
  unsure (1)..(569): unsure at all n locations
tgcngttgaaaccnatgtagantaccncatgctantatacgtgacaactgtctgaatactacagtgcattacacacatctcacatactatgacttactcaatacatatagtagtgtgatcatatgtattagtccacacatctctacgtgtgcataagtagcttctctcatagaaacatgcatagtactgtgatcactagcaatccactcatcattataggctccgagaacagttttatctaataactaatgactagctagcccagcatgactaacattgaaggaaccctccttaataagcaatccattacttctattctagatgaccttacctctgattcttgcatactgtcaatgactaatatcgacattatatatgataaaggtatctatcctatcacaattcatgttctgggatctaatattgctgaagagtcttggaacgtacattacataaataaaagaatactttctactagcatacagctggcttctatatttgcgatgcaatgaaaatagtacgggtccaagacgattgaagatgaggctccagctggaggatgatcttcg

SEQ ID NO: 269159 - DNA, 506 bp, Glycine max
  unsure (1)..(506): unsure at all n locations
acggcgacgttctgacncnactgcatanccgtgataaatagacgaaacntgacagccgacctgcangcatgcaattttcttatacaaggctcatnttggtggtcaagctccttcttctatggcggatgccctagtggatggnccctcctctcacctattctcctttgtcttccgctggatcttcatggtggaagtcaccattaaaggacctcattgcaagctaaagatccagcctccatagacatcccacaagcaagctttcatcaagtggtatcacagcacaagagcttcaagtaggtgctccttaaaccttcattaattttattcattaccctcccttccatcgtgtctcttcacttttctccatgaatctcctcacatgtcttgtcctaatggtgctacatgattcttataacttccccccgatacacttgctaacaaactagatttgatttctatggtcaaactcctcgtcctgccctagaccatcaatgtgctcacttccc

SEQ ID NO: 269160 - DNA, 190 bp, Glycine max
gatgaagtatggctgagtctgaactacacccttggcttattttcttatgaatataataacgcctatgactcgcttgagtacatcttataaatgacctagaccatgctctttaattactaccctcacgcactagtactctagttgatagtctcccacacctccatggttaattgggatgatcgagagatct

SEQ ID NO: 269161 - DNA, 364 bp, Glycine max
  unsure (1)..(364): unsure at all n locations
agcttcatgaagatgtttcctccttaagcttcctcgtggcttgtttgagatgctttntcaagacgcttctttgagaagctagatccttatctatccacacccatctattaactaaattaacttccttaaaaataattatggatgaaaataatgcaccaaataatcaaacatcacacataatcactaataatatatacatatatatatatatatatatatatcagggtgttacaactttcccacccatttgcgaaattcgttctcgaaatctaccttactccaacaaggatgggtgagcttctcgcatctgactttctaattcctacgtggcatcttcttttgatgcacctccccagactacctt

SEQ ID NO: 269162 - DNA, 359 bp, Glycine max
  unsure (1)..(359): unsure at all n locations
gttgccgatatagttntcactggcgtaaggatcgaagtgggtctgagaacatgcacatataattatcttgctttgatgaatgggaagcttggggcaaatggagagaataataatgagggaggaacccatgctgtgactgccgttcctacatagccaaatttcccaccggctcagcaatatcgatactcagccaatattagcccttcttattacccaccaccctatcatccaagaacacccaatcatccacaaaggccacccctaaatttgccataaaacccacttgctgttagtcgatgaatacgactaactttggtgtataaaacctgtgtaaattgtatcaaactccttccaattat

SEQ ID NO: 269163 - DNA, 105 bp, Glycine max
acgcctatgcgcgttcacacatacactgatcttgttcctgcgtgacaaatctattatcattacatgactgagagttgggcagagagacatgctttctcgctttat

SEQ ID NO: 269164 - DNA, 352 bp, Glycine max
  unsure (1)..(352): unsure at all n locations
atcaagaacatgcttgtacgcacatcgttcacgtgtatgataatcactccacaacgtttgagtacacgagagcttccaccctataatgcaacgtggccgacaaaagtgggcagtaaacttgaatggtcgtcattgtcaatgcggaaggtattctgcgcttcactatccatgttcacacattatcgcagcttgtggctacgtgagcatgaactactaccaatatatagatgttgtttatacaacacaacacatcttanaagcttactccccacaatggtggcctctcgcgaatgaagcggctattcctccttctgatgacgcatggacacttatcccttacccaactacaatt

SEQ ID NO: 269165 - DNA, 425 bp, Glycine max
  unsure (1)..(425): unsure at all n locations
tcttgtcgagttggaaggacttcacttctttagtgggtttcactctcgactntgcttttctcaaatcgagttcagtttctcccaagttactattgagggaggtgcatgctaccgattgtactttgggctttgctacccttttccctttagcaatcttgaggcttacaatataacattccattccactcatttgatcaactctgatagtgataattttcccatcctcacttgggaacttcatcgctagatgcggagttgaaatgatggcccctaactcgttatgtgaaggacatcttatcaatatattgtaaaaagtcaaggtgtcgactaaaaagtacttgatcatgatggactttgaccccttttcatctttgaaagtagttagcaagtgcacatatcctattgtgctcattgtctctactaca

SEQ ID NO: 269166 - DNA, 332 bp, Glycine max
gaatggctagacatgatacatgtcatggtttggtttgtttcaaggataaaagggatgccccacattatttccatgacacaaatgcaaaaatgatgatgtggaaattttatgcaaaactggtcatgcatgcacctatgtggacactcaagtgtcaaattttttatggtcatgtgatgctagggctcacgattcattttctctatgtttactcaacccaacgtttacaaaatatgttcttttatccatgtgtgcattcatccgagtccatttcgggcgatcgggaatattatcacagcattcacccttcacgtgtatacacatttttcaaaaac

SEQ ID NO: 269167 - DNA, 455 bp, Glycine max
  unsure (1)..(455): unsure at all n locations
ctgacgggtggttggagatgataacatccgatgatgaatgggagggtggcgatgctgtggatgacaccgatactaacttctccttctcgccggagttgcccaatcggaaattgtctccgtcgggtacccattgagcacaaggacggactgacgtgcgcagcggcgatggtagacctctgggcaatagccaggttgacgttgcacaccaggaaaagtcaaaaagcatggtaggtgatctactgggctctacctcgggtaagcacaacctangggacagctctgcagcaacacaagaggaagttgcttataccaaagaggaaactgcccacaacaccctacaggatgactgtaggcacagaaatcacacagagggaaacaatttgaatggtggagtgaaagcagttgatggtcaggcctttatcggngaagaagagagatatgccatgcagtctccc

SEQ ID NO: 269168 - DNA, 398 bp, Glycine max
  unsure (1)..(398): unsure at all n locations
catgcaagcttgcacgttgttggtaaaaagcctanttcattatttgtaagcactcgtgaaccaatagtaaatgttaatttggaagccacagttgtaatttggatgcttaaaatatcacacgccaataataaaagattgaaaaacctagcttgattctccttccaatatttcaaaacatcaagagtaggatgatatttatttggaagactcgccttttccaatatgtatccaattgagatttacccacttgtgacacatcttcatcttcaaattatataaacttctacattaattacataaaaataaaaaaatagttaggtcaagtaaataagaataaattaatgatagctaaacaattaagtcaaaccttgacttacattcataacatcaacttgtga

SEQ ID NO: 269169 - DNA, 511 bp, Glycine max
atgaccatctttacgtacactttaatctcaagctgcaaggctggagattatagaacacacacacgcctatgtgcgtgcacacatacacacataatgttctattgatgtcttatctctagtcattatatgacttatgttttttcagttatgcaaattttacgcttgagatgtctaatctttggtgcgagggggatgtgtaagaaatctcacattgactaaaaatatgaccaattaagtatatatatatgtcacgacccactcttgaactgtgatcggggcacaaactataatttccttagtcatctgacctaatcgtacctcactcaaaaacacaattaatagaccaaccaataaggattaccgaatatccgataaaatttttcctacaaacaggacatatcccatattgaattgctggcgaaaacatatcatatatatatgtatatatatgtatatatatatatatatggatatatatatattctcatccacacaatatatatagagatcg

SEQ ID NO: 269170 - DNA, 301 bp, Glycine max
  unsure (1)..(301): unsure at all n locations
agcttagaaattaagtgatcatcaattccaaaacatacggggagtatgaaatgagtgaacacaatatatcatgcatatacattacttgtatcttgatttcacgaattaaattgtcatcatcaaaaagggggagattgtanaagcaaagactttgtctttgatgttctgatgatgtcatatgatcgtgatgatatgatgaaaatgcgcttctcaagtttaattcaagacaatgatccaagaatacaagatacaacatcaagaagatctctattattttcggaacggaattcctaattgaaat

SEQ ID NO: 269171 - DNA, 448 bp, Glycine max
  unsure (1)..(448): unsure at all n locations
aggttcgaggtacttacccgttgaagatcgaagaacgatgaagaacgaatgaagaacgtcgaagaacggtcaaaacctttgcgaaatccctcacggaaaacgttacggaaacgtttcggaagcgcctcggcttagattttcttcacggaaacaatttttccaagcaaattcgaaagagagaaaagtgcctaaggggctgaacccctttcttcttcacttcctcccctatttatagcaaaataggggaggtggttgccgcccagctcgcccaggcgagccaggttgcttcctccagaagcaacagccttctggaggaatattctagagggcccaagtgggcctgggtgctatttngcaccaccattttactaagtacacccccctctgcttttttttggtaattctttnttcgtaaagttacggaaacttacgaatttcgtaacgatac

SEQ ID NO: 269172 - DNA, 460 bp, Glycine max
  unsure (1)..(460): unsure at all n locations
tatgctgcanatatttacaatagacctcctcaacctcagcagcaaaatcaaccacagaagagcaattatgacctttccagcaacagatacaaccctggatggaggaatcaccctaaccacagatggtccagccctcagcaacaacaacagcagcctgctccttccttccaaaatgctgctggcccaagcagaccatacattcctccaccaatccaacaacagcagcaaccccagaaacagccaacagttgaggcccctccacaaccttccctcgaagaacttgtgaggcaaatgactatgcagaacatgcagtttcagcaagagaccagagcctccattcagagcttaaccaatcagatgggacaattagctacccaatcgaatcaacaacagtcccagaattctgacaagctgccttctcaagttgtccaaaatcccaaaaatgtcagtgccatttcat

SEQ ID NO: 269173 - DNA, 431 bp, Glycine max
  unsure (1)..(431): unsure at all n locations
ttaagaagaanaagagaacgtgatctttcccttttatattaaatatgagagacgtgaatgagacaatactaaagtgtgaaagacgcatattttcctacattatttacccagaagttaagggatggaaatattttgtgagttctgttacaagttataactttaacagcatacacatgtatgcgctggacgcacgtatagtatatataactaacacaagtgcttaaatgagatttctacacaggtgcgcatttgggtcagataatcatcgtgaaaataaaagcctcccatagttgtgaactacggaatctatctaggttactacaatagtcgtacgagtcaatgatgaaagatgcgaaaggataagatatagacttcagttttaagagctgattaaggaaagaagaataatgccaaagttaatattatgttca

SEQ ID NO: 269174 - DNA, 378 bp, Glycine max
agcttctacacccaatttttactaaattatgtttctaagacagcttgctcattccactttgagttctttggttaaaaattgtcctttggatatgtgggagatttggctggaaaagcttctacacccattctttgtccatgctcagcaagcacttagctgttcatggtctaatcttctacaagatggtagagcaaacgctccggatgctcatggcattcttagtggatcagacttgacagtggaagtgatggacgaaacaattccaggataaatattggctgattcggtactaggtgatatcgcaacaaaattaacgcttaatatttgaagagctttataaaatcatgtattcataattacatgctcactgctaatgtt

SEQ ID NO: 269175 - DNA, 422 bp, Glycine max
  unsure (1)..(422): unsure at all n locations
tggttcctaactatggtttatggagctctaaaggttgtgggaatgcaaactctgtgggatgatttgttttacattagtaatggtttaactagaaaatgggatgttattggtgacttcaacagtactctgtcaactacggagagtatagggagttgtaattttcatggccaccatgttatgcacttattttgagatttccttctctaggggaatttttttgatatgggatatcaaggagatatgatgacttggaggaatggttgaatacgattatgtggcggatgaagtctaatcatcgtcctcttctcttgaggttagataatctggctaataaaaacaaccacaggaggcctttccactttgaggcaacatggaccttncatgatggttttcaaggtttgataaggagaaaataagagcat

SEQ ID NO: 269176 - DNA, 127 bp, Glycine max
agcttactttgggaatagaccaacaaactgccatggagcaccaacagtttcttttgttctgttagtaacctcttgcagaattaacagcgacgaaccatgacgaattatgtttgtaagggggggggga

SEQ ID NO: 269177 - DNA, 457 bp, Glycine max
  unsure (1)..(457): unsure at all n locations
agaacgaatgtaagacacatcttcttcaacctttgtgattcttgactccatttcattgaagcgcatatccacttgcaattccaaagtgtcaaacctctcaccaacaaaggtttgaagaccatcaaacctgtccataatcttcgaaagaagagatgaatcttctccctcgtgtccttcttcaccaacatttctagcacccttcttcacctaagagccatcatgctcctttatatacccaaaggatgctatgactgaagcgcctataaagaatgatctcttgattggaacatatggttcacaatcaagagggatgttgaagtgttgaagaaaaagggtaacaagatgaggataaggcaatatggcattcaatcgcaatgccttatgcatgtgaaatctaacaaggtgtgcccaatcaattngtaaacctttatgaaaggcccacatgacaatgagatct

SEQ ID NO: 269178 - DNA, 372 bp, Glycine max
  unsure (1)..(372): unsure at all n locations
agcttgtatcatcagttggactgcagtattcatataagagaacttgtcttggaaggttgggtgtggagaaaatatcaaattctggtctgacaatcggctaggggaacaatacaccctacagcagaagtacaaccagcttttcctcataagtagacaacaaaacgctctcatgtcacaaatgggccattttaacaataatagctagtgctgggacttgaggtggacgaggaacctatttgatcatcaaagtcaaatggctgttcantttttggacgagatcagcaatgtgcctattcaaagcccgtcaacgataatatgatatggttgcctgacctaatggacatacacactacgtcacttatatttatgtat

SEQ ID NO: 269179 - DNA, 455 bp, Glycine max
  unsure (1)..(455): unsure at all n locations
ntgcacgtatcagtcaagtgtatggaccatatcgtagccaaagtgcttatcgataatggttccagtttaaacgtgatgcctaagagcactttggagaaattaccattcaatgcctcccacttaaagccgagttcaatggtggttcgtgccttcgacggcacccgccgagaggttaggggagagatcgatctcccagtacatataggccctcacacctgtcaagttactttccaaataatggatattaaccccccctacagctgtctgttggggcgcccgtggatccactcagtgggagttgttccctctacactccaccaaaagttgaaattcgtagtggaagggcatctggtcatcgtatcaggcgaggaagacatcttggtgagctgcccatcctctatgcctgatgtggaagccacagaggagtcattagataccgctttccagtcttttga

SEQ ID NO: 269180 - DNA, 288 bp, Glycine max
  unsure (1)..(288): unsure at all n locations
agctntgcgggattggtcttcgctattgaaacgatcgatgtgggtccgaaaagaggcaaatttgatcattctactacgacgactgagaaaactgggggaaatgaagagggcgagaaagagggagaaacccatgctgcgactgccatttctatacgaccaagtttcccacccaacccaacaatgtcattactcagncaataacaaacctcctccttaccccaccanccagttatccacaaaggccctccctcaaataaccacaaagtctgtctaccgcacttccaatga

SEQ ID NO: 269181 - DNA, 375 bp, Glycine max
gtgacggtgcgcagcccaccatcttttcatagtagagtaccgattatgtgtctaccatcaccattatcgtgtccctttccattattgggggtaccacctgggccgccagatccctgcaccttttgggcgtgttctttgaatgatccgaccccctttatgcacatgttctgtagttgcatcctatccggaaccatatcaaaattgtactgatactgcctaacaaaggcaaccattaggtccttccaagaatggactcgggaaggttccaagatagagtaccatgtaacagctaccccagtaagactttcttggaacgaatgtatcaacaatgcctcatcttttgcgtattcgcccatcttctgacaatacatcttt

SEQ ID NO: 269182 - DNA, 316 bp, Glycine max
  unsure (1)..(316): unsure at all n locations
agcttatgattagtaattctaagtacaataattaaaccaatgttctcatgttcaattctactaaaatgcttatgacnacccatcgatggagccaaatggctctggattcagtacgccacattgaaagcgcacgttcttaacaagtaaaacaacacaacacaggaagttaagacacccaccattaatccaatatttattaatgttgcgatcatggtttacaaaagatctcaacactttggagatcccaatgagtctttgaatcctctaaccgcctccagtactaagcataatatcgctcgattatatcgaaattcac

SEQ ID NO: 269183 - DNA, 435 bp, Glycine max
cggtgcatataatttatatgctccagcttgaggaggagtgttataattatgggtattattagatgtatctttagagtagatttccctattttatcttgttgtagaagacagcagtgtgtactgtcttgtcaaagcttgtcaagctgtctctctcctattagtatatatatatgttatttgaatgaaataaaactaagcaagtgaatgaaaagttttcctcctcacatattcaaagcttcaagtgcatgtaagcatgttcaaataaaaatattcatcagttgtgattaattactaattagctcctgtactattcctagaatttgggattgtggcctaaactcaatcccacaaaattagcttataaggtgaggattgtctgagccttatttataaggaccacaatggtcatatcaagtcgacattggacaaaataca

SEQ ID NO: 269184 - DNA, 330 bp, Glycine max
gcttgatctttagttttatctttaatctttaatccctgaatgaactattcaagtttgtaattcgaactttaattatctcttaattcgctcctaaagatagatcgccaaatctgttgctaactgcacaataatctgttaaagatataacagatttatgtgtccagtatttccggcaggatgtcctggacattgtatccgacatcgtggatcctgcacaatctgttaaagatataacagatttatgtgtccagtattttccggcaggatgtcctggacattgtatccgacatcgcggatcctgcaccttcaattcttcatttgacattttat

SEQ ID NO: 269185 - DNA, 453 bp, Glycine max
  unsure (1)..(453): unsure at all n locations
ctntgtacaagcaatcaacactaagacaacaaanatntaaaagactaaaatntaaatactaaaatttaaataactaaaacataaagcataaactaaataaactgatcaaaataaactattcaaagtacaagacaagaagataaagatcctgtcaatcctcctgcgggtgatcctctgcatgctcattaagatccaacaccggagcagctgatggatcctgtatagtaggttgctctggctccgatgctagtgcagatggctgggaatcctcggggatgggtgctggagaggtatgaactggagaagtaagctcctgagttgctgcttcctcatgagcaactggatcagtctcaaagataaatggctcaagaggaacaggctcatcctctgcatctggcataggctcctctcctggcatagactcttgggctgcaaaggtcctaccccctccag

SEQ ID NO: 269186 - DNA, 503 bp, Glycine max
  unsure (1)..(503): unsure at all n locations
ggacggacggtgagccatttgagaccgtgatananacgagaaaanctcgcgcgaatgcacgcttatanctntgtattgaattgcgaaacatatcgtgacctggtttctggatgatctgcaagctgtgatgtgtgtatagcaggcctctaagaatgcatgcattatctacacgtggctatactacacagttacctttatgtgtgatccgcaaagccagggatccgaaatcgtgttcatcattcattatctgaaagctactatctgctgtcgcacagcatttactttggtggatgaaatttcacgctcatcggtcaaacaatgcacatctagcttaaaagcctttcatgacttccatcattcatcaagtctctctgccacattcactgcatacaaaccggattttgcccacttcacagcgccactgatcacatctctttgcattcttgcactaaatacctgctgcacatcgccttgtacatcttactattttcatgcagcccccg

SEQ ID NO: 269187 - DNA, 471 bp, Glycine max
  unsure (1)..(471): unsure at all n locations
cttgtaaagactaananactagatggagatatgatntatgactttctctntgtttttaagtcaaaaaccagaactaaccatctaatctgcactactacattaatgttctttttaaccatgagatttatacagggtaccgggaaaaaatatattaagttaaattcctttataaattctgtagttttgttaaaattttaaatggagggacattggaatgaatttatttagacttataaaaatcacttggggttcttttataattnttttaactcatttcaataaatttaacgattattctaataaataatttttcaataaaaatttattgaaaatgtgattgattatatataaaaaaaaaatatgtcttaaaccagcaatggttaaaaggttttaacaagatcctatatttatacaattnttaattagattcctaaccgctatcgacatgtttgaaattctttaataaataat

SEQ ID NO: 269188 - DNA, 302 bp, Glycine max
  unsure (1)..(302): unsure at all n locations
agcttggacagtcttcaccttacaagctggttttgtggggtttaattacgcacaaatccaaattctaagactagcaaatgtgatacccgactagagaagattggacgaagagaatatgacacatattattattaattatacaggcaacgaattggaacttgacgcangtatctgacgattttggcgtagtggaagtgggcattttttcttctttttataatctctatttccgctgaattgcattcaacacattttgctttcgctatttctactgatgattttcggttcattgagaactttct

SEQ ID NO: 269189 - DNA, 471 bp, Glycine max
  unsure (1)..(471): unsure at all n locations
cacgtgccanaccacctcctcaggtgttgccacccaagcctccactcaccaatttctccatttataccctcattaccaccaccttaaaccctaccacattaattactcactcttcactcaaaactcttgtctttcattttgataattcccacactatggctgagcttcactaccaacaacaacaccaataccctcaccgataccctaatgatccatacgaacaacaaactagctactccactcaggtcgtcaaggcggccaccgccgtcaccgcgggcggctccctcttgatcctcgcctcgttgatccttgccggcaccatcatcgccctcaccatcgtcacaccaccgctcgtcatcttcagtccggttctcgtccccgcggtgatcaccgtcgcgctgctgagcctgaggttccttgcctncggcgggttcggtgtggcggcgaccacngtgctggcgtggatctaca

SEQ ID NO: 269190 - DNA, 487 bp, Glycine max
  unsure (1)..(487): unsure at all n locations
cgccggcgcctgacacgtctcgaacccgtgatcttcagagatcaccttaggcatgcacgctntgcaaccggaatgctgagaacatatactttaatcccatgtatggaacatctggaaagatgcaaagaaagttctgagatacttatagggaacaaaagaccacatgcttacatataagaggcctgatcacctagaggtgatcgcattttctcactcacactctcgctggatgtcgcgcccaacaaatcgcacctgcctctccttcttccctccggccgaccactccgcccccaccctcccccccccttccccccacacccctcctcctcccccgcacctctctccctcccccccccctccctcccaccttcccctctcctccttcccccctctctctccccccgccgcccgtcccaccccataccccccgcctccccgcccctccgccttcctcccctccttcctccctccctcgccctcgccctcc

SEQ ID NO: 269191 - DNA, 297 bp, Glycine max
  unsure (1)..(297): unsure at all n locations
atcctgatctgaactatatgtgtcatcctccataaaaggtgaagaccaaaggtgctccaaaaaaactgctgaccaaacaacaaaagtcaacaaaatgtgattcatcttattgggagtaagttaatgcgttacattctgtgcaaaatagtaattcttcagtgaaacatagtgcatcatcatctgagcaaccaatatagagacgaaatattccaatgttggatcaatttcatctgtgcatccaagattctattgaaaacattattgatgtcaaagaggatggtnactgtggttatcatg

SEQ ID NO: 269192 - DNA, 486 bp, Glycine max
  unsure (1)..(486): unsure at all n locations
cggcgacggttgcgcatctggtcccgtgatacttacgagtcacctcgcacgcatgcaagcttgcttgtggngcttctatggacgctggatctctcanctcttatgacgctctttaatggtgattctccaccatggagatgcaccggaacacccacgagaatacgtgagaggccgcccctttccctcacggatccaccctcgcacaatgctctctcctcacccctatccatcttcggaccctattcctgctccccttctcacttctatgccactcttccgccttactctcccacttcctcatctgctgctttctccccttctccctcctccccctttctcttctcttcctctcctcttctcttctccctctccttctccctcccctttcttccctcctgctcctcgttcccccctcccttcctccctcctctcctcctcctcccccccctccctcttcttccctctccctctccctttcttcccccc

SEQ ID NO: 269193 - DNA, 82 bp, Glycine max
acggacaacattctcggccggaacatcattccggagagaaatgttaaaatttattatactgagttcgatgagtttaaagtgg

SEQ ID NO: 269194 - DNA, 66 bp, Glycine max
tgacttagaaaatattattattagacttaaaccctatgagggatttgggggttgagaacgaaacga

SEQ ID NO: 269195 - DNA, 179 bp, Glycine max
  unsure (1)..(179): unsure at all n locations
nttctccaagcttcaagctgtagtcttcatgttgcttcccttatctctaacagttctcggttagttttaccccaatataagggagttcatttgagccactctgacacatatagatagatccgtatacagagagaaagagtcttccgccctatcgctttatcaattccgtcctcttgaat

SEQ ID NO: 269196 - DNA, 464 bp, Glycine max
  unsure (1)..(464): unsure at all n locations
tcacttctgacttcctcaatgntccagaatgttgagttgttggccacattgaacttgtttctgcagagagaaggttcactgatctccacaagtaccatagtgtcagcgtcgtacgttaacttgaacggattgttttgcatgctagactggggagtacaatggtacccccaaagcacacgttttcctcccttaatcatcacatgtctgcctcatgttgatgcctcgaggcccccaaattagcctccattttcttgtgtaactgttccatttgctctcaaatttcctgtatggttgacgtctcgactcatgtggagcacgcaaacaaactaggatcacctctccttgttgctaccattctgcaactgtaagagaattttcctcggccccatggtgggtgccaaaatgttcttgctgagtttcaatgagatccgactgagctatctggtcttttgcttcttagtata

SEQ ID NO: 269197 - DNA, 174 bp, Glycine max
agcttgatcaaaacagttctctaaccattccaatccattcaaatcatacaactgctcacttaaatcattctcacactcatttcataccaaacaatcaattgcatatcattttcaatcaattcactgttcaaacacactctctgtacaagcaaacaactcacagtgccatggata

SEQ ID NO: 269198 - DNA, 236 bp, Glycine max
tatagaaagttcgttcctaatttctctacaattgcatcacctctcaatgagctggtgaagaagaatgtggcatttacctgaggtgaaaaacaagagcaagcctttgctttgctcaaagaaaagcttactaaggcacctgttctagctcttcctgacttttctaaaacttttgagctagaatgtgatgcctctggagtgagagtaggaactacgatcaacaaactagctactccact

SEQ ID NO: 269199 - DNA, 257 bp, Glycine max
  unsure (1)..(257): unsure at all n locations
agcttaatactattgtggcatgactctgatattttgattctgtgtctctcgactgtcatttaaatctgacgcattaaactcctctctcataccattattcatcaaaccattttgattnttgtacaatgttatctgtttggcaagtgtaccacatgtccaagtaataaagcctcggaagccccactgtccaattccattggaatcttgtgttgtacttatcttggatactctttaatttataagtggaaaataataaa

SEQ ID NO: 269200 - DNA, 456 bp, Glycine max
taagctgttaggtgaaaacttatgaatgatataaataattgaatataatgtctaacatgcgatatgagccttttgggctttgagcaaaggctgggccaccttaccttgtgctaaaatttatctttttttattttgaataatggagatataatgtgtcaaattctctgtcctgaacacttggtcaagagtctctaataccatgtcaacaaccttcgctattgaaaagtcaagttgttagttaaaactcatgaatggcttgagctgaattaattatatatgatatttattatatttttaaaaattatgattaaacctaattgtataattatagtttaatataattaaattataattcaaattgagactgagctatagtttgaaaattaaaatgcagttagagcttgagctttgattttcttcaaattatagaatggtggaaattaatttcatgtcttg

SEQ ID NO: 269201 - DNA, 436 bp, Glycine max
  unsure (1)..(436): unsure at all n locations
agcttgactcattacctatcatagactttntttaaaggctcgactcggcttacctaanagtctggcttggcctacgagcctatntaaaaatctgcttaaagacgtctctaatcaattaattgttttaaaacctagtaaaatactaacaaaaaaaataaacttataaaatttcgtataagtaatgtacaaatccaaaaataatgataaacaaaatcatattgaattcaagttattaaaacataaagtatatcaaaagaaaatgaaaaaaaagaacataatattaaaaaaatatatggattagagatgatctatactaatatagccaaataaaaatatttaaattgtctgaaaatgtctttacaaaacattnttttctttggaagtattaatcctgatgcattatctttctaacttaagtcttttctttttgaaaatt

SEQ ID NO: 269202 - DNA, 445 bp, Glycine max
tgagggagaatgttgagaagtaaaaatatttaatgtatagatctattatgatccgatttagaggaaaatgaatatcctttcattatcattggtatctattgtaatgacctatataattagaatggttctgttgtgtacttttacactaattttagtctattattcctttatattacttttattttacaaaattgattgagtccagaattaatttaggctgaaataattttaagtagcttttgtgttaaatcagaaaattaatatatttgatatagcatatgataaatttatgattagattatagtgtaaaaatgtacacaactgcaagaattatttattcttgatattgttacaattttaagaaactcttgcaatatttccttatagaaaagtcttgctattgtgttggtgtaaaaagtgagttattccaaaccaaaagctgatt

SEQ ID NO: 269203 - DNA, 402 bp, Glycine max
  unsure (1)..(402): unsure at all n locations
agctctataagtgcgggtctgggagacgaacgtctagtggtcgcgatatgtgaagatgatgttccaagaactctggatttggtccgaccatgccctcctgatttccagctgggaaattggcgggtggaggaacgcccccgcatttacacaacaagcataatgtaaacctttacggttttaaaagctctatagttgggcctacgctntagagtttctattctgttaaggctttgcgtcttttgtctttgagtttataatacaaagatctttcttcatctgttcctggtctctacccattcttattcatttgcatgtttacttctttttctgaaacggcagatccgatgaccagtcccccaaggtactaatacctgcgaccctctatcatttcgagcagaaatg

SEQ ID NO: 269204 - DNA, 416 bp, Glycine max
tcttatccaaagctcatcttggtggtgaagctccttcttccatggcttattccttaatggatggcgcctcctctcacctcctttcctttgtcttccgctgcatctccatggtggaaaatcaccattaaaggaccccattgaagctcaaaaatccagcctccatagaagccccacaagcaagcttccatcaagtggtaatcagagcacaagagcttcaagtaggtgctccttaaacttccattaatttttttttctttgccttctcttccattgttgtttcttaatttttctccatgtatctcctcacatgtcttgttctaaatgttgttaacatgattctttagagtttccaccgattaaacttgctatagaagttagatatgattttctatggttcaaatttcttgttcttgttc

SEQ ID NO: 269205 - DNA, 360 bp, Glycine max
agcttcccagatccgatcatggaaagacttggtgactgccttcattacgcagtaccaatacaatacagatatggctctcgatcggaaccagcttcagagtatgaccaagcgagaacatgagtccattaaggagtatgcccaaagatggaattgatctcgcagcccaagtcgtgccgcccatgatagagagggagatgatcacaattatggtagatacgttacccacgttctactatgaaaagttgataggctacatgccagctaactttgcggatctcgtcttccccggagaaaggattgaatccggactacgaaaagggaagttcgaatatgctgccaatatgcgccccaacaacaaca

SEQ ID NO: 269206 - DNA, 436 bp, Glycine max
  unsure (1)..(436): unsure at all n locations
tggagaatgatttctataaaaaagttagtcgtacaaagcgactaacaaactcccccaaatttacagtttttcttgtcctcaagcaaagaaagaatagttcacttgtcctcaagtgacaaagacagtggccaatcaaaagaaaatagtgtttgattcatcaaggacatcaaccatatgaaatgaatatcatggaatgcttaaatcaattacttctcacaagcatgcaatttttcaaagattctcacaagcattagagtcacagctganataagctagtaagcatgacaaaaattaaggaaggatcatcaaccaaaacctcacagtcattgtttcacacaaactcaagtgtttaggcttattccatcataaacaaccaacacaagttccaacctttgcatttcatctcctatcatatagcaatgaacacacaaaaatg

SEQ ID NO: 269207 - DNA, 393 bp, Glycine max
tattaacttacattactagacacgtatgattttgtacactcattctctttgtacataaattgacggctgaaacctaaatgtcagtcatcttacctacattccgatgcattatgggagtgaactaaccaccaagcaaaacgtctaatatatcaaagggctccatcatctattgcaacgtggcgaccttccatattcatacgggatatgccttatacactagtacattggattctgtacaccacgagaataaacatacgaatcatcacaactgcattgctattcgttcctgatctcactagcttcatcaccatgtgttaaacacgaagagacttcacagttctaatagggcctgtacatgcacactgcatcgtaacttgccaccacataacataa

SEQ ID NO: 269208 - DNA, 348 bp, Glycine max
  unsure (1)..(348): unsure at all n locations
acgcttggaaaattatttctatacaaaagttagtcgtatagagctactaacattcctcaacaatttcttcaagtgcaactaaatcatcaactggttccagcgccagttcattagccagctattgtttaaatcccttcaccttctaatcagctctacttttcctcgcttggataaccattttgcttctagtcatcacaactttgcactcttctttacgatttttctctgcgtttgttcgaaagttgtttgatgatctttcagctaactgctttgcaagctgacccacctagacttctagattcttaattgctgactncgtgctcttttggttagacattgacacttgca

SEQ ID NO: 269209 - DNA, 469 bp, Glycine max
  unsure (1)..(469): unsure at all n locations
attctttgtgggttgatgggttctgtcgcacagaatggcgtgatcactggctgacatattctcaattagctcagttgcttcttccggggtcttcagctttatttttccccatgtcgaagcatctagcagttgcttggtttgtggtctcagcccatctatgaacatattcaattggattggctctgaaaacccatgggtgggagttcttctcaataaacctctgaacctctctaatgcttcacttagagattcatcagcgaattgatgaaattaagagtttgcagctttcccttccgcagtcttggactctgggaagtatttctttagaaacttttcaacaacttcttcccatgttttcagactgttacccttaaacgagtgaagtcacctcttggcctctcatgctaatgagaatgagaataggttgagtcttatagcttcatctggcacaccgaanatcttaacaatg

SEQ ID NO: 269210 - DNA, 405 bp, Glycine max
  unsure (1)..(405): unsure at all n locations
agcttaaggataggatttcaataccaaacttaaattgggtatgtagttcctgtaaaaaaatcaatgaaattcattaatccgtcaagattctaatacatttgctatcatgaaaacaatgagatattntaggggtcagacatcatccaatgtctttagttctaacatttctccttttgcaaaccgctgtaaatatctttgagtctcattttggtggtactagctgccttgtttgtataagacttgcgggtggtggctagttgtcttatctccaagatactttgtatattctgaagagcttgccactttagatgacagtgcctcaatacacttctacatggtgctttcatcatagcttctgatgtgtgctttctaaactctgtagacacatctatctgtattattctc

SEQ ID NO: 269211 - DNA, 480 bp, Glycine max
  unsure (1)..(480): unsure at all n locations
tgtagaatggctagacatgatacatgtcaaggtttggtttggctcaaggataaaagggatgccctacattatttccatgacacaaatgcaaaaatgatgatttggaaattttatgcaaaactggtcatgcatgcacctatgcggacactcaagtgtcaaatttttatggtcatgtgatgctaaggctcaggattcatttcctctatttttaaatcaacccaatgtttccaacatatgttcttttatcaatttgtgcattcatccgagtccatttcgggcgtccgggaaaattttcacagcattcacccttcaggtgtacacacacattttccaaaaattagtgaattttttcaaagaaaagttggaaatcatctcttttcataagcatgtcggttattcagctagacgaacttattttcttttccatcttttttcttacttgctttctttntccttatgtgttctctttttctttacttg

SEQ ID NO: 269212 - DNA, 473 bp, Glycine max
  unsure (1)..(473): unsure at all n locations
tggcttctatccttntagtgcattcaaataagtgttcattttctaatctaggtttacaatgccaacgattttaacctgcaatgtctcttaaaatggaagatgaaaatagagcaagtatttgcatgctgccaatataatgaagcaaaaaaggttaaggtagcagctttagagtttaaagatcatgcttaaatttggtgggatcaagaaaagaaatataggaagggaatgaatgaaacccccgaggcaacatggttggagaggaagacctagacgagaaagaggcatgtttcgagagaatataaaagaagacaaatagaagaagggagaaacgaaagagctaatgagagagatgaaaggttaggttggaggataaaacagaagagggaggatctctctattggtgctaaactcactatacctattcatccaactagaagtanggagcttgaatgtctcatgntgttctgaaaaag

SEQ ID NO: 269213 - DNA, 281 bp, Glycine max
  unsure (1)..(281): unsure at all n locations
agctntaacctcatcgtccctcacagtctctagatttgggagccaatccaatccttgtgttcggactctcagccacttatgatagccgccgatgatcccattactggttcccctaagctctttgtcctttcttcacgcccgcatcccatgccttgcgaactccttggagtaccctcgcgttgtggtcactaaaaccccgtgcgatgaaaggcgtgatgctttcgtctaatggcgctcctctgatggcgtagcccagctgtcttatggcgagaacgggatta

SEQ ID NO: 269214 - DNA, 472 bp, Glycine max
tatatcaaggaataggctaaaaccttcgatgagatctccttccatcatgttccccgcgaggaaaatcaaatggcggatgcacttgctactttggcgtctatgttccagctaacgccgcacggagatctaccctacattgaattttggtgtcgtggcaaacccgcgcattgttgccaagtagaagaggaacgggacggaaagccttggtatttcgacatcaagcgatatgtcgtaagcaaagaatacccgccagagattgccgacaatgataagaggacattgagaaggttggcaaccgatttcttcatgagcggaagcatactgtataagagaaatcacgacatgacactcctgcggtgtgtggatgccagggaggcaaatcacatgatcgaggaagtccatgagggctcgtttggaacgcacgccaacgggcatgctatggctaggaagatccttagagcaggttattact

SEQ ID NO: 269215 - DNA, 270 bp, Glycine max
  unsure (1)..(270): unsure at all n locations
agcttncaattacagttaatatggagtacattttacacacctttgctagtctctccaggcatattggatggcccagatgacagcgcacagctcaacatagaggagagattggaaaccaatataggcggagaaacacccacgagatgcacccgtgtggcctctaaagatggcaccgctgctatagcctgtcccggagacnccgccctcattaaaaaattattggtatttaagatttttgcatgcacacggataattgacagcacaaataat

SEQ ID NO: 269216 - DNA, 396 bp, Glycine max
tcataagagagtcaaaacatcaaattgagaggagaaataaaagctatgctaaacaagccaacaaagggagaaagaaggttgtctttgaacccagagattgggtttgggtgcacatgagaaaagaaagatttccggaacaaaggaaatcaaagcttctaccaaggggagatggaccatttcaagtgcttgaaagaatcaatgacgatgcttacaaagttgagctgcccggtgagtataatgttagttccaccttcaatgtctctgacttatctctttttgatgcagatggagaatctgattagaggacaaattcttctcaagagggagagaatgatgaggacatgaccaagagcaagggcaaggatccacttgaaggacttggaggacctatgacaa

SEQ ID NO: 269217 - DNA, 504 bp, Glycine max
  unsure (1)..(504): unsure at all n locations
cgccccgccgcgtcacgcctttganccccctgtagtgccgtgatccttagagtcacccgcngcatgcaagcttgaaatgtggaagtgtggaacggtgacacttcctacttttattcgntgaccacagagtggtacctggagatatgtcgcggggatcacgagaccttcgggacgtcaggtggcgtgctattgcccaaaaccaaatttgaccaatcctcgaccaacccggggatagttagtcagtgagaacctgtgatgtaactaaacatgcacgctcttgacagtcaanccgataaagaaccaagaccacaaagcacggacgcttgtgtggtggctcgccacccatgagtcttgagtgagatttgcgatatggcctctggtaatcgataccaacggtacggtatccattacaaagcttaaaagtgatacaggaccgttacatgggctctggtcatcgactaccaccgcggggtactcaattcacaaccttacaaatcacatccg

SEQ ID NO: 269218 - DNA, 449 bp, Glycine max
  unsure (1)..(449): unsure at all n locations
gctattacggacctatgaaactcagcttanaaatatatgtagaacataacaagctagaagaataaatggaagttaattatattntcttaaaatcttattttattatttgatgtagctccatgtagagcttgtaagcattgaatctttcttatcaatggagtcatttgcttctcaaagatcaatgacaacggaatagagaatgagaaaaggttatttgagacgccacttcaaagagaagatgaatcaagaacaagctcactagcatatgaaaccatgaataagagcttgaaggtaggtagaagaagatgagtggagggaaaaggagagggggacatgaaatttatgcctcanatgaggtctgaactttgaagtgtaatttctcaaattatcaaagttgaaaaatatacacacaagacctctatctatagcctaagtgtcacacaaaatta

SEQ ID NO: 269219 - DNA, 414 bp, Glycine max
  unsure (1)..(414): unsure at all n locations
tgtccatgttagtcgcaagcccaggactgcatattgcgttttttcttttttataattccctgatcctctggaacgctaagaagcaatgaatagtttcccacagctctacttaagttgaatatagagtttctgctgcctgcgaattacaacggataaagcatctttgtgatgatcttcatctttccattcctgttcctttctgcacttcttctgatcatgaatctacagttccacttgcaaagaatcccccttttcatgaaagaacaaaatanattgaagtgcgatggcatttgattcaatcaagattcatgaacgccctattctcttgtcttaacttncttatggatgtccacttgctaatatgtttaataacgccttgtatcctactccctttcaagcaaatgtgtcccagcc

SEQ ID NO: 269220 - DNA, 381 bp, Glycine max
  unsure (1)..(381): unsure at all n locations
ngaaacctgactcatttacgtattgtactgcgattctgtgccttgttgaccttggagaaattaaagaggcatgtgcatgtcataataggatcattgagatgtcttgcattccttcagtcgcaccttatagtagcctcactaaagggctttgccgaattggagagattgacgaagccatgtagcttgttcacgattgttcgggcaatgttagtgatggaccattggagtgtaagtatagtcttaccatcattcatgcatgtaaatcaaatgttgctgagaaggtgattgatgtattatatgagatgatagaacaaggttgctctatagacaatgtcatttattgatcaatcatgtctggcatgtgtaagcatggaacaattg

SEQ ID NO: 269221 - DNA, 409 bp, Glycine max
  unsure (1)..(409): unsure at all n locations
tccctctatctctaacaaatttctgctccgaaagaaagattgtgatatggacatcatgttgtgcccttgctgtagtgtagtcttccatacgtctgctacaacggccttccaatcattagagatttcaagaaacatttcagcctcttaacgacctcttaattaagacaaacgaagacaactcattcacatgtcgatgaaccaagcttaaaatctaatcactcactttcagggaatgactacctatntgccaagtgccttagtgcctcccaacaagtggattaggcagccgaatatgcccaatcaacataaaatggaaaactctttgtcctaacactattacaagttctatacaccacactgagatgaatctctatatcccatcattcaccctatgggtcgaatcttgtcc

SEQ ID NO: 269222 - DNA, 460 bp, Glycine max
  unsure (1)..(460): unsure at all n locations
ctattacggacctatgaaactcagctatcctacaaaacaggacatccttactttatatatgcagaggactaagcagacaaaatcaccgaattaactttcatatggattctagtcacagcccaacgattcactaccttgaactaacatccatataagacacaaactgcaccctctgaacacacatgatcttaaccctaacgatctacattgagcaagcttaagcagtgatcaaacttgctctttggaactggctgtgtaaacatattagccggattgtgcagagagataatcttatgaactttgattcttctttctgaccgaatgaagtgatatctaacatctatatgcttggttctatcatgatgaacctaatccttggccaagcatatagcactaaggctgtcacagtagatgttagcatattcttgattaatntcgagatcatttatcagacctctca

SEQ ID NO: 269223 - DNA, 297 bp, Glycine max
  unsure (1)..(297): unsure at all n locations
agcttatccntagaggggatggtatttttacgttttggagaggattattcaaactcgacaagtgcattcgatcacgcaagtactataaaacggccagaaccgagtatcaaactctcggggaacttgtgttacttggcaaagctatattcattgaatacgcgtctagtattaaaagatatgtgtacactatgaacacgtgtgtcaactaactattaaaacgaaaatcacctgagtaatgatgtgtcaagacaactacacaacacgttggccttcctattacgcgcccgattctataaa

SEQ ID NO: 269224 - DNA, 453 bp, Glycine max
  unsure (1)..(453): unsure at all n locations
tctggtcgctcaatagctccaggttgctgcatgttaaggcaaatgtctgtatggaggtcaccacatgagcacacaccacagacccttgcaacaagtacagatttctcgctcaatgccagctgggttaccaagctaaccaatgcatccagtttgccttcaaacttcttattttcagatgatgcagctgagtntgttgctacctcatgcactcctctaatgactatagcatcatttctggcgctaagctgctggttgttggaagccatcttctcaattaaatatctggcttcagcacgagtcatgtctccaaaggctccaccactggcagcatctatcatacttctctccatattactgagtgcttcatacatatattggagaagaagctgctccgaaatctgatggtgaaggcaactggcacatagcttttataatctctcccagtattcatac

SEQ ID NO: 269225 - DNA, 334 bp, Glycine max
  unsure (1)..(334): unsure at all n locations
agcttcttatccaacgctcatcttggtggtgaaattccttctctcatggcttattccctagtggatggcgcctnctctcatctcttcttctttgtcttccgctgcatctncatggtggaaaatcaccattaaacgacctcattgaagctcaaagatccacgcctcatagaagttccacaagcaagcttccatcactttctatccttttcttttctttacgagagatgttactatgtgacttatggcgccctctataataatcgctaagttcttcacttaaactcttgcaagagtcatgactactatacgagacatgcttctctcttctcatttc

SEQ ID NO: 269226 - DNA, 369 bp, Glycine max
  unsure (1)..(369): unsure at all n locations
tgaagagcctcctcaatcaaactgaaaaacctatattcctcaatgaagttagcacccatcttttcataaaacttgatggtgagaatattccaatcaagcataacccacttgacccttatgcaccccatttttatggcttgctntgccaccacagagagcaacattctcccaagccccttcgtcttataacactccctcaagaacaagttctccatgtaaaaccctcgcttctctagaacgagagagaagttccgagaaaacaagacaaacccaacaatggaaacacctttgagggtttttaaatcgtagtttctcgagataactattacttaatgggaataataaatgaataattaataattatggact

SEQ ID NO: 269227 - DNA, 383 bp, Glycine max
  unsure (1)..(383): unsure at all n locations
ggaatacaatgaaactcgctnatttagcaaagatgagattcactcaatatgctcaagtttgcttcgtccaatgaagctgacagggttacaacacttggttattgtcgcctcagattattctcttatgatatgacactcttaacatgaacatattcaagctttatacagacttcagagctttgatccattgaaagatcccagctagctgttgtctaatattcttggcacttgacacgaggccactattatgcagagagagagagagagagtgggggactagatacactttctacaacatatctttagagaagtacaatntgttagtgttgcctagtgctcaaagttgacttttcgcgtacagctcagaagaaacattaccaaca

SEQ ID NO: 269228 - DNA, 405 bp, Glycine max
  unsure (1)..(405): unsure at all n locations
agcttacactgattgacaatccgtaaggttagtctttatgacttatacggattgttaaaaatatgttttagaaaataatttaaaattaatgatccatacaggtctcaaacctgtgtgactctcatgttattatcataacactctaatcaactcaatgaataggtcaattatgttaaaaaataattagcgtcgctatatataacattaaaatttttaatgtatatttaatttacataataaattttgtaacaattatttttgatctaataatgtttttttacatatataaattctaaataaaaattatacggttaatgaacatctatatatgtaaaaaatacattattacaataaaacttattattacacaatttattatatnaacttatatgtgtattaaatata

SEQ ID NO: 269229 - DNA, 489 bp, Glycine max
  unsure (1)..(489): unsure at all n locations
ggacacttgaatctaagcttgacctaaaatgagtttcttaggtttgaaaatgtagggtagcatataagatttgcaaatatccgactatcgaaacatcgagagcgctaaaaataagttaggagcaaaactttggaaaatgagcgatagagcgattntaaacattagatagcttaaacttggaatctgtgcctctatataaattatcttagaattatttattttttggaattgctgatttatttactattgtattgttgagataaatgcaagatctatgactgatgcatgttttgaaattgtgatgattctctacagataaaattactgaaatgcacgcctgtattttattatgattattgaatgataagaccggaaaagtgtgaactctggtaattatattgtcatttttatttgtacgcgctgtggtttgggtctagaggtgtttaaccctcggcaaattgtttgctctanttggtagatagctatgat

SEQ ID NO: 269230 - DNA, 285 bp, Glycine max
accgagggagaggcttattctgatgtaacctgcatgtaattttgctagtatagaatctacggacgttaaggagcgctttgccaccatcaacgacgttggttcgtgattgctgtggctaactaacgtggaggtggtcgtgtccgcaaccacaagctcaatctccggtcctaaagcttgggttgccatgcccgtgagactatgaagagatttctgtgatgttcggattttgcttattccacatgcaagggttttatacaagaccgttaattatgccataagtgagca

SEQ ID NO: 269231 - DNA, 329 bp, Glycine max
attatggttatatattcatcctaaactgaagatcgtgaccactacttttccctcttatatgatcatgttgccgacagatcctggtgagcacgatcctgatcagctcagctaaggaaactttttcatctccattcttaatgcatcacacagttcacattatgtgaatttcatgttcttgcttacgatcttagaaaaaagttcaagcaccctgaatatcagcttacaatcatctacagtacctcaaccgatttactcactttgaatattgagtcagttcatttgtctcccttatttcatttcagcattcatttatcatgtaatttcgatgc

SEQ ID NO: 269232 - DNA, 420 bp, Glycine max
  unsure (1)..(420): unsure at all n locations
gctttaatactttgaaatagaaaatgacgtctgcatccataatcactactccaaattggacactagattttgaaataatgtgtgatgcaagtgattatgcagtaagagcggttctgagtcaatggaaaaataaaatttttcatgtcatacactatgcaagaaaggtattaaatgaagctcanatacattatgccacaactgagaaagaattgctcgcaatagtatatgctttggaacaatttacatcttatttgataggatctaaaattgtgttttttactgatcatgctgctataagatatctgttagttaaagctgattctaaaccctaacttattaatggattctattattgaggaatttgatttatagatcaacgataaaaagggaagtgaaaattatgtacctgatcatctgtct

SEQ ID NO: 269233 - DNA, 473 bp, Glycine max
taaattagattaagttcacaacaatagtaaataatatgtagtaaagagagacaacattccaaggatttatattggttcaccagggatgacaaaatgggtaagctggcttggcctgacctagtccatcaggccaagcaagaaacatgggttgggtcgagttagcccatattttatacgtgactcattttttgaagtccagccaggcccggtagaccatcaggacaatccatattggccctctttacttttttgtcttaatttattcaaattgaaaagaaaaaaattaaaaaatatcgagccaaaataggcctagttgaatttgggcgtatatttcttaagtcaagtttgcctgatgggctagatcatataggcccagttatatttgcgcaaccatttatcttagcaggccaacgggccggcccagtccagtttgccaactctagcctacatctagaccctacaactatagactt

SEQ ID NO: 269234 - DNA, 405 bp, Glycine max
  unsure (1)..(405): unsure at all n locations
gcatgcaagcttgctnctncaccttctctaatagcccacaagagatcttcctccatggctctcctatcaaggatttggccatttgcatcaactattcttgcatctacgacattgtcagctncaaggccatactttctcatcatggatccatatgcacctcccgtgatgtgccctccaacacctaaacttgtgcaaaggcctgcagggaaaccatgaaccgaacttttctcatatattttgtaatagacctccccaatagtggcancggcttgaatccaagcagtgttgtcttctatatcaacgttgacggcgcgaagctttgacaaatcaacaattatgaaaggggtctcaacttcagaaacatatgagagtccttcatagtcatgggcaccgctacgaattctc

SEQ ID NO: 269235 - DNA, 483 bp, Glycine max
ctcagcttaatggaagaacaggtgaaggagcttcaatggaagaaggagcaagcagaaagcgaaaatcagtagggttcatgcaagcagaaagagaaaatcaatagggttcaaacacaaaggtctaggattcaaagcagaaaacgaaggagcaagcacaaaggtctagggttcaaagcagcacaatctcgaaagctagcagaaacgtgcacacccgtgaggtctaggagcaatttcccttatttgtttttacaactacgacggtttttttttaaaaaccggcttaaattttataaaacataacattctaaggcggttttcaataaccgccttagaaagtgcgtcgtaaaatgaaatttgttacccaataattacaaaaatgccaccgcaccgctttctaaagcggttcctcaaataaccgtcgtaaatcgcgtgtcttaaaaagccgtttttctagtagtggaaattaaatttctgcacagcatt

SEQ ID NO: 269236 - DNA, 265 bp, Glycine max
  unsure (1)..(265): unsure at all n locations
gcatgcaaccttttcttcctttttataaaaagagaagctcttatactcatcatgttgtctaanaaggcggtgacgtggatctaaccgctctgatcattcattancatattcatgttttggcggcatactcaccactgtttgtttctttacggaactcaccataactaanaaagcgcagacgcacccctataacacccaatccaaaaataagatggataacgaagacggagtgcaacaatacatgaaggatacgggcatattctac

SEQ ID NO: 269237 - DNA, 421 bp, Glycine max
  unsure (1)..(421): unsure at all n locations
agtggactataccttcgaccgaacacgaccgagtttctgtctatgctcggattcaaggcgggttgcagcaccggcgtcgcttccctaactgtactggaggcggttgcggtggctttatcctctatggttttctggagttttaacatgacctccgagatggaagccatttgatcttttaaggccgatagatcggccttcatctgttcctgcacaccctcttcattatccatttttctggatctagtgttataggggtgccttggtgttttcttagttatgatgaaattcctaaagaaataaacaacggtgagtatgccaccaaaacatgagtatgcaaatggatgatcggagcacttggatccaccccaaggttttttagataacgtaatgagtccaaaacttctcattntataaaaagaac

SEQ ID NO: 269238 - DNA, 397 bp, Glycine max
tagtgaaggagtcatcgcgacacttgtggtgttctgagatgccgttgaagaattaacacgttcttcccccatcaactgcagaatgatgagcagaaccagagtgatttttcatcatgtgaggaggaacaccatgcttttgaaagcaattttcaacaaagtgatctcgtctatgacaataagtacagtagccgcttggaccagaattagatcttccattagcagaaccttgagacttactagctgaagcatcaacaagagcctttgaatactaagattacgacacacatttgacgttcaaatcgatcaccataaaacagatcttgggatagacggagacgtcaatacaagatctgcatttacccgatgacttattgttaaccatcagaaagcctacacg

SEQ ID NO: 269239 - DNA, 410 bp, Glycine max
  unsure (1)..(410): unsure at all n locations
tctccnnctatttgctataaataggcgaagaagtgaagaagattagggttcagccccttaggcacttctctctctctcgaatttgctgagaaaaattatttccgtgaagaaaatccaagccgaggcgcttctctaacgtttccgtaacgtttccgtgagtaattacgcgaagattctcggccattcttcaagattcatcgttcgttcttcgttttcttcagtcttcaacgggtaagtacctcaaaccaagcttttcaattcattttatgtacccgtggtggtccacatttcgtttcatgtatttttattctctttttcatttactttttatacccccttttgacgtgcttaagccaattatttaagtcatttctcgcttaatctatagaataaaataaattccaccgatc

SEQ ID NO: 269240 - DNA, 171 bp, Glycine max
  unsure (1)..(171): unsure at all n locations
ncgctctgtacgtctacacacttcaagtatgactgactagcctctaaactcagccctgatccactgccgttaactcattgctgtatcacaccatgcggtttgggcacccttatctgcttaaacgctacgcagacctcgcaatgccacatcctgttgattcggtaccgatcg

SEQ ID NO: 269241 - DNA, 239 bp, Glycine max
agcttcaatgtttaatttcgattgtctcgatatattataagcctgaatcggacctacgtgtgaaaagttatggccattcgaatttcttgagagctctcgttggtcaatttccagtgtctccatatgtgatgcaaacgaattcgacacgccggtgaaaagataagaccatatgaatttctcgagggctttccctcctaaaattcgagcgtctccatatattctaagcctgaactcggaca

SEQ ID NO: 269242 - DNA, 317 bp, Glycine max
agaatcggacatccgtgtgagaagatatggcctatctgaatatctccagagattctgatgattgagtttcgagcgtatcgatatgttataatcctgaatctgacatccgcgtgaatagttctgaccgtttagatttcaccagagcttgcgtcgtcaatttcgagtgtcactatatgtgatgcgcctgaattggacatccgagttaaatgttatgaccatttgaatatctcaagagcttccactgttcagatttgagcgtctcgatatgtgattcgctcgaatcggactctcgtgtgaaaagctatgaccattataat

SEQ ID NO: 269243 - DNA, 466 bp, Glycine max
  unsure (1)..(466): unsure at all n locations
cgcctacaccnttgagccctttgtagtccggagatctctcagacgacccgcacgcatgcaagcttgctgccagctcgccnaagagagctatgttgcttgcttcaaaagcaacgacctggtggaggaatattatggaaggcccaagtgggcctcgttgctatttacacgcccccttttactaaacgcagcccctattctatctttctggaattgcccttcccgaacggtaccaaaccttacgacatttatgaagatacttattgtttcttcctaaagctacgaaccctaccaaatatgtcttactctttttaactctcgaaaaggtaccgatattacggatgcgcacaacactctttctcaattccgcacattatgggattcaccgttgcaaaacctgttcctttaattctgaacccttggacttcttataatcaaaaagacccagctctaagccgtaaacagatgg

SEQ ID NO: 269244 - DNA, 442 bp, Glycine max
  unsure (1)..(442): unsure at all n locations
tccatcaactaacagtctagtggtatatgaacatacgctgtgttataattgtaactgttcactgttgcaaccattttcggttagacaattaggtgtcgctgcttatgaggagctttgagttcggattcacagagcttgagagtgcttctaacccttttccatgtatattctgttattcacacttgactcaataatgtgtcacagtatatttctcctccttcgatcatccatgctcccttatctgaatataatttctcgaatcttcccaatanataggtatctggagcgtcgcttcaagatcagttccacattagtgtcatggtagatcaagtcattagtgatcaacggctctatgtgccatctatctgtgttgcatcttcgagattctatcacgaagatggtcaacagcgtcgagattgagaaattcacagggaagaataac

SEQ ID NO: 269245 - DNA, 300 bp, Glycine max
agctctgcgtccacagtcccacagttcttgtttggtcctcatcagtgtgctgcaaccgaagagaacttggcctctccagcttctaatgaagcaccactcaagatgggcgactatcgcgacattctgagccttacaagagttctcatacgtggcccccaaagcacagcacatgctgatattgccattgacacgttataagccacaatttgatcccaaactttactacccttatgatattacctataacaaaacatgtttatcatcaaagcggatgccataattatgttctttctgacctta

SEQ ID NO: 269246 - DNA, 242 bp, Glycine max
atcacttgattaaattgaattgaatatattgatctcatatgacatagggaaacatatgccactccatatggctatattcaatacacagggaaatatccgtcactgtctacagtataaatactgatgcttgaattgatcccatatagactgacttagaatacaaactagaggaatatgttgagcgccctcccgagtgcatatattgacctctagagtatatatcttatctatatatacatata

SEQ ID NO: 269247 - DNA, 179 bp, Glycine max
  unsure (1)..(179): unsure at all n locations
agcttcaaagccttttcttcatgttgctcccnctatctctaacatccgatggatctctggcgccggaaatacacttttcctgcactgagcgtactgtcaggagtggtctataaagtacttgctgtatctcgaaatgcgctccagaatacttgattgtatcaaagaatttattagcggaa

SEQ ID NO: 269248 - DNA, 357 bp, Glycine max
  unsure (1)..(357): unsure at all n locations
atatgcgatgactatgaacaaactatgctatcactcactgacgatggaaggcaatatctacccagacatatatacgtgcacgagcccttatatgtggctactcatgacttgaaaggcgacgagacttgcaaacttaagctcgcgaagagtgagatgaccctattgggagcaatgatgatcttacttgcactgaagacttccaaaccttcaacggcatgagctcacattgctccgcttcatgaaagatcttacgattataacatacctacttacacttgtcataatacatgacacacgtatgaatctcctgcactagaccatngccaaaactcctggcgtgtggatgcacacacaaca

SEQ ID NO: 269249 - DNA, 399 bp, Glycine max
  unsure (1)..(399): unsure at all n locations
agaggagccgtatgaggcggaagctccacgtacggttttgaagccgagcctttctagcaatggggcctanggaccgatatgatgattggtttaggtagggcggccggcctactacgggcacctgtagggattagtgcttgagaccgcgatccacaaaagcatgggactcaccctctacttgngaatgaagaggggaaagatagcatgtcacaacagcgaggcgaggttttgtactctactgcgagagggacgcctcgcgagccccgcttctagagatgacgccttttggcgaagccacttaatttccggccaccacacctcgaactgatgagaacgcctatggagtaaaggaancctgtactttgcacactccctgctttaaacgtgcctagagacccg

SEQ ID NO: 269250 - DNA, 380 bp, Glycine max
ctgagccaaaatcctgactcaccatataccttgacccagggtgagaatgtcaatccttaccctcggaagcaaaaaagaatagaggggaaatttccaatcaaagaaaaagagaaggaaaatttcccatgaaagcaaaaaaagaaaagaaggaaaattccccaatcaaagagtgcgagacagcaaaaaaagaaaagaaggaaaattccccaatcaaagagtgggagaaagcaaaaagaaaagaaaggaaaattcccaatcaaagaatgggagaaagttaaaaaggaagacgaagaaggaaagaaagctcctgatcaaggatcgaaagacaacagaagatatgtgcagagaggtctttggaccggacaatatctgaacaatac

SEQ ID NO: 269251 - DNA, 307 bp, Glycine max
  unsure (1)..(307): unsure at all n locations
agcttgctctaaattacattgatgtttgtatttattggaggaggttgtatgccatttttgttttaagggtagcatttcttggtaaaactaactttccaaatgtttgccttcgcaggaatggacccgaggaagcttgcctcaaagaggtccaagaaggacaaggcggccgaaggaactanttccactccggagtaccacagttaccgctttaggagcgctgtacaccagcagcgcttcgaggccatcaagggatggtcgtttctccgggagcgacgcgtccagctcagggacgacgagtatactgatt

SEQ ID NO: 269252 - DNA, 445 bp, Glycine max
  unsure (1)..(445): unsure at all n locations
tcttgagctnggtatgaaaagttaagttcngttttaattgaaaatggctntataagaggaaaggtaaatactatgctatttcagaaagattatggaagtcaaatcctagtcgtcaagatatatgtggatgataccatattcagtgctactaatgacttgttgtgcgaggatttttccaaacttatgcaggcagagtttgagatgagtataatgggagaattgaagttctttcttggacttcaaatcaagcaaacaaacaatggcatatacacacatcaaaccaagtacatgaaggaacttctgaagaagttgaagatggatgatgaaaaccaaatgaaaacacttatgcatccaaccactgtacttggactaggcaaagaatcaaagcgggtggatgaaaagacatacaaagaaatgataggatatcttttgtatgtcattgagt

SEQ ID NO: 269253 - DNA, 512 bp, Glycine max
  unsure (1)..(512): unsure at all n locations
cgcgttgacggccttgnganaatccngttgatanttctcgagataganttctctcgacatgcaacgcttntnttgataatccaatatacacgtgggggttttggtataaaaatgttgaattgccacacatgatgagaaatattcaggtagatacatttcattctgttgaccacacaccgcaactctgaggatttactgtacacagtagattagttaaagccccacttctcatctgctcaaagaaaaattttatggcgtgatttaagaatagtaaaaagtgacgcggcgttgtatatatattattataacatcgaaatatctatctccgactaccatttatattgacaaaacatctcattcacttaagctcccatttcagataacgaaactcattagttacaaagtaccccctccacacagagatcaaacctaccttcctacaagtattatctcatttcggaggccctctttgagctctcctctaatatacttatgagggtacccgatccccg

SEQ ID NO: 269254 - DNA, 299 bp, Glycine max
gctaccttgctggagtgaccgttgtgaagctgcagttacggtctcatatgaagctcaggcgccacttcatgatccgatatataggtgtatatcatatacttttgcacgtgaacaacaggtttgttaatatccctctcacaatatgcatatcaattgaaagcctctactagccagcatgtgcctactgagaactatatataaaatagtactgggcatgcacttttgctgaatctatcaaggaattgaactcctttagctaaactcaagcgtatgaattactataaaactctgatacttat

SEQ ID NO: 269255 - DNA, 157 bp, Glycine max
catgcaagcttataatatatcgagcgcgctcgaaattgaacaacggaagctcttgagaaagtcaaatggtcataacttttaactcggaggtaattcatgcgcctcacatatagagacgcttaaaaatgaaccaccgaagctctcccgaagttaaaat

SEQ ID NO: 269256 - DNA, 478 bp, Glycine max
  unsure (1)..(478): unsure at all n locations
ctctttaggaccttgaacaggcaactaactcctctttcanaactatgctatgtgctcgcgactggtccctttcttcctttcgcaacttgagttcactattgctaccccatagagctccgcgaaatttgttccggccatactcttccttgcgagccctcttggtctcttgttcaagggctcttgcggtaattgcattctcttcccgtaacccggcacactccttccgaacgtgtgtagcggccaacttgaacttctccttggcaagttttgcctttcctaactcgcttttgagagcttggacttcttcgtcctcttccggtgcttcaaaactctctttgctgacgactnttaacttggcgagccaatctaaacctcgtatatgaactttcagccattcgtggtacccaccaatgatgccattacgaatgcctctaagctcttgatctttctttaacggggtttcccacgccttatggat

SEQ ID NO: 269257 - DNA, 428 bp, Glycine max
  unsure (1)..(428): unsure at all n locations
agctgtgcttctacagtctcacgtggcacctatcataacccatatgactcttcattcttttgttttgccaaactttttcgagatgataagatgcagtcacatgcatgcttgtacttaacattcatttagcgcaacaattaaccaagtgttttgttcaattttactcaatgcttacagcacccccaccgaatgtgctgaatgtgcaactcttgatcgggcagactctacccttggctctggagtacaggtcatgtaagcaagcaaaacaaaagcgtacattcatacccatcgaanaataaaaataaataataaaaaaaatgccaagacacatatgagacggagagatacaaaacatcaatccatatttattaacgttgagattattcgttacaatgataccctaaaacatggagatcctaatgagtcct

SEQ ID NO: 269258 - DNA, 461 bp, Glycine max
aaacgttcagaaactgctggtaatcgattactatatatgtgtaatcgattacacagtgcaaactttgaattcaaattttaatagctgttgtaaatcagttttggccactggtaatcaattacatcctctggtaatcgattaccagagagtaaatttgttaaaaaagactttttaacttaaaattcttggccaaaccttttgctacttcaattggaattctcttcctatttaatataccctttctaagactctagagactgtcttgatcatccatcttgaatatctttaatttctttgtcttgaataaagcttttagactttgagacgcatgtgaaactttggcatcatcaaaacattcagctagatcctttgtctacaaaagtgtgacagagagacaggtgcgatcatagttctggatgacattgcttctcagcagcatcctccccagcgatcataattct

SEQ ID NO: 269259 - DNA, 431 bp, Glycine max
  unsure (1)..(431): unsure at all n locations
agcttaggcaactatcccaaaagaaggataaaatcatgccatcaatatgtatacatatatacaatataaataataagtttatttgtacttttcatctttattttcacagttcattatcttaaaacccaagagttatgaataattactcatgacaacagctagatttttaaaaaataaaaacaattaaaaatggattctgttagatttataatattttaattcttaattcttatttaaatatttgatatatttttctttttaatttacccaaaatcaacgatacattacatttatgttatatttatgtcaattattggatactctaaggaanataattaaatctacactaacgaaactcaattaacataanattatttcatttcaatcaataattctgaatctgagtgataggcatttaattataatcttac

SEQ ID NO: 269260 - DNA, 465 bp, Glycine max
ctgacaatgacctctaatatgataactatgaaacttaacagacattaatcctcagccagaattctggtttaattaattaagtcaaaattcctatagtggtacaactttctttgatttatgcatagcttgatattttcaaaatctgtctggaaaatttctataacccaaagtcctgtactgagtagcatacacttctttttctttttctcttttttaatatctaagtagcatacacttcaaagtttcaataataaaatataaaatgaatccaaaacttcacaatactagggggaggcctatgctatttacacctctctttttttctctctcttcacacttccactttttttaatcctaaaatacttctattctctctcactttttcacaaatcttactaaaactagttttgtaacgtagttatgttttaacattacataagctagttttgtaatgtaaatatatat

SEQ ID NO: 269261 - DNA, 415 bp, Glycine max
acgtttgtgctctctactggctcatattgttgatctacacaaaatgaacaataagcctacccatactcaaacttgacgttaaatagaaccttctatgttggctctctcacatcaagcagatcacaacctttatcaataatttaccggtatgagtaaaaaataagctttctacttcaagaatatttcggctagcatttctaacttgcttcacataacatatatctgctcatgtactatggagacctaacaatatagccgctaccttactacttatacccttgcttacactccaccctctccataattcctctgcttcaccacaaaatctcccctaacctcttgcctccacacaacaacccgtccatactatcattacacttacaactggcggaactcaacttctctgacaccaact

SEQ ID NO: 269262 - DNA, 135 bp, Glycine max
tctcagcttgagaaatacaatatggactaactgtgcatgaggacaaacttcccatgctaaacgataaagcatgagcagtattaaatattgttaagataagacaccaccacattgggttgcttgaaacctaatgta

SEQ ID NO: 269263 - DNA, 453 bp, Glycine max
  unsure (1)..(453): unsure at all n locations
ngaagaggatgcttcaatggaggaaaagaaagagggagagaaagagagagaggggagcacaaaattgaaggaagaaaaagggagagaagatgaactttgagttgtgtctcacaagactctcattcatcaaagttacaacaagtgttacacatgcttctatttatagattaggtagcttccttgagaagctttcttaagaaaacttccttgagaatcttctttgaggaaacttccttgagaagctagagctttagctacacacacccatctaaaaactaagctcacctccttgagaagcttccttgagatgctagagcttagctacacacacccatctaaaaactaagctcacctccttgacaaaatacatgaaaatacaaaaaaaagtccctactacaaagactactcaaaatgccctgaaatacaaggctaaaaccctatactaatagaatg

SEQ ID NO: 269264 - DNA, 393 bp, Glycine max
tgtagtcccgggatctctaagtcacctgcggcatgcaagctttgagccattacacgacaataactctttattcggatgtctgattgagtcccgtaatatatcgagaccgtcgaaattgaatgttgaagctcttagccaagtaaaacgacaataacgttttactcggatgtctgattgagtcccgtcatatatcgagacgctcgaaattgaatgttgaatctctgagccaattcaaacgacaataactttttactcggatgtctgattgagtcccgcaatatatccacaccctcgaaattgaatgttgaagctctgagccaattcaaacgacaataactttttactcggatgtctgattgagtcccgtaatatatcgagacgctcgaattgaat

SEQ ID NO: 269265 - DNA, 432 bp, Glycine max
tcaacattcaatttcgagcgtctcgatatatggcgggactcaatcagacatccgagtaaaaagttattgtcgtttgaattggctcagaggttcaacattcaatttcgagcgtctcgatatattacgggactcaatcagacatccgagtaaaaagttattgtcgttggaattggctgagagcttcaacattcaatttcgagggtctcgatatattacgggactcaatcagacatccgagtaaaaagttattgtcggttgaataggctcagagcttcaacattcaatttcgagggtctcgatatattacgggactcaatcagacatccgagtaaaaagttattgtcgtttgaattggctcagaggttcaacattcaatttcgagcgtctcgatatattacgggactcaatcagacatccgagtaaaacgttatt

SEQ ID NO: 269266 - DNA, 371 bp, Glycine max
agcttgaaggttacaactcataataaaaggatctgcaacggcgctcttgaactaacaaagaacttaaacgtaaaaattttactcaccactgtcctttgataatggttaaagaattaatcagtagagattttttaaaattgttaaaaaccatagtaaaatgtattgttacattctccgataaaattctttctacttttgagtccttaaaccagcttacttatgcattatattggtaaaggcctaaatggtatcactattacgtaaaagataattttttttatgtctgaatgttataatttttgcggaattcttacaatcatgatcttttggttgattatgagtattcttgaaaatctttatataattttttt

SEQ ID NO: 269267 - DNA, 465 bp, Glycine max
  unsure (1)..(465): unsure at all n locations
tattattatgaagaaaaaaagggtttgttattgcattnttttatattttcaacttacatttttttttatctttttagcttgatagaggtggtcttctgctctatgtatctttatgtgcaatgggagaataagacttacttagaaaatatttatatattgatatttttattatttttatctttttaatttattttaaaaattctaatgataatcaagtagaaatgcatctaaagtgattatattttaacatttaataacttttacagtaaccaagacaaaagtacatccaaagtggctactgtacaacctttattatattttttagtttttaatttttaacttaaaagctttcacaataaccaaattaaaagtgcatcgatatccaaagtgactatagcaaaacttctgtataactatcttgtagtaactaaattaaaagtgcatctaaagtagtcgctactaaag

SEQ ID NO: 269268 - DNA, 336 bp, Glycine max
catgcaacttcacgatgtgtactccctcggctgctgactagcagagtatacggccacggaacaactactacaaggtatgaaactacatgagagaaaaaggttcttacaagacaccactaagtatgtgcgggacgaccctattcttttttgcattcgttttgacagaccgtcaaagcgatgtctaacaaaagaagaacaagctatcatactttggcattgccataactcaccacgacgaggccactttaactgagatagaacaactgcaaagatccttcaagaaacattatattggcctacattctttatagatgcttatcaccatgcacgatcatg

SEQ ID NO: 269269 - DNA, 268 bp, Glycine max
  unsure (1)..(268): unsure at all n locations
cgacanacataactatccactggttccttctcatgagctggccttcacagcgagccggctattttctttgtaaccatcctattaaccgccgcccattggactcccctccctaaaccccttatgtggcataggataacctggatacatctgcttcctgtcccccagcacaatggcatactactagcccatcacatgactattcattaactgtgaccaccactgcttcttggatctctgagtgtagctcacgatatatgctcccaacttc

SEQ ID NO: 269270 - DNA, 230 bp, Glycine max
acgctttgatatttattaacggttgtgggtatctgattcttgtattaatttcttttataataaactcacccctcgcaatttttgtatcatgtggttggcacctgtgatgatcgtgaacctttattcgtgggagcagaatgacaacagtcgggtcaagaagtgagattcttctgtggagcccccgagccgacatgatgacattgggaatattttgggagagagttgcgttt

SEQ ID NO: 269271 - DNA, 457 bp, Glycine max
taagctccttcaactgcacaaggctcttaatatttgaagagtatccttgcggaaccttcacccgacgaagacactgacaaaaacttatcttctacttcttggacaaagtatggcaagctgggggcaagtaaattttcttcccatcagaccttggatgcaactgtgatcttatacccatatcagctagatcttgacgggtattcaagccatccttcgtcgtgccttgaattttaaggagcgtcccaatcacactgtcacaaaaatttttctccacatgcataacatcaatacaatgtctaacgtcaagatcacaccagtatggaagatcaaagaaaatggacctcttcttccatatgcaactctgacttttatccttcttttgggtcttcccaaatacagtgttcaggtgttgaacccgctgatatacctgctcaccagtgaacagtatcggcgcaat

SEQ ID NO: 269272 - DNA, 320 bp, Glycine max
  unsure (1)..(320): unsure at all n locations
agcttagacaagttaaaatcaatgattctttagtgaatgctttggttgaaagctagagacctgagtcacacgcatttcatcttnctgttggtgaatgcacaatcaccttggaagatgttgctcttcaattgggtttacacgtagatggaagaatagttactagcccaacatattatgattgggaacaaatgtgtgcaaaatatataggtgttgttcccctacagaatgcattggtgggatcaacacttaaactaaaatggttaacagaacacatgttgactcttccagcaaaacctacaccacaacaaccagcagcccat

SEQ ID NO: 269273 - DNA, 390 bp, Glycine max
gctattacggacctataaatctcagctggcatgatttacattctcccctttcttaagcaaattcttcttgacatcatcaaaatcttcatgatttacattctccccctttgttatgatgacaacctcctgtaggttaagagcaacaacaaaaaaatatctatttgcatatagtttactcacccttggtttagcaatgtttgcttatatgagtgatcgagaccgtagccgaatcaaataaacattagaatgcagtaactaggaagtgatcgtaggtcgtttcccaacgagcaatgaataaccaaatgttcataatatgcttcgttataacaacaacaataacaattggaggggagggtgtttgttttgtgaattaaagaagacgcagactga

SEQ ID NO: 269274 - DNA, 1256 bp, Glycine max
  unsure (1)..(1256): unsure at all n locations
gactcttacatcgtactaataagataactcatctaatctgagtctatatgtgttctgtaangatacanntactaggcgtgttgatgcatcttgtcacgaagacctatagatctcactgcatgcatgcaagccttatgtatgtggaatcactattgattccaactgtactattaagaacaacgctatacacaataatacgaccaatacacttagacctcatcttaccactcatgagtccaagcttataattatacattaacactgtttgcctaaccatgaagtcccttcttaattatcatgctatcatacaacttctttggctgttcttatgtagaactaggcattcttaataagctttctatgcgcgatccttatctcaccgtatgtctgcaatctcttccttttcctctactaggcgtcgagtatataagaagattgttaccaggtcctccacctgcccaatgttgcttttgtgctcactctctcaacttgaagatgacattgctctttcaaaagacaacaccgataaggagacattcctataggtgctttgaggcctgtctatatgccaaagagcatcattagcctgcactccatctttctgctggtgccaatctcttaaatttcttgactcctgtaacattctgctgtcttgatctgggtgtatgtggatatcttggcaatcctctttaaccagatgataatagtcaatggttcttgtatactattgataggtctccacttgaaatgacaacgataattcactactttttttgtcaccggtcgtcccctttataatacatgggaacttactaccatattgtatgccttatttccccatcacatcaaaactagtcgcgttatgccatatgatccgctgactgtacgtcaattcctcttaagggaaaaatagattgttatgtttnctaagggaaaaaacaagaaaagaaagtctcattacattcatcagattaatgttgttatctcccttgcttnccntataacaatagatggaattattaattcgaacgcacggatcgatcccgccttatgtactgtgatctatatttgagattagattgttttgatttttttttcctnntnnnntnngnggtgttnaagaccgacaggtataatagatatattgagccccgaaggatagangtgtaatgtatagatgtgatattattatatgatatatagtcanctcgaaatattattatgtccaccctgtcatacccactcttctcacccct

SEQ ID NO: 269275 - DNA, 797 bp, Glycine max
  unsure (1)..(797): unsure at all n locations
gggcgtgatgaacatctttagcgccttacatctcagctgatagttcccattatggcatttggagtacattgtgactcatttcgttacgttaacactgcttagaacattcattggtttatgataaactgtgcttttatgtgaccaaagctaggttgtattcaaaaaagccttggctaactcacattggctacccataccccctagtgacttacccctttcacaagaaacttctacatcactctagcggcctgacggaacagtactatccaaagtgcttagcactaactcaatgcctaaccattcctactcctaaccaggtgcctatgactccattaagctattaactattgggataatcatgccngcaaattcgccccaggcattcgaaaacctgacacaaagaaccttctgaaccgtttgttgaaatatgataatagtgaactacaagaggatccttcgaaatttccgttacatatgtagtttgagtgtacctttggttatacagtgaccatagatgcttggagcctactatttttggaaccttcaaggttttgatcgctacttgcactttaagaggtatgttagtcactttgctctatccccgctgatacctctttcggcacgattctgttgttaaggaanggggttttcccccccattttttactctttttngttgcccccgcgcccccaagggcnaatggttgctttttttatattnnnntgttcatttattttttattanncttttttntgcttngtgtttgttaacttcctattttccctatattattctcc

SEQ ID NO: 269276 - DNA, 298 bp, Glycine max
  unsure (1)..(298): unsure at all n locations
ttccacaattttagtcgtgctatacgagacatcttgccaacagagtcaggttaccataactcgcatgtgcttttnctttcatgccatatgtagcaaagtccgtgatcctatctagtttgatgagctggaaaatgacgccgcaattatactgtgcttagtggagatgtattttccccctgcttttttgacatcatgattcacttgaatgtgcatctgggcagagaaatcaaatgttgtggtcttgttatctactgtggatgtacccgggtgagtgatacatgaagatcttaaaagggta

SEQ ID NO: 269277 - DNA, 370 bp, Glycine max
  unsure (1)..(370): unsure at all n locations
acttcgatctagatgggatgcgtttgntattacttatgtttntttcccatggtttagttaagactaaaaatgaagttaccgaaaaattttcaaagtgaacaatcacaaaatcaagctttttcatgagagcccccaggtggagaaggaatttgtggccaacctctctttggtcttgccaccaattttatattatgatgtgccgcgaatggcacttgaggagtttccttccccttttcttttatatngtngtcctttctttgcatttcattacatgctcacattgaggacaatgtgcatttcaagtgtggggggagggtttagaaaaatctatactttctgattctgtattctattttaattttggcttcta

SEQ ID NO: 269278 - DNA, 309 bp, Glycine max
tccgagagagaagaatattcttgttgaaacagtgtcttacaggaaaacattcgcgcttttataatctattttaagggcaaatggtgtttcaataattgtgggtgccctagcactcctataactccttttaagggattgagcccaaattattatatgcctttggttttattatatcactcctttgagaatgctagcggccatctttatctttttttgtaagatctcttaaaatacaattttttaagttcgttctattaccattgtgttttaatcgaattaaatggaagacatttagatactttaaatttt

SEQ ID NO: 269279 - DNA, 1018 bp, Glycine max
  unsure (1)..(1018): unsure at all n locations
gaatccatctcacacgatttcgtatnttatataagttatcacccnnntccaccccggatgaccatcttaggccttaaactcacctacggctggatatcaatacgaacaagactcgtttacctttgtacatctgtttatacaactcgcctgccgaggcgggatgtaacaaaaaggctatttggtattcctgttaacgttaacactgatatgaaagaagtacaaatttttgatccagctcaggagctgagtcctcttttataacccagttctggggcgacaaatttacacacactggcctataaattgtacacaccatggagatggagaagaacacactttcaagcatgctttgactataccactcccttgcttagtaccagctngtggatngctgacagttattctatgtacgcgatctatggagttaagagggaagctagcttctttgtcgggattccccccacaaccattgggccatttcgcatggttgagccatcgacatcacagcggtgttaggaatatctgcgaaacatattgtgtcatatgaatgaaactcctgcgaatatgcgtttgtatatttggagaccctcagtgtacatcctctgccttgcttcccaagcgctcaagaaggaggagagaaatcctcgttctttttacctaagaattgcaagatccggatctgatcaaaaaattaggcttccgtcctctataacctcttagtgggcccccctaaaaaattgtacctttccatagtgccaagggaaaaatttcaaaactacttaagtaagggaatcacatcccacccctcgactctgttctgtcaccaataggagttattattacaccgtgagaaattattctctttntttcnaggggnnagattttttttttatcccccccccccccccccnngnggatagtgattgttttnttggtaaatatttttannttntnttnntttttcaacccaaacaacagaacagngncnccncnaccttttttttatacccctgtattc

SEQ ID NO: 269280 - DNA, 418 bp, Glycine max
  unsure (1)..(418): unsure at all n locations
tgctctgtctatacgtggcttactcattaccaatttaattcctttgttaggaataataggcatccttctacatatttcctgttgaaactcttcttgaagattttcacttgtagattgaagtctggtaataaaaaaagttttacgtcacgtatgaaaagaagtnttgttgacatctaaaacttgttaacatgaaaagtattaataattatttaaagattaatccacaataaaatatagtaaatcataaaactaaggaccctaataattaatttaacattgaccagagaaacacactacgttgctaattcaaataaaggaattaagaaanagaaagacataaaatgctacagaaactatgatactaatcaacattaagaagaactaatctaactattagttatctcttttaagctactca

SEQ ID NO: 269281 - DNA, 327 bp, Glycine max
  unsure (1)..(327): unsure at all n locations
agcttaattattttcactcagaatctttcattatctatatccctaggatgagaatttgcagagtttcattaccattaatgggtggctccgtgatttcttatggacccacataattcagtcttatggttctttattatctgcatatggtctctctttcttgagtgcacattctgtatgggcttttaatttaatgtttctattcagcgggcggggttattggcaattctagcatatggtttntggcacaataatatgcaaagaaaatctcttatgctatgtgtttattgattatgaagatcgatgatatgatcttcccttaacgttcac

SEQ ID NO: 269282 - DNA, 434 bp, Glycine max
  unsure (1)..(434): unsure at all n locations
agctngaatatatatcacataggccaactaattacaattgtaaaaccataaatataaacacataataatcgtacaccatcttataatttcagcatagttacaattgtaaatacacacatctccaatttattaattaaataaaagactaactctcataagaaattatccacttgtaatacgttattacggctgattcaaggaaactgttccaatcctataaattcagtctttgtaattgtatggcaattgtaattgtagtccctgtctactttcaatttcttaagataagtattaaaattattaatgtttattgctgcgtcccagttatagtggatgattgtttcactttttatgtattattttagttaagtaaaattacttttgtcatgcaggaaaagagtacatattgtattattctagtatttcccttttat

SEQ ID NO: 269283 - DNA, 325 bp, Glycine max
actcagcttgacgcacatcgttcacgtatatgatatccactccacaatgttagaagtggaggagaccttcaaccctataacgcaacgcggtggacaaaagagggcagcgcactagaatggtcatcattgtcaatgcggaaggtattatgtgcttcactatccatgtgcacacattattgcagcttcgtgagcatgaactactaccaatatatagatgtcgtttacacaaatgagcacatcttaaaagcacacttctcacaatggtggtctcttgcgaatgaagcggctattcctacttctgatgacacatggacacttatcccta

SEQ ID NO: 269284 - DNA, 494 bp, Glycine max
  unsure (1)..(494): unsure at all n locations
ctgcagcttgtataaactcaaataatgaacattttttagcacatcaagcatacacttttttntgtgttgttcaggatgtgtatcctgacagtaaccagaatttcaacctagaaatcaggagtggcggttatgttgcttaaggcttacatagttacaattgatgtttgcttatgctcaatcttattggataacacaattcaagagatcttaatactttttttgattacagatcagccacaactaacaccacaactcaattcttctaggcatcatatggaaactataaacaaaaatatagtcaatgagactacttctaaaatgatttggcatgtttaactaatacatgcatgaatatactaaattcaatgatagctaaaatgcagatcttatcaatgtttaaatcatcacaaatcaattcacacaacttgacatatggacatatatacaactgacttnacactgaagagtgttcactagatttggttcttctatca

SEQ ID NO: 269285 - DNA, 979 bp, Glycine max
  unsure (1)..(979): unsure at all n locations
cggacgcggtgataccatgaaanccacctanggacactgactctcgcccagataagaccagtgggtcanggtcttttatacccaatagccaaacccctaacgattctgaccaatgagaaccgagagtttatgtacattccgaaagatgattctgatcaaaaagattgccacgctccaagggtgatgaaagatttcgaaacaccgttcacattttgtcttcaaaaaattttctccaatttctaaggacccgaggttactctctggtatccataccaacaaggcacaggtgattcaaagcttcaattgaattctacgtccattgattcaaatgggtatcattacagattttggctcgttcccatgctataacgcccattccaatcaatgtgagagtcatccttcctaaagcttggtatcgataccgaattggatcactacccgccagtttgacacatccaagagaactctccatgttgtagtttctaaggttacccttcatggttcttgcagcataagaccttaaacaacctgctgctttacactttttatatttttcacctgatcctcacttgttgcgatcctctcttccacatctaagtctgttcacctgataaagctttcttttttttctccacaatcccgctacccgacttctactgaggcccttgccaaagacatcggtgtactacaaagtccttgtctatggggtcctcttctaaagggccctgctctaatttcctaataccccctgcgctccgtgacacaacattntaatttttttttggtgtttagttaaatatngagganaccgccnccctccccctttgngtctccccatcgcgcacgtgtcaacccacactctcacccttccttgtccctctttttagngtnntnntttagtattcatcacctctgccacacccnnnnctnccctagtgtccccccccatcccccacccctcctcccccccccctcccct

SEQ ID NO: 269286 - DNA, 1187 bp, Glycine max
  unsure (1)..(1187): unsure at all n locations
tatcacgaactcaataacgcgactgactttggtatatatanatgaatatattantnatnnnnnnnnnnnaccgaggtttgacacttgagacantcgcgaaccctagatactcnctgcacgcacgcgcgcgtatcaaacactgtacacacaanattaataatattcgttaacttaatncacacaacgcactgccactctaacatcgctggataaangatagttccacttgttaataacggaccatcacggcatggagaagcccgtgtgacgcatcattattctgacccattctagccgggcatctaccggcataatgagaaactactcttatatccatggtataaaaaggaagacgtctcacacctcacttcctgtcataatctccctagctcataaaagacccaagaaatggacccaagtaatctcctgtcaccctaacgccattcctggacatagtaggacgatacacacagatcccccgaagaacgatgtgagtcctggtcaacccctacaactctgctataccatgtatccactagactaacggttaaataagcaaacatactctgtcctcttacgaaccaaatatgccgtacgaagccagcaccacatttctacaccacccaactccctatggtctcttcaatgtacccccccgagcaccaacgctcattaaaaaacccactctgattgcttctccttcccgggctgatgggacaagaccaaccaccaagcaaatgaccaccttcagtcctctagaccccaaaggagacgtattattgatttattatttnggggcccccccccataataataataatagtttaccnagtgagaggatagaattgagatatggacggatacaagtactattgcaccctaccaacctcgccccaacgaaccgccctttctttatatgtatgatgggaaagtcacgccgtctccgccccccccctccccgacccccccaccactaaaaaaaaaataccaatnttgttgattttgttggttataaatatttgatataatgggtgaggtaaataaaagagtgntattattataagtttatgaatatatatagttaacgccaccccacccgcccccctcctttttattattataatttaaagtgtttgaagaaggttagaattgaatataatgttgatatagatgccataatgccaact

SEQ ID NO: 269287 - DNA, 961 bp, Glycine max
  unsure (1)..(961): unsure at all n locations
gcgcggggtaacccttgaagctttgtancnatccancncccctcggnnattatatcctatggggggtnggcagagctttttaagttttcggagttctatcagaggaaatgggccaccgtacacttcactactgaacattgtatattttgttgatcatggagcacctagtcgataagaattctgggcagcgtttttggtctgcccccgtgtctcttctgtgaaaatcatcggtctgaggtttccagccgttatctggaatatgccactgtggattggcactaggtacatgggactaagctatcacggtcgctgtgggtggaaaaattttctttgaattacacctgagacttcctctaagacctggcgatcctacggtttaacgttctttgaaacccttttggcctttgctgtgtaccgccgtctgatggccaaagttggtgatagaagagaggatctcttccttgaacagattttatcaaagctttccgtctcgtagaggcacacatgccttttttatctacaattgaagaccctctcttctcaatggttcgctccgatgggaggagtttacgctgtaccaactcctaatcttggtgtatctcgcgtgttcctcatgtttaatagggtaaggatattttaatgatacgtgtgcaagttctgcggttaatgtccggcttccttttaggtgtcttttgggggggagcggccccacccgcctctcggtttgtgtcctgtccatcatagtactcatcttnnnttatttgtgtattagatagtattattnncnctctattcttntaaatatgtgttagtatgttagttagcgtaagtagagttgtgatggcggcgtcatagttttcgtcctcccccgtctttagatgtaatgtctgcttctntnntnnnttnnnnntgntgntattttttattttttgtaaattatgtttatgcactcnggggtttt

SEQ ID NO: 269288 - DNA, 392 bp, Glycine max
agcttcgcttgaggagaaggtgaatacacgagatggaaacagagaaatgatgaatatgcattggtttattcatttgttgctaaacatcaataggtcgagaagcttcctagctcgacgacgtgacctcatagccctggtagctcaaacgtgtagagctattgtaggtaggtagcgcacgaagaagaagaaagtgtgaattcaagattttgaaaaaatgaaaaaacataaggatgtaaaccaaaaacgcagcgtaagaagaaaaaaaatgcaactaaccaaatgcaatttgaaaggaaaaaaaaaaataaccggtcgaaaatcatgaagctgacacttatgcggtttcacggttcttttattataagggtagtagatagtagacgagatgtttt

SEQ ID NO: 269289 - DNA, 480 bp, Glycine max
  unsure (1)..(480): unsure at all n locations
tgtaggattatggggtacccatcacatgtggtactatgtggcggtcgggcgatggtgcaaaacgattctccacatccacaaatcacgtataacccaccatcccctgttgcccacctccaactaagctcacgtactcccacgtagcccttatccttgtttctctcaacgccgggtgcccatcaatcctcccaagctttcacaacatccaggtaattccacatccaataatcatggcctaacaaaaccaagcaaaacagggcaaaggcagaaaactcagcccataacacaactcanaatcacagcttttcacatacaaataccccagtaacatttccttcgttcgaattcgtaaccgttggattgactcgaaaatnttactggaagtctctagtacataagtctgcattntgaccgttgggatctgctagcanatgtccagaaccccatagttactacccgtttcacaaccatncatacaca

SEQ ID NO: 269290 - DNA, 1211 bp, Glycine max
  unsure (1)..(1211): unsure at all n locations
ctttcaacacgtcacatattataatagatcgcatgagtcgtgtatttgtantctacccncaaaaaatccatcgttgtgtgacncntatctacacacgggatcctcanagtccacctgcatgcatgctatcttctaatccaaggctctatttggtggagaatctcctattttcatggctcattccctaatagatggctcctcctctatactattcttcatatgtcttccgctgcatctccatggcggaacattaccatcgaatgacctcattgaagcttaatataccagccttcataaaagctacactagctagcttccatcatgttggtgcttataacaactagtaaattaataaacataaattcttcaaacaataaaaaaattcacataacaaagcatccgatatgactgagtattcaataccttcatgtaacctcattctatcattacggaacgttgaattatagaaagagtgacttatcaaaattgatgttgacaatggctcattatctatcagggtgggtgggtaattcttaaactccagacaccattaccttcccatgattatttggatatcaattacattacagaactaccagaacgttcccatactttccttaagcaatactatatgatatatagtctaacattaaatatctaaatcctgcaggcttccatcactttcctccatcacacatatcaatcctctatataataacataaaataacatacatcctccttgtgtgaacaatcttccgatacccctacttgtctattcaaatagtcaatatcattgatcgaacctacttctatttacattcatcttactgtatcataaacttaattattctatctgatacgcctaactattctactatatcctatcgtcgcatcttgctcattaatttcattacatctacctactcctagtattaacacgactatataagatatgtttcatcgccnnacctcatatatcaacaaccatactttctactcatcatacaacttacaatgccgttctattaactatactcattcacaattatctcatatactcacttctcaatatcgcattgtgcatgcaaaaattcgagttaagtaataaataattattaaatagttgtntnttatggtgagaagggagagacaccgggcgnacngaaagaagacacacaccccaccccacacgatcctactgatctatgtt

SEQ ID NO: 269291 - DNA, 1085 bp, Glycine max
  unsure (1)..(1085): unsure at all n locations
ttctataatccgacaacgtacacttgattattacaagacactaacctccccactccacggctgacccttgataccttcattaccaccatacaaactcagctaaccaacatctggagcttactcaccccaaccgaatacactcatgctctactcacaagacacgccctgccggcctacacaaacctagataacccngaaaaaagatgaacttaatcccacaatgcgcttaattcaaacacaaccaggctataccacaaccccctagctttttcaatgaaactacaaagcaaagggccttacggccaaactacgtcaaaaagggattacccctcacacatgccgctacatgtccttaaacaaatttaccactataacagcaaaccccagccactagtgatcgtgcgattcagatagaaccacagggttttaccactttcagcactatgcctatgggctcagagactaaatactacttgactagcctagactaaaaccttacctaaccgatacacctagaaatcaaaggcgttatctaaggttgaaaagagataagattgatggctacatctggatgcctcgaagaccaggaatcgcaaaccccactcaccagactccaatcctcagataagggcaagtcgtcaagaaaccatgggcatcctgattaacataatatagacctaccatatgctaaatactacttgataaaccacctacaactctctctatttattaaactaagttgccacccggcggttcctctaaccatgtgcaacctacacaaaacacacaaccctaataaagcgcctcacaaaaactgaaagcaccctcctacctactttgaggtatntagccgcgtcatttaaactccctccccgcggctcaagntcaagttatattaagaccctctcgtagataaggagagatagagtttgattagatcttatttctannnnnnnttnnnnnnnnnnnnnnnnnnntttagaaggattagaaggaagaaagcagaataacaggctcaatcacaaccaaanagaaaaggaggtnagtgaagtnatcctccatcgtctctttctagatacncgcag

SEQ ID NO: 269292 - DNA, 476 bp, Glycine max
agcttgtctgggttaaactgtttctggtgcttcatttaaagcttacaactgttagaaattcagttatagttagttaattgaactgttatgcagttgtaattatgttatttatttggtagttaataaaactgagatctaacaggttctatatataaacatgagaacctctctcaaggttatgcatcaattgtaataacattttgacagacatagctctctctcgatgtacattttcaaaaacctattttctaatattattacatgaaccatctcgagttctattccattaagttaatttcttgtcaattctcaggtagcagctagggtcacaccacgaaatgccgataaggatgaatggtttgtcgtaaaagtgattcattttgataaggaatcaaaggagtaagtatacattttgtaattaaatagtcatgtattgagttcaagcaatcaatagaatgtgttctttcatatgtata

SEQ ID NO: 269293 - DNA, 356 bp, Glycine max
tcttttcttttagaagatggtttttaatatgaaagacaaagttgatacaactcatttcagaagagaagtacgcaaaatttcattataattcaaattcatgtagatgaaattattttttgagttactaatgaatctttgtgtagggatttctctaatcctatgaagaatgaatttgaaatgagcatgagatgagaacttaagttcattttgggacttcaatcaagaagtatagcaaaggcatatatattgatcaataaaagtacactaaaaaacttctgaagaagtttaagatggaaggtgctaaacctatgaaaacccttatgcatgcttctattcctctgagcaaagacaaatat

SEQ ID NO: 269294 - DNA, 450 bp, Glycine max
  unsure (1)..(450): unsure at all n locations
agcttctacacccattttttactaaattatgtttctaagacagcttgttcattccactttganttccttggttaaaaattgtcctttggatatgtgggagatttggctggaaaagcttctacacccatttnttgtccatgctcagcaagcacttagctgttcatggtctagtcttctacaagatggtagagcanaggttccggatgctcatggcattcttagtggatcaaacttganagtggaagtgatggaggaaacaattccaggataatatttggctgattcggtactaggtgatattgcaacanaattaacgcttaatatttgaaggagctntataaaaatccatgttattcataattcacatgcttcactgcttaatgtttgcttcagcagattattctaaggattntgtaatgaaattattatgcaatgctctagagttaccac

SEQ ID NO: 269295 - DNA, 1048 bp, Glycine max
  unsure (1)..(1048): unsure at all n locations
gggccggatgaacatgtttngcgtgataccatctttacggacctatgatactcagctcggtcctactatggttagtgagctctaanggtgtgngaatgcaaactctgtgcgatgatttgttntacattagtaatggtttaactagaaaatgggatgttattggtgacttcaacagtactctgtcaactaccgagagtatanggagttgtaattttcatggccccatgtttgccttatttgaaattccttctctatgggcatcttttgatatgggatatcaaggagatatgatgacttggaggaatggttgaataggaatatgtggtggatgaagtctaatcatcgtcctcttctcttgaggttagataatcttgcttataaaaacaaccacaggaggcctttccactttgaggcaacatggacctttcatgatggttttcanggttgattaggagaaaatagagcatgggcatangctgcttctattccanatattgtacggttattgatanggtaaagatgggataagaggtttgggtgtcttgagaagaagctgantgataccatcttatgcattattgaaagagtcacttaatttttcttgttgagttaaagaatgagaattaaatggtactcaaaatggtatgtctaccttgaggacgagcctctcaaatctcggaacctgttttctttggtccacgttcagctggactatgagacttaaacccttaaaatttacttaatatgctaggctgaaaactccttttcaatggattgagacttccttaggtttctacttagagaatttttcccaaggggttaaatcctttgtgtccgttccctccgagggganggnnnnnnaaaancgnnntagcccgcccagacataaccgacnnnccctccntnncttcttgctctcattatgactcatcgctttctcgtatcagtctaccattctctnnntattctatttcttcttttttctttatctctttttnntnnnagagnnnttncacctattcttaccaccctatagtgttttctgcat

SEQ ID NO: 269296 - DNA, 1283 bp, Glycine max
  unsure (1)..(1283): unsure at all n locations
cttcgcgcgtctcccgcagatctgtagngtanggtcatagactaattgcnattattctagtaatctnncaacaaatgacggctgttgactttggagaccgtctcgtacccaggatcctctcaatctacctgccagcttgnattctatggatgaatacgatgatctatggatctcagtcaagtccaatatgcgtcaactcttgcaccactgaacaatcatcgtgatacgcaacatacgtatgttcatgaacgggcgctcataataagactcatcacctctatacaactagcgtgtcaactcctaacttactgagcatattctaccaattcttagcgaggacacatcgttacgtcagtattatacaatcacataataatagactttcagcctcgcctattggtgaatacgccctggttaatactatgtcctggcatcacaacactaatacgatcgctttaattctgatacgacacaatcttgttatcatatcacgcgtaccggattgcctctcacatatatgtgtaatgaatagctggaccataatgtacttccgtgttaattcataaactatttactgcgctgtcgctggtatccatattcatatgaacatttcactacttactaccaccatcctatataatatatctcacctttctacacaagaattatgcgatcttcttctgaccgtaatatatacacgtagttcataatacaagaggatactctcttggacaactatacanatacgatctaaactcatcatacctgcttaatcctcaaccgcgatcatcgcttctctctctattcacactcgactgctgagatcgcatgnatacgtgtctagcgcatgttcatagacctactctatatctatcgcttcactcttaatctcacttagcactcggttactcccacgtctatgaaacattaaccccatacgacgcattgcatatacgaatgcaaccgtactatgcgcgttgcatcgactgactggaacgatcggtatcctctatctcaagttatatttatctatgtgtataatttaatgttgtgtgtttcgttgttaatgatgtaggaggaggggatggaggagaaagnggcatacgcgatactacaactgttntngacagtctccattatgtatattatattaatgtgttttgtagtattggtgtctttcaatgttatccacgcaaaccactcccaccgaacccaannttaactgctcgctatctcgtgatcacatcttatggagtagggatgatatcacctcatctttattt

SEQ ID NO: 269297 - DNA, 311 bp, Glycine max
  unsure (1)..(311): unsure at all n locations
tggtctttttaatacacttagcttgctcactagctttttactttcgtttgcttttgaccttgttccatcaacacactttattcttttttttatttttaacatacaacttatntgttgtgtgtgttgatgcttaacctttttcttttcattctaatngacttccctctcccaaattagagntaaattgccttgaaccatatgcctctctaaaatctaaacaaggtatcaggagataattatttaagttcagggttcaattcatgacanaatcatacagcttatatagggagcagagggatgaaatatcattc

SEQ ID NO: 269298 - DNA, 117 bp, Glycine max
atgacacgggatgtcccacattatcttctggacagaaatgcttccctgacgactatggaatattgagccaaactagtcatgcacgcgcctacgtggacacttaagtgctggagaatt

SEQ ID NO: 269299 - DNA, 1223 bp, Glycine max
  unsure (1)..(1223): unsure at all n locations
cgtgttagacatcttgtccgcatcattaataaccgccgctgcagcctgaatgnggagtgttgacgtgtgaacctccttgctttattgttgaccacatagtggttactggacatatgtcgtgggggtcaggagaccttgtggacgtccagtggggtgctattgcccaaaaccnaacttgaccaattccgacccaaccctggcataggccgtcagtgagaacctgtgatgtacctagacaggcgagctcctggctattcatggataaatgaacaaagaccacacatcaaggatgcttgtggtggctggccagctgtgaagctggattgatatgtgagatatggtctttggtaatctattaccaacgatggttaatcgattacaaggcttaaatatgaagacatgaagctaatatggtctctggttatgattaccactgagtgtactccatacctggcataatacgatgcaggaatcctgatggctttaggtattatacgatgcggtgaaatattcctcgttcaaaagacttctatttgtatgctctcggctacgaaaacttctatgagactcttactcgtgtctagttactcagatgcacccacactccgctctctgactataacttctacatctccttccactttctgagcgccgcaccacatgatctctgataccgccttagaactcataaaataggtggtttataatattgttttgaaatgttgttttgttgnnntggccccacgcgccccacagaaatganacgccgcacacagagccattcaaatgaagaaatatgttttaatttgtgatatcgcatgggaccctctcacacctattcatatcattagaatgaactgtattgtatgtgtgttattggatatcattgtttgtgtaccacccnatttctcctccccgcactcctctccatgtaatttatctttnctacttgtacactgtctctgntttattcagctttgagttgataccgatcaccatacagacccccannnnnanacccactccccnnccccccccncnnccncncccnncnacccnacttaccatctccactcatactctcaatcgctatactatattcctnnnnnnnntnnnnnnnnnnnnnnannnnnncnnnattgantatcactcagtagntatcgaaatntgtgtatcaataatctctattataatcatgtctctcactcccacatcaccacctt

SEQ ID NO: 269300 - DNA, 157 bp, Glycine max
  unsure (1)..(157): unsure at all n locations
cgtaggattatggggtacccatcacatgtggtactangtggcggtctgtcgatggtgcacaacaagtttttccacatgcacaatgcgcgcataaacccaccatgccctgtagcccacctccaactgagctcacgtactcccacgtaacccatatcct

SEQ ID NO: 269301 - DNA, 363 bp, Glycine max
  unsure (1)..(363): unsure at all n locations
aatggtgattntccaccatggagatgcagcggaagacaaaggagaagaggtgagaggaggcaccatccacttggaataaccatggaagaaggagcttcaccaccaagatgagccttggataataagcttggagagggtgctccaatggatgataagaaagacggagatactgacagatgtgggagcacgatattgagagtgaaaaacggatagaagatgaactttgagttgtgtcttacaagactctcattcatcagagtgacaacaagtgttacacatgcttgtatatatagactatgatgcttctcaactatcttgagaaaacttccttgagaagctagatcttagctacacacacccctc

SEQ ID NO: 269302 - DNA, 324 bp, Glycine max
  unsure (1)..(324): unsure at all n locations
ggggggggggcgggggggggggggggggggggggggggcgggcgggcggggggggcggggggggcgggcaccccggggccgcctcggcggggggggggggggggcaggggggggggggcncggggggggggccggggggncgncgggggggggggggggggggggggggggggggtngggggggggggggggggncgggggggggggcgggggcgggnggggggggggggggncggggcggcgggggggggggcgggggggggggggggggggngcnncgcggggggggcgggggcncncggnnnncggggcgggggggggggg

SEQ ID NO: 269303 - DNA, 404 bp, Glycine max
  unsure (1)..(404): unsure at all n locations
agcttcatgatgatgaatcaagttgattcaagtagntttgatgatgacaaagatgatgacaaanagcccaagagaatgatttcaagattgagtcaactagtttcaagaatcaagagaagtttgatttcaagattcaagagaagatgaattcaagattcaagagaagaaatcaagaagacttcactagggaagtattgaaaagatttttcanaaaacaaacatagcacagttttgtttttcaaaagagtttttctcaaaattttctaagttaccagagtttctactctttggtaatcgattactagtttcctgtaattgattaccaatggcaaagtttgatttcaaaagttttcaactgaatgtgtaacgtttcaattgattcaaaatggtgaatcgatacagat

SEQ ID NO: 269304 - DNA, 307 bp, Glycine max
  unsure (1)..(307): unsure at all n locations
agctntgatctaccaccaccaccgccaccataatcttagttctctattatttgtaatattatcagtactttgatttctagccgtgtattgngctatattattataacatttgaacaatttagtatttcttttatttgcatggtatgattgaacaattatgaattatgttatatgactatgtggttcttatatatttgaacatgattggtttatactctctaatgaatgtcttggtatgattagagtgtatgatgttattactataccacttggttttgttgatgccaaggggaaaaataggattaat

SEQ ID NO: 269305 - DNA, 405 bp, Glycine max
  unsure (1)..(405): unsure at all n locations
gggttcgaggtacttacccgttgaagatcgaagaacgatgaagaacgaatgaagaacgtctaagaactgttgaaacccttgcgaaattcttcacggaaaacgttacggaaacgtttctgaagcgcctctgcttatattttcttcacggaaacgatttttccaagcaaattcgaaagagagagaagtgccaaaggggctgaacccttttcttcttcacttcctcccctatttatagcaaaataagggaggtggattgccgccatctcgcccaggcgagctcaggtcgcccaggcgagccatgttgcttcctccagaaacaaccgtcttctggaggaatatnttggaaggcccaagtgggcctgggtgctatttgcacccacatctttactaagtacacccccctct

SEQ ID NO: 269306 - DNA, 478 bp, Glycine max
  unsure (1)..(478): unsure at all n locations
agcttgcatttggaattgcgaaagcnccactccatcattatgattagtacctgacatctcaaacaaacaaatcaaacgtaacaagacaattatagttgctgtttgaatacctcacccactcaagtgtatcacacaattatggcttttctctaatgaaacactcttgccttttaccactctaattccccttgagttcttaggcaattcaagagattatggccacaacaaagaacaattaccaatatgtgtaaggtaaggctgacaaggaaaatgttaaccaagaaaaaggctaacaatgtttntaggcacacatgaagganataaaattcaaaatntangaattcaagtaacaatccttcatgcaaccaatatattaccttagagagtnttttttttttaagttcttcaagcatgaagcattcagcccaattntttnttttttaatttgctatacgaattctgcttctttttttttttt

SEQ ID NO: 269307 - DNA, 1139 bp, Glycine max
  unsure (1)..(1139): unsure at all n locations
agcccgatggatgaacattgattaagcgatctataggagacactatcgagtactcaagctttacagcagaatttattaatgacccactgacctggatttataataacttaatgccattaacctacggaagtcatacacacctaacggctgagtgtgaatgaaattgcggcaaccaaaaatcaccctccacagccgacaactcattcaccattatgtcttccagaaggctgatgcctaggttgccaattgggcccttattacaacttgaactaaagcccttttagatgattaatccacaacatatatctggccagccaactttacaatgagttgggcattatttagacaaactaaacactcctaaattgaaatacagnggtgttatttagtcctccttcatttgggccatgatacaactcacaactgtggacttttattctttaaacataagcgtgtattttaatacgttggacaacacttgtggaatagctaccttgtgtttcttgctttatccccagacagaagagacccaattctttatgggatgcctgaactgctcttcgtatgtcctcacaactgcatctacgtgaatattcaccgactttgtagttgaattcgccaatatatataaaaccccctgctaatatgttttttaaccacgaggttttttatgggtgcaataaagtacaaaccctcacatatttgtaaggcacacacattatatagaaatcttattttctctcccgataaaattactcccttaacttttatgctatctcaataatatttttcccaaacaatctcaaaaaaaatcactatagctctcagcagtcttctatggatgattctccccctccctacgttgcatgctatattttaacaatcgnatttggtaaaccttggttataaaacccctttcctatcctcactnntngaatataatatatcatataataataaattnnnnnnnnnnnnnnnnnnnnnncngtngcnctnaggntataaagaataatatcccccccccnnnttnccnnnnnnnnnnnnnnnnntnntaatatctacaaatatcataatatcagtctctnncagnngnnnnncccncncccccctttctctttannattcctcccacatctcct

SEQ ID NO: 269308 - DNA, 446 bp, Glycine max
  unsure (1)..(446): unsure at all n locations
agcttcaagaaaaacatggcctcagcaaactccttatttccagaagggaattctatcaatagacctccaatctttaatggagagggttaccattactggaaaacccgaatgcaaanttttattgaggcaatagatctaaatatttgggaagccatagaaatagggccttatatacccaccacagtggaaagagtttcaatagatggtagttcatcaagtgaaagcataactatagaanaacctanagatagatggtctgaagaggatagaaaacgagtacaatacaacttataagccaaaaatataataacatctgccctgggaatggatgaatatttcagggtttcaaaattgtaagagtgctaaggaaatgtgggacactcttcgattaacacatgaaggaactacagatgttaaaagatctatggataatgcactaactcatg

SEQ ID NO: 269309 - DNA, 751 bp, Glycine max
  unsure (1)..(751): unsure at all n locations
tgactatacccccactcaagaagctttcgtggtcggccaccccaaacttattgtatttaaaacggtcccagaatccaccccatggcgggcattcaatacacgtcttaaaaaaagaggctaatcgccttggaatcgatccccgggggtatttttccacctgaaaaaggccggaaccttaggcctcggtaatatttccctctaaaagggggggaacttggcgcctttttttgcccccctttactacttccaggggggcctgtatatacactttttttctttaccgcttttatttattctcaattgaaaaatacctgtttttacaggggttctttccaataaatcctttatctttttcttttcgttcagattgcggggtttaactggtaaccccctttttttcatccctctccgtatagtaaaataaaataaatcaactctcccccacccttttccccttccctttccctatctccccccccccaacgggctgttttttatatggttattaatgatgttttgtgttaaaattagttaatttattaaatattattgtcctccccccccccccccgtnaagtttanggagagnataaaaaaaatcttttataaatataccctgcattactgaaggattagagatattaaatatgttttttattattgaatatttccccctcccccactccaatgatatactaattaaagnnnnnngagagncanctnnnaactctcccttataatcaccgcatcct

SEQ ID NO: 269310 - DNA, 403 bp, Glycine max
agcttgaacgaatgtaagacacatcttcttcaacctttgtgattcttgactccatttcattgaagcacatatccacttgcaattccaaagtgtcaaacctctcaccaacaaaggtttgaagaccattaaacatgtccataatcttcaaaaaaagatatgaatcttctccctcatgtccttcttcaccaacatttctagcacccttctttatccaagagccatcatgctccttaatataaccaaaggatgctatgactaaagcgcctttaaggaatgatctcttgattggaacatagggttcaaaatcaagagggatgttgaagtgttgaaggaaaagggtaacaagatgaggataaggcaatggggcattcaatcgcaatgccttatgcatgcgatatctaac

SEQ ID NO: 269311 - DNA, 438 bp, Glycine max
agcttccacaacatccaagtaattcaacatccactcatcacaaactaacaaaaccaagcaaaacagggcaaaggcagaaaactctgcctaaaactcaaaccaaacatcacagctttttctcacttaaagaccccagtaacatttccttcgttccaatttgttcaccgttggatcgacttgaaaattttactggaagtccctagtacataagtctacattttgaccgttgggatctgctaagaaatatcgagaaccccatatgtactacccttttcacaaccagccatacacaagcatttgtctgcacttatacaaaattctgctgcacatttcaacaacaaaattctgcataaagtgcagatttcgaaaacctctcttgcctttcatccaatttggccaaatcgaatcctacaagtcccaaatcatgtatcagtcatg

SEQ ID NO: 269312 - DNA, 570 bp, Glycine max
  unsure (1)..(570): unsure at all n locations
attcgtcacgttatatcanactggagaactcaccgtgattggttgacaatacatattcataaccttaggaatagcctgtttatcgaccaccatttgcatattggtaaacgcgaatcgtgtgttcctccaacagatacttaatgtttagaagtgtctggtacattcctcccacccctttcctctacaatcgtgtcgcttgcgccaagtattagcccaattggtttattcggttaaacgcatacttaagtggtgatcatcttcaactcattatctctagtataagctttttatctttattagtaagtattaaatcctatattgatagattatgnnnaaaaaaattatatttaataatgaatttatgtagtcgcagttttagtagaagttatggattggatggaattttctctttcaacgtcacgatcttnctcgcatgcatcttttgtnctgatctnnactgacttatcttataaataatatatgatttcatctacaaacnnnnnntgaagtgatataatcgttctcactctcttctaaacgtgtcttacatcatctctccccttcccacct

SEQ ID NO: 269313 - DNA, 815 bp, Glycine max
  unsure (1)..(815): unsure at all n locations
gtcgacttacattcgttcttccacgcgctagagcagagaaaaggaacgactcaagccgatnaagttactttatcccttgactgtacttttgttaaaggttctcttttatagcgatgaattgtacggtgagaagggtccctcttcacctgcatatctcaaaagtctaaaccaggaggcgcgctcttatttctgacacctgaggaccggagtgtattattgtctaatagagactggtggaggcgcacctctcaatatttattacacgcgtgttattctgatttaaatacgatactacctcactatcttcttatcctcacgagcatcngtatctctctaactgttacgcacgtctctagatctcacgtttnacgactgctagagctcttacnaatcgtccctattgtccctgttgctacatatgcgactactcacgaccttgcaagtattgctatctatctatatatcacatcatctatagtatataatcagtatgtgtanannnntaagatgtgtatgtatnagattctgatatatcactctcancagtgacnnncngcncactagactatcnttcacnacnacatgtttgtacatgtnnagctaatgatatgacgaaannntaatatattgcttatgtaacgatatctaatgtcactctntagaatatttcatatacgataatttagtaactatacatataatacacaacactcanctgacggctacngnnnnataaaatgtctccctcactctgtatctgantctatatngattagcacaccnatacgactcatctgtcgtcggatagaacacat

SEQ ID NO: 269314 - DNA, 303 bp, Glycine max
  unsure (1)..(303): unsure at all n locations
agctngactntgcgagttcatcttagccttagtttcactttagttattagtcaattcaatcaagaaagagaaattccaaagagaaacgtccaattgctttttttggtttattntactaaaagatatttttttattattatattattatnttacctctgtttggtttccaccgtggttacgacatgaccgaacggtcgaatttcattttaacagaaattaacggatattacaaatcaaatgatcggtggaaattattntatttttgatacgcgagaaaatactaaagtaaatactgaacacgtc

SEQ ID NO: 269315 - DNA, 996 bp, Glycine max
  unsure (1)..(996): unsure at all n locations
gaccagttgaaccatttncgcctgatagcatctcttaggacacttaaaactcagctctctatgtcatttttctgaaaatgtgtaagttcctcttgcatggcttttacccaggtctcatctttcattgcatcatcaatatgcctgggatctacctctgaaatgagaactatgtgaccttgttgtctgtgagaacttcttgtttggacctttgttgatggaactcccatgattngactctattgatggttcttccttagaatctgtgcaaatggcgctctttcctcttcttatatgcttggcatttgagtggacgcctctcttctatcgaatgatcggcacaagacctatgccttcctccatcttattctgccaagaatctcggctctcaaaatctattcacggttgtggcttaaacctcatgaaaacttcctcataggaggtctaaagtgaactattttccttgatgttaaaagtccaaaatgtcctttccactaaagtacttctagtgctttgtgtaaagaacttgctcaaagaggaaataaggtggtttttcttctatcaagggtcttttagggctacaaattgctaaaacagataggtctcacccaagagaaatattgcagcccggctcctttccggtttttatttcaacccttttggttttcaacttgaaacatttcataaaaaaattttatttctgatattagaagganattttaagttaaaaaacaaaatttgagagagaacccaagtcatccctttccccctctcccacaatttatttccgagtccgtttgcccccccgccccccatnnnannntngnnngaatattngttaatattcacttaaggctctctcaccgagctactccntcatattgtagtatatnttttnttttattnnnntnnntccgccctcnnnntcctnnnaggttgaagatagtagttaatagatacgacaannnnnnnnnnnnnnnnnnnnnntattcanccccc

SEQ ID NO: 269316 - DNA, 430 bp, Glycine max
  unsure (1)..(430): unsure at all n locations
agctnttgaattctttgtatagagatgtggcctaagcgctcatgccatanagtggtgaaattctcatttaatttatgtttcgcaccatgtgaatcctttgcaacatttctttataggaacactcaatatcaattaaagacccataaccaacatcatttggatcacataagagaaaaattttattatttccaaatgaacaagaataattggatctgtccaaaatagaaatcagaaattgaattcgcctaatagatggtgtgttagacaagtggtctcaataacttaaaaggaaggggtgaattaagttaaaaaaattctctcttaattaacttctaaatctccttttaaatctatatgttaagaagattgaagatgaagaatgaaattatatcaacataatacttcaagtgtgcaagaataataaaatatg

SEQ ID NO: 269317 - DNA, 1723 bp, Glycine max
  unsure (1)..(1723): unsure at all n locations
ntttccaaacgacggcnntcnntgncnnccccncatgnntnnnnnnnnncnccccaaacgaaatntaccgcacgnaagncctnatnnntanggggcggaccancctnnnatanttacnatacaacgtgaaangcnntnncncgggggaaagccccntacanantngnnnannnnnnnnnngaggatgnaagacgacgacagacgactacgcagcaggagnagnagnnnnnnagnnnntgnnnncnnnnnnnnntaggagatgnnnnnncncnnncncncnnnnncnncnncnnannnnnanatnncgcncnnncacnnaagcnncnnannnggnnnnaccatagaganagnncncnagaagnacannnnnnnnnagcagaacgaagagngnaanaagtntgaagaagtgagcgnagcgcgagagnncgcgagcagagcgagagaggagagnnnnntnnnnnntngnagacnagagagagacagaagaagnancncngntctgaacctcgggagaancactcatnccncnnnncnncggggnnnnngaaagagagcagncgcagagaagagagcagagagagagntgagagncnncnnncnnnccaagaagagagcgcgagagcncaagcgnagcntnntagggaagagnnnnccagcgagagncgcagnagcagagagagagacgggagcagagagacaannnnntnnnnnnnnccatnnnnctcnagcgngnnaganntggagcgcgncgcnaaacgccctgtttnttctgngaaggctgcccaagcccctcagagatntagggaacataacccccnnnnnnnnaagagagagaaggcgaagagcggnnnaagagaagagagacgaggagagagaagagaagagtgnnnaagagagcnnnntnccnnncnnnncctgnanncccncgcacggcgncgcgnacgagagaacagaagcggagacaggagnancgcagtggagagcagagagagacgagcgagagcgcnncnccacnccacgnnnnnntncccccccaagcagagagagnccacaagcgccgcagtagcgacaagagcncnnnncnncnncncttncncnnccncnaacntcnccaagggagccgagcacgggagagcggtgnccnnnnannaacacaaggggaaccggngacacagcctgncgcgncncgtgtgcaccnncccatagaaggggnncnttgggtgnncantgagnagagnagnagagcgagagagcgcncgagagcgnnnncnnncctccncncncnnnctgncaagagagagaagaggagtaacgcagaagcaggaggccnnnncncncacacnnntngnnnncncccccccnnnccccnccccnncnnnagagagagcnagagagnnagcagnagagagagagannanncnaaagcaaccaacaaaacagcaaaagagaacgaacgagganagacgaagcagagtnaccacnanaaggnagagnagcagaggagagaagagagagaggnagnnnngnnnngnaacgaagaggagagnaggagagagagagagagcgnnagcggagagcnagngnnagagagagagagagaaggagagagtgnngcgagcaaagnnnnagaggaagcagagagagagagnnnnnnnnntgagagnagagagagacgagnncagnagacgagagaagagggcaggagaagagnagagagaagcag

SEQ ID NO: 269318 - DNA, 673 bp, Glycine max
  unsure (1)..(673): unsure at all n locations
catacaaacggcatataacctgaatccctgctgatcaccccttgctcctggtatatatttgcctggggaaacgggctacaactgtcttatggcactttaactcaactgtagaatatccaggatggctgacgaaacatatctcaaattcctttgaataagttttttatgtgttccccccgggggcggggngcgtgnggaaacccggccacccaccacaacactaacagggggaagtgataggtaaattaataaggagggttatgatagaatgttatttagggaattgtttgttttatttttttcccccctccgccgccccccacgcctcgccttcaccgtattattgtatatgtatagattagataatgtttatgattgattttaatgtgtggggatagaacacccctctcctcgnnnnnnatgctcctgttatatctcgcccgcgcgttcgtgcctacacctantatctccattgatatanccatatcanctccccaccccaccccccgccccaccccacccnncnanannnannagnatgaatatcctatatttctttatttattgtattgttatgatgnnnnnnnnnnnnnnnnnnnncccacnngngggnganggnngggnggggagagaaagccccccaccccacangaangaattctngtatatatat

SEQ ID NO: 269319 - DNA, 333 bp, Glycine max
  unsure (1)..(333): unsure at all n locations
gtaggctcaactaacaatacgctctagaaggacagcgattcgatctactactctttttttatatgnattcaatcacttttatcctgggattcatgatagtactctgggntnnnnnntnctggacaaacnnacagcncccactactatcactctaaactcaactatcattctcnttngcntgtggcggacccgatcgttgagtagccgcnnnnncncnncctnntnctcatgctnntnnttnntnnnnnnnnctccccgctgctcatagtacgtcacatcaatagcgnnnnnnagtnnnnntnatatnnttnggtattagatcgcctctctccg

SEQ ID NO: 269320 - DNA, 1161 bp, Glycine max
  unsure (1)..(1161): unsure at all n locations
cgacgctgttttgttgaccagactctctgtacgnncngncgattccctntannnagnntcgacnctcgcangggcatttgcacaggctctaacactttctctaaattaaactctatataaagaaggaatagatgtgttattctcttcttcagaccacagaggaccaggggtnattgaagaaggaccgccgttctcttcttctttttgggttccaaaatataaagtatttatattattgcctaagnaanagaatggggaanntcccctagcctctttcttccagaaagtagaaagtagaggggtgggaggggagttaccgttaaagtaccatatcccttcaacagtgaaggaaaacaaatttcattattttgatcaatactattagtttatcttatgtatgaaggaactagctagggtgttacctaaatatataattgcttttatgtcagataanaaaaatatttntctctttcccctctcttgtttgaaaatttaaattttattatattaaaaaaatcatattgtccttagtcttcacctttgagggttggtatttgagagttgtagagtggtctaaccacgccacccgctttgatcacgaggaatccctcttcacttacagtgtatatctttgaggagcacatttataacatatatatatgtacgtatctcttagacgactctgtatctctcatgtaacgaacctaacagaatcattttcaacgaagagagtttgtctaccttattatcattgtataagcatattcatcttgatgtagtgcacaagactatgaattgattgatatgatcttattatttgagtaaaaataaacgggtatgtttattcgggtttaaagtaggaaagccccccacctccaggcttactaaaatttgagtttgttgtataaatgttccaacctccctctcacactcttgaaattagaangccacaccacaccccaccaccccacattttntttttttttnnnttncttttattntttttgtttgnttattggtttttttaagnntnnntnnntnnnnntnnnnttgttttgtattaaatagaataggagaaggatattngnnnnnnncntanaanantanaannnannagaggatttaatagtttttgtccctccccaccccccccccctccct

SEQ ID NO: 269321 - DNA, 1035 bp, Glycine max
  unsure (1)..(1035): unsure at all n locations
atgaaacgcagagacccnctgttcctttcctgcactcccaaggccaatgctctttaatgtgattctttttggaatacattcaattattatgtcgacaattcgaatgaattttacatgcttagaaagagggaagacacaactaaactagttatctctggaattttatcttcttagagagacttttaaagaaacctatctccacagacccttataacaatagagggggatatatccttcattcttcctaaaagtaaaagggtttctatacctgggacttaattctctgcgaacctcacttaacctctgggaatgggacagttgctccaacttattccctttctggtttgagttaaggctgccgaatacaaattaatttttgaaaaaagggtccaaaactcttttcacttcgctcttgtatgccggcgtttttgaactttaacacaaaaggtggatgtttaagggaaaacaccttgtggtggtaaacacatatttgcaacccttcttctctttagaacaatccaccctcttctttttttccaccctccccaaaagtattttgacccatttgttttctccccgccgcccctagggagtaaatancaaataaacgcttctcgctttttctaattggtgggaagtgggaatcacctatctgcatggtgttaaatagtgtgttttattttgttaacacccgaaaaagggttttannngtctgcccccccccccacccctattctacatgtccgtcccccttctttactggttcattgtttttgttccttgattaattaatttgtatatatagtcttctagtctgtgtttactatgatcttttgatcnnntcatccccccgcacgcacacccctttattctatatctatcctactgtcgatccttctactcctntttcttttctctatctctccttttccttctttnttcctctttttctccaatctattttataatataaattatagtatgtgcccacggnnnnccccncctctcttcctccccctctggtagcccctcttt

SEQ ID NO: 269322 - DNA, 464 bp, Glycine max
  unsure (1)..(464): unsure at all n locations
agcttttctttctcaatcaatctgtctactgactaacaattctaattgcacgttcacattcttgttctttctttntctaacatacacacttgttcaaactcatgaaaaggaacacaaactccatcacaatcatgcattcaattcaaaataaaagcatacaactcatttcacaaatcaacaaaagtgcttcactgtcatatcattaaaaaccaagttaaactgttcaaaatgcttcatgatgagaaaatcaactaatcataaataaaactagtgtatgtagacataaaggaaataatgtactaaaaccataattataataataataaaaatctgaaaaggaaatcagtgtccaaactggagaatcagtgagagccacaacttcctcagatgagaaattagaaagatcagcagttcattcaatcagaaaagtcagaaccgtcatctatgttgtaagatggtgaatt

SEQ ID NO: 269323 - DNA, 1376 bp, Glycine max
  unsure (1)..(1376): unsure at all n locations
ggacgcggagaaccagcgaaagcgacacaagaaacacaagcntnggcaattaacctgaagttgagagaaaatgagnatntaancacacccgaannaacaagacaatagagagagagaggagcgannaccgagacacgaaaaanactctacacacacctgacaagacgagagagcagaagnntnanagaagaaggagtgactgacaannnnnnnaaagaagagagagnnnncnncnnnaaggnagnnaagcaggagagaacacggacctacgcanacagaagagagagtagagagagagagagaagagaaaagagagncaagagagnagaagaagcagacaggcaagaaagaagagaggnaagaagaagagagagaagacgagagnagcaagagagcaggcgaagaagacaagaggagaagncggagacagganngagnagagnncaatatgagnncacgagaancagnnagagcaagnagagnaagagacgagaagagagagagaagagaaaagagagagnagaagagaagaggaagagaagnnaagnagnnagaagaagagagagaagagagagaagaaagcagagnnagnagagagagagcgaagaggaagagagagaaagaagaaaagnnaagaagaagagagaagaaagaagaggagnagaggagagaagaagagaaagagagatagtagagagaagaagagagagaagnctntnntngnnnnnnnnngaacatgaagagnannnnagnnncgaagagaaagaacagaaaggccgaaaagaagagnnnagnntaagagagagagacgagaagcagnnnnagagagaagagaaaagnnnnagaaganaagagagagagaggagagaagaaagnagagagagaggagaacagagcagnngagaaagacaggagagagaaggagaaagcagaagggagaaaaaagnnnnnnnnnnnaagagnacgaagagagaagaagagagagaagaaagagagagaagagagnnaagaagaagaagagaagaagaaagagaaggaggaggagaagaaagnanaaggagagagaggaagcagggagnagagcagggaagagnagagagagaagagaagagaagtagagngagaggnnnnnnnnnnnnnngnnncgcagagaaatagaaaaagagagaagaagaaagnagggaggaagaaggagnngnnnngggcanagaggagcgaggcagcagagagaagaaagaaagaaaggaagnnnnnaagggcgaggccgcgcgccccccgacagccaagcaagagaagtaggagagaaagaagagagagnnnnngnnnnnnnnaaaaaaaaaaggggnnnnnncaagnnagagttttttagtnttntg

SEQ ID NO: 269324 - DNA, 430 bp, Glycine max
  unsure (1)..(430): unsure at all n locations
agctntggaaatgatntctatacaaaagttattcgtataaagcgactagcaccaggcaagccaggggtctgaaaaagcaataaaatgaaccttttgccctcccatttgggaatnttccacattcttatcgaaacatcgaataatattctatcttgcgcagcaattggtgtcgaacaactcaattcggcaagggagaatcaaaatgttggcgaatgatagtccccgaacgaaattagggtataacagttgcccctctttacttgtcttttattggaaataaaatggaagtaaagataaggacactaatttcgttcgagcaatcttgttattcgaccagtgactggcgaagaccaaggcagtgaaacctgtcaaaagagaaaaaagcatgatgtattgagagtaccaaaagacattgaagtctttgaaatgt

SEQ ID NO: 269325 - DNA, 437 bp, Glycine max
  unsure (1)..(437): unsure at all n locations
tgtggatgctgatataataattcctctgacctaatattacatagatggaaaaaatagagatggatttcaatattagtagaagaaagaaacacatcatttctactttctagtttttctaccaagctagtaaaatggaaatggttcaatccacatctttcatagaaacaaactaaaattgtcactcagtcatagtaagaggatcaagtataattaattgatgacattgtcatactgttagtccttcaaatgtattattattgttgatcacgcanacttgttcatcaagtggttccccaacacctcgactatcatcatggagaatacgccttgagtagtaaacattgtgttaatactttgnttgcaataaaataatattgaattagcattaataaaagaaagcttgaatacctatgaagcatcaattccacctcaccatc

SEQ ID NO: 269326 - DNA, 384 bp, Glycine max
  unsure (1)..(384): unsure at all n locations
agcttaagaagtcatgtntgcacatatngaatgttgagaatgagagatgagccaacaagaggcaatattgtatcagaaacactccctaaattagatgatatgtttacctttaattaattcaagtttaaaagcctcataaaagatacgattgtaaggtaaatatttgaccacggagctccctttctagaactttntgtgagcgatgagctgttttaaaatgtttaatgttttaaaaaacagtttgtgactgtgattntggccacaatgtcaaggtttttgagtgtccgccactataattgtgaccccatcagtgaccccatcagtctcatttatccacaatntcctgccacaatttcctgcaatatcaagaaatgcgacaaaaac

SEQ ID NO: 269327 - DNA, 457 bp, Glycine max
  unsure (1)..(457): unsure at all n locations
gcttcttatgtntatctgtgagaagagtgtgtagtggattgaactaacatctgggacatgttatgtttacatgcaaccattccgattcacctttgattaaatataaggatattagctttttcatctaataaaataataatctgcatcctgtttgattatagattattttatgagattaattgatcttgtgttttcttctagtcaactaattttgtttcacaatttcttctccattggagaaacctaagagtgcttatgagacagggtattaatggcatttaaagacacttacgaaaaattcatggtatttatggccacgcacacgggtcagtataattctagattaagttgggaccaagtaggtcgataatggggagtgggaggatggtgtgagaatgggtgccatgtgaatatgggttgctatatatggtacaagatctatatggggatctacatg

SEQ ID NO: 269328 - DNA, 469 bp, Glycine max
  unsure (1)..(469): unsure at all n locations
agcttcatgatgaatcaagattgattcanagagttttgatgataacaaagatgatgacaaaaagctcaaaagtcaagaacacttcatgataacaaagatgatgatctcaagaatcaaagaacgagttcaagattgaatcaagtacacttcaaggatcaagaagaaagttgaattcaagaatcaataatgaagtntcaagattcaagttccaagaatcaagatcaagattcaagactcaagattcaagaatcaagagaagacttaatcaagataagtattaaaaagttttttcaaanactgagtagcacatgaatttttctcaacaccttttaccaaagagtttntactctctggtaatcgattactagattattgtaatcgattactagtagccaaatgtttttcanaaagctgtcaactgaanttacaacgttccaattggattcataatgttgtaatcgattacaat

SEQ ID NO: 269329 - DNA, 407 bp, Glycine max
  unsure (1)..(407): unsure at all n locations
cttgtagcttcgatgcaaggaaacattcttatggctatgaatccaaaattaggttttagaattagaaaggcatgaaaattatgacttgcttgagagagtttttgtctgaatttgggctgccccatatgtgataccttgcacctaagtgatatgaaaaataccttgcaatagtatgtatatatatgtaaatataaggagcatgaaattcctatcaaagtgtgaatgatcgtcttcctaaatgaatgtatgatagcacggaattcccttttgaatgcaagtgtgtgcataatgtanatagctcgccaatatgaataaatgtgagtgaaacaataaaaatttgtatatgtacgcagtttgtaaatagcaaatgtttatgatataacataagtgtcgagtttgacgcaatg

SEQ ID NO: 269330 - DNA, 303 bp, Glycine max
  unsure (1)..(303): unsure at all n locations
agctngaagtgagaaagtgtggaagagtcagtcttcctactnttatttgttgaccacagtgttgtaactggagatatgtcgcgggggtcaagagacctttgggacgtcaggtggggtgccatttgcccaaaacaagcttgaccaatcccgacccaacccgggcatagtcagtcagtgagaacctgtgacgtacctaaacatgcgagcttttggcagtcaaccaataaaagaacaaagaccacacagcanggaggcttgtgtggtggctggccagctatggatcttgagtgatatctggaatat

SEQ ID NO: 269331 - DNA, 417 bp, Glycine max
  unsure (1)..(417): unsure at all n locations
acacagcaacacanaatctatgtgtccacaacccctcaatttaatggattttctagacttgagaagtgaaatttagaatgaggtaaaattgaagcaaactctcacctcagaccagtccataacatcaatctaaacttgctcaaactggatttacacctaaaattccaccgaatcaaaatttcactcctcgacacccaaatttaccctagaaatggctctttgttcactttggtcatttgtatttctctctagcacagtccaagctatctactaatcctaagagacatttcaagctaggattaactcactttaatctccatgtaccacagaatccagatttaacctttcaactctcaaagtctcactcttttttcactcacaacaccacattctcactttctaaccctatgttaactc

SEQ ID NO: 269332 - DNA, 437 bp, Glycine max
  unsure (1)..(437): unsure at all n locations
agctntgcatgtctagtgattctagagagagaaaggtccaagttccagagagttttgagagattntgctgtgtgaagatctacagagaccagaacttgaagcggaagccgttctaagagcttaagatgagtttatgagtggtagtgagatcctagaggtaaaggagacatcctcaccacttgtatttttgcaatctttcatcttgttcttctctttgttgcaaaggaggcttcctggttatggaaagctaaaatcctctattggatctttcttgtaggtacttgatgttaaatatctttctatctatttaatgatgttttgtgtgttctctgtgctatcagatgttcattctagtatgcctttaccttgatcacgtanatgcatgctnntgtagggtcattcaacagtggaaactggtctgattctgatgaccttga

SEQ ID NO: 269333 - DNA, 1152 bp, Glycine max
  unsure (1)..(1152): unsure at all n locations
atctacctcactattacaaggccagntatntcccttgcagttggagtggtgagtcaattcatgtagtctcctcataatgatcattgggatgcagtaannccctaggatgagatacattaaaaggaccccacgacaagggactctctctnaagaacaaggaaacactcanatagttggagtttgcaatgcagattgggcaggatcacccatctatangccgcccacttcaagatattgtgtgcctattggagaaaatcctgtcttatggaagaagtaaaaacaaaatgttgttgcaacgtctaatgcagaggctgaatatagagctatgggtgtaaccacttgtgagctcatttggaataaacaacttctttaagaattgaagttggagatactcaacagacggagctatggtgtgataatcaagcaagcctacatatagcttctaatctaggatttcatgaaagaactaatcatattgagaatggatgtcatttttgtcgggagagagatcttctaaagaagtattactgattccgtaagtctatgatcaatagagacatccttcaaatctctaggggaccacgattcaaatatttgttcacctcgaccattgacttatgcctatctgaaggggtggggaatacaacantatgggactctcacagatggtgtactgtgcaataaatagtatatgtgctgtttccaatcctgctagaatcaagcggcnnancagaatgatgaatgtaaggagatgagtatgcgagatgtaaatgaaacaggggagcgcaagttgacgcttgtctaaataaggagagaacttgtattgtaagaaggtanaggaggtagttgggatgatggggttgtgtctcgtagagcagagagcagtgttggagatgtagtgctcgagagcggagnngagggnngnaggtagagaagtgagataagcttttgtagataagnaagntagggtgggntnnaaggcgaggtnagtagagagagnagnatgggnnnnnnnnnnnnnnccccccnnnnnnnnnnnnnnnnncgcgcgccggagagaggaggcgagaagagtaggtaggaagaagatgctgtagnaggtagagcggagcagagnaaggaggagagagaggagcacggagnnaagtagaa

SEQ ID NO: 269334 - DNA, 393 bp, Glycine max
  unsure (1)..(393): unsure at all n locations
agcttacacttacattgtaacccatgtggttatgacttgatgatctcnaactccatgctaatgtgagcagatgactatgaggtcaaccttgtaatgcccctaattattcacactctacaatagttcatgcggtgacacttcactctagtttcttgttggtcagaaccctccatcagtcaaaatcctctgtaagtagccctttcttagatctcaataatctgcttcagatgttttcaagatcaatgattgttcccacaaagcaacatgagactcttcagcatgttttgtcctcactcacctgttntctagaagacttccaagagagtcaccaatctcataactattccaagtcaagcacacttaattgtggagtcttaagtgataggatactga

SEQ ID NO: 269335 - DNA, 239 bp, Glycine max
tcgactacctacgggtccctaccatggacaccatgtatattgttaattccttttatgaagcaatctataatcaggttgttaacgcgtactaatgcataaatactgggtatagttacaggttgtgctagagcttattatcgacctccatcaaccgtaaaggtattgaggtcatgatacagtgctaatatgaagttaatatcttgacaacagtatttctgcaaaatacctcacattattct

SEQ ID NO: 269336 - DNA, 428 bp, Glycine max
  unsure (1)..(428): unsure at all n locations
agctngaccaatcccgacccaacccgggcatagtctgtcagtgagaacctgtgatgtacctaagcaggcgagctcctggcagtcaacagataaaaggaacaaagaccacaaagcaaggaggcttgtggtggctggccagctgtgaaatttgtgtgatatgtggattatggcctctggtaatcgactaccaatggtgggtaatcgattacaaggcttaaaaatgaagacaggaggctaagatggtctctggtaatggattaccacggggtgtaatcgattaccacgcttgaaaacgaggtcaggaagctaatgaagcctctggtaatcgattaccagccggtgtgatcgattacacgaaagaatgggtcactggtgctcgattaccaggtatgtgtaatcgaatacacagtgcatttttgcatattcat

SEQ ID NO: 269337 - DNA, 322 bp, Glycine max
  unsure (1)..(322): unsure at all n locations
agtgaccataagagccctaaatatttgtttgatcaaaaagagctttacatgaggcagaggagatggttagagttctttaaggattacgattttgagcttagctatcatctatgtaaagccaatgtagtagctgatgccttaagtagaaaatcccttcaaatgtctgctttcatggttagagagttagacctcttagagcagtttatagacatgagnttggcatgtgagatcacctctagtagcattaagttgggtatgttgagagtcaccagcgaactcttgagcgagatccgtgaaggtcagaagtttgacccattcttgt

SEQ ID NO: 269338 - DNA, 406 bp, Glycine max
  unsure (1)..(406): unsure at all n locations
gcttgtttatgcagaattagggtacaatgcctatggcacagaattccacagcacaccacagtgtctatttcaggaaaagagctttggaggcagcaagaggagcagcttttgtagagatacctatgttttgtaagcttattattgttagggtntcttctgtaatggctggctaaacacccttgttggggatttctaatgaacaactaatgtaattattttcatatctaattgaatgggttcttgtgtcaatgcttctttcagtgcttaaattttgtatgctcttggtctaatcaaccatttgtgtgcctagttaggtgaatttaacattggcaagtgtattgttgccttagaacttgaatgaagcagaattgaaacttagtcttacaagaaggatctgcggattaaa

SEQ ID NO: 269339 - DNA, 237 bp, Glycine max
ctattaggaccttgaactcactgcatatatggatacgggttaaagtaaaaatacctgtgtcggcgaaattcacttggtagaccaaatgggcttgctaaagcaaaatggataaaatatttgtatctgctaattggttcactaaatggcctggaagtacacaatttatcttggatagaaacttttctgatcattgtcctattctgctcagatctaaaaatgttgattgggagcccaaac

SEQ ID NO: 269340 - DNA, 1284 bp, Glycine max
  unsure (1)..(1284): unsure at all n locations
cctaaactgactcgtctagtctcacngngtntgcagataangtaatgtaganagtngtcntgtatanntattacannannaancatcagcgagattgtagncanctagataggctgtcggnacantctaatacanacatgtcacgtaacgtcatatccattcatacaccgcatccactactcacactacgcatgtgagtgtggatataactntgacgncactatatgcagacgctctctggtacgctgggtcggtgactaanatctcagtngctcgagagcgacatgaatttccagtagtcagtgcgcgctacaacattntgngcctcatacatctccgacaccatactnatcgcactaaggcacagtgagcgcagcggcgtntaccatgagtcgctatagtcatggtgtaattcgtacccccgacctgatctctactgattaaaatggactaactctgtcatcgagacttcgantacgccttccncgcttcgacagtacaacatagcgtctgcgcgaagagcactcacatatctcacttgtgaacgttatgatggcgcagcacactgtcggtctagtgaaacctaataagcaacactcctgattatgatgctccctcgtgcttacgacttacgaagatctatcacacgtctatttttgcgtgtcagatgtacgctctacgcgaatgcggcactgcgaacggggtgtgcatcagtaagatcgcccttgcgccttactaaacaaaccgtgctgttccgagctccagaatacctcctactatgtaccgtagctgtctcactgcctctagttgtgaatatggagttcatccgctgcgaattcttctagagtcgattgcccatcctaccaagtacggccagtacccacaccaattgctggatgacccatttgcgaccgacactccttcgggtgaatagcaaggacagctctcttccatacactagcgctccagaagcccgtgatcggacatgactcaccctccgtgaagtggcactgatccctcattgatccttgaggatgacatctaacaggatctagcacgccgtgatgatactacacggtagcaagcctatgtttgtgttatatttttaatttgtttatccccaggggggggaaggaanaacccccccccccccgacgtgcatgtgcatgtatagtcgtgacatcgaacccccccagttttttttcgtaagtacacaacgccaccacacccgccnnngtcccctcaagaacaaaatgttagctgaacaccggattcacccccccc

SEQ ID NO: 269341 - DNA, 381 bp, Glycine max
  unsure (1)..(381): unsure at all n locations
gctaaaaaaaattaggagagaanaattacaaattcctctataatntaacccccaaaatatactcatagaccaaaggaagattgtttgggtaaattgggagacgatatgtctctcaaaggagaatggtggattgggtgtgcangatttagtgaattntaatcatgccttacttgggaaatggcgatggaatctcttccatcattagggagaactatgggcaagagtttngaattcaaaatatgggagttgaagaaatttagatgaatcaagaagacatatcatggattcaatttggtggagggacttaagttangtttccaatgtttatgaggaggggagctggttcaagagtggtatagatnggaaaattggttatggatc

SEQ ID NO: 269342 - DNA, 416 bp, Glycine max
  unsure (1)..(416): unsure at all n locations
aaacccaacacagcagctatgagcttatcaattaccatcacaagtttagtcaactttcgctgtgatgaatcaatatatagacttatcttcacttgggacttgggtacaccgtggcctttcatggctcctgacactttatccacagactttttcacaatggttttgaaagccaccttactcatattaccttgccgccatgatggtttcaaaacctcccttacaaaaatcgcaatggaaactttgaacaatttcatcgatctggaatccttactctnttttcttttcccacgagacttgacctgattaatctcaacctcccctgaagtcatttttgcaacatccacatcatcacttaagctctcattttcaacagcacctacttctgcatctgctggntcaccatattcatcattatt

SEQ ID NO: 269343 - DNA, 372 bp, Glycine max
  unsure (1)..(372): unsure at all n locations
tattgcaaactatttccccaattaaaattctatttcactttcaatgccagttataaattcccttaaaaatgaactcttaaataatgattcaaatagaacaatctgaatataaatataacgcaataataaataaaagagttcaagggaaaagaaagtgcanactcggatttatactggttcggccacacccttgtgcctacgtccagtccccaagcaacccgcttgagagttccactatcttgtaaaatccttttacaagttctaaacacacaaggataatccttcctttgttttcataattcttttacaacaagagaccctcggtctcttaatcccctctgagaatttagaaagaagagaagaatgaatctc

SEQ ID NO: 269344 - DNA, 429 bp, Glycine max
  unsure (1)..(429): unsure at all n locations
ggtccgcanaagaaattactaaataagatntaaggttcaatacctcagtttttcttaccaagcaaaaatggatcatttttaaggtccaacaccttaaaaagatcacattccaagtaaaaagaatcgcttgataaaagataaaaatataaaaaagcaaatggaaacgcccttgtcgaccacaaaaagataaaaatataaaaaagcataaaaaagggaaacgcacttgtcgaccaccaaaagataaaaatataaaaaagcataaaaagggaaataagaatgtaaaaaaggaagataacttanattgaagtcatatttgcacatttgattaaaggctgcagtctcctgtgacggacgcgtggggtgctaataccttccncgtgcgtaaatacaactcccgaacctttcacttaaagttcgtagatcacgtct

SEQ ID NO: 269345 - DNA, 417 bp, Glycine max
  unsure (1)..(417): unsure at all n locations
agctntcaaagtgttccttcgccacatcatatgtggaatacttgggccatattgtgtcttgtcgtggcgtaaagcccgtgccggcgaagatagaagcggtgtaaaattggccaactccccaatctaccagagcattgcgaggcttccagggcttgtcgggattctaccgaagatttattaaaggctattcctcaattgcagctcccctcacgacactgcttgccaaggattcattccactggaactttgaggccaaacatgccttcatgaacctaaagcacaccctatgtagtgcccctgtgttaagcttacaggatttttccctcccattttgtgtggaaatggacgcttccggatcggctgggacggtttgctataaataccgaagcattttacaaacatctgtcactctgtgct

SEQ ID NO: 269346 - DNA, 376 bp, Glycine max
  unsure (1)..(376): unsure at all n locations
ntataactagcatgatatgccatanattcttcanacaaactttcaagatcaggagctctttcttcttcataatgattataaggattaaactcctgtctccacccagaattattcgtggaatagaaataacaattgtccttctaatgctctcttcgacaaaaatcacaatttatctgtgaaacaaaaataataatctccataatgcggaatcagaagattgaacttctttgtctaaaatggaagctactgtcctatcttgcaacaatttccttctcctttcggctntgttccttcttaacgtggcttcaatttccaagtccagaggaactaaattacctgtaggagatctatgcatataaaacactgataggaacaa

SEQ ID NO: 269347 - DNA, 463 bp, Glycine max
  unsure (1)..(463): unsure at all n locations
atctcgaccggatccttaagtcacctgcggctgcaactgcctaataacctgaaattgagataaaatgattatttaacacacaaaatggaagtactaagtatttattacctatacttaacaganaatacttataacactacaaaataaccataaattggaagagtttgatacactttacacaagtttgttgtaccccagatgggggctgttggcatgccctggcgtgttcctccctcatcccctaatgtccagaatgggatgatacgccacagttgggagaattaggtctccttcgatagtcgtgctaggggcggcggcggtggtcgcattgctctccattagttgtttcattcccagcatggcttccatcatagaagccatgtcttccttcaaagtcgacatgtcgactntcatctgttcttgtacttcctctaagtcacccatcgtcctaagcttggatctg

SEQ ID NO: 269348 - DNA, 435 bp, Glycine max
  unsure (1)..(435): unsure at all n locations
tgtagaatggctagacataatacatgtcagggtttggtttggttcaaggataaaagggatgccccacattatttccatgacacaaatgcaaagatgatgatttggaaattttatgcaaaactggtcatgcatgcacctatgcggacactcaagtgtcaaatttttatggtcatgggatgctagggctcaggattcatttcctctatttttagtcaacccaatgtttccaaaatatgttcttttatcaatttgtgcattcatccgagtccattttgggcgtcccgggaaaatttcacagcattcacccttcaggtgtacacacattnttttcaaaaactagttatgatcagttgaatttttcanagaaaangtggaagtcatctcttttcaaaagcatngtgggttttcagctcgacaacttaatttctttttctc

SEQ ID NO: 269349 - DNA, 433 bp, Glycine max
  unsure (1)..(433): unsure at all n locations
gcttctgatctcgataaagctactcaaaatcaattagcaagaggtcaacgattgcgcgagttgcttaaacaatcccaatcagctcctcttaccgtggaagaacagataataactatttatactggaacgaatggttatcttgattcattagaaattggacaggtaaggaaatttcttgttgagttacgtgcttacttaaacacgaataaacctcaattcaaagaaatcatatcttctaccaagacattcactggggaagcagaagtccttttgaaggaagctattcaagaacagatggaactctttttactacaggaacaggtagaaaannaatgattaatcatttaataactttataatttcactttcaaattcttataaattagtatctttaatatctttttatttcatttgaatattatattaatatatt

SEQ ID NO: 269350 - DNA, 358 bp, Glycine max
  unsure (1)..(358): unsure at all n locations
attcccgaaaattagctntttatgattatatcggaaataatccagcaaaaggggggttatttatagcaggttcaatggacaatggagatggaatagccgtcggttggttacgacatcctgtctttagagataaagacgggcatgaacggtttgtacgtcgtatgcctactttttttgaaacatttccggttgttttggtagatggggatggaattgttagggccgatgttccttttctaagggcagaatctaaatatagtgtggaacaagtacgtgtaattgctgagttctatggtggcgagcttaatggagtcagttatagcgatcccgctactgtgaaaaaatatgctagacgtgc

SEQ ID NO: 269351 - DNA, 389 bp, Glycine max
  unsure (1)..(389): unsure at all n locations
agcttggagaggatgcttcaatggagganaagattatgggagagaaagagagagaggggggggggggaacacaaaatcgattgatgaataactggagagaactccaactttgagttgtgtctcactagactctcattcatcacagttcctacaagagttacacatgcttctatatatagactaggcagctttcttgagaaaacttccctgacaagctcctttgagaacactgtcttgagaagctagagcttagctacacacacccctctcataactaagctcacctccttgagaatcttgcataagaagatggcaaaagaagctagagcttaactactcacacctctctaataactaagcgcatcctcttgagatgagaagctagagct

SEQ ID NO: 269352 - DNA, 750 bp, Glycine max
  unsure (1)..(750): unsure at all n locations
ggccggttganccttgttccctcttaggtaccttcaatcctagctgttgtgacttttggggaggatttgacttaagaggcctttaaggggatttccccagggatcacggaaacaggaaaaggaaaggggccctccctaggataacctggagaggacttcccccaaaaaccttgtaaaacttgggaggtcttatggggaacaataggacaaaaaaagaggaccaattaagaaaaaggaagaatgacttgattggttcaaatttatctcaatacacaggcccatcttttttaacagagttctgaaattctaaaaatcttaaccttttaaactctggactactactccacccttaactacactttgcaatagaatcaaaagctctagatccaagctaatcggtacctttcaatccctcggccaaaggaactttattcaaacggctttcaggccaaacagttaacagctctgttccctatgatttatgtcagaaattttctgagatctaatagtactatttctataaaaatattgttggtaaaggaacttggtttcaagccctccgctctaagaattagtttgtttttttgggagagaagggctaatagatacacccccccacccccacaaaaaatttcccctcttttttttttcccccccccccccccccccgatccctnnntaatagttntttgnaactctcccccaatattagtggngagagnnnttataaacttttacctcccccccccc

SEQ ID NO: 269353 - DNA, 398 bp, Glycine max
  unsure (1)..(398): unsure at all n locations
agcttaaggattcttagggaactactagagacatcactatcactgccaaactacacacatcagcctgcttagaggtaagggatgagtttatcgcaattgaggttaaaatgaacatatgtagtgatgtagatccatgtgcagcttgtaggccttggatcttcttcatcaatgaagttttttgcttcttgaagatcaataaaaggggaatagagaaggaagaaagacgattagagatgtcacttcaaggagaagatgagtcaagaacaagctcaccatcaaaagaagccatggataagagcttgaaggtangatgagatgagtggagggagaaggagagaangagcatgaaattttatacctcaaatgacgtctgaactntgaagtgtaaatctaaaatg

SEQ ID NO: 269354 - DNA, 430 bp, Glycine max
  unsure (1)..(430): unsure at all n locations
ctgtatttaanaatgtnttaaaaatactcttaattaatatttgagattttattcctttattaatatatatgtgaggggtagagggtgtcacaattgttgttggtttgaaatggaatccgggtggaaatgccttggctatagctttaaagggattcttgtcccaatatttcggcttcatttgcaaaacagttgaaaaattatttttgtaaatataactgttactgggttttggggctggtgttgtcattggggttattatatgtttttcttttggagaattgcaaataacttttgtgcctttggctttttggattaaggtttgtagatcaatttcagattgatcatctgattcaaaggctatgtcagcccatgttttctttgggagttttgtcacgccaatttcttgatgggccaaaagtgtctcgattgg

SEQ ID NO: 269355 - DNA, 429 bp, Glycine max
  unsure (1)..(429): unsure at all n locations
agcttcttccatgaatgttcatcttcaatatggttgttttgtcgaacaaccttgttctgacaacatatcgtgcaactcgatgggatcaatttgtaagaacagtttcttatttcattaaatgttggtcaatacatatgtgtaagaagtatacaaagtatgtcctttttttagcaatgatgaattcaatttggtattagctaatattcagtgtgtggaattattaagcttgcaagactatttttttattctttggtgttattggaattcaaatgatctattagcgagtgttattttattatagaaattttttttcacatatatactcagattaacataatataatttgtcgttaaaaaaaagatgtatactagatgtgaaaataggaaccaagttattataccaaacatagntcatataatttcatgtcat

SEQ ID NO: 269356 - DNA, 1064 bp, Glycine max
  unsure (1)..(1064): unsure at all n locations
tcgctccgtgtttgaccccattgatgacgctctctttgagacactttcagactcaagcctcacatgaaacaaccaacttgcttgggccagcctgtttgctttgctctaaaccaccaccttcttatggccactaaaccggagcttcctccctatatttgctattaaaaggcatttgacgctcacggaaagggcttatccccctttgcaattctatttctctttatacaagatgaaagaatggcaaaattccatgtgtagcacatcccgaacacttctattaacgttctgtgaatgaattcgctaacgttcttcgtcgttttcggtcattcttaaatcgtcggcaacttcaacccggtaggtgtacatatcgagctttgaattattctgttgttgattcatcgcttcaaataataaaaagggggttaaaaattatatgttcctgacaaataaaattatcctcctatgtccatgatcatgagctctactctcagttaaaagtaagaacgaacatacctgcctcagtttagtgcattaaattcccttgaattaaaggtgggaaaaagacaaccacatttttggcgcctatttcctacttgcccaaaaccacgccttatttttacctttaacttacaccaaacccaaagtctatctttttttaaccaggatacctctgactacaaaaagacttttttcaaaaaacaatagaccttctccaagttacccatgtggaacttccgttcctctttaggaaagataacttcctaacttttgcggaacacatactcacttttcttgaagtacaatctcatttcttgtcagtggatcaatcttttatacagatttcccttttnactatataaattattatatgttatatttatatcttttcgnncagccagaataancgtcgtggttcgctcctcatcatccattcatctaacatattctcttggttnnnncttttctactactatgtattctaattatttaattttgttngcgctagagncacatgagttatttattgatattttgatatgaaataaaacacctctcctcccccg

SEQ ID NO: 269357 - DNA, 439 bp, Glycine max
  unsure (1)..(439): unsure at all n locations
agctntattaaaaatgataataaaatattaaaacagtaaaattntaaaaaataaaattaatatcaattcattctctttgtttatcttttacaactattcatattcatcttattaaaaaaattatatctatttttttatgggaaaaaaatatttattgaatatattcaagtcaaaaatttacttgatgagagcacttgcctccaggccattatcttttgtgtagacccccccactgacatgaataaaaaattaaattcagaaaacaacatattatttacttacatttcgcttgccgtttaatcgacctagacgcgagctcacatttacaatgcgtccaccagcagaggatgacttcatcaatggaatcatggcttgaatcatacgcttggtgccataataattttgttcaataaccaatttagcattctcaacggaatta

SEQ ID NO: 269358 - DNA, 1175 bp, Glycine max
  unsure (1)..(1175): unsure at all n locations
atgcccgttgacctttgtagcctcttgtaggacactttaaactcagctgccttgagattggacaatgggttttaatgttggtattaagtttgcgcgtatgaacgtgccgaactgcttactctcttgggagctcagagttataggatgggaagtgagttatggcgcacaaattgtgccacgctcagaacgaagctacacagtaatttgccacaatgctaagaaggttgcttcatcataagaaccagctctttgcgacagctttaatgatggtgaacctgcgaaagctgttctcactattgacaacacaagctctaagaagaagaagctattgtaccgcttgaagaccaagcctctcctctctgactaanatcattattgttatgcgtatgtgccagcgggaagaggaagatcactaccttgaatgggatgctacgttnctgcatcaactatcctgctgttcgtatatgaatataaagttgttctattattttgccatttgtttcgatgatattatgtcttctaccatatatataatttatatatacctctgtcttgtgttttgtgggagtgattattntataagtggtgagnatactgacgaagaatatcacctccgttttacatttgaggtattctttggatgttgctgtgcccttctgtagtataacatatgtaaattctgggggcttttattctgaccttgtgtggctacacaatgagttaaacttttaacgctcccacaggaaaccaatgagtataaggtgacttgtaaatgcccgtggtgactgaaagacactgctcctctttctccagagaaacatnttgtctacaattcctgtgctaatggatacaaatggggtttaattaaatttacttaaattattatcttttgtcagcataccagagagtttctgctcttgccttatctcctatttannnataaatattattaattacacccccacccttattctctaccatcgcccccagcccnnnnncnngnnngnnntntnnnnntannttttttnnnnnntnngtnnntattgatttttttgtntgtttgtttgtttatgtaatcccacatctcaccctcacgccccaccatacccnnccccggggnnnnnnnnnnnnnnnnnnnanannntatttggataatggatactcctcgnttcctc

SEQ ID NO: 269359 - DNA, 438 bp, Glycine max
agcttcaagatcaagagaaaacatatcatctttttccacataaagaccagtattctttgattgttctgttcccaacacatgaaaccatgcctgtattacttgagatggtagcataacaagtggaccatttacaagtggtataatgatttagagatgtgacccacaaaaaaagggaatttgttattgcacaaaatggccaaggaaacattggaaatatatttcaattccatcttggagcagggatggacaacttgtttcagatttaaaaaaacaacgatttgtggatggtcttctgattgtgagtttaactctgtttcaaactatctagtactatactattatattttatttatgttaaacattttccctttaagccaacatgagccttatcatcaaactacgttacttgattacaaaacatcatacctgcatgataca

SEQ ID NO: 269360 - DNA, 1014 bp, Glycine max
  unsure (1)..(1014): unsure at all n locations
cgcaccgaaaatntagtcattntaggttgatattaagagtgcctcgccggttgaaaagtctactttctaggcgaattacttgttaaaaattattattaatataacgaatttgtcaagcataccagctagtacttatttaaaagccacctgaattcactggaattgtgctcattcgaccatgcatgtcatcattaaagtcatttctaatggcgtttatagtntccaacacttatatgcaagaaggattataaatttatacaatgctcttttaacgtcggagtaccagtactagaaggttaaaatctctattagaaaataaagaaagaagttgtagttttaacttgcgctaaataatatacaaggcgattacacaaaagggtacacacaatttgtatgttattggtgttctggtaaaaaaattactataaatactctgtttagatcttctcctttcactctccttattagaaatatttggattttatttataaacctacttcggtggatttaaaaacctaaacaattaatattaaattaatttgtgagcccgcgtgggaaattctcttatggattgaggaaattaaaaaactgcttttctggcctcgctaaaataacaaaaataatggcaaaatctaattaatttaattttttaaattttagataaatttggggaaacccccgtaattaccggaaataaatttttatttttccttaaacaatggcacataaaaaacttctgtggaggttattgtccacaaacatttccaacatattccaaatgggttagacattaatattttttnntctgggnttgttaatacataatataaaacatagaaaaatgtgagaatgnngntnggnggnttccnntgaggcagcaccatctgtccttcttcctctctcttcgnggccnnnnnnnngnntgtctgtataatatcatattattgggnggnggctggnnngnnnnnngtgncagcnnctctcccttcgtctttaacattgcgttatacatct

SEQ ID NO: 269361 - DNA, 359 bp, Glycine max
  unsure (1)..(359): unsure at all n locations
agctnggcacttgtgatggtgcgagtttatatatatcttgtttcccctgataattattcacgtaaataagtttatattgagatgataattaggcaaaattctttctatgatttttgttagtaatcaacataattaaagaactttntactattgagggaaatcctacaatatttttataaattttgatcatttagattcattacgtaactaattcttaatttataactttgtcatatctaaagtttattgtttccattcgaacttaaaaatcaaacatacaaattatctttcataacctcaatatgtattatcaaataaattatactttntaactnttttttaagataatagagaaacaa

SEQ ID NO: 269362 - DNA, 371 bp, Glycine max
  unsure (1)..(371): unsure at all n locations
tctattggatgattgctattaagtctctctacatttgcactataaaatatttcaagaagttttaacttggacttggtcttgagccatgctaatactaatatattatttcatttggnttcatttgccttaataataataaaatggtgtcaccaatgacgtgttagtttgaaatcttaaatgaataatatgcacaataattntgaataaagactaagtaatatagctttttattagttaagatttaagtttattctcttattttggatagatacttcngctatntccttttattattaccatttttctttattgttgatggatgacatattaacctaacttccttctcanggttgctatgtgttcattattat

SEQ ID NO: 269363 - DNA, 365 bp, Glycine max
  unsure (1)..(365): unsure at all n locations
agctntgcttctacacttatcagtgatggtgggtcacattnttgtaatgcacagttgcagaatatgttggggcactacaatgtcaagtataaggttgcttctccttatcatccctagacaaatggccaggccgaggtatccaataaggaattaaagaaaatcctggagaagactattacatcctcaagaaaggaatgggctgtgaaattggattatgctttatgggcttatagaactactttcaagactccaattggtttgtccccattttagatggtctatgggaaggcatgtcatccaccgatagagatgaagaacaaggcttactgcgctctcaaattcctcaatnttgatgaatccttatc

SEQ ID NO: 269364 - DNA, 230 bp, Glycine max
  unsure (1)..(230): unsure at all n locations
gtgagtaattacgcgaagattctcgaccgttcttcaagattcatcgttcgttcttccgtttcttcggtcttcaacgggtaagtacctcaaaccaagcttttcaattcattctatgtactcgtggtgggccacactttgtttcatgtatttntattctcgttttcatttactttntatacccncttttgacgtgcttaagccatttatttaagtcatttctcgcttaatct

SEQ ID NO: 269365 - DNA, 242 bp, Glycine max
agaattttctcagagctttcgttttcaattgcgagtgtctcgatatattacgggtttcattcggacatccgagaaaaatgttattgctctttgatttatgtcagagcttctgttctaaatttcggagtcttcatatactaccggtcacaatcgagcatacgaatagaaagatattgtcatttgaatttgctcaaagcttttgttttaacttcaagcgtcttgatatatcgtcgttagattat

SEQ ID NO: 269366 - DNA, 927 bp, Glycine max
  unsure (1)..(927): unsure at all n locations
gggcaggatgtccatctttgtaccttgcatctaagctttactcgatgtcgagtgagtcccgtatataatgagaggttcttattgagaattatagcttctatcaaatccaacattatacatttttctcggaaggccaatgtgtccctaaatatttgaagctcgaaatgtaaaaaaaggggagcagattcaccaaaaaacctttttcaaatatcaaagagactcccatatttttgaaatcccaattaaaaaaaatttttcgaataaaaaaaaaattttttctgaggtgatagggccccttttttctccccccccttaaagaggtggggggggagaacaaaacctttttgtggttggggtgtgatatatattttgggggcactaaaaaacgtcttcatctaaaaagcaattacctttatgtattggggagtcgatttgcctccacagaaaaacggggaaccaacaagtcttcgttttttgtcgcgcggtcttgtccccgcttcaaatcatctgatattacccaaatttcctttttgttctccttttgtctcagaacgaaagcgaacacanactcttgctcctctttttccttctgcggagtaatgtccatataatataatctattgatgttctttttcccctctcaatagaaagagcaaatatcttctataanttttctgttccttgttantgtatggtatttatgagagaaaaggatacccannannnnnnnnnnccancccccccccnnnctgggatgtattatttataaatttttatccccccacagtttctggcccctccccactcctgttatancctctctccactnntcntaacttttcccatcnnacctcactcatacaccacataaatgatccccgtattttagttttgttgtgtgtgnngnnnnnncgcagcacnnnaccc

SEQ ID NO: 269367 - DNA, 409 bp, Glycine max
  unsure (1)..(409): unsure at all n locations
ttcttatcttcatattctagnggctgctacgcatacaccttttcatttatgaatccatttagaaaggaacccttaacatccatctggtatagtttaatgtttttgtgtgttgcataagctaaaagtattatgatggcttcaagtcttgctactggtgcaaaggtttcttcatagtcaattccatcctttngattgtatccttaagtaaccagtctagccttgtttatgactacttcaataatgcccttgactgttaacttgttggtagctcacactctatgacacttcacacggtgacacttcactcaacttctcgttagtcagaatcctctaccagtcagaatccttcgtaagtagtctttttcgagacctagacaatcttctttgactgctttaagagcaatgacta

SEQ ID NO: 269368 - DNA, 384 bp, Glycine max
gacatgacagattgcggggtacctgactttattacatagtaaatttgtgtttttaaatatgttacattggattatgatttaaacatatctttatgttatgttaacctcattttttttgtagtgctggatctatgagcactttccgagtgtgcatcagtgtgtcataaatgatgcgtacgaggagaagtccctacgtgcttcccggtggctgacgaccaaagcgcatatgaagggaattacaagagtaccgtaccgggcacgttgtgatgctttgacggtcacagatgtgtgctggttgccttacactgagcatcgaggggttaaggggtttgagctgatgtcatcattccaaggtcaactgagatggggtcctatggtggtcac

SEQ ID NO: 269369 - DNA, 443 bp, Glycine max
  unsure (1)..(443): unsure at all n locations
tgctanggttccttaacctccattntcttgaggatacaactcgaacgcaacgtgtgcttatcatggaggagccccggtgcattccactgagcattgtanggccctaaagtgtatggtgcaaagtctaattgatgtgagctggctgaaatttgaggagaatcgcttgtgaatcctgacattgacaagcgacaccacacatggggcaattntgaaagctgtttgttagatgtctctaatgacttatcaggatnttcaagtttatgccattattataaaccacagttacaatgctaaaatggatgaatttgacatccttgtccctcatcgtcccgtaattacatctttgcttccactggaatgtgggtgcaagccattggtttgtttgctcgagcgacatgcgctcctgagtgctgacttccaagaccgttcaatcagaaattact

SEQ ID NO: 269370 - DNA, 403 bp, Glycine max
ctggatgcattggttaactcggtaacccaactggccttgaaccagaaatctgtacctgtcgcaagggtctgtggattgtgctcctctgctgaccaccatacagacctttgcccttccatgcaacaaccgggagcaattgagcagcccgaagcttatgctgcaaacatttacaatagacttcctcaacctcagcagcaaaatcaaccacagcagaacaattatgacctctgcagcaacagatacaaccctggatggaggaatcaccctaatctcagatggtctagccctcagaaacatcagcagaagcctgctccttccttccaaaatgctgctggcccaagcagaccatacattcctccaccaatccaacaacagcaatagccccagaaacagccaacagttg

SEQ ID NO: 269371 - DNA, 414 bp, Glycine max
tccttaatcacctgcggcatgcaagcttcggaagaaagtgatgaggtacaagccctaaatgcttagcttgaaagagcctgggtagtcgaagagaagttcaagtccatagccatcaaagtctgaaaagagtatgatgaactaagggatgtcaatatggccaccgatgaagccttggaatgagaaaccaagaatgcccgaaaggaagaacacgaccaaagcaaagttttgaggggctttatagggcagcaatagtgagctcaagctccgaagaggtgaaaggaatcatcacgggtcaaaggcatgatcttgaaggacgagctataggtctgccttacgtcaaaaagaaatttgcccaacagttaagcgagactgaagggaatatgtgggccatcatcgataagtgcaaagagaagc

SEQ ID NO: 269372 - DNA, 377 bp, Glycine max
  unsure (1)..(377): unsure at all n locations
ntgagccaaaatcctgactcaccatanaccttgacccagggagagaatgtcaatccttaccctcggaagcggaaagaatagaagggaaatttccaatcaaagaaaaggaaagaaggaagatttccaatcaaagagaaagcaaanaagaaaagaaggaaaattccccaatcaaagagtgggagaaagcaaatagaanagaaagaaaattcccaatcaaagaatgnggagaaagtaaaaaggaagaagaagaaggaaagaaagctcctgatcagggatcgaaggaaaacagaagaaatgtgcagaaaggtctntggaccggacaatatctgaacaatacagaatttgtccannnattgggggagtttgttgggtgacaa

SEQ ID NO: 269373 - DNA, 313 bp, Glycine max
cgacagttagtgtttactctgatgtcggataaaggcccgtaaaatatcgagacgctcaatattgaaaacagatgcagtcagcaaattcaaacgacaataacttttgactcggatgtccgattgtgtcccgtattatatcgagacgctcgaaattgaaaactgaagctctgagaaaaatcaaacgacaataactgtttactctgatgtccgactgaatcccggaatgtatcgagacgctcgttattgataacagaagctctgagcaatttcggacgagaataactgttgactcggatgtgcgattgagtcccgt

SEQ ID NO: 269374 - DNA, 982 bp, Glycine max
  unsure (1)..(982): unsure at all n locations
cgagcgcggttggcccatttgatagcctatctttnagcgcactatctaattctcgcgcctgcctgtgcaagaataaagactgtacgttagaataggaggggacattacacacaaagctgatacggctcatatctcactacaagtacgcacaatctcattatcatatctagatctgtcgatgacactatatttcgagcgactaatgaatcgttccggacggatgtttctcctcctatgagcaacgaatttcgaatgaggctgagacgagaactctagttcattctcggactttcatcgagatgtatagccaagcgtattacttgtccttggctgtacactcaaaaactcctgctgaagtctttatgggagcgctaaagcatgaggacccttatgctgctttattccttgacacacacaatattgagactgtgattaacacaacaaggctggtggtgcttttgatcgatgcaccaactgaactcgttacgttattggtgtcactaactatccagagacttcaactgtgaagatttcttttagagcaacataaattttctttaaatagatcaatttgatctctcatttcggaaaccaaagaaccaaggggctcttgcctgcattttggcaaacaatcctcttgactgatggctgcgtgcggggtctttcaaaggctgatttttatacaaccgttggacctcctcttaatacattaggacataaaacctgtttcaagtttcttctcgcggttctgtacttggggttcgtaaaaaagcttccgctagatttgctgggtcnnnnnatatatattgacataccccagagnnnnncngnnnnncctnncggagacatccctcgccgtgtcttgtcnnnncccnnnccctnnnnnncagcntggcacgctatcttaatatatgtaagttgtgnnnnnngnngggntgagagnnnnccccccgccccccccccccccccgggtggctggggg

SEQ ID NO: 269375 - DNA, 389 bp, Glycine max
  unsure (1)..(389): unsure at all n locations
agctngaagtaacttatggaaaataagttaccttattagctactagctttatttttctctcttaattttatctttacgtatttatttgaaattatgattagttttaaattgaagatatgatttgtatcatgtttcgtagtcatgcaagtgagaggcgtatacatccaaattnttcttgtataaatagaaaaataatggttaagaaaattataaagaaaaaacactctatttcttgttttgaaataatattattaataaagtattcaaatgtcaaanatttctgtattaatctttttaaataaatcacagttttattatttttctgtcattttatattttttagctatttcaacgggttaatttatcgaatacttataatttactaaact

SEQ ID NO: 269376 - DNA, 328 bp, Glycine max
tgagcatgaagatatgattgatgtctccacacgtatatgtgaagtaatccataacggtatgagcttgaagttgtgaatgagcttatcaatatcaagttcatatcgcagtggtggattttgggaccttggttgaatgccatacaagttaagaagagacactcaaatgccaccatttataaaataattaaaataaattgtccaaaattaaataaaaaaattaaagaattcttattaaaaaaatgcttgggttaacaaaattaaactagttgggaatatcacaactagtctctgacaatgacgccaaaaacttaatgcctaaaatatgtta

SEQ ID NO: 269377 - DNA, 329 bp, Glycine max
  unsure (1)..(329): unsure at all n locations
agctttgtggccatgtaaacactaaggtttagagtttgtttccccattcagatcaaaccagtgtttcaataattgctcttttatctagttatgcacacatccgagtccatttagacatttcgggaaaatatttcattgcgttcacccttttggtgcacatttcttttttcaaaaaccttcttgtgttttgatctgtgaattntccaaagaaaattggcggtcattctttatcaaaagcgtgttggccttttaagtttcttagttttatatttcagttntatagaaaaaagttgtaacctgtgaaaaattgtaccccagatacactttat

SEQ ID NO: 269378 - DNA, 460 bp, Glycine max
acaattttccttgtgtgggattatcgatctttcactgacatagtcaacaaacattgaccaaggtgaacaagccatttcaaacttcttcaggcattcatcgaactgctgcaccaaacgacaatcaaccagacttccccaggcatccatgacatactcccaagcattgttttgaccaattaatgatttcaattttgccttgacattcttgtttatgtgaaagttgcacaacaaatttgtacactcaggaaatacagttctcattgcattcatcaatgataggtctctgtcaatgacaataactccagggagggcatcacgtattaaaaatataactcagaaccgttctaatgcccataccacattattaagccattcaccctccagatatgcaaaaccagtagagaatgtcatccctgttggtgtcaccccaaccaaatcaagtagtgggagtctataccta

SEQ ID NO: 269379 - DNA, 416 bp, Glycine max
  unsure (1)..(416): unsure at all n locations
agcttctanactntgtacaagaatgaagctctgataccacttgttagacaagtggcctcagatatcttaagaagggggggttgaattaagatattccaatctttttcccctaattaaaaatctatttccctttttactcaagttatgaattcccttaatgacaatcttcttaaatattaattcagacgaagcaactggaatatgaatataaagcaataataaataaaggagattaacggaagagaaaatgcaaactcagttttatactggttcggccacacccttgtgcctacgtccagtccccaagcaacccgcttgagagttccactatcttgtaaattccttttacaagttctaaacacacaaggacaatccttcctttgtgtttagagatcctttacaacaagagactcaca

SEQ ID NO: 269380 - DNA, 342 bp, Glycine max
  unsure (1)..(342): unsure at all n locations
tgctcaccactactagagggaaatcttttanggtgtttcataaaaacctcctcctctaaatcaccattaaaaaaggatcttttcacatccatttgttgcaactcaaggtcaanatgaacaatttataccaagataatacgaagagaatatttcttagatacaggagaaaaattctctgtgtagtctattccttctttttgagtaaatcccttaacaacgagtcttgccttggatctctcaatgttgcctaatgaatccctttggtcttaaagacccatntacaaccaatgacctttaccctattatgcaactctacaaggtttgaanactttgtactctgca

SEQ ID NO: 269381 - DNA, 418 bp, Glycine max
  unsure (1)..(418): unsure at all n locations
agcttgcatgatttacattcttccnctatatgatgatgacaaccattatccaaggctngatctttgtgacatcatcaaaatcttcatgatttacattctccccctntttgatgatgacaaccacttgtaggttaggagcaacaacaaagaaaaaatatctatttgcatatagtttacgcccccttggttttgcaatggttgcttatatgagacaatcgaagatttcatatttctcatatataaaagattgtctcataaagaatagataatgttctttactatattatcttttatctgtcctctctcctttcgcaacatcaaaaacaaatcatgagcagagaggagaaataaacacttgctgaatgtatagagtcaagtgatatcaaggcatataacatcattcatattaatcaacaaa

SEQ ID NO: 269382 - DNA, 140 bp, Glycine max
gctcgtctggctgatatttatcatgccgacttgtttgatgatgactgatgaacaattacggatcaacttgaaacttatgtgcttcgagtgagaacaaatgcttctttttcacttgtgaagatgttcaagaggtggctatg

SEQ ID NO: 269383 - DNA, 427 bp, Glycine max
  unsure (1)..(427): unsure at all n locations
agcttagccaacaggtgcgcttagcgcacttctaataattcaaaacccataagagattggagcttagcacctcttggcccgctaagcccagcttaaaaactcaagttacagaatggatctggggcttagcgcaggatagcgtgcttagcggtgctacaataaaatttttcccgagaagaagtggcgcttagtgcatcatccatgctaagcccactagttaaagttcaattaccgtaaagatgcacggcttancatagtgatgtgcgcttagctgaactattcagccaaccaatcaggggtctctgcgtttagcacgagaaagctcggcttattgcgtgaagactgagcgcttagcgcaaggtctgcgcttagcggataaacaattgcaaaaaaatntatgagtctttntctgtctatctcttcacac

SEQ ID NO: 269384 - DNA, 369 bp, Glycine max
  unsure (1)..(369): unsure at all n locations
ngctccataacacaatgtttgcttacaggtaatggaaggaggttaatatgttctgaaagtaaaaaccaaaacataagatcacccagtgaggtaaaagcgtcaagctaatgatgttaaagaatcacttccttggaggcaacacagattttaatttttgttatctttgtttttcatgcatttaatcatttggaacttgttgtctgatctgtacataggagtatatcaacctatctttgaatgtttaacataacggtttcaatttcttggataaggactgaacaatatattaaaacatttttctgaaaatagtcttttgctagcggaatctccactaagccatcttgttatgcctaagtcgaagtcttaaac

SEQ ID NO: 269385 - DNA, 287 bp, Glycine max
agcttgtatagcatagatgtgatactgctttcctcatcatgtggcagatgatgtttacaatataacgatcctttgttaccttgcaatgagacacagaatgattcacacactcactctcatagatactattacacgcatactctttcaccaactcaatctctcacacacacctaaatgagcttgacactcgctcactctcacacaaataatgagacggactaattcactaacacactatggcacggacacacacacaaagacacacactctgagtcatagacacacac

SEQ ID NO: 269386 - DNA, 437 bp, Glycine max
  unsure (1)..(437): unsure at all n locations
tgcagccgtccgtcgcagacatctcaaattgtgcgcactgtttagttaataaaaaggaaaatnttctcttttacaatttgataaaaacaaaaattatgcaaaaaaatgaattaggttatantaattttttttaaaaagaataattcagtaaataattataaaattatatggtttaaagaatttgtaacagtaatgaatgatataatgatgatcattactatcgtgtatatgtaataacataaaaatagatataaaggttttcttagacaactaacaanaaaagataaaagaattttagattgaataaaaggataaaataaaatttcaaataaaatagtatggataatttaaaaaaaaacttataaaataatntattctccataagttacttcaattagtgtatggaaaataaactactaaaataacgttgtgtactt

SEQ ID NO: 269387 - DNA, 318 bp, Glycine max
agcttgtttcttgctattccaagacactatagagcttcctaatatgtggcatgtcccacctgtgtattttctatataatttgcaacctgcacaatccgaatttaaatagcctattataattaaggtggcacctttatgataccacaaacctacattcgtagtgcctttaggaactcaatgatcctttgaatggttgtaaagatagattccttaagagttctctcggtatctttcacataagtaaacacttagtaagatatcctgtctttttgaactcagtacataagtgatccactcccacctttatatcttgactca

SEQ ID NO: 269388 - DNA, 1021 bp, Glycine max
  unsure (1)..(1021): unsure at all n locations
ctgatagccttctttagcgacacttaaatctcagcttcagacaagatgggctcagcaatttctttttccagaaagaaactttattcatagaccttccatctttaatggagagggttaccactactggaaacccgatgcaattttatcgaggcatagatctaaatatctgggaagccattgaaatatggccttatatacccaccacagtagaaagagtttcaatagatggtatttcatcaagtgaaaagcttaccatagaaaaacctatagatagatggtctgaagaggatagaaaacgaatacaatacaacctaaaagcccaaaacataataacatctgccctatgaatggatgaatatttcagaagttaaaatgcaagagtgctaaggaattgtggacactcttcattaacacatgaaggaactcagatgtaaaagattaggataatgcctaactatgagttgaatattacatgaatcaatgaaatttcaagatgcataagaatacctatgtaatattacagcttagcaaatccaatgagactataacaggcaaatgttattaatgcaccaagacgtttttgatcaaattctactgttttccttttgtattgagaccaatgaatggatgccatgaaatgacaaaaagatgtttaattttcatcgagaagatgatgtcgaagaatattccttgaaatcaatttagtaggaaaagcatttatagaagaaaaattctctagctaggaactgatggggtgctctaaagtgatgaaaattgaataaatcccggaattgtctttaaaaaatttgaataggagagcgctttttaanaatagagtacttttatattatttattttagattagtctcttatctctatgtgngtcnccgctttacagtgtgctatacttctgagtgttcatctaatnnntnagntgnatcctttgataattgtctattctgtaatatgtgngnngaagcaccacgctgtcgctctattggaatttatgagtttctgtgct

SEQ ID NO: 269389 - DNA, 421 bp, Glycine max
  unsure (1)..(421): unsure at all n locations
atcttattgcttgganaccaacactagataagataccctgattnttgaatntatctcacaggaataccatcaatgacaatgaagtattgtgtgtgggatgtgttatgactgtaaatatacttgggacttgttctctgaatgcaatatttttctctagagtttgctgcggatactttatgtggtggggtattcattttgcacaatataatgactctccttctaacttctcacaattcgtgggttttccaagttgctatgattagaatgagtaccgtgatacaatttgtttgttgtgtttggaaaattggacgactcgtgtattcttgtcttaaaacttaagaatgagtttgatcaattgttaacagtaagatacactttgcaataattatactacatgtattcttcttactgccctactcat

SEQ ID NO: 269390 - DNA, 339 bp, Glycine max
  unsure (1)..(339): unsure at all n locations
tcacctatatctgtttaaaactattatggtcatgtgtccattacacaaaattgacaccatcttagcgaacttaactgagttgagactagtactctctttcttccataccaatatgtcctccttactcagaatcaaattaatacttctaaagtcatgaccttttatctgagtaaaatattatattcatttctcctcatgatatagagatatcttcattcccatctgcacaatcaatttcccgtccttcggtcacgctaacgtgacaccctggctnttatggccactacaagattgtataatctagtatacttcctatatgtgaaaataaaccactttcac

SEQ ID NO: 269391 - DNA, 1216 bp, Glycine max
  unsure (1)..(1216): unsure at all n locations
ctactcattgcatgtcacatattnactacatgtacgagtatgtttaacttcttcataatatatttnactnaacaatccgtgtttgttgcatccattccgcgcgcaggngttctattaaaatctgcacagcacgcgcagccatatctttaaagatatttgttcgaacatacctgtntcggattatattcatatagaaaaccttgncatgtttatatatggtacagtccttctccctctgacgggcgtttgtgagtgatatacacatcctctagatntttatatgcgctcgacgataantcactactagaagaagtccgctgtcaggtgttcgtctattactanantctctcaggcttaataataccagngctnccaatgtagcattatgaacttgcagcacgacacctctactgtgtcngtgtgaagattcttatcgactaananagatacgcgtcataatacttnttcggccgcactgctatttatatanaggggcaccttccaatcgtagtgatactgtgttgcaccatagaaanaataatacggcatgcctatccacctctcctcgaattctaatggagtactcgtggacactatttctcttataataacgtggtcaagtatatcgttcattccaaccgttatcctacggcgtgataatccttatgatggagtggagcgcacatactagtcatctgcttccgtcgaaacccatcacacactgagttcaattgtgtggggtgacacgtctttactctcacctgtgtcaatatatagaacactccactggctttggtctctttgtatatgcataatcccttaaaaataaatgagaatggcgactacaagaccattgtaattgcgttgcaactaagcttagggtatccaactaatgactaatgagtgggcgtcaaatatatttcaagttttcatcattttgctcgctactttctcatatggagtggttaatttactcgcttttgtcattctatcttttcgaacttatttttatcgttctcataccatcaatccattccannnnaatataatataatatttaganttnngtctttccatgtttttatcatctatgacactagtgatttatttttattttttttaaaagaaaaaagaaaaaaaaaacncccacccccccccctctccaccgtctcacgactatattcctgtctcacttcgcgtcccccccatcttttct

SEQ ID NO: 269392 - DNA, 1232 bp, Glycine max
  unsure (1)..(1232): unsure at all n locations
gatgaattcatcactgatcatgttnttacttaactcactttatcttngagntaattatacgannnnaancagacacgggagatacattattagcgatcttacacacatcaacntngaccacaatcctggatccccatataacctgacccaaggggagaatgtcaatcctaccctccggcgccataatagcaatgtagggaaatctcccatccaatcaaatgagaacgctaaatttcccatgatatgccaaaagaaatgaacgataatctcccactccacgagtgggagaaatcacaaataggaaaacaaagaatagttcccactccatgagcgggagaaagcaaaatgaatcacaggataattcctcacctatgatgggagaaagtcaccaatgtagatgaataatgagagaaagcttcctgtctatgatccagataaaccataataaatgtgctaaaaggtcttgaaccgacaatacttcgaacattcaaattcgcaccacatgcactagaaacgaagatacggaaccacgaactacaattatcgttttccttngatatcacaccaaaatataagcgctaacgaactattatttcttagccctccctaaataaataaatcaacataagactatgcctgaaataggtctcaaccactcttacccaagatgaaccttcaagactcttcgcaggaaccttgatcctatccctggatatcatcgaggaaatttgcaacaacttccattcttgtcttatagagaaacatgccccgaaaatcattcggtgattccttctttcacaccgctctcatggtttaacaagcacacccactatttgtctggaactcccatctttccgtcccgtgtgttacataatccaagagggttctcttacaactcctactgaaacgcttntttctactcgtctgcctttttgatatatacatcttactactctttacaatagatagcacatctctctaagtaatctaccatcgtagctactgcttctcacacaatgtaactcgatatactatttatttacttcatctaccttatcagattagtgctctcantctctctacttacactcatgtaacaccttcacatgacncttanggatctttagccatagtaatcatacatgaatatccacttattacgacgtcttcaatagatgccacnngtctgtacaattctcacttactactcacttcatcgacagtatctaccg

SEQ ID NO: 269393 - DNA, 803 bp, Glycine max
  unsure (1)..(803): unsure at all n locations
tcagacaggaaactctgtcgtgccagtctgcaattaatgaattctgtcatacgctgataccaccttgcgcaattgcaagtgtacactgaccaaactcttagtatgacggtcatatgaataagaccatactttccttattatagctattaggcgtaaaactcatcagttaatggcattcatggttgtactagataattatccaaccgtctgcactcatgtcttactatggaacgtatgcttattactacttgacatctaaatgcgtagtgtacttaccacatcgacaactcatgtcgtggtatttctccttaatgcgggacttcacaataacacatacttccttcactctctcgttaaatgctatgttaataagatacattttctcctcactcggacaacctaacggactatttttttctgcaaccccccccccccccccctctttttatattagtgataggttttgaagatttggacttagttgactgttcaaatagttacccacagcactggataactattttctatagattatttggatatgggattatatcattcaggtagctgtgttttagacgattcaagaagggacctgtccccaaataacaactgatccctttactacgattttatactccgncctcttactcgtgatcatatttagcgacttcttcttcgatatcactgatacattncgctgttnnntgccgtagttgtgagtaatacatacccggncttcgcacccaccgagactctataaccaatcccttatcactacttaggctcccacccctttatatgtt

SEQ ID NO: 269394 - DNA, 1241 bp, Glycine max
  unsure (1)..(1241): unsure at all n locations
ggctgagcagtgtaagaagtcttactatcatgaaactgttatgtntctagttntatttcacatattcccacggcgcggataagcatcttatagcgttgttacacactcagctgccgcccgcaggcgactctcaagaatcacggtggcgagcctcaattctcctttatgagacgcttaccattcactcggcggcgttttaccaacaggtgacatggaaaaacctggccttatccaacttaatttcagtgcagtaaattcccctttcggcagctgggggtatattcgaaaaagccgctcccatcgcccttccaacaaatgcgctagccgaattgtgaatggagcctcaagccggatttatttcctacacaattgtgcgggaatgacaaccaatattgtgcactctcagtacatctgctttgatgccccatanttattcaagcccgacacacgccacaacctctaatcgaacacttttcggagaattgtaaacactcttatataagctcatacccacccctgtnaagagctcggggaatgccgtcactcctcgttcataagttcaaagacacatattacatattctagtcccagaaatctctcctttttctatacttgagaggcctaggagataatttcatagacatattaccagtgcgatgatctaactattacaggtaaccaatcaccgtctccttccataagagtatagactcttctctccattttgttgttctgagacataatagatcagttcatcctcataanaatcaaaaaaaaagtaatcctatcttctctctcacacatacatctctattgtgatggttgcaacttgtgctatcatccctcctcattagcatcagcaagtactatgaaagggaacttcctctcacgtctcaagtagatcgcactttctcctctataacccattatctccccaaatacctcgcttanagtgtcccgtcacatgatatatttaacaacatcactcacgatcgttcacgntgccgagggacatataagatttatactaatagatttgagatagtcctccagaaagtccttgctggtancatagtctgctcctttcatatcaatctacacacgctacatattangtttcgttactcactactatctatgtaanaagctatactaataattatataatagatagacaagagagnnancncnnnnncntctcattaatttcattctaacatcagcagatatctactcagccc

SEQ ID NO: 269395 - DNA, 471 bp, Glycine max
agcttgtggatgttctaagacgtaatattggagcgttttcttggagctcaactgacatgctaggtatagatccaaatttcctccatcacaaattggttttagattcctcggcaaagccagtcatccgaaaatgaagaaagttcggagaggataaaataaaagtaattactgatgaaacaaagaagttgatttcagccaaccatgttagaaaaattcaatatttgacttggctggtgaatgtggtgatggttaaaaagtcaagtgggaaatggataatatatggtgacgtcacaaatttaaacaaagcatgcttcaaggattcatatccactaccaaacatcaatcgcctagtcaatggggcatcatgttgcaaatggcttagcttcatggatgtctacttagggtataatcaaatcaagatgcatcccatggacgaaagacaaacaacttttatagttggataatccaatt

SEQ ID NO: 269396 - DNA, 970 bp, Glycine max
  unsure (1)..(970): unsure at all n locations
ccagacgagtntgagctcgcctatatgagctgcttgcttacgcttgaagtcatcaactcgcccaggtgagtagcttgcatatggacaaagctttntcttggcccaggctaacatctagctagtctgggtgaatttaaggtcagaaaactctatgaaatgaccatgttcccctttccttgcctnttgtttctggaattgacaaccaccctcttatttgaatgataaaggtttattcccagatgaatagggtctgaccccctctcaagggaactatttttgttattcattagaggtttggaagccaatctaagtgaatcttgtgccctcttttttccaaaaaaaaaagtgtcccccttgacccttttatatgaccataccttcagcctctcaaaacaatttgataatccccacctggattgccctaaaactttgtggaatcacggtagaaccccttttgccttccttacactttagccttaaaatattttcccaaactcactagatatctcgtgtaccctcaaatctcttaaaagaaaggggggtcatttggacactaacttttttttgaaaccttctaggtcctttaaaaatttagaaaatctccctgggaaatttaatagaaaaaccaaccctttgtacaaccatctttttccctcggctataagatcttcaccacccacttttatttttttataacatacaaatggtcgacccccttattctgcggaactttaatgcggaaaaatcttcttttccattattaataanaaactatnnnnattctagttataatatatcctcttagttcttgcatgtctctnnnnttcnttcacgttctcgctactctatccacattctantttagtctcctctctttttcnanattntagctcaaccatcgaattcactttcaaaagaannnnatannnnnntctcnnntctttttcacctcgtcatacaccaccccccg

SEQ ID NO: 269397 - DNA, 454 bp, Glycine max
  unsure (1)..(454): unsure at all n locations
atcctcttagtcacctgcggcatgcaagctntacttgtaatggaaggctagaacctctntgttgtggagtagactactgaaactcttgatgtaatgttctaactatctatctaatgttantttttggtgttctttgcttctacttatacttattttacatgcttgtggctttatcacccatttgtatgtgttgttaggctttttagtgttggaaaatactttaaaaccttagaacttgatagtgcaacctagaaatctgtatgtctatgaatgaagtgcaatctagtatattctacattgtatgcttagtgcaactcttatagaatgagtttgttgatgaatcaagaacaaaagctaagagagttaggctcattcatgtgaggaatcatggtctgagtatcttctcggtgtaagaacactatgataacattaaatagagaaaaacccttttata

SEQ ID NO: 269398 - DNA, 335 bp, Glycine max
gcatgtgaattacgcagcctcatctcgaatcgatccacgactattgtgcaagcaatcaatggggcgtaacacaccacatgattatgatgaccgatggctcaaattctcacacaggtgaactcatcactttcatatagagctttctaaactatcatgacatgtagaggagaatcaacgatctcaagtcacacaatgtcgagaactattattctcaaaacaatgacccatgtcttgaacatatcctataagacatagaaaaacatgcgaaggcgttcatgcacacaaaattgacccataatattaaactaaatatccgacgaaacttacatcattaa

SEQ ID NO: 269399 - DNA, 336 bp, Glycine max
aacgtggttgtttatgccatggagcttgatgaattcttagatgagctggcgagacgccactgggatgaggaattgactgatttcattgacggaagcatcgatgttgccattgtgaatgagttctatgccaacctctatgacctctatgacaaatcacctaagcaggtgagggtgagaggtcatttgattaatgttgatgaggacactcttaacacttttttgaagacccctgttattgtggaagaggaggaatcactctgtgcttattctagatttgcactcctgaagcctgatcctcaggagttagctaccaagctctgtattcaagggagggga

SEQ ID NO: 269400 - DNA, 284 bp, Glycine max
  unsure (1)..(284): unsure at all n locations
cacacaaaatgaaaatacttagcacttattgcctatacttaacanacagtacttataacattactaaatgactataaattgggagagtatgatgcaatttatacatgttgtatacacaaaattagtcgttttcgccgactaacaatggtacctataaaacaaataggtacagactcccactacttgactatgttggtgtgacactgtcgcaacctaccctttggcgggagggcgactcaagactctcacgatgcgtgttccaccacacgaatacccgcggagtc

SEQ ID NO: 269401 - DNA, 1274 bp, Glycine max
  unsure (1)..(1274): unsure at all n locations
tgatcgcgatacgatatatagcatgtgntactatatanataaacattgancactatatagattctctatctanctacagacggattgatgctatctgatgaccnctcgccgaactcagagcatgccaactgtctactatctataacaatttacgaacataantttggatatatatataataacacccaacgacatgatgcattcatacctgcccaccgccgcatgtattataaacacacctaatgaaagtgagcgcaaagactgcacaaacaatgtcctgatcgtagtgtatctacacccgatcggtacaaatacacgcacccaagggctataattcacacctagctaacgctctcacacatatctaacgatatgacccactcattctcaacgcgcttgaacattaaaggctgagtcaatgacatgtactggatcnaacagagaaatatgctggttccgaccattgaattatgaggaacctctcaattaacttgtggcattaggggcgcgaggtgactgattagatacaagcgtatcatgagtcatgtatgcgggacattaattcattgattgtgaggaccgctatcactattatattcacgggaaggtgagcggcgctactaatcgcactggacgactcaattaaattaggacgtgtctgacgtgtggttccgagcgcccaacgtccgcacgatcgatcacacgttccatcatctggcgtccacactctcttaactggactcatcgtacgtctgcgcgacttgcgacatatataccttaaccacacacaattagcccatatactagctcatccataattcgatctcgagactgtcttcgtatgtactctctttgctacgatcctgagactgcggacgttcttttatcatctttagaacacaatgaagaatggatcctaacaaactaacatcgacgatcagtatactaatcttaggttacggcaagcacgctgagcgtaatccgtgcgacgttaatagctccaacgatatatggactcactagcgngaatcgaactcaaacgataaactaatgataatactcgctctnctcacatttatgcatgctctgcagaacattacatgtcttagtggaattgcttcaagttgcttgtataaagtgagnttattgaaattgtatattatataagagagagagaagagaaggtttcttaacganggnangngacacacacaccacaccacccacgctggtagtaggtgaatgatatgtatgtgtgacttaatatattgact

SEQ ID NO: 269402 - DNA, 1161 bp, Glycine max
  unsure (1)..(1161): unsure at all n locations
cgtacggcttganctttgaagcatgtcttagcgtcctattatactcagcccgacagacatttgtgattgctggaccttctacatctggtcatagtgaacacttaaatatagcccatgcctggaacctatatatacctcatgggagacgctttctacaccatctgatatgtacacgtgctctgttactctgacggtgagaaacgttcatagtcgagcctgaataaatgtttaatgatcgacacgcacacctgatctagctggctcattggatgaacctcccgcaatgaactgataaccgttatatcaacaccagatgtaacaatggagttttcagacgaacttgacaaaatcatctcgatccaacaagactcaagtatggcnagtgaatgctatgcaactagtctcagatcggtaaggcagagatggcacttataccacatcaccactctcagtataagctgcttgagacatagctcttccatgacaggtaatatcaagacctggcctcgatagatgcatacccttccacttggaaagatcctcacattgtccaatcgttgtgcaaatgattaacgagttaaaactcctggaagaggctgctatcactgtgatatgtatcgacgacgtgcttctcaagagctgctacgcatatgaagggtaagcaagtgggcattcctttgacagaagcttgaggtgaccaacgctatgataatcttctaccagtgctnaggcggtgctgatgacaaaaatactcttatatggaaaagaaattttgtcacatatggtgcaggaaagacanacccagcttctttaggaggtccttgcacccacaaggtgaatcccaatgaagatccacgaagaacctcccttttccgtgatttaatttggggataattttattggtgaaagaaaaagnngggggccatccacaacaccattttggggggnnntttttgtgagtaataataggtgtactatcgcncgcgncgcgcgtgaacttttctncttatgatataagaaagtttgtcctctcacgcttactccgtcctctatcatactaccgcaccgctcctctcacatctcttccgctgttgagctttgatagttgtngatnntcnnntnnnnnttgtntngtttaacctaatgatcgtactctctcat

SEQ ID NO: 269403 - DNA, 476 bp, Glycine max
  unsure (1)..(476): unsure at all n locations
atggggtacccatcacatgtggtactaggtggcggtcgggcgatggtgcacaacaagttnttcacatccacaatgcgcgcataaacccaccatcccctgttgcccacctccaactgaactcacgtactcccacgtagcccatatcctcgtttctctccacccgggtccccatcaatcctcccaagcttccacaacatccaatcaaaacaacattcaaacagcacaagctatcacagccaagccaaacagagcagaggcagaaaactctgctcaacacatcaaccaaaatcacagcttttctctcttaaggaccacagtaacaattccttcgatccaattcgttaaccgttggatcgactccaataatttactggaagtctatagtgcataagcctacattgtgaccgttgggatcgactagcaaacatacagaactcattctgtactactctnttcacagccaaccacacacaagc

SEQ ID NO: 269404 - DNA, 1195 bp, Glycine max
  unsure (1)..(1195): unsure at all n locations
tacttctcagtcnccatnacatattccaacanangtcatactactctanatggattattaacnnntnttnntcnnnnatagagctgagntttgattgcgcttgatacacgngacttntatggactactctttacaacctccacgccngagagaaagattcgctctaatcgtcgtgagtaaccacaaagcgatattgtgtgcgtatcctctaacatctcaatgcaataaccacacgggatcagatcgtgacctatcaaggtgttctaatagaattttctttattaccagctcacacaaggggtaccacactcccttttttaaactgggtnccttccataaaaagattgttcagaaaactttccttagaatttttctaaaaatacattcattggaacctttttagtaaatctccctctccaatatcctttacaagccaacagcttaatgccacccctaaaaagcttatccccagcccttgttaaaaacatttaataccaatccatcctctcacaaatacatagattgcctaagacaggctaaccccattactatntatcgcccaataatgtccaatttgaataaccctttcccattagtataaagtgccttatttcgcctgctcacattttcctcgttcttagatctagacagtttataacttcccccctttgtaacttgacagctatgtatggcttccagggctgatcaattctactttaatttctaaaccccttcctctatcctactataaccgccctttactgttatattcctgctattccattttccatcgttctattattatttaccctacatcttcacaatctctctatttttatcctctatctaacttctcttctaaactcctcaggctaatcactcatttatccatcacacatctacctcatgcatcaatgcttgctcatatatcacttcaatctcagtatattgaatccttcgatcttctcctctacccacctatnnattcatcattaatcaatattaggcatctattctctatgtatatgttcttcatgtttcttctatcttctcttaccattgctattatcaatctcactactatactacctcactactcattgaatccaacttattaaatatcaatatagtttgcgnaattgacgactgacttaccacactcactaatttctcatttcagtagtattattacacg

SEQ ID NO: 269405 - DNA, 1131 bp, Glycine max
  unsure (1)..(1131): unsure at all n locations
attattattgattgtcaagttatatatcgatatttttcttattaatcatcnnnnancaaagcggttgtggcatctttcgccacgaganctctanaatcgactgcgggctagcaagcttgagctatcaaagtacatgcgctatgacatttactgctcatttcctcctcctctcacaattctagctgacttcaagagctcatatacacggtagaagaagaaatgatctcttaatgaactcatttcatattgtatgtgcaataagatgaaaggttgaacccacgaacgacttgaagtgctcatgttgtgagttcctctacagaccanggcactagaataagaactgatgagcccaagtatgaatctgcttaaggtctacgacatgaaatacaatatcagggcgaccactgtttcgtttgatgaagcttggaccggtttaaaaatatgtaccatatatctgcttancgtcaaagaagggatgctcttacttgggctgcctgaggtcattcaacgaactaccttgaacacttggtggtatattccggtgcactaacacatatcgtttcatgtgggttggcaaactaccgagccactgatttgaagatgtcttttggaacggaatcgggaacggaccctgaccttaattttctaggctatttattgactaagacttcgtgacgtttatcagattgtgcgttttttcgacatggtcttgtgctctaacatcgcttcgtctttcactattgggacgctacttgttatattttgctcaccctctctgtatcatctcgcactctatcataacacggtatccaccattgtctgtccatagacatgtactattatcgtctccattgattgttctaggatcaaaaatcttatccnatcgattatacttttattaataggatgtttggattatagtgatnatgatttatgacgagattaaagaaacacccaccacacgaccctgcgatcgatcatttttatctcctatccccttgccgcattacacgttcatcctatctgttattctctgtttcccgctaccccctgtactctctatcttcagttcnnnnctcatgatggagccacgcttgtcatcccatccgtgcacgtatcctaccaccctct

SEQ ID NO: 269406 - DNA, 1059 bp, Glycine max
  unsure (1)..(1059): unsure at all n locations
gtagcggagtncatgttgttgtatagtatctaccaatgctcatatgatataacttttcntntctaagaagagggtgaagcattgtacgctttgttagatactcctacaagctctcaccaagtgaagctcntccgataccaggatgaccggtccagcaattagaggatataatgtccctacaaagggacccacacgccgaagcccacaagtgctctcgcactgggctatataaatatactaggctcaggtgcgaccgagagggagaaaactctaggaaggtaccacgctacccatattcttaacgttgtttatcccacaaggaaccctccacctatatgtgtggcacaaaggaccttcacacacgctgttcggatgaagccccatctcgcaggaggcgaagttataacatttaacagatgccgattaatgacaggaaacaaaagaggtttcacctcttctaaatccactcataaaaagcttcacacgtctgtgtccacaccccgaagacatgcccaagaacattttcaatcaccggccggagctaacatcaactgagcgtatcggtagggcccattttccccgtcgtccgtctatcggagtacgagaaatcgcaaaaacaaccctttcccgatgagactgtcaattcttcggcggtatcaggaacggtcgtaccgccttggtgccgagacaccaggcgccacgtctcctaaatgttaggacaataccggtaattttatacgtccttctaatcctaaagaataagatcttgtatccagtcacaaggggtaagaagaaccgcttcctctttgcattataacacagatcgcttttaactgatacgaaactgcgaggacaattatatccatcattcacccttttnnnnnaaacttatgagatcaagaggtgctcggtanagaaggggaaannatntnnaatntnctnaagaagacctcctctttagactccccgtctctatctctcggttaatgttgagcccaccagtccgttgcctntcgtgngatcctancgtgtgctgcaccttctnagaggtagtcgcct

SEQ ID NO: 269407 - DNA, 345 bp, Glycine max
  unsure (1)..(345): unsure at all n locations
agctcgtttccatcatggtccgtcacgtggaacactgctctgtgcaatcaacagcgacccatcgcggagaagcatgctacattgcaagagtcatgcttatagattgcgtacattatattaaaagcaaattcatcttatctctttaataagattaagtgatactttgttctggttggttcgtataattttatccacgtgattataatggaatatgattataacatcnatatttcatattgagagtgaaggaatatctatacactctaaaaatagtttgtgatgtggttgaataacaaataaagtgtataaccctcttctctatctataattgacatgaataaacta

SEQ ID NO: 269408 - DNA, 1293 bp, Glycine max
  unsure (1)..(1293): unsure at all n locations
cgacgttgccttgtaccttttccgccttnatctcccttaaaaaacggagtgcttcctgtttttaaagaaacggggtgaaacgatacactggttacttgcatatttgtctacattatgttcccagaagttatgggatggaaatattctgtgaattctagctcgggtgataactataacaccttacacatgtgtgcgctggacgcacgtatagtatgtatcactaacacacgtgcttccttgagattattacacaggtgcgcatttgggtcagataatcatcgcgaacatanagcctcccatagttgttaactaaggaatctatctatgttactacaatagtcgtgngagtcgatgatgaaagatacgaagtgattacatatatacttcattctgaaagcttattcacgaaagaagataagtacaacagtgatattatgttccaagatgctgtttgcaaatggtttagctgttgcacacacaacaaaagtcgactgtttttgtgttcgaatttaagcatcttctttggtgtacacacgcgataccttcagtctactctactaactcatgctcattctcgcactctttcccgtgaaggattaattcttactttccatgaataattataattatacaccttcaagactttaacttaatcanactacgatcgcaacagacattgctattntgaaattgcaatctagtntgtatgattacggctgatgcttgaactcacttctgaaggatacctattgtgaaatagatggtaagaacaagtgttactatcctctattttgtcttctaacctctatcaacccccgactcattagcgcaatgcaatcctcgggcgatatatatcttactgaagatctcgcccatatgtaggnctcacctctttacacttanacacacacgtgtactatcttcgtgacacaagatatattctctctgccttagaatatatatacatagagagattttttctccgcannnnnnnnnnnnnnnnntcatatgagtcataattatgtgagagngattatctctcgttggtccncncnnnnnnnnnnnnnnctctctnnnaaggggatgctcgttgtgaatagcttctcttgtncntctttttnnnncccnnncnnnnnnnnnnnnnnnnnntccgtttcttctttatatatatatatatgatgttnntgnggcgcgnnnnnnnnnnnnnnnnnnnnnnnnnnnnnnnnnnnnnnnannngnnnncnnncccttaaattaatctttattcannatgtgttagcttcttacattctn

SEQ ID NO: 269409 - DNA, 389 bp, Glycine max
  unsure (1)..(389): unsure at all n locations
ttaatcatttccaaatatgcatgtgaattatgacgcatcaacaagaatcaagccaatgctattgtgcaagcaatcaatggggcaaaacacaccaaatgattataatgatggatggctcaaactctcacaaaggtaaaatcatcactttcaatatgagcttttaaaactatcatgacatgtagagaagaatcaaggatttcaagtcacaaaatgtcacaaaatgtcaagaacttttattttcaaaacaattacccatttcttgaacatatcctataattcaaagaagaacatgcaaagtcgtacgtgcacatganatngacccanaatattaaactgaanatccgacgaaactaacaacattaacaaattaacacaactaacaaaataac

SEQ ID NO: 269410 - DNA, 1148 bp, Glycine max
  unsure (1)..(1148): unsure at all n locations
tgagacccgtntccttatgctttactcatacttatatatctttanattgtatcnnnnnncagcccggattgaacctgatagcgttatcccttttctgcgaataagatccacctgaagcaacggaccatggttctgggacccctgccttcccggaatttccctgggcaggggaggggcggtgcccatatgtgcccctatcgacctatgacctcttccttccctggaatttgacatccgagattattgctggaatatttctattgaccttgttcaacctgcgcccccaaataaacctgtgagaggggtaataacctctctagcgcagagtacatcgtctggttggaggactcaccctatcctagaatggccaccctctcctaacaacaacattggcctgttctttacttccaaaaagcctgttggcccagccttaccttgcatgcttcgacagttcaacaccaacatcggcctaggacacagcataattagaggccctcaccatcttccctcgagtacctttgaggcaatgattttctgaacttgagttctacataagcccatcttcctttgagctcccattgggtcacacacgtccaaattgtgaatctacttctagctgccaaatccaaagataatgctttattgggtggaagcacgtaaggacataccgaacacttcttttagaatgaacctcaccttcttgttctaaagagggacaaaattactacatgttgcgcgggatgtttccagtgatttatgcaaacccattcctatctttctctagattcctataatgggagtagaagattgacattaataagaatgcctctggcttaacccaaatcatattaactccttacggttagagaaaaatgggaatttgttgatgtgaataaagaagaaatnaanggggaaccccgcanataanngcncaccnnnnnnnnngncncnnnngtnatttagatatctaatataaagtatnctcangaccgccgnntcnccctccccactaaccacctactcattactatatcaacctcctactctcggtgcgtgcctcctcaccccntgattactataattatttaattcatagtcctcacccatnnnnnnnnntnnnnnttnntatttttatgttctattatatc

SEQ ID NO: 269411 - DNA, 443 bp, Glycine max
  unsure (1)..(443): unsure at all n locations
agcttgtgtatagcataatattaagcttcaattaaaggtttntgctaaaggaaatatacctttaacatcaaagaatgcctgttgtttatgcttgtgcctcctacataaaacaagtccaacaccaagaactatcaagctgaggcatcccaaacttaaaccaaaggctatggccattttgtgagccttttttctgcctgatggcaaagcatctagggaagcaaagagatattctaatcacaataccatcattatgcagaatgtatcaaaatgcaacataaggaaagtgatgtaaggaaaaatcattcaagtttcaaaattcatgagcaattctaaaagggtcttaccctcagtatcgttcaagttcattgacataagcataagtgtcatcccatggcaatctttttcttttcttgagcacaaatgacggggtctcctacaatact

SEQ ID NO: 269412 - DNA, 818 bp, Glycine max
  unsure (1)..(818): unsure at all n locations
ttgtagcctctttagcgacctttaaactcagctggattattgtcagggcctccatcactgacatgaaattagatgcttcagaatgaaggagtcccggatccctgttggttgcagaagacaaacttggtgaacgaatgaggaacgcactctgatgaggttgaattagcatgtgttttgtccaaatgactgtactgattctggacccatgatgagagacaactgtgtggcaattttactcttgtggtaagtggacccactttagatctgatggatgggaacaataatggcttctcttctaggaccaatgaaaactttaaatgaagtggctgcatgaattggctagcatggcatctcttgaatataatgttcatatttgngatagacttgatagctgatgtgccagtacaatcaatattcttacaatatgccagtgtgatagcatgctgaggctataatcttttgggcttattaacttgagaatctacatgatttgtgtataggaacccctttatatctttaaaattaaggaatatcagagacttcgtgatattacgatgtaattccgacacagcagagaccgctcaggtgctaaagatctttggagttccgttaaaacactagactagtagccttaaaatgcttactaaaagatcaaatttccctaggnctatgccttttttattttttatttttgttnncnnncgnactcgaacgggtatatctgatctctacttctgtttctttttcccatcnncacttctctcactatcataattttctgagtaannnnctntactgctcaattatgagtcttttcc

SEQ ID NO: 269413 - DNA, 452 bp, Glycine max
  unsure (1)..(452): unsure at all n locations
agcttgcatgagtacttttaaagcctatcattgacaaaactntaacacgagttttatatatcaaactattttcaaaatactgatntgttaatcactagaagaattttttttattactagatgataaaactaaaatctttttatacattatccttttcattttcaaaaagtattaaattttatctaacacactattcaacccccttctaggagctcttttcttcatcttctttctttctttctttctttctttaagatgatctatgtcagtggatggatgaacacattgttgtgtaccaatgaccaaccaatgtggttgcatcttgaccaggtagggatacattggtcatgttcattgaggagcctccagacccataatngaataagatggaagtgccttgaatgcttgagaaggtgaatgctcatgatcatacctcgtccactcagcatgag

SEQ ID NO: 269414 - DNA, 1177 bp, Glycine max
  unsure (1)..(1177): unsure at all n locations
gaccgtgaataaccatctttagtgaccttagaatctcagcctgcccagagaaggagtccacngaggaaatgcttaccacctcaaaagacttgaaagcggtttctaatgactcctctgcggcttccacataaagcatagaggattggcagctcaccaagatgtcttccttccctgataccatgaccagatgcccttccactacgaatttcaacttttggtggagtgttgagggaacaacttctactgagtggatccacgggcgccccaacagacagctgtaaggggggttaatatccattattttgaaggtaacttgacaggtgtgagggcctatctgtactgggagatcgatctcttccctaacctctcngcgggtgccgtcgaaggcacgaaccaccattgaacttggctttaagtgggaggcatttgatgggtaattctccaaagtgctcttaggcatcacgtttaatctggaaccatatcgatgagcaccttgctacgatatggccatacacttgactgatacttgcaaacttattatgccctctcccttcgcggggatttcttctttcgcgaagccaggatagtgtggcagtgatatattgacaaccttnctacnctctaccagatatctnggcacgtggccttgtcaaacttactacaaacccataagctcgactatagtaatcacacagacctgccgggttgtgacgtcaaactgattctctgtatatcgagactctgttctttcacactctttacatcttttcgaagccttgcgatttatcaaccggcgttcattgtccccattcttcttaatcgggtgtgtggcgaggcaaccactcggccaactttcgattttttcacacgacgtgtgttcttcctcgtgacccgttttagaaaaccatcacgggccttttcgtttaatcaattttattctcnnnnnntttatattacttttacttatattctctatttctncgcgnnagtnnnnnnnnnctcgnnctagtctcccccctcccctctatgtcctctncgctattacattccactctctaatattattctattgcnnnnnnnnngngtatcttaatacatattataattatctgtgcnntcagtannnnnnnnnntnnnncnnnnctcnnnnnntacttcatctagttatactctcccg

SEQ ID NO: 269415 - DNA, 239 bp, Glycine max
  unsure (1)..(239): unsure at all n locations
accggatccttaagtcactgcagctgcagctngagcctatcaaccgacaataacttntgctcggatgtctgattgagtcccgtaatctatcgagacgctcgaaattgaattctgaacctcagagctaattcaaacgacaataactttttactcggatgtctgattgagtcccgtaatacatcgagacgctcgaaattgaatggtgaagctctcagctaattcaaacgacaataactttt

SEQ ID NO: 269416 - DNA, 362 bp, Glycine max
  unsure (1)..(362): unsure at all n locations
cgagggtctcgatatattacgggactcaatctgtcatccgagaanaaagttattgtccgttgaatttgctcagagcatcaacattcaatttcgagcgtctcgatatattacgggactcaatcagacatccgagtaaaaagttattgtcgtttgaatttgctctaagcttcaacattcaatttcgagcgtgtcgatatattacgagactcaatccgacatccgagttaaaagttattgtcggttgaatttgctcagagcatcaacattcaatttcgagcgtcttgatatattacaggactcaatcatacatccgagtaaaaagttattgtcgttgaattactcagagcttcatattaatttcg

SEQ ID NO: 269417 - DNA, 403 bp, Glycine max
  unsure (1)..(403): unsure at all n locations
agctntgcggatntggtcttcaccggngaaaggatcatagcgggtctganaagaggcaaatntgatcatcctgctttgatgaatgagaaaactgggacaaatgaagaggatgagaatgagggagaaacccttgctatgactgccattcctacacagtcaaatttcccatcagtccaacaatgtcattactcagccaatatcagctcctctcattacccatcacccaatcatccacaaaggccatccctaaatcaaccacaaagtctgtctaccacacttccaatgacgtacaccacctatagcgcanaccaaaaaggaattttgcagcaaaaagcctgtaggattcaccccaaatntcgatgccatatgctaacttgctcccatatctacttgataatgcaat

SEQ ID NO: 269418 - DNA, 360 bp, Glycine max
  unsure (1)..(360): unsure at all n locations
gagatctangaaggataaagcggctgaaggaaccagttccgctcccgaatatgacagccaccgttttatgagtgctgagcaccagcaacgcttcgaggccatcaagggatggtcatttctccgggagcgacgcgtccagctcanggacgacgagtataccgacttccaggaggagatagttcaccgacggtgggcatcactggttacccccatggccaagttcgacccagacatagtcctcgaattntatgctaatgcttggcctacagatgagggcgtgcgagatatgagatcctacgtgaggggtcagtggatcccgttcgatgcggatgctctcagccagttcctgggatacccttt

SEQ ID NO: 269419 - DNA, 502 bp, Glycine max
  unsure (1)..(502): unsure at all n locations
agcttaacattcaatntcgagcgtctagatatattacaggactcaatcaaacatccgagtaaaatgttactgtncgtttaaattgcttagctctccagctttaaatttcgagcgtctcgatatatgacgggactatatcagacatccgagtaaaaagttattgtcatttgaatttgcttagagattcaacattcatcttcgagtgtctcgttatattacgggactcaattatacattcgagtaaaaagttattgtcgttagaattttctcagagcttcaacaatcaatttcgagcgtctcgatatattacgggactcaatcaggcatccgagtaaaaagttattgtcgtttgaattggctcagagcttcaacattcaatttcgagcgtctcgctatattaccggactatatcagacatccgagtaaaaagttattgtcgcttgaattggctcagagcttcaatattcaattacgagtgtctcgatatattacgggactcaat

SEQ ID NO: 269420 - DNA, 385 bp, Glycine max
  unsure (1)..(385): unsure at all n locations
cgacaataactttttactcggatgtctaattgagtcccgtaatatatcgagacgctcgaaattgaatgttgaacctatgagccaattcaaacgacaataactttttactcggatgtctgattgagtcccataatatatcgagacgcttcgaattgaatggtgaacctctgagccaattcaaacgacaataactttttactcggatgtccgattcagtggtgtaatatatcgggacgctcgaaattgaatggtgaacttctgagccaattcaaacgacaataactttttactccgatgtatgaatgagtcccganatatatcgagacgctcgaaattgaatgttgaacctctgagccaatcanacgacataacttttactcgatgt

SEQ ID NO: 269421 - DNA, 438 bp, Glycine max
  unsure (1)..(438): unsure at all n locations
gcttatcatcaacatgatccncatttgggtgttcacattaccatttggaatctgtgcttcccaaacctccactttcttcatcaaacaaggtgccatcatgaacagaaatatangcaataatggatttgtggttcccccagcttcaattttcactcttgcagccgttgggatgatactttcagtgaccatctatgacaagctccttgtgccagtgctaagaaaactaacaggaaatgacagaggaatcagcatcctccaaaggattggtattggaatggtcttctcagtcatcacaatgatagtggcagctttggtggaaaaaaagaggcttgaggcagttgaaatgaatggcccattaaagggttctttgtccatgagttgcccttggttggccccacaatttatgatcattggatttggtgatgggtttgctcttgt

SEQ ID NO: 269422 - DNA, 446 bp, Glycine max
  unsure (1)..(446): unsure at all n locations
atcttcttcatcagtggattccttttcttcttggaagatgaatggcaacggaatggagaaggaagagagagaggagacacaacttcaatgagaagatgaatctagaagaagctcaccaccatatgaggccatggataagagcttggaggaagaaggagatgaatgaagggagagggagagaagagcacacaattttatgctctaagagagctatgaaatctgaagtttaattttaaaatgatcaaatttgaaaaatgcacacacatgtgctctatntataacctaagtgtcacacaaaattggagggaacattgaatttctactcaaatttcacttgaatttgaaattgaatttgtggagccaaattctcactaattatgattagtgaattttagttatggttcagcctactaatccaacatcaagcccaagattcttcactaagt

SEQ ID NO: 269423 - DNA, 437 bp, Glycine max
  unsure (1)..(437): unsure at all n locations
agcttcgatggagaacaaccttatgttgtagagggtacacgcacggagaagaagataacgggagaagaagaaagcgcgagcaaaataggtggcgtctaatataatttaaattgtaagttcaacatcagttttcaatacaaaagtgatgttaacgttaacatcagttttattcaagaaaccaatgttaactaatcatacattaacatcggttttcagaaacccgatgttaaagtaacttcgttaacatcggttttcttgaaacccgatgttaacgtatatacattattcacaattatgccaccacatttatcttaacatcatntttaaaaaaaaaaaaactgatgttaataaagtctccttatttaaccatttngccaccgtgttttgttaacattgattttatcaaaaaccgatgttaacttaacgatgttaaatgt

SEQ ID NO: 269424 - DNA, 324 bp, Glycine max
tatggtggtgagcttcttctatagctagactaatgagtgaaatacaggaggtgctcgagcagatgaatgtcgtcatggaggccatgaaaagacaaatggccacaatgatggaagccatgttgagcattgaaaagataatggaggtcaacgtggctacaattgtcacattttgtggtggaaagactgcctcctgccattgtggaaaatgggaaatttgatcatataaatgaaatggtgaggtctattgaaggaggaggagattatgcctttgctgacatggtagaactgtgcctagtgcctgacgttgtcatcccttcgaagttc

SEQ ID NO: 269425 - DNA, 435 bp, Glycine max
  unsure (1)..(435): unsure at all n locations
agcttgacaagccagctnttntaagtaataataataataataataactattatctataccatttttatggaattataaatgacaggatgaagtggcataaagtgcttagagagttcacttgcatgtgaaaaattttcaaaaagaaaaagactcaagttaaaagaataatgcaaccagattaatacttccaaagaaaagaatattttgtaaagacattttcagacaatttaaatatttttatttggctatattagtataaaacatctctaatccatatatgtttttaatattatgctctttntttcattttcttttgatatactttgtggtttaacaacttgaattcaatatgaatttgtttatncaattattttggatttgtacattacttatacganattntataagtntcttttttntagttagtatttcact

SEQ ID NO: 269426 - DNA, 992 bp, Glycine max
  unsure (1)..(992): unsure at all n locations
gatttgctgggggtaatagctatttagtacacgtcancaaggtgagtggctttgaccttttgcgccttaatccactttttcaaaaggggtcaccgttgggtgtatagtatgtgtacataacccccgcaactagggtcaaacaattaagtgggggctcttggataacctctcacactactatggcccataaattctgcccccaagagtcacattccagagacccaaattctgaatctcttggcaaggatatctcaaacaccctgaggcaacgatctttggggactttgtgtagacaagaaagggtcgaaaatattccaaagagtgatagtgaatattcgtggggccgcttttatgttgcccccgatgaataactacatagtgtntggtggtggggggtgttcacccaaaaggaattctttttatttttatgagaaattgaacggaattttttttataaaaaacttgcgcgagtttgaaatttatttaccgaggttgttgcatatcccttaagggcgaatacccgtatggagatttgagcttaccgggagtttctgaaatcatacttattaacgccttctaagataattttacacaccatttcacaccattttaaattaaaggacatttttggacatcaccttcgattccaccctcatgaatttcactctctcacgtttaataatcttatcttactcgctgttcatgtcctatcagtatgttacctcactgaactgcttcnttaattccaatcttcatatcacattcgcaaacactaacacgtcgattactccttgacgtccacctattagaatatagnnnagtttgtactcagtaattatcttaaggtttagaccaccgattggtccattgcactaatcataactcctcctcccctttcctgcacctctctccttttcttatttttagtattttatattagaatatcgcaggctggttnnntttataatntttttccctgaagaaacagaaag

SEQ ID NO: 269427 - DNA, 510 bp, Glycine max
  unsure (1)..(510): unsure at all n locations
agcttctccctatttaggctataaaagggcatgggaggctgnaaggaaggggttcancacccttgttaagcatattcacttaaaattggtgaggagaagaagaaagaaggagaaaatcaaggccgaggcgcttccataacgcttctgtaacatttctgtgactaattttgtgaacgttcttcgtctgttcttcatcgttcgtcaatcttcaaccggttagtttttgatttcgaagctttgaattcattctatgcacccttaggggtccattcttgctttgtatgttttcatcttcatctcgtctactttcaatattctttttcttcgtattaagcgagtattgaccgatcgtttaagtcgtaacctcaattaatgttaaaatgaatttcaaccgatcgtgtgcgtcgtaatcttgcctaatcaatcatacaataaaatttgaccgatcgtcatgttgtacctcagtaatcaaaaataatattttcaccgacattacttaaagttctttat

SEQ ID NO: 269428 - DNA, 1063 bp, Glycine max
  unsure (1)..(1063): unsure at all n locations
agcagtgatgaccctgtttgcactctttgggcccttctaactcccaccttacaattggatttacgctgcgaagactggttgtattcattcccttctggtgatcaatacacatattaaatttggaatccaatttctagggactggtgtaaacactttcaacttctggggaaccgataccacaaaggtaaatccaatttttaatgaattagaaagaaatttttgggccaaccctttgttttttctatttgggaacttttttctcagaatctagagaaccactcaatcataattctctgatttcctggatcctcggatcctctcttaaacttataaaccctagagtcctttggcgtatcaaaacattaaaacatcttgcttctacataaggaatctttgacttaatccatcagctgaatgaattcttcaactatttctcattcttggaaaatcttttgccagaatcaaagcgtatttcattcttctactacgaagtgtgaaacagacacgatggtactcaagccctcactgggaatgaaagaccctgcttgacgcaagagactagggccgataaaatttacccattgtcccggtcaggtctgacgaagacacatggttctccagcctcatgggcaatagggttggctggcctatgaacacgcagatcaattcacctcagtttaaataaagagggggggcnctggattttgtagttaccatcccctccccccaagacgctaataaaactcttcgcttctgtttaacgacagcgaggctgacgcagccctctctcaatgaacggtgcaatgctcgcatcttgccttaagttcaaatcagtctcagggtgtattctctttttgggcctcgnnaagaagacaacaaacagtcaacattccgtnnnttccngccgaagtaacttcatctaatgtttcctctccgattaattctgcctttnnnnnttttnnntnntnnnnnnnntttnttatattataaatgtatagaggatagattgcntnngngnnnnnnngcgnncnnccaccccnccaccagaactgtcttactctct

SEQ ID NO: 269429 - DNA, 978 bp, Glycine max
  unsure (1)..(978): unsure at all n locations
ctaatcgacacgattacattcgtcaatatatactattatttaattaatttcgttcncttcaaagcggtttgtgcattgtgtgcctcggggacactaaatctatctcagcgatcctacctaacaccgtaggggcgaggcatttttttgatacggtnaccaacatagaagaattcccacgatcactttttaatacccgggattgattgttctccctcaacctcacggtatgggacatatacgctgtaaaatatatgtgtgcgctcgtaccctacacactactccgttaaacattgtcgaaaatacctcataacccaggagggggattccctcttggataaacctctatctaagggcgccgccctactatacgtcctccgagtatcgaaaaagctcctcacccaaaagactgttgtcttagccaaaaaccattaaaaccaaactttcttggttgctcacctgaactgcgaaaacgaacattcaacatgactactcattggacaggggcgacgaaaaaaaattacccctcttctctcgctttaagcccaataaaaagaatgctgccgacatacgtgaacctggaggcaaattttacataaaatatctctagccaagactctgataatacacgatgaaatggttattttgtggattgtccccggggaggagccccccacatataaccctaacatatactaccgccccaacactccccacccccacttaatttcctcatagaagtgagaagcatatagattaagttagtaaatacacggtgattcacaacccaaccagccgcacaaaaatggttccctctntnttcccataaaaatagatagtctacccccccacacgcctcccccttttacaccctcctttaatttaacctattccgcgacgatggctcatacgcgtcaaccataaaagaagatataatgnnangggtgggagaagttttttttttgttcctggagacaagaa

SEQ ID NO: 269430 - DNA, 307 bp, Glycine max
  unsure (1)..(307): unsure at all n locations
atgcattggatactgngcactatcaggacagaacaatgatacacaaatttaagctaccttttcatgagcatctacttacaacgacaaaaggacggatcagccatcctaggtggctagttcaaaacagattaacttaaagatttataaacctatatgatcaacttgagaatacaagtctcataatatctagattgagaaaatgctttncatcctcacatcatatgataaggaatgaataaattgaacaacaccaagtcctaacatacaatattccacaacatcaacgaaaattctgctaatatgacac

SEQ ID NO: 269431 - DNA, 1486 bp, Glycine max
  unsure (1)..(1486): unsure at all n locations
cgagttgaancntttganatcgtctcgtcccgggatccttaagtcacctgcggcatgcaagcttgcaacaatacattaatattatcagccaatatgtgtgcatgatttagggaaaaatgggaaaatagagcaaggcaaagaatgtgtttaaaagaattgagaaatatcagtaaagtactaagcaatttctttaactatatatcaacgttccaacaaaaatacttgtatgctcaaaaaccccaggtttgccgaggtaaatgtataaaaaagggacaaattttagcggatggcgagggaattattttcanaagaatgaaacaggtacatacattataattttttatatcaagagatgcaatttaaacatttttttaattaaatacaaaatattgactaaaagaatgaaacagggaagcaaaagtctgcagcctcatcaaataaaagtgaacaatcagtccaatgaatatattatgaaatgatagaagttcttttttaatgtaaaaatacatccccatgtgtgtaaccctcagctgcacccaccatatcanaatcataatananaaatcanaccaaactttaaatgaataagaacannnataacataccccacattatcttcatagtatatgccacgacnacanattagcaatacaccacatcatttttagcaatcatantgcgagaaagagatcantggctctaaccatcaagtctcttcgggagggctacantgatngggcaaacacacaaaaaggaaattgtgtggggcttctcattttgctccttactgatacatnttcccctaagatggctatcacaccagtgtggtatatcacgtctagccaactcaaagaagacattgattaggtcnttnttctcgaccacttaagagtngaccattaaataantaagggtgtntttctatgctagaagccanagtaaaattatgccanngaatncttcatgtattactanantnagtatgaacatttatattcaggtcctcggcctttacangaaggcgtnnctctctatatatatatataaantatatatagaatatnagatangtgaaaaggctnaaccacncaaaaaaannncnnnacacactcagacaacccacaacacatacaacaaactatacatactcantatcancactacacatactcaannnnnnnnnnnnnnnnnnnnnnnnnnnnnnnnannnnnnntatatannacgnnaangcatctctctggcgcgcgcagtgtcccttngtaaacattcgtgngccgncgttgctggactccctcnnntctcctcgtccgtctcttgcgccactcgcccccccccccctcnccnacgacgactcacaccgcccccccnccnccncgagacannnnnncnncnncntcnnnctnncnnnnattttcannatatagtacgtgtanattntgaagtgtaatgttgattcgctccgtgctgcgtccangcgctatgcgt

SEQ ID NO: 269432 - DNA, 1081 bp, Glycine max
  unsure (1)..(1081): unsure at all n locations
ctgtggtgatcaacactgagcttaccaaagatgaagagaatatgttggtggaggtcctctagacacacaacgatgcgataaggtggctcatatcatatcttaaaggaaatcaccctgcttactgtatgcacaagataatcatggaagaagactatataccagtatgacaccccacagaacgatcaacccatcaatgtaagaagatgtgctgatagaggtgctcaagcttctagaggctgtgcttatctaccncatttgcaactatgtttgggtaagcctactccaagtggttccaaagaaaggtggcatggcagtcattcggattgaaaagaatgacctaatcccacacaggattttcattggctgtagaatgtacatcgactaccgcgagggccacatagccacaagagaagaccattttctttgcccttctggaccacatgttatagaggttngtgtgacaagcttattactcgctcttggatggatactcttgatacaattaattacagtgaccccaggatctggaaagacgacttacatgcctcttgtgtttggctacaacngatttgnttgatatgtatgcactgcatattcaaagtgctgttgcattttcaatatgtgagtgagctaagctatggcctcactgctattggtaatactttagaactaattcatgctattaaaatagtgaccttatttcagattacaaatgagtttgccagtctaacaatccccgaacagtgtttatcaatcgtatccaaccgaacaaaagcgtgaaaataaccgcgtatgggccccgcccgaaagactatacaaacaaatttgataggtctatcttagcactccacatcccnggcnccncnnnnngcgaagataaatatatatatatatattttcaccnnnnnccnnatgatgtatctttcttaattaggagcatngtcatctattcgtttnctncttctccgtacgnnnngaagaggnnttatattttatcaatattaatttcactctctcctgcaatgnnnnnanagagannnnnnntaatatataggtcttctccaccgtctccccccccccg

SEQ ID NO: 269433 - DNA, 460 bp, Glycine max
  unsure (1)..(460): unsure at all n locations
agcttgtgcgaatcanatcactcctgcattntatctctagcatgcattctttctttctttacccactccccacgtttggtttttggggaaaaacaccataactaaacgcgccacaaggcatccctatcgcaccagatccaaatctagaacgatgggtgatcaagaggagacacaggaacaaatgagagccgacatgtctgctctgaaagaacaaatggcttccatgatggaggccatgttaggaatgaagcagctcatggagaaaaacgtggccaccgctgctgctgttagttcggctgccgaagcagacccaactctcttggcaactgcgcaccatcttccctcatacatagtaggacggggaagggacacactggggcacgatggtaaccctcatctgggatacaacgagcggcttacccttatggattgccgcccactactcacacccgttctgaag

SEQ ID NO: 269434 - DNA, 1108 bp, Glycine max
  unsure (1)..(1108): unsure at all n locations
atgccccgatgggttgtannccnttttgatnccgcctttcgattgcccttgcatttangngacactatacaatactcaccctggagaggtgcctctttggtggaaagattgagagtgtgaaanacagatgggggagaccaaattggagaagaacatggaagaagtgaaccttggttgaggccacaagactctcattggcccaaatacgataaccggtacacatgcttctatttatagactatgtagctatcttgagaagcatggttgagataaattccttgagaagctctttgagaagactttctatgaaagctagatcgtagctacacatacccctctggtaactaagctcacctgcttgagaagctttcttgagaagatgctaaagaagctaatgcttagcttcacacacctgtctaatacctaaattcacctgcttgagatgagacgctagaggctagctacaccgccccttaatagcttagcttacgctatgcccacaacatgagagacataaaaagtcctacttcaagactacttcaatgcccgaattcagggctatatctatctactgaattgtaagacaaggcgatgaagaaaacatctatattacaaataaccgctcatctaaccatggctcgaagtacctaagctcataaacctaggccttcttgatcttagcaactactgaattgttcatggcttggggacgatgatcatatggagcgttactcctgaaatttactaacctcccaagagacataactagacttgtcttactataagggggtaatagactagtgtcaaaattatttggtaagggcggaatataaggtttgtaggtattnaaatttgtgtccccgccgccgntattggggccccccccccctcaccttaaatgtcccccgcgcgtttttnnnnnnnagaaaaaaaataagatgtaaatgggagtgaggacncncanctaattctcctccgcaacaaaaatactctcccgttataacncacatcgcctanttatccctctnctcgtctccgacanacaacacgacttaatattatataaataataannnnnncttcntatttnnttgcagtctcacatcct

SEQ ID NO: 269435 - DNA, 568 bp, Glycine max
  unsure (1)..(568): unsure at all n locations
agcttgtattgaacactacttatatatatatatatatatatatatatatatatatatatatatatatatatatatatatatatattaaagaaactaattngtgtacccaaaaatatgactataccaaaaaagtcactaattcaaaaataaataagtctcattaggtaaatataataaatttaattcattaaaaacttctttaggtgtgatatacattcattcactaaatatatatatttttttttcaaaaatgataacatatatgtcagagtgctcaggattcttcctagtgcatcagtgaatgcttcttggcaattatgtntcctcttcataatatgttatgtatgtttttattacactaataaaaacaattattaaaaaaattattnttcaatatcaatgagtacaaatgaattatgatgtaaaaaatacatatattttttagaaataaatactttaattcgtatcattataaacgtggaaaaaaataaatacctatatagccatgtgttaatatacaagacagtgaggagaaaataaatgtgtaaaagaatatatacatatttaa

SEQ ID NO: 269436 - DNA, 1174 bp, Glycine max
  unsure (1)..(1174): unsure at all n locations
tgcacgtggctgacccccttgtgacccatgttcgccctcttntatgtgcactatataatacttagcccttacttttcatgagagtggcgtggtgattcattccactggttcataaccttctatgcgaacaaggggacgcgacttttnttttttttttttaaataggggacgcgacttagactttaaaagatgggacaaagaaaattaatttttggaagtcattaatatgttgaagggtatgatattgaaccaagaccaacactttaattaagaatagcctcataggtttttcataaattaagaaactggtagttttaaaatattaaaacttaagacatctcgttcatgtcggtttgcctactccaanagtgtgcttatttccgttctctttttntattgggtaaagtcttatggtgcctctaacactattattaaatttactggcggaacattatttcttaagtgtataanatttatattctttgtttgaaatataagtgtacaatgtcattgaaatggttctacaattttcattattatatcataataatatgcccttaattatccacttgtttacttgatcctatcaaagaaaaaagcgagatgaattgctaaataggagatcgctaatttgaaaataaatcagagatttggtttaacaacgtctatattaaaacctgagcctttttaaaaaagtatcttccaattttgatcttattaaattaaaataccaacccacctgccttttagtaataaatttaaatattaaaattcgctctcagcatgagcaagacactctattcctaggttctcagggctagataagcccttatttattaatatttttgattgggcacccggttcataaactttccttatggcggtctatttttcttggaccagcacggaagagtatcacgaatgttacccaacccttccgattaaattaatagatgaattataaaaaaaacacaattganacccnagnnnggnngttggggtattaggggggggagggccgccccccccccccncaacgcccaccgatgaangnngtgtttgtttatgtaatgatatttgtgagtataaagaatagcccccccgcccgccccnccncgcgcncctcctnnnctctttctccgcgactgacgtgcccacatcggacttccttcct

SEQ ID NO: 269437 - DNA, 603 bp, Glycine max
  unsure (1)..(603): unsure at all n locations
aaagaaaagcatatagtccatgcgttcaagtttagttttaacatggcacttttacttcgtataatttttcgtttgttttaatgttattacttattagactaagattcgctaagtctcatatntaagttttatgaataaaaagatgtataattaaaagaaaaaatttcattaaaaatgattgaacttgtcttagatgcatngttgcatttgttggaaacaataaccacaatgaaatttaaacttaaaatttcgtacacatttcctaaatttatcaccactaacctaattctaatagttttcttttacataaatatacattgataaagcttcgatacttaattaagtatttagaagacataagagttattcttaatgacttttatacttcaaacgaatatcttatataaagaaaatagaattggttttatatattaagaaatatttatatttttctacttatctataactaaatactcatatcttacataaaagtaatcgttttattcttatttagttaatgagctacaaaaaaagtgcagatattgtttaaaactcgctgatatgagtggttactagaatacctctactatgatagatcatctg

SEQ ID NO: 269438 - DNA, 121 bp, Glycine max
tttatataaattctttccgattagtttcttcacgagataatttttaacttatagatagctaattttaaccctttcttcttgaattatttctatgaagaagtttatctaaattatccttaaa

SEQ ID NO: 269439 - DNA, 376 bp, Glycine max
gcttctacagaaacaagtgtagaaccatggttacctctaaagaaaacgaaaggtcagattagggttgtgttctctaccgaaaccgcatgctaagttggaagattccgctttggttgaatggttcctctcggtgtggggtttcaatggagaacaacgatggtttatggtggctaatggaggctgtgggtgattgataaagtgcttgcgatgttagaaatggatttgaaagagaaagaacaagaaatggcgtttttcctatgctacatgaaagcaaaggctgaaatgcttacataagaaatgctctcgggaatggaagcttctagcacacgccatacatctgttcaacgatcccaacggtccgatcatgaaaagtggc

SEQ ID NO: 269440 - DNA, 332 bp, Glycine max
  unsure (1)..(332): unsure at all n locations
ntataagtgcnggtctgggagacgaaagtcaagtggtcgcgatatacgaagatgatgttctgagtacattggatttggtacgaccatgccctcctgatttccagctgggaaattggcgagtggaggaacgccccgcatttacgcaacgagcataatgtaaacctttacggttttaaaagctctatagttgggcctaggatttagagtttttccttttgttaaggctttgtgtcttttgtttttgaatttataatacaaggacctttcttcatcttgtcctacgtctctacccattctcattcatttgcatgtttacttctttatttctgaaa

SEQ ID NO: 269441 - DNA, 310 bp, Glycine max
cgcagctgcaactggagatatgggtacccatccatgtggtactatgtggccgtcgctatggacacaacagtttcccacatgccaagaacacatagacccaccctcccctgttgcccacctaaactgggtccgtacaacactaggccatattctatttgtctctacacgggactccataatcccccagcttcccgactcaaagtatataccattctcgcagcacaatctatcacatccaaccgaacagggcaaatgcagataactctgctcaaaactcctaaccaaatcacagctattcttacttaaagac

SEQ ID NO: 269442 - DNA, 1070 bp, Glycine max
  unsure (1)..(1070): unsure at all n locations
cgggaagaggtttgaacccaatcttgtangccgactctatagaacactcaagctntaacttaatatataagtgccctatatattaaaatataataatcacgtacagatagccttctacgtcgtagtccaatcttataatcatttccaaaccctacctgtaaagtctaaaatcgcatgttacccgagcttacgagagttgcaatcagaaatgaaaatgtgaatattatactccgaaacactatgtttatatgggcactttggaagtataccataatggatgcctaaatgcgtgttataatagcaatggatgtcgacttctgtgaaaggagatagtctcttgtaacataataactgatactcgattctcttagaaagatgctcatattaaagatgtttgaccagcatttattttttattaaaaaacaatgaacaattctatttacaaaaaaactctaaaagtagtacatatttattaataaattaaaacatactttaataattactggaagtcttatctactacangaacttttatgcatcctcttcgatcccgcggagcattatctactatataccatagaggctcgcgctttgttggatataacttattgtagtgagacaaatgtgatcctctcccccatatccaataccacaactttgttaaaacaactggcttactaaaatcactattattaatacgcatgggggttctttttatttttctataatgagctgcctaataaaggccattggcacctcctctctttttaaatttcgaaaaagaatcggcacccctaaaaaacaaagctcttcaaaaacactagtgcttcccttttaacatccttcgcgctcaggacccccccccccctctcccnnntttcctcttcttcactgattttcaaccntnnnntnnnncnnnagnctcanaaacttcttctcttctcttcactttgtccataacatctctcacctccaccatagttcattcaatctaatatcaccaacttctnnnnnnnnttnnnnagnngnntnnttcntcttctctcggtctccgttatgatgccatcactc

SEQ ID NO: 269443 - DNA, 510 bp, Glycine max
  unsure (1)..(510): unsure at all n locations
agcttccttgtcgaatntcaagcgtcgcggtatatgttgggtctcaatgagacatccatgtcaaatgttatagcggtttgaatatgctccagctttcgtgtctctcgatatttaagtcaaaagttattgccgttggaatatccctggagcattggtctttcatctcgagcatctcgatatgttatgagcctcaatcggaaacttgagtcaaaagttattgcaatttggattntccagtagactccttgttcaatttcgagcgtctcgatatattatggaccgcaatcaaaaataaagtcagaatttatgggaatctaaatttgctgggagcttcgatgttcaatttcgggcgtctcaatatattatgggactcatacagacatccgagtcaaacgctatgctagtttgatntttttgggagattctatttcaatntcgagagtcttaatatgttatggcctgcaatcggatatcatagatagaacttatggccattgataattggctgga

SEQ ID NO: 269444 - DNA, 333 bp, Glycine max
  unsure (1)..(333): unsure at all n locations
ttagtccagacttctaatgctcttaatctctcctcgtctaaatcaactaactcatctgacatcattttccaataatggtcgatcggaatgtccatttgtttttgtactctagctgattgcaaatgtatttcgaccggaagtatagcatcgtgcccataagtcagtcgaaatggggtagtattaagtgattccctatgagaatttctacatgcccatagaacttgatctaacgttntattccaatttcttggcttttgggcaatgtgttttttaatcaagttgaatacaatcttattggctgcttcgacctgaccatttgcttgcgcataatat

SEQ ID NO: 269445 - DNA, 385 bp, Glycine max
  unsure (1)..(385): unsure at all n locations
agcttctaaactntatacaagaatgaagctctgataccacttgttagacaagtggcctcagatatcttaagaaggggggttgaattaagatattccaaacaatttcccctaattaaaaatctatttcactgttttactcaagttatgaattcccttaataacaatcttcttaaatattaattcagatgaaacaatttgaatatgaatatcaagcaataataaataaaggagattaagggaagagacaatgcaaactcagttttatactggttcggccacacccttgtgcctacgtacagtccccaaacaacccgcttgagagttccactatcttgtaaatcccttttacaagttctaaacacacaaggacaatccttcctttgtg

SEQ ID NO: 269446 - DNA, 244 bp, Glycine max
taacaaacttagaaatcaagtgatcatgtattccgaaatatagggggagaaaacagatgcacattctatctataaacaattgtttgttgcttgcttgaatcttgatttcaggtattgtattgtcatcatcaaaaagggggagattgtagatgcaattggctctgatgttttgatgatgatcatgataatgtgttgcaattgatgcaaatgggctgttcaagattaaaattcaagacaatacttc

SEQ ID NO: 269447 - DNA, 415 bp, Glycine max
  unsure (1)..(415): unsure at all n locations
agcttggtaacttcttatcacgacctcccttactattcattatttagggtatgatttgagatttacatagcatatatgtctgaagtgatgaactntacagatgtaaaacggtaaaggcatcagacatctcttcatttcctttccttcttaacttagtcgtttgtgggattgctgattgttgaacaggtctttttgtatgccaactccaaggctttacatgtttccaacttctgattatatacttttaaacttgcaaattataatgttacgcccaagtatattttgacttttgatgaccaattctaagggcagttttattacatgaatattcaaaaattgatattagatgtaacattacctattatctttatctctttgtcacacatttatagataagtcgaacatcaaggaaata

SEQ ID NO: 269448 - DNA, 377 bp, Glycine max
  unsure (1)..(377): unsure at all n locations
gcatagactgatactggttacatggtgtttgaggaagctatatgtataagctgtatccattttgagtttaatccttgaaaacaattagttgggacctccagcttaattacaatctttctttttgtttttgggagttagtgggctaagaatgaggaaaggttggattaaatgtgagtgttgatgctttgtaaggattaaactangcatattttttttcctgaggaaactaagtgccattanggctgaaggccatttgcttcagcttaatatggctatnaatattactttctatatgctattaatgcacaacaacccaatggttgggtcatacaaagatgttgttggtttacaagtttcacattttgatcatagtagtc

SEQ ID NO: 269449 - DNA, 317 bp, Glycine max
  unsure (1)..(317): unsure at all n locations
agcttgagatgaggaagtgtagaagggtgaacttcctgctnttattcgttgaccacagagtggtacctggagatgtgtcgcgggggtcaggagaccttggggacgtcaggtggggtgccattgcccaaaaccaagcttgaccaatcccgacccaacccgggcatattcggtcagtgagaacctgtgatgtacctaagcaagcgagctcctggcaatcaacatgataaaggaacaaagaccacaaagcaagggggcttgtggtggctggccagctgtgaaatttgtgtgtgggttgtggcctctggtaatcgattacc

SEQ ID NO: 269450 - DNA, 342 bp, Glycine max
  unsure (1)..(342): unsure at all n locations
cctcatcagcaaaatcaaccacagcagagcaattatgacctctctagccacagatacaaccctggatggaggaatcaccctaacctcagatggtccaaccctcagcaacaacaacagcaacctgctccttccttccaaaatgttgttggcccaagcagaccatacattcctccaccaatccaacaacagcaacaacccctgaaacagccaacagttntaggccacattatttccaataagggtattgaagtagatcctgcaaaaatttctgttatttcacaatngccttacccctcctgtgtgcgagaagagtgatctnttcttggtcatgcaggattctac

SEQ ID NO: 269451 - DNA, 478 bp, Glycine max
  unsure (1)..(478): unsure at all n locations
agcttccttgagaagattcctaaagaagttagagcttatctacacacacctctctaatagctaagctcacctccttgagatgagaagctagagcttagctacacacccctataatagttaagctcacccccacgccaaaaatacatgaaaatataaaaaaagtccctactacaaagactactcaaaatgccctgaaatacaaggctaaaaccctatactactagaatggccaaaatacaacgcccaaaagaaaganaaacctattctaatatttacaaagataagtgggctcatacttagcccatgggcccaaaatctatcccttggatccctggcctaatttacttggagtcttctctatccaaagcccttgtggtgtaggattgcatcacacctgtcacaagggatggcattctttaatcgagtatgtgcaacgtgacttcagaaatatntactngttcgttttatatttttatat

SEQ ID NO: 269452 - DNA, 406 bp, Glycine max
  unsure (1)..(406): unsure at all n locations
tagattcactttttttttgttaatcttaaaaaaatgagctcttaagttgtaattntattntattntattttgcttttctttataggaactattgaagatagtggctaaacaagctgaagaagggaagatatatttgctaaatactttacttttgagatagtgaacttgtttgtttattgccaacttaagggatttactctgtctggaacctctttcatggttaagaaggacaaacatcagccaattgtttaaatgtaaataccaattttcgttttcattccctgttattctgaaactcgtagatgtaatcaggtgaggaatacaggttattacgtgaataataaagttttaacgtatgagaagaatgctattgttgatgtatactgaatatacatgcttgcaatca

SEQ ID NO: 269453 - DNA, 484 bp, Glycine max
  unsure (1)..(484): unsure at all n locations
gcttctaaactttatacaagaatgaagctctgataccacttgttagacaagtgaccttagtatcttaagaaggtgggttgaattaagacacaaaaatatccctaattaaaatataactctctttttaattaataatgaaaccctaattatgaattatttcaagaacaattcacaataaaacttctttaaagcgaaatataaactgcaataaaataaaagaagttaagggaagagagaatgcaaactcaattttatactggttcggccacgccctgtgcctacgtctagtccccaagaaacccgcttgagattccactatcttgtaaaatgcctttacaaagtctgaaccacacaaggacaacccttccctcacattcaaaaatccttacaacataagagaccctctgtcccttaatcaatntctttgaatgagaagaagaaaagaattctctctttaagagaaaatatacaatggaagatactc

SEQ ID NO: 269454 - DNA, 198 bp, Glycine max
ttattctctaatggatggtgtgtcctctcacctcttctactttatctttcgctgccgctccatggctgaaaatcaccattgaaagaccttatttgaactcagagacccagcctctatacaagcttctcaagcaaacttgcatcgggaaccgaattcataaagagagttgttgcttttctcaaaactgttctctgaaac

SEQ ID NO: 269455 - DNA, 426 bp, Glycine max
  unsure (1)..(426): unsure at all n locations
agcttaaggtaatcatgacacacctatacttacgccactatataacttcacacttaaggttgagggttcgactgttgtttatgatgtctaactctctaactaggacactggtcacatcaagagtttcctactcaagctccaactactaagctagctctaacggttgaaactaaactcacaacaagattcttaagaattctacccatctcttctaccttggattcaactcttaaggttctcacaatgtatcaaactaatggtaatgcctccaaaacgtgaaggtgagcaccatggctgccaactctatatcatgcttaggataaatcctttcatgagtcttgagttgttgagaaaacatangtcgttacttggcctnctacaagcactcctctaaacttaaaacttcngatantttactactccaac

SEQ ID NO: 269456 - DNA, 364 bp, Glycine max
  unsure (1)..(364): unsure at all n locations
gaagatatcctaacactttctttgccgctgtctagagctctatacctgaattactctgatatcttccaagcattccaaccacaaatgcaatgtcaagtcttgtacacacctgcgcatacataaagcttcctacaatggaagcatatggaatgtttctcatttgttccctttgaagcttatttttatgacattgattcaaattgaatctatcacctttcacaataggtgtcatgttgggtgaacaatcttcatncgaaatatttctagaactttgttagtattggccttcttatagagcccgagaatcccttgatatcaccatctatggatctctatgccaatgacatatgctgcctcacccata

SEQ ID NO: 269457 - DNA, 323 bp, Glycine max
  unsure (1)..(323): unsure at all n locations
agctggaanactatataacagcaccaaggttctagtttaggccctctcctctctcttatgtctctcctatgttcggatattttgttttacgcttttctttgagacattacttcgttttgcaattccagtagcaataaaatttcgttcttcaatttataagttcgctctctattgattaatggaaggctaactctccagcgttattttctcttgaagatcaagcacagttctctttgaggttctattattacagctaaattctgttcagtttttcctcttcactaattactctgaatttgttgcttttaattcatgcatgcttt

SEQ ID NO: 269458 - DNA, 427 bp, Glycine max
  unsure (1)..(427): unsure at all n locations
tactcagcctacataatgatgaaccttgttctatttgtaacgctgtcatacctcgtggacagcctgattgtaacatagtgtttattttgtaatagcctgttcaatgtttaacaattgattttgattgtacgtacaagtctttgactcaagcttatgaagctgagtcttcttttataaccagtgtacttgggtcgacaattttgcacaccatagcacttcaattgtcgcactccttgctgttgttagtgaccatctttcgaggtatgtatttgtctatcccactcctatgcttattacatgcttgttgatatatgactatgtatttatgtaagcaattatgtgagttgcgagtgaatcttagtttctcgtttgagattcaatacantgattaatatggacaatttgcattaattgatgtattgaatct

SEQ ID NO: 269459 - DNA, 459 bp, Glycine max
  unsure (1)..(459): unsure at all n locations
agcttgaaggttacaactcataataaaagggattgcatgggcgctcttgaactaacaaagaacttaaaggtaaaaattttactcaccagtgtcctttgataatggttaaggaattaatcagtagagattttttaaaattgttaaaaaccatagtaaaatgtattgttacattctccgataaaattcttttcacttttgagtccttaaaccagtttacttatgcattatattggtaaaggcctatatggtatcactatcangtaaaagataattttntttatgtctgaatgttataatttttgcggaattcttacaatcatgattttntggttgattatgagtattcttganaatctttatataattcttctggggaatcaaagaaattatntatcacgtctagtaagaaaatagtatctcataactttatatgaatngtattaaataccaaatggtatg

SEQ ID NO: 269460 - DNA, 864 bp, Glycine max
  unsure (1)..(864): unsure at all n locations
tggcagttgaacctttttnncctttttccctctttagtgaacctttattctcagcctttattttaagaaaaaaaaggttggtttgcttttttttattttcacttacatttgttttatctttttaacctgatagaaggggggctccgccctatgtatttttagggcatgggagatagactacttaaaaaatttatatgaattttataatttatcttttatcattttaaaatctatgatatcagtaaaagctctagggatatttttacatttatactttacagaaccaacaaagtcttcagtgctctgtccacttatattttttatttaatttactaaacttacataccaataaggctcattcaaggacttcaaacttttacattgatacaataaggcttaatgcctctaagtttatatactctgttgcgggctatttatcttttatttaattttttaatgaattactttattataattatagttgtgatgcaaatttatattttcccttagataaattattatattttaatgaaaatattgtaatgttgaacataaaagcgtttttaaaaaaccgcatatatagattcttggccgttcttatattaattctaatattttttcgcaaatttttttttctaatttatggaccttactttggttttgtccatagatcacttccttttttcttnttaannngttttattttttttatttttattttttttttttngnngnnnnnnnnccnnctccnaaaaacggtggatcactcaaacaaacanccgcgnncnataaaatatctttttattttttttttaaaannnnnccgnnccncnncntatattccccccccccctgtgtctnntg

SEQ ID NO: 269461 - DNA, 394 bp, Glycine max
  unsure (1)..(394): unsure at all n locations
acttaaaattctggaagaagacaactaacaatctttttgaattggaacccgtgaatgctatgccttatgttattgtgtctaacatgcattatgaatctcggaaatgggatgatgttgtgaaatacaaggttggtgaaatcaaaggaataacaaaggagcctggatgtagttggatcaagatgaactacagagtgcatacattcatttctgaagatagaggacatccaaaggaagctgagatttgttccaagattgatgaaatcgtaagaagaactaaggaagctggttatgttccagatatgaattttttgttgcatgacatggattcaganggaaaagaagttggtcttgcttatcacagtaagaaatcggatgttgctttgggattacttgc

SEQ ID NO: 269462 - DNA, 860 bp, Glycine max
  unsure (1)..(860): unsure at all n locations
cctcccacttctctggccttcctgccactntttcccctaccttttccctcccaattctcttttctcttccccccnnncgcccggcttgtccttctaaaccccnatatcacaccctcccctatggttaaaaatcttggaccgtaatgaggttccatttcgtgggcgagtggtgaaatctaggtagctcgggcctgacctcaaccaaacttaaaatttgaaccttaattgtcaaaatgacctcaaatacccttaaaactaaacttggcaagaatgccattaagtatctacaatccttgtttataagcatttcaggacctcatctttgcctaaaaaaattttgaacattatggacatggatttactaagatggtatgaacctccaaaataggctaattcgtttgcaaaattttttttggggtttgaattcttttacatatttctcaggttctggaaaatgcattgggataactctgtaacaaggtttttctaggattgacaagtcctcttaaggaaatttcacccaagggtttaaaaatgggtccttggacggaattaagcccccacttaaaatttttaactttaaccgtagtaaagtgacccaattgaaccctattcagtgcgtttttcccaatttggccatatatttacaatgcgatacgaactattttaaaacccttgccatatctttggtgggtgtgccaatcatgaattattttccccccttaaacattgccttggaataaaaaccaatggtgataccctataactatattggagaacttttggtcctcttggccatcaggccaatcaaaccaaagttattggccaggtaagaaaaacacctcccttttaagtaaaaa

SEQ ID NO: 269463 - DNA, 418 bp, Glycine max
agcttccacgttcaatttcgagcgtctccatatgttacgggacttaatcagacatccgagaaaaaagttagtatcgtttgagttggctcatagattcaacattcaatttcgagcgtctcgatatattacgggactcaatcagacatccgagtaaaaagttattgtcgtttgaattggctcagaggttcaacattcaatttcgagcgcctcgatatgttacgggactcaatcagacatccgagtaaaaagttattgtcgtttgaattggctcagaggttcaacattcaatttcgagcgccttgatatgttacgggactcaatcagacatccgagtaaaaagttattgtcgtttgaattggctcacaagttcaacattctatttcgagcgtctcgattgttacgggactcaatcagacat

SEQ ID NO: 269464 - DNA, 242 bp, Glycine max
cctttatatatttgagggactcatgggcactctgaattacaaattcccttggataaaaagggtgttgccatgttttcaaaacccgtacttaagcgtacaactccttattataaattgaataatttaaggtgagaccactttactttttacttaaataaaccatttgattggcctctttcattaacacaacccccattccaacattttaaacattacactccatttttaaaaaatttttaaaa

SEQ ID NO: 269465 - DNA, 332 bp, Glycine max
agctttgagctaattcaaacgacaataactttttgctcggatgtctgattgagtcccgtaatctattgagacgctcgaaattgaattctgaacctcagagctaattcaaacgacaataactttttactcggatgtctgattgagacccgtaatacatcgagacgctcgaaattgaatgttgaagctctcagcaaattcaaacgacaataacttttttcctcgaaggtctgattgagtcccgcaatatatcgaaatcatcgaaatggatttctgaagctttgacctatttcaaccaccaataccttttttttcgaatgttggattgagtcccg

SEQ ID NO: 269466 - DNA, 496 bp, Glycine max
atcggccctttgagcctatggtccccgttttttgaattggagctcattaccagccttcaatgaaaaaccatgatatctccttacgctcttagaattacggagctttggaattgttttgggaataaaagtgtgggggggcatgttcaatcggaatatatcatgtggagccatgactagagtcaattctacgtcctacttaaaagatatagacggccgaatttgcgcttaacttctacattgctgttcgagcgtctcgatttattaccggactctatctgacgttcgagtaaaaaggtattgaccgttgaattagctcaaaacttgcagatttgatatcaagcgtctctatggattactggactcaatcagacattctaataaaaagttcatgtcctttgaattcgctcagagcttcaatattcaattttcagcgtcttgatttattaccggactcaatccgacattcgagtcaaaagttattggtcctttgaatttg

SEQ ID NO: 269467 - DNA, 196 bp, Glycine max
tctagcatctggggagaaacattgccgacgggctagatcattacatgacatgcaacatcgtcagaagtgagaattgtgcctttatgatgggctgttatgaatttgaagctgatatgcaagcgctaatttttatatttcaaccttattgtgctcgcgcactagcatttattccattgatgaatgagattcttaagct

SEQ ID NO: 269468 - DNA, 137 bp, Glycine max
tgggttcatactatgtagctcatcatgatgtatcttttccattccaatgatctatgctttagagccttcttcggatgttacatagctagtggagcatggctgaatgttcaccaggaattctttaacttctgtcatgt

SEQ ID NO: 269469 - DNA, 556 bp, Glycine max
ctgccgcatgccagcttgtctattaactattgtataatcatttcacgttttttttttttctctagataaaaaattactgtccatacttgctgtacttcttataccggaaaaaatttctttcttggcaaaagaccccttacaattgaataactgtcagaaatttgcaaaccatctcctttatattagagaccactagttaaactataataactatctattattaatcacagcgctcagtcacttatacaaattattagtttaactgaggtaaatatatagagagaaagtttatcatttccctttttgccaaacttgacccaattcatccactccaggtaattcatatattatcttgaacttgataaccacgaccgaacaaggtgctcactttgattaacgtagtattggctgaaaaaattttgtgaaacattttcacctgtgtaggtgctgttgatgctaacgatatgaacttgaatctaagtttctccccatttatcgtgcacaaccttttactataaacaattgacaaatgtcccagagtgggtccattttttca

SEQ ID NO: 269470 - DNA, 580 bp, Glycine max
ctggttatcaactcgtcccccgggtggtccattcaacccgtcttttttatgatcttccatgcccatgatgcatcctccaaatccaatgatgaatctgtctcctctaaatgcttctccaatgaaccctgcaggaattggttcttcaccttcgatgctacgtccacctcatttccaacagttctatgatcaacaacaccaccatcaacatcctcagtcttttggacttcctggtcggcctgaatatgatccgtcatccaagtctttcaaaggggtctttgggccacttccatctgatgttgcaatggagctcagtaatgtccttaacaatctgaatggtacaaaagaatccatcaaaggtgcaaaactttggttcatgcagagatctccatttgcaccagccctagcagaagctcttacagatagggtctttgcattggatgaagttgagagacaattacacataatataccttgccaatgacatactttttgacaggtatcatatttgattaattcacatattataaaatgttagaaatgttcttctaataagcagaaaagatggatcacacatacaccta

SEQ ID NO: 269471 - DNA, 403 bp, Glycine max
agcttgcacgaaagtttctaaaattgtttttgttcaaaataaagtaactaacttactaaattccactaatatatacagtgactactcaaaaagaaggaatgggccttgattaagctcatttaatatacataattaaactaattacagaaaacaaagcccaaactcgcaacccaattattcaagtgtagaggttctgacttccatgctcaatttgacccttaaaactgcaaaattggcctaagcttatttgtgaaaaattgaagctccttttcttagctttccagggattactcacatgctttacttttaatcttgtagtgtcctataggccttaaacaagtcagataattcaagtaagcacaaaatctgaaaataagcaacaattatcacttaagctcaatca

SEQ ID NO: 269472 - DNA, 740 bp, Glycine max
  unsure (1)..(740): unsure at all n locations
ccgccattagtcgtgcgtctctcgngcacctctgagtcacctgccgcatgcagccttcacttcaatgggagcgtctgctatggtttttattttataggactccgaaacaaagccggatggttcgacttgctaaaaagtcccacggagcctgatcgtctcatatgtacgggactcgaccaacattcgacaaaaagggtggatgttgaattggctcgacgtgctcattgccttcccccccctatatttgcactggactccgtttacaaacagccaccaattcttgtgtgcgaaacggccacagggtaccgcatcctgcttttgatggacaggttcctgacctacccgcatgcttgtatgaataaagctgctctatttatcacagttgagattgaagaaaaccgtggctacattgctggctcaatcaaaagtcctgcgggatcttgacggtgcctggatgccagtcctctttttttccgtcgcccagggtgcggctggggacaatgttcgcaacctttgtttgaaggaattgttcgctttctctgttttccggctggggtatttacgcgtccttgcccctcttaaaaaataagggcccttgactgtcccactctctttccattccaacggcaacattctggcgcgggaaaaacgcccggggaagccagagaattgggcggccttgcactttcctggaatctgggcctctttttttgggcgacggcggccaactcaggctaacc

SEQ ID NO: 269473 - DNA, 810 bp, Glycine max
tgccccgggaagtagacatcattggaaccggcccacttttaagaaccccagccctgtccccgataatttaaggggctttccggcctggcaaaaactttttttttttctcaccgaaccgtgtgctttgtcaagttttctagcactggcaaaacgcaaactaaccgttccctcgccctgttggacgggggtacgccttttaggcatggttattggctggaaaacatgaaaccttgaatggcaggtttttccagacttactggaatcggccgacgttttaagttgcagtggcccttggataattggattttaaccatgggggaaatcccgcgtaattttcgtcccaaatgagccttggtcacagtaatcactaaaaaccggtataagggcaaccccttaaatggtccgatctgggtttatcaggcattaagaccgggggaaaacatttatatctcctgtttaattacgctgttgcctgaccaccttagttggatatttaatactctgggtggttttttagatatacccccccctttagtctacccccccctaccatgcccaggggacctctgatcaccgttgaattatccaaggtccctatttctaatagggcctggaattgcaaattctttgcttaaaaaaaatgtcatatttgggaaggggtcccactgtccaatactcttttttcaggcccatttttgagtcacaaaatttccatccctttccatggtaaacttgccagaaaatcccggtttggttcgttctccactggggacaaatgtcctctggatcaaccgggcccgcttaaataac

SEQ ID NO: 269474 - DNA, 159 bp, Glycine max
aattactaccatttgaattgctcgagagctttggctgttcagattctaagggctcgatatattatcgccccgaatcggacttttgggtggaaagagatgaacatttcaatttctcgggacctttcggatttcaaatttcacagtcttgaaatctgacgc

SEQ ID NO: 269475 - DNA, 449 bp, Glycine max
tctcgatatattatgcgcctgaatcaaactttcgtttcaaaagttattatcctatgaatttctccactgtattccgtgtgacaagttatgaccatttgaatttctcgatagcattcgttgttcaatttcgagcgtctctatatattatgcgcctgaatcggacttccgtgtgacaagttatgaccatttgaatttgtcgagagcattcgttgttcaatttcgagcgtcctcatatattatgcgcctgaattagacattcgcgtgacaagttatggccatatgaatttgtcgagagcattcgttgttcaatttccagcgcctcgatataatatgcgcgttaatcggacttccgtgtgacaagttatgaccatttgaatttctcgagggcttcccgtgttcaatttcaagcttctctatatattatgcgcccgaatcagacttccgtttaa

SEQ ID NO: 269476 - DNA, 420 bp, Glycine max
aacaagcatctcaagagcttttgtgatcggtttaaaaataccatcttttccgatgagaatgccttaaaaacactaacaaagctgcctatgggcctaaaagaaacgcttatcttgggaaggatctgagctcgccttgcattcatgttacccgacagcccaagatgactaaagtaccatgcataacaacggggtcatgctaagggctgaatctgaacacttcgcaagtgtgaatgacccccatccctgtgtatgttacatcccttactttgagtgccttgaagaaatttgggagctttactataggaaatttactatatgttttttcaaatggagatgggttgacagcaacaccggcgtgcgcaccagagacatatgatctaccttggttgacctgaaaaaacgttggttccacgatgaccc

SEQ ID NO: 269477 - DNA, 494 bp, Glycine max
ctctcccctattttgctataaatagggggagaagtgaagaacaaaatggttcaccctcttatgcacttctctctctctcgaaattgctgaggaaaattatttccgtgaagaaaatccaagccgaggcgcttccgtaacgtttccgtgagaaattacgcgaagattctcgaccgttcttcaagattcatcgttcgttcttcgttttcttcaatcttcaacgggtaagtacctcaaaccgagcttttcaattcattctatgtacccgtggtggtccacattttgtttcatgtatttttattctcgttttcattttctttttatacccccttttgacgtgcttaagtcatttatttaagtcatttctcgcttaatctaaaaataaaataaatttccaccgatcgtttgaattgtatcatccggtaattttggttaaaatgaattccgacccgtcggtcgtgccgtaaccacgttggaaatcaaaaaagaggtaaaat

SEQ ID NO: 269478 - DNA, 497 bp, Glycine max
agctttatgcatacaaaataatccaaaaatgccttagaattgggtgttgaaaaagcataacatgactttctgtgatcggcttaaagatacaatctttgcaaatgagaatgctctagaaacatttataaagcttgcagatgggcctaaaagaaatgttgtatcttggaaaggatatgacatatacatgtattcattttacacaaaagcacatgatgactaaagtacaatgcctaacagcggggtcatcctaagggctgaatctcagcacttcgcaggtgtgaatgacgccaatccctgtgtagcttccatcccttactttgggctcattgatgaaatttgggagcttaactatgggaaatttactatatgttttatcaaatgtagatgggtagacagcaacacctgagctcgcaccaatgacatacgatttacgttggtagacctgaagatacttggctaccacaatgactctttcatcatggtggaacaagctatac

SEQ ID NO: 269479 - DNA, 439 bp, Glycine max
tgtcccctatttcgctctaaatagggggagacgtgacgacgcatatggttcagcctcttaagcacttctctctctcatcgggacgctgatgcaaattgtttccgtgaagaaaagccaagccgaggcgctttcgcaacgtccccgtgagaaatcacgcgctgattctcgaccgttctttaagaatcatcgatcagtgttcgcttccttcaatcatcgacgggttaggacctcataccgagcttttcaattcattctatgtacccgtgggggtccacattttgtatcatgtattttatattcccgtgctcattttctttctatacccccttttgacgcgcttgagtcattcatttaagtgcattgatcgggtaatgtgaacaaaaataaattggcaccgatcgtgcgaattgtatcatccggtaatactgggctaaatgaa

SEQ ID NO: 269480 - DNA, 379 bp, Glycine max
ttctggtcggtattgatttttggtatatcccttcaacactttcatgtagcgttcaactggatacatccaccacaaaaaaaccggaccacacaacccaatttccctcacaagatgaacaattaggtgaaccatgatgtcaaaaaatgatggtaggaaatacatctccaactggcaaatgacaatggcagcctcattctctaagtcatccaattgttgaggattaatgaatttgctacatatggcattaaaaagaaagcacaaactggttatggcaaccctaactttgtcaggcaagatgccgcgaatcgcaacaggcaataattgttgcattaagacatggcaatcataagacttcaagccaaccaacttaagatcattg

SEQ ID NO: 269481 - DNA, 643 bp, Glycine max
ttaaccgatcgtttaagtcgctatctcgcctaataaatgatatattgaatttcaaccgatcatttgcattgtaatctcgtctaatcactgttaaaacaaaatctaaccgatcgttcacactgtaatcacggttaaacaaaaaaagggaaaaataataataaaaaaatcaaaatatcttgaaaaaaataataataaaataatcaaaaaaatcaatcggacgtttttctctgaaagtttccttggatgaattgactaataaccaaagtgaaactaaggctaaaatcaactcacaaatcaagctttgtccacaaaaatcactaaaaaccgttttaaggtccaacgccttaaatggtcctctttgcttttatcggctatcatggaccgttcaaaagcatgaaatcaacatgtaactttaccgcttttgcaagaactacgtaggtctgattttctcatcgcaattgaagatatgtagcagaaaaagccccgcttttgtcgaccactccaagagatcgttaatggtccaacgtcttaacgtttctctcctttcacaaccaacagatcgttaatggtccaagaccttaacgtttctctcctttcaaaaaatctaaagatcgtttatggtccaacaccttaaatgaccttt

SEQ ID NO: 269482 - DNA, 448 bp, Glycine max
tttttggtctttattgaatgttgagtttgggattaaccacaggctgtgcgaaaagttcttccctcgctgaatggtaaaactactgggatgtccttccaagtcccccctgatgatgtttcaaatgttgacctaactgtcatgctaaagaagccagcatcctatgagcaaatcaaagctgctatcaagttagtttttgaacctttttgaaaatcttttcatttggcagatcgaatcatgtttttttcccgttgacccaacaactttttgtgttcaaatttcagggaagaatcaaaaggcaaactgaagggtattttgggatacaccgaagatgatgttgtgtctactgattttgatggtgataacacgtgatgttgtgttctgaagcaacattggaagataaactatcatgatcacttttttggtgttctcttggtctataatgacttac

SEQ ID NO: 269483 - DNA, 739 bp, Glycine max
  unsure (1)..(739): unsure at all n locations
taacatataacgcaccatgcgagagttttgcatatggatatttcaatttaattaggtgacgacagagatgattagagtgtagtatggtcgtaaaacactgggttacatgctttttttaaaattgacaagccacgtgtacaactattaaattacacgcgttcaattatttattttctctctcgtgaaacctaacccaaattcatgtttagagtgagtctgtgtttccatcttgattttggttttatttgtgttgtgcgacacaccatcgtcatacaccgtctttgattttggcacaacacctaaatcgtccaagaagtgattttatttttttacaataaacagtttgttttttccgcatgagaagaaatgttttttccaatttaacggtgttttcccccatttttgggtctcggtttgtaccttttttccgtcaaggggaacatggatgaaatttgttgtgaacaatgattgctattttaatgtaatcacaatactattgacatgatgatgagttgatttacatganatataaaataaaaaaattagtttaattaatctgtaatttgagcaattttatgtgttttacttttgcaatgaaaaaagttataccgaagatgttaacgagtgataatgacgatgagaattgagatgattaaacatgagaaagatttatacttatgagaatcatgaactcatttagaaaattatttaaatttatgaattttttttttcatttata

SEQ ID NO: 269484 - DNA, 445 bp, Glycine max
atcagttggactgcagtatttttaaagataacttgtcttggaaggttgggtgtggggaaaatatcatattctggtctgacaattggctacgggaactatacaccctacagcaaaagtacaacctgcttttcctcataagtagacaacagggggctcttatgtcacaaatgggccattttaacaatgatagctattgcttggacttgacgtggaggaggaacctatttgatcatgacagtcagatggctgttcagttcttggaggagatcagccatgtgcctattctaagccaggacagcgataatatgatatgggtgcctgaacctaatggacaccacaccactatgtcagcttatagcttatgtctgaataccatgtcaggacaatctgaacacaatatctttaagacaatctggcaggtgcatattcccccctcggcactcat

SEQ ID NO: 269485 - DNA, 569 bp, Glycine max
gcgcacgtatcagtcaagtgtatggaccatatcgtagccaaagtgcttatcgataatggttccagtttaaacctgatgcctaaaaacactttggagaaattaccattcaatgccttccacttaaagccgagttcaatggtggctcgtgccttcgacggcacccgccgaaaagttaagggagagatcgatctcccagtacatataagccctcacacctgtcaagttactttccaaataatggatattaaccccccctacagctgtctgttggggcgcccggggatacactcagtgggagttgttccctctacactccaccaaaagttgaaattcgtagtggaagggcatctggtcatcgtatcaggcgaggaagacatcttggtgagctgcccatcctctatgcctgatgtggaagccacagatgagtcattaaaaaccgctttccagtcttttgaggtggtaagcattttctccgaggactccttctctgggcaagcttgcctgtccgatgcagcagtaatgatggcccgggttatgttggggaatggttacaaacacagaataggttt

SEQ ID NO: 269486 - DNA, 574 bp, Glycine max
  unsure (1)..(574): unsure at all n locations
cctgccgcctgcaagcttgccacccagctcgcccaggcgagcaagttgctttctctataagcaacagccttctggaggaatcttctagagggcccaagtaggcctagttgctatttgcaccccctttttactaaatgcacccctttctatttttttggtaattctttctccgtaatgttacgaaactttacgaatttcgtaacgatatttattttccttccgcaaggttacgaatccttacggattatgtatttactcttttttagctttcgaagaagttacggaaactcacggattgtgcaaaaacacctctttttgacttccgccacatgacggaatttcacgaatcgcgcaagcctgcttccttttgatttctgagatgtctcgggacttcatttattgtgcaacaaaggacgccaagtatcgcatagcggctaaccaaaggttgcatgtcatcaagtaataatccccggacgaaattanggtatgacagttgcccctctttacttacctcttatcggagataagaaggaagccaagataggacactgatttcgtcccccctgctcttttt

SEQ ID NO: 269487 - DNA, 665 bp, Glycine max
  unsure (1)..(665): unsure at all n locations
ttaacggtaacatttaaaaatattaatattaatatatttaaacattctcgttaatatttaaaacattaatataattatattaaaacattaaacataatcatattaaaacatatatatatatatatatatataagaaataaaaaatttatatacttatattggtttacacgaaaaacatgtatacctatattctaaacatatttcaactaagtcacgaacatcaaggaaatgcctaattacaatgtgaataaagctttagttaatttcttcaaatgactttattcaattcaattatccaataaccactgcacatatgaatttcatgatgagtagtcacgtacgcggaacaaaatataaagtttgtgaaataaaagtgtcaatatgtgtacgtgtatacaatgcggcatcaaaaattttaagaaaagaaaaaaaagaaatcaacaagattggaaggtcaatatatccagtataaataaaatcacttccacacaatttttatgctaaatataaagaatcctaattcctaaggtacacacccaacacaagaacacatcaattttacaacaaattcgcatcgaaacaccaattggtccatcaaacacactcaatccgncattaaaacatgaaanacataattgaacttcataaaacacccccaaataacc

SEQ ID NO: 269488 - DNA, 529 bp, Glycine max
agcttgtatttcatcagaaaatgttgaagaagaaagattaactctagctttagtaaatgcaacagaaaaggcactgcagttgcggaataactctaacgttctaatgaaagggagtgcgagatcaggagcggaatttttggcaaatcgatcttatcagggtctgaacatgtccagtgagaacacctccccagaaccatatctcattggacggaggggaagggcatctgggtacgaggatgagaagaacaaacaatgaatttttgaggcataaatgtggtttttgctttagattgtagtatgaaaatgagagttagtaagaaggtcagagattgacaagggaaagaagagtaatactccttggtgagctgctcgttcattttggctggtgacttttgtctggtacgagtttcttaataacccgcagttgtaaggatttcgaatgctgttggcaagcaagcttgctgcatggcatgatggaacttgcagttatcctttcacctttgttattcacggaaatgtatgtcttcct

SEQ ID NO: 269489 - DNA, 521 bp, Glycine max
  unsure (1)..(521): unsure at all n locations
tagcccatcatcaatattgatttcagaaaaaaaaagcaagtgattatattgaactgagccagaccaaggaaaaatacatcaaagaaaataaataatctagtatagctaattttataatcagataaagcatctgagacctgctgccatgtggtatcaacaggaagctgccgccgagcatcgccagcatcaaaatccagtacaccataatccctcaaccgaatctacacagcaataactaaaatcagaagtctttttgaggattaaatgcatggcattatctataagacacatttttcaaattgagacaaacccgaaggaaggcacggattctttgcaaattcccaacaccaccaccaagagcagcctaccattagataaaaaagcaagcagaaattaagtgttgataacaaatacaaattcatgcttgctctcttatatgaattaagaaataaagaacagcngatataaacaaaaaaaattgagagaagcttgcanagtatttcactatttcttggagcatg

SEQ ID NO: 269490 - DNA, 407 bp, Glycine max
agggaaaaaacccaaaagaaaaaatttttattttttgaatgaacagcgcagcaggtccgtgttttaacgctaagttcaagggatgtcgccggggaatctgagagggaataatttttcttagatattgaaatcagagtgagagaaaaaagggggattgcgaaaggtttggaaattggacacgatcgtatagagagagagagagacagagagcgagaagcgagtggactgatatagaggacaatacatgagaaaaatgagattttagaacgaacgaactaggaaggaagagatttgttaacgtgcgacgcgttcatgataactagatgagtgcctgttcggaactgtaccagttcacgctttgagtgtaataatccctgcctttactactctctatctcttaaattaaa

SEQ ID NO: 269491 - DNA, 808 bp, Glycine max
  unsure (1)..(808): unsure at all n locations
cgcccctggtttgatgcttcgtgaagcagcgacatatataaagctcacggaaaagatactgcccaggcgtataaaacctgcaangatattttttttttaatactcctgcgcaattagtggaacttgaattttatatgtgggaacaatgtgggtgttgaagagccaccgaaagagttcacttgttttttgtgtatgcatgaaaatgtacacgaaggatgactgggatcccatgactggatatgattaaacatacacctatgccccaagtgatctatgtagacctataccacacagggatgactgcttataagctgcaaactattgtatagactttggattctttgcaaaattttctgtccaactatacccctcatggttgagtgaaaactgatatagcattacttaaagggtgtaagccattacatagggtctacacattgtgaaccctttcatggctaagtgctgagtttgcaaggatttgacgcatgtggctggagttgactgattgggcgacactttatggctagctcttcgcccgtatgcttgctatgaacatccgggatagacgatttgtctagctttcggttggaggcctaggtttacgcctagaatgactgggtatttcaggggagagtatgtgtacttttccaatgtcggcctacccctccctggcaaatgtttaaattgtcattccattcttattgaacgagtgcttttttgaatttggccaaatgtggtgccccccctgtctggtacttcgcgactctcctctgattgcgattcaaaccgttcttcaagatacttttct

SEQ ID NO: 269492 - DNA, 433 bp, Glycine max
ccaaagtaactcaatatctacgcatctgaatttttcttttttcaaggattttcatggtttgagaagtgaacatgagaatggggtaattttggagcaaactctcatctcacacaagtctatcaaattaatctaaacttgctcaaactggttttaccatgaaaactctaccgaatcaaaattcgactcctgacacccaatttaccctagaaatggctcttgccttcactttggtcactcaatctcctcctttgcacaacccaagctttcccacagtcctaaatgacatttcaaactaggattacctcactctaacctccaattaccactaaatccagatgtggcgttttaaagccatccaacataacacttttccactcatatcactacattcttacttttaaaccctacgttaactctacccttcatgtctatc

SEQ ID NO: 269493 - DNA, 500 bp, Glycine max
tctcggctcctgctgggaacgcctctagctcaacacccgtgcagcctaatgcacccacccagagggaagctccccaagttccaactccgaacgcgactcgaccggccggtaatttcaacacgacaaggaacttccctcagagaccgttgccggaattcaccccgctcccaatgacgtacgaagatcttttaccatccctcatcgccaatcatttggccgtggtaactcccggaagggtcttcgaaccccctttcccgaagtggtatgaccctaatgcaacttgcaaataccatgggggtgccccggggcattccatcgaaaaatgcttggcccttaaatacaaagtccaacatctaatggatgccggatggctgacttttcaagacgatcggcccaatgtgaggaccaatccgctcgccaatcatggagggggagcagttaatgcagttgaatccgatacgccccacaggtctaaaccgttgagagatgtggcaacccct

SEQ ID NO: 269494 - DNA, 408 bp, Glycine max
gctaacccatggaagctcctaatatctcctacactttttggagtgggccattcttggatggccttgattttataaggtctccttggaccccatttctaccaactacaaaccctaagaaaactatattatctacacaaaaagtacacttctctatatttgcatagagggtatttttcctaaggactgaaagaacttgcctaagatgtcctaagtgatcatctaagctcctactgtacactaaaatatcatcaaaataaacaactacaaatctacctatgaaatcccttaagacatgatgcataagcctcataaaggtgcttggtgcattagtgagcccaaaaggcatcactagccattcatacaaaccaaacttggtcttgaaagccgttttccactcatcactctttt

SEQ ID NO: 269495 - DNA, 548 bp, Glycine max
ctagtcttcatgttgttcatgttgcttgatgtgtcatcattttttatatttcttaaccctttttgtcaacattttaattactgattagccttaattgtcaaattaattatgcaattttatcatttgggcctactggattaattttgtgtttttaatttaattttaagagaactataagtaattgagcttgaatccagaattgggcttggacttgaagagagcaggcaattttattctaccaaatcttatcttatctagattttatctcatctagatattattttatcttgatcttatcttatcttatctagattttatttcatctagatattaattcatctagattttatcttatcttatctatctacattttattttatttatgggcttggatttaaaacagatttgttagctttggggttgagaactatataacagcaccaaggttctagttttaggctctctctctctctctctttcattttagctttttgtttggagaataattctagttttctactacaatttcgtttgctattgattaatgg

SEQ ID NO: 269496 - DNA, 391 bp, Glycine max
gcaagcttacaaatctattttaagtcccagcccatctttattatataataaaatttggacaagataagataagattggatgaaataaaatctggacgaaataaaatctagatgaaataaaatctggataagataagatttgataaaataaaattgttttctctcttcaagtccaagcccaattccggattcaagcctaattgcttataattctcctgaaattaaattaaaaacacaaaattagtcaagttggcccaaatgataaaactgcataattaatttgacaatgaaggctaatcagtaattaaaatggtgacagaaagggttaagaaataggagaaaataatgacacatccaatccccccagaaataggggtatataacaaaacttt

SEQ ID NO: 269497 - DNA, 448 bp, Glycine max
tatccccataagagtgcagaacagctggcgagtcagcattgattatatgaggctaatccaggtaaccaaaaaagatcattttcccctgccattcattgatcaaatgcttgagcgcttggcaagtatgtctcattacaatttttttatggcttttctggttatttacaaattcatattgctcctgaggatcaagaaaacaccacattcacctatccctttggcatttttgcctataggaggatgccctttggcctatgcaacgcctctggtaccttccaacggtgtatgcttagcattttcaatgattttttagagagttgcatagatgtgtttatggatgattttactgtttatggatcctcttttgatgcatgtttggatagtctagatagagttcttaatagatgcattgaaactaaccctgtgctgaattttgaaaaatgtcact

SEQ ID NO: 269498 - DNA, 511 bp, Glycine max
agcttatgtggacaagaagtcacaatgaaaaatattaaattattggtatgaattaaatttatgaccttttatttaaaaataaaataataaatcattaactcacttattttgtttaattaattttataaatattattttatatgtatgtgttatttttttgaattatcaaaatttataaattaaaataaaatatttaatatttaatattatatatatttttattataaaattttatttaaatatatgttaataaattattattataaaaatttattattatttattataattttaaaaaaattagataaactgatacatagataatttcaaaaaattattttatgtaacttatacaaattacataataatatttaaataatataaaaatttattactttttataattaaaataaaacattgtattatttatttacaaaaaggtttacataattttttataaattacataaaatatttatataaataattaaatattaattatgtacctttat

SEQ ID NO: 269499 - DNA, 581 bp, Glycine max
  unsure (1)..(581): unsure at all n locations
ttaccaaaatagaactaagtctcaagtctcttcaaatatatctgacacttattagcccgttgttattttgttcacttcttcttctccgctgtttataaagagaacacataattgttaacatataaaatacaattgttttctgctattgcaggaagcagaaatgaaattttagttttatttttcttttccatctgttttctgaaactttgagggtctttttttaaaaattttatatgataaaccctttaggttttttttaaatatcaaaacttctgcgtcatgcactgattctattactaaatccatttgtccaatggacaagtacaagtctaatggatcctaatattgtaatattaaaagccttagaatctatacatttcatcaagtttgtcaaaactcattcaaaaatctcatgaaagtttgagaggacatgaaaacatggtgtcctcttgacctaatgcggggacatgatatgtaaattatacctttcataactctcctcggaatagccagttcatggggcttgtggaatatcatgggtctgggcanggactataacgaatgcagttatttggagttac

SEQ ID NO: 269500 - DNA, 442 bp, Glycine max
agcttcgacatcagaccacttccgggtgctggttctacttcacatggatttgatggggcctatgcaggttgaaagtcttggaggaaagaagtatgcctatgttgttgcggatgatttctccagatttacctgggtaaattttatcagagagaaatcggaaacctttgaagtattcaaagagttgagtctaagacttcaaggaaagaaagactgtgtcatcaaaagaatcaggagtgaccatggcagagaatttgaaaacagcaggttcactgaattctgcacatttgaaagcatcactcatgagttctctgcagccattacaccacaacagaatgggatagttgagaggaaaaacaggactttgctagaggctgcttgggtcatgctttatgccaaagaactttcctataatctctgggctgaagccatgaacacagcatgc

SEQ ID NO: 269501 - DNA, 415 bp, Glycine max
ttgcggatttggtcttcgccggcgaaatgatcgaagtgggtctttttaatgcaaatctgatcatcttgtgtttgataaatgcaaaaaaaaaaaaaaactggggcaagtgaaaaagatgagaaggagggagaaacctatgttgtgactgtcattcttatactaccaagtttcccaccaacccaacaatgtcattactcagccaataacaacccttctcattaccccccacccagtcatccacaaaggccatccctaaaatcaaccacaaagcctacgtaccgcactttcaatgacaaacaccacctttagcataaaccaaaacaccaaccaagaaatgaattttgcagtgaaaaagcctgtaaaattcaccccaattccaggggcctatgctaacttgcttccatatctacttgat

SEQ ID NO: 269502 - DNA, 573 bp, Glycine max
catgctagcttttactccattctaaagaagcacctcatgcctgttccttggaagaatcagctaaagcaattctgtgaagtccagctggattgactaaagcttttcattcgtaaatacccgaaggtagttttctttaccttttctatggctgaaattctgtataatactgagctggcagacttgtaggatcacgttgactgaacacatcaagatatgatttcatattagttattaattttatcttgttcatgcaaatacagggtcccaagtcacctttcaaagagttggatataaaagcgccaatcagacaacaattagcaaatatagtcattttggagttccctgttgtttgtgttctcttgccatctcatagaatcaattttgaagttattaaggatgtcaataccagcaagcataaatcactgcagaaagattgtgaagacaaccaaatccctcaaggtttatcatttagggaggaagcgatagaagatgacaactactctgcagatcctcaggttcttgatctcatgaagcaagtggaatcaagtttattgcatgaaatgatgaccccaa

SEQ ID NO: 269503 - DNA, 493 bp, Glycine max
ttgggttgtatttgaattttatttgttttcaaaacatttattggttagaaatcattaattaacgtgaacgaattaagcatcagccaataataatgttaccactacagaaattaacgttacgcatctcaagtaaaatattacaaatttcaaagttgtcttaacgttcatatattttttgcatggattatatacataactttcattatttattgagaaaaatataaaaactgcacatagatttttattttccgtgttagtatcaaaattataaaacatgtgatatgcgttatgtattaagaaatattcaatttgcatacaaaagtctcacaataattaaaaattattgaggcaacttattttgtagagaactttttattgtaccaaaggcacagtatcatgttcttgatagaaattaaatgggaatcttcaaattcatcatagaccattaaaagagaacattaagtagacaatttagtgctcatatcatattcta

SEQ ID NO: 269504 - DNA, 395 bp, Glycine max
  unsure (1)..(395): unsure at all n locations
agcttnaccattcaatgaacataaaaacttgctaggagacattcataatgctctgaatatagaaatgtatgacagaacaaaattttgttctccaacaaataaacaatcaatcaaatgaatgtttattattattatgctgtaataatttgtgtaattaacagaagacctctagtccatacaatacaccggcgtgttgtcggtgctcatcctttacaaaataaatgtcaacaatcttctggaacgcgtgccacgtgagcaagctgtctgacccagcctggtggcactgccctacggcgcgttccacgttaagcgaccgggcgacgcggtccaatccgccgtagagcgtgtcacagaacctcatcatgtgcttgacatcataaacgttgtgcccaaaa

SEQ ID NO: 269505 - DNA, 622 bp, Glycine max
  unsure (1)..(622): unsure at all n locations
tttgtcactccacccaaatcttgccttcaagttcaccaaacctaacatcgccggtaaccgtgtgaaggttgtgcatcccaaatacaatggcttcttagaatcagtttgtaatttttcataataaagtgcataagcttgccaaaaaccctcttgcccaagattgggtatcatgtcttctatatgatctccgatttgtacattaatcgcctcagtctgagggattgttgacatttgtggcaattcaccatgccatatccatttagtataagtcggactgatccccttacatataaaatatgatctaatgtcgttcaatgactgtcgtctcccattcacacatttaatacatggaaaaaaatatttccccccattactcgtgcattttgttgagcaaattgcaaaaatctttaacccccttctcatactcgtcacttatgcgtggtgccttcatccaacttcgatccatgtttcatgttctgtgataccaggtacattatctcatatgtgtaaaaatctcacttatttgataaaaaggtgtggccctatcccattcangaagacatatttttacttcattcatgcttacaagttaagtagattatgttaaatttcatgaaatttc

SEQ ID NO: 269506 - DNA, 443 bp, Glycine max
agctttggatatcattggcaaagatttcctgggctttcttccaaaaagagcgacacgatttaaatgatcggaggatctccaagatatccggctcaactgattaccataacacgacacatagttgatagtcaagcttctcccattcaggtcttttatcaactgaaacagaatccgaagttttctccaagtggtcatggtgtccttgaccaaggaaccacaactccacggaagcagaccacgaaggatagtttttccagttcagctttgcagtggtgatagttggagtcccagaaaacgaaaaaacaggtgcagaggaggccatttaagagccaaacagcaaaccctaacacacaagagaggaagacactgctgagctgaccaaacggcttgccagaaagcggaagtgaaacctgaaatagacccacgaagtgatgacgaaactg

SEQ ID NO: 269507 - DNA, 318 bp, Glycine max
tctgttttcaattacgagcgtctcgatatattacgggactctatcttacatccgagtaaaaagttattgtcgtttgatttttctcaaagcttcagttttcaatttcgagcgtctcgatatactgtgggacacaatcggacatccgagtcaaaagttattgtccgatgaatttgctcagcgcttctgtttttaatttcgagcgtctcgatattttatggggctctatccgacatccgagttaaaagtcatcgtcgattcattcttcttagagcttcccttttcaatcacgagcgtatccatattctacgggacaccatc

SEQ ID NO: 269508 - DNA, 514 bp, Glycine max
gcttgaaccttgaatcttgattcttgaaatcaactttcctcttgaatcttgaagtgttgttcttgattctatcttgaacatcttgaactcattctttgattgacctttgagctttttgtcatcacctttgtcatcatctttgttatcatcaaaacatctttgaatcaatcttgattcatcatgaagctttgcgtctacagctggatcaacacaattctcatgctaaaagttttagaatggccagggatagattggcagatgatcaagccgataatatcaaattgcaactgatagctgctcggggaaaagatggccatgcatataatatgcctaatgttcccgatattgctgcactaattgttggcgattttcatccaggctcaaaaagagatattattgttgaaactcaaaatggagaattacaaagaatccatgaactgcaccatagctatctaccactacagtaccttctactctttccttatggagaagatggatatagagctgacatact

SEQ ID NO: 269509 - DNA, 617 bp, Glycine max
ccgatattccatgtggtcacctatggtttgcaaaattccaatttcagtggtcatatttttgactgaggaaatgccaattaaataatgtcgcaacgtgcccttcgcgggcgagcgagggcgaggctcatgggtgcgctttccaaaggaggaaagatgcgcggagtcgccaccaacgtttatttgtggaaaacgtcgggaaaaaccgaagaaaactggtcaaaatgaaaattctaagttcgggagttgtatttacacttgaggaaggtattaccacctctcacgtttgtctcaaaggacaacagcctatttttttagaattgtggaattgtgttatcttaacttttatttctttttattttttgaggtcgacaaaagcggggcttttgctcctacgtacactcctttggagaggaaatcagacctacgtagttctttcttaagcgtgaatcaagtgattcctttttcttgaaaggtgatcattttaaggcgttggaccttaaaaatgatccattttacttggtaagaaactgaaatgataaactttcaaaaccctatttttgtggacgagcttgactaggcgagttgattttagccttagtttcactttagttaattag

SEQ ID NO: 269510 - DNA, 614 bp, Glycine max
agcttccttgcagtgctttgcatataatcatgtgcaaaccattctgccagtaacctataaaaagtttaataaattgcaacatcacattacctgttcacccaaaaactcgctttcaataaaatctgacaattgcgcatcattgctctttgaggcaacctatcaaacaacatccaacatgttcaaatatatgtatttccactttaaaaacatcaaagtgaacataaatgagacaaatgtcatgcaggtttggatagctactatggttgattctaagacctaaaatcatggtgaaattttgaaaaagtggaagtaaccatttgttgttttagcttccaacgtggttttggaattgattatgacaaaattgaatcaaatccaaacatgctatgaatccaaaactaggaccaaacaatcttgatatcttacactgtgcaagttaagcaacttttcatttgtcagcttctccaacaacagggcaagttccattgctgcaacaagaaacaaacacaaaataaatttagtgccaaacatacaaatttggcaggggaagttcataagacaagcaaaacactttgaacaaaaagtggcttagattacatcatgtgtatttgtat

SEQ ID NO: 269511 - DNA, 594 bp, Glycine max
tcagtcccatcaaacctatcacgtggagtggtttaaaattattattattatatacaaaactgtatggttgatttatgggaaaaaagtgtaagaagagaaaaataaggaaggaaaaggaatagaaaatatataaatgatatatttttttcaaattgtatgataaaaaagaaataaaagataacaaaattaataaaaactgtgtttaaaattataaaaaaatttaaaacaaaaaagataaaaaaaaaatgagaaaaaatttgtttaatttgtgccttgaaccctagcttcagtgccatgtgcatgagaagcctgtcccgccagctctaatggcgggattgctagctgaaggtgtcccgcaagcagtactggcggcaccaccctgtaccgcaaacagcattggcggcacccaccctacccaccgtctctcacctgtcccacagatgccatcagcggcacccaccctctctcacctgtaccgcaaacagcataggcggcacccaccctacccaccctctctcacctgtcccgcagatgccatcagcggcacaccctcacccctctctcctactcagcacatgtcccgcaaccgggact

SEQ ID NO: 269512 - DNA, 497 bp, Glycine max
tttttctgcaccagcgaggctacttaaatgactggtggaactccaaaatatcctgctttactgactacccttccatacatactttgaactcaaccttcatacttttccgttcttgcttaaacgtcacataagtcaaagttgtcttcaaccggtgatggggatccttggcaaggaaccgccgcctctatgttgcgggaccccactgatagtcgcctcatatgacttactctagcgtggaaattatattcccaaacttgtataattcccgtatttatggtggctttggagaactcttgtacataactcttgtcctatggttagagctgtctttagaacttgtccatcggatttcatgatgagagctgtgcattctcaggtaaaacaagaggctatgtcctgaagtgcaaaaagtgacagttgagcttacctcaccaattgggctaagcgcgcatccaccgcttagcacatttttagcgtgcttagcgcgaatgagaatc

SEQ ID NO: 269513 - DNA, 63 bp, Glycine max
  unsure (1)..(63): unsure at all n locations
tctcaaggaagctaccaagtctataaatagaaagcatgtgcacnctttttttttttttttctc

SEQ ID NO: 269514 - DNA, 397 bp, Glycine max
ttgcctaaattgacgctcgggttcttcttgcttcatggtttattggcattagtcaaatcggccaatcaatgataggttattaacattctcctagtcctgatagtacattttggctcttctcttttcatagttgaaatatcatgaggctggaaggaagaaagaatacttgccacaagttggtcaatggaacgtgatgaacaatgttatcttatactttaaaagattatcgccaccgtataatttttttaagtgaacaaaaactaaaactacttgttcccaaccgaatgtaactctagttatttcaatgccaaaagttataaacggaagcactgtcagatattgggcatgtcattctagtgtcgcattttacataataggcatgaacttattcgttata

SEQ ID NO: 269515 - DNA, 727 bp, Glycine max
tcaacaatgattttccatttatcccttcatgttcaggaatattctttcttgcaagctaagaattgttgaacaattacttattgtatgatattgatattttttataaccttcatctgattttaaatctaaaatgataatgtaaagagataatgaggggaaaaactagaataaatattattttcaatttaaattcaaactatcttttgttaatagataacacaataatttttttaataggagagggacaaagaaaaaaaaaacaaaagcaactacaaatgtggaaacttaattcccacacttaatcagcttgaagtggatgtgatcattagtagttgcttcatgtttttctaaaaaatcaactgatacattctattataaagatttaatttgaattttacataagacaaatatgatagttaaaaaaactcttataagataagctatataaagaggtgactgataaaattgtataacacattaaagaaaacattaaatactatacaagcataaaaaatataagattatatatatactatgtgtgtatatataatcaactaatgtaattagcttattcaaattaataatagctataacacgtataaatatttttatatgtataaattaattaaaacatatattggattttctctctccctctctttcggttaaaagaaaagataaattcaattattaaagataatgtgataaatttccttttaattttttt

SEQ ID NO: 269516 - DNA, 332 bp, Glycine max
  unsure (1)..(332): unsure at all n locations
gcaagcttntatataagctgaacctttttatcaacaaacacattttttttggaanacagaaaattagagcttagctcttttatggtagggagagcgacccccctaaaacctggagggattcaagaacacccgggctgtatcaaaggactggcacaacctttgagtggggcccttgcatgacagagtgatggccggcttcccttcatcttcaccctcgatatctgaaaccactggtgcagaaaaaccacctctgcccaaaaatatctcggggccataactcctgcattacgcactcgaattaaatgattcttgagccgaaatagaagttcaaa

SEQ ID NO: 269517 - DNA, 566 bp, Glycine max
tgaaatagaacaacggatgccctccagaaattccaatggtcataacttttcacacagatgtccgattcaagcgcataatatatcgagacgctcgaaattgaacaacggaaccagtcgagaaattcaaatggtcataacttttcgctagaatgtacgattctgggacataatatattgagacgcttgaaattgaacaacggatgcgctcgagaaattccaatggtcataacttttcacatggatgtccgattaaggtgcataatatatcgagacgctcgaaatttaacaacagaagctctcgagaaattcaaatggtcataagttttcacatggatgtccgattcgggcgcatgatatattgagacgctcgaaattgaacaaagaaagctctcgataaatttaaatggtcataacttttcacacgaatgtccgattcaaggacttaatatatcgagacgctcaaaattgaacaacggaacctctcgagaaattcaaatggtcataacttttttctcggatgtctgattctggcgcataatatatcgtgatgatcgaaattgaacaac

SEQ ID NO: 269518 - DNA, 614 bp, Glycine max
  unsure (1)..(614): unsure at all n locations
gctgagcctgtaagcgcggattttaaacaccgccgctgcagctctcagttgattcaagaaatttttttttaacaacctcactccgctcctttagagactgtcccattggaagagaactgcattctaccgcagggggctaaaaagctgtaagcaaaaaagctgagatagtttcttatgggtagtacaaccacccttttgttttctatgtgtgaaaatattaacattgggtancagaatgcacattggtcatataatcctggcgcgtctctcccacagggtgtgaccaataatattgggcgcgcttcccagacaatgttggaaaaaaaagagcttgacccggtcttgaagcaacaagatgtgtagaaaaaagactctccttgtgtgctcctctggggagaaatttcacacctgaacgcgcgtttactttcttcatactgaagcatctaaccacatggagcacatcaaatctcactgcccaaaacaaaaaaattcccttttgaagccctaaatgtgacctgaaggatgggcaactcgtaacccaaaagggggggggaaaacctgcgagcttcttaatgttaccacacccctaagcgccccctaagctccgccccaac

SEQ ID NO: 269519 - DNA, 497 bp, Glycine max
ccttgtggtcaccacataacagccttagggcaatctggtcctccattgtttggaaagatgaaatcccgaatcctggaattggtggataaagcatttgtcaaccatggcatgattttcttgaagaaatggactttgatgatggagatgaaatctctctttactatagatattatgaaaaaatttgggatattgtaattagaagccaacaggattgggactattgtgacaccgattaatactgcctttcgtagtctgggatttaaaaaaaaaatcttactgatgtaatttcgacaaacaattaccaaactctatgttgcatgatttgactttaactttatatcgctatgcataaatgtactgtcactctatttgatagtttatcaacctttactaactcgcttaccaaacaactcgagtatgtgtacgggtggcataatattatatgagttaatacatgacaggaagagatagaggtggtatgtatacaataattctaa

SEQ ID NO: 269520 - DNA, 849 bp, Glycine max
  unsure (1)..(849): unsure at all n locations
gccttgataccgtcgtaccgtccncggcgccctctatacagttcacctgcacgcgtggcatcttgntctgaaaccaaaaatataatgcccttttcttctttgtgaaaccctttactattctaaacaagtgctgataccactttaatacataggagcaccacaatatattttcctgtaagtacacatatgtgcatgtgcactataatttgtctgatgacgctacctacatactaaggaagtcccctagctataacataggtattcatgctttaaataatttattggcaagctcaaataaacagataaaatccttgatggagcaatctctatatctggagaaaaatagacccaagcctgttaggttttgaaagacttcttttaagcattggttagaattatctattgtcctcttataacctccaccaggatattgctgtacgaagaacctatatccataaaaatcaacaatattacaaaaaccattaattgtttcaaacaatattctacgagaattttagaagcgttaccctcccccaaaatttcgaaatattatattctctccccaggtaacttcctcaaaatttttttcgcgccttgacacacaattcgacaggcactcttcaaagacgtaccactatgcattcaattaaatgggcttttctcttctaaccagctgtgaatagaaccnattatcttaaagattgtaacaaagttcctacgaaaacccccaaactaaccctcctgttgagctaaacaacactcagtcaaagctaccctcgccgattgtggcagaaaattaacattgatccaacatgacaacccttaaaccaaatcccgcaccatataaac

SEQ ID NO: 269521 - DNA, 478 bp, Glycine max
tgtcatacagatcggagatctgaccacccaaattattatatgatatatcttagtaagtgagatgttgaagatttgatagtgatgatggaatctcaccactaaatttagtgccaccaaagtgcacaggttctagctgcatgagattagactcacatcgagaaataggtccttcgaagaccatgattcaaaatccacatgcttacgggggtatttggtttggttgtatgctgtctttattttcaccggagatgcaagatggtgatggaaatgtgtgcatgttggattactattttcatgtgcactgataaatatattcccccatgagccaggaactggaaacaatggtatcttgttattacttgatgccaggatcctctttttgggtaaaatgaaaatgcggtggcaacgatgtcaatgttagcaaatctaaataaacatctccttttgaaaacgcattttcagtgcctttatttcttga

SEQ ID NO: 269522 - DNA, 402 bp, Glycine max
cctgcaatctttacaatataatgttttcaagaattcaaattatgtttgttaggtcgccgaatagaagaaaaaaatatcttttaattgtgacacggaacatgggtgtctgacacctgtccaatgcatttccatgaagcgacattgctaaattattgtatgccattttaaagggatgatactgttttatagccttacccacatgcaaagataccaggatgaaaaaactgggtctattggagtgcggaacccgcataagtgctttctactgtagtattatgacgcatagaccgtgatattgctgatagtgccagcgatatatgaaaggtatggggacattatcgacattcttggtgaaaaggcatgggtagaattaaatatacaatatgcccattggatgaaaaa

SEQ ID NO: 269523 - DNA, 449 bp, Glycine max
ctgggccgatctcacatggttggagcattctcgctaaacagcgttaccctgattggtctccctatgtgcggtgaaagtgaccgggcatacccattgtgcggtggggcctgttatgtactcctaagtgccccagtatgatttttcactaacatggtaccacattgcatatatgtttgagtcttagtataattgttgcattacgcttgtgtttgacttccattgagttaacaattatgggttgatattattttctggaatgtgtgaacttgaatggatgcgaataatgtgtgtgattttgttaagtgatgttgtctttaagtattaaatgttttacatgttctgatgttttattatatatgaatgtgataactcattcccggtatgtgtttggtgtttggactgattgccattttggtcaagtgagccatcacatgatgaggttcacgcta

SEQ ID NO: 269524 - DNA, 576 bp, Glycine max
  unsure (1)..(576): unsure at all n locations
agctttagcttcttaaggaagttttctcaaagaagcttctcaaggaagttttcttaagaaagcttctcaaggaagttacctagtctataaataaaagcatgtgtaacacttgttataactttgatgaatgagagtcttgtaagacacaactcaaagttcaacttctctccctttttcttccttcaatttcgtgctccctcctctctttcttttagcaaatgctcacccccccctctaaaatttaattggattgggcttctcccaattcaattaaatttattttcaaccacacacatcaaatattcacttaatgcatgccaaattagaaaactacccctaatacaaaaaactagtctaggtgccctaaaatacaagagatgaaaaatcttacatttctagggtaccttaactatattgtggagccctaaatacaaggcccaaaaataatgaaaccttaatctaatatgtacaaagataagcgggctcatacttagcctatgggtccgaaatctaccctaaggctcatgagaaccctanggccttctcctgcatctctggtccaatcttcttggagtc

SEQ ID NO: 269525 - DNA, 500 bp, Glycine max
tgtagaatggctagacatgatacatgtcagggtttggtttggttcaatgataaaaagggatgccccacattatttccatgacacaaatgcaaaaatgacgatttggaaattttatgcaaaactggttatgcatgcacctatgcggacactcaagtgtcaaatttttatggtcatgtgatgctagggctcaagattcattttctctattttagtcaacccaacgtttccaaaatatgttcttttatcaatttgtgcattcatccgagtccattttgggcgtctgggaaaattttcacagcattcacccttcaggtgtatacacattttttcaaaaactagttatgatcagtgaatttttccaaagaaaagttggaagtcatctcttttcaaaagcatgttggtttttcaacttgacaacttattttttctcttttctccttctttttttttttatcattaacggttggttatttcttttcctgggtttttttttttttttt

SEQ ID NO: 269526 - DNA, 573 bp, Glycine max
catgcaagcttcaagaattatggcctcatcaaactacttgttttctctaggaaattctataaataaaacttccattttttaaggaatggggtaaccaccactggaaaacccgcatgcaaatctttatagaggcaatagatttaaatatttgggaagccatagaacaaggaccttatgttccctctataatggccggaagtgcaacaatagaaaaacctagagcagattggactgaggaagaaagaagattagtaccatataatttaaaggccaaaaatattattacatctgccctaggaatagatgaatactttagggtttcaaattgtaaaagtgctaaagatatgtgggatacactacaagtaacacatgaaggcacaacagatgttaaaagatctaggataaacactttaactcgtgaatatgaactttttaagatgaatgtaaatgaaagtatacaagacatgcaaaagaggttcacgcacataggtaatcatcttgcatctctaggaaaaacttttcaaaatgaagatctagtaaataaagtcttaagatgtcttaatagagaatgac

SEQ ID NO: 269527 - DNA, 543 bp, Glycine max
tgctagtattagagatattttattttatttttaaaaatggtgctgatgccatggtagaatcccttcctacatacttttagttacttacagtttaggatactaacacccccaccacttccatggacaatgctgcaagtcagatactgcattctcctctctgtttgcctagccttattgataacctatgatgccatcaaagcatgtgtaaacattatcctatattttgttgaaaatagtattctaactatgatgctgatcttgctgactgtaggaagctgcagccagaggtatccttcccagattagttttgatctcttcaccattatttttatgagttaaatttcgatataatgtcaggatgtttttttttatgttgtcattgagtattaacttttgtcttatgaatgttgcctgttatttttcatgctttttgttctcttgataacaaatcagttgtttcatctgatgatgaaatttaagagattgtaactttgataatatccctctgtaacaatctttattatattttttaactctatattt

SEQ ID NO: 269528 - DNA, 400 bp, Glycine max
agcttgcacaacaagtaactaaatttattttctacaatatgaagtaattaactaactaactaactaaattccactaatatatagagtgactactcaaaagtaaaggatgtgccttgattaggcccatctaatctatctaattaaaccaattacacaaaataaagcccaaactcgtagcccaattattcaagtgcagaagttctgacttccaagctcaatttaaccctcaaaatggcagaattggccaaatcttatttgtgaaaaaattgaacctcttgttattagtttttgagggactactcacacgctccatttggagttctgtagtgtcctataagccctgcacaaggcagataagtcaagtaggcacaattatcaattaagctcaatgattttccta

SEQ ID NO: 269529 - DNA, 588 bp, Glycine max
  unsure (1)..(588): unsure at all n locations
tctccttccatgacttattctctagtagataacacatcctctcacctcttattctttatcttccactgcaattccatggctgaaaatcaccattgaaggacctgattgaagctcaaagatccagcctccatagaagcttctcaagcaagcttacatcactatggttttagctaacactactaaaaatagtgtattccacgacgcgcatttaaagtcgatcgtcacaaaaccgtctttgtttgggggcggtgacatttttgtaaatactggcaacattttaaagacgactttcttgaaaccatctttaaatagtataaaacaaagacggtttttgcaaaactgcctttattttacactatttaaaaatagtttcgtgaaaacccatctttaaatttgggcaattttaaatttaaacgcgtgacttttcttctcttcgcttcacttgctctcctcttcctaatgccttttctcctcttccctangctctcgagaagacaccatctagtaaaatgagggtggaggagctgcgaacggagctcctcaatcatggataagctcttgctccttccaagtttgatttgctttcaa

SEQ ID NO: 269530 - DNA, 488 bp, Glycine max
  unsure (1)..(488): unsure at all n locations
cactctcgtcacgaaacatcccgtggggcaccttcgattgagattccttctatgctcgcgaattagaaatcattcccgaataaagataaattgtttaccggccctatattctaccacaagaaactgtcacctttccagggagacctcacaatgttgtggcaatctaataaaatgcccttaattgccaacattacctatggccaccaacataactggcctaagcctaccggttgggcacatgctcacatagctgctaagaaccaaagggcacaaaaacctttgggaataaccccttggggatcaaaccaacaacccgccgcgagtcaatttattcaagatacttactcgttcaccaaaaatcccccgtccccgtgggtgccctaaaacaacaactttccaaccaatgtgtccctttaattcnacccaccttgtgtccctcaccgaaaggttttttttttacatcgcgttaacatacccaacttccaact

SEQ ID NO: 269531 - DNA, 55 bp, Glycine max
tgtcttttcaaaacatgttggtttttagcttgacaacatattttttctttttatc

SEQ ID NO: 269532 - DNA, 352 bp, Glycine max
tccttgatagaatgtccatccactacaacatgttttgtgcgatcaagacaaactggattgggtgctctagctatgggtgctttattaacacaaaacagatccattggatcttgagctgaacacatgacttactctacctacctcttctaccagaagatgcctcacgctcatatgaccatacctctaaactgcgcttctgcactagataacacaaccaccttctgccttttactgctccgagagacaagatttcctcccacaaatgtgaggtcacctgatatggaatgtttagtagttatactccctgccccatctgtatcaatataaccctgaatgtgctgatgctatcttt

SEQ ID NO: 269533 - DNA, 688 bp, Glycine max
tgtagcaagcatcgatttttaataggcataacccgttcaatccatacttaagaaccggtccacaaataacatcgtaaaacaataaaatatgtaactccaattcgggaattataactataccaacctactagaaatcatatacaaattaaatgaaatgtaacaaatttccacccacgtccattatgtttcttctatatatattattgattagtatatatgatatatacttaaaaaagttcgagggataggggctaaacccctgtgtgccccgtaaattcgtcccggatgataccccttgttatcaccttatatatgaatacattctctgctgataaataaatagaaaaattatgttcaatttaattttgatgatgtcatgtaattgtaaagtaaaattgtgatagcttatgaactatgcttgcttggttttctattttgttgcatgattgtgtgtgtgatgcgtatttggttgaaattctttgatgttaggctcacctaagcacccctgatagtaagattgaagtagtcatttataacttacgttttcaactatggtgaaataactatttaaaattgttaattttagaacgaagaataaaataatcattaattaatagaacaaataattgatgtctagtgctttgtttttacaatatgtaaatgtgtgcaaataattgattatacactt

SEQ ID NO: 269534 - DNA, 688 bp, Glycine max
  unsure (1)..(688): unsure at all n locations
aggcccggatgtgacatgtttggacgcaggattataaagcgccgctgcaagcatctgtatgacagaagctacgaagattctctgaagactcagcgcttgttcgcgaaagcantcctggcagtgaatgctatgcaaaggctaactcttagaaggaacttactggataaacatcccttgacacacgggatgggcgaggtgcactttgaatattataacaaaatggacccctattaacactcaggccatgccctctaataatggcagagctaacaacaattgcctgcgtttgaccatgtacgtttgtcttccgaaaccctccgactttttaatctaccccatgggtccacgatccaaatgcttattgattggcctttggaaattttgaactcgggcgatttatcaacctcagggttttttacagagaatccccctcaccatatgttaatggtgcttgtcaaagatggttccttgcggattaacgacccacccccggatggattttctaacaatcatttcttcatggcagaagatttatttgtacaaactttgatgcagatttatatgacccgggcattcatgaaattcgtgggttgagaaaaacaagaaaggaaatattttttccttcaaacaaagttctttgtttccaaagaaccacgagggggggggggtatcccccaggtcgttttcg

SEQ ID NO: 269535 - DNA, 629 bp, Glycine max
  unsure (1)..(629): unsure at all n locations
cgttgtgnccccttcttccttcgtaacatcagggttcccacgcccctaagtttatcgatagatcaagtgtttgaacttgctctgcaccttgaacactattcttcttcttctttttccgggggggtgggttaaggttctgcgtagatgtttcagcattttcctcttgtggaacaatcgagactaatgagtctgccaagggtttaaggcatacctcaacctgnggctgctcatttgattcctcggttatcttctttctctttctcttcttcttcttcttcttctcagtgccatgttccggggaagcgagtgtttgagggttttcctcctctctgtgcttcttcgcatcggagaactcgctctgcatattgcaatggccacggccacctatgcggccaagctccttggctaatgcaaatcacgtaaattagggtttaatgcggggtttgactctttttctttttacacgaatttaagtactttttctacgacatgaatttaaggatgcactttgactgtatcaattaatattaattaatctcaatatagtatataaaatatgtttgctgacaataggtctcactctttttttaaaattaaaatacaataaaaaaatattttcaatcattttt

SEQ ID NO: 269536 - DNA, 564 bp, Glycine max
  unsure (1)..(564): unsure at all n locations
agctttctagcttttcattggtgtattttgatctccttttggtgctctaaatcgngggagtgtgctcaaatatatggggcaattttgatttgctttcttgcttgattaggttgaattaagggttggtatgagatggccctaggcctataatgcattttgaaacaataagacatgccacattgtccccgttcttttgctattgatgcctaaacgcgcgcccaccaagtgttcggtgaaatgcctcaatggcattagcgtgtgacttttgtaaggagacaacccatggggtattttggcttgtgcatattttctatttttttggaatatgtattcattcccgaaaaaggctagagtaattgccccacatatatcctagtcctagaaactgaaattttatgcaaaaagaacacaaaaggaggtgcatattggtaaaattacccttttttggcccacaatcagctatgggccacgctacaatattttcccctagcctagatgggttagaattttgctcatcattaaatgtgtagtttaaaataggtaccaaaatacctttggcaattt

SEQ ID NO: 269537 - DNA, 687 bp, Glycine max
tgtccacaaaaaaaaagtcactaaaaaaggttggaaagtttatcatctcagtttttcttatcaagtaaatggatcatttttaaggtccaacgccttaaaatgatcacctttcaagtaaaaagaatcgcttgattcacgcttaagaaagaactacgtaggtttgatttcctcatcgatggagggtacataggagcaaaagccccgcttttgtcgacctctaaaaataaaaagaaatgaaaggtaacgtaatacaatttccacaattctaaaaaataggttgttgtcctttgagacaaacgtgagaggtgctaataccttcctcaaacgtaaatacaactaccgaacttagaattctcattttgatcggttcccttcggtttttctgatgttttccacaaataaacgttggtggcgactccgcgcatctttcctcctttggaaagcgcacccgtgagcctcgcctcgctcgcccgcgaaagggcatgttgcgacagttggcgacttcactggggaacttttgtgagttaggcctattttaaggaatcgtggatttgtgacactttgtgtgtgcattttttgaactgtgttaaatgtaaataactgttgtctatttcacattctttacactgcattctaagcacccacgggtttgagtagaaatggggccctataccgggtcatgggaat

SEQ ID NO: 269538 - DNA, 491 bp, Glycine max
ttttaatggtaaaaggtataagacacccctatgtttttctttaacccaaaaatggccttaccttaggacctgaagtggtacaacaaaccacaaagaaagtcaatttgatccaagaaaggatgcccactgctcaaaataggcaaaaaggttatcatgataaaaagaggaaggatttggaattcaagggtggtgatcatgtattcttgagagtcacgctgtggactagggttggtcgagcattgaaattcccaaaactcacaccttgctttatcggccctttccaaaatcttaaaaaaattggccctgtggcataccaaattgcatttcccccgtctctttttaatcttcacaatgtctttcatgtgtctcaactccctaagtatatccatgatccatcccatgtgattgaattggataacgtacaagtgaaagagaatttgacatatgaaacattgcctttgacgatcgaggataggcgaacaaaacaccta

SEQ ID NO: 269539 - DNA, 590 bp, Glycine max
tatgatgcactcaacattaggcctcaaccaacactttctttgtgggtgatttctgtttttgtattatggacatgatggataaatccaatccatatttttgttgttgttgttagccttgtcactctctttctcattgttggtcttcctcctgaatattttatctgagcttggacaacaccctttttagattgttcttttctcaccattctcctttttttcttgtgcctttttaatgcattgaatagctatattagggtaatattagacaaatcttatgtattttctaaagaatggattgaggcttgaaatctctgaagaacagtaataagtattttcttaaccattttagaatcaaaaaattcaaagccatgcaatcttacttatttgcaatgttgagaagtttattgtcgtactcttgaatcttcattgtttgacttcttcaatttttatatctcaaattctataaccagattcaacacttccagggtctttattttttcttttccttcacattcatccctaaggaactaccaaattcccaatgcttgattgtagtgaattttcttgtgagatagcagaaaaataacaag

SEQ ID NO: 269540 - DNA, 445 bp, Glycine max
ccgcttatccttatggcctgcctcctgacttcaccccccgtgcctttttggaagagtgaagccaagcacctacttttgaggggcaactcccaccttatgaagactatcccgggcaagacgatggggaaggagatacccatcttggccccctgctccacctcaaagatccgtccccgcatgaactatcccaaccgaacatagtccgttataccccggcctcacccacacccgtaaaaaaatctgttccttttgcggaagataagggaaagattgaggcgcttgaagagaggttaagagcagtcgagggccttggcaattacccattctcggatttggtggatttatgtctcgtgcccaacatcgtcatccctcccaagttcaaagttccgaactttgataagtacaaagggacgacatgtccgaaggggcattttctgatgtattg

SEQ ID NO: 269541 - DNA, 427 bp, Glycine max
tgcatgatttacatctccccctttctcaagcaaattcttcttgatatcatcaaaatcttcatgatcccgactcgttggtggaggatgcgtgaatgacaatcaattcatggggctaccaataaaaatggagaatggaggattagcgaataacgctacgcaatcaattcgcggttctaccgactcgttggtggaagatgaatgaatgacaatcaactgatggggctgcgaataaaagtggagaatggaggataggagaatagcgcgtggcaatcaattcacggggctgcagactcgatggtggaggatgcaagaatgacaatcaactaatatggcttcgaataaaagtggagaatggagaataggcgaacagcgctaggcaatcaattcggggggctgccgactcgttggtggaggatgcatgaatgac

SEQ ID NO: 269542 - DNA, 487 bp, Glycine max
gcttgtaattgattaaaccgatacgagagatttctctgctagctagaaacatttatgtaatcgattacgatcaatctgtaatcaattaaaatagaaagtcttaacttcaaaaaaaatcttctaactttataaactattcctcttactcctacaagatgatgcatgatgcacatatgaaataatagagactaagatggaacacacaatataacactcaatacaaatgccactcaagagagttgggcatgtaaaagacaaaaaattttcaagctcttcttcaagattcaaggctaggtctttatgattctccccctatctataacaatctcccccttttggctttgatgacgccaaacttgaattttccatttgagtacatttggagagtcttaagagtagagacttttcttagtcaaacctaaaactttcttaacattaagagaagtacccattcatatcatcatcatttagtagagttatatatgaa

SEQ ID NO: 269543 - DNA, 362 bp, Glycine max
tctcccctattttgctataaatagggggagaagtgaagaagaatttggttcagccccttaggcagttctctctctctcgaaatagctgaggaaaattagttccatgaagaaaatccaagccgaggcgcttccgtaacggttccgtaacgtttccgtgagtaattacgcgaagattctcgaccgttcttcaagattcatcgttcgttcttcgttttcttcggtcttcaacgggtaagtacctcaaaccaggattttcaattcattctatgtacccgtgttggtccacatttcgttgcatgaatgtttgagggcactccatttactgtgaatccccccttttgacaagcttaacccctttattt

SEQ ID NO: 269544 - DNA, 487 bp, Glycine max
agctttgagtatcacactgctttcgatggtgttgcattgtgaattgtaagctgtttgtaccctttaacatcatctatacttggtgcatttttattttctttcattatgaataaatatacacaagattaaataatttcttcttggtataaggttagacatattgagtgaaaacaggattttggaatataacactcaattagagtcatagacctaaagatgtccttggctgttttagttttgtaattgaccagctctagacattctagtactggcagcaccagatcagaatttaaaatctgagtgctattggggctatatctgatcgggcttgaatgttgacttcactgagttggatttgtattcactttaactagcttaaaactaacattctttcccttgttgcatatagaagtaatgttaggtgaatatgctttatataaatctatgcagagtgttgtagaatacactcaattgcaggttgatatgc

SEQ ID NO: 269545 - DNA, 227 bp, Glycine max
tttgaagcattcacttgacaggcacacagtaatgaaatgtttttcccaaaagatcggatctaaaaaatctatagcttctgagctaccgaacctaacggctggttactaaaaacactactacttcttgctattatgttaataaccataatagttaactcttaaattgatgatgatcatttcaattttgcacatgtttatgaactactgattaaattggttcttaatga

SEQ ID NO: 269546 - DNA, 960 bp, Glycine max
  unsure (1)..(960): unsure at all n locations
ccccccaccgcccaaactggacgagaaaaacacctcatacaaccctgcatatcaaccgtcaccaatangtgcgcgatgcctctcaaaccnccccccaaacccgaggtttgataccgtcgagaacaccgcgacctattaagaagaaccgcccggcagccagcaatctaaccgaagaatggtggagaaccaaccacttttggtgctctaaatagagggagcgtgctcaaatatatggggcaattttgaaccgacttcctggtccaccagggaaaattacggggcggtataagaggagacaaggccaaaggagcatccaaacacaataagacatgcgcacaagcccacagcaccctgatattgaagccaaaacccgcgagagtcaattggtcaggaaaacacacaaatgcaagtatagtaaaaccatggtcatgaggacacccccggggaatctcggagatgagccctacacactatatagaaggaatgcgaacacattcccgaaaaaaggccaaaataaaatggcccaacactaacccaaacactagaaaactaaaaagttttgcccaaaagaagccaacagggggtggctaatggggaaaaggcacccttgtttgggcaaaaaaacaggtttcggcccaccctacaaagacataccctagccctagaggggaaggaaaatcgccaatcagaaaatgggtagggttagaacagggagcaaaaataccctgcggcaaaacaaaatctaggggtagaacagccaaaaaacatgggacggcaggccataaaactcatcggtaagcaaaacggtttcaaaaataaaaattccataaaacttgtgcgataatatttagaaaaaaggatccatcatagaaggcatcccgcagaattcacaccaatataagaggcccaagggaaagaaccttgaagaagcaccccctttgctaccaaacgatactaacc

SEQ ID NO: 269547 - DNA, 641 bp, Glycine max
ttttgtcactcacaacaactccacaccatccgtaccacccaaaccactaaaaacaacataaaccacatcaaaaccatgaaaacaaacacatttataagcttccaatagtgctcatggagggaaaacgaaaatgaaaaagaagaggggaaagatgagagttccttaccattggactagccctcaaactcgagtaaatccctggtccaacgtcccttaagcaaaggaattcaaggtctcaagctctccaatgaaggactttctgggagagggagaaaatagtcaaaatcaaagtgttttatgttgtggtttagttttaggtcaataaaactgagcatatgactcttcctttcctttctatttacgcccaaacacttcctaaactcacccactatgttttcataactcaaggcccactcatctcagccaaacattctaaaacttactatttacacctaaacacaaggtttttcacatacataatcataatcatatatacaaacatcacttcataattaattacaagcacttaaactaaattaaaataaattactcttacaatctaattaaaatcacttaatcaaacattatgaaaacccagtgttacaaatgtcaacacttgaatagtagaacttgacctcgtc

SEQ ID NO: 269548 - DNA, 664 bp, Glycine max
  unsure (1)..(664): unsure at all n locations
agcttcaagaaaatcaactaagacatgataacatatattttctggattagcagtataattaaggcactataatatatcatcgaaaagatctggtacatttttcaaccaacacacataaaagtccaatacaagctttgtttaataaatgtaacagaaaaaaatagcttcaagaaaatccccattttacctgaagccttgaagcattgtacataggtacggtgaaagtcatgctgacaggccctgcttctttcatgatatttcctgtgctcataacaaacacattaattcattacagagaacaatgccttttgaaacattaagcccaaacatagttatcagcattgtaccatgtaactcctgtgaaaatgtcagctttgctcgtaaagtatgttcagatccaccaacaacctgtaagaggatggaccagccattattgtcatctattaatatgactcattagcctcaaatacccaactgaaggattctntatgaacatccatagatcagtggttaaaaatatactgattattagtggaaaaacggacaatcaatattacctttttcaaaccccattccagtcttttatttgcttccttaaaatagtggtgtgtcccactgctccagttctaactcaaaagtaacactgaaaatttgaaaataattt

SEQ ID NO: 269549 - DNA, 834 bp, Glycine max
  unsure (1)..(834): unsure at all n locations
tccctgcnttgttgantcattcnttagccgcctattgatatttcaacctgatttagatttccattcagtggtttcattttctttcatttttttcttccaaaaatttgtaaccggtggccctaaccctaccgtttttaagaaaggtcagaatgggatttgctcatgtcatggattaaaaaaaaaaaaacctcgtttttattcagcttatgaaactgcctagcttttattgcctgaaagggctcatttttaaaaccaaaccaagtgcccccggttttaagaagccttttggattctaaaccactggtcccttatattttcaaccaaatccagctcctctcctaagaatgttgaatccatttttttaagtttcggtttttttaccccactatgatgaaatacctcccaaaatatataattatctctaaatgtatatatatagatgtctctatctacacacatttttggaaaacttttttaacacgtcccctggctgaatcttccccagattgctctatcccaggcgctgttattaataattccgtgaccacaaagggggcatcgttctccccgctttcctggtgccttttaaaactagaaggttttgaaaccaatgctctcttttaccaaacaaaaagatcccctaanaggaattttttttgtgctctctctttttctacctatactctgcccgagcaaaatgagaaaattcctgttcgaaccgtgtatttccccctttatccacaaaccgacccccttttttttttttttatttctctaagtctgggtctccacacagacacaatttcctcccgcgggcttttcggccctcttcct

SEQ ID NO: 269550 - DNA, 440 bp, Glycine max
agctttgagcaaattcaaacgaaaataactttttactcggaagtctgattgagtcctataatataataagacgctcgaagttgaatgttgaagctttgagcaaatttaaacgacaataactttctagtcggatgttttattgagtcctgttatatatagagacgctcaaaattgaatgacgaatctatgatcagattccaacgacaattactttttactcggacggctgattgagtcccgtaatatatggagacactcgaagatgaatattgaagctctgagcctattggcacgacaatagctctttactcggatgtctaattgagtgccgatatatatcgagacgcttgacagtgaatttcgtagctaggatctactaaaaaccaccttctcgagttactcggatgactgacagagttcggaaatataaggagacgctc

SEQ ID NO: 269551 - DNA, 538 bp, Glycine max
tcaacattcaacttcgagcgtctcgttatattatacgactcaattttatctttcgagtataaagttattgtcgtttgaattttctcagagcttcaacattcaatttcgagcgtctcaatatatgacgggactcaatcagacatccgagtaaaaagatattgtcgtcttaattggctcagagcttctacattcaatttcgagcgtctcgatatatgacgggactcaatcaggcatccgagtaaaaagttattgtcgtttgaattggctcagagcttcaacattcaatttcaagcgtctcgatatatgacgggactcaatcagacatccgagtaaaaagttattgtcgtttgaattggctcagagcttcaacattcaatttcgagcgtctcgatatatgacgggactcaatcagacatccgagtaaaaagatattgtcctctgaattggctcagagcttcgacattcaatttcgagcgtgtcgatatgttacgggacttaatcaggcttccgggtaacagatattgtcgtctgaattggc

SEQ ID NO: 269552 - DNA, 423 bp, Glycine max
ttgcaacatcggagaacatgaaaaattgtctttgcatagacagaaagggaaagatgtgaaaatacagttacctaggggaattttgcggtcttctccgagtcaactacactaatttggcactaagtttgatgacatgtcaacgagttacttacagaaatgatccaacaattgaatcaactcggctaaaggtctggtttccgattcaaccagtcgggccgagccgagtttaataacactgattgggagggttccttacttagtattgaaaatcttgctttcaatttgatagtaggtagtaaagttcttcttcatggagtatgtctcattaagattctcccgcatttcacaaattgaggtagaaaacatacaattatagcttattttttgaataagagtgccataaccacgtttatgataaaagca

SEQ ID NO: 269553 - DNA, 719 bp, Glycine max
  unsure (1)..(719): unsure at all n locations
tattaaatctgcaggaagctgaccagacttcaatgcctgcaatcatgtacaattgtacaccaattagatgtaccgcattattacagtccttttcataatagataagataatttcataggagtctcccatcagatcctccctctaggtctaacagcaggtcattagttataaattatcctatcatattatttaatgtaatttcaatattctaagttaagcatgagtattacacaaacaaacattaaaatccaataagcaattatctaatttagaaaagcaggcaccttttcaagcctagcaacctcttcaagagtctgagaattcacaatggcagcctgcataaagcacaaacatgtcaaccatagataaccaaaattagctgcctgatgtaccagcttctaagagaagttaactctagtttatgaatacagtcatttgctataatgtagaatggaaatgatttcttatctgaagataatatcactagagcatgtaaagtgatctatcagaaaatggtttatcaataaaaaaaattatcacatgggacaataggacagtaggtatacgcatcttacagcataattgtaacttgtaggacaatgagttacacgttcacgataaaacacggtcaaatggataatttaacaagctctanaagtggnggctagaccatgagcatttnttttttttttggaaagcagacaatgagcatttaatga

SEQ ID NO: 269554 - DNA, 466 bp, Glycine max
agcttgtaggattatggggtacccgtcatatgtggtactaggtggcgatcgggaaatggtgcaagtcgactctccacatccacaaatcacacataaatccaccatccccagttgcccaccttcaactgagctcacgtactaacacgtagcccttatcctcgttcctctcaacaccgggtccccatcaatccctccaagcttccacaacatccaagaaattcaacatccaaacatcatgaactatcaaaaactaagaaaatagggcagaggcagaaaactctgcccaaaacacaaaccaataccacagctttccttactcaaataccccagtaacattctcttcgttccaattcgttcaccgttggatcgactcgaaatttttactggaggtccctagtacataagtctacattttgacccgtgggatctgctagaaagtgtccagaacccaatatgtagaaccctt

SEQ ID NO: 269555 - DNA, 726 bp, Glycine max
  unsure (1)..(726): unsure at all n locations
tgtgactcttggcaatttctttaaaactagttacttaaaaagttgtgacttttaaaaaaatcttcagaaacaagtcatttgaataattgtgacttttggaaatgtatttttcgaaatcagtcactggtaatcgattaccattaaggtgtaatcaattacacatcaacaaatgtgactctttattttgaattttgaaaattaaaacgtttagaagctctagtaatcgattacaagtattgtgtaatcgattacacaagtttaaaatactttaaaactttttaaacataagttataactcttgaaatttgaaatcttaacattttaaaacactggtaattgattactaccttctggtaatcaattaccagagagtaaaactctttcgtaatgattttgtgaaaacttcttgtgctactcaatattttgaaaaacttttttagtacttatcttgattgagtcttctcttgattcttgaatcttgatcttgattattcttgaatcttgattcttgaaacttgattcttgaatcttgaatcttgattcttgaatctttggatttttcttgactcttgattctttggcatcatcaanataaccttggaaggcattgcttgcacattttcccttttatcttttggtttggccataattggatataacctctgctatgttgttgggtgggtatgtgtctgcctatttattacttttctagttagaaatattttt

SEQ ID NO: 269556 - DNA, 807 bp, Glycine max
cgccaggttttgttcttctctcccctttttaacagcgcagctgcctccgggagatcttcaggagtaactttagggaaaaaagagggagcaggaatgaaagtaaaaagggataatgggagcctttggtgaactaaacaaagtttcatttctgattgttaacaccgctgctacccatgctccgattctttcacgctgtagcatcactcctaatctttgttgagaaaacctttttgaaaaactttgacatacacaccttcattgggaaggttgcgacttatttacccactcccgtgtcataactaacctcaacttcttgagaagattcctaaatgatgcgtaccctatcttctctcaccaatatcattgcgaaggtcacctccttaagaagagaaaatggagctttagctccacacccccctattaatatcttgcagctgcacccccctctatacattgaatgcggtgtttttatacaatgaaaagcccgctacgtttagagactacctcataaagtccccgaagttacaaaccgaaaaccctataccctggaaggcctaggtcccagccttaaccaaggaccacctctttatatttcccaagaattggctctcactttccaacggcttgatatcttcccccggtcatgaaaacctagcgcctccctggatatccgtcccacataattagggagctgtcatcctatgtcccttgcggagaaggaattgcttccctcccccccctggaaatgtattttactaacgcctctcggcttttttttttgggtccttcctggaggcccgcaaaaag

SEQ ID NO: 269557 - DNA, 534 bp, Glycine max
  unsure (1)..(534): unsure at all n locations
tgaacctaaatatcacaaccatcaaacaaaaaatcaagtcacacacatttgattaaactataacctaagttaacaaaaaaaaattacaactgtcaactggttatcaaggtttaaaaaaaaaagtctgcaacatcaaagtttccaagtggcagggaaaggcggagagctaataacaaaatcaccaaatcaaccaacacaaatctcaatatctatcaactaactgatcgaatttcttcaagcaaaaagctaacatttaacagaattttaccaaaaaccaaggcatcacaaatccgatcgaatataatacaatctcaattcaagccaactgttcaaagattttaccaatctcgacgccaagaccctacatcccgcatatgagaaagttggaaccgaagagcctttgcatgatctctcgcccatacacggcgagttgtcagctgtggagatcctcatcgatgtccggcgggtttgatttgcccaaagccatattggacgctccttcactcgcgtncccgctgttgctgcatatagtgc

SEQ ID NO: 269558 - DNA, 489 bp, Glycine max
tttataaaatgagaagttctagactcattacgttatctaaaaaccttggggtggatccaagtgctccgatcatccatttgcatactcatgttttggtggcatactcaccgatgtttatttctttaggaatttcatcataactaagaaaacaccaaggcacccctataacactccgtccaaaaaaatggataatgaagagggcatacaggaacagatgaaggccgatctatcggccttaaaagatcaaatggcttccatctcggaggtcatgttaaaactccagaaaaccatagaggacaaagccacggcaaccgcctccagtacggttagggaagcggagccggtgctgcaacccgctttaaatccgggccgagacaaaaacacggccgtgtttggtcgaaggtatagtccgcaagcttatccttatggcttgcctccggacttcactccccgtgccactccggaagatttaagccaagaccctacttt

SEQ ID NO: 269559 - DNA, 670 bp, Glycine max
tcaacaatacattccttctgaaacgggtcgtatttctcacatgaattgagcctatgtagatatctttcaatatgatacattcaatgatattgcattttttggatcaagtggcctcaaaataattaagaaaggggggttgaattaattattaacgtgtcttgactaattaaaaatttatccttcttaatgttactagattcaatcaagctttactactaagttatgagaaagtaaagaacagaaacaataacttagacaaaagtaaagcgaacacaacaaaaagataaagagtgtagggaagaagaagacaaacacaagatttatactggttcggccacaacccgtgcctacatccagtctccaagcaaccaccggttcttgagatttccaataatcttgtaaaatccattacaagcaaagacccacaagggatgtaccctcccttgttctctttcaacaaccaagtggatgtaccctccacttgaactgatccacaagagatgtaccgtctcttcaatgtctttcttggtcttcctctgttccttttaaaaaaaattaaaaatcatgcaatctacttttagcaccaatgtatccaacatctttctttatatgtttgcaaaccatcttaccaatttttcttttggcatctttttgtggagtcacttgatgc

SEQ ID NO: 269560 - DNA, 566 bp, Glycine max
agcttctcaaggaggtgagcttatttatgaccagggtttgtttttcttagctctagcttctcaaagaagttttctcaaaaaagcttctcactgaagttttctcaagaaaacttctcaaagaagctacctaatctataaatataagcatgtgtaacacttgttgtcactttgatgaatgacagtcttgtcagacatacttcaaagctccacttctatacctattttattccttcaattgcatgctcccccctctctctttctctccctctttcttttcctacattgaagcatcctctccaaacttcttatccaaagctcatcttggcggtgaagctccttcttgcatggcttattccttaatggatggcgcctcctctcacctattttcctttgtgttccgctgcatctccatggtggaaaatcaccgttaaaggaccccattgaagctcaaagatccagcctccatagaagccccacaagcaaccttccatcactacctggacttgaacccacccgttcctaaaacaatatcccctgccacgcattgatatattggaagataatac

SEQ ID NO: 269561 - DNA, 557 bp, Glycine max
tctcccctgagcgagctgggtggcaagcttctcccctattttgctataaatatggggagaagtgaagaagaaaagggttcagccttcttggcacttctctctctctcgaaattgctgaggaaaattatttccgtgaagaaaatccaatccgaggcacttccgttacgtttccgtgagtaactacgtgaagattctcgaccgcccttcaacattcatcggtcgatcttcgttttcttcagtcttcagcgggtgagtacttccaaccgagcttttcaattcattctatgtacccgtggtggtccacattttgtttcatgtattcctattctcagcctcattatcttcttatacccccttttgacgtgcttaagccatttacttaagtcattgctcgcctactctaaaaataaaataagatcccaccgatcattagaattgtatcatccgttaatttctgttaaaatgaattccgaccgttcggtcgtgccgtaaccactttggaaatcaaaaaagaggcaccataatcatgtattactaaaaaaaaacccctttactaa

SEQ ID NO: 269562 - DNA, 594 bp, Glycine max
agcttttctttctcaatcaatctgtctactgactaacaattctaattgcaagttcacattcttgttctttctttttctaacatacacacttgttcaaactcatgaaaaggaacacaaactccatcacaatcatgcattcaattcaaaataaaagcatacaaccattttcacaaatcaacaaaagtgcttcactgtcatatcattaaaaaccaagttaaactgttcaaaatgcttcaggatgagaaaatcaactaatcataaataaaactagtgtatgtagacataaaggaaataatgtactaaaaccataattataataataataaaaatctgaaaaggaaatcagtgtccaaactggagaatcagtgagagccacaacttcctcagatgagaaattagaaagatcagcagttcatccaatcagaaaagtcagaaccgtcatctatgttgtaagatggtgaattaggagggtgttagtcgatgaatacgaactaactttgtgtatattgtatcaaacttctccaattttgtagttgttttataatattataagtactctatgtttaaatataggtataaaaaatttatactttt

SEQ ID NO: 269563 - DNA, 507 bp, Glycine max
  unsure (1)..(507): unsure at all n locations
tggctaattaacctgaagttgagaaaaaatgattatttaacacacaaaatgtaaatactaagtatttattgcctatactgaacagaaaatacttataacattacaaaataaccataaattaggagagtttgatacaatttatacaagttttatacacaaaagttagtcattttcaccgactaacaaatgttcaaaagtttattgagaagaactcccacccatggttttccgagccaattcaattgaatatgtttatagatgggctgagaccacaaaccaagcaactgctagatgcttctgtaggggggaatattgttggatcaagtggcctcagaataattaagaagggggggggggagtnnngaaaaatttttctaaaaatactctcttgaagtcttcccaactcgagatctgtggaccttgttgccttagatatcttaagaaagggggggttgaatttagataatcacaactacttcccaatttaaaacttgctctctcctttta

SEQ ID NO: 269564 - DNA, 427 bp, Glycine max
aattgactgatttcattgacggaagcctccatgttgcccttgggaaggagttctatgcccacctctattaccttgaagaccaattccctaacctgtgagggtgaaaggtcatttgattaagtttgatgaagacactcttaacactatcttgaagacccctgttattgtggaagaggaggaaatactctgtgcttattctagattgcctcctgagcctgaccctatgagttagctcccaagctctgtgtccaacggaggggattcaagcttaatgcttatggatacctagtgaaaattctgaggaaaaacatgacttccctcgctcagacgtgaaacattcttttcttcttgaacttaattcccacctcccacacttttgatgtcactcttgaccaaaccacactcatctatggctttattatgaaca

SEQ ID NO: 269565 - DNA, 700 bp, Glycine max
  unsure (1)..(700): unsure at all n locations
tgcctaattaacctgcaattgagagaaaatgattattaaacacacaaaatgaaaatactaagtacttattgcctatacttaacaaaaagtacttataacattacaaaatgactataaattgggagagtgtgatgcaatttatacatgttttatacacaaaattagtcgttttcaccgactaacaatggtacctagaaaacaaataggtacagactcccactacttgactatgttggtgtgacactgtcgcaacctacccttcggcgggagggcgacgcgagactcgcaggatgcgtgttccacgaaaggaatacgcgcggagtcgccaccaacgtttatttgaggaaaacgtcagaaaaaccggaaaagacgcgatctacgaacttttaagcgaaaggttctggagttgtatttacgcacggggaaggtattagcaccccacacgcccatcccaagggatggcaacccttaatcgaatgtgcaaacgtgactttgattattatgttccctttttatgtctttatatcctttataccctttttatatttttttctttttgagggcgacaagggtgtntccctttgctcctacgtattcctcaattgggatgagaaaatcagacctacatagttcttttcttatcaagtgatttctttttacttaaaaggtgatcaattttaggcgttggaccttgaaaatg

SEQ ID NO: 269566 - DNA, 451 bp, Glycine max
  unsure (1)..(451): unsure at all n locations
agcttggagaggatgcttcaatggaggaaaagatagatggagagaaagagagaggggggagcacgaaattgaatgaaaaaaaagggagagaagttgaactttgagttgtgtctcacaagactctcattcatcaaagttacaacaagtgttacacatgcttctatttatagactaggtagcttccttgagaagctttcttgagaaaacttccttgagaagcttctttgagataacttccttgggaagctagagcttanctacacacacccctctcataactaagctcacctccttgagaagattcctaaagaagctagagcttagctacacacacctttctaatagctaagctcacctccttaagaagagaagctagagcttagctacacaccccctataatagctaagctcacccncatgacaaaatacatgaaaaaacaaaaaaagtccc

SEQ ID NO: 269567 - DNA, 524 bp, Glycine max
tgctctctaccaagtcctaaatgacatttcaagctaggattaactcacttttatctccatttaccacaaaattcagacttaaccttccaagtctcaaagccacatatctgtttccactcataacatcgcatgggtggcttgataaccctaagatgactctaccattcatctataacagattcccataagcaatttcagcatataaacatcacaaacatcatcacataaaccctaaaatagaatgggtatgtctatctcatccaaacatggcaatttcaacgagctttcaacaaatgtctgcacaaataatcatcacacagcagaaacctagcaagactacccatcatatctacccaaaccccatacccacgaaaattaaaggagaaagaagtccacccaacctgaaatttcgaagtcccactcgtagccacggacttgacgaccccgaaaatgccctccttttgcgatgtggggcacaaatgatggccaaagggtggagctttgttggggtttcaatggagaat

SEQ ID NO: 269568 - DNA, 132 bp, Glycine max
agcttggagaggatgcttcaatggaggaaaacttttttttgttataatgagacacatggggggggtgcaactccttctatcattcatttgcatacgtctgtttttgtgcctttctcaccgctcactatactt

SEQ ID NO: 269569 - DNA, 528 bp, Glycine max
tgcttgttgagcttgtatggaggatggatctttgagcttcaatgttgttctttaatggtgattttccaccatggagatgcatcggaacacacatgagaagaggtgacaagaagctccatccactagggaataagccatggaagaaggagcttcaccaccaatatgagccttggattagaagcttggagagggtgcttcaatggaggaaaagaaagatggagagaaagagagaaggaggagcactaaattgaatgaaaataaagggagagaagttgaactttgagttgtgtctcacaagactctcattcatcaaagatacatactgtgttacacatgcttctattcatagactaggtagcttccttgagaagctttcctaaaaaaacttccttgagaaccttctttgagaaaactttcttgagaaggtagagcttatctactcacacccatctaaaaactaatctcaccttcctgaccttgtacttgatcataccagaaaaagtccctactacaaagacttcccaaaat

SEQ ID NO: 269570 - DNA, 408 bp, Glycine max
agctttgggaagatattgaggtatcctccatgcaaattataattcgggcaaaaaagactctgtcctggtggaaaaatgcctacatcctttcatcaattggggtaaatttctcaaatcttgtgtaacaacatggaggttgcactactacaaaagcacgattctacgtccgttaaaagcggtataccacgttggttgaagaccgtcgtcgtctgcgacgacgtaataaattcaaaggatttcaacgacgggtaaggaaaaccgtcgtagaacttgtagaattctaagacgggctgccggacatccccgtcttagaacttacgacagactacgacggccatggggacagcaccgtcgtaaacctaatcgtgttctacgacggttgtctgctacagaccgtcgtacaatcgt

SEQ ID NO: 269571 - DNA, 513 bp, Glycine max
tcttagtctcggctgatgaagatgaattcatggttacttcatgcactcctctaatgacaatagcatcatttctggcactaaattgttgggagtttgaagccatcttctcaattaaatttctggcttcagcaagggtcatgtctccaagggctccaccactggcagcatctatcatacttctttccatgttattgagtcctttataaaaatattggaggagaagctgctcagaaatctggtggtgagggcaactagcacataattttttaaatctctcccagtattcatataggctctctccactgagttgcctaatgcctaaaatatcctttctgatggtcgtggtcctggaagcacggaaaaatttttctaaaaatactctcttgaggtcttcccagctcgtgattgttggaccttgtggcctcagatatcttaagaaggggggggttgaattaagataacacgaactattccccaatttaaatcttgctctctctctttaattaacaatgc

SEQ ID NO: 269572 - DNA, 515 bp, Glycine max
ttctttctgattcgtcggactactgactaacatttttaattgcgagttcacattcttgttctttctttttctaacatacacgcttgttcagactcatgaaaaggagcacgaactccatcacaatcatgcattcaattcaaaataaaagcctacaaccattttcacaaatgaacaaacgtgcttcactgacgtatcattaaaaaccaagttaaactgttcaaaatgcttcaggatgagaaaatcaactaatcataaataaaactagtgtatgtagacataaaggaaataatgtactaaaaccataattataataatgataaaaatctgaaaaggaaatcaacgtccaaactggagaatcagtgagagccacaactttctcagatgagaaattagaaagatcagcagttcatccaatcagaaaagtcagaaccgtcatctatgttgtaagatggtgaattaggagggtgttagtcgatgaatacgactaactgttgtgtgtattgtatcaaacttct

SEQ ID NO: 269573 - DNA, 297 bp, Glycine max
actatagcatactctaggcttggaatccagatttggtccttaattctttgatgatcccacagttttcttttctaactctcacttggctataccaggacagaataccttactacgttccaaccactcgctaattgagggataggttggccttttcctttcttgtttattcgcactaatctctggatttacacccgatattcaacgtgtaaaagtatctctgcaagcaatcccttcgccggttgccctggcccttgccaaattgcatgtacataaactgggagatagcccacacccatc

SEQ ID NO: 269574 - DNA, 472 bp, Glycine max
agcttcatcttcatgctccctatgccttcaacctttttttgttcaccattccctaacttgaaagagttgaattctccatcggttttcaaagctttgaggcagcacaatcctttacccattttgttttagcaaccacatcattcgctgccaaaaatatatcatttacatcttcaacacttatttactagattagcttgggagttggtgtcatctttgttcatatctgttaatttcttcaagtccttcttcatttgtttgcatctcacttgcacatgatcattctcaccgtaatatataacattgtagtgttactgatatctcgttgcagacgtcactgcgattttgatcatcctcttgggccatcatgtcttcttagatgattcctcccttgctcagactccaccataactattgcattgtgttgatcatccacattttcaatgctcatctgtctctcatcttcttctagagt

SEQ ID NO: 269575 - DNA, 645 bp, Glycine max
  unsure (1)..(645): unsure at all n locations
tgtcattcaccataagtagcccttagacaattatgtatagntgttttttactttataaagaaatcttgtagagattatgcatcacattagcatgttgattcaatcattgccaacaatggcttccacctatattttttatatcattaccaatatatatatatatatatataatattattcatctgatgacacattcttgtgtgagaacatgaaaacaattaataataaccattagatatgatcatgattaaaaataataggccctgaaaattaaaatacttaaaaattaaaattaaaatctaatatagtcattaaatcgctaaaagattcactaaataaaccaatcaaaaaatatctcaattattatctatccaccacttctgtcggtatgacaatcgtcgtcggtagtgtcataactgtcaccactatcaacgacggtgattgtgacagtaacgacgacaatcgtcatgacaacaaaggtggtgacaattaataatgatgttcataacgacaaccattatgatagtgatcatggcggtgcaatgaacaattataatgatgatgataaattatttgagatatatgataaagtgatagttgaaatctttatatatttatttggtaattgaataatcctttaaatatc

SEQ ID NO: 269576 - DNA, 311 bp, Glycine max
  unsure (1)..(311): unsure at all n locations
aattctctttaattccttggtcttcatcttattcctcctgtgtatcctccattttcttgcggattggcgctgtctanagctcattcacaaaaaaaataaaccgattaaatcttacatctatacttgctcttgcatttttctcggtcaaattttgtagatctactcttgaatcatgtttttgtgctgactttaactctatcattttttattcataacattcttgagctcaaccttaaatctaaattttctttcaaaattttgattagaaaaaaaacaccaatctaaatgtgaatcacttaatccctgttttc

SEQ ID NO: 269577 - DNA, 523 bp, Glycine max
tctagccaaatggacttaccttgaattaattcctttgatagcccttttgagccttgtatccttttccttgttttgaagctcactacaagccttaaatgaaaaaaccatgatatgaccatatccttaaggaattttggagctttggaattgttttgggaataagtgtggggggtttttgtttcattggataacttgttttgttggctatgcttcatgatgtattttgggccatacttgatgtacattgtatattggttaaatgttggacatgctgaatgaaatgttgtttctcaaaggccatagagcaaaaaaaaaaaatcgaaaaaagaaaaagacaagcaataaagttgagtgaataagatcttaaatggcacaagaatgatggaactcttggctctactctttatgtttaaattttatctttactcctttatattaccttatttttttcttaatatgcacttattccccattgctcctctattcctttgggatttagccacttattccatatttttccata

SEQ ID NO: 269578 - DNA, 372 bp, Glycine max
agcttcaaacaaatgatccgttttaattttccagcgatcaacacttcgattctgaaaaaaaaaaatatttgttcctcccacataccatcttgaataaaaaaaatcaatgttgaaatttgaccaatgacaaacttccaaccctgtttgtgaacagtacaaaagttatcacaagttaagtgagtaccagttaatctgttaagttcaattttaatgagataaaaagtagaatttatgacaaaatctgaaccaacagaagatctatttatcttactgacaacaaaaacaattgcatgaccaaactctatactctagagccttattaaggaatcttgtttgtggcattgactccataacagaatctaacttcaaaag

SEQ ID NO: 269579 - DNA, 438 bp, Glycine max
tggtactacatctgggtttgattcagcattaaaatatatatccttctaatcattacatgatgttgttttgattataatgaattaaatgaagagttcattgttttagggttcaagatgtgtacttgcaggggaccatcttcaacttcctccaaccattcaaagtgttgaagccgagaagaaaggcttaggaagaacgctctttgaacgacttgcagaagtgtatggagatgaaatcacatcgatgcttactgtccagtaccgtatgcatgaacttatcatggattggtcttctaaagagctttacaacagtaaggtactcccagtttttaaagtgtgtctcaagattgcattcattgtaaagcaatctttatatgccactacaaagcataatttatcaatcctgaactgcaaaattctattatgttgggggggtggggg

SEQ ID NO: 269580 - DNA, 467 bp, Glycine max
tttgatcatcctactaggacgactgagaaaactggggcaaatgaagagggtgagaaagagggagaaacccatgctgtgactgccatttctatacgaccaagttttccaccaaacccaacaatgtcattactcaaccaataacaaacctcctccttaccccaccacccagttatccacaaaagccatccctaaatcaaccacaaagtctgtctaccgcactttcaatgacgaaaaccacctttagcacaaaccaaaaaaaaacaccaacaaaaaggaattttgcagcaaaaaactcgtaaggttcaccccaaattccgttgtcatatgcctaacttgatcccatatctactttgatattcaatggtacccataaccctagccaaggttcatcaacctccatttctccgagaatacgactcgaacgcaacgtgtgcttgtcacggagaaagccccggggcgttccattg

SEQ ID NO: 269581 - DNA, 548 bp, Glycine max
  unsure (1)..(548): unsure at all n locations
ntgagggtgcgcagcccaccatcttttcatagtagagtaccgataatgtgtctaccatcacgattatcgtctccctttccattattgggggtaccacctgggccgccagatccctccaccttttgggcgtgttctttgaatgatccgtccccctttttgcacatgttctgtagttgcatcctatccggaaccatatcaaaattgtactgatactgcctaacaaaggcaaccattaggtccttccaagaatggactcgggaaggttccaagttagtgtaccaggtaacagctaccccagtaagactttcttggaaggaatgtatcaacaattcctcatcttttgcgtattcccccatcttctgacaatacatctttagatggttcttgagacaagtagtccccttgtacttgtcaaagtccagcaccttgaacttgggaatgaccatgtttgggtattaggaacaacttttctaggttagcaaaggcataatcttcacctccttcaatggccttgagcctttcctttagatgatccgcctttccctttt

SEQ ID NO: 269582 - DNA, 618 bp, Glycine max
  unsure (1)..(618): unsure at all n locations
agcttatatctagatgtcaaataaagaagagttctctgcctcatatctttgattatgatttgggtcaaagcaaaccactgtgcaatcaaagttctatctagatcaaggttgtcaaaatattaagtggccttctaatctttaattaacttgtgtgatattaatgtgttttgattatacattatgtttttctttaaaatctattaattggtattttttggatcactatataattgatgtgaagtgtatattaagtttgttgatgattaatttttgttaagaaatttgactgattatttttaatgaaattttttcactaaatcatatatataaagctcaaatctgatattattttaaaaaaaatcaaattcaatttcattcaaattaatgattttttggtatttatttattggtatgaattactaagatggtgcattttgagattgttacgtgttagattaacattaaaattttagattcattaaaccaaactttttttaattttcattttgatcaaaattgagaaaatacgcgggggattcttttttatcatatttttgngatattgngttttgtatgtaataattaataaaaaaaattaaggaggtcaattttttttat

SEQ ID NO: 269583 - DNA, 593 bp, Glycine max
  unsure (1)..(593): unsure at all n locations
tgtcatttgagactgaactctgcattctcacggcttcacaatcgcagttttggaagttcagacataagcagaacctcgaagtgaataaacagaccataaatatatcaaagggaaaaaataataaaatgagcatgcttgatggtggtaattacttgaatattttccgccatatcagactctagtttagtcaaatgaattaacttgaacagagatgagggaaaaaaaaaaatcaatccagagttgtacgattttaatcatagacgatccctatgctatactactaccatcatatatattttcagtcatatgatcaggagataagaagcaagtatagcaacactaacagaagaataatactcttccttttggttttgatttggcaggagggtaaattacaaactaaattaaattgttaaaattttaataaatttccaataacaatttaaaaatttaaaataggccactgctaatatataaacaaaacctattagttaattntcatttaaggtttactccgtagagaacaactaaagaaattctgaagctgggttgattttgatagcacataaaaaaaattcatattatatttttta

SEQ ID NO: 269584 - DNA, 482 bp, Glycine max
  unsure (1)..(482): unsure at all n locations
agctttgatttgagtcatcaaaagattataaatatgtgaccatggcatgattcgaatcaagagatccatcgtctatctttcaatcttntttcaacatcattcaatatctttgaactctctctatagaattttccgattcatttctcttcatctttctaaaattttttgttcaacactttcttttccaagaaattttatttgatcaaaaacttgtgttattcatctttttcattctctgcttccttttccaaaagaacgaaggactaaccgcctgaattcttttgtgtctctcttcgccattacaaaacattcaaaggactcaccgccaaagaattcttttggttattccctttcccttaagcaaaagatttcaaaggactaaccacttgagaattctttgtcccaacacattggagggtacatcctttgtggtacaagtagagggtacatctacttggggattgttatactgagaacaagag

SEQ ID NO: 269585 - DNA, 480 bp, Glycine max
tgagatgaggaagtgttgaagggtgaaacttcctacttttattgttgaccacagagtggtacctggagatatgtcgcgggggtcaggaaaccttggggacgtcaggtggggtgctattgcctaaaaccaagcttgaccaatcccgacccaacccgagcatagttggtcagtgagaacctgtgatgtacctaagcaggcgagctcctggaagtcaacagataaaaggaacaaagaccacaaagcaagggggcttgtggtggctggccagctgtgaattttgtgtgatatatgattatggcctctggtaatcgattaccaagggtgggtaatcgattacaaggcttaaaattgaagacaggaggctaagatggtctctggtaatcgattaccacggggtgttatctattaccaggcttgaaaactatgtcccgaagctaaggaagcctctggtaatcgattacccaagggtgtaattaatta

SEQ ID NO: 269586 - DNA, 757 bp, Glycine max
  unsure (1)..(757): unsure at all n locations
cacaaaatatatatatatatatatatatatatatatatatatatatatatatatacatatatatatatatatatatatatatatatatgtggaggtagaaagataccttggatatgcgtgtatgtaccaaaaaaaatctcacaaaatatatatatgtatgtgtagggagcaagataccttggatatgcgtgtatatagcaaaaatatctcacaaaacatatatacgtatgtataggtagcaagatacctgggacacacatgtatatagcaaaatacctcacaaaaatatacgtgtgtgggggtagaaaaatacctcatgaaaaaaaagagagcgagcgcgaaaagaatgagaagaaaaaaaatatagagagaaaaatcctataaaaatataaaatataattgggggtgtctagctaaaaaacaacatgcgtgtgaagagagataacttccagcttttctttgaaaaatgcactgaacataaccagtttatgaaaaaaaatgtgtgcacacattgggaggggaaatgctaagaaaagttttttccaacaccccagatagactcgggtgagtgcacaaattaatagaagaacattttgggagaatactggggtgcttaaaatagagaaaagaaatctgtgccctagtggacatgaacataaaaacttgagcctgagtgcccacaggggggctgcatgaccacgttggaaaaaatccctaaatactttggtgcaggtgtacagggaaaaaagggggaccn

SEQ ID NO: 269587 - DNA, 529 bp, Glycine max
tatccttatgacttgcctccggacttcaccccccgtgccaccccggaagatttaagccaagcccctacttttgaggggcaactcccgccttacgacgactatcccgggcaagacgatgaggaaggagatacccatcttggccccctgctccacctgaaagatccgtccccacatgaactaccccaaccaaacatagtccgccatgtcccggcctcacccacacccgtaaaagaatctgttcccttcgcggaagataagggaaagattgaggcacttgaagagaggttaagagcagtcgagggccttggcaattacccattctcggatttggcggatttgtgtctcgtgcccaacatcgtcatccctcccaagttcaaagtaccagactttgataagtacaaagggacgacatgtccaaaagggcatctccggatgtattgccgaaagatgggggcgtattctgcggacgaaaagttgttggtccatttctttcaagacagcttggccgatgccgctgtagcatggtata

SEQ ID NO: 269588 - DNA, 464 bp, Glycine max
gcaagcttccattagtaactttaagagagaacaagagacttttttttatgttaccttaggtttctttttgggctttgatgtactctgtgtaagaattcgatccaaagcaccaacactattagaagatatgttgtcttcagataatgcactcatttttttattgacctaagagtgttcatagttggatttggttagaattaatgttattgtaatgaataaaattaacataagggaatttttgcacttttactttgactcttttagaggccatagccaacaccactaatttttccttcactataagaataggtttgaggggtatgtcatctattgcttttccttttcgttttgaatccttcattggagatggaacatcagtgaccttacaaaatgtgacaagttagttatgaaaattgtaaaaagtgaggatgatgcttgaaaataggcttatatgatcaatgcct

SEQ ID NO: 269589 - DNA, 529 bp, Glycine max
tgtcaccacctataaataccatgtaatcatccgttgaaagcatagaataatacttgatcatttcttccttctcttgcttctgggaggtttcttgggcctcgaacaccaagtataacacatgttttcttgaatttctttgtctagaaaaccacatcattaaccagttgagccaactagggttaagcgacataaaggttaaattaaatttaaagtgagcttttgtggtaaactaaagatgattactcttttcattttgggaatgtgccatgcatcaatgggagagagcgcactcactctttttctgcttaacgtctacggtgtgtttgttacacatgaaagttgaggggtgaaagtgaaagacaagtgaaaagagctgaaagtaaaaaaaaatgctgttgttgtggcataaaaatttaaagttaggtgtcatatgttttggtcaaatgacaagtaatgatccaacgatttatgttaaaaaggaaaatatgctccttgattatgtgctgctaattggctccagaaatatact

SEQ ID NO: 269590 - DNA, 365 bp, Glycine max
aacttatctataaataaaaaagtatgccggtaatttatttatatattgggacaaagaattatcatcgcttgacttgatatatctctggatgttagtgctcatccactcacaatagtggaggaattctcaatattcttatgggagatttgacgcctgataaaaaagtccgttttccttttttcgtatcatatacatttcatcggatcatccttgattattccaaaatcgagtagttaacatcaaattttcgaattatgaacaaataaaatttgccttatgttacaacctaatatcaaacggaaagacatagctttattactattatattctcgatcagatctagctaggacaaaatgatattatta

SEQ ID NO: 269591 - DNA, 851 bp, Glycine max
ggcctccgggattaagacattcttataagcacactctatattgctcaagctcccgcggtgcccatcccgccatcgttctctatgagagtacccgtaatgtttctcccaactcgattatcgtctacctttcgattattgggggtaccgcctgtgccttgatcattccttcaactatgggcgagtccattgaacgaagcggccccccatatacaatgtacgcgatgtgcgtcctctgctgaagcatcttgataactgtgctgacactgcctaaccaaggcaaacatcaggtgcctactggaatggtctgctgcatgctcctgaatagggtaccagagtgccattccgctattccgactcacacggcatggatgacataaaaacaccttacctgatgactagtctcacatgtcccgacactacacctgtagatggtactcgaaacaaatggtccccttaggctttgtaaatgccagcacctccaactcgggaatgaccttgaacctgtctcatggactactattgtaagttagaccatgcactatactgaggctccgctttgggggagagcccttagcttacactaacctgctttttcttctgggccttcataagtagggcttattcccatcctcagaaagcactgtgtgaaaggtgcaagtcaatccaatggcgcgacaaaccagtgtctcacaggtatcacaacccccgctttgccttctagcgaatattccccccaatggtccgacacaaaccccacctggaggggccattccactttccccaattggtgttatatacaaaggtcccagaaaaaataattcccttgaacccgaaatctcggaccgtaattt

SEQ ID NO: 269592 - DNA, 301 bp, Glycine max
ttttttttgtgaaactatctcatcctctttttcaagtgtaaaatgaagcttgacaagttcaggtgcaagtgctgctactggtggaagcacttgaatttggttgcctgaccacaaagggatggcactcccatttttcgaattttgcacagtttgggaaagcaatttgttataattttgggactgagcttggttcaactgagtagccatctgccccatctgatttgtcagactctgaatggaggctcttgtctcttgctgaaatttcatattctggatggtcatttgcctcactaattcttct

SEQ ID NO: 269593 - DNA, 399 bp, Glycine max
tgagatgaggaagtgtacaatggtgaaacttcctgcttttatttgtttaccacagagtggtacctggagatatgtcgcgggggtcaggagaccttggggacatcacgtggggtgctattgcccaaaaccaatcttgaccaatcccgacccaacccgggcatagtcggtcagtgagaacctgtgatgtacctaaacaggcgagctcctggcagtcaacagataaaaggaacaaagaccacaaagccaggaggcttgtggtggctggccatctgtgaattttgtgtgatatattggttgtggcctctagtaatcgattaccaagggtgggtaatcgattacaaggcttaaaaatgaagacaggacgcttagatggtctctggtaatcgattaccatcggga

SEQ ID NO: 269594 - DNA, 622 bp, Glycine max
agcttgaggatagagacttcccaagctatttatcttctctctcagagaggcttactcaagcttgaggataaagacttcccaagctatttatcttctctctcaaagaggctctctacttggatggttaggaatgaaggctcctacccttatttatactactccatctccacaatgaatggtggagattacttgtatcctaggatgaagattaattctctagaatgctccacacattctaggagtctctacactcttttattccctttcatactcttccataaggttccagcccacacatctccagaatattccagaggtttccacatccttccataagcttctagagagttctacactactctagagttctccaggatgttctagaaaattctacacttttctagaaagctctagaattttctagaacctctccaatttgttatttaatttgatatttatttatttatttgagatgtttctttgctatcttaagtattgctttcaattgaacttatttaacaaatacattattttaattcaattaccgctatatgacacctccttatattttatttaccataataattttaattattaacaatatattttaaaaaatattttt

SEQ ID NO: 269595 - DNA, 620 bp, Glycine max
  unsure (1)..(620): unsure at all n locations
ttgcggatttggtcttcgccagtgaaaggatcgatgtgggtcctaatagaggcaaatttgatcatcctactaggacgactgagaaaactggggcaaatgaagagggtgagaaagagggagaaacccatgctgtgactgtcattcctatacggccaagtttcccaccaaacccaacaatgtcattactcagtcaataacaaacctcttccttacccaccacctagttatccacaaaggccatccctaaatcaaccacaaagcctgtctaccgcacttccaatgacgaagaccacctttagcacaaaccaaaaaacaccaacaaaaaggaattttgcagcaaaaagcctgtaaggttcaccccaaattccgttgtcatatgctaaacttgatcccatgtccactcaataaatcaatggtagccataaccccaaccaaggttcctcaacctccatttttctgaggatacgactcgaatgcaacgtgtgcttatcgtggaggagcccttgggccttccattgagcattgtatgaccccgaagcataaagtgtgaagtctaattgatacgggctggctgaaatttgangggaatcgcttgttgaatcataacattgacaagccac

SEQ ID NO: 269596 - DNA, 442 bp, Glycine max
agcttatacggataaccactcgggtatttccgtccgtctgtgtgactcaaaagtcatatgacagatctgtgagcgcgtgaatatgacatatatctccgcgtgtcaacgggtttgtcaaccgccatggactaagggcgcataaaacaacattagtctctgcgtgttattatgcttttcgtcttacagacagcaaaaagtttatacggataaccactcgggtatttccgcccgtcagcgtgactcaaaagtcagtatgacagatcttgtgagcgcggaagatgacgtaaatctccgcgtgtcaacgggcttgtcggccgcgattgacgatgggcgcagaaaacgacgatagtctgtgcgtgctatcaggcttttcgtcttacagacagcgaaaagtttatacggataaccactcgggtatttgcgcccttcatcgtgacctcaa

SEQ ID NO: 269597 - DNA, 454 bp, Glycine max
tgttgacacgtggagatttacgtcatctttcgcgctcacaagatctgttatattgacttttgaatcacgctgaccggcggaaatacccgagtggttatccgtataaactttttgctggctgtaagacgtaaagccttataacacgcccagactaacgtggtcttctacgaccttcgtcaatagcgggcgacaagcccatttaaaagcggagatttacgtcatctttcgtgctcacaagatctgtcatactgacttttgagtcacgctgacgggcggaaatacccgagtggttattcgtataaactttttgcattctgtaagatgaaaagcctgataacacgcaaagactaacgtcgtcttctgcgcccttcgtcaatcgcgaacgaacaacccgttggcacgcggagatttaccgtatcttccccgctcacaaaatctgtcatactggcttttg

SEQ ID NO: 269598 - DNA, 819 bp, Glycine max
  unsure (1)..(819): unsure at all n locations
nncccccgtgtcctgagnccctgagaccccgtccattgagacaaccgcggcatgcaagcttggtgtagaacttgagttaaggagctaagagtgttttttaaaaatacttctaacttattgaagttagtgaaacttagtggtttgtcaataactgaacatagtctcggtggttgagacgaactagtataaatttcttgtgtcttattttctccttttttatttaaactgacttagagtttgaatttgacctttactttagaaaaattatgtttgttttacaaagatctgaacctatcgtcaaatctatcccacaaaaatctgatatttgtttcttaagttttacttcatcaaatgatgtttttgttgtatttcaagaagattttaagtttagtaaaaatcacaattcacctcattcttgcgatatatatatatatatatatatatatatatatatatatatatatatatatatatagcaagaaatattataatatatggagtggttactacaaaaaaaatcttgttttccgacggactattgcccacggacacaatttcgtcgaaatttttttattttccgacggatattagcaaatgaaattcatctatgggaacattgattttttcgacaatttacccatggatanggatcgccgaaataaaaattctcaaacaaaagacctctccccaacccgctgaatcaggggggtttctattttttttggctccctcccatttgcgctttcttcttgccagacagaacctttgtgggtgcccctttgcgctcttttattgtgggtggatttgggtaataaaccg

SEQ ID NO: 269599 - DNA, 476 bp, Glycine max
tattaatggcttggcagcaaagtctgatcattcacccataatcatccacctccatgggactaatcgtagaagcttcaaaagacaatttagatttgagaattcttggcttcttgagctagacatggtcaatattgttgatcttgcatgggaaccacaacaaacgagtgactttattcaaataagatttcaataccaggaccaaattgatatatgtaagcatgaattggagtagagaaagaattcaaatgatgatgttaatggtgcggcctatttggaaacaaacaacaagttttgtactcttattgcgctagaagaagcttattggagatagaggtccaaggtgttcttgtgacaccctctacctcgacatacatataaataagaaaaacatatcaaaatgtgaaatttaattaaatcaattttattcagatcatgtaaacaaattcacgtgggtaaaaaggtcacattcgcttcac

SEQ ID NO: 269600 - DNA, 195 bp, Glycine max
gcctgaagatatgtcacgggggtcacgaaaccttggggacctcaggtggggtgctattgcccaaaaccaagcttgaccaatcccgacccaacccgggcatcgattacacagtggaaattgcacgttgccatgttctgaagctgtgtaactcgagttaggcctctggtaataaattaccaatgttgtgtactccat

SEQ ID NO: 269601 - DNA, 534 bp, Glycine max
tattcgttgtagtccccctatggtagattgttataagttgaactctaatatgtcagttaggcataatctggtttagcttttgtgggaggtgttctgtgtgatcattatggatctgtttgtggtttcatatgtagctcatattggcatttgtccactttttaatatataattatgagctctatatatcgctattctcattgctcatcgaaaacgattcacgcagttcactatggagtcaaattcttagctttttatcagtcttctatagcatacgtgcattgattctcatccttgtgcagcttttggttaatagtatgtgaaagatatagaagatttgttgagtcataagacaaatcagaacccttaataattctgattacatgtaaataattacgaagtttctaaattgagtcttatatgcaattacgagaagacattgtatttgcttttgatagataagacaaaagtcaacaaatgttaagttcttataaagcacttaagacttcatttaatattgtgtatgagatttgtttt

SEQ ID NO: 269602 - DNA, 513 bp, Glycine max
  unsure (1)..(513): unsure at all n locations
agcttccatcaagccctttctgagacctcgaaaattagttatgcctactgtaacgacccgcctcgttgctacgatatcaacactctaatactcgataattttaattgttataaaaagaactcccttaatttgcttatgaaaatagaagtaatttggtcacaacatacattcatccaacaatacgtcgttacttaagtgaatattcataattatatagaaacaataactcggtacacgtcatacacataacaaaaattaaatttgttcataagtataattaaattccaagttttacatctttaactcaacaaaataaaacttgaaaaccaaatacggaggagtcgattacaaaacacaactctctcccaaaataatgccaacatcatcacatcagtttggcggctcctcaccaggatcatactccctgcaccctgctgctgtcattctgctcccacgaacaatgttcgtgatcatcacangtatcaaccacacgatacaaaattgcaagggtga

SEQ ID NO: 269603 - DNA, 442 bp, Glycine max
  unsure (1)..(442): unsure at all n locations
tctttttctgactgttggctcactcatgctagcctttggctcgcttgggacaccaaataacttcatggtgaagtaaccggctcgcccaagcaagcaaagttactttaagatgaagtaacgagagctccgctaagcgagttgtcgaaccctaactgccttgtggcgcttaaactaagcgtgaatagggggtacgaaggaggttgtgaagaccatacgtgaacgatgtgacaaaattgcgagaaacgaatactgagcatgagatctggagcctcagtcgctgtcgaatcgcgaccataaatgttcgtcatcctgtcagtgcttgcccttaaggatttgaacatgattcatggacccttangggtcctctttattgtaatgagcctcgtcatctacgtctcctatcatcggtaatggattttctcttgtgcagaatgtgttaacc

SEQ ID NO: 269604 - DNA, 521 bp, Glycine max
agcttggaaggatgcttcaatggaggaaaagaaagatttagagaaagagagaggggggagcacgaaattgaaggaataaaagagggagagaagtggaactttgaagtatgtctcacaatattctcattcatcaaagttacaacaagtgttacacatgcttttatttatagactaggtagcttccttgagaagctttcttgagaaaacttccttgagaaacttctttgagaaagcttccttgagaagctagagcttagctgcacacacccctctaataactaagctcacctccttgagaagcttccttgagaagattcctaaagaagctagagcttagctacacacaccccctataatagctaagctcacccccatgccaaaatacatgaaaatatataaaaaaaaagtccctaatacaaagactactcaaaatgccctgaaatacaaggctaaaaccctatactactagaatggccaaaatacaaggcctaaaagaaggaaaaatctattctaatatttac

SEQ ID NO: 269605 - DNA, 477 bp, Glycine max
tgtccttggtttagacatgattggtacatgatttgggacttgtaggattcaatttgggcaaaattggatgaaagcaaaaatggttttcgaaatctgcaccttatgcagaattttgctggggaaatgtgcaacagaattttgcataagtgcaaaaaaatgcttgtgtatggctggctgtggaaagggtagtgcacatgggttctgaacatttgctagtagatcccaacagtcaaaatgtagacttatgtactagagacttcctgtaaaattttcgggtcgatccaacggttaatgaactggaacgaagagaatgttactggggtaattaaatgtgaaaagctgtgatattggtgtgtgttttaggcagagttttctgcctttgccctgttttcttgactgtgctagtttgtgatgattgaatgttgaattacctggatgttgtggaagcttgggaggattgatggggacccggcgttg

SEQ ID NO: 269606 - DNA, 575 bp, Glycine max
cgacctgccggctgcaagcttaaaaccccttgttcattactaaacaagctgatttttttatcacaatcacaagcaagatgctctaacatgtagaagaaaacaaattcaaatgaaatgcaataaaaagtagagaagggaaagaaaggctaagctgcctcccaataagcgctcttttaacgtcattagcttgacgcctctttctgttatccaagatcaaacaaggttcctacttcaagcaccttcttctcaggtctcctttcctccatcccatgcacttttagacagacattttggctaggtggatctttgtcctcatggaacaaatcaaagctgatcttctgatcttctatgcccatttgcagcattttctttcccatgtctacgacgcagctcgcagtagacatgaatcggcatccaagaatgagaggaatgtcaacatcctcttccatatttatgacaacaaaattagctggaaatataaggtgcttatccttcaccaaaacatcttcaatgactccatatgggcttgtgatggagcgggcaactaactggagggtcatgcctgtgggcattat

SEQ ID NO: 269607 - DNA, 674 bp, Glycine max
  unsure (1)..(674): unsure at all n locations
tcgagccaaaatcctgactcaccataaacctggacccagggtggaaatgtcaatccttaccctcggaagcaaaaagaatagaaagggaatttccaatcaaaaaaaatagaaagaaaatttcccatggaagccaaaaaagaaaagaaagaaaattccccaatcaaaaagtgggagaaagcaaaaagaaaagaaaggaaattcccaatcaaagaatgggagaaagtaaaaaaggaagaagaagaaggaaagaaagctcctgatcagggatcgaaggaaaaacagaagaaatgtgcagagaggtctttagaccggacaatatctgaacaatacagaattgtcaccaaatgaacaaaaagaaggaaaggaaaccacgacctaaaatggtcttctccctttgattaccaaccaaaatcccgtgcgctagcgactttttcgccccgcactaaacaaaaaaacagaaaaagaaaaagccaacaaaaaatcaaaagccaaaaacacacaaaagccgaaaaacccaccaaaagaacccattcccaagggaagtcctattgatccatgatcacacatgntaattttgatttgataggaaataatttgcaaagtcaagtcatgatatatctatggttcggaattaggatgaaacacttacctgtgcgagattgatacactttgag

SEQ ID NO: 269608 - DNA, 443 bp, Glycine max
atccttttagtcaacctgcggcatgcaagcttgcttgtggagcttctatggaggctggatcttttatctttaatgaggtccttcaatggtgatttttcaccatggagatgcagcggaatacaaaggaaaagaggtgagaagaggcgccatccattaaggaataagccatggaaaaaagagcttcaccaccgagatgagccttggataacaagcttggaatgatgcttcaatggaggaaaagaatgacggatagatatacaaaggggggagcaccaaattgaatgaataaaaagggagagaaattgaactttgagttgggtctcacaagacttttattcatcaaagttaccacaagtgttacacatgcttctatttatagactagctaccttccttgataaactttcttgagaaaactttcttgagaagcttctttgagaaaac

SEQ ID NO: 269609 - DNA, 466 bp, Glycine max
tgacctgtacggctaagcgccactttgcttctgtaggttttcctttgaataatgctaagcgcgtctatacgctaagccctggttgtgtgttgagataagcgccctgctgcgctaagctcaactctctcactgtcttttaagtttatgtagttaggctaagcgcaccctgtgcgctaagcctgattggtattttgttgaggctgagctaagcccgccatgctgcgctaagctccaactctcttcagttttgaaaattgatgacttaagctaagctcagttatgcgctaagcctattctgtagaaaaaaatgttttctatgtcttcgagctaaacgccagcctgttgttggatcgagtggcctcaaaataattaagaagggggggtttgattaattattgctaaacctttactgatttaaaattcactcttctaaagcttttacttatgttggtaagagaataaggag

SEQ ID NO: 269610 - DNA, 376 bp, Glycine max
ctgcccgcatgcaagcttggagccaatacaaacgaccataactatttactttgatgtttgattgaggctcgtaatatatcgagacgctcgaaattgaatgatgaagctctgagccaatataaacgacaatgaccttttactccgatgtttgattgagtcccgaaacatattgagaccctccaaattgaatgttgaacctctgagcctatttcaacgaagaaaaatttttactcagatgtcagagtgagtccccgtacgtatcgagaccctctaaattgaacgttgaacctctgagccaattcaaactactataactttttacttagatgtctgatagaggcccttaatagatcaagactcttaaaagtgaatgttg

SEQ ID NO: 269611 - DNA, 240 bp, Glycine max
aaggactgaatcttgcttttaagacaagggaactggtcaatctgatggggtaccaactttttcgtttgatctggaacaacgaggtcaagggccgcactgattcaatgttccgacgaagaagttacaggatgtgtgaattagccccattatgtatatacttgaatatcacacacgagggcatttcatacgggactacttcctacctccgtgtgacatgtttttgccccttgatgtatctga

SEQ ID NO: 269612 - DNA, 148 bp, Glycine max
  unsure (1)..(148): unsure at all n locations
atgcaagcttaagaataactttcgatcaaagcaccttacttccttcaaaanacttccacagaccggaggtatttgaatgcatgggcataccccccggggaaactctgcttgaaaattttatataggccattgaattaaaggtttggga

SEQ ID NO: 269613 - DNA, 793 bp, Glycine max
ccccgggtgtgagcctcacagccccataatcccgcttgtatgccggaaatcaccttacttaccctagcgttttctgctgggactcattgccaaaaactgggagggaccctgaagacttagggacccacgacctccagaccttatagggtggttcagttattcagtgatacgggcctgggtaaccacgggcagcacaatgcgagctttgtgctaataaccaaatgttcccattaaccaggcgaggtaattggccatgctttcgtgtggataatgaccccacattatgccgagaaagtcccctcgattaagcgccatcgacaggacgatcgcgattgacctggactaactgctcgcagaggaaggactaaagttgccgctggacacccggtacctttattggccttttaatttcactatcatctctataagtgaaagcctatgattaaatgaattgtgcatcttgtagacggattatccatggtctaaatggtcccgatcgctaacctttatccaaatcaacctcactcatattttttctggaacaataaaaacgggcgcactgccactgtagaattctttctccacggattacctcgaaattacacgtggcctgggagcccgctttaacatacccacctgagtatacgactgccctgggatcgtcttttaaagctaaggccattaacccccgccccgggttttagagccttcccctatatataattcatgataaaggatccaaactcacgattccaccccaacttttctggagttgggtgctatttctaagggc

SEQ ID NO: 269614 - DNA, 817 bp, Glycine max
cccattctttgacctgtttctccgcatccttgtcaccgccgctgctgctggcaggatttttattggtggacaaaataattttttttatcaagggcgggcagacccctggggatggatgaaaaacgggtaaacatttgcacacttcatactagcctgacacagtatatataagtcctggtgcccccaatggagcgcccttcttacattaatagcctggggcctcttgctggaattccagatgggaaaactttcttgcaactctctttatgaataggtcaactctaacccattgcctgcactctgccccccacactattgctatgtcgaacttcgtataaaaggatccttgccaagatgcccttaaaaactaatatttacgtataccccctctttttattaatggctcccaccccggtgtcaaaatacttgaatccgctctaaaaaagttccgaatgtcgagactcttttcatgtttttgactacaaggctacctcgctatactacgtgattggccttaacccaacgccgtatagagggatcatctggttttgtatttaccagacaaagggaccgacggttgggccataggctcctatatctacccttggcatcctgaaaaccctgaagccttctctaacattgcttccccaccccaattgtttttttatttaccttccctggccgggtgggattgtctcccgtttcttggcacgtcttcttatttatgctgaccagcaggccctcctttactgttccacctcccctaaccctcccatcttttctttttttttgtggaacccggtttccttggtgcccc

SEQ ID NO: 269615 - DNA, 415 bp, Glycine max
tctacgctcgcccgtgggctagacatgaatggttcatgaattgggacttgccggattttatttgggccaaattggatgaatgcaagagtggttgtccaaatctgcaccttatgcagaattttgctgcggaaatgtgcagcagaattttgcataagtgcagaataacgcttgtgtctggctggctgtgtaaaaggtagcgcacatcggtcctgatcatttgctggtgcatcccctcaatggaaatgtaaacctatgtcctagagacttcctgtcacatttgcgggtcgatccaaccggtaatgaactggctctaaaaaaaagttactgtggtgattcaatgtgaaaagctgcgatattggcgtgtggattaggcaacgcgatctgcctttgccctgttttcttgactgtgctaatt

SEQ ID NO: 269616 - DNA, 189 bp, Glycine max
acaaaaggctagagcatgtaatgaaaaaccaatggttgttacatgcactgaaatgaaaagaatggtgaggaaggcttatgtgcctgctagtaactcctcggactagaacattaagctgcaaccactaaccgcttgccacaatggggctgaggtccttcttcaggcaacgtatgtgctcgtgattcatgc

SEQ ID NO: 269617 - DNA, 603 bp, Glycine max
agcttctcaaggaagttttctcaagaaagcttctttgtgaaactacctagtctataaatagaagcatgtgtaacacttgttgtaactttgatgaatgagagtcttgtgagacacacttcaaagttccacttctctccctcttttattccttcaatttcgtgctcccccctctctctttctctccctctttcttttcctccattgaagcatccttccaagcttcttatccaaggctcatcttggtggtgaagctccttcttccatggcttattccctagtggatggcgcctcctctcacctcttctcctttgtcttccgctgcatctccatggtggaaaatcaccattaaaggacctcattgaagctcaaagatccagcctccatagaaaccccacaagcaagcttccatcatttagtcctgcttctatcaagttctaaggcaacagtacatttcccgatgcttaagtcacctaacaatacacacaaatgggtgatcaaaccaagagcatgccataattaagcattggaagaagcattgaacccacaaaacacaattaataagatattaaagataattacatcaactgttccttataaataccc

SEQ ID NO: 269618 - DNA, 505 bp, Glycine max
tctcgaaagcaatgagatcatctgcttcgaatgttgaaaacctgaacacatgaaggttgggtgtccccaattgaagatgaaaaaatattttggtgacaagaagaagaaaagtatgatggtcacctaagatgacttagacaatgagaagagtagcagtttagacaatgaacaagccgacatttgtttaatgggagatacagatgaaaagattgcggtaaaaacttattctagatctaatacttcttctagcacttcatatgatgactttttctggcacttcatctgatgaagatgatgtgccttatgattttcttcttcagaattttcataagatttctttttagtgtaaaaaagtataaagaaaaatataaaacatatgtttttgaaaacactatgatgaaaaacaaaggtagtagcatgccctataaaagaatttgggaagtttttggaaagctcaaacacattaaccaggattttaaaattccatcaacacccctatgataac

SEQ ID NO: 269619 - DNA, 604 bp, Glycine max
  unsure (1)..(604): unsure at all n locations
agcttctaaactttgtacaagaatgaagctctgataccacttgttagacaagtggcctcagatatcttaagaagggggggttgaattaagatattcccaacttttctcctaattaaaaatctatcttactttttacttaagttatgaattcccttaatgacaatcttcttaaatattaattcaaatgaagcaacttgaattatgaatataaagcaataataaataaaggagattaagggaagagaaaatgcaaactcagttttatactggttcggccacacccttgtgcctacgtccagtccccaagcaacccgcttgagagttccactaacttgtaaattccttttacaagttctaaacacacaaggacaacccttcctttgtgtttagagattctttacaacaagagactcacagtctcctaatcccttagagaatgagaagaagaagaggaacaaatctctcttgaaagagatggattntacagattgagcactcaattaattccttaatgaattgcaatgaattggccaaggaattctttaagaggataaaatgaaattgctttttgagaggataaacactttgttgttctgaaaactct

SEQ ID NO: 269620 - DNA, 468 bp, Glycine max
tccattgtagaaaggtatgttgctgaagaagctattgaattttgttctctgtacatggaaacagttgaagctgtgggggtaccgaaaattcgtcatgaccggacacgaagaggtcaagggacacgaagcttcaatgttgttaccatgagtcgacaagatgtgtcacaagcgcatttgtatatcttgaataacacacaggaggtcgttccatacatacaaactcacaaacaatatatgacatctattaacccaaaattgaatatgatgaaattgttgcaagagcataatagaactttcatgaactggtttaaagaaacaattatgagtgatgacaatgcttccaaaacattaagattgttggctattggtccgaatctaaatgtccctacttggcaagggtatgacataaaaaattattcgttctatacaaatcacaagatgattaaagtagtgtgcaaaatagtgggg

SEQ ID NO: 269621 - DNA, 626 bp, Glycine max
agcttgtccactcaatatttcttcaaatgtagttagtcatatacatgctcaggaatttcaagaagctcatgttcttttacaattgttccttttgtaaagaacaacctgtatggatgcttgcacaacttatatattgtccaatattattttttacctcaatgttctgaacaatataagttttcctctctttgagttgatttttccatttgtcaaattcaaaatgttataactgtagctttgatcttgtgtccctaagaagatgagcaaaaaaaaaaaagccataagggctccaattgtgtacataacatttaatcaatttgagttgataatttaatgaatgtaggattaccttctcatccattaaaagcatctccaaaaaacctcctcctagagtttttttttatgaagcacatttttgtaattctgattgcaagtttccatgtctcctttgtatcattaatctcaccaattaagctaattctacatgtcatacctgtttttcaatttaaatatgtagtcctttaggatgtcatgctacctaattaaatagatttgtgttaataaggggtaatatagtacattctaatacattatgtgggagatgcccaatttatacaaaaaaaaaa

SEQ ID NO: 269622 - DNA, 583 bp, Glycine max
tctccatatcagatcagcgttctatgtagcttttgaaaaacgtgaactttgaaccactgagacttgcttcttcatgatatctctagctagatatttttttagattagaactatacactgagaagttagttacacttagatctcatctcctttaaatctaaccaaataaaaactaactttttacagcagtatagaacattctaagaatctctttttttatttaacaaaagaaaaaatattacctaatactacgtgatcatgatttctataattttcagttttttcaattttcttctttaatacttcaaattatatagttttaatttctataatctctctctctctcttgctacgttaaagtgctcaacaagtgatggtagctttatttgaattatattttgcagctcgagatattcacccataataaatgatagcccaagttcttgtcacgtagaggtagaaaaaaggtaaacagactcgatgaatatgccattattggtacgttaggtgacttacaaagttgacccctaaaaatccttaaacatttttttaagcatttttttttaaaaatttttaatcaaact

SEQ ID NO: 269623 - DNA, 677 bp, Glycine max
atgcaagcttttacaactcgagaaggttcacaccttttttttttggtctaacatgatgaccaaggtgatacctactaggaagtttgaagactgttgtcaaggtgctagtgtggtggtgctcctcaattaagtcaggaagggggagatttgttggaaatcactccataattatggaacaccacattcagcaaatcttgataacatcaaatgcttggaaaataaaaggtagatattctaatgttttggaatttcatctttgactcttgatgatatcacattcatcttagaaaaatggagataacattttcaagggttcttggaaatatgaaaattaatttacatccatttattactctatggagaaaccatatccctccactatataagtgggggattgtgaggagttgtggcaaacaagcaagtgagatccttcaagagtgatagagtgagaaagttttttgtaatcctctttaagaaaaaagagttatatttccaccatacatggtgagcatttgagaaatattggtaaccatcctattggtgagattgagatcattgtatcctacttcatagtggaaattttttttttctggacttggcctatggtttttcctttctactgaggggtttccaagtaaaaattttaaatgtgtgcttttctttactctctaattatt

SEQ ID NO: 269624 - DNA, 513 bp, Glycine max
  unsure (1)..(513): unsure at all n locations
agattgcctttggctttacttttatcttgattctccttgagcttggagatttacatcctttttntcctttagagcttctgcgcaactgttgaatcaggattgcttccatcttgattctccataacccgagtcattttcccctgaaaacttctcaatatcgtactttgttgttcccatctttcttgatcttgattcttgtccccacagacggcgccacttgttggttctagttataaattatgctactcttaatctgcacaagataataaaaaaacaagaaaaaacacagaaaacacagcaaagcaatacacagcagagcaagaacccaaagatttacgtggttcggcaatgtgcctacatccacgggaaaacgcagctcatcatcatcacattgatcatgaaattacaagttcaatacaagcagcatctaactttgatctctcttggttctctttgaacaaaacctctctcaatcacctagctcactacctcccttttgaactctctgatttc

SEQ ID NO: 269625 - DNA, 597 bp, Glycine max
agctttcacatgtataagttgtacaatctctctttattatcatgccagagatgtgcaagactccttaaggaaattgagtttggaagggaagaaaacataaggagcgttgtctttaaagaataacctattattgacaatagataagtctttgtacttaccattgtttaagaaatgaatatggtaattaaatcatgatgttactcctaaaattattaatggacaagacaacactgagatttcctctcaagtaccacctaaagttcatactcaatagcctcactagatgttattaacaagatcctctagagaaagggcataaatgtaatttgaatgactaggctatatctctttaagaacacgaatatgacattctgtcgactgagaaagtctaattgactttagtcaaagtatgttgtgctttaactctcaagtggattgatgtaataaatgatgtaataaaatttgaggctgaatatgacattttggatatcatcaaatcgcctgatagtgtgaaactcatgaattgccatagatattatagtccgaatggattcaatggctcatattgagatatataaagtttgtcttgtcaccaaa

SEQ ID NO: 269626 - DNA, 415 bp, Glycine max
tgcatgatttacgtcccccccccccctttcttaagcaaattcttcttgacatcatcgaaatcttcatgatttacacggaactccaaaaatcagttgttcactaagctatgtgtaattgttcaagtattattgacctacttttctaaacttttattagatagttttcatcgctagactttgtattgttgttcgcacatgatggggctatctttttatgatcttagggtgttccttacaaaattttagctcattatgagatctgatgagtatagttgtagatcttcccccttgtttagtgctcggggagaaacacactatttggagcgtataccgcgtgactaagggctatccttgtgagttacagcccttagattctgagatccatctagccttgggtatgacatataagcatatt

SEQ ID NO: 269627 - DNA, 830 bp, Glycine max
  unsure (1)..(830): unsure at all n locations
gcaagcgggtgtgatatcgcccatcacccgccttggagaaagaacgcccgcccccanctgaatttccgatccgaaaaaaacatttttttaatgttgggacaggaaccaaaccacgggggtcttctcgaggagagagacccccgcacccgacgaaatctactgggaggaggaaaaaccaacttatgagcgacgacaaccaccctaattaacactcggaaaggaccataccaccgacgggaaaagccgacaacaacccctctagccaagaacctcgccggaaggcagcatctgaaaaacaccccatcaccgacaggataatccctgcccccacagagattggggaaaacagctacaagaaaccttgagaccccaacaaatcctctcctaacacagccaactagtggggccgaccaattgccaccatcaaagacatgtgcaaagcaacaaagcaaccccaacccacccacaacgacccccccccaatgacctacacaaaacccgtcccgccacccccccccaaaaaagaaaaacactctcccccccatacaccggcaacccccgaaaaacactcggccactcacccaaccgggaaaaaacgaaaacccgcgacaaccccccacatcgggaacacggcgccaccccggcgcaggcccagaggcctctcacacctccccagcagccggcggccgcacacacacaattcccacagcagcccgtccaacctaccgccacaaacaccgactcatcagacccaccctaaccacacacgcacgccaatttcagccaagaccgtccacacacaccgacgcagccaccgcgatatcacgcgc

SEQ ID NO: 269628 - DNA, 549 bp, Glycine max
cctgccgcatgcaagcttctaatttctatttctagaccaaaatccaattatttacatctaggtcattaatgggttgaccattatttgaccaaagaattttatttgaattatccttattctttatagactttagcttaaaaacttaagagtttaaccatgcctaggtatcctatgatagcatctcattttttaccatttcaatagtctaaaaccactacccaatcgaacgacaataatattgtctatcacacacacacacacaaaactgggatgttacaattcaaatcaattctcaaaattatattgaaaattttagtttttgatttttttcccgagtttttattaaattgataatatttcttttttcaatttacatcaattcaaataatgttttatctattattattagatgatgaaatataattataaatatttataatatgaagttaaagtcatgttttattctttgtattactatttataaaatctaatcgccaaatgagttgagcctctgttcaatttcttgattggttttcttttgaaatcaaa

SEQ ID NO: 269629 - DNA, 973 bp, Glycine max
  unsure (1)..(973): unsure at all n locations
acaagtaccccnnatagattcccctagtaatgnatccccacncnatnngnnngaagaangtcttgacccnnggnnnnnnnnnnnannttttnggatgaaggtgagggaagaattttttttttttagnaanaaaaaaannnnntngnaggggggtgtgtttatatataaaananaaaacccctctccaaaaaagaggagaggaaaatccagaaatagaaaaatagggaagtgaacctttcctaacataaaaattgggggcccaaaaagaccgaaattaaaaattntcatacacctcgcatccggctcatttgcaaaaaaccaaatattaggaggagtaatgatggcgaaaaggagaaaccgcacacaacactcttcttttaaatatattgaaaaaaaaacaaaaagtggaaaaatgaaacgtggacatttagaaacatttgggaaccgccaaaatatcacattacacaaaaaaaagggagcaatactgcgaaacttctcgttgagaataaaaaaataccggggggggaagacccccacaacccacaaaaaaaaaagaggttcaaaaccctacccccccgtctttttaaataaagaaggcgcagcaacaaaatccaggggggcgtaaaaaaaaaaaaaaagggaggcgcttggatgtcaaccaccctccaaggaaaaaaatacagccccgcgggcgggtgagaaaaactttttttgaaaaaaaacaataaatggtgcgggaggaggtgggaaaaaaccacctccgggggggagaaaagaaacaaaagaatagagaccgtccccctcttttgtttatataaacccaccctatcacaaaaagatggagcggggtggaactcaaaacggaggggtgagatacttaaattaaatctcgcaaatactaaccaataaacacgcttacacaactttaactctcaactcagcacatactaagtctacgaagggcagccctacc

SEQ ID NO: 269630 - DNA, 339 bp, Glycine max
  unsure (1)..(339): unsure at all n locations
atgccaccttgtanggttaaagtctcacgattgtcacgtgctttttctactaattacagtcgaggctatacgagacatcttgccaaacagaagtgggttagccataactcgcatgtgctttttcttacatgccatatgtagcaaagtcgctgatcctatcaagtttgatcacctggaaaatgaggccgcaattatactgtgctaggtggagatgttttttccccctgctttctttgacatcatgattaacttgattgtgcatctggtcagagaaatccaatgttgtggtcctgtttatctacggtggatgcccccggttgagtgacacatgaagatctt

SEQ ID NO: 269631 - DNA, 580 bp, Glycine max
tattttcggtaaacttcgatctaaatgggatgcttttgttattactaatgtttttttcccatggtttagttaagattaaaaatgaagttaccgaaaaattttcaaagtgaacaatcacaaaatcaagctttttcatgagagcccccacgtggagaaggaatttgtggccaacctctctttggtcttgccaccaattttatattatgatgtgccgtgaatggcacttgaggagtttccttccccttttcttttatatgttgatcctttttttgcatttcattacatgctcacattgaagacaatgtgcatttcaagtgtggggggagggtttagaaaaatctattttttttgattctgtattctattttaattttgtcttctattttaatatttgtgcttggatctatttttctggttaactgtattatattccggctatttttctatatctgcatctatatgctgtttttctggatttgcgtcgatatgtcgaattagttctgattttggagctttattggttttaccttccacaaactaatttaaaaaccgattttattgttttctaacgttattgttg

SEQ ID NO: 269632 - DNA, 507 bp, Glycine max
gtcacctgccgcatgcaagcttccttcgagcagcaaagccatagagtaaaatggttgtacaagagaaaacctttagtatcaaaaaaagaaggggaaaattaaaggctcgcctagtagcaaaaatgtattcacaattgaggagccttgatgatgaatcttttttttgtaactttatatgaatgatatattgattattggtaaccatttgcatgatgtgaatgagttgaaattcatgttgggtagggagtttgacattaaggacatggatcctaccaagaaaattcttgggatgaagattcatcaagatagaaggtccaaaaaattatggctctcacaacaagtttatgttgcaatgtgctggacaggttttgcatgagtaatgctaagtctgtgaatagtctacttgtaaaccacttcaagctttttgtagattagtgcctaaagatagattaggaagtggaatacatgtcaaaggttccatatgccattggatttggttggttgatg

SEQ ID NO: 269633 - DNA, 503 bp, Glycine max
tattccgaggatagtctattatcatgcacaacctgcgagaattggctcactatatgccaaatatacctatgaagcattttcttgagcaagtagcactggcctggagctcaacctccattggtgagacccaacgaggctactgctcctgagcccacacctgcatggggtgaaccaatgccagctgatccataatatctagtggtgaatccaccttattctgctgaacttgaagtagttgccccatcatgcttaaacgactggactcggaataagcaggcaggttctgcccctcttctatgatcataggggtcttcataaacgtgttaagggcgtctacatcaaagttaatcatgtggcccctaacccatatttgctagggtgacttgtattccgtatcatacaagacggcatagaactccttcactattggcacattgatgctgccatctagaaagattgtgaatatcttgtgctaattccttctttatagctctggcttgaac

SEQ ID NO: 269634 - DNA, 492 bp, Glycine max
agcttcggtattcaatttcgagcatctcgacatattacgggactcaatcgaacatccgagtaaaaagttattgtcgtttgaatttgctcagagatttggtcttcaatttcgagcgtttcgatatattacgggactcaatcgaacatacgagtaaaaacttaatgtcgtttgaatttactcagagcttccgtattcaatttcgagcgtctggatatattatgggtctcaatcacacatccgagtaaaaagttattgttgtttgaagttgctcaaagcttcaacattcaatatcgagcgtttcgatatattacgggactgaatcatacatccgagtaaaaagttactatagtttgaagttgctcagagcttaggcattcaagtccgagcgtctcgatatactacgagactcaatcagacatccgagtaaaaagttattgtcgtttgaatttgcttagagctttcgtcttaaatttcgagcgtttcgatatatta

SEQ ID NO: 269635 - DNA, 419 bp, Glycine max
tgccgccacagagttttccgactatgctcttgtgtggtggaacaagctacaaaaggagagagcaagaaatgaagagccaatggttgatacatggacggagatgaaaaagatcatgaagaagcggtatgtgccggctagttactcaagggacttgaaattcaagctccaaaaactaacccaaggcaacaagggggttgaggagtatttcaaggaaatggatgtgctcatgattcaagcaaatattgaagaagatgaggaggtaactatggctcgatttcttaatggtttgactaatgatatccgtgatattgttgagctgcatgagtttgttgaaatggattatttgcttcacaaagcaatccaagtggagcaacaattaaaaaagaagggagtggctaagaggagttttaccaactttg

SEQ ID NO: 269636 - DNA, 870 bp, Glycine max
  unsure (1)..(870): unsure at all n locations
gcaagcgggtgtgaaactgtgcgccccccgaatcgtagaaagacctcccggccagcagccagnaaatcccgagcccaaaaaacaaatgtttgtataggggggaactggaaccagcccccaggctttcttggagagagagaccgacagaccggatgaatattaacgtgagaaggaagacccaacatattagccaccaccccccacctactataacacctggaaaggaccaaccaaccgaggggagagaaaccaataaaccctctaaccccaagaacatcttctggtaagctgcaacttccagaacacccaatcaccgactgcaaatactatgtcccgacagcgggagaagacacattgcctcacatgaaatcccgagacctcaccaaaatgtctcttaaaggcaccccaaaatcatccaagcaaatgggggaaacgacatcaccacacgacgaagaatggcgggaacacctccacaaaggcgaaggccgaacaccccccccaaacgccttcggcacgacgaaacaacaaacagcccaactgccacaacgaactggagccaaccgcaccatttcctccgaacggcgctacctatcgaaaaccaacagccgccacaatcccggggagtaagataggcagccaagaccccccacggaacccgataccgacccccaaccaaacccaaacagcatggggacgggaaaaccacatccccaggcgctcaccacccacccagcacgcactccacaaggcgcggactcaccgcggacactggggcacaaaaagccaacacaggcaactcaaacagaacgcaccccgcgcgcccaccacccgcctcccgcgccacacaccgcgcccactcgcccacaaacg

SEQ ID NO: 269637 - DNA, 289 bp, Glycine max
aagctttttttcttgtgtaatcaattacaataagggggtaatttattaaaatagagagtcctgccttcagaagaaattttctaactttagaaattttcttctcactcatgatgatgcatgacgcactaatgatatgttaaagactaagatgcaacattcaatataacaagcaatacaaatgccagtcaagagagttaggcatgtaaaagacaaaacttcttcaagctcttctccaagcttcaagcttaagtcttcatgttgctcatgttgctcccgctatccctaatag

SEQ ID NO: 269638 - DNA, 449 bp, Glycine max
agcttgacggagtttgtcgcatcggggaacaatttatctttaaaagtgggtcccaattggattcctaattttcaacttacctatttggaagtgacatcatggcagttaggtcccagctttccattgtggattcagtcacaaaaccaactttaatatgttggactatctaacacggggattttcgattctattcccacacagatgtgggaagcactttctcaggttttgtatttaagcctctctcgtaatcatatccatggtgagattgggactacattaaagaatccaatatctgtcccaactattgatctaagctcaaatcacttgtttggtaaattaccctatctttcaagtgatgtgcttcagttagatctttcaagcaattcattctctgaatccatgaatgactttttatgtaacgatcacgacgagccaatgcaattagaatt

SEQ ID NO: 269639 - DNA, 908 bp, Glycine max
  unsure (1)..(908): unsure at all n locations
cgaccggnnttgatgccntcgttatatcagcccccttggaaaataaacctccccggatttgacctgaaatggttgttaaggagagaacaagtgtttcttttcacttccattttccctggcgggttgggttcttttccaacaaaatatttcctaaccagttccaaaatcggaaagccaaattgcctgtgaaattctcccataggaatattgctccccaaaatgcttaatttcccatttttaacccctttaactggcccattaaccaattttaacccttttggggaggttattccgcgcctanattggaattccactctttcttctttttctttttaaatcctcaaaacaaagacaccatcccggggttcctcggtttggtcctatttgggaaatatttggaaccccgacattctcatttcccaaaaaaaaagtttcttcctttggcatcttctggtccccaataaataaatccgggggggaacgtacccaaacccaacacaaaaaaaaggtctcccacccccccccccctctttttaaaccaggtgtaagttcaaaacccctgggcttttaaaacaataattcgggccttgttttacccccccccatatggggcccttttctctactcttgggggtgggaaactttttttattggcccataaaattattggggccaaaggcgccaaccaactcccattcaggggaaaaaaaggaaaattcgcgaccctgcctctcccctcgctcttttcacaccccccctcttcaacacatatttagggctctctgacaaccccctcaagggaccggtttcagtctcgcatttctcttctgccctgtccccaacttactgcccaatttccaaatactcttgcttatattctgtgcaacctttcttggtcctggccccca

SEQ ID NO: 269640 - DNA, 562 bp, Glycine max
ctgcctgcatgcatgctagcttctggcagaataactatctagcaattagattttctgttataaccccttagttttgttccttggaacgggctatttatgagtgagagcaccttgcaaaatgattagaaaatgaggaacctcgttgacaactttctctttgctctcttatctcaacgaccgcatggaggttgctgggccttgaaaaccagctgctgacataaatatgcccctcatgaatgatggtgctcctcatgaattcgattttcttccagaactacacctacacatctacttctatattccaaaagtaatccaacccttctctttttatacatactaatgtttcaacccatgtggcgggtggggcaaacaatatatttatgttattggaagatgatcttgtatcaattaataccgtttccgaaagttaaaaaaaattctagcttttgatttgattatttggtttaacgtataagttacacattgaaaaataattcagacttttaattcccactgatacagtaaataatggaaaagtgatataacatgtgttattgcttac

SEQ ID NO: 269641 - DNA, 611 bp, Glycine max
ttgatgtgttctaaaagttggttatggaattcagagaatgcatgtaatattctgaatgcttatgtgatactttatgaattgcttatatttttaaaacttataacttgttatttattattttataattattatttataggttctagatcaattgaagaatcaacgtttactgatgagattgaatccgatgatgaaggtatattcacttttagtggttctaattttttttaatatcattatacatatctaatttttcaaattttttaaaatataggtggatctttggtcagtaacattactcaatgtttgcaagattagtagacattattgttgatcggtaaagtaataactatacttatttactaatgtgatgtgtgattttaagatttgaaacatctaaaatatgatgtttgattttataaataccaagttgagcgcttgagaagaaatgttaatgacatgtttggtgaagttggtggttattttgatgatggacattggtttcattttctatttatttctaatttggtgtaatttgaactaatgaacatttgaattatggtgcttcatatttgacggtatttatttacccttaaaaaaataatggaatca

SEQ ID NO: 269642 - DNA, 537 bp, Glycine max
agcttcagaccaaagcaacataaaatctaggtatccaacacccctcaatttaatggattttcaaggtttgagaagtgaaattggcaatgaggtaaatttggagcaaactctcacctcacacaagtctataacatcaatctaaacttgctcaaactggatttacaccataaattccaccgaatcaaaatttgactcctcaacacccaattttaccctagaaatggctctttgatcactttggccattagtttttctctcttgcacaacccaagcttcctcataagtcctaaatgacatttcaaactatgattaactcactttaacctccaaataccactaaatccagatttggccttacaactctcaaaaactcaccttttcccactcataacaccatattctcactttctaaccctaggttaactctacccttcgtccctagcagttttccataagcaatttcagcacaccaacatcaaaagcatcatcataaaaaccctaaaactgaatgggtaagcttaactcactcaaacataa

SEQ ID NO: 269643 - DNA, 454 bp, Glycine max
tgtacgagtactgagaaagattcaagaaattgtgtgcaagctgccctcaccaccagatttctgagcaactccttcttcaatatttttgtgagggacttagcaacatggagaggagtatgattgatactgccagtggtggagctcttggtgatatgacccctgctgaggctaggaatttgattgagaagatggcttccaactcccaacaattcagtgcaagaaatgatgtcattgttcttaaaagagtccatgaggtggccatgggttaatcttcatctactgaaaataaaaaagcttgaaagaaaacttgatgccttggtcaaccttgtaacccagcttgccatgaataaaaaatctacagctgttgcaagagtctgtggtctatgttcttctgcggatcaccattcaaatctttgtccttctttgcagcaatctggtgtcaatgagcaacatg

SEQ ID NO: 269644 - DNA, 354 bp, Glycine max
agcttgaaacatataagaaaacccaaagcgctgtttatttaaagagaaaaaatgaaggggcaaaatttgcattttctaaaagtgtcaggtgcaccagcaatgttgctgggtgcacttagaaacaccctttatccttgggtcatccctaagtggctggaatggttttgcacttgaaaaagaaaaggaatattgatggtttgaagtttggatggttgtgattggttggcaaagaaaatcctacgtgtacgtgaaaagaaagaaggctgtgtcgcaaaaagcgtggcgcttgaagaaacatgtggtgcgagtataatgagtgctcagacatgaatacaattggacggttgatatatt

SEQ ID NO: 269645 - DNA, 568 bp, Glycine max
ttgtctacttacttccaaagaaattgtacttttttaggcttctcatactcatacgtgctatgaagttccaagcaatactcttttgagccttcattagcatcctgaaatgatgacactgactgtgtaacactcccagacacaacctcactaatatatgatagtgtacccttacaaatcaagctccaaataagagtacaaaatcatgacattttgaatgcaatcataacttgtgacgttgtatcaacaacaacaacctgtgacctgtaggttgcaaggttatatatgattcagtatgataaatatatatatatatacatatagtctattatgaaacatgacttggcaatttcacatgtcagatttgtttttttacttcttgcaattggcttttattcaaatttggtttactgcatatttattaatgtcattacagctgtgtattaatgatttggtttgtttcaatggttaatatgcataatggtggccacattgcacatggaacatagttgggtcatctgaatttttatgttaaccctagcaggaactgctaatttttgtataacattct

SEQ ID NO: 269646 - DNA, 463 bp, Glycine max
agcttgtgactcttggcaatttctttaaaactagtcacttaaaaagttgtgacttttgaaaaaatcttcagaaacaagtcacttgaagaattgtgacttttggaaatgtatttttcgaaatcagtcattggtaatcgattgccattaaggtgtaatcgattacacatcaacagatgtgactcttcattttgaattttgaaaattaaaacgtttagaagctctggtaatcgattacaagtattgtgtaatcgattacacaagttaaaaatgatttgaaaatgttttatcacaagttgtgactcttgaaatttgaaatctaacgttttaaaacactggtaatcgattactaccttctggtaatcgattaccagagagtaaaactccttggtaatgattttgtgaaaaaaaaaacttcttgtgctactaaatgttttggaaaacctttttagaacctatcttgatt

SEQ ID NO: 269647 - DNA, 292 bp, Glycine max
tctagccaaatggacttaccttgaattaattcctttgatagcccctttgagcctatgttcccctttctttgttttgaagctcattacaagccttaagtgaaaaaccatgatatcaccttacccttaaagaattttggagctttggaattgttttgggaataagtgtgtgggggggtatgtttcattggaagatatgatttgtggccatgcttaatgtttattttggccatgcttgatgtatatatattgcctagttcttggtctaatcttacattgctgcccaaaaaaaaaa

SEQ ID NO: 269648 - DNA, 576 bp, Glycine max
agcttcccagatatggagagctaaattctctgttggttcttccttgtaggtacttgatgtaaatacatgtatatctatttaatgatgttttatatgttctctatgctaccagtacgtcatttcattgtgcttttgccttgatcacgtagatgcatgctttgttaggatcattcaacagtggaaactggtctgattctcagaacttgataggaaagggctagtttatcgtattatcacgagggatcggggtacggtaacctagttgtttgtatgtttgtcttaatgcggctctggtcgagtttagtccaacaagaggaatctgaggatgatgcttgatcaggattaggctagattatctcgaggaatcgaggtttagcatttcaggagacgccacagaacacatgagcattgttaagtatagaatatccttataacatcaggcacctactaggaagaccaacatgttgtctacttgtctttacacatcatttctcacatgattttgctttaaatagttagtttacataactattcatagtccacacatatcttttcatactagacacctattcactg

SEQ ID NO: 269649 - DNA, 496 bp, Glycine max
tcactggagcttacatcaagtggtgtaaagagcgtcttcatctgcgcgatgtcccattgcttactatatctttctggtcgttgaattctgggtatttccttgatctacatcttattcaccatgtctatcctccattgatctgtggtttggtgctgcccagagtagattaaaaaaaaaaccgagtaaatattatatctacacttgctcttgcatttctatagttcagattttgtagatctatgattgaatcttgtgtttgtgtggatatctgggtctatcattgatcattcataatattcttgagctgaaccttatatctaaacttgcttcccaaatattgattagaaaaaaaaaaccaacttctaagtgtaaatgacttaatccatgttgtcttagacacctgtttaatcatagtacttgtcacattatgttctaagcttgtgatgatcgaatactacatacatttgaccatgtatctttgtcattcttagcccat

SEQ ID NO: 269650 - DNA, 491 bp, Glycine max
  unsure (1)..(491): unsure at all n locations
tcttccccaactaatcttcttacttcaccnnnnnnnaaccatgactgaaacgacattaactagcttgaggcaatcacatgaaaatgatataagactagtgaagctcgcttatgtcaagaggactgaccgactagtggatcgaggaaagaacatgggctatatgacagtataaaaaactaatctacagcacccataataaggcttgacgacagcttctacatttatatctacaacctaaaatggaagccagggatagtgtgatatatccattacacagagaagctatgatgtggatggataggttcgctgtcactctgaatggaagctaagagccttcaagactgttatgcaaagccaaagcaatggcggacgtgttctccactcccgatgaatgtcatggtcttttcgattatcgtgagcatatgatcgacgtgatgcccccataattaggaactactgacgcggttgtactatggctcgactagacaaag

SEQ ID NO: 269651 - DNA, 352 bp, Glycine max
  unsure (1)..(352): unsure at all n locations
agctttnctacaagtnctaattgacattctaaactataatcaactcactttgcactcaaatttccactaaccccaaatttggctttctaaccctcaaaatctcacacttttncacctacaacactaccattctcacatttaactctaagctaactctccccatcctctctaccaattttctatctacattttaagcatacatatatctgaaagcatcattattaaaccctaaatcaacatgggtagttntgcttacatcaaacatgtcaagtttagtataatttcaacaatttccttcacaaacaactaccctaaagcaataacctagtagaactacccattatagctccca

SEQ ID NO: 269652 - DNA, 143 bp, Glycine max
  unsure (1)..(143): unsure at all n locations
taagatcagaagtatgggatgtcggngccaagttataataagatagaacactccaggtttgggccagagtggtaagatctttcctcatgagcttccacggtagaccctcaatattaagtacaaatcccctcccaaggatacac

SEQ ID NO: 269653 - DNA, 416 bp, Glycine max
agctctgacaagacaagacacactgctgtcttgttcaacaagataaaacagagaaatctattctaaagatacatataattataacccataattataatactccccttcaagctggagcatataaatcgtatgcaccaagcttggaacatataaactgaatcctaggcccccttaaaggtttactcaaaatatctactggctgatcattagagttaatgaattcagtgacaatctctttagacaatagcttcttccgaataaagtgacagtcaatctctatgtgcttggtcctctcatggaagactgggtttgaagcaatgtgaagagcagcctgattatcacaatataacttcatttgcaccactttgcaaaaattcaactcttcaagaatttggttaacccacataagttcacac

SEQ ID NO: 269654 - DNA, 450 bp, Glycine max
ttagacgcactataccaacctctaggatccagggacggccaattatctatatataggcttgctaagggtagagagaggaagactagagatttggatcaagtaaggtgtgttaaggataaagaaggcaaagtcttagtgcatgaaaaagatatcaaggaaaggtggaaggcgtatttccacaacttatttaatgatggatatggatatgactctagcagtctagacacaagagaagaggaccggaactataagtactatcgtcggattcagaaacaggaagtaaaggaagcgttgaaaacaatgagtaacggtaaggcggtggggccagacaacatacctattgaagtgtggaaaactcttggagatagaggtcttgagtggctcaccaaactctttaatgaaattatgaggtcaaaacgcatgccggaggaatggaggagaagcatgtta

SEQ ID NO: 269655 - DNA, 478 bp, Glycine max
  unsure (1)..(478): unsure at all n locations
cgccccgcgcgtgagncttgatgancgccatctataacncacctgctgcatgcagcttcggcatcgagccaggcctcgantgcggatatggccctgactcttgatncagcgccaggtacagcggctgctactatgaccacacttcctgtcactctcagattaatgactccacgtcacttatctactactttgcacagcgcttaacgtaacatacaacgtaattcgaatggatcgcagaggattctgagccgtataagcctacgtatcttttacatggacacaacgttctgcggctattattttaccaatacatcagatcaaccgacttccactctaggtcctgatactctctctctctggctctctctctctacgtctattggaacatcaccgcttactctactagacatacgggcaactccactacgacttgctcacccttgcgaacccgaatatacaaccgcctcttgttactaag

SEQ ID NO: 269656 - DNA, 348 bp, Glycine max
  unsure (1)..(348): unsure at all n locations
cattgcataccatatctgcagggagaaatcttactactttatgaactgttaaacggtcggtcagacagagaacaataattgacaagatttaagtaggtttctaccttctctctgctcttaggccactcaattgggcgtttataaccttcacgaacaggaacaatgcangtaggacgttcttcaggacagtgcctttctcgatgttcatagtgtttactactctggagactcctaatagcctctcagttattgaggccaggtataaaatcaggaccagcagtgacattacaaagcttccacttgtatccaattggctgcttggaagactcttgagaatccttttcattc

SEQ ID NO: 269657 - DNA, 425 bp, Glycine max
  unsure (1)..(425): unsure at all n locations
tagcttatctacatgatgaagaatgctttcctttgagtacttatcttttatctttgcacaacattgaaaaacaatgccttacatagagacttatcacatgctacatgaagaggatccagaattagaatgaagttgcgtcaaagcctatattagaatgacgaacatattgactcttatgaactaaacacccagatggttcaaaatgactcataatgcatcacaacgacaatatcagatcttccatatgatatcacacataccgattaaacacattanaacacangagttgacaacattttactttcctcatgttgtcacatacactaagggcacataaaaaagtgaatactatctgcattataagatgcaaaattcttcgaagctaaatctgtgaatgaatagcattgattaacagcactataata

SEQ ID NO: 269658 - DNA, 465 bp, Glycine max
  unsure (1)..(465): unsure at all n locations
actttaaactcagctaatgttgattatatattgtactttgaaattntatccccctatagttgcccaacaagtttaaagtctgattttttttcctaatgtggcttaaagctttgattttttatttttattttttattagggtaaatctttgagttttttttgggtaatatgcactctccagtatgttatatggaaatctaaagtcggtctaagagtaaaattattgtagttcaaattattcaatttttgttattgttttcaaatatttttttttgtttttgctttttgattaaataaaaaattatttttggccattgacacttttttacttttttaatagctatatatcagcaaattttttgtttgctcgatcactgataattntttccatttattattagttagttcctttgaaaaaaattaatactaaataaaaaaaattatcagaaacaaaaataaaattcat

SEQ ID NO: 269659 - DNA, 219 bp, Glycine max
agcctatgctccccttgttttggtttgaagctcattacaagccttaagtgaaaaatcatgatatcaccttacccttaacgaaatctggagctttggaattcgtttgggaataagttgggaataagtgtggggggtatgtctcattggaagatataatttttggccatgcttaatggtttattttggccatgcttgatgtatctgcatattgcctagctc

SEQ ID NO: 269660 - DNA, 406 bp, Glycine max
  unsure (1)..(406): unsure at all n locations
gtactaccccttagagccgctcagaatctgtttctgccccattcttccttccaggccctctgtgtttcccgctctaacgcttcgactgtagtcatgttaagatcccttagatcgtcacactcttttctgaccctagtgactcctgtcttgagctttatcttgactactctcattctttcaagctctattctcaaggcttacacttctttgctttcttcaaggacttcggcttccttcccactnttttagcttcgggagccaagttatcccttgcatcctagccttcaaccacttatgatagccgccgatgacnaccgtgttgcttcccctaagctcttcatcttttctttccaatgtattccatgtcttgcggattctctgatgtatntttgcattgccttcattg

SEQ ID NO: 269661 - DNA, 332 bp, Glycine max
  unsure (1)..(332): unsure at all n locations
cggatctctaagcaccgccgatgcagctttttaacctacattcgtaacctctactatgtccatcaagttcttaattacgcgtgtcatggcaatctcttctattcctacttgatttcatctcgccactctcccttccctttagataatctaatctcttttgtccagggggaaaaataacatgagtgaaatatcttgaagaaagatacccccccctgttaagtaattgcagacacattttgctgacttagcagaagtgcaccaacatcaatccaagaagaatctggaagaaattcacgtctcaaaccanccatacacaagcatttgtccttctc

SEQ ID NO: 269662 - DNA, 315 bp, Glycine max
atgaaacactatatcacctatgtccgtctttcattatgtattaacaaagggaagaaagccgtgacaatgcatctgtttgatatctaagatacatgtttacaatgtcaaatcttgttaacgtcctactagaaagacatttatgtttcaccgtcattaagtgcataaaaaactgaatgacattttaactaaggggaaggaagatgtttgtacaattgtacgaaaagatgaaaatatcttttttcgcttttggatcttcgatggaaaatgttacgataaggactaagttcgcgaggactaacacctcataaccgaata

SEQ ID NO: 269663 - DNA, 357 bp, Glycine max
  unsure (1)..(357): unsure at all n locations
agctntcatcaagtggtattatatcacaagagctttaagtacgtgctccttaaacctccattaattttcagctttaccttctcttccattggtgcttcttcatttctctccatgtatctcctcacttgtcttgtgctaaatgttgttaacatgattctttagaatttccactgattaatcttgctatagaaactacatttgattttctatggctcaaatttcttgctcatgttcttaaaccatcaattgtgttgagtttacgttcctttgagctttgtcttgctattttttgtggctgaaacctacaacatacaattattaccaaaacattaaagtagaagaacacctccaaaatct

SEQ ID NO: 269664 - DNA, 274 bp, Glycine max
cggacgatgtattcgatgtacatcttcgtgatgacactgctaatagaggcccaaagcctattgaagaacttttcaaactataactcagacccaaaccggggtagtatacacagctcagccgacacctcaccagccatgaacatagacacatagtcgataccttacataggaacacaaacctatttgcatggcagacatctgacatatcgggtatccaccccagcattatatgccacaagctcgccatctgtctccaggccaaattagtgtcata

SEQ ID NO: 269665 - DNA, 381 bp, Glycine max
attcgccatagcgaaagggaacagattcgtagcctctatttcactattaatgcgccagactaacttatgtctgcagaaccattattccacaaatttccacggcgagactgtgtcaaaaccagtcgctaaggtgatgctcacaactcaaaaacattaagacgtttgcgatctctcgtctactggtacaaacttgaccgtatgcgagacaacacaaaactccctgcgagagacatcccttccaccgagacattatcttctcaacgctcaacaatggatgtgtggcaataaacattccacctcgtgcttaaattcacctctcgccaccacttacaagtctcagatccctgtcctactgagaatcaatcagcgtatgcggaaacc

SEQ ID NO: 269666 - DNA, 516 bp, Glycine max
  unsure (1)..(516): unsure at all n locations
actcgngccattggaannnnctagattacgnctgctatntacgcgactgtatacaatactcaagcccgcacaccatatgctcaccactattataggagagaccttcatgttgtttcatataaacctcattctctaaatcaccattaagaaaagttgttttcacatccatttgttgcaactcaaggtcaaaatgagcaacttatgccaagattatatgaagagaatctttcttagatactggagaaaaaggctctttgtgatctattccttcattttgagtaaatcccttaccaacaagtcttgccttgtatctctcaatgttgtctaatgaatcccttttggtcttaaagacccatttacatccaatggcctttgccccattacgcaactctacaaggttccaaactctgttactctacatggaactcatctcatccttcatggcatcataccataaatttgactctttcaactccatgcttgatcaaaaagttcatgatcattttcaagctccat

SEQ ID NO: 269667 - DNA, 379 bp, Glycine max
  unsure (1)..(379): unsure at all n locations
agcttcaagcggctcgattgctccaggttgctgtttggaagggcaaaggtctgtatggtggtcagcagaagagcacaaaccacacactcttgcaacacgtacagatttctgattcaagtgcagttggggtaccaagttaaccaatgcatccagtttgcctttaaacttcttagtctcagatgatgcagctgagtttgtagctacctcatgcactcctctaatgactatggcatcatttctggcgctaaactgctgaatgttggaggacatctatttaattaaatttctggcttancacgagtcatgtctccaagggctccaacactggcagcatctatcatactctcctacatatcaccgagtccttcatgaaaatatt

SEQ ID NO: 269668 - DNA, 438 bp, Glycine max
  unsure (1)..(438): unsure at all n locations
tagtgctngattaattgtctctgctcttaatttacgttcatgcttaatgatcatttatgagtaattggtgtatgtgttgcttaatcacataacgaatgtcttatgttaaatttctcttaataatttaatttaaggttggattaagtggttaaactgataaaggataaattctcgcaacctacgataagagacttgcttgtgaatcaaggggaagcaatgcattttaattctaatattttctagttcaattttactcgttgtgtaatttacaaaagcaaacaccccccccccccaatttgttgccatttcctactatctgttatgaacatttgatttatcattgctcattgggaaacgacctaggatcacttcctaattactacaatttaatgtttatttgattcgggtatgggctcgatcaatcatggcataacaaaa

SEQ ID NO: 269669 - DNA, 64 bp, Glycine max
agcttattgatttgtcattaactgtacccccgactttagacgactatctcctcggaccttggtt

SEQ ID NO: 269670 - DNA, 280 bp, Glycine max
tattatatgacttatattgcgaatttgaagactcaattgatttagaatgaagaaaatcctatgaaaagtgtcaaggagccctaaaaatcactttacgatccactgttaacttggtatttaaaatataaaaaattactaaacccatgagaaccaactcatattaattctctaatttgtaagttgatgttgaatgcaatattagttgattgtatgaacaatgttgaaattaattgccattgttctctgatgggtactattatgccttaaaatgttatgaata

SEQ ID NO: 269671 - DNA, 301 bp, Glycine max
agcttcttagtttcagatgatgcagatgagtttgtagctacctcgcgcacctctctaatgactatagcatcatatctggcactaaattgctgggagttggaacttatcttctcaaataaatttttggcttcagcaggggtcatgtctccaagggctccaccactggcagcatctgtcatacttctctccatgttactgagtccctcataaaaatattggagaaaaagctgcttccaaaatcgatggtgagggcaactggcatatagctttttaaatctcttccaagattcatatacgctct

SEQ ID NO: 269672 - DNA, 431 bp, Glycine max
  unsure (1)..(431): unsure at all n locations
ntaagtgtgaggattgaaaatatagagcgaagaagagaggattaatcatctaattcttctcatggagaagatgaagggtatgaaaaggatgaggggggaaggaggaatgagaggtatagggagagaagaaatcatagaagatatggaggtaggcaaaaagaggaagggattgagggagtgaaggtgaagatccctacttttaaagggacttatgatctagaagtgtatcttgagtaggagatgaaggttgagtaggtttttgcttgctacaactacaataaagagaagaagatcaaattgacctccctggagtttgagggatatgccttagtatggtggaaccaagtgaggagtgatgttgagaggatgataatgcctttgattaatacttagcatgacatgaagagagtcttgatagagagatttgttgt

SEQ ID NO: 269673 - DNA, 135 bp, Glycine max
agcttattacaatctctcccatagaagagatatgtagtttgctccctgagctcaatttgtgcacatcctggcttgaacaaatgaagattcttttcaccatattgcagaattcactgaaggaacattaaaataata

SEQ ID NO: 269674 - DNA, 470 bp, Glycine max
  unsure (1)..(470): unsure at all n locations
actaagcttgatcttcactaattgacactaatcttttcttccacatcttgtacattacaggatatgaacaatcgtatgaagattggtacagttgaagtgagacacgacctttaccacctcacactagaccaaataaccaccaaagccgtatgctccactattattcatcctctgtcataccccatttttgacccgtttttatttcttttttctcgtcttttaagccggaaatttccatcatttcagatgaaatttcggcagggaggtattttaaaatacctcatttttgttttgaagacgcccctttttttattattattatttatttatttaccttttttattattattattatttntatttttagttattattttcttttcttttcctttcctggttataagtgttttttattatttccgtnttttttattattatctttattagtatcttctnnttcgtttttttcg

SEQ ID NO: 269675 - DNA, 269 bp, Glycine max
cagatccgatcatggaaggacttggctatctgcttcattatgcagtaccagtacaataccgacatggcttccgatccgaaccagcttctgggtatgactaaacgagagcatgagtccattaaggaatatgcccagagatggagagatcttgcagcccacagtctacccgccatgacggaaagagagatgatcacaactatggtagatacgttacccacgttctactatgaaaagctgataggctacatgcccgctaactttgcggatct

SEQ ID NO: 269676 - DNA, 431 bp, Glycine max
  unsure (1)..(431): unsure at all n locations
cttttacaacattctacggactngaaaganaacattggcacatcagccacaatgcctattatgggaaaagagccctagaagcagcaaagaggagcagcttgtgcattgaagcctatgctttgtcatttgagagagattattgagtagagagtgagtgtgagatgctgagaagaggaggaggaaatccccttcttgtgtaagaaactatcattctttgtttttaatctcatttattgttagggtttctttgtaatggctggataaacaccctagttggggatttctaatgaatagtggatgtaaatacctaatatctaattgattgtgttttctgtgttcaatgcttccttcaatgcttgatgtttgcatggctttggtctgatcacccatttgtgtgcacaagtaggtgactttagcattgggaaatgtac

SEQ ID NO: 269677 - DNA, 95 bp, Glycine max
aaaaatggaatctatttgtccagcatcgttgtctttgcgcttgagggtctatctgacgcctttcttgatgactaatctgcacatgttacatgatt

SEQ ID NO: 269678 - DNA, 401 bp, Glycine max
  unsure (1)..(401): unsure at all n locations
agcttgtggattttanggattgcgggctgtttttgtttatgtttatgtttgagtttgcgtgtgaggcttgtgttttggaagaaaaactcgaagaaaaaggtttgagtttaggtgtatatttctcttcatagagtttggccaacgaaactgttctgaggagtgatgtacgtgattgcgcaatgacatccattctgatattaggttttaatcctcccacaaagcaatccaatacagcttcttgtgtaattccttgtactcgattacctaaagccgtgaactgcacgtaatatgactgaactgaaccaatttgagtgagtttaaacaactgagatctacgacattcacacggtgatgggccaaattctgtctctaacgctcgcataacagcaatccatgttttg

SEQ ID NO: 269679 - DNA, 446 bp, Glycine max
  unsure (1)..(446): unsure at all n locations
atcgggagacatcacaggctagtattnntaataaattgtgtaggaaaaattcaccttattgatagagaaaaatctaaaatcatacatcttagttaaataaggcatgctagcccccaacattattgcattttgattccatctttggacattcaaattgttgtttatttttcctgttatcttttcctttgccttagtctaaatttcgaacttacaattcggtatctctttcttcttttgtttctcctcatttcttaataattggatttgcatcacttaagtacaaccaaagtccctttggattcaacagttgaacttcaatttcaatctttactacttgtgataaaattaggacacttgtcaatctattaacaagtttttggcactgttgatggggactttggttttcgtacttggtnntgtacaaatcccaatttgagagcaatcat

SEQ ID NO: 269680 - DNA, 356 bp, Glycine max
attgataaacgttgctgcaccatcacgatgatctggccccgatgaacaacttaatcatagtccagcacgggacatatggcgaagtgcaagttctgtctggttaagcccgctggagaacagagccatatttcataactgcaacaacagtactaaatatcacacaatttctttgatcatactttcttataacatacacttaatgttttaaaaaccataccagtccttgaactgattacaggagacgtctaagattttgcggtccagcaacggtagaactacgtttgtgaatatacatgtataaatcataacgcccaaagatccactaaaactatatatatatatatatatatatatac

SEQ ID NO: 269681 - DNA, 460 bp, Glycine max
  unsure (1)..(460): unsure at all n locations
atatttcttgacaacatccatcatgcctgcactattcatgattcttcttttgtatgaataggccaaaatggtgatagttcaacaacttttcctataataatcagcgttggtgacaccagctgagcagatgtaattttctcgtgaaggtcctttagttcagcaaacacctgcatcatagcaaaataatcagctattggacctagcatccggaaaagttgaattaagaaccagctatatatagattcacacacaattgtatttatttatcagtttttaatatcaaccatgcagaagtacaaaataaaatgtctcaaattcacaactacctcctaaaacaaaacattattaagatcactatatcctattagccttgactgtagtgtcaggtacactttcttcacacccctcacattcaatctttaattgttgaatatcttttactacagntaatttgtcaaga

SEQ ID NO: 269682 - DNA, 383 bp, Glycine max
acctcattgatactatgacagcatgaatcttgtaaaaacttgacactgacatgtatgacgtggatgcatctattcttcttcatgatgtggacgagctttcttttcaagatcttgaaaagatgtaacatttcaatggtggccatgggaacggtatgatgttactaactgcatccatttgtttgtatgtatcaacaattttgttatagatgctgaactatgcattatggtgcaattcccaactggccttgcattggccattgaaaagaaaagcaggcgaatagaaatatcattatactgcctcgcccgggctatagagagtttctttacatgcatagcggatgcacgatatctgccacaatcaagaaggaacaagagagctgatg

SEQ ID NO: 269683 - DNA, 385 bp, Glycine max
agcttgtaattcctgatccttatataacatatgttgtaaaggttgggactggaacgagtcaccaatggctttcttgaggagagagacatgaaagatcggatgaattttactgtgagatggaagatccaacttataagcaacaacacccacctagtttaacacttggaaaggaccataaaaccgaggggagagtttttcattaatccttttagccaacgatcttcttctgtaaggttgcatcttcaagaacacccaatcactgactgcatattctatgtcccgacggcgtttgttgacattcgctcacatgatatcttgagacttcaacaaattttctcttagagtagccaataattcattccgagcaattgttagtttattgact

SEQ ID NO: 269684 - DNA, 417 bp, Glycine max
  unsure (1)..(417): unsure at all n locations
acataactntgcaagcttatacaacttgtgtaatcaattacaataaggttgtaatcaattaaaatagagagttttgccttcagaagaaattttctaactttagaaattttcttctcactcatgatgatgcatgacgcactaatgatatgttaaagactaagatgcaacattcaatataacaagcaatacaaatgccagtcaagagagttaggcatgtaaaagacaaaacttcttcaagctcttctccaagcttcaagcttaagtcttcatgttgctcatgttgctcccgctatccctaatagaggcaacaaaataataatgcatattctatcccactaacccttcttttgcaggtccttctaacaactcttatgtatgtncttcanataggggtccacaacaacaacaacaacgagc

SEQ ID NO: 269685 - DNA, 381 bp, Glycine max
agcttataagaacaaaattgttttaatcatctttatatatgcctgtgaattacgacgcatcaacaagaatcaaccccacgctattgtgcaagcaatcaatggggcaaaacacaccaaatgaatataatgatggatggctcaaattctcacaaaggtaaaatcatcactttcaaattgagcttttcaaactatcatgacatgtaaagaagaatcaacgatttcaagtcacaaaatgtcaagaacttttattttcaaaacaattacccatttcttgaacatatcctataattcaaagaaaaacatgtaaagtcctacgtgcacatgaaattgaccccaaatattaaactgaaaatccaacgaaactaaccacattaacaaatt

SEQ ID NO: 269686 - DNA, 444 bp, Glycine max
  unsure (1)..(444): unsure at all n locations
ngattgtaactaagaataatattgagcaatganttgactagatccatatgaagcttgattgtgaacctcattaccttatttgaagctttattcacacaacatacattgctgacacaaaatttcttgaattatatatggagaaatttcttcaattcgatctggcttattagctgtcacaagctagctggcctcttcataaggtactcacctacacaagttttggcatgttaagttacttggtttgtgcatagtgttatttcatttattaagtggatattcatatttctttttcgttcttgtttatagcaacctaacttgaatttgaagtaggcattgatatcttgtaactaagaataatattgagcaataatgtgactagaatcatatgaagcttgattgtcaaccccattaccttatttgaagtgtaatcacacaacatacact

SEQ ID NO: 269687 - DNA, 358 bp, Glycine max
agcttgcttgtggagcttctatggaggctagatctttgagcttcaatgaggtccttcaatagtgatttttcaccatggagatgcagcggaagacaaacgagaagatgagaggggagacaccatccactacgaaataagccatggaagaaggagcttcaccaccaagaatgtgccttggataaaaagcttgaagaggatgcgttcctcgacgaaaagaaagagagagaaagagagagggaggagccctaaattgaatgacgaaaagggggagagaacatgaactctgagttgtgtctcacaagactctctcattcatcaaagatacaacaagtgttacacatgcttctatttataaact

SEQ ID NO: 269688 - DNA, 451 bp, Glycine max
tcttgagatgtgaacctagaccgatcaaatcaaacttgggaatgtgtagaaggagccttccttttcttagatgccatctgcaaaatataaaacaaaacaagagattagcacaggttattttcaacaaaaacataaaaataaaactgaaattttgactgggcgcgtagcgcagcaagctgagcttagcgcgccttaccgtaagtcgactagcaaggatcaaaagatcaacaaacaatagtccccggacgaaattagggtatgacagttgcccctttttacttatcttttattgaaaataaaagggaagtaaagataaggacactaatttcgttcaagcaatcctactatttgaccgtgcaactggctaaccaaggaagtgaaactgagaaaacatgagaacattgaagttctatagagcggaagatatttgaagttcttctcttcttctttt

SEQ ID NO: 269689 - DNA, 352 bp, Glycine max
gggatccttaagtcacctgctgcatgcaacttgactttatcatttccatgctctatatttgaaaaatggaaccttagacctaagagccattctagttgttggatcgatagcgacgacgaccgacccaacttgctaaaaccaggtgttaatcttggacataaaaccctcgttcaatatttaacttaattcggacaaagtttggttaagaaaactttagaacaatattaattttggctacagccatggcttgcatgagagctttatacattaaaccagcttttacgtaacaataaatataattgatctcacatttccttttcgttacgctacgcttgttgcaaaaatattaaat

SEQ ID NO: 269690 - DNA, 413 bp, Glycine max
  unsure (1)..(413): unsure at all n locations
ctgactaattcagaatagacaggttatttcagatacatgaatgtaataagattgaagttttcaaatgcttgtaagcattcaaaattctcatttcagaagaactccatatctatgaattttgggtctataatgaaacgagacgaaaagaggtttgtgtactgtatacgttgttcctctgatgagaataatgatccagaatgaatggagggaggaattggggcttcctgtgacccggaatgccgctgactccgactcgaagttccttttcgctttttagatggttccgccatttgaagagttgtttcagtattgtaatcggttcaaatgaaagagattgaanaaagatgaagtttgggctttgcggggactgatttggacaagaattgagtgagatatggctggaagaaaaattg

SEQ ID NO: 269691 - DNA, 417 bp, Glycine max
  unsure (1)..(417): unsure at all n locations
agcttaataatgtatgatatacagatttaagattatgacgaagatctacgtcccacataaagtttgcggaaaagccataagcctgcaaacaaggactcaaagagctagcttgtttagccaagagatcacgattgaatctccgtaacacatgttctcagctaatattcctttcaaatctatgaattcttttaaataaccttgaccaaaccgcacaagaaaacatgcgattagcaactctaacagccaaaaaccgactntattgcgtcaaagatgtgtcatcttcctttgggatgctaaaacaatggaagctaaatttgcccgtgttgatctttgacgccgacactgattaaatttggcctcaccgacactttaaactatcccaacacacataatcgacactaacattgaatttcctac

SEQ ID NO: 269692 - DNA, 402 bp, Glycine max
  unsure (1)..(402): unsure at all n locations
tggacctgngtgttgtccagattcatcatatcttctgtaatactcatcacctctatcatatctaataattttcacatttatgtctaattgcccttttatttcattgtagtaaatttctaaggcatacattgcctaagaaatctcgggcagtaagtagacataaccgtaatgtgaataatcatcaataatggtgataaaatatcattcctttccgaaagaactaacatcaaaaggtccacaaatatcagtatgcacaatttcaagaagctgagtgcttcttgtagctcttttctttgtatgttatgcttgttttcccttaatacaacccacacaaatatttagatccataagatccacataaggaagagtttcattctttattaatctttccatcctttctct

SEQ ID NO: 269693 - DNA, 317 bp, Glycine max
  unsure (1)..(317): unsure at all n locations
agcttgtgcctcttcacgtgtganatatgaatgtagcatatagatctaaagacccttatgtgctttgctgatggcttcttgccgttccaagctgtaattggagtcttgttttttacagcttagctggacatttgttgagtatgtaaacagcagtgtagactgcttcacctcaaaatgtgctagggccgcccctcctccttgagcatcgatctcaccatctccataactatgcgattctttctctcggatactccattttgttgaagagaatatgcgactgtaagttgccgctcaatgcctttcatcctcataaaatc

SEQ ID NO: 269694 - DNA, 91 bp, Glycine max
  unsure (1)..(91): unsure at all n locations
cgctgataggaacaacatctctttatgtagctcatanttgagatatataaggttctctgacaagaatgaagaggagagacattattgggcc

SEQ ID NO: 269695 - DNA, 217 bp, Glycine max
aagttatgaccatttgaatttcctcagagctacctttgttcaatttcgagcgttttgatatattatgcgcctgaaacggacctccgagtgaaaagctactaacatttgaatttctcgagagcttcccatggtcaattttgagcgtgtcgatatactatgcgcctgaatctcacctccgcgtgaaaaggtatgaccattttaatttcttaagagcttc

SEQ ID NO: 269696 - DNA, 390 bp, Glycine max
  unsure (1)..(390): unsure at all n locations
tctatataatgttcgttcctaatttctctacaattgcatcacctctcaatgagctggtgaagaagaatgtggcatttacctgnggtgaaaaacaagagcaagcctttgctttgctcatagaaaagcttactaaggcacctgttctagctcttcctgacttttctaaaacttttgagctagaatgtgatgcctcttgagtgggagttggagctgtattgttacaaggtgggcaccctattgcttantttagtgaaaaacttcatagtgccaccctcaactaccccacctatgataaagagctntatgccttaataagagccctccaaacttgggaacattaccttngttccaaggaaattgtcattcatagtgatcatcaatcacttaagt

SEQ ID NO: 269697 - DNA, 344 bp, Glycine max
  unsure (1)..(344): unsure at all n locations
agcttattagattgcaaacaaaanaattgaatatttattacgaatcactttcatattttaaccaaattaaaattataatacacaatgaagattgcagaaatatatgaggtacaactaagtatatagaactaacttgtgtgaggttgtcttaaagttccactgtctctggcgctcaccttacgtcatgtctggaggtgtgatggcacatggcccacgactaaaaggaacttaacataaaaattaaaaaaattatatggatgcaaaatattttttatattattttgctatttcataactaaattgaagatattatgttattttattgttaagctacaagacatttg

SEQ ID NO: 269698 - DNA, 359 bp, Glycine max
  unsure (1)..(359): unsure at all n locations
tatctgatttcgacttacactttgtgataactaccctccaattttgaccggtggtggacctaattgatcaccaactcttgtcgtggaagctaatgcaacttacatacaaaagtaattttagggaccgtcacctacatgatgacatggattattagggagatagttgtgttntgttaatcaactcctccatagctggatccatcattctctgtgttgaattgaggatgtcaatcataaatttaattatatgtatgaacaaatttacttttcattatgtgaatgacgtgtattgagctactattcccatatatatatgtattcacttcagtaatggtgcgttgataggtgaatgtatatct

SEQ ID NO: 269699 - DNA, 331 bp, Glycine max
  unsure (1)..(331): unsure at all n locations
agcttgcatgtcgcgttaaacctaanaacatctttgttttgtaatatctcaaattgggctaagcgtgcaggcacaggctaagcgagtcatgcattcccggtaagcctgtggtgctcgctaagcggattctgcacgaaatttcctcctgcaaaactctctaagccctatgtggcatgctaagcccaataatatctctgaagttgcaatttcatttttgggcttagcgcacaagtttgggcttagtgcgcaaaaaaaaaaatcaaaatttcttgtacttctattttggtatgtcntctacgcagcaagcttagtgcgcacttacacgctaagc

SEQ ID NO: 269700 - DNA, 427 bp, Glycine max
  unsure (1)..(427): unsure at all n locations
ggtacgatctgngacctaaccatgacagaggtctccacggtggccattgcctccctctcccaatattatgaccagactttgaggtgcttcacctttggggacttccagttaacacccacagtggaagattttgaagagatcctgtgatgcccttttggaagaaggaaaccatatttcttctcgggattctatccctccttagctagaatttctaaaatagtcaaaatctcgacacaggaattggaccgcgggaagcaagtcgaaaatgcggtggttggggtaccaaggaaatgtttggaagcaaaggcgagagtcttggcaagtcaagacgaatgggccccgttcatggacatcctagcacttttgatcttccgagtggtcctctttccaaatgtggatgggttggtggaccgggcagcgattgata

SEQ ID NO: 269701 - DNA, 372 bp, Glycine max
agctctgatgcaacatatggagaggttaatgaatttacaagatgatgcgctccatgagaggttggatcaaatggagaatagagatcataatgaagaagaaaggaggagaagagggaatgatcgtgttcctagacaaaaccgaattgatggtattaaactcaacattcctccatttaaaggaaagaatgatcccgacgcctacttggagtgggagatgaaaatagagcatgttttctcatgccacaactatgaggaggaccacaaggtgaagcttgcccgcacggagttttccactatgctcttgtgtggcggaacaagctacaaaaggagagagccagaaatgaagagcccatggttgatacatggaccgag

SEQ ID NO: 269702 - DNA, 352 bp, Glycine max
  unsure (1)..(352): unsure at all n locations
gcttctcgatatattatgcacatgaatcagacttctgtttgaaaagttatgaccatttgaatttttggagagcttccgttgtgcaatttcgagcgtcttgatatattatgcccctgaattggacttccgtgtgataagttatgaccatttgaatttctagaaagcttccgttgttaatttcgagcgtctcgatatattatgcgcttgaatcggacttncgtgtcataaggtatgaccatttgaatttctccagagctttcgccggtgaatttctggcttctcgatatattatgcacctgaatcagattttcgttttgaaaggtatgaccattttaatttctcgagagcattc

SEQ ID NO: 269703 - DNA, 405 bp, Glycine max
  unsure (1)..(405): unsure at all n locations
agctntctagcttttcattggtgtattntgatctcctttcggtgctctaaattgtgggagtgtgctcaaatatatggggcaattttgatctgttttcttgcttgactacgctgaattacgggctggtatgagatggccctatgcctataatgcattttgaaacaataggacatgccacattgtgcccgttctcttgctattgatgcctaaacgcccgcccaccaagtgttccgtgaaatgcctcaatggcattaacgtgtgacttttgtaaggagacaacccatggggtattttggtttgtgcatattctctatttttttggaatatgtattcattcccgaaaaaggctagagtaattgccccacatatatcctagtcctagaaactgaaatttatgccaaaaga

SEQ ID NO: 269704 - DNA, 358 bp, Glycine max
  unsure (1)..(358): unsure at all n locations
ctcagttttccttatcaagtaaatggatcatttttaaggtccaacgccttaaaatgatcacctttcaagtaaaaagaatcgcttgattcacgcttaagaaagaactacgtaggtttgatttcctcatcgatggagggtacgtaggagcaaaagccccgcttttgtcgacctcaaaaaataaaaagaaataaaagttaaggtaatacaatttccacaattctaaaaaataggttgttgtcctttgagacaaacgtgagaggtgctaataccttcctcaaacgtaaatacaactcccgaacttagaattttcattttgatcggntcccttcggtttttctgatgttttccacaaataaac

SEQ ID NO: 269705 - DNA, 271 bp, Glycine max
tgccgcatgcaagctgctacttcctcgctttttctttgcactctcttctaccttaaagacaactgtggttgcagaacttgtactaatggatgaactcacctttgtgatctgggacttgtttctttgtgaattggaaccaattctgctgaagtactccatttcttgcattatgagtgatgcaactgcgcctctggttcctatttctactgggggaaattcagccctatcttttgtgtcatttgagtcaagggtagtggatttatgcatgctc

SEQ ID NO: 269706 - DNA, 448 bp, Glycine max
tatatacagaaatgcttggattgtctacaagctaaatcaaactatacactgccagcaggactactccaacctttacctattcctcaacaagtttgggaagatgtagccatggatttcatcacaggtttaccaaattcctttggattatctgtcataatggtagtcattgatagactcaccaaatatgctcatttcattccattaaaagctgattataacagtaaggtggtagcagaggcatttatgagtcacatagtcaaattacatgggataccaagatctatagtgtctgatcgagatagggtttttaccagtactttttggcaacatttattcaagttacaaggtactacattggccatgtcatcagcttatcatccacagtcagatggacaatctgaggtgctgaataaatgtttggagatgtatcttagatgcttcacgtatg

SEQ ID NO: 269707 - DNA, 409 bp, Glycine max
agcttctgccagtccatcttttaagcacggtactttgtctagtcttccttgacgtacctcccgaacgagcatctgaaagtggaggggaacttgatgggggtgttgccatgggtcttgtccaaaattaaaataagaattacgaaacacaaagtaattgccacaacatgtaagtatcaaattgtaaataaccagaattgtaaaatgtaaaatagttaatattttgagttaaacattatttgggtatataccgcagttaaatagccatattctcccataaaccttcatcatgatcattatgacttgcatgtatatcatcctcctcacttctaacatttatggaacgcatgtgtggcgagaaagtgggcatactcttaacatcaagtgttgaccatacatatggtaacggata

SEQ ID NO: 269708 - DNA, 445 bp, Glycine max
  unsure (1)..(445): unsure at all n locations
tctactcttcttctccttagtctcctcttcagccatcccagttatgtgttagacaagtggcctcagatatcttaagaacgagggggttgaattaagatattcgatactttttcttctaattaaaaatctatcttactttntacttaagttatgaattcccttaatgacaatcttcttaaatattaattcaaatgaagcaacttgaatatgaatatacagcaataataaataaaggagattaagggaagagaaaatgcaaactcagttttatactggttcggccacacccttgtgcctacgtccagtccccaagcaacccgcttgagagttccactaacttgtaaattccttttacaagttctaaacacacaaggacaacccttcctttgtgtttagagattctntacaacaagagactcacagtctcttaatcccttagagaatg

SEQ ID NO: 269709 - DNA, 486 bp, Glycine max
  unsure (1)..(486): unsure at all n locations
cgcnccgcgccttgacccgttgatttgacgcgattctataccaccggactctctgcaggcgacctgcaggcgtgccagctgtggatggtggcatatattacgggatcattctgtggatgctaagaagaaactttcttgagtgtaatctgccgaccctaccactatttttgaggagaactctctagagaatgttctgtgcatgaacgccatgttgaagtgtcttgaacacgacctcggggttaaagatcaattatagcacaaggctaattggcgtgattggtgcgggatcatctctcattcaatactattcgcccaatcatagatgcgaagctatggcattaccttttgtctatcttgggataccgatcggggcagcctcacaatagaaaatatgagaggtcctatcccaaagaaatgttgattcgtgtactcagaggaaacacaaaacactttcttctgtggggccggctaatttaaataatacgg

SEQ ID NO: 269710 - DNA, 373 bp, Glycine max
  unsure (1)..(373): unsure at all n locations
ctgaggtatcgctctgattngagcttgatagctgcttctttgattggaacctgaagagataaccttggagctgtgtattatataagtcataatcataaccatacctcacagactaatcgcagtgattgaaaatgaacatgaaatcaatcacatcattcatatatatatatatatatatatatatatatatatatataaggaggggaattttagagttatctcttatctntatcattatttttttaatatttaatagttgcaataagtagttaatctgaatcattagatatcaagagaatcaatggttaggatgaatagtaactctttgaaaattatttctagagtaacttgatccccaatgagacattaatta

SEQ ID NO: 269711 - DNA, 314 bp, Glycine max
  unsure (1)..(314): unsure at all n locations
agcttcttttgtagacctcgatcggtcatcttttctggccgacaccggctgtnattttttcgatcaatatcggagaataatatttttttggcggagagggctgacgttttcctggctgaataaatgagaacctgccatttttggcctgaacaacacatcggttgagctagcacgagaaaacctagccgacctacattgtgagatgtttatgcaacaccggaacaagaaaacctcctctgccgaaagaaaaatagttatggccccccccgcgttcttttaaaataaaaaattgcgcggtgtgcgctgaacaatat

SEQ ID NO: 269712 - DNA, 364 bp, Glycine max
gcttaacatcataccacttccacggtgctggaactacttcacatttacttgatggggcctatgcatgttgaaagccttggaggaaagaggtatgcctatgttgttgtggatgatttctccagatttacctgtgtcaactttatcagagagaaatcagacacctttgaagtattcaaagagttgagtctaagacttcaaagagaaaaagactgtgtcatcaagagaattaggagtgaccatggcagagagtttgaaaacagcaagtttactgaattctgcacatctgaaggcatcactcatgagttctctgcagccattacaccacaacaaaatggcatagttgaaaggaaaaacaggactttgc

SEQ ID NO: 269713 - DNA, 304 bp, Glycine max
agcttgcctcgaagaggtcctggaaggagaaggtttttcgaaagaactagttgcgctccggagtatgatagtcaccgctttatgagtgctgtacaccacccgcgcttcgaggccatcaagggatggtcgtttctccgggagcgacgcgtccagcttagggacgacgagtatactgatttccaggaggaaatagggcgccggcggcgggcatcactggttactcccatggccaagtttgatccacaaatagtccttgagttttatgccaacgcttggccaacagaggagggcgtgcctgacatga

SEQ ID NO: 269714 - DNA, 215 bp, Glycine max
  unsure (1)..(215): unsure at all n locations
tgcgtagcccaccatctcttcatagtagaacaccggtcacgtgtctactatcattgggataatctctttctctgtttntggaggtgctacttgagttgccaagtctctccatctttgggcgtattctttgaaagattcgtgccccccttttgcacactttgtgtagttgcatcctatccggagccatatcagaattgtactgacactgcctaatg

SEQ ID NO: 269715 - DNA, 395 bp, Glycine max
  unsure (1)..(395): unsure at all n locations
acgccgatgagtttgtccctaggtcgcgcactcctctaatgactataccatcatatctggcactaaaatgctgggagttgcgaagtcatcttctccaataaatatttagcttcatcacgggtcatgtctccacggctccaccactggcagcatctgtcatacttctctccatgttactgagtgcttcctaaaaatattggacaacacattgctcctatatctgatggtgagggcaaccggcatatacctttttaaatctctcccaccatttatatatgctgtgtcgcaanctacccttctgcgggagggcgacgcgtgactctgcgcggatgcatgttncacacaaaggaatacgcgcggagtcccccccacgttatttgagaaacgtcgacacc

SEQ ID NO: 269716 - DNA, 503 bp, Glycine max
  unsure (1)..(503): unsure at all n locations
cgacagtgagccttgaanactgaaccnttttgaaacggcatgattacgtatctattcccgcacttattaacaccagcttttgggaaacttggctattcgtngctcaagaaattttttaagatatgggaagattgcctaaccacccactgatttgtgtgaaaatagatctcttaatatggagtgcaacggccactgagtcctctaatgcacttaaaggacgcattaacccactctccaaatttgactttaccaaacttaaagaacccttttccattgatgtgatgccttgcgaacaaggataagagcctggttaacacaatcgaaacgtcccactgcatatatcacccaagggttagctacttcagttttaagtaaatctgcgtacgagaaggaagtaatggcttttggctcatcaatccaacattggaggccctccctattgggaagacgattcactgtattcactgaccaaacaagcttgaagtacctgctggaacaaccgc

SEQ ID NO: 269717 - DNA, 277 bp, Glycine max
  unsure (1)..(277): unsure at all n locations
agcttgtaatctatgaaatcatggttattgcctctcatatacaattccaaacaggacatgggggagggaggaatgaacatgatgggtcattctaccccacttcngagactcgagttaggtgggcaaggccaaaaacgaaattctgagacagaaagaatgaagatgatcacgacgaatgaacacgactatgattggtttcggaacctgcctatttatactgaaacagaaacaaaattcttgtgattcaccatccaatccattcttttcttttctggga

SEQ ID NO: 269718 - DNA, 431 bp, Glycine max
  unsure (1)..(431): unsure at all n locations
nggaatngcatttgggcacctattntgaatctcctatgttgctcctacatataagaaacaggcccactctcccaattttacaaaatcatattcatacatcattggggcatttcactgagcacttggtgagcgcatgtttggacataaattgcaagaggatggggacaatgtggcatgccccattgcttcagaatacagcatatgcctaaggccttctcattcaaatcctcaattcaagaaaacaagcataaaaacaaaccaaaactgccccacaaatataagcacattctctcaatttggagcaccaaaagatgaagaaaatataccaatgggaagctaaaaacatcaaggattgaatacttacttgtgggagtgaataataacaccaaaaatgaaagcaaaaggcaaccaanagtggcttgatggagcaa

SEQ ID NO: 269719 - DNA, 412 bp, Glycine max
  unsure (1)..(412): unsure at all n locations
agctntatcttgtaaaactcacttccaaatgtttgttctcgcaggggatggccccgaggaaacttgcctcaaagagatccaggaaggataaagcggccgatggaaccagttccgctcccgagtatgacagtcaccgctttaggagcgctgaacaccagcagcgcttcgaggccatcaagggatggtcatttctccgggagcgacgcgtccagcttaggaacgatgagtataccgatttccaggaggagatagttcgccggcggtgggcatcactggttacccccatggccaagttcgatctagacatagtcctcaaattctatgccaatgcttggcctacagaggagggcgtgcgagatatgaggtcctgggtgaggggtcagtgaatcccgttgatgcacatgctatcagc

SEQ ID NO: 269720 - DNA, 422 bp, Glycine max
agcttagcaaaatacaagttaatgatgttttttttttataaaattgggattatatcaccttttgcatattcaacatattatattggatccatcttatgaagtgatgaggatgcaacaaatacaattctagttagtggataaaataaataatgcttcaagcataacctgtgattgcagagtgggtatgaaagcaaaattggattggatacttttaagtctggaaatgctttaaagtagtgaattttgaagagtaaagtgctaacaagagaaaaaaaaatgtgcagtggagaagagaatgttgagatggggatgagttcattagaaaacagataagattacaaatgaatgtattcacgagaaagttggaataccagctatccagttaagaagatagacacacattcatagcttattgttcaaaa

SEQ ID NO: 269721 - DNA, 410 bp, Glycine max
  unsure (1)..(410): unsure at all n locations
atgatatgcaatggatttttttgcatgaaataagtgtttgagaatgatttgaatgggcaattgtatgatttgaatggattagaatgattagataattattttgatcaagcttgtagccattagaagagaatgagcatgtgattagaagtatgactganaatgttagtaagtttgtcagattgattgtgaaggaatgcattaatcgtatcccggtgagagtgtgatccttaaattttgagagaaacgactatcatttagtactgatttttgcgtgaatttctgtagtatggactgaatgtatgaaattgaggatgatgaaggccatgtttgattgtgatagccacttagccaaaaagctgaccatgtgcttcaatgaattatcccttgtacccagtttgggctgaatcaat

SEQ ID NO: 269722 - DNA, 403 bp, Glycine max
  unsure (1)..(403): unsure at all n locations
catgcaagcttgctctaaatttacattgatgtttgtatttattggagggggttgtatgccatttttgttttaagggtagcatttcttggcaaaaactaactctccaaatgtttgccttcgcaggaatggccccgaggaagcttgcctcaaagaggtccaagaaggacaaggcggccgaagggactagttccgctccggagtacgacagtcaccgctttaagagcgctgtacaccagcagcgctctcaggccatcaagggatggtcgtttctccaggagcgacgcgtccagctcacggacgaccagtatactgatttccaggaggaaatacggcgcccgcggcgggcatcactgtttactcccatggncaagttcgatccacaaatacgtcttgagtcttatgc

SEQ ID NO: 269723 - DNA, 397 bp, Glycine max
  unsure (1)..(397): unsure at all n locations
caaagaaatagtgtggctttatggattaccgaggagcattgtcagtgatagggatgcaaaattccttagtcacttttggaggaccttgtggggtaagattggtactaaattgttgttttctactacttttcacccacaaactgatggtcaaactgaggtagtcaataggactttangaacactgcttangactgttttaaagaanaatcttanatcttgggaagcctgtttgcctcatgttgagtttgcttataatcgagctgtccatagcacaactaattgttcaccatttgagatagtatatggatttaatcctttgactcctcttgatttgttgcctatgcctaacattgctatgtttaagcataatgatgcacaggctaaagctgagtatgtg

SEQ ID NO: 269724 - DNA, 253 bp, Glycine max
  unsure (1)..(253): unsure at all n locations
actgaaactgatttctatttctaaaatctttattttataattttgtaaaaaaaaaaataangacacattggcaaaaaacacttgtctgccttggtgtgtgagaaaaaaactgctctatttatctatttcttcctcgctggcctttgccatgaatgccaagattaacagagtaacgagacaaagcccacgaataaacttttgagttagactacgactacgttatgttgctactggctagtaatattcgatctat

SEQ ID NO: 269725 - DNA, 346 bp, Glycine max
cgtaatcattcaatgcattcataatacagccacattctttcatagctgctctaaaaaaatgaaacagtcatcatctgagagtaggtaagatataataggtacacccctacagattttgatgccatgagtatgtcttcacccttctaacttcttaataagagcttaaatcccttcagcataaaggatgaacagaaaaagagaaaggggatatccttttctgagaccccaccatcggatgataagacccaccaagctttcattgacagtaacatagtactagacagattggatgcgaatcaaaatccacttaacccaagttgcactaaatcccattttggtcttgaca

SEQ ID NO: 269726 - DNA, 352 bp, Glycine max
  unsure (1)..(352): unsure at all n locations
tggattttcatggtttgagaagcgaacatgacaatggggtaatattggagcaaactctcatctcacacaagtctataaaattaatctaaacttgctcacactggctttaccatgaaaactcctaccaatcaaaatttgactcctaacacccaatttaccctagaaatggctcttgccttcactttggtcactcaatttcctcctttgcacangccaagcttttccacaagtctaaatgacattctaaactaggattacctcactctaacctcccattaccactaaatccagatttgctnttccaatcctcaaagcatcacaccttttcattcatatcactacattctcactt

SEQ ID NO: 269727 - DNA, 203 bp, Glycine max
tctcggctcctgctgggaacgcctctagctcaacacccgtgcttcctaaggcacccacccagagggaagctccccaagttccaactccgaacgcgactcgaccggccggtaattccaacacgacaaggaacttccctcagagaaccgtgccggaattcaccccgctcccaatgacgtacgaagatcttctaccatccctcatc

SEQ ID NO: 269728 - DNA, 295 bp, Glycine max
  unsure (1)..(295): unsure at all n locations
atgcattttctttctttacccactccttacgtttggttttttagggaaaacactataactaaacgcgccgcaagggatctctatcgcaccagatccaaatctacaacgatgggtgatcaagaggagacacatgaacagatgaaagccgacatgtcggctctgaaagaacaaatggcctccatgatggaggccattgttagtatgaagcancttataaaaaataacgcgcgcccccgcggcgctgtcagttccgctgccgaacaaacccgactccttggcactacgcaccatctcc

SEQ ID NO: 269729 - DNA, 171 bp, Glycine max
  unsure (1)..(171): unsure at all n locations
tccatcaatatatgcatgcaatctacggaggggagcggtgttgtctaacccaaacccttggtgatatacttcactaaaagcgcagcttcgcaaaagcctggacacccctntgtagccaaacctgttcctttcctgtaccanaatagccacgcggtcccgtggagatatgca

SEQ ID NO: 269730 - DNA, 299 bp, Glycine max
  unsure (1)..(299): unsure at all n locations
agctatgatccgcctctatatttttcacaatcctatcctccctccagataatgagtttctggtgaacggtagatggcccancccccactccatgaatccattctcttcctaatagcaagttaaaattagccttggactgactcaccaggaatagagctggccgaactatactgcctacagcaacatctacttgaatggctcccaaagaatagccaggtttaccttcataattccaaagcacaatgttgtgggcctatagaatagtgtcatgtttcccgatcttgtagagcatacatcga

SEQ ID NO: 269731 - DNA, 267 bp, Glycine max
  unsure (1)..(267): unsure at all n locations
gaaatagccatgtgtggatgtgttagacatacccattctgttgtanggtttatgtgatgatgtttgtgatgtttatatgctgaagacgctgatggaaatctgttagagatgaatggtagaattaacccactgttagaacgtgagaatgtgatgttatgagtggaaaaagagtgagactttgagagctggaatgctaagtctgaattctgtggtcaatggaggttagagcgcagtaatactaacttgaaatgtcatttanaacatgtg

SEQ ID NO: 269732 - DNA, 253 bp, Glycine max
agcttgtgacgctaaatggtattgtcaggcactttaatggttttgcgatccgaagaactctgaataatagacactgcaatcggtcctcgaaatgccatcccctctgatgtttgcatccgaattctacatgttctatgccaatctatgaccttgctgacttcgggtctcagctctcgtcggagtgccaaagctcatctcatgaggaacgatgcatatccttatttcttccttctctacctctcgccatattttc

SEQ ID NO: 269733 - DNA, 428 bp, Glycine max
agtgattccaattgaatccctacatcttctatgttccagaaacaattaagctaagatgccaaagagaaaatcgttgcctataaaaatagacaaatcctctatgcattagaagtctcaaagtgaccaatgagcaaagagctcaagtggcaacagcatcagacttcattttgattcctgttacaaactcctgaccctttccgttgcctcaattcctaggtctacacagcctcccttggaacctggaaaaatctattaaactaatattgtatatttttatgacttcagatggaagttttgaatatgctataggattttgttagtgaaaggaggtcttaaaacctgcaaaacataagccagcatccctacaggcaagagcagtcatcatcatgtgtgaaccatccagtgaatgtacgaagtttggaggaaat

SEQ ID NO: 269734 - DNA, 394 bp, Glycine max
  unsure (1)..(394): unsure at all n locations
agcttgtgaagcaactctcttgacatcctttggctttgcatcacacgcttcaagattagtacgtacttgggtgaccttggtagctttttccttacctatttttgcaataagcttagcttgtatagctctttcccatttctgcctttttgattcaagatcttcatacactcgcatcacgtaatcaattatctttcacaaaacaaacttatgcatcatcaaagtgatacctcttggttggacacaacacttggatggaatccttgtggtcttcaagttnttgaccatcaaacccatatgtggaggctttggaagtatcaaaccagataatttgattctaaaacagtctancatcaaactgatctagcttgcatgcaagctacttacctcaaaaaat

SEQ ID NO: 269735 - DNA, 336 bp, Glycine max
  unsure (1)..(336): unsure at all n locations
gaatcgttacacatatactgttatcgattaccagagcagattttcagaanatattctcatttgtcacatctttttatgtggttcttgaatggctatcaaaggcctatatatatgtgacttgagacacgaatttgctaagagtttttcagaacaaaaaggtcttatcctcttataaagcaaaatcgttttatcctcttacaaattccgtggccaaattacttgtgattcaataaggaattatttgagtgctcaaattgttcaatctatctctttcaagagagatttcttcttttcttcttcttcattctgaanagggattaagagaccgagggtctc

SEQ ID NO: 269736 - DNA, 379 bp, Glycine max
atatatatatggtgatgcctactattgatatatagcattgaccatacatgatactagctagagagaatagaaactattgataatagtacactccataggtagtaaaccacaaaaaactttagtggcttgcataactttagttaaatttagcggcttttaatgcttatcctatatatattataatgacataagtatttctaacttgttacctcctaagagattccctttggagcccttactggcttgttaatcttttagctgaaacattgcattttggccatgaggttgatacaaggctgaatattttttataagctaacattgttggaacatcctaatcgagcatttgagatttgagatcatacctcaatctacctatg

SEQ ID NO: 269737 - DNA, 332 bp, Glycine max
catccaagcaaaacatcattcaaacagcacaagctattacagccaagcaaaacagagccaaggcagaaaactctgctcaacacatcaaccaaaatcacagcttttctcacgtaaagaccacaagaacaattccttcgatccaattcgttaaccgttggatcgactccaaaattttactggaagtctatagtgtataacctggcatttagaccggtgggatatactagcaaacatccagaactcattctgcactagactttccacagccaaccacacacaagcatttttctgcacttgtgcaaaattctgctgcacaatttcacagcaaaaat

SEQ ID NO: 269738 - DNA, 395 bp, Glycine max
  unsure (1)..(395): unsure at all n locations
agcttgaggagttgagctgtatttgctgctgttcccaattaaatttatctcaacattctgcggctgatgcactgaagttacttcttccaccttcctcttttgtttcagttctctcccacgcttctgagagtcactattagaagtgcttacattcacatctgatacgccagagagtgattttctcttacgcctaactgcattttcaattttattgttctttctcttcttacttttggcatccagtaaatcattacacacagattntcccagtttttcttcttttgcattaacctgcgaagtagcaagttcaccctcatcatggcagtctgatactctgtatctgcaacagaaccgctcaactaaatcaaaactcttattcccaactggaaacatac

SEQ ID NO: 269739 - DNA, 430 bp, Glycine max
  unsure (1)..(430): unsure at all n locations
tctatgattnntggaataatcaattatcaaatgtgataattgtattatttgaaacacanagaactattaagtttccaaacagaatttaatcgattacaatatgtggtaatcaattatcttgagctacaaatattgtattcttttgaaattagcttggctaatcgactacaaaacttggtaatcgatcaattcgataaaacttaccaatatttcaacagaagtaagttatgttgcttgttctaacactttgtaattgattacttaacgtaggtaatctatcatacaaagttgaacttattgcttcttataaactttgagatcaatccatatatcttctcatgtttgataaccactaagcatgaataaagagaactaagtccaaaacatcaacattcctagtctaaaaatattcaatacaaatgccacatct

SEQ ID NO: 269740 - DNA, 494 bp, Glycine max
  unsure (1)..(494): unsure at all n locations
cgggaacgcgcgcnnccacnatgccgtagccgcgataatttgagtacganccgntctgcactgcaagctcggatacacttcagatcaagctttatnagttttatctcgagcttttatgtatgtgatgggattggctgacaaagtctggctgcgcattataacgaacgcttttttgcatgggcattcacttttcatgtttgagggtttatgcaccattttttacctaccatatttcacagcgcttttatggagcaccgacataatcccaatccttttatatctcataacatatcataaaacataatattttctctctgtctctaccgcttaacatacccctataacttcattcttgctataacgtttaatataacacgctttacgtggatgaatactcgtcttcaccaaactcccttattaaaattactgctcttagctcacaacttcctaccatcaacatcttatttagactttcgctaccacctgtctaattc

SEQ ID NO: 269741 - DNA, 404 bp, Glycine max
ttgcttggtagaatcaattatactgcctaatagatgtttagtccatagaggagatcttgcaatgatttctaaataactcttaaaatggattcagttcttcctttgtttgaagcatgatattcttctttttaagtttgaaaacttctcacttatcttttttcctagtcctagattaaatattttatgtgagaaaggtgttcccaccatctgaagctatatagtagtttacaaaaatataatttattcataaaagagaacaaaaatgaaaattattggagtgaattcttatttaaaatactcaataaattatgaaaaaactcagaagcaactatacattatttatcgtctagcatcatcatatgccactctaaaattattagcatcgagaaaaggaatttcgtgtg

SEQ ID NO: 269742 - DNA, 379 bp, Glycine max
atgcaagcttataggttctaatgtggtcgtgcaaatgtttcgtacctgatcttgtatcaccaccaaggttcttttcacaatatttacatatagctttccatttttcctctattttctttctttcgaagtgggtcccagcaacggaagctaatccttttttatttggacttctttcaacatcttcaacttcttctatattcggagaattttttgcttcttccatcagattgtgcatcattaccaacttgttgtgtttctaatggagcaatactattaacggatggatcaatacgcatacccattttctgtacaacaaacaagtaacaaaatttacaaatatgagtcatgtacaattgtacatgcacaaatctgactatta

SEQ ID NO: 269743 - DNA, 399 bp, Glycine max
ccctctgctgcggctaagctatcttgaaagaagtgcattttcttgcttttgtccgtagaatatgcccccattcttcggcaatacatctgaagatgaccatttggacacgtcgcctctttgtatttatcaaaatctggtactttaaacttgggaggaatgatgatgtcaggtaccagacacagatcccgctaattcgagaacgggtagttgctgaggccttctaccactcttagcctctcttcaagtaaatcaatctttcccttgtctattgcaaagggaacaagttccttaacgggtgatgatggagacaggacgtggcggactatgtttggttggggcaactcatggggggccgaatccttgatgagaagtagagggcctaaatgagcatcttcttca

SEQ ID NO: 269744 - DNA, 311 bp, Glycine max
atgcaagcttgtgaagcatgtatgtctcttaaatattattcttttgcgggacacggtaacttatgctgttgcaattctggtaatagcacatcttataacattaagagaggatttctagtaatctaccttaaagttggtcttagccattattcaatgatctgccggctctgaacagaatgatccacaacttaaagaaactgatctgctgaaaagtcacaagggcttcatttatgcttcacttgatcaaatccgtgaacgaacacaaccatctctacctccttttggtctacaacggaatgacgaggaatgtg

SEQ ID NO: 269745 - DNA, 350 bp, Glycine max
  unsure (1)..(350): unsure at all n locations
tctctgngatttgaattaatagtgtgtgatatagtgtgacaaaatgagggaaaaaaggaaataaaatgttcagaaagattttacagacattgagaattatattggtgggaagcggaaatggctgaatgaaatgaactagctttgcaatgccagagatagtacaattatgggttgagagttatggagggagctgaccatgtaactaaactacccaataggtgtaataacaatctagcctgagagtctagtataacagacttcagtgactaccatatgagtagctatgctaatattccccactcacattcaacggggatggagaaaaagattggtccatgaccctgagtttg

SEQ ID NO: 269746 - DNA, 428 bp, Glycine max
  unsure (1)..(428): unsure at all n locations
agcttgcttgtggagcttctatggaggctggatctttgagcttcaatgaggtcctttaatggtgattttccaccatggagatgcagcggaagacaaaggagaaaaggtaagaggcggcgccatccactagggaataagccatggaagaaggaacttcaccacaaagatgagccttggataagaagcttggagaggatgcttcaatggaggaaaagaaagaaggagagaaagagagagggcggcggggcacgaaattgaaggaagaaaaagggagagaagctgaactttgagttgtgtctcacaagactctcattcatcaaagttacaacaagtgttacacatgcttctatttatagactaggtagcttccttgagaagctntcttaaaaaaacttccttgagaagcttctttgagaaaacttccttga

SEQ ID NO: 269747 - DNA, 365 bp, Glycine max
agctccgctatgtccttttccacccttttatcaattatcactatatactgctatctttcaactttcaagtttcattaactgcgtctttgtctgtcacactctcctcaccttctgcaccataactttctctcaaaaacaactcaattgaacataaacaatgtccactccatattacaatactcctcttctgcatccgcgtctgcatcttcttctccttattattattattgcactcatttccccatcttcctcttctcttcattcaacggacctcaaagctcttctctccatcaagaacaccctcaccgaagtctcacccacgaagtcattcttctccacgtggaacctcaccgcacctgatccct

SEQ ID NO: 269748 - DNA, 438 bp, Glycine max
catgcaacctggaggaacacaacctagagtgacgaacactttacaaattcaatttttgtgtaccacaagctcccaataatcagaacgagagatgaaatacatcacactcttgtcctccaaatgccgaacactatatgttgcctcttttgttgctagtaatgacaactttatgttggggaagactcacgaacacaaaaaaatataaccttttatcctgaaaaaaatcatgctctcacaaaacaaaggcagaatatgcaaaaaaactaaacctcttgtgttgcaaaggaagaacaatactctagcatggtaaaataagcccgaggaacacagaaagattcacgaccacaataaaaatttaatattttctaccacaaaacccatatatcataaggagaaatgaaatacatcaaaaacctattctcctaatgccggacacta

SEQ ID NO: 269749 - DNA, 444 bp, Glycine max
attcgttggactcgagaatgttattggttctaaaaggtataaaattttctatcagtgactattgggatggttcatcagttgatgtcagtgacatgcgaaccttctgtcaacaaatgcccgtcataaatggcatagatcaggatgatgttgtacatgtaactcgaaatgatcatcatgaaggtttatgggagaataatcatacataactgcttatgtttttactggtaatgtatatgacctatttcataattgtaatacatttatgtacttgaattttttcaacttaatgtagatttcatttgtttgtttaactgacatttatgtttatataactgacatgttcaaattgatgttcgcatacatttatgatcataatgacatttatgtttatattactgacatgtcatgctaatcttaatttgttcagttgtgtatactcatgac

SEQ ID NO: 269750 - DNA, 229 bp, Glycine max
gaaccaatatcaccgatgaaatgatgaatatataaagcattttcaagtttgaaacttaaataagaggactcattatcagaatctattttattagagaaaactttgaaaagtgttaactcgaaaaaaaaaattgttttgaataacagagtcataattcatttatacataagcaaaaagatattgattatgcatgacattctttgttaaaatgtctataatagatcattta

SEQ ID NO: 269751 - DNA, 398 bp, Glycine max
  unsure (1)..(398): unsure at all n locations
agcttcttcttgtttctctcttcatttgaaacctttattcttcttgagcacttcattgagaggcgctgccaatgtgctaaaatccttcacaagtcgtctataaaaacttgctaagccatgaaaactcctcacctcggtcacagacttaggtgtccgccattcttgaatagccccaaccttctcctcatccacttgcactccttttgaactcacaacaaaaccaagaaacacaatatggttagtacaaaagatgcatttttcaagattggcatacaattgttcttctctaagcacagcccagacagattctacatgatcaatatgcaaatcaagtgaagtgctatagataagaatactctgaaagtacaccacaacgaantttcctatgaactctctta

SEQ ID NO: 269752 - DNA, 289 bp, Glycine max
cctattatttttatgcgcccattttttaacagtcccacccaagctactaactgctcattccgtgagcattaccgaccttgggggccagttagccgaattaaagaatgggacatgggatgcccatcctttaaaacacctagcaagcatcttacaacctaatcaacaaacagcacatctagataatcctactttacaaccatgcataagcacaatctctggaactgaatccagatgagactactgtgaacaaaataacaacgatcaaaccaaatgtgactaggtgaaatct

SEQ ID NO: 269753 - DNA, 225 bp, Glycine max
aaacgttctctaacttgatctctagtcctttctccaagaaatagacacccttatgtctaacattcaacgctaagctgatatactccattgcacaaattataaagccacttcccaatgatctaatgcatgaaaacaaaaattgctgaaattaacaactgtgttgcctcccacgaagcgcttctttaacgtcattagcttcatgcttctacctcattgggtgatctt

SEQ ID NO: 269754 - DNA, 348 bp, Glycine max
tgcatgtctagagagttctacagttataaaggtccaagatttatagagtatgagaggttatgttgtgagaagatctacagagaccacagcttgaataggagagccgcctgagagctcgagatgagtatgtgagtgattgtgagatcctataggtggaggagacatcctgcccactttgatttacacaacctctcatcttgctcttctgtatgatgcacaggaagcttaccagttatgcagagctaaatccttcgttggatcttccttgtatgtacttgacgtaaatagtcttctctatctatttaatgatgttttgtgtgtcactatgctatcagaactttattctac

SEQ ID NO: 269755 - DNA, 367 bp, Glycine max
  unsure (1)..(367): unsure at all n locations
gacacttaanaattattttttaatagaacatcttgttctagctcattgaatcgaatgatgtatatatatatattacccgcttttaagctgaatgtgaggggtatcatgcgcctaaaataaatacacgaaaccttttagtttacgattgagagtacacctccgtagttggtaggagaggtgatcaagtctttctgaatttatttcaaattttcataatataatattaagtcgcaaagactgcagtacgttttaataagtctttttttttaatttccattttaactgtacagaacataacacggattttacttgagccgtggcactctaagggttatatatgatggtgaaaaccaaaactttggtgaat

SEQ ID NO: 269756 - DNA, 280 bp, Glycine max
agctttttggagtataaacatgggaccaactcattttatttcataaaaaaggctgtatctagtcaaggtctgagagaccatacaagtttcctagcgatttctaattatgtgggccattaagtctatcatatgttgacaatagccgacaagcccatgaatctcttcgggggcggagtatgtgtccgccatcgccttcgccttggctaacaagcggagaagttcttgacttccgttcaaggtaagagcaaaccgatccatccacatggttggctcttggtgt

SEQ ID NO: 269757 - DNA, 298 bp, Glycine max
  unsure (1)..(298): unsure at all n locations
gcctcgattaggtccaggactgtcttatgcagccgaaggaactatttccgctccggagtatgatagtcaccgctttatgagtgctgtacaccagcatcgcttcgaggccatcaagggatggtcgtttctccgggagcgacgcgtccagctcacggacgacgagtatactgatttccangaggaaatagggcgccggcggtgggcatcactggttactcccatggacaagtttgatccagaaatattccttgagttgtatgccaatgcttggccaacagaggagggcgtgcgtgacatg

SEQ ID NO: 269758 - DNA, 182 bp, Glycine max
ccatcttgggatgttcccagcctttgatgacagctttacaggttctgctatccagtgatttgaggaagggcaccattcttgctttccagtattcatagctggttccatcaagaagtggtggtctgcgcactggacctccttctttctccatgttcataagaatttatctccctacatctcac

SEQ ID NO: 269759 - DNA, 108 bp, Glycine max
aaaaatcttttgttctaagcgcccgcgcaaataggatgtgtgggaggggtgaacacaccccttgaatgagagaggtttatacttagaatcacaaatggtggtgaattg

SEQ ID NO: 269760 - DNA, 338 bp, Glycine max
agcttgagatgatgaagtgttgaacggtgaaacttcctgctcttattgtcgaccacagagtggtacctggagatatgtcgcgggggtcacgagaccttggggacgtcaggtggggtgctattgcccaaaaccaagcttgaccaatcccgacccaacccgggcatattccgtcagtgagaacctgtgatgtacctaagcacgcgagctcctggcagtctacagataaaagggaaacaacaccacacagcaaggaggcttgtggtggctggccacctgtgaatcttgtgtaatatgtggattgcggcctctggtaatcgattaccaaaggtgagtaatcg

SEQ ID NO: 269761 - DNA, 144 bp, Glycine max
atcctgactcactataaaccttgacccaaggttataatgtcaattcttaccctcggaagcaaaaaataaggggagagggataaattccaatctaagaggaagcaaaaaaggagagaacgagaatttcctatcaaatgaaagaaa

SEQ ID NO: 269762 - DNA, 415 bp, Glycine max
agcttggagctatagtagtctctacaccacaccttataatgaagttccctaccttaacaggagaaatcataactgtcaaggtagattataagcaagcccaacagtgctacactaaaagcttaaaggtggtttcttatcctcccatcagagagtcaggcaagcaacatcccccctgtggtggcaacaacaatcaagtcatgggtgtggtcgaggaattcccaataaagaccttgaccgtttatgaaacaaccaggggaaatcaagatgacgcattcgacatggaccctcgtgataatactattgactaaggaccaaagcccatcaaagaactcgtcaatctacaattgggacctaaacccaggcaatacacacaggttagcaaagacctcaccaatcatgagtacagacatgtagt

SEQ ID NO: 269763 - DNA, 436 bp, Glycine max
  unsure (1)..(436): unsure at all n locations
ctactntggatggtcatgatcttcagaatggagagatatattataaggagaaagaagaacttacaaataaagaaaaattaatcagtgctgaatctcaaaaggaagtcttggaagggaagattcaatcagctactgataggattaaatccttaatgaatcaactccaggaatcagagaaaattattgacagcttgagattggagatacagtcctataaagaatcaaatggaaaacttgagaatgaaatcaggaatcagcaagtgataatttcaaatcttgaagaacatcatacagaagaagaattaaaggaggcttgtaacaaggttttggctttagaagtggaactggagaaaaagaacagcaattgtaaagaattagaggccaaatgtactgaattgcangtccagcttgaaaggtatgaatcgtccttacatat

SEQ ID NO: 269764 - DNA, 428 bp, Glycine max
  unsure (1)..(428): unsure at all n locations
agcttggaaggatgcttcaatggaggaaaagatttatggagagaaatagagaggggggagcacgaaattgaaggaataaaagagggagagaagtggaactttgaagtatgtctcacaatattctcattcatcagagttacaacaagtgttacacatgcttttatttatagactaggtagcttccttgagaagctttcttgagaaaactctcttgagaaacttctttgagaaagcttccttgagaagctagagcttagctgcacacacccctctaataactaagctcaccttcttgagaagcttncttgagaagattcctaaagaagctagagcttagctacacacancccctataatagctaagctcacccccatgccaaaatacatgataatatataaaaaaaaagtccctaatacaaagactactc

SEQ ID NO: 269765 - DNA, 432 bp, Glycine max
  unsure (1)..(432): unsure at all n locations
catgattggtacatggattgngacttgtatgattcaatttgggcaaaattggatgaaggcaagagtggttttcgaaatctgcaccttatgcagaattttgctgtggaaatgtgcagcagaattttgcataagtgcagaaaaatgcttgtgtatggctggctgtggaaagggtagtgcacatgggttcttgacatttgctagtagatcccaacagtcaaaatgtagacttatgtactagagacttcctgtaaaattttcgggtcgatccaacggttaatgaactggaacgaagagaatgttactggggtaattaaatgtgaaaagctgtgatattggtgtgtgttttaagcagagttttctgcctttgccctgttttcttgactgtgctagtttgtgatgattgaatgttgaattacctgggatgtgtggaag

SEQ ID NO: 269766 - DNA, 429 bp, Glycine max
agcttaagctccttcaactgcacaaggcttttaatatttgaagagtatccttgtggaaccttcacccgacgaagacactgacaaaaacttatcttctcctttttggacaaagtatggcaagctgggggcaagtaaattatcttcccatcacaccttggatgcaactgtgatcgtatgcccatatcacctagatcttgaccggtattctagccatccttcgtcttgccttgaatgttaaggagcgtcccaatgacactgtcacaaacatttttctccacatgcataacatccatacaatgtctaacgtcaagatcagaccagcacggaagatcaaagaaaacggacctcttcttcaatatgcaactctgacttttatccttcttttgggtcttctcaaatacattatctaggtgttgaacccgctgatat

SEQ ID NO: 269767 - DNA, 499 bp, Glycine max
  unsure (1)..(499): unsure at all n locations
ctggccctgcatnacgtgcactattagtctccgcttgaatcttggatcacgagggtagctatggacacacgctctataggtgagggcagacgattacagacttcgagatagttatctttactatacacggatatagaatatctggatacatatagacactcaactttgatcctaactgatcagatgttgccgcaccaatccgtgacgtggacctttacgcaatacgaacgcccattcaggtaacgagcctgatgtgtctatatttcatagatcctgctgcctcatagaatacttaatgacctcacctgacgtacataccaacttgactttacgcctcgtgaatggtccatatacatgccaacccatgacccctcagcatacactttacagcagtaacgttgtgccatgaatcatgcaccacaaatactgtatgctctgatattgatgacattagcctgctcagatagcgacctacctgancactgtgtacagcatgtcn

SEQ ID NO: 269768 - DNA, 313 bp, Glycine max
agctgtgagcaacttcaaacaacaataactttctactcggatgtctgtttgagacccgtaagatatccaaacgctcgaaattgaataccgaagctctgagcaaatctaaacgagaataagtttttactccggaagtcagatgtgaggacccgtaatatatcgagtcgctcaaaatggaataccgaagctgtgtgctaattccaaccacactacctttttactcggatgaatgattcagtctccgaatatatacaaacgctcgaaatcgaatacccaatctctgagcaaatttacacgacaataactttttact

SEQ ID NO: 269769 - DNA, 291 bp, Glycine max
ttctcgacagtattacggaactcattcagacatccgagtattaaagtgattgtcgcttgaatatgctcagagcatcaacattcaatttcgagcgttctgatatattacgatactcagtcggacatcctagtaaaaagctattgacgtcagaacttggtcagagcttccgtattccatttcgagcgactcgatatattacaggactcaatcagacctgcgagtgaaacgttattgtcgtttgaatctgctcatggctttcatgatgcatttcgagcgactcgatatattact

SEQ ID NO: 269770 - DNA, 441 bp, Glycine max
agcttctgataaaaaccgagcagttctaataagatttgtcatacgaatacccttacgctttgcagatatataaggcgacattttacgattccattttctagtaccgcggccaaaatgaactcctgcttccatcatctcttccaagattatgtccccatatcttcttgtcatttatatttatccccacacttttctttcatttcaaaatcgaaattctataaatcttttgaaatgaacaaaacagacccggtatactgaaatagaaataagtgttccaaaggaaccttctcttctaccgaagattggccttcgataaacgatcgggccatcttttctatttcatacttaatatgaccattctctttattatctttcttttattacacaacatcaaatgaccgaagatgaatccgctcttaagaatcattattttacgaatta

SEQ ID NO: 269771 - DNA, 511 bp, Glycine max
  unsure (1)..(511): unsure at all n locations
atttacactgacccatgcatntacttgacccctgacatatacgccctccatatggtatgcctctacgaatntcaggtactttcaattttatgattgtatttcatgctgagcataatattcttatgcatccatttcacatgttaggtgtagctggtgtattcggcggctccctattcagtgctatgcatggttccttggtaacttctagtttgatcagggaaaccacagaaaatgaatctgctaatgaaggttacagatttggtcaagaggaagaaacctataatattgtagctgctcatggttattttggccgattgatcttccaatatgcaagtttcaacaattctcgttctttacatttcttcttagctgcttggcctgtagtaggtatttggtttaccgctttaggtatcagcactatggctttcaacttaaatggtttcaatttcaaccaatccgtagttgatagtcaaggtcgtgtaattaatacctgngctgatattataaccag

SEQ ID NO: 269772 - DNA, 224 bp, Glycine max
ggatcttaagcgactgagctgagctgtatcataccttatatgaatttttaccagagagttggtcagaatacattgtcaacagtcacatctttctgcgcggctcttgaatggctatcatacgcctatatatatgtgacttgagacaccgaatttgaaacgagtatttcataacacaagggtcttattctcttatcaagcaaaatagttttatcctgttacaaatt

SEQ ID NO: 269773 - DNA, 406 bp, Glycine max
  unsure (1)..(406): unsure at all n locations
gatcatcaatgaattatggttggagagtcgacagctggaaacattgaccagatggaataagaatgctggagtgaagctccacaagagcctgcgcatcaatggagtccttttaagtcatttatgattcaaaagatagatgttatgcttcacctccatcaagagaactaactgaagtaatagttcattgaagaatataactacccaactggaaacattgagattaggctgacccttaccaacctccttaatcctaatgatgatgaagcttagttgtgttntaagtgtttggttgtccttttagattacgtttaattntggtttgtgtctctatttacttgntatgtgatggctgattaagtaataatgattaagtaaagttttaatgattagtaatggttatgctatg

SEQ ID NO: 269774 - DNA, 410 bp, Glycine max
  unsure (1)..(410): unsure at all n locations
agctntgaatgcactattcattggagttgacaatatcatcttcagactgatcaacacttgcacagtggccaaagatgcatgggagattctgaaaatcactcatgaaggaaccttccaagtgaagatttccagattgcaactcttggctacaaaattcgaaaatctgaagatgaaggaggaagagtgtattcatgacttccacatgaacattcttgaaattgccaatgcctgcactgccttgggagagaggataacagatgataagctggtgagaaagatcctcagatccttgcctaagagatttgacatgacagtcactgccatagaggaggccccagacatttgcacatgagagtacatgaactcattggttctcttcacacctctgagctacgactctcggatagggc

SEQ ID NO: 269775 - DNA, 373 bp, Glycine max
  unsure (1)..(373): unsure at all n locations
gggacattactctttttcaaaaacggccttaacctgctcgcataaatacaaacatcaatgtgaatttagagcaagcttatgcgcctattttcttacaaacgttctcttgcacaagacatttatccgaaaaaatgcacccatatacaatcaaggcagcttcggtacctatattatttacacgtacctccaaagtgtatttgtgacttacatcacacacatctccttggctaaattcacatacatgcatactcaaagcattttgtggcaccaaagattgcacatgtgcacatnttgtcaggtgtaatacctatacatacgcggacttcatgatgaatcttgactatctacacaataaggtgctacgattcatgct

SEQ ID NO: 269776 - DNA, 397 bp, Glycine max
  unsure (1)..(397): unsure at all n locations
agcttcatgatgatgattctagtatgaatcaagttgttntgatgatgacaaacagtccaaaagaatgatttcaagattgagtcaacaagttcaagatcaagattgatttcacgattccagagaagaaatcaagacgacttccccagggaagtactgaaaaggacttttccaaaaccaaacatagcgcagttttgttttacaaaagagttttctcaaaattttctaagttaccagagtatttactctctggtaatcgattactagtttcctgtcatcgattaccagtgataaagtttcatttcacaagctcttaactgaatttgcaacattccaaatgatctttaaatggtgtaatcgattacaatatattggtcatcgattaccagtgtatctgaac

SEQ ID NO: 269777 - DNA, 376 bp, Glycine max
attccgaggacagttcattatcatgcacaacctgcaagagtttgctcacaataggccaatcatatctacgaagcattttcttgagcaagtagcctggcctgaagctcaacttccattggtgagacccaacgaggctactccgcctgagcccacacctgtgcaggtcaattcagagccagctgacccaaaatctccagtgatgaatgcaccttcttcacctgagcttgaagcagttccctcatctcctcctctgattgtcatttctgatgcatcatcagatgaagcagttgctcctcctgattcaccagctgcagaaacagccgacccccctattttcccaagtggaggaattgctgatctttctgattcatcatct

SEQ ID NO: 269778 - DNA, 415 bp, Glycine max
agcttaagacttcaagatctgaactccttatttctttgagcatttcgtgcaagcttcattcaaggtaaggggggtctttccacttcttgaaccctaaccttgtttttggaagctaggcttcattgcatgttgtattgatgtttaaaattatgtatatgttgccatgactaaaactgtgtaatatgttttttttttcttgaatttttaaggctaaaatgagttttttgggtattaaaacttacggttagccttaagtttcccttatatcaaagttttctagcaaaagttatgaataaaacaagtttaaggactttctgtatgaaattctgatactgcggacagatgtcctaccggatgtcacgacatcacgctctacaacatgcagattgtacttgactgtatgaacacattaaac

SEQ ID NO: 269779 - DNA, 437 bp, Glycine max
agatagactatcagatatagttactgaaaattattttttctgttaccaacagtaattaaaataaaaaggtccctctattaatttatttaattcaattaaattcctcttttaataaaaagttaaatttgatctttatcttgcaaaacttttcaatgcggctctttccgccatattgccaagaatgacgttaacgttgtatatacatgacacaaacaacttagcaccacattgataagtttggttagccatcctaatggcacgacaccgacagaaaggaccacattgaagagttcatgaaaaataagagatgaaattgaacttttcattaaaagtgaaatcaaattgcattaaaaaaagtagaggaaacaaattagtaagttagcccaataaaaactattcttatagatatgaaaacttgaacttgaagggaaaaatta

SEQ ID NO: 269780 - DNA, 427 bp, Glycine max
agcttaagcaagtctagagagttcaaaattctcatatagacaactagcataagctagcccataaatagatagtgcatagttattaaacacttttaagttttacaaaactatttttatgttaccataacattggtgagaagtatctatcgactttgtcaatgactaatttccaccaaagaatctatttggtcaacttaaatagagtctttcttgtcaaccatattttttcacccacaagtcgaacttgaaaccttggttatgacattcgaattcaatatcactcaaaccaacaacttgatgtgaaaatgttgtgaatcatgcaaggtttgatgatgccaaaaagaatttacttgataatggttgttatcataaaaaagggagaatatgaatatatgaatacaagattgtgatgatgcccaagtataat

SEQ ID NO: 269781 - DNA, 320 bp, Glycine max
  unsure (1)..(320): unsure at all n locations
cgaacccatcaaccttcctctcttgcaccatcaccatatccccaacccgtaaccccacctcctccacttttacccgttccaccccagccaccctcttactgttaagcgcctaacccccgaagaaatgtcaattaggaaagaaggattgtgcttcaattgtgatgaanaatttagtaaagggcacaagtgctcaaataagtttttacacactttcgggctatctagctcggaaacccttcgcttggtgggccgaatatcaactcagaaagtgctcatcctcattgacagaggaagcactcataattttgtgcaacaacatt

SEQ ID NO: 269782 - DNA, 410 bp, Glycine max
  unsure (1)..(410): unsure at all n locations
agctttntaaatgggtaaaaggctcacattcactttcttctacatcatattcaaacttgtgcaaataaataataaaggcatctcgactcaaagaaggtcatctaagtctgatacaattaatatcgaacctatattctaatgtcacatcctatcaaagcgtggtgttcccgtgtcctctagcttgaggttcttcatagtcatccacctattcatctgctccccccaacacaaagttcaagatcatcacaggatccaaacacaaacagcaaaccgggagtgagttatcacatttctaactactagagagaaacaacacatcatataggagcggaatacaatttacttagcatatctcacattatttgatcactttgtcattcatcaatcacacttttcatccatccatcaca

SEQ ID NO: 269783 - DNA, 423 bp, Glycine max
  unsure (1)..(423): unsure at all n locations
tcatacgctncaaatgagtcatcaaataaccaaacaatatgctctaattngttactttcatctattgtgtaatcatattggaagacatctgttgcaattgggatagcggcgggacgacataaaatttttatttaaaatggagtcgtcactaacattttaaattgagggaaaacattagaaaacccttaaaaaaatctttgaaactagaaatgagttcgagaatctattacacgtagagaaggtattaacactctacaatgcccatagaaaatgatacgtctaattaattgcgcaacatcatttattttataaatatttactatagcccaaaaaacgtattcttgaatcttattataaaaagctccttntttatactctattaaaacttagcacaaggatttaagctagcaaatggctagtcat

SEQ ID NO: 269784 - DNA, 213 bp, Glycine max
cagcttgtgcctccttacgtctggaatatgaatgtatcatatacatccaaacacccttaagtgctttgctgatggcttcttcccgctccaagctctaattggagtcttgtcttttacagacttagctggacgtctgttgagtatgtaaacagcagtggcgactgcttccgcccacaatgtgttatgtagtcccttttccttgagcatcgatct

SEQ ID NO: 269785 - DNA, 395 bp, Glycine max
  unsure (1)..(395): unsure at all n locations
cgaatccaattcgttcagcatgcttntatgaaagttgctagtgtataattgcgttgtactggtgtcacataaattccaatcttttcaatatatttagtagcactgctctaataaaaaagatagtatactaattagtctataatatgagttaagaaaaatttaatatattagaaaattaaataaacttaagagttaagaatacatctatgtgtataaccacctgcaaagtcggtggagaatttcagcttaattggtattgaggcattgtgtcaagtatcacgttttgatacaacctctaagaaactcgaggttgcactcgaccagcaagatcacattgcatctaagggattcagctataacaaaaatctcttaagagtttaaactatgtgtattat

SEQ ID NO: 269786 - DNA, 393 bp, Glycine max
gcatgcaagcttgctgcctcatgaggaatgccttgcgcttatatagcatgaaaaaacccttctataatatgtatgtatgtaaatatgtagcatgaaatgcctcgcaaaatgttgaataaaaggccttgcaaaatgttgaataaaatgccttgcaaaatgtcgaataaaatgccttgcaaaatatgaatatatatatatagcataaaaatgccttgcataatatgtatatatagcatgaagtgccttacaaagtgtttggaatggtagcgtaaaagttgttctcaaaatatgtgtatttgtgagtaggtagcaaaaaaagccttccaaacaaaatgtgtgtatatatatatgatgtaccctgaaaacgttcgacaaacactatatacatggatg

SEQ ID NO: 269787 - DNA, 431 bp, Glycine max
  unsure (1)..(431): unsure at all n locations
aaaccatgaattgttggcagcctaaccctattacaagcctagaaagtccttcggattcatttttgtgtgttcattactgtatgataggagatgaaatgcaaaggttggaacttgtgttggttgtttatgatggaataagcctaaacacttgagtttgagtgaaacaatgactgtgaggttttggttgatgatccttccttgatntttgtcatgcttgctagcttatttcagctgcgactctaatacttgtgctcttatctttgaaaaactgcatgcttgtgagaagtaatttatttaagcattccatggtattcagttcatatggttgatatccttcatgaatcaaacaccattttcttttgattggccactatctttatcacttgaggacaagttaactgttctttctttgcttgangacaagcaaaact

SEQ ID NO: 269788 - DNA, 395 bp, Glycine max
tgtgctttgcaaatttaagcccctatacacttaagaaaggagctgaaagattatttatcttttgaagctgcccatgggaagagaaattgatctattgttattcactgtatgtgtagccttccttttaacattattagaaaatgcagtttgtctgttagaatgagtttatagctgttttacatttccaatttaagcaacactcgtgttcatccttcttggcacgtctatggaaataatgttgacatccaagccatgtgtgaaatgtataatcgtccaattcacatatacttctacaccacaggtgagcctctgaaattgtgatggctgcgaatctgagattgcttatgcgctatcccataacatcaactatggatgcagaacccatcaatatcttt

SEQ ID NO: 269789 - DNA, 432 bp, Glycine max
  unsure (1)..(432): unsure at all n locations
gaaatgacatttcatctgtgtttttntataccttttttgtctctgttcctgcctctatattgcagtctaagtgacttactagtgagccctattgcaatgctggtaaaatggaggatgcaatcatgcaagcgaattatagcaaagtttgtggtgtacacttggcgaatagacggttcattattaaacatcatatttattattggaaagtaataataaggatgtacatgaccaaaagtgtggaaaataaatgttgatttgaaaatactatatagagaagcatattataaggggtaagagctactgtgggtggaaaccactacaagctacttatctttctcaactttttttccaatccaaccagctactattgtggtaagagctactgtgggtggaaacctaattggagatgcagctttatgtgcagcatatgcc

SEQ ID NO: 269790 - DNA, 427 bp, Glycine max
agctttgatttgacaggctatacacattgattatacacctatgtcgagaatcatgccaattacaagtttgaggagaaaaacgcacgacgagctcaaactgaccttaaggggcaatcagtggatgccttgccaatctacgtatggggcgtgtgagatagcctatatgatacataggtgtattgttacttaggaccttgctcttaacgacttatagctctgctatataaaattgcgccattacgtcggttgcatgttataatggagaaatttgttatttgccaattgtgtgattaggaatgctttacagatttaaaatagatctctacatggctaccgagctacaaggtaaggtatcttatataactactttacaggccatgattgaaggtcaaggaacaagaattatcttaagatattatggatgtgt

SEQ ID NO: 269791 - DNA, 426 bp, Glycine max
  unsure (1)..(426): unsure at all n locations
ggtttctggaccgagaatcatctntgcaaagagccattttggagcaattgggctatctgaggattggtgcctttctgctgctgattacctaaactgtgccctgctccattttccattctgttacctagggcttccaattggaatcaatccgagaagaaaggtggtgtgggagcctataatcagaaaatttgaggctaggctaaataaatggaaccagagaaacatttcgatggctagtagaatcactctaattaatgttgtcctaacagcattgcctttgttctatctgtccttcttcagggcccctatagcagtgattaatagattaactgccatccaaaggcactntctttggggtgtgtaattggaagggaagaaaattgcttgggtagcttggagacaggtgtgtgcctctagagaaatggg

SEQ ID NO: 269792 - DNA, 429 bp, Glycine max
  unsure (1)..(429): unsure at all n locations
agcttccttgcagtgctctgcatataatcatgtgcaaaccattctgtcagtaacctataaaaagtttaataaattgcaacatcacattacctgttcacccaaaaactcgctttcaataaaatctgacaattgcgcatcattgctctttgaggcaacctatcaaacaacatccaacatgttcaaatatatgtatttccactttaaaaacatcaaagtgaacataaatgagacaaatgtcatgcaggtttggatagctactatggttgattctaagacctaaaatcatggtgaaattttgaaaaagtggaagtaaccatttgttgttttagcttccaacgcggttttggaattgattatgacaaaattgaatcaaatccaaacatgctatgaatncaaaactacgaccaaacaatcttgatatcttacact

SEQ ID NO: 269793 - DNA, 401 bp, Glycine max
cctctcacgtggagtggctgaaaattattattattatatacaaaactgtatgggtgatttatgggataaaagtgtaagaagagaaaaataacgactgaaaaggaatagaaaatatataaatgatatatttatttcagattgtatgatgaaaaagagataatatgataacgaaattaatagaagctgtgtataagattatgaaaaaatttaaaacatgaggagatgagaagaaaatgagaaaaaatttgtttaatttgtgccttgaaccctagcttcagtgccatgtgcatgagaagcctgtcccgccagctctaatggcgggattgctagctgaaggtgtcccgcaagcagtactggcggcaccaccctgtaccgcaaacagcattggcggcacccaccct

SEQ ID NO: 269794 - DNA, 396 bp, Glycine max
gcatgcaagctctggcgagaaatatacctttgagcgggtgtttgcaaggttggtttgactaatgttgtgagcatcaaagtgccaggcctcggggaaggactcatccgcttgtgttcccatccaaaccgcaagcatgatttccccattattatgaattttttggcccttcttgtcctccaatatgtaccattgaggagccaaggggctgtctgggggtacccgaagaggaacctcagtgagatcaaacataactctccccacaaaatcatccttgacaatgtccttatccttgacggcgactctaagcaaatttgattgcagcctgtccttggagaaggcgaagatttgattccagacagggttctggctcttgtccaagtgcttggtgaggccctt

SEQ ID NO: 269795 - DNA, 338 bp, Glycine max
tgaaagcctatatctttattcagtgggcgaccgagtgtatagtaaagtaaattggactgaaattttgtatggtgagcgttccgtttacaatctgtaaaggtgaagctcgatttatctattgatattaccaaaaagtaggtgatccttcaatacttccctcaatacactcaaccaaaattgaggtggacacgttttagcgtgtaataacattaacaagtatgaagtatgtgtaccacaaaaatcgagagcggattgaaatagtaaaattttaagtgatgccaatgagttccttacactttataaagttgaagctcgagattaagtaaatagtcatattt

SEQ ID NO: 269796 - DNA, 258 bp, Glycine max
catgaactatccacaaccaagaaaacagggcaactttctgtactcaaataccccagtatcattttctttgctccgattcgttaaccgcgggattaactcaaaaagcttactggaggttcctagtacataaatctacatttggaccgttgggatctgctagaaaatgtcttgaacccaatatgtagcaccctctcctcaaccaggaatacacaacattttctgcacaagcacaattttctgctggccaaaatttgatag

SEQ ID NO: 269797 - DNA, 393 bp, Glycine max
  unsure (1)..(393): unsure at all n locations
gaaaaagtgcattaacaacttttcatccctagaatgcgcccccatcttgcgacaatacatcttgagatggttcttaggacaagtcgtccctttgtacttgtcgaagtcaggtaccttgaattntggggggatgacagcgtccaataccaagcaaagatccgccatgtctgcgaacggatagttgccaaagccttcaacaactcttaatctctcttcgatgagatcgagtttccttctttcttccactaccaggggtggtccttctatggacaagaaatatggttgtgctgggaggttgtcgtgaggcagtatgttgtgtgcccgcccctcgatcaggacccggggggtagaaatcgacattcccttgggcatactctctatgatcctcatgaa

SEQ ID NO: 269798 - DNA, 581 bp, Glycine max
  unsure (1)..(581): unsure at all n locations
cggggcaggcgcccttgancccctttgcattgaccncccttttgtttagtcgangangatcctcctagagatcgacnctcgcagggcatgcatatgctnnnttccnnccaattnttttataataatagggcggatgtatgtgaacgtaccnaaaagggggttcatgccnccggntaaggcactctcctcttcttcttctcgaacatangcatgagggacaacattatgtgtcttgctgacagacaaantctacagaccgagggcactctccaataacgatttcccgtacacggtttcccgtgtagtatattacgccgaagaattctccaccgcttcttcaagaattcatgccgctcgntcttcgggtttctctcactcttcaaccgggtatagtaccatcaaagccgagcatttttcaattcatttctatgtagcccgtgggcggcccacacttttgttttcatgtacttctttattctccgcttccatttacccttttatacccgccttttgacgtgcttaagccatttatctaagccacttctcgcttaatctaaaaataaaatacatttcacgccacc

SEQ ID NO: 269799 - DNA, 397 bp, Glycine max
  unsure (1)..(397): unsure at all n locations
tcaacctcagcagtttaatcaaccacagcagagcaattatgacctttccagcaacagatacaaccctggatggaggaatcaccctaacctcagatggtccagccctcagcaacaacaacagcagcctgctcctttcttccaaaatgttgctggcccaagcagaccatacattcctccaccaatccaacaacaacaacaaccccagaaacagccaatagttgaggcccctccacaaccttcccttgaagaacttgtgaggcaaatgactatgcagaacatgcagtttcagcaagagaccagagcctccattcagagcttaaccaatcagatgggacaattggctactcaatngaatcaacaacagtcccagaattctgacaagctgccttctcaagct

SEQ ID NO: 269800 - DNA, 390 bp, Glycine max
agctttcacttatgtgcgggtactcttcgccattactgtcgcggtaaagaaatggtgacaatatcttctgggtcaccttttcaccattcttacagaccatcgtagtctgaaaaagcttatgacgcaagtgatacaaacgtcggaacaacaaacctatctagtcaggcttatggggtatgactactctattcaataccactcatgcaaattgaatggcgttggaaatgccttatccagggttctttgaattcgttccagcaacctgttagtcctctcagtttcatgcttgacttcccttaaagaattgaaacactaacttttgcataatacgaatcttctccaattgtgacacgagattatggaccaactttgataacactagagtatagt

SEQ ID NO: 269801 - DNA, 405 bp, Glycine max
  unsure (1)..(405): unsure at all n locations
ttctattcagtattgaaacacaaagatgatagaaggagaatagagatatcgtgcaaaattgttaagtttattgcaaatacaagagtttacaatgaaagggttcaaaacaatttcaagctctctgaacccataatacagagcttcttacacaggagacaacaacttaatgtctaaccaaaaacaactactatagaaaaacaganaatagttacgattacaacataacctatgttaatgaaccgccgaactggacgctcttttctacgtgattagacactttaccaaagaaatcctaatggcaaggatcaaaaagcaaacttttcaaatatcacggagcaaaagcagattattttttatcaacgatctaaaacaaaaattggatatatatcacggatcacaaacata

SEQ ID NO: 269802 - DNA, 397 bp, Glycine max
  unsure (1)..(397): unsure at all n locations
agcttctcccctattntgctataaacaggagattatgtgaagaagaaaagggttcaatcccttacgcacttctctctctctcgaatttgctgagaaaaattatttccgtgaagaaaatcccagccgaggcgcttccgtaacgtttccgtaacgcttccgtgagtaattatgcgaagattctcgaccattctgcaagattcatcgttcgctcttcgttttcttcaatcttcaacggataagtacctcacaccaagcttttcaattcattttatgtacccgcggcggtccacatttcatttcatgtatttttattctcgctttcatttactttttatacccccttttgacgtgcttaagccaattatttaagtcatttctcgcttaatctaagaacaaa

SEQ ID NO: 269803 - DNA, 355 bp, Glycine max
  unsure (1)..(355): unsure at all n locations
gaaattgccatgattggatgtgttaaacatacccattctgttntagggttntgtgatgatgtttgtgatgttgtatgctgaaaaactgctcatggaaaactgttagagatgaaatgtagagttaacctacggttggaaagtgagaatgtgatgttatgagtggaaaaagagtgaggctttgagagttggaaggttaagtctgaaattctgtggtaatggaggttaaagtgagttaatactagcttgaaatgtcattatggacttatgagaaagcttggactgtgctagggagaaaaacaaatgaccaaagtgaaccaatagccatttctatggcaaaattgggtgttgaagagtc

SEQ ID NO: 269804 - DNA, 311 bp, Glycine max
agcttctaaactttatacaacaatgttgctctgataccacttgttagacaagtggcctcagatatcttaagaaggggggttgaattaagataatgcacactattctccccattaatactctatttccatttcaatgccagctgcaagttcccttacaaacgaactcttaaataatgatttcaatacaacaacctgaatataaatctcaagcaataatatactcaatagtttaagggaagagaaagtgccactcatattatattggtttggcacacccttgtgcctacgttaatcccaagcaaccccttgag

SEQ ID NO: 269805 - DNA, 314 bp, Glycine max
  unsure (1)..(314): unsure at all n locations
gttggttttctcgtgaatatctacccctnggttgagattctatgcaaactaacttttgtgctccttgtcgtattgattctctgggtgattcctccaacttgagccttgtgtaaagttccttccttggttgaatcctggtgggccctgattaaatcctgttgatccttgattgaatccatacggacctcattggttgtaaccttggaattcgtggcgaattggtatgcccatgtagtttacttccctggaagggtcttcttggatagacattgtctatgctcgtgtgttcctccacatgtatgacatccccctac

SEQ ID NO: 269806 - DNA, 217 bp, Glycine max
agctttggctggatgtggattcccttttagtccttaaagctgttagtgttatcaatgcggctccttacgatttaagaaatgtctggatgaatactttattctattgcggcccaaatggaatttcccgtcttccatatcttctgaaactaatatgtatgcgctgatcatttggctaattatggtgtaaaattactctattatgttggaagataaactt

SEQ ID NO: 269807 - DNA, 246 bp, Glycine max
tctcacaaaactttcatttttcacaatttcaacaagttgttacacatgcttctatttatagactatgtagcttccttgagaaactttcttgagaaaactttcttgagaagctttttgatataactctctttagaagctagaactttgtacacacaccccttaataactaagctcacccccttgtgaagacttcttgagacactttcttgagaaaccttcttgagaagcttccttgagaagattcct

SEQ ID NO: 269808 - DNA, 431 bp, Glycine max
catgcaagcttactcctggatgtgccgtttggtctgaactatgtgaaatttctccccagccatggcgcatctaccaactccaagtcatctacccaatcgttgaactccttgatgtcgtttgtccctaaacccctttggcaaatcccaaatctctcagcaaggtacctgatgctattaaagtcacccaagatgcaccagaaatcccctgatagagaatgctttagctgcctaacctgatctcacaatatcctcttattttgtatttcacaggcggactaaattgtaagtatactgatttgttgtgcctccctcaaccattctcctctcaggaaaataaagccacagccaacaactctcatttgtagtttaaatgttcgttcactccacaagcataaaataccacctgttgtattgacagcgggatgcgtctc

SEQ ID NO: 269809 - DNA, 458 bp, Glycine max
  unsure (1)..(458): unsure at all n locations
cctttaaactcagcttgccatntagttntcgctggtgaaaggatcgaagggggtctgagaagaggcaaatttgattatcctactttgatgaatgggaagcctgtggcaaatggagagaataagaaggagggaagaatccacactgtgattgtcgttcccatatgaccaaatttcctactagctcaacaatgtcaatactcagccaatatcaacccttctcattacccaccatcctatcagccaagaacacctaatcatccacaaaggccacccttaaatctgtcacaaaacctgcctgctgcatatctgataccaaacaccacccttaacatgaaccaaaacaccaaccagggaaggaattntccagcaaagaagcctatagaattcagcccaattttggtgtcgtatgctaattngctcccatatcttcttaataatgcaatggtagccataatcct

SEQ ID NO: 269810 - DNA, 415 bp, Glycine max
catgcaagcttctgttttcaatttcgagcgtctcgatattttacggcgctctatccgacatccgagtgaaaagttattgtcgtttgattcttctaagagcttcccttttcaattacgagcgtctcgatatattacgggacacaatcggacacccgagttaaaagttattgtcgtttgaatttgctcacagcttctattttcaattaccagcgtctcgatatattacgggactcaatcggacatccgagtaaaaagctattgtcctttgaatttcctcagaccttctgttttcaattacgagcgtcctgatatattacgggactcaatcggacactcgagtcataagttattgtcccttgaatctgctcacagcttctattttcaattacgagcgtctcgatatattaccggactc

SEQ ID NO: 269811 - DNA, 433 bp, Glycine max
catgctagctagaaagactgagagccagaaaactaaccatcagccaaccatacataagttggtagtgctaacaacttacataaaacttcaaactacgaatctagaaaaaatctacaaaataactgaagcaaaattcaagtcaaattttttttaccggtcacatatttaaaacagaatagtaaaaaaaactggcttgcattttactccctgttgtcattttccagatgaagacttcaataatcaataatgagtccaatccatgaccacattatatattgcaggaagctttggagcttctttatgttaaacaatgtcggacttagtatttcttgagttgcatcacttgcacgtacaaggacactggtgcagtggcaatttttttttcttacgtcatgatctcaggagtagtcttcaatgcagggtaactcacctt

SEQ ID NO: 269812 - DNA, 418 bp, Glycine max
gcttcatgcacatgaagtcaagtttcttgcttctaaaagggattgttagtttggaagcggtgttctcttctaccaccgtctcatcaagggtttgatcttttcagacgctgttgggttcaaaggttgccgagaaattgaagggccttatgttgagtatcttgcagaacagtttgggaagcctgttttgctttcaggacctttcatacctgagccacccaacactgtttttgagggaaaatggggttcatggcttgaaaggttcaagcttggttctgtggttttctgtgtacttgggactgaatggaagttaccacatgatcaattccaaggactattgttgggtcttgaacttacagggcttccttttttggctgttctaaaagttccaattgggtttgagacaattgaagctgctcta

SEQ ID NO: 269813 - DNA, 433 bp, Glycine max
  unsure (1)..(433): unsure at all n locations
agctgtgtgcaaggaanatcgcgaagggaacactgttttacacgatgttgtgttttgtaagaagaagaanatggctgatgttgtgttcgagattgaagatgagttgttattgcaacaacaatcatcatcactagaggaaaagagaacatcgctagatatgagaaaccaccgaggtgacaaccctttgttcatggctgcaatgcatggaaagctgaagatgctcaagcatatggccaaccgtacaggcacacgaaatatggaagattttcgaaaacatttgcatcgatctgacaaatattctgctcttcatgccagtgtcatggagcaacattttggtatgtctttcattttactttctgggtgtatataactattaaataaataaataaataaatacttccctccgatttcaaataagtctaatatttaaaaa

SEQ ID NO: 269814 - DNA, 441 bp, Glycine max
  unsure (1)..(441): unsure at all n locations
cttgctatcccatggaagctcctaatatctcccacactntntgtggtgggccattcttggattgccttgattttatcagggtccacttggaccccatttctaccaactacaaaacctaagaagactatattatctacacaaaaggtacacttctctatatttgcatagagggtttttttcctaaggactgaaagaacttgcctgatatgtcctaagtgatcatctaggctcctattgtacactaaaatatcatcaaaataaacaactacaaatcgacctatgaaatcccttaagacatgatgcataagcctcataaaggtgcttggagcattagtgagcccaaaaggcatcactagccattcatacaaaccaaacttggtcttgaaagcggttttccactcatcaccctatttcatcctgaattggtgataaccactttta

SEQ ID NO: 269815 - DNA, 212 bp, Glycine max
cgtaatatatcgagacgctcaaaattgaatgttgaagctctgagcccatatacacgacaatgaccttttactcggatgtctgattgagtcccgtaacatatcgagacactcgaaattgaatgttgaacctctgagcatattcaaacgacaataactttttactcagatgtctgattgagtcccgtaacttatctacacacttgaaattgaat

SEQ ID NO: 269816 - DNA, 232 bp, Glycine max
tcttcacttcaatttgagcgtctcgatatattacgggactcatttatacatcagagaaaaaagttattgtcgtttgtattggctcagagcttcaacattcaatttcgagcgtctcgatatgttaccggactcaatcagacatccgagaaaaaagatattgtcgtttgaattagctcagaagttcaacattcgatttcgagcgtctcgatatgttacaggactcaatcataca

SEQ ID NO: 269817 - DNA, 409 bp, Glycine max
  unsure (1)..(409): unsure at all n locations
agctctggctaaaaggaaaatgataaactcttcttacgcctaaggttagtcaacgtaaacaagagctgagcatatggatttatgatctataaattgtaaggagattgtttgcccttgcaactattatgcatgagtatccactatcaattgtggataatcttgcttttaggagatttgtagcagctctccaactggccttccaagtcctttctagaaacacgatgaagaaagagattttcaaaaatctataacgaagagagagtactagctttgaagttattagatagtcttaatggaagagtggtcattgcatcaaacatgtggacttcaagcaatcaatagaggggtacatggctgtcactatacactatattgancggctcttaaacttgcaaagtcacattttgag

SEQ ID NO: 269818 - DNA, 416 bp, Glycine max
tctaactaactaacttactctgaaaatacactatgtagactaatatatattctaactcatcagaagtaatggatgggtcctaattaagcccaactaatctctctaattaagccaattacacaataaggcctaaaattcgcagtccataatccaagtgcagatgctctgacatccaagctcaaaatgaccctcataccgacataattggcccaagctcatttcagaaaaaattgtagctcttagctttgtagggacaactcatatgcttcatttggatgtttgcagtgtcctatatgtcttgcataaggcagataggtcaagtaagcacaaaatccaaaaataagcaacacttatcaattaagcccaattatttgcctaagaccaaaattgaattaagctgagaaaataagagtcaa

SEQ ID NO: 269819 - DNA, 389 bp, Glycine max
  unsure (1)..(389): unsure at all n locations
agcttctagattcatcctaactatacctaacagaatctaaacaactaacaaaaaggtatcctagccttctaaccccctgatcatgctcgcggcttctctcgacatgcctcacgcattccattctgcatggcttctgtcgtagccttctagatacgttggggtggacctttccctttgtggtctagcactccttgcttcctgcacctcccttgctattgacaccccttccttcatcttctccgtaacaacatgtctcanatgggtagcggaatctggaagcagacaacattgcaacaacattaattacttttagttntgtcatcaccgagttacacactgtctttcgctctgtactttcattctctctctttttttttcttttctgattc

SEQ ID NO: 269820 - DNA, 450 bp, Glycine max
  unsure (1)..(450): unsure at all n locations
ctagaacgtgatgaacttcagtcattattctaatagcaccattatgcattatatatagntaaattattctattaattcttcctctactttattaattctatttccaacttattttttatggaaatttaatgtaaaatatattctattttttctgttatatcactcaatatttcttaattattaaaaaaagaacgagttatatttgattattattctattaaattcaaacaattntattttcaaaattttcctctatttttagaagttgtattcttaatcaattatttcattcttcttttaacattctttaataactattataatattatttaataacgtactatgaaaaataatcaatcaatttatttcatttctttttagtattttttaattaacaatatatctttgtaggtaatatatgtatgctatatcagtttttcagagcaatga

SEQ ID NO: 269821 - DNA, 381 bp, Glycine max
  unsure (1)..(381): unsure at all n locations
agcttgtgctttcacgaaaaggttcatcaagtctttttgaagtatggaagtaaccgtctcgcgaaaaattgnggcaaaagatggatcgcgctacatcgctccttcgtctactgccaaacacatttagggctgtcgatgtccctgttacttccagcttgaccttgacaaagatgtcatggaccaagttgaaaatctaaattgattcaaccccatgtcctgtgtaaaaattcacaatacttcaactatgcatcattcncatacatccatgcttttcattggacgcattgctcattacattctttccttgaaaaaaaaggagaacttaatcattgttataaaaaaaaagaacccgctttactgtgcctttaccaaacctgtgct

SEQ ID NO: 269822 - DNA, 277 bp, Glycine max
  unsure (1)..(277): unsure at all n locations
tctagtatttataggccttcttcttcaagtgctctttggctctaaatgaatataattcttctcttgagctaacgtctaatgcttatggtcgctggagcatttaatgcttacattaaatgcctgtatgttttcatgttgaaacaccattctgggtggcttttgcgttgagcactatagtacaaaccacttcctttgactaaaggaaaatatcacacgatagggcacttgaatgtgatcntatattatttcttctttaaatccttttcacaatctaacc

SEQ ID NO: 269823 - DNA, 399 bp, Glycine max
cacagtctatagatttgggagccaatccaatccttgtggtcggactctcagccacttatgataaccgccgatgatcccattagtgcttcccctaagctctctgtcctttcttcacgccgcatcccatgccttgcgaactccttggagtaccctcgcgttgtggtcactaaaaccccgtgcgatgaaaggcgtgatgctttcgtctaatggcgctcctctcatggggtagccaagctgtcttatggcgagaacgggattataattaatacaaccccttgttcccatcaagggaacatttggacatacttcgcatgaagatagaatcttgattcttccttccttctagcgagggaaccaattaacagacgcccccccatgctagccaagagttggtcccaa

SEQ ID NO: 269824 - DNA, 241 bp, Glycine max
tcccagatccgatcatggaatgtcttggcaaatgccttcattatgcagtaccagtacaatatggacatggctcccgatcggaaccagcttcagggtatgactaaacgagagcatgagtccattaaggaatatgccgagagatggagagatctcgcagcccaagtcgtatcgcccatgacggagagggagatgatcacaattatggtagatacgttacccacgttctactatgaaaagctga

SEQ ID NO: 269825 - DNA, 298 bp, Glycine max
  unsure (1)..(298): unsure at all n locations
agcttngatttgtgtcgatcatgaactttaagtggtcttattcaattcttgcgcccaaatcaatctttgttaccagattctagttcgttgcttaccttcttttcacttattaaattctcattaccgccaccacatgttggccattgtagatactattgtcaatcaaatgccaaatgttaatcttttatcttaaattcttaacaaagcatgttccttttatcaatccgtttgttgcgtacatacactacattaaactacatgtttcatgaagtgaagcgtttatgataaaaaaaacctc

SEQ ID NO: 269826 - DNA, 133 bp, Glycine max
atcttatgagctaagactgtatatcactatgattgagggttggttatagagcttaaatgttacaggtgtgaaattaggaggtatagggttaagaaggattgcattacagctaatttagcgagcagactactgc

SEQ ID NO: 269827 - DNA, 306 bp, Glycine max
  unsure (1)..(306): unsure at all n locations
agctagngaatgtgttcgggtttggtgttcatgtattttttctttcctacacctgatctagcgagagtatatantcttatccatatgctaatctgattttctatgatcaattgcagtgttagtgtgtttggcgtctcaacataactaatgcagtgttcctatgattcacaaggaaacagcgcccccactattctactgctaatgcgagaatgattatactcacacgatggcctacacgtacgtaccaataatattatatactctgtcatttgagccattgactatgattgcgtcactgactatcat

SEQ ID NO: 269828 - DNA, 230 bp, Glycine max
  unsure (1)..(230): unsure at all n locations
ctcttcactcaacatcaaaaatgtaaactccctttacattactattngacacactttttattgacctgaaagtgatattcgataaagtgaaaaggaactatcaaaccatctttagcttattgcgaatgattctggttttccacttatgtttggagcatattatctatcaatgaagaccaacgaagcttatctaccggaaaaggattttcttcgtttggtcaattcgtgat

SEQ ID NO: 269829 - DNA, 302 bp, Glycine max
  unsure (1)..(302): unsure at all n locations
agctnttgcatgtttagagatctctanagatagattggttcaagttctttagagtcttgagagattttcctatgagaagactgacagagaactgagctaaaatatgatgccatcttgagagcatgagatgagtctgtgagtgaatgtgatgttctaaaggtggaggagacatccccactactagtatttcttcaattcttcatctttctgttcacttcggtgtaaaagaagcttccgaaatatggagagtctaaatctttggcggctcttctttgtgggtacttgatggatatatctgtcta

SEQ ID NO: 269830 - DNA, 461 bp, Glycine max
  unsure (1)..(461): unsure at all n locations
tgtgactcttggcaatttctttgaaactagtcacttaataagttttgacttttgtaagaatcttaaaaaacaagtcacttgaagaattgtgactcttggaaatttatttttcgaaatcagtcactggtaattgattacaattaaggtataatcgattacacatcaacagatgtgactcttcattttgaattttgaaaattaaaacatttagaagctctggtaatcaattacaggtattgtgtaattgattacacaacgttaaaatactttaaaactgtttaaacataaattggaactcttgaatattgaaatcttaatgttttaaaacactggtaatcgattaccagagagaaaaactcttttggaatgattctgtgaaaacttcttgtgctactcaatgttttgaaaaactcttttagtacttatatcgatngagtcttctcttgtatcttgaatcttga

SEQ ID NO: 269831 - DNA, 175 bp, Glycine max
taacaacatatcttttaattcgccatgttttaaattgcgtcagaggatctgatatcacccctccgatggagcaacactctatctttaatttctaacatagaagtggctattaggaagcattatatgaaagaagcaaagctgtgcatgattggataaatgatgttgaaatctaaga

SEQ ID NO: 269832 - DNA, 384 bp, Glycine max
tcaatacgacacatatatagactcttattgcaccgtctttatcacaccaggcagcatcgatctccagccatacggtttggcaagctgccaaaaaccctaaagtatactctatttcacatttaatgggagcggttagctagtgcacaatattaatacacatcatacttatgaaaaaagatctaagtttgatttttataaaatacatcatttaaaagtgatagtactttaagtgtgaataaatctaaaaaaaaaactaggcgacatttgtaacccaaagtaactgaaatttgtaaaaatatttggaaggttatactaaaaagctaacagcactcattacaatgcactaaaaaaatgtatgtttagcggtggtcatcataaaccgcc

SEQ ID NO: 269833 - DNA, 436 bp, Glycine max
agcttcaacattcaacttcgagcgtctcgttatattataggactcaatttgacatccgagtaaatttgttttgtcgtttgaatttgctcagagcttcaacattcaatttcgagcgtctccatatattacgggactcaatcagacatccgagtaaaacgctattgatgtttgaatttgctcaaagcttcaacattcaatttcgagcgtctagatatattacaggactcaatcaaacatccgagtaaaatgttactgtcgtttaaatttgcttagctctccagctttaaatttcgagcgtctcgatatatgacgggactatatcagacatccgagtaaaaagttattgtcatttgaatttgcttagagattcaacattcatcttcgagtgtctcgttatattacgggactcaattatacattcgagtaaaaagttatt

SEQ ID NO: 269834 - DNA, 436 bp, Glycine max
acgacaataactgtttactcggatgtctgattgagtcccgattatatcatgtatctcgaaattgaatgttgaacctatgagccaattcaaacgacaataactatttaatcggatgtctgattgagtcccgtaatatatcgagacgctcgaaattgaatgttgaagctttaggcaaattcaaacgacgataactttctactcggatgtctaattgagtcccgtaatatatcgagacgctcgaaattgaatgttgaacctatgatccaattcaaacgacaataactatttactcggatgtctgattgagtcccataatatatcgagacgctcgaaattgagtgtgatcctctgagccgattcaaacgacagtaatcttttactcggatgtccgattcagtggtgtaatatatcgggacgctcgaaattgaatgttgaa

SEQ ID NO: 269835 - DNA, 441 bp, Glycine max
  unsure (1)..(441): unsure at all n locations
agctntacaagaaagaatgaaagaatatgtttgtgtagatgatttgtatattatttttttaaagcttcttctatttataacattcatctccaagtatttgttctctcacaatggttgcgttcttcactctgttcttcatctaaagtcttaagtccattggagcattaaatttatattcattctttatgcaaagtccatgctgatatgctaatgtgtcttgtacttcaacaacaaagtcactttttttttcatcatagcaggtctgcaacaaaaaagggcacctttgatgaggttcaacgtcttccagattatggactttggatgatatgcgaaatcgttttatgaatgtattgtctganaatacatacgcagagatataaatcataatctaatagcatattagacacaatttttattatttaaatntatttgcatgtaatc

SEQ ID NO: 269836 - DNA, 503 bp, Glycine max
  unsure (1)..(503): unsure at all n locations
catgatacccaatgcatgaggtcactctatagaacactcaagcttagaattatacaataacactntntgcccaaccatgaagtccttcttaattatcatgctatcatggaacttcttggtcttttctttgtagaacttggcattctcatacgcttctaggcggatctcatctaactcactcagttgcaactttctttcctcactagcttgatccctagagaagttgcaggtcttcactgcccagtatgctttgtgctcaatctccactggaagatgacatgcctttccaaagacaacccgataaggagacattcatatgggtgctttgtaggtagtcctatgtgcccaaagagcatcatctagcttggtactccaatctttcctgcttggttgcacaatcttctctaaaattctcttgatctccctgttagaaatttttgcctgtccattggttttggggtggtatagtgcggataccctgtggacaaccccatacttnttan

SEQ ID NO: 269837 - DNA, 438 bp, Glycine max
acaccatcactctttctcatatcaattgtgttcatgccactgttttgcgaaatgaattatatcttttatttccttctacttccttaatctttgctttttgatattttttttttttgttttcggaaggactggaatttgcataatttattagttgtgatctaaattaaattttcatgaaagtgacctataattgtttcccaaattgattctcacaagtacttctacaaacttattttcaacctaacatataattgttctcctactctattgaaaggaaagtaaattgcttttctttcaagttcattgtgttttaaaaaaagaatgaattctattaatgctcaaaggggtatgtataagtgatataattcacaggttagccttttggccccaaggctcacaatcatcaaaaacaaagaatgccttggtcatgtctaaaat

SEQ ID NO: 269838 - DNA, 440 bp, Glycine max
gcttcttatctaaggctcatcttggtggcgaagctccttcttccatggtttattccctattggatggcgcctcctctcgcctcttctcctttgtcttccgctgcatctccatggtggaaaatcactattgaaggacctcattgaagctcaaagatccagcctccatagaagccccacaagcaagcttccatcaagtggtaatcagagcacaagagcttcaagtaggtgctccttaaacctccattaattttatttctttaccttctcttccattgttgattcttcatttttctccatgtatctcctcacatgtcttgttctaaatgttgttaacatgattctttagagtttccaccgattaaacttgctatagaagttagatctgattttctatggcttaaatctcttgttcttgttcttgaaccatgaattgtgttgag

SEQ ID NO: 269839 - DNA, 437 bp, Glycine max
agcttatcgtaaccgattacacatttatttttgagacaatgattgattttttaggagtctctgctttaatccattaccagtagatataatcgattacttctctcttaaaaagtgtttcagaagtgatcaagaacactttaatcaattacatcaaaaatctaatcgattacattgttcttgaaagttttccaatttttgggaagaacactttaatcaatcaaaatggtaataatcaattacttctttgaaataattgattacattgtatatttaattgattacaggcagttattacgagctggtataagctagaataacattattagaaaatatgttttttacatcggttatttatgactttcaacatcggtttttaaatcgatgttgaaagtaccgacgttgatagtattattggtaacatcggttttttaaaaact

SEQ ID NO: 269840 - DNA, 398 bp, Glycine max
  unsure (1)..(398): unsure at all n locations
tgaagcccttagttnntagtttggtttaataattntgaaatgtcaaacatgtttaatagatgtggcaattgtcttgaatgttttagactangcatgtgtgtgatatagtctaagtctttttaatacttagttttgatcaaatgtaaagtgaatgaagtattttatttctctaagtttcctaagtacaagcaatagaacttacttctacttgaaatttggttgtaaccatcgaattaattgattgcctagcttggtaattgagtgcctaagccagattcaaaagaaggaaggatgtatagcttatgataattgactgctctgtttttggaaacaatgagaagttctctatgtgattctacaatctattaccacatgtgacaatcaactacccagaaagc

SEQ ID NO: 269841 - DNA, 366 bp, Glycine max
  unsure (1)..(366): unsure at all n locations
agcttgttgagttaactctaataccagagttcattattagatctaaagaaagttccacaagtcataccaacaagaaggttggaattttttttctgctccttacctcttacgtctgtcttcatgcatatatatcacattttggtcccacatggcagagaaagagctgagtaaaatttttgatacatattatatgctgccgtgctatggaaccatctttatgaaatttatctcattgcattgtttctttcttctctctaataaacattccttttttttttttatctgaagggaaaacagtttggattattttttgttgttatgacgttatgtttaaggtttctataatggngcattcaatttgtcttt

SEQ ID NO: 269842 - DNA, 445 bp, Glycine max
  unsure (1)..(445): unsure at all n locations
tctaccatgatgacgacatcccttcgtacttgttctacgaggtctaaatttactttcaacacttcattgttctcaacctccatgaagttctgtcttcttagtgatattttccccacttctaccaggaccataacattcatcccgtataccaaccaaaagggtgtatcttgggttacagattggggagtgcaccggtatgccataaaacttcaaagagctcctcagcccatcttcccttgacattgtgtagttgtttctttagttccactagaattactttgttagccacttcggcttggtcaattgtttgagggtgttctacggatgtcaccatgtgcttgatgctgagccctgtcataaactagttcaattntcgatccgtgaactataaaccattatcggttacaatgatgtataggatgtngaagtgagtgatgatgttctt

SEQ ID NO: 269843 - DNA, 328 bp, Glycine max
  unsure (1)..(328): unsure at all n locations
agcttcaacattgaatntagagcgtctcgatatattatcctgactcaatcagacatacaagtaaaaagttattatcgtttgaaaatcctcagagcttcggtattcaatttcgagcgtctcgatatattacgggactcaatcagacatccgagtaaaaagttattgtcgtttgaattagctctgaggttcataattcaatttcgagcgtctcaatatattacgggactcaatcagacattcgagcaaaaagttattgtcgtttgaattagctcagagcttcagaattcaatttcgagcgtctcaatatattacaggactcaatcagaca

SEQ ID NO: 269844 - DNA, 402 bp, Glycine max
  unsure (1)..(402): unsure at all n locations
tagagctaattcaaacgacaataactntctactcggatgtctgattgagtcccgttatatatcgaggcgctcgagattgaatggtgaagctctgagcaaattcagacgacaatatctttttacacggatgtctgattgagtcccgtaatatatcgagacgctcgatattgaatgctgaacctctgagctaattcaaacgacaataactctttactcggaagtctgattgagtcccgtaatatatcgagacactcgaaatggaatgttgaagctctgaggatattcaaacgacaataactctttactcggatgtgtgattgagtcctgtcatatatcgagacgctcgaaattgaatgttgaagctctcagcatattcaaacgacaataactttatactcgaat

SEQ ID NO: 269845 - DNA, 425 bp, Glycine max
  unsure (1)..(425): unsure at all n locations
agctngccaaattcttattatttagcagtcccaatataattnttagattgggagaaataataaatcgttactatatcattatgagaaatacaaccaatctgtgttctaaacaaataattaaagaatacctgaatcaaccatacaacattctcactgtacaaatcattattcactatccaactggctagttggtcccactcactttgcttcctaccatatattgatattctatattcagccatctgtgaataaataaggcacagaaataagttaacatctagatggggataagcatatataaacaacagtcaagaaatggtaaattatagtcaacaagtcaaaacacattggccaacataggtcctcatactcatgaacatattattgcactattgngtagtggtaaataaagacgcattgtaatt

SEQ ID NO: 269846 - DNA, 447 bp, Glycine max
  unsure (1)..(447): unsure at all n locations
ntatgcagaataatctgacaattaactctttttttcaaataacattatataattactatctagagcccactgaagattcacttctacatgggatattaattacacgcaaacattttaccttttgaagtcttctttcattttcgcaatactttgacacacttcaaacgttctttccattcatagcacatgcagtgtgtgtcaacgtcaatcttagagtcatattcaaatttagatcctagtatataccatcgccgagtaactctatttaattattttattgttgaaattaatacgtatacagagatattataaaagcaacctaaggattggcacagtgcgtaaatagtaaagtttcatgtatctgcatgtaaaaaatgatatattaagcgagataataagtatttaatttgtttatgtgaaattctctttaatcaacagataattata

SEQ ID NO: 269847 - DNA, 436 bp, Glycine max
  unsure (1)..(436): unsure at all n locations
agcttcaagaaacanaaattagagtttctgagtcatttaagcttattctaaattattgttcaaatgcttgaaattgagaacacaaggtggctatatatagagaaaacaattataactgtttgtaattgattaaaatggcaatgtaatcaattatctcgacagagtaatcgattagattctctttttaatcgattaaagtgttattcccaaaaccttgaaatatttccagaacaatgaaatcaattaaattcttaatttaatcgattaagtgttcttgatcacttctgggaacactttcaagaatgatgtaatcgattattataacctcgtaatcgattaaagcagaaacccaagaaaatagacatggtctcaaaagaaatgtgtaatcaattataggtatgtggtaatcgattaaactagaatgaagatatctctg

SEQ ID NO: 269848 - DNA, 441 bp, Glycine max
  unsure (1)..(441): unsure at all n locations
ctttgaaatcaaactntgccactagtaatcaattacaggaaactgttaatcgattaccagagagtaaaactctggtaacttagaaaattttgagaaaaactattttgaaaaacaaaactgtgcaatgtttgtttttggaaaaatcttttcaatacttcccttgtgaagtcttcttgatttcttctcttgaatcttgaattcatcttctcttgaatcttgaaatcaaacttctcttgattcttgaatcttcttgatttcttctcatgaaacttgaaattaattttgatcttgaacttgttgactcaattttgaaatcattctttaggctttttgtcatcatctttgtcatcatcaaaactacttgaatcaacttgattcatcatcatgaagcttgcttctacattctctcttgaagagaaggatattacaattgaagtccat

SEQ ID NO: 269849 - DNA, 394 bp, Glycine max
  unsure (1)..(394): unsure at all n locations
agctttagtggttntattttgttgtggtgttccattggaggtgtggtccatatattgntgttatgatggtgtttctgctgatattgttttttttttttgtggtggacccttgttgttgtaaaaccagaaacatgaatggtttttttatttttgtggtggtggttcccactttagcttttatttttgttatgttctgaaaagctttgttggtggtgttgttctattaaatttttacgctttgttgacgatcgcgtttttgcaggccaaccgaagaacacacagtaaggttaaagattcaccatggaggaatgtttatttataagccatccactgtgtatgtcaatggagacatcgttgaagaagaatggtngtgggatgtggatactatgtcata

SEQ ID NO: 269850 - DNA, 378 bp, Glycine max
tagttgtaccatgtttagtttacttgagatcagatggcagaggtgtgaatattggtttggcatcaaccatcttagccttttcaagcaaatcataaatatatttagcttgagataacaatagagaaccattactcaaatgttttacttcaatacccagaaaataatccaagtttcctagctgtttaagagcaaaaacaacatgtagtttggtaattaagtttcaaataagaactggagatgaccctgtgatgataatatcatcaatacatatcaacagataaagacacttagaatcagtgttgaacactagaagggatggatcacactttctttgaacaaagccaaaagtcagtagtgttttggttaatctttcatact

SEQ ID NO: 269851 - DNA, 411 bp, Glycine max
agcttatagaggaagcttctatggagaaagagaatgaaagagaggaagggaatgggaattgaaggagattagggagagaagttgaactttgaagtgtgtctcacaagtttcccattcatcaaagttatgacaagtgttacacatgtttctgtttatagcctagcacatgggaagcttccttgagaagcaaggaaggtagcttccttgagaagctagaggggggctactcacacccctctgatagctaagttcaccccatgccaaaatacatgaaaatacaatgggaagcttccttgagaagcaaggaaggtagcttccttgggaatcaaggaagaaagcttctttgagaagttagaggggggctactttcaccgctccatgtagtgttgttggcagagatcatatttcttg

SEQ ID NO: 269852 - DNA, 357 bp, Glycine max
  unsure (1)..(357): unsure at all n locations
tccaagagttgaggcgattgacaacagctccaatgttgattntgtccgaccctaagagaccatttgaagtgtattgcgatgcgagcgggcaaggcttanggtgcatattgatgcangagggaagggtanttgcttatgcttcacgcccattatgtcctcatgaagttaactatccgacccatgacttggaactagcagctgtggtctttgccttaaagatttggaggcactatttatatggcactcgttttgaagttttcagcgatcacaagggcctcaaatacttgttcgatcagaaggaactcaatatgaggcaatgaagatggatggagttcctcaaggattatgactttggtc

SEQ ID NO: 269853 - DNA, 455 bp, Glycine max
  unsure (1)..(455): unsure at all n locations
gcaagcttctaaactntatacaagaatgaagctctggattcatcttgttagacaagtggcctcagatatcttaagaaggggggggttgaattaagatatcccaaattactttccacaattaaaaatttatttcactttcttttcaagttatagattcccttaacaatgaacttcttaaatattaattgaaataaaacaatttgaatatgaatgtaaagcaataataaacaaaggaggttaagggaagagaaagtgcaaactcagatttatattggttcggccacacccttgtgcctacgtccagtccccaagcaatccgcttgagagttctactatcttgtaaattccttttacaagttctaaacacacaaggacaatccttcctttgtgtttagaattcctttacaacaagagacccacagtctcttaatcccttagagaatgagtagaagaag

SEQ ID NO: 269854 - DNA, 446 bp, Glycine max
gaccagttagagccaccaccagcattgccatctctcttcctaacactatgctgatcttaacactatgttgctcctaacaatggtatcaattgaataataactacaattaatgactctaatttgttaggactaaactcagacatatttctttctcaaagttctattccagccatgacccaagagcatttcttttagacttttccaaaagctagtgccaaataattatccaactcgaatagcagttgttggactctaagtttcagttcaagcttaacaatcagtgtcatactattgatcaaaacaaagcaggtataaatatgcaatactagactcaaaatatgcaacaaacactagacctaaatcagtgtcacagaaattggaagacaatactttatccaagcacaaacttcaagccttattccatgtattggggggaagttatggct

SEQ ID NO: 269855 - DNA, 451 bp, Glycine max
agcttccttaagaagattcctaaagaagctagagcttatctacacatactctctctaatagctaagctcacctccttgagatgagaagctagagcttagctacacaccccctataatagctaagctcacccccatgacaaaaaacatgaaaataaaaaaaaagtccttattacaaagacaactcaaaatgccccgaaatacaaggctaaaaccctatactactagaatggccaaaatacaaggcctagacgaaggaaaaacctattctaatatttacaaagataagcgggctcatacttagcccatgggctcaaaatctaccctaaggctcatgagaaccctagggcctttccttggatctctagcctaatctacttggagtcttctaaccaatgcccttgcggggtaggattgcatcacatacgatatgtcattaagtaatgcatttcag

SEQ ID NO: 269856 - DNA, 460 bp, Glycine max
  unsure (1)..(460): unsure at all n locations
ggaatcttctaccccatttctgacagccaatgggtgagtccagtttaagtggttcctaagaagacatgcctcacagtgattaagaatgagaagaatgagcttatccccacaagagtgcagaacagctggcgagtctgcattggttataggaggctgaaccaggtgaccagaaaatatcattttcccctgccattcattgatcaaatgcttgagcgcttggcaagtaagtctcattactattttcttgatggtttttctggttatttacaaattcatattgctcctgaggatcaaganaagaccatattcacctgttcctttagcactttttcctataagaggatgccctttggcctatgcaacgcccctgataccttctagtgatgtatgcttagcattttcagtggatttttagagannnncatataggtgtttatggatgattttactatntatggat

SEQ ID NO: 269857 - DNA, 444 bp, Glycine max
agcttagccttccattacaagcaaaaactcaaaactttaagaaagaaactgtttttggtgaaagatattggaagaagatgatggacgatgtctcccccaacctctaaaccctaagtctctctattttcctgagctaagcacctctgttgctccaaactcgtctctctactgcttcttgttttttttccaccaacttcaatgttttaaaggctcttggacctttcagcttccgaaggctcgcttagcgagcatgtctcgctaagtgagagttagtgaatttttgctaagtgagagtgggcgcgctgagagcgagaagagacaacgtcctcgctgggcgagcacatctctagcttatccttttctagggtttcccaatccgctaagcgagctggatgtcttgctaagcagatgtctctcgctaagcggatctacctcactaagcga

SEQ ID NO: 269858 - DNA, 441 bp, Glycine max
  unsure (1)..(441): unsure at all n locations
ctggaagacctctggagagctntcacatgctgaaaaactatatctgcaccttttgttaacattgctttcgtcaatgatggacgaggtaagacatatttatgcagattcccatacttttgtaactccgatttcttcaaacagttgaccctgactatatatctataaaagaaaatgtagattttctcagagttatgagtcgctgaaaccttgcccaagtggaatattataactccatctcacctgtgtttatgtacatgtgtgtcagcatttgttaaataaatgcatgctacactatgataacggatattgactttctttccctgatagagcataattatgtctgctctatcctgtatattagccatcattgtaacagcgcgttaagcaccttagagcatgaaataggactatgctgaagtgatacatgtgcacatattggat

SEQ ID NO: 269859 - DNA, 447 bp, Glycine max
  unsure (1)..(447): unsure at all n locations
agctntaagccaaacatgtaatcgattaaaacaaagtaataatcgattacaacaaagaaccttaaacaataacacaacaaaagcaagtatggtaattgattaaaacatggggtaatcgattaaaataaaaggtttcaaaaactaataaccacacaacaacacaatgtaaatgattaacatgagaatgtaattaattaaaacaatgaaaaacacaaaatgagaaagtaaaacatgtatttttagaaaaagatattcaaccacgtatcaacatactaagatattgaagaaaatatcagacatagaaagcatatataacaagctacatgtactacatcataacatcattcaatactagatccatctaagatgcctagttcattcctaataaagaagaacatatctctagcaagaggtttagtaaagatgtcagctagttgatgttcacta

SEQ ID NO: 269860 - DNA, 454 bp, Glycine max
  unsure (1)..(454): unsure at all n locations
tgtagaccacaccttntccggttnttccgacattttcctcgaattaacgttggtgttgactccgcgcattttcctttcttggaagacacacccgtgagccctcgcgtcgcccttccgccgaagggtaggtttcgacactcatgatagtctagcctaatcctgatcaagtatcgtccgcagattcctcttgttggactaaactcggccaggaccgcattaagacaaacatacaacaactaggttaccgtaccccaattcctcatgaaaatatgacaaactagccccatcctatcaagttctaagaatcagaccggtttacactgttgaatgatcctaaaaacacatgcatctacatgatcaaggcaaaagcatggcagaatgaagttatgatagcacagtgaacacacaaaacatcagtaaataaataanaaaagatatttacatcaagtaccta

SEQ ID NO: 269861 - DNA, 432 bp, Glycine max
agcttcttagtttcagatgatgcagatgggtttgtttctacctcatgctctcctctaatgactatggcatcatttctggcactaaactgctgggagttggaggccatcttctcaattaaatttctggcttcagcaggagtcatgtctccaagggctccaccactggcagcatctatcatacttctctccatattactgagtccttcataaaagtattggagaagaagctgttctgaaatctgatggtgggggcaactggcacatagtttcttaaatctctcccagtactcatacaggctctctccactgagttgtctaatacctgagatatccttcctgatggctgtggtcctggaagcagggaaatttttttctaagaatactctctaaaggtcatcccagctcgtgatggaccttggagcaaggtaatac

SEQ ID NO: 269862 - DNA, 425 bp, Glycine max
aagcttctatccaggctcatcttggtggtgaagctccttcttccatgtgcttattccctattggatggcgcctcctctcacctcttctcctttgtcttccgctgcatctccatggtgcaaaatcaccattaaaggacctcattgaagctcaaagatccagcctccatagaagccccacaagcaagcttccatcagtctccggatggcgaaaaggtgcacggaatgatcataatttgtctccgcatgtcatcgggctcgccgcttctggatgacaaaagggcgcacaatgaccataatttgtctctgcgtgccatcggacacgattgtctccgaatggcaaaaaggtgtgcagaatgaccataatttgtctccgcatgtcatcgggctcaccgcctctggatgacaaaaggatgcagaatgatcat

SEQ ID NO: 269863 - DNA, 439 bp, Glycine max
agcttgcagccatagtgaatgatgagccatagaagttagaagaagaagaactatcagaagagaagaaagatgaggaagaaggtgagaagaaagctcaattttatttttggttttatagctctcttgcgatgctagtgttttgtcttgaacattgattcagtagtgttttattatttgtaatcttatccaggagatgagtcctgatactcccaattttttctcctgtcgccttacacctgactaaactattacacccataatggagagtttcgtattcatgataaattactctcattttttccctaggctaacaaacacaagtcaattagtaaagcatttctcccttacagactaacccctaattcgtctttaatcatgcttatccttagagtaaattactctcaccttgcctatattttacccttcttacataaatcac

SEQ ID NO: 269864 - DNA, 391 bp, Glycine max
  unsure (1)..(391): unsure at all n locations
gttatgtcataacagttccctcatgacatcttgaatgtttcatacgatgttttttgaagactgttctccaagaagccttctagtgatgattatgataattgcatttcttttgcatcaattttcttatcttttggtcgctttgattgaatgaggacttgattcttccataagtttgcggctttgaactcttgcaagtattttctagagctagttgtttttggtccaatgcttttgaacactggagcatgactttctgacattgatcttcttgtgtgtgcttctaaatagtgtagacttcattgtcttaattcttctattatgcaatgcatctattgatgatctctagtcatactcaatntttgatacctacactttgatctagaaaatatga

SEQ ID NO: 269865 - DNA, 436 bp, Glycine max
  unsure (1)..(436): unsure at all n locations
agctngattaagaggcttctatcacactccagatatcttctcatagatcccaacggtcagatcatggaaaagtgtcttgtgaagttgcagacaaaatttcgagaagatccaacggttaatgaaggctgggaagcgtttttaccgaggcagcttcatgtagctttctctagaagcttcattaagaggcttcctccataagcttcctcgtggcttctttgagaagctttctcaagaggcttctttgagaagctagatccttatctatccacacccctctattaactaaattaacttgcttaaaaataattacggatgaaaataatgcaacagataattaaacatcagacataattactaataatatatagatatatatatcagggtgttacacttagcacatgcataacacatcctatntgtgtcagagaatcaatcg

SEQ ID NO: 269866 - DNA, 410 bp, Glycine max
  unsure (1)..(410): unsure at all n locations
cgtcctatngcaacatgacaactaggggtggttatagaaatagataataatactatcctttctgagcaacactaatgctgtcaacactacttgtctgacaatgtgtctttgctgagaatatgtctcttttgtatcctacctgatcacacacttgaaattcaaatgataaggtaaattagaacgatgatgaaacatgcagtacatgaactttttaagcataatcatcatcgttcagagtatagagattgggtgaaacaaaacttcgatagaaataattgagtaagattcttatcaccaatctggatgttcaaaagactctacacataggatgctagttcttaaaagagcacttagacgctggttaatttatagcaagttggatgttagatagttcttttatgataacatgt

SEQ ID NO: 269867 - DNA, 400 bp, Glycine max
  unsure (1)..(400): unsure at all n locations
taatggttttctaccancgccagaacacgtgacacagatctaatcaaaggtgggaatacggtctatacatggactagtcgtattaaatgaactggtttaaaacaactcattaccacacacgatacacagggtaaatcgattaacatattactggacttaattatatacggtgacaaaacactccctgacatagtacatcctgtatgcttaaataaagagacttaaccacctatcgacagactatgattttgataaaaatatcatatcagtaccgtatcctcactagctacatgtacttatcaaaccatcacgccttcgagatccgtctataggcctacccatcctaatagaagaacatcctctacagaggatatgacaacgcagctagtgacgttcaccg

SEQ ID NO: 269868 - DNA, 362 bp, Glycine max
aaattatcttttccattattcaatacaaatcatttacagcctaagatatgaagatgtgagatgttcggttatatgccattgaacaattcatatggcagtttctttacaatgggtcttattaaagccctatataatatgtagcatgcagtgctaacgacttcagcccaatagtattttggaagaggagtatcatataataaagttttagcaatctcttccaaagatctatttttcctttcaacaacaccattttgttgacgggttctaggtgcagaaaagatatgctcaatcccatgcttatcacaaaatattttagattctttattctcaaactcacgcgcatgatcactcctaatagatat

SEQ ID NO: 269869 - DNA, 431 bp, Glycine max
agcttatgctgcaaacatttattatagaccccctcataagcaaaaccaacatcagcagaataattatgatctttcaagcaacagatacaatccaggttggaggaatcatccaaatttgagatggacaagtcctccacaacaacaacagcctgtccctaccttccagaatgttgttggtccaagcaagccatatgttcctcctccaatgcaataacagtagcagaagtcacaacaaagacaacaagcaactgaggctcctcctcaaccttccttagaagagttagtgaggcaaataaccatccaaaatatgcaatttcaataagagacaagagcctccattcagagtctgacaaattagatggagcatatggctactcagttaaaccaagctcagttccaaaattctgacaaattgccttcacagactgtgc

SEQ ID NO: 269870 - DNA, 426 bp, Glycine max
  unsure (1)..(426): unsure at all n locations
tgcgcagcccaccatcttttcatagtagagtaccgattatgtgtctaccatcacgattatcgtctccctttccattattgggggtaccacctgngccgccagatccctccaccttttgggcgtgttctttgaaagatccgtccccctttttgcacatgttctgtagttgcatcctatccggaaccacatcagaattgtactggcactgcctaacgaaggcaaccattagctccttccaagaatggactcaggaaggttcctaagttagtataccaggtgacagttgtcctagtaagactttctcaggaaaaacgtatcagcagtttctcatcttttgcatatgcccccatcttccgacaatacatccttagatggttcttggagcaagtagtccccttgtacttgtcaaagtccagcaccttgaac

SEQ ID NO: 269871 - DNA, 438 bp, Glycine max
  unsure (1)..(438): unsure at all n locations
agctntaaattaaaatttgcatgcatcagtgacctttatgacgaaggaaagtagcagtgcatgtgatccaagattcttggccattttgctcacccaatgaaacctacgttatctagaattcattgttttttttatcgaaaaaaatcaaaagatatatatatatatatatatatatatatatatatatatatatatatatatataaggtaccaaaaataccaattgaattacatacaaaaagcccctggtcatactatatttatcaataaggtgtatctagaattgagtgtgaatgcacaattagtttgcctccttcagtccttttcataggaaaacgaataatagttctgacatttcaatgtttagttcggttgttattgtcaagagatatgttaccactctcttatattattaattnggtaatgtatacttctttaa

SEQ ID NO: 269872 - DNA, 414 bp, Glycine max
  unsure (1)..(414): unsure at all n locations
ttagacaaatccgacgccaatgatgggaagcttcacttgactattttccggcaggtatgtgacaatatctgctccctgattaaagttgttttatttctttcttttgattgagtttgtggagcctgcaaaatggaactttgtctttctttatttgtggcatatgtattatgattatgccttattgatttgtgtgattgtgtcagggacaagaggttgaactttntgtgggaacagatgttagggatggaaatggtactgctcgtgcaattaattggtgtggttgtattgtccaagatccacatccagcagtgcgtgctcttggatttcttcccgaagaaggtcatggtgtatatgtggcaaggtatgattttaactttgcgctttgcaaatttaagtctgcataagtgtaaaaaa

SEQ ID NO: 269873 - DNA, 415 bp, Glycine max
agcttgactactttggtactgatcatattctcggattaaatgatgatcaatgtcaatgtgcttggattgttcatgatgagtacagcttgaagcatgacttatagcaaatttattattacaaaatatcatcacagagggcacatcaactttaaagtaaagaagtaacttgcttaaccaaacaatttcactagtaacagaagacaaggcaagatattcagattcagtggatgattttgaaacaatgggttgtttcttagaacgccaagaaagaaggttgtttcccagaaagacacaaaagccagaagtggatcttctggtatcaacacagctggcccaatcagcattagcaaaggcagtgaggttgagagagttctgagcagatttgatatattgcagaagatgatgaacaacatgt

SEQ ID NO: 269874 - DNA, 390 bp, Glycine max
tgcaactgcaactacaattgcttctttgatttgtcagtgctacttatatagcagtcccatactcaatttcaagtcctacatctccacctccatcaatacccttttagctacatctccacaaggggtaaagcgagcagcaccactggaatggcaaaggatatgtgtctgcaaaaaagtgtttaccgtgtctgggtcaatgacttcccaaccttatgtgaaccttgataacagatggttcttggaatagtagacatctttcacaacacctggctggcatgacactgaaccagatgcgaaacactcctttgtgcaacaacgtgaccttgcacattgtggtggatttgctcgctttatcccttgtagtggagatgtatgtaactaggtattgat

SEQ ID NO: 269875 - DNA, 411 bp, Glycine max
  unsure (1)..(411): unsure at all n locations
agcttgctccagaacacaatgtctgcttacaggtattggaaggaggtcaagaggttctgaaagtaagaaccaaaacataagatcacccagtaaggtaaaagcgtcaagctaatgacgttaaagaagcacttcctgngaggcaacccagttttaatctttgttatctttgtttttcatgcattttatcatttggaacttgttgtataatttgtacataggagtatatcagcctatctttgaatgtttaacataagggtttcaatttcttggaaaaaggactgaaatataacttggaaaactttttttctgaaaaatagtcctttcgctaagcgcaagcctcacgctaagcacatcattattcatgcactaagccatgagtcttaagcgcttagcgcccaaccaacccttgca

SEQ ID NO: 269876 - DNA, 439 bp, Glycine max
  unsure (1)..(439): unsure at all n locations
tgctaacccatggaagctcctaatatctcccacactttatgatgtgtgccattcttggatggccttgattttctcagggtccacttggaccccatttctaccaactacaaaacctaagataactatattatctacacaaaaagtacacttctctatttttgcatagagggtgtttttcctaaagactgaaagaacttgtctgagatgtcctaagtgatcatctaggctcctactatacactaaaatatcatcaaaataaacaactacaaatctacctatgaaatcccttaagacatgatgcataagcctcataaaggtgcttggtgcattagtgagcccaaaaggcatcactagccattcatacaaaccaaacttggtcttgaaagcagttntccactcatcaccctttntcatcctgatttggtgataaccactttta

SEQ ID NO: 269877 - DNA, 441 bp, Glycine max
  unsure (1)..(441): unsure at all n locations
agcttgtggttattagatcatttaatgcttgcattattcgcatatccttcntatgcaggaaaaccactatgattggctttcgtgttgatcactataacaaaaaatcagttccttttagtcaaagtagatctatcacagtaaaacacatcttttgatgttgtttggaaacttttacaacttaaacttcatttattcttcataggattcgacaaattctgaaagaatgtcttgcgagacaatttttgccacatgaacctcagacacaaagtactaaatgaagtcttaaatgtcatctttaatattgaatcacatcatgacttattcatacttctgggtgaaatatcacatggaagatcatgaagcattagctgatatcacataagacacaactcttaaccggtgtatttattngtatctaatacaaataattaagggtcttga

SEQ ID NO: 269878 - DNA, 431 bp, Glycine max
  unsure (1)..(431): unsure at all n locations
agaagattctataaaaatcatcttgaacaccttcttttaaagacggtttttcaaattaaaaaatattagtcaattattgtttcataaaataaaatagtaaacaaaatgaaaaattatttaaaatgaatttttgtaaccatttttctggcaatttaattttttttaaccgacttgacttgttcatcatcaatttcttttttttagttttttcttcttgggttttcttgacctatgacatggacaattcatgtgttttccanaaaataaaattatggttctcatcagttttcaattgaattgactattattttttattttttcctatatattaatcagaatatgctagactcatagaaaaatcatattttataagacagggtaacttttaattgtcaaagtgaatttgcttttatcatagacatattggagta

SEQ ID NO: 269879 - DNA, 443 bp, Glycine max
agcttatgagtcaggtcaattgttaactaaccagctgaatgcataagctaaagtagttcatcctctgatagtttttagatgagaagttaatgggagctatggttttgtattgcttatgataaatttaacataggacatattaattaatcgagtccttgatgatacaaaaagtgtacattggaaaaatcacaaatataagtcatatttttcttttcaaacagaacacattagttactaaaagtgactaatatataacccgccttttcgaatttgaaagaccaattaaaatgggattttaacgtgttcacctttaaactttttagggatcgaattagatttttttttttaaaaaaaattgataagccaaaatagattaagagaagcataaaggggaacataaacagaaaacctcctaagaccttggtttacacaatccagaagac

SEQ ID NO: 269880 - DNA, 443 bp, Glycine max
gcttaccaccttgaggacaaggtgttgcctaatggggtaggaaatgatgggcccaagttcaatgatcatatgagtacaaggcccaaaaaagtaatcaccaccccaaggtacctaagagattaggtttgattagcacggcagtatgttgacttatttgtcaaaaaaaaggtattctgtttattagtgcttgcagtagtggggggtaatagaatgttgttattcagttagtagtgggggtatcttcgaattggttgaatttgttaaaattgcactatatatatgtaccccttagtgaaaagaataaaggaaacagatatttagtaattctcccttaccttggttctaatatcctctgttctaaaaatgctattatctgtctgtttcctacgcattaaaaacacttgcaatgatttccaactcccaatcattatttccctgttcta

SEQ ID NO: 269881 - DNA, 433 bp, Glycine max
  unsure (1)..(433): unsure at all n locations
agcttcttggaggaccaaattgcaaggaagctattctcgaactaaatgcttcagatgaaaggtacatttttgtaatttctcaattcagttttcaattctggacgatttcctgttaatttatcctttcacttttggttatagatgacttgctccacggttgaactcactgttcaataggtggagaagttgagggaaatgagtccactttatgaaattgtcaaggaaggtatcaacatcaaggacattcaatgggcacagcactgattattatcaagctctcagattgcaatgcaagtgatgggaagcaattgtgattgaactccagacgtagctgccactcttgcaattgcagattcttcgaacttgctgattatntagtaatttgtatctcgagggtacattacaattagaaatttaccctggcagagctatt

SEQ ID NO: 269882 - DNA, 494 bp, Glycine max
ctgaaccatcatgaagcactcatagacactcaagcttgattcgagatatctggttatcaccaaatactagtaaatgaggttaacaggcatattacagctttcatgacacatcaagggcattatgaatggcttgccatgccatttgggctcactaatgcccctgctacatttcagcctctcatgaatgaggtatttcagtgctatttatggaaatttgtactagtctttttttatgacatacttatatgcagtccaaactggtcagctcatttataacatttggtaacagtgctgaaagtgttacaacaacataagttgtatgccaaattatccaaatgttcatttgggttacaagagatcgattacttgggccacacagtatcaggcaagggagtaacaatggatcaagaaaaggttcacgcagtcttgaattggccatatcctataaatctgaagcaattgagaggcttcctcggtctgactggatactacag

SEQ ID NO: 269883 - DNA, 422 bp, Glycine max
  unsure (1)..(422): unsure at all n locations
agcttctcgatatattatgtgcctgaatcggacttctttgtgacaagttatgaccattngaatttctcgacaccatacgttgttcaatttcgagcgtctcgatatattatgcgcctgaatcggatgtccgtgtgacaagttatgaccatttgagtttctcgagagctttcgttgttccatttccagcttctcgatatattatgcgccggaatcggacttccgtgtgacaagttatgacgcattgaatttctcgagagctttggttgttcaatttcgagcgtctcgatatgttatgcacctgaatcggacttccgtgtgacaagatatgaccatttgaatttctcgagagcattcgttgttcaatttccagcatctcgatatattatgcgtctgaatcggactttcgtgtgacaagttatgac

SEQ ID NO: 269884 - DNA, 361 bp, Glycine max
aagcttctcgatgtattatgcgcctgaatcggacatccgtgtgaatggatatgaccattggaatttcttattagcttccgttgttcaatttcaaacttctccatttattatgcgcctgaatcggactttcgttgaaaagttatgatcaattgaatttcacgagagctttggttgtccaatttcgagcgtctcgatatattatgcacctgaatcggacttccgtgtgacatgttatgaccatttaaatttctcgagaccataccttgttcaatttcgagcgtctcgatatattatgcgcttgaatcggacatccgtgtgacaagttatgatcattggaatttgtcgagagctttcgatgttc

SEQ ID NO: 269885 - DNA, 435 bp, Glycine max
  unsure (1)..(435): unsure at all n locations
agcttcaagaaaaatggcctctatatactccttanttccataacgaaattctatcaatagacctccaattnttaatggagagggttaccactactggaaaacccaaatgcaaatnnttttttatgcaatagacttaagtatntgggaagccatagaaatagggccatatatacccactacagtagaaagaattacaatagatggtagcacatcaagtgaaagcataccattagaaaaacctaaagatagatggtctgaagaggatagaagacgagtacaatacaatctaaaagccaaaaacataataacatttgccctgngaatggatgaatatttcagggtttcaaattgtaagatcgctaaggaaatgtgggacactctacaattaacacatgaaggaactacagatgttaaaagatctatgataaacacact

SEQ ID NO: 269886 - DNA, 259 bp, Glycine max
atattgtgttgtaaaccaaagtatcactcaacctgaaaaaccatataaaatgaatgagggatccatatctatggcaatagaaacttatttaaccaactagacttgcacatcaataatctcggatggtagcataatcatctaggagacacgagacctatgacatggacaatccatgtggtcatcctaagatataagtatggtatgcatcagaattcacttgaattgactattaggaaacatttatggctacatattagtc

SEQ ID NO: 269887 - DNA, 414 bp, Glycine max
  unsure (1)..(414): unsure at all n locations
agcttgaaattgacaacggatgctctcgaganaatctattggtcataaattttcacacagatgtccgattcggggaaataatatatcgagactcacgaaattgaacaacggaagctctcgagaaatttgaatggtcataacatttcactcggatgttcgatccggggacataatttatcgagacgctcgaaattgaacaaccgaagctctcgacaaattagaatggtcgtaacttttcacgcgaatgttcgattcggggacataactcatctagacgctcgaatatgaacaacggaagctctcgagaaatttgaatggtcataagttttcacacggatgtccgattcgggaacataatatatcaagacaatcgacattgaacaacggaagctctcgagaaaatcgaatggtcat

SEQ ID NO: 269888 - DNA, 248 bp, Glycine max
  unsure (1)..(248): unsure at all n locations
atctcttttatcttagtgagagtgattctcctaaattcttgagtgattcaagaccaccctgctgtatcaaagactntcacaacctttgtgtgttgccctcgctgggaagagtgattctttccttccaatcttctccacccttgttctttcaaaccacaattccagaaaatccacctctgcccaaaattatctcgtgaaaggcttcgtttgaaattcatttatgctcaagaatcacttaatttgagtgc

SEQ ID NO: 269889 - DNA, 431 bp, Glycine max
  unsure (1)..(431): unsure at all n locations
agctntactaaattaaaacccaatggtcagaagattctaacctttattatttacaatattcctctcaatgactggattagcctgcaatcagaatgttcgttagatagaaatagaaattttttttaagggaatcttaagataaagcattgtctcaggtagcatggatagagataaagattatataccttccgtaatctcttgtatttttccacctcagggtgttcaatcacattcctgctatcagatagaaattatatatggaaaagggaaagcttaaagtcataactacatgtaaaattgctaaaagtactttttgaaacttctcaaatctaaaatccttaaagcaagagaatgtccattcaactcataaagggtatcaatgatcactcaatcaacattngcataagcatacctgattatttttaggagag

SEQ ID NO: 269890 - DNA, 401 bp, Glycine max
tgctgtatgctagctatcatgatttcatttgtattcctcaaaatgtattctttgtatatcctcaataaaatgacatgaattggtttgcttaaaaaaaagtgctatagagccatgtaactaatatgaaagtcacaagaggtgaagaatagtaaatagaatgttaagaagtgggtgctgaaactgatgtatgacacaagaggttgttcattaaagcacaaaaggtgcagtattagcttgcagtaactagcagaaaacttgtcttatactctatggcactgctcatagattctattgctctttaggttcaacttataaataagattaaacacgaatccgatcaatctagggtgtggaaagcttcacgtgataaataagttctgcatgtaattgcacatgacatg

SEQ ID NO: 269891 - DNA, 360 bp, Glycine max
agcttaaagtatgcccgagtcattcatccctatgtgtatgttgtcgaagtattttctatcagaattgccattccttggattacggagttgaaccaagctcactctatgacaaaaaggttcatcaagtcaagttgaattatggaagttaccgtcttgcgaaagtggtgctatagatgaattgagtcacatcactgcttcatttactgctcaacatatttacgattattgtatgtcttgtagcttgcactttcaacttgactatgatgccatggaccatgtggaaaatctaaattgatacaaccccatatctgggcgtaaaatttgtatacttatactggcatcattcgcatgcatccgtgc

SEQ ID NO: 269892 - DNA, 446 bp, Glycine max
agcgggctatacctacggccaaacatagacgttttcctgtctcttaccggattcaggacaggctgcagcacctgataatgttctcgaaccgccttgtaggctatagtactgcgcttgatccactatagcctgctggagttgatgcatgacctccggtatggtagccatttgagcttgtaatgccgaatgatcagcctttatcgtgttccgcacgccctcgccattatccattattcgggatcgagtgttataagggtgccctagtgttgtccttcttatgatgaattccctaggtaacttatctatggtgagattgcctccaactgctgattatgctcatgaatgatctgagatcttatctccaccccgaggatgcataaataacatgaccagttcctatcatctcgctactataataaacatgacctatattacgcgaacattat

SEQ ID NO: 269893 - DNA, 402 bp, Glycine max
agctttgatttcctttgttcctgttacctttcttttctcatgtgcacccaaacccaatctccgggttcgaagacaaccttctttctccctttgttggcttgtttagcatagcttttatttttcctctcaatttgatctttgactctctcatgaagcttcttcacatagtccgcctttgcttgaccttctttatgcttaaaaacagaaacattaggcatatgcaaaagatcaagaggagttagtgggttaaaaccataaacaacttcaaaaggagaacaattagtggtgctatgaacagctctattgtaagcaaattcaacatggggtaaacaagctctcccaagttttaagttcttcctcaaaactgtcctaaacaaagttcccaaagtcctattaacaact

SEQ ID NO: 269894 - DNA, 297 bp, Glycine max
agagatgaggaagtgttgaagggtgaaactgtctgctattattgtataccacatagaggtacctggagatatgttgcaggggtcacgagacctttgggacgtcacgtggggtgctattgcccaaaaccaagcttgaccaatcccgacccaacccgggcatagtcggtcagtgagaacctgtgatgtacctaaacaggcgaactcctggcagtcaacagataaaaggaacaaagaccacatagcaatgacgcttgtggtggctggcccgctgtgaattttgtgtgatatgtggattat

SEQ ID NO: 269895 - DNA, 327 bp, Glycine max
  unsure (1)..(327): unsure at all n locations
tcctcgggccattcctgctatgcaaacgtttgaaagcnagttttcagganatatagcaaccattacaaacaagggccaagcaacacttctcatggcacgagttataacttgcacttatagataaatcattttgtggccgagcattgttatgactccttcgtatttgacacttcaaaatgttgcgtgaagcatttcacgacacctatccatgtacatattttttgacagaccttttgatgctacatcctatttgtgtacccacactttttattaggaaggctccttttgtacctactcccatgtccacatattttgaaaagcacttta

SEQ ID NO: 269896 - DNA, 448 bp, Glycine max
  unsure (1)..(448): unsure at all n locations
agcttttttgaaaccattntgctactggtaatcaattacaacaatctgtttattgattaccagagagtaaaaactctttggtaaaaggttttaagaaaaattcatgcgctactcagtttttgaaaaaaaattttaatacttatcttgattgagtcttctcttgattcttgaatcttgatcttgattcttgtaacttgaatcttgaaacttgattcttgaaatcaaattttcttttgaaccttgaagtgttcttgattcaatcttgaactcattctttgattcttgagatcatcatcttttgttatcatgaagtgttcttgacttttgagctttttgtcatcatctttgttatcatcaaaactttttgaatcaatcatgattcatcatgaagcttgcttctacataatttggcttatgtgtagaanaattgttggaaccttgataacct

SEQ ID NO: 269897 - DNA, 433 bp, Glycine max
  unsure (1)..(433): unsure at all n locations
tctcgcgaaatattggttctaatatggtactaattgcatatttatgggcttgtacagatccaaaatanttgtttagtggagacaataatttttttatcaatggcaataaaaacaccacaacaactatcatttatatagatagatagataaatatatacccaaatattgttattgatccataataaatttttcttcatttttgttccctgatatttgacatggttttttaaattgtagtcattagttaagtgatgacatgtcactactaaaaaatagggtttcaacattggttattaaggactttccacatcggttattaaccgatgatgaaagtaccaacgttgaaagtaatatcgttaacatcgattttccaaaaccgatattaatataaaattacaacatcggttattgaaataactgatgttatataata

SEQ ID NO: 269898 - DNA, 445 bp, Glycine max
  unsure (1)..(445): unsure at all n locations
agcttctcaaggaggtgagcttagttattagaggggtgtgtgtagctattctctagcttctcaaggaagttntctcaaagaaacttctcaaggaagttttctcaagaaagcttctcaaggaagctacctagtctataaatagaagcatgtgtaacacttgttgtaactttgatgaatgaaagtcttatgagacacacttcaaagttccacttgtctccctcttttattccttcaatttcgtgctccccttttctctctttcttttcctccattaaaacatcctcttcaagtttcttatccaaggcacattcttggtggtgaagctccttcttccatggcttattcccttgtggatggtgcctcccctcttccattctcctttgccttctactgcatctccatggtggaaaatcactattgaaggacctcattgaagctcanagat

SEQ ID NO: 269899 - DNA, 456 bp, Glycine max
tctacttatgtggcagggcgggcttccttcaccttcttgtctctttcgcgaactttgaccattgttcttctttcccgcgatgcttctttccatgtccgcctgagtgggcttatagcctaaaccatacttcccacgatttccttgggtatttatcaggctagttatgccgccgttgttttttcctaaacccatcccgggttcataaccgttccccaacataactcgagccatcattaccgctgcatcggacagacaaggctgcccaaagagggagtccacggaggaaatgctgaccacctcaaaagactggaaagcagtttctaacgattcttctgcggcttccacatacggcatggaggatgggcagcttaccaagatatcttcctcgcctgacacgatgaccaagtgcccctccactacgaatttcagcttttggtggagtgtagaaggcacaac

SEQ ID NO: 269900 - DNA, 418 bp, Glycine max
  unsure (1)..(418): unsure at all n locations
agctntacagcagattntagtaatgacccactaacttataattaaaatttcttaatgccattaacctagggaattaaaaaaaacttaatggctgagtgtaactgaaattgtggcaaccaaaagtcacccccaacagccaacaagccagccaccatttggtctcccaaaatgctgatgcctatgttgccaattgggcccttattacaacttgaactaaacctaactaatgcccttttagttgattaacccaaaacatatttttggtcagccaactttacaaggattgggccattatttagacaaactaaacactctaaaattgagacaaggtggtgtcatttagtcctcctccatttgggccatgattcaactcacaaccttggactnttctccttgaaacttgtgcttgtattcaaat

SEQ ID NO: 269901 - DNA, 435 bp, Glycine max
gcttctcgagaaattcgaatggttataacttttcacacaaatgtccgtttcggggactttattcatctttactctcgaaattgaacaacgcaagctctcgagaaattcgaatggtcataacatttcgcacaaatgtccaattctgggacataatatatcaagacgctcgaaattgaatagcggaagctctcgggaatatcaaatgggcataacttttcacatggatgtccgattcgggaaaataatatatcgagatgctccaaattgaacaacgaaagctatcgagatattcgaatggtccgaacttttcgcacggatgtccgattcggggacataactcatctagacgcacgaaattgaacaatggaagctctcgataaatctgaatagtcataagatctcacacggatgtccgatttggggaaataatatatc

SEQ ID NO: 269902 - DNA, 446 bp, Glycine max
  unsure (1)..(446): unsure at all n locations
agcttgcaccaacattcattagtccaatacacactcatcaaatagtcattatccatccataattccaatcattcatgctcaatatgatgcatgcacctgacatcaactctcatatgcaatgtggtatcatccccaaggaaatagcctaagcgtgcccacatgacactttcacttaggaaaactaggcagtaagtgtcgaggtcaccctgtcgtgcacaggcaactcccccacacggtgatcagcatgagtcttaagggagtttcaaaccgagtgacatgccccctagtacaagtattcctcctcatgagaaactacaagtacttactgacaaagtttatactatttccatgtcatatgaagtatgagacatgggcaccatcaaatgcactgaccgtgaataattaaatattctaagccatccncttccagagatgcttaaaactct

SEQ ID NO: 269903 - DNA, 458 bp, Glycine max
  unsure (1)..(458): unsure at all n locations
tctanactntatacaagaatgaagctctgataccacttgttagacttgtggcctcttatatcttaagaagggggggttgaattaagatattccaaactacttccccaattaaaaatctatttcactttttattcaagttataaattaccttaataatgaacttcttaaatattgattcaaataaaacaatttgaatataaatataaagcaataataaacaaaggagattaagggaagagaaagtgcaaactcagatttatactggttcggccacacccttgtgcctacatccagtccccaagcaacccgcttgagagttccactatcttgtaaattccttttacaagttctaaacacacaaggacaatccttcctttgtgtttagaattcctttacaacaagagacccacggtctcttaatcccttagagaatgaggagaagaagaagaatgaatctc

SEQ ID NO: 269904 - DNA, 395 bp, Glycine max
  unsure (1)..(395): unsure at all n locations
acgctatccttatggactccctccggacttcaccctccgtgccaccccggaagatttaagccatgcccctactttcgaggggcaactcccaccttatgaagactatcccgggcaagacgatggggaaggagatacccatcttggccccctgctccacctcaaagatccgtccccacatgaactaccccaactgaacatagtccgccatatcccggcctcacccacacccgtaaaaggatctgttccctttgcggaagataagggaaagattgaggcgcttgaagagaggttaagagcagtcgagggccttggcaattacccattctcggatttggcagatntatgtcttgtgccaacatcgtcatcccttccaagttcaaagtaccagactttga

SEQ ID NO: 269905 - DNA, 356 bp, Glycine max
agcttgcttgtgaggcttctatggagactggatctttaagcttcaatgaggtcctttaatggtgattttccaccatggagatgcagcggaagacaaaggaggagaggtgagaggaggcgccatccactagggaataagccatggaagaaggagcttcaccaccaagatgagccttggataagaagcttgaaaggatgcttcaatggaggaaaagaaagagggagagaatgagagaggggggagcacaaaattgaaggaataaaagagggagagaagtggaactctgaagtatgtctcacaagactcttattcatcaaagttacaacaagtgttacacatgcttctatatatagact

SEQ ID NO: 269906 - DNA, 434 bp, Glycine max
  unsure (1)..(434): unsure at all n locations
agcttgtaatggcaagaaaagagcaacacacacagttatctaataagcagcaagtataaaaaaaactgtaagtataaaataaaagtgtgtgtgtgttgctaattaagaaaaagaaaagctaagtgcggaaaagcaagtaatagagctagaataaaaagaaaaaggttgatctaaggatgaatgctctcctagaacctaagcttttgcatcctagaaaaatcatgaattgtttgcagcccagcctcgttacaagcctagaaaagtccttcgggttcagtttgtgtgttcttgactgtatgatatgagatgaagtgcaaagattgagacttatgttggttgttgattgatatataacctaaacacttgtgctngagtgaaacagtgaccgtgaggctttgggtgatgatccttccttgatatctgtcattcttact

SEQ ID NO: 269907 - DNA, 382 bp, Glycine max
ggacgggtacagatccaaaacatctgtttagaggagacaataatctttctataaagggcaatcaggacaccacaacagctatcatttatatagatagatagatcaatatatacccaaatattgatactgagacataataaaccccttcttcatgtatgaaacatgatgtcagacatgggggaaagatggtaacattggttaagggatgacatgtcactactaaaaaatggggactgacagttggtattaaagactttccgatcgggataaaccgaagaagaaagaccaacgtcgaaagaaatatggttgacatcgaattagccaaaccgatgttgagataaaactacaacatcggctattgaaataactgatgttatataat

SEQ ID NO: 269908 - DNA, 409 bp, Glycine max
  unsure (1)..(409): unsure at all n locations
agcttataaaaaaaatgatgacatgnatttaatcctatcacattatgttgaataactattgatgaagtttaattattttgatgtgaaacctgtttctattccttatgactcatccattaagttagaaaattttgagtaaaggaatttcttcacataaatattctcaaattattggttctttgttgcatttgacaaacttctctaagcctgatattgcatatgcagttggtagatcaggaagtaattgaggagtttagtgatgcaaattggatttatgattttgatgaaacaaaattgactatgtctttactttagctggtgtgcaatatcatgaaaatctgctaagcaaactattatttcacgttctaccatggaagcagaaattattggtttagatactgctactagt

SEQ ID NO: 269909 - DNA, 478 bp, Glycine max
  unsure (1)..(478): unsure at all n locations
gtgannccccntcatgangcgcttcttgatacccgttgctatnacagactcaagcgtatgcagccctgtactgaccctgcgtgtctcttcacaaacttttaccatggtttttgatttgcgagacgctaatttctctatcactactgatagaggttatatgctatacctgacttgccacaataatctggattatctgatgagctagtgatacctccatgggtgattacttggcgcgaacgttgagcatatgccgacattgaacaaatcattagccttatctaccgaggtgtgcgacagatctagttgtgattgatggagtacatgacgattatctgagctctgataaactgcattgacctatgacatttcagttcaccttcacctatgtatggaagacgccacctaccaggttatcgctggatgacccatgccaagtggccgcactgcaattgatttagctgagagtaaagatcactcg

SEQ ID NO: 269910 - DNA, 434 bp, Glycine max
agcttgacaaattcctttagattcaagaggaagctatgtaacttaatgttaacaaaaaatgtagctattcaaagatattaacacaaaaagaattctgaaagcaaatttgatatttccaatagttcaataacagtgacgatccaaatcataaagtccaaacttcaaattaattgagtacatagcaatcctaataactaaaaaagattaaaaagaagcgttcttgattcttcaatcatcatcaagtgtaaaagtcgaggagactgaatgagtaacatctaatgtgactagtgagggaacaagttctgaaacataaagaagattttttagttgtcattcatatcatataataagtacataaaactaccttaagaaaaaaaaatcttgttaccttcttcaattctttcaaactccaaaaattcatcattttcatttga

SEQ ID NO: 269911 - DNA, 446 bp, Glycine max
  unsure (1)..(446): unsure at all n locations
tcaccttctggtcctcctcatagttgttgcatgaganaacatgctctattttcatctcccactccaagtaggcctacggatgattctttcctttaaatggaggaatgttgagtttaataccatcaattcggttttgtctagaaacaccatcattccctcttctcctcctttcttcttcattatgatctctattctccatttgatccaacctctcatggagcgcatcatctgggtgcttcattaacctctccatatgtcgcatcaaagcttgcatctggaattgcgaaagccccccctccatcattaggatttgttcctgccatctcaaacaaacaaatcaaacgtaacaagacaattatagttgttgtttgaatacctcacccacttaagagtatcacacaattatggcttttctctaatgaagacacttttgccttttaccactc

SEQ ID NO: 269912 - DNA, 296 bp, Glycine max
agcttggctcaacccttccacatctaccacttcattctcataaattatatatattttatgcttatatatggagcggccactattctccagctaacgcacatgacaaagaggtatcaatgcaacatttgtgactctatgcgtgtgatgctgaatgctgcttgtatgatacttaagtatgtatatcaaacgcatttctaaagtgcaatagaatcaccattacacatgacttagtttatatgcaactgatcatacaaatctcactacaattttcatgactcaagtattattgacaaaaa

SEQ ID NO: 269913 - DNA, 306 bp, Glycine max
tatcatatatttacactatattatataccgaaatctgcctagctacttgaatcactcaataaaactccagcatcttagattataacattatatgatagttatttggtaaatgccatcaacggcagcattggattagaccattattgaggagactatccacttatgtccaatacaacattgtgacaaagcaaacatacatgaacagcagatccctgtctataaacacaaaaaggaaaacaaaatgtttgagcgaagaactaaccaacctttgtggcaagcatgattgcaatcacattggcttcatga

SEQ ID NO: 269914 - DNA, 439 bp, Glycine max
agcttgccttgccccttgatatatttgagggactcatggtcactatgaatgacaaattccttgggataaaggtagtgttgccatgttttcaaagcccgtactaaggcatacaactccttatcataagttgaatagttaagggtaggaccacttaacttttcactaaaataagcaattggatggccttcttgcatcaacacagccccaatcccaacatttgaagcatcacactcaatttcaaaagatttttgaaagtttggcaacgcaagtatgggtgcattagttagcttttccttaagaacattgaaagcttcttcttgtttctctccccatttgaaaccagcatttttcttgagcacttcattgagaggtgctgccaatgtgctaaaatccttcacaaattgtctataaaaacttgctaagccatgaaaactcctca

SEQ ID NO: 269915 - DNA, 409 bp, Glycine max
cttgagccaaaatcctgactcaccataaaccttgacccagggtgataatgtcaattcttaccctcggaagcaaaaaaagaatagaggggaaatttccaatcaaagaaaaagagaaggaaaatttccaatgaaagcaaaaaaagaaaagaaggaaaattccccaatcaaagagtgggagaaagcaaaaaaagaaaagaaggaaaattccccaatcaaagagtgggagaaagcaaaaagaaaagaaaggaaaattcccaatcaaagaatgagagaaagtaaaaaaggaagaagaagaaggaaagaaagctcctgatcagggatcgaaggaaaaacagaagaaatgtgcagagaggtctttggaccggacaatatatgaacaatacagaattgtcaccaaatgaaccaaaaa

SEQ ID NO: 269916 - DNA, 421 bp, Glycine max
  unsure (1)..(421): unsure at all n locations
agctnggaaacgatgaatgggatntctccttactttctaagtaaattaggatttaaacaaacacaaactccaaatgtctacaaattgataatatcataaacaccagacatgcatgaatgaaacctagtttatcgaggacaacacgaacaacaaacaatggcagttgaaaacaatattggtacttaccgcataacggtcagagtgaaggaggtacgaccaagcttgcgaggctgcctgtcgacacttatacacacaatgacaagcttgcggctagcacaattccaagctcacggcagactgaaggaggtacgaccaaacttcttctgtgcgttcggaggtttccagaatatgtcaagatcgagaagctaatcgaacattgcagtaccaacgaaagtgaataatcgcgaattaaaatatgata

SEQ ID NO: 269917 - DNA, 425 bp, Glycine max
  unsure (1)..(425): unsure at all n locations
tataacccgaagggtcacacgtcatatttctaagccacaaaatctatgaacaaagaggcttacaaataattactcataataattttaaaataaaaattctaattccaaaaattactacacttaaactntaccttcaaattttagtctaacaaaaaaaaattattacttcaactaatattttgtcaatgataaaaagaaaaaaattatttgcttgctctattaaacttaacctagacattcatactttattctaaaaaaaattattactctaattaaataatttatgaaaaaatcctcaacttcaaaacctggaagtatcacatataaatattcttaaggctgaaataccatcaacaaaggcttataaatggaagggttacacttaaaaaaaattcagacgcnnaaaacctaatcaaataattact

SEQ ID NO: 269918 - DNA, 409 bp, Glycine max
  unsure (1)..(409): unsure at all n locations
agctntgcggatntggtcttcgctggcgaaatgatctaagtgggtctaaaaagaggcaaatctgataatcatgccttgataaattcaaaaaaaaaaactagggcaagtgaagagggtgagaatgagggagaaacgcatgctgtgactgccattcctatacatccaagtttcccaccaacccaacaatgtcattactcagccaataacaaaccttctccttacccaccacccagttatccacaaaggccatccctaaatcaaccacaaagcttgtctaccgcacttccaatgacgaacaccacctttagcacaaacctaaacaccaaccaagaaaatgagtttgcagtggaaaaaaaacctgtagaaatcaccctgctaggtttcctcaacctccattttttcgaggata

SEQ ID NO: 269919 - DNA, 368 bp, Glycine max
  unsure (1)..(368): unsure at all n locations
tccttntagtgcatcacgtttaataccgagtttgatggtggtattatctttgatggtactcggngggaagtgatgggggaaatcgacattcctattgagataggccctcacacttgcaatgtggtgtttcaagtgatggacataaatcccacctatagctgtctcttggggagaccttggattcatgcactgggagtggtcccttcgacacttcaccaaaaattgaagttcgcggtgggtggacttttagtgatagtgtcgggtgaagaggatatgttggtgagctgcccctccttcgcaccatacgtagaagcggcggaagaatcgttggaaacggctttccaatccactcatctcttcccctaatg

SEQ ID NO: 269920 - DNA, 323 bp, Glycine max
ttatcttatgctacacttgtatatatgcatgtgtctatttttgaactataaaatagtagaatgtataagatcatacggcagagaaatcgctgagctgggccggagctagctggacctgcgtttcttgagtggtgcgtcagcgttatggctgacggaggaagaaagataaagagtctctccgactccgaataatgggaacaagctaattgacctttgctatttttgacagtttgccttaattctacttaccttcgttatattctccatcaaaaaacacctgatgatcctgctatagataataattaaagcaacagtccataatt

SEQ ID NO: 269921 - DNA, 447 bp, Glycine max
agcttgcttctacaaataaagggcgagtctggggtatgaatgaatgaattaggtgaagattattctatggatgaatactctcctagaacctaagattttgaatcctagagaaaccatgaattatttgcagcctaacccctttacaagcctagaaagtccttcggattcattttgtgttcatggctgtatgatatgagaagaaatgcaaaggttggaacttgtgttggttgtttatgatggaataagcctaaacacttgagcttgagtgaaacaatggctgtgaggttttggttgatgatccttccttgatttttgtcatgcttactagcttatttcagctgtgattctaatgcttatgctcctatctttgaaaagttgcatgcttgtgagaagtaattgatttaagcattccatggtattcagttcatatggttgaattcctttatg

SEQ ID NO: 269922 - DNA, 452 bp, Glycine max
cgcttgtggagcttctatggaggctggatctttgagcttcaatgatgtcctttaatggtgattttccaccatggagatgcagcggaagacaaaggagaagcggtgagaggaggcgccatccaccagggaatatgccatggaagaaggagcttcaccaccaagatgagccttggataagaagcttggagaggatgcttcaatggaggaaaataaagagggagagaaagggagaggggggagcatgaaattgaaggaagataaagggagagaagttgaactttaagttgtgtctcacaagactctcattcatcaaagttacaacaagtgttacacatgcttctatttatagactaggtagcttccttgagaagctttctaaagataacttccttgagaagcttcttagagaaaacttccttgagaagctagagcttagctacacacacccatct

SEQ ID NO: 269923 - DNA, 444 bp, Glycine max
  unsure (1)..(444): unsure at all n locations
agcttgaaagaagaaaattagtaattaatgtaaggttagaaattaagtggtgataattaaggttgattaatggtgatctagatttcatagaattagaaaataggtaattaagtcttaagagtttaaagttgagagtatttttgtaaatgaccatacgactagtttaaaaatagaattttagtttaattagtgtctgattatatatatggaataattaaaatatgttagagttgtaacaccctgaaaaattataactcaggctgatagaggaaactctatgttgtgtcatctgtgcatgtgtgtatataattgcaatgattatgtgtttttaattattaatttttgtgctatatatgaatatattttgtgtaaataatttgtttagtctagcttggcagagatacgagaactgcctaaatgaaaattccatttgtaacanaattg

SEQ ID NO: 269924 - DNA, 403 bp, Glycine max
cgagtgtgaatgccttgctgagggcgttgtggggacagaggtattataactcttaagacgattatgattgttgggaagaaaggggttggggggaataagaagcctatgtttgttcagtttgtgttggagcccttgtggcaggtgtatcagggggccttggaaggggataaggggctggtggagaaggttattaggacctttagtttgtcggtgccgcagcgggagctgcagaacaaggatgtcaaggttgtgctgcatgcggttatgagccgctggcttccgctttcggaggcggttttgtccatggtggttaggtgtttgccggacccggtgacggcgcatgcatttaggatatccaggttgattcccaagaaggaggttattggggatgtggagggggttg

SEQ ID NO: 269925 - DNA, 435 bp, Glycine max
agcttactcttaacacaatttttgccaactatttattatcactttgttatgacaaattcacaagtggatagcaatgttattaaaaagcgaccacggcgaaatagcatcgcgaaatttcgaaaaaacgccaccaaaatagtggtggcgttgcgggttgcatatggcgacgtcatggcggtcatggcggaatcgtgttaatgacgaaataatgggttttttttaaaacgtgcgcgacaagggttgggctgacccgacccaaccctacccgagtttctcttgcaaaaggaaactcgaagcgcgagaacaaagccacgaacagaacaacacaacaatcttcagcggcgcgaccaacagcagcctccagcgcacgaacggcggcgatggtgacgcacacaacacccgcacacaacattctcgagtgtgacgacggcagca

SEQ ID NO: 269926 - DNA, 454 bp, Glycine max
tctagccaaatggacttaccttgaattaattcctttgatagcccttttgagcctattttcccctttctttgttttgaagctcattacaagccttaagtgaaaaaccatgatatcaccttacccttaaggaattttgaagcttgggaattgttttgggaataagtgtgggggggtatgtttcattggaagatatgatttttggccatgcttaatgttttattttggccatgcttgatgtatatatatattgcctagttctttctttaatcttcaatttcgtactactcaatctaaaaaaatataaaaaaaataaaaatgaaaaaaaaaattcagttgccgcaaattctgcaatttcgtactattcaaaaaaaaaaaaaaaagaagaagtgaagttgaataaataaggtcttgatatgagaacttgatttgggagccttagttgatttagttgata

SEQ ID NO: 269927 - DNA, 460 bp, Glycine max
  unsure (1)..(460): unsure at all n locations
agccgacctgctgcatgcaagcttgttcgtaagtctcatcccatatcgagggctcaattntcttgagtgttttgttaaatggcttcaccttctcagcaagcttcgggaggaacctagacagggatgctagcctaccatttagtttttgaacttcttagtcgttgatcgagttgtgcatctccaatatggcagtgtatttatgggggttagcttcaatcccctggtaagtgatcatgaagccaatgaacttgcctccgcttaccccgaaagtacatttttcagggtggaggcgcatgtcatatttgtggagttccccaaagacttcttccagatccatcatgtgttaggctatgctttgagacttgatgaccatgccgtccatatataactcgacgtttcatccaatctgttgtttaaatacttggtccatcagccgttggtatgtagcgcatgcattttt

SEQ ID NO: 269928 - DNA, 451 bp, Glycine max
tgtaacccaccatcttctcatagtagaacaccggtaatgtgtccactatcattgttatcatttccctctccatcattgagggtgctacttgagcagccagatccctccacccttgggcgtacactttgaaagattcatgcttcttcatacacatgttttgtagtttcattctatccggagacatattagaattatgctgatactgcctaatgaaggcaaccattaggtccttctaggaatggacccgggaaggttccagattagtataccaggtgatggctgccccagtaagactttcttggaagaaatgcgtcaacaatttttcatttttaaagtatgcccccattttcctactgtacatcttcaagtgattcttgaggcaagtagtccccttgtacttatagaaatatggcaccttgaacttcggagggataacgacgtcgggcactag

SEQ ID NO: 269929 - DNA, 422 bp, Glycine max
  unsure (1)..(422): unsure at all n locations
agcatttaatggttgtggaagtaaccttganagctatcttgtttgattattctttagcatcatcaaaactatgtattcatacattcacattctacccatttctgatgatgacaatcattatcaagcgaattcttttcgacatcatcaaaacctgcatgattcatattctcctcctttgttatgatgacaatcattatcaagcaaattctatttgacatcatcaaaacctgcatgattcacattctccccctttatgatgacgataatcatttgtaggttaggagtaacaaaaaatatctatctgtatagtttactcccccttgattttgcaatgattgcttatatgacaccagtgaagaatgcatatatgtcatatataaaaagatggctcatacaccactacgatgctaatctttatcgat

SEQ ID NO: 269930 - DNA, 409 bp, Glycine max
  unsure (1)..(409): unsure at all n locations
tgtaatggatagataatcggatcgaattaatgtattcattaactattgatacacttgcatatatgcatatgtatattatagaactaaataatagtagtaatgtataagatcataaggcaaagtaattggtgtgttgggttggagttagctggagctgggtttcttgtgtggtgtgttggtgttatggctgagggatgaataaagataaagtgtctctccgactccgaataatgggaagaagctaatggacaaaagcgatttttgacgggttgcattaattctactatccttcttttttttttccattcaaaaacagtcaatgatcctgctatagaanataaataaataaacagtccataattagtcattatagttccttcggcatctataatagaaattatttaatgac

SEQ ID NO: 269931 - DNA, 433 bp, Glycine max
  unsure (1)..(433): unsure at all n locations
agctntacatggagctatatcatgtggtatcaagatcattntcatctaggtgatgttcttttgattcctctatctttttgtttggtcaattcactttaattccttgttcttcatcttcttctccatgtatctcctcaattttcttgtagtttggtgttgtttagtgtagatcaaaaaaaataaaccgattaaatcttagatctacacttgctcttgcatttctatggttcaaattttatagataaactcttgaatcatgtttttgtgttgattttaggttctatcattttttagtcataatattcttgttttgaacctttagatctcaattntcttgcaaaatattgattagaaaagaaaacaaaaaaatccaagtgtaaatcacttcattcatgttgtcttagagtcatgtttagtcataataattgtcaca

SEQ ID NO: 269932 - DNA, 399 bp, Glycine max
  unsure (1)..(399): unsure at all n locations
tatgcgtangaccccatacaacttgaagtccgtgcgacattatgttgatattntatactgtgaaagaatcaatggcagacatttggcactggaagacagcagacctgattacagcgaatcatcatgtctgacaaatggtccattcctcggtacttgatacactgaggttaaggttgctgagagtaccagttatgagatgtgagtctaagtttagaaggatcactcagaccactatgttgagcaagcttttctacaacattgtcataagtgtaagctttgtcctagatgatctaagagctcaattgaactatcagatatactttactcatatgattatactagatagagaattatagattttatagaaactaacagctccagactaacttcatcctcctt

SEQ ID NO: 269933 - DNA, 431 bp, Glycine max
agcttctgaacccaatcttcattgtattgttattcagtttaatcacaataaactttcatttttcattatttttttctccttctatcatcttcttctctatctattttcgtatttctcagtcttaaacctaacaaatcatatgaccaacttagcaacctcgacaaaatacaatcatcgctaattggtgagagcctgccattgtaccatggttaaaggtatactcccaacaataatccaatacttaagtgtaagaccactaagttctggaagttctcgtggaaactaaccagtgagaaatatttacggtgttagtaatgaaaacaattagggtttgagtgacacctggtagacaaccatattgtgggggttagtagaattgtgagtaacttcttaagtccttctcgatgccattgacaaagcgagaaaactca

SEQ ID NO: 269934 - DNA, 446 bp, Glycine max
  unsure (1)..(446): unsure at all n locations
tcctcggagccatttcctgcanaggcaaacatttggaaagttagttnttccaagatatgctactcttaaaacaaaaatggcatacaacctcctccaataaacacaaacatcaatgtaaatttagagcaaacttatgcacatacttctttacgaacgttcacttgcacaagacattcttataactaagaaaaatgcacccatgtacaatcaaggcaccttcgttacctagattatttatatgtacttccaaggtgtatttgctacctacatcacatgcacttccttggctaaatttacatacatgcatactcaaagcatttggggtaccaaaattgcacatgtgcacattccggtatttctaatacttatgcatatacaaactttgtgatgaatcttggctatctactcaataggtgctacatttcatgctttattcaagtgttttt

SEQ ID NO: 269935 - DNA, 430 bp, Glycine max
agcttaaacaaaatatttacaatttttcttgtgacttggcagccctgcgcatctcacaggatttggggagaaacatttctatgtggatgttgcttgagagagtgagatttaccttagatggtattgaatgtaacaaaattggtgtcagctatgaagcttttaatcaacaaccaaacttttgcgcttctcccttttggacctgcttgcataatcaattgtggaattttcgggaggttggtacttcaacaataattttttcttctttaattcttattctcatcttgcttttttggtttcattattgtcattttctattcacttctatttttgcaaaatggatttggagaaaaaattcattgataatcattgaaaattcgaaagaaactttcttgtccttaacaggctgacctgaatcgaataagtaggaatc

SEQ ID NO: 269936 - DNA, 436 bp, Glycine max
tatccttatggcttgcctctggacttcaccctccgtgccacccttgaagatctaagccaagcccctactttcgaggggcaactcccaccttatgacgactatcccgggcaagacgatgaggaaggagatacccatcttggccccctgctccacctcaaagatccgtccccccatgaactaccccaaccgaacatagtttgccatatcccgacttcacccacacctgtaaaagaatctgttcccttcgcggaagataaggggaagatggaggcgcttgaagagaggttaagagcagtcgagggccttggcaattacccattctcggatttggcggatttatgtctcgtgcccaacattgacatccctcccaagttcaaagtaccagactttgataagtacaaagggacgacatgtccaaaagggcatcttcggatgt

SEQ ID NO: 269937 - DNA, 432 bp, Glycine max
agcttgcttctacaatctcccctcttttgatgatgtttaacctaaaatcaagatacacatacaagctctatcttctaatcgatcactcacttaattctccccctttgtttttgagtttaagcttcacttgaagttaagttatttaattatatgagttcttgatttaatcccaattttctctccccctttgtcatcaacaaaaaagccaaagtgcgtatagagacataaaatcatacacaaactcataatcatccaagcattttaatccatacaacaagcaaggaggaaaataattcatacataaactaagcaaggaagataataattcatccattaatcttaataaaatgtcagataattagaaagtcatccaagataaccaaattaaaacaactaatttagaaagtatatactaataagtgtatcaaacat

SEQ ID NO: 269938 - DNA, 414 bp, Glycine max
ctatagacaactcaagcttctacttatgtggcagggcgggcctccttcactttcttgtctctttcgcgagctttgaccaccgctctttctccccgcgatgcttctctttatatccgcctgagtgggtttatagcctaaaccatatttcccacgatttcctttggcatttatcaagctagttatgccgccgttgtctttgcctaaactcattccgggttcgtaaccgttccccaacataacccgggccatcattactgctgcatcggacaggcaagcttgcccagagaaggagtccacggaggaaatgcttaccacctcaaaagactggaaagcagtttataatgactcctctgcggcttccacataaggcatagaggatgggcagctcaccaagatgtcttcctcacctgatac

SEQ ID NO: 269939 - DNA, 396 bp, Glycine max
  unsure (1)..(396): unsure at all n locations
agcttttacataaagaatttgaatgntagcgtattgtcattacacattctccaaagcttctggtatttataagtcttcatcttcaattttatattggctctaaacaaatagaattcttcacttgagctcacatttgtagtttgtggttgttttcatattgaaaaatcactttggttggctcttgtgttgagtactacattagaaaaccatttcctttaagtcaaagcaagtttatcatagtagagcacatcttttgatgttgtttgggaactcacagaacttgaacttcatttatgcttcatgggattcaacatatcctagtagaatgtcatataatacaattcctgcaaaatgaatctcagacacataatattaaatgaagtcttaaatgctatc

SEQ ID NO: 269940 - DNA, 436 bp, Glycine max
  unsure (1)..(436): unsure at all n locations
tgtgtagttccncaatttatggttattttggagtaaattntgtttataaattntgttttatggttaacgttgtctctagaacatttccattagatttaatgatgaaaagtagcagttgagctaagcgcttatccaccgctaagcgcagctctagcatgcttagcacaaaggagaatctggcagatcatcagcatcaaagccgcgcgctaagcacgagatcagtgcgctaagtgtagcaggtgcattcagccaggctcagcgcaagactagcgctaagcccaattccacttactcgagctaagcgcgagggtggcgctaggcgcaaggtcgcgaattctaagcctatntaaagtctgttttttgcagagttagggtacacaccttctgaggcttgggcacacaattttggaggcactagtgcacagcattacacagt

SEQ ID NO: 269941 - DNA, 424 bp, Glycine max
  unsure (1)..(424): unsure at all n locations
agcttttaanatttggtctttgccagtgaaaggatttatgtgggtatgaaaaaaggcacatttagtcatcctgcttggacgaatgagaaaactggggctaatgacaagggtgagaaagagggagaaacccatgctgtgactgccattcctatacggccaagtttcccaccaaacccaacaatgtcattactcaatcaataacaaacctcctccttacccaccacccagttatccacaaaggccatccctaaatcaaccacaaagcctgtctaccgcacttccaatgacgaagaccacctttagcacaaaccaaaaaaaacaccaaccaagaaatgaattttgcagcgaaaagcctgtaggattcaccccanattccggtgtcatatgctaacttgctcccatatctacttgataacgcaatggg

SEQ ID NO: 269942 - DNA, 379 bp, Glycine max
  unsure (1)..(379): unsure at all n locations
tagggatggaatacttacttgttggtgatgaacaaaagcgcatttcggaatcaaaaaatgcgacaaaggatgaccctatggctgcaaattcgtcaatcccgtgggtatggcttttgaaaggtgggaaaagaagtttttgaatgtaaaaacgccccccctttcgtcattnttataatttggtgcaggggtggcttcgcccagcgagcccagctcgcccaggcgagctaaccggcactatantgtgtntntgcttccttctttatttacgggaacattaaccatttcacctaccttcatactgatataaattttggctaacttgtactcatgtacgctataattaagcgttaattccttatcctatacatactttgtgact

SEQ ID NO: 269943 - DNA, 505 bp, Glycine max
  unsure (1)..(505): unsure at all n locations
agtgannattaggaagnccccttgnantttgacgtgccctcngaanancctgacnaccncttggagannancngcangcccgcnnagccanagaanatctcatatattaaccatgacttttgttgagncatacctgtttcctctgaggagtctaacgccctcctaccaaagaatgattttctcgatgatatttcagactcctcagtaaatacccatattcatggaaatgaatctcaagaaatagactaacgacgcccttgagatcctcatgataatggggctagaggatacaatgaactctcaagacaatggaacgcctctagagatcatccccctgacaacattatgtggtgatatataaaaagggaacaactacaccttttcttaaagattatgcaataatatggctctttgatctatgatcgaacctaaattcataacaagcctaggagatataaccggtaattgcttgcaagagaactgatcattcgaaaaaaaatgtggg

SEQ ID NO: 269944 - DNA, 397 bp, Glycine max
caagtgtttcacccctccaatagctaagctctctccatgggaacacacctctccaatagctaagctcaccccccccccccaaaatacatgaaaatacaaaaaataagtccctactacaaagaatactcaaaacgccctgaaatacaaggctaaaaccctgtactactagggtacccttaacttgtacggtacggtgcccttaattcttagggtatcctacaaatctaaaatggccaaaatacaaggcccggaagaaggaatacctattctaatatttacaaagaaaaatggacccaaccttgtcccatgctgtcataccctatattcgtccggcgacctttgcttgatgacatgcgaccattctttggtccttgtgaggtgcttggcacccatcatt

SEQ ID NO: 269945 - DNA, 442 bp, Glycine max
  unsure (1)..(442): unsure at all n locations
agcttcaaccttnnggccatcattttgccccaaatcttgaaaggagagttttttcggcgtcgtgaagtgcgtggctacgagtgggacttcgaaaatccaggtttgggtggacttctttccctcttgattttcgtgggtatggggttttgggagatatgaggggtagttttgttagttttctgctgtgtgatgattaattgtgaagacatttgctgaaaacttgttgaaattgccatgtttggatgagttaaacatacccattctgttttagggtttttgtgatgatgtttgtgatgtttatatgctgaaattgctgatggaaatctgttagagatgaagggtagaactaacccaaggttagaaagtgagaatgtgatgttatgagtggaaaaagagtgagactttgagagttggaaggctaagtctgaattctgtggtaaat

SEQ ID NO: 269946 - DNA, 344 bp, Glycine max
gctgtccttctttccctataataggggaaggagggatgaacaattatgttcaaccttctctggatctgaggatcacttaaaattagtgagaaaatttgtttccgtgaagaaaatccaagccatggcgcttccgagacgtttctgtgggtgatttcatgaagattttccaccgttcttcgttgttcttcgtcgttcgtcggtcttcaatcggaaagttcccaatatcgaacttttcatttcattctatgtacccttagtggtccggatttgtttcacatgctggtatattcatttcatttacttttcgtaccctcttttgacgcgctttagtcatttatttaagg

SEQ ID NO: 269947 - DNA, 445 bp, Glycine max
  unsure (1)..(445): unsure at all n locations
agcttcaaaacacagcaacacagaatctaggtgtcttatacccctcaattcaatgggttttctaggtttgagaagtgaaattgagaacgaggtaaatttggagcaaactctcacctcacacaagtctataacatcaatctaaacttgcccaaactggatttacacctaaaattccaccgaatcaaaatttgactccttaacacccaattttgccctagaaatggctcttggttcactntgatcatttgtttttctctctagctcaacctaacctttctcacatgttctaaatggcatttcaagctagggttaactcattttaacctccatttaccacagaatccagatttagcctttcaactctcaaagcctcactctttgtccactcataacaccacattctcactttctaactctaggttaactctacctttcatctctaaca

SEQ ID NO: 269948 - DNA, 452 bp, Glycine max
gcttctctacttctgtgtattcttcccaaactctccttattttctccatcctttacaagtaaagctagtgcacaagtaataaacaaaataggacatcaccactcaacttagtgtttcactcaagttcactcgtgtatcactctttcaaggctttttcttttataatatgcactcttgccttgtaccactcctcctcctttttagttcttaagtagaaccttcaagctcaaaatcaagaagtattcaatgtgaaatatgtcacaaatcaaaactcaactcaagaagccaagagtagaaatactctaagacaaaactttggaatttaatgacaaccagaaaaataacgaaaggaataccaaggaagacaaaaaaactagaagactccaaagtcaagataaagaattatccaagaattgaactatactatatgtaaataaccaacaagacacaat

SEQ ID NO: 269949 - DNA, 448 bp, Glycine max
  unsure (1)..(448): unsure at all n locations
agctnganatgggtttgggccggaacggtggtggctctgtaagcctgtttaagattgctgaaagctgtgggaggtttggtttaaggtacaagcctactagtgctaacaaaaagaggattgctttcgaaaggaaagagaaaagcttagctcatttacaagggtgatgatcgcaggtggagaaggtctctatttgtcacatcaatgagagctttgtaagtgtagggtggatgcatgaagatcaagttgctatgctggatgaagagactaatcaagaccacccgaattaagtgcagccatgttccccggactttgaattgaaaaattggtagatcatagagcaaccaaagatttatgtttcgaattcgatgtaatcaagtagtttggatcatattgtcatgcctaggttttaggggttaccttctttgttgggcatactcttctgtaatgg

SEQ ID NO: 269950 - DNA, 454 bp, Glycine max
tgaaggtgtgtaacccaccattttccatagtagaatactgatgatgtgtctactatcattgccatcatctctttctctgttattgggggcattacttgagctgccagatccttccacctttgggcgtattctttgaaagatccatgccccccccctttttgcatatattcagtaattgcatcctatccaaagccattatgctgacactgcctaacgaaggcaaccattaggtccttccaagcataggctcgggaaggttccaaccaagtaacagctacccccagtaagacttccttggaaggaatgtatcagcaatttcttatcttttgcgtatgcccccatcttccgacaatacatctttagatggttctcggggcaagtagtccccctgtacttgtcaaagtccaacaccttgaacttgggaggggtgatgatattgggtactaggaacaac

SEQ ID NO: 269951 - DNA, 459 bp, Glycine max
  unsure (1)..(459): unsure at all n locations
gacatgctcgcatgcaagcttgagtcttagcataactgtctcatgcgcttgcttattgcttattattaaattgatgtgttattatgtcttgatcggagtgtgtgattcttgtgtattgtgattgatgattgaaaggtttgattgatgatttaaaagtgaattttgaatgataaagtgataaaataatgtgaaatatgctaagtaaattgtatttggctactatatgttgatttttttctctattaggaatgtgataactcactccctgtttgntgtttgtgtttgaatcctgtgatgatcttgaaccttgtgttcgggggagcacatgactatgtgaagtgcttaaaggaaccttgtgctgaaggacgtcgggacacaatgctctgataggatgtgacagtggggcataagttntatattaattgcataatggtagtctattttatgttatctcactga

SEQ ID NO: 269952 - DNA, 380 bp, Glycine max
  unsure (1)..(380): unsure at all n locations
cacttacatatttcatatgaattaagttttgatttctactgttaatatcatttcttatgtgagtgcaaatacaccaatacaagatacttctgacagtataaaattgttaaaaatttctcacaacagaaaaattaaagaaattgcgatgtgttcaaacttattatattctcagttacttctgatatgtcttgatatatagatagtttaacagatttaccgaaagaggctgatattttcattttttgcattattggcttatttaataattntgataagctattcatactctaggattatgattgtatcattaccaccttgatccagattcaactaatgcaatcattggcattatttcaaataaaccattggcgtatcaatgc

SEQ ID NO: 269953 - DNA, 434 bp, Glycine max
  unsure (1)..(434): unsure at all n locations
agcttatagaatatataatataataacaatgacattttgtgagtctatacatgtttcctttgatgagtctaatgccattctaccaaggaatgattttttagatgatatttcagattccttagaagatacacatattcatggaaatgaatctaaagaaaaagatgaaggaagcaatgaggattctcaagataatggggctagaggaaataatgaacttccaagagaatggaaagcctcaagagatcatcccctcgacaacattattggtgatatatcaaaaagggtaacaactagacattctcttaaagatttatgcaataatatggcttttgtatctatgattgaacctaanaatataanagaagccatagtagattataactggataattgctatgcaagaagaanctgaatcaattgaaagaaataatgtgt

SEQ ID NO: 269954 - DNA, 449 bp, Glycine max
  unsure (1)..(449): unsure at all n locations
tccttgagaagcttccttgggaagcaagtgttacacccctccatatctaagctcaccccatgggaacacacctctccaatagctaagctcaccccccccccccaaaatacatgaaaatacaaaaaaaaagtccctactacaaagaatactcaaaatgccctgaaatacaaggctaaaaccctgtactactagggtacccttaacttgtagggtaaggtgcccttaatttttagggtatcctacaaatctaaaatggccaaaatacaaggcccggaagaaggaaaacctattctaatatttacaaagaaaaatggacccaaccttgtcccatgctgtcataccctaatttcgtccggggacctttgcttgatgacatgcgaccattctttggtccttgtgaggtgcttggcacccatcattaggcaatntatgaaattccaggacatgcc

SEQ ID NO: 269955 - DNA, 167 bp, Glycine max
  unsure (1)..(167): unsure at all n locations
agcttcacgcacacatgcagtctctgagggtacgatttttcccttctanaaaagcagaggagggcgggatccctggtgggggccaacattttattatgtgcggctccattggtaggcacggccatggcaggactatacgcgcaacaaaggcttggatggcgggaaac

SEQ ID NO: 269956 - DNA, 306 bp, Glycine max
  unsure (1)..(306): unsure at all n locations
tatgaatgcgtgacggagggatgaacagttatgttcaacctttctcggattttatgatcacttaatgatagagagaatacccgtttccgagaagaacatccaactgaaggcgctgcccagacattactgagggagattccttgaatatcatccaccgctcttcggtgttcttatgattgcttatgtcatacagcggaagattccacatttcctatctgtcatcttcattgtatgatcccctatggatcactgatcttactacacgctgttcttctctttccacntactaaaccaaccctgaattga

SEQ ID NO: 269957 - DNA, 423 bp, Glycine max
agcttcttatccaaggctcatcttgttggtgaagctccttcttccatggcttattccctagtggatggcgcctcctctcaccttttctcctttgtcttccgctgcatctccatggtgtaaaattaccattaaaggacctcattgaagctcaaagatcctgcctccatagaagccccacaagcaagcttccatcgagtggtaatcagagcacaagagcttcaagtaggtgctccttaaacctccattaatttttcgatttaccttctcttccattgttggctcttcatttttttctccatgtatctcctcacatgtcttgtgctaaattttgctaacatgattctttagagtttccaccaattaaacttgctatagaagctagacttcgatttctatggttcacacttcttgttcttgctcttg

SEQ ID NO: 269958 - DNA, 446 bp, Glycine max
  unsure (1)..(446): unsure at all n locations
ngccgcccagctcgcccaggcgagcaaggttgcttcctccagattcaacaaccttctggaggaatcttctagagggcccaagtgggcctgattgctatttgtacctccctttttactaaatccatccccttctatttttttggtaattctttttccgtaacgttacgaaactttacgaatttcgtaacgatacttattttccttccgcaaggttacgaatccttacggattatgtatttactcttttttagctttcgaagaagttacggaaacttacggattgcgcaaaaacacctcttttcgatttccgccacattacggaatttcacggattgcgcaagcctgcttccttttgatttttgacaggcctcgggacttcattcattgtgcaaccaaggacgccaagtatctcgaagcggccaatcanagggtgtatatcatcaaat

SEQ ID NO: 269959 - DNA, 413 bp, Glycine max
agcttgctccagaacacaatgtttgcttacaggtattggaaggaggtcaagatgttctgaaagtaggaaccaaaacataagatcacccagtgaggtaaaagcgtcaagctaatgacgttaaagaagcgtttcctaggaggcaacccaattataaattctgttatctttgtttttttcatgcatttaaatcattttgaacttgctatatagtctgtacataggagtatataagccaatctttggatgtttaacataagggtttcaatttcttggaaaaaggactgaaaaataacttagaaaaatattctctgaaaaatagtctttttgctaagcgcaagcctcgcgctaagcgcatctttattcatgcgctaagctgtgagtctcaagcgcttagcgcccaacccatgaatctg

SEQ ID NO: 269960 - DNA, 467 bp, Glycine max
  unsure (1)..(467): unsure at all n locations
tacggacctatgaaactaagcttgtcaagcgttgaggtctgttgttgaacgtggtggtgcgagaattaacagtacccacaccttcaggtcataccgccacttgaaaaccacaaccatctttcaaaaccctgtgttgtgcgtcaagttctcccactatgaaatcctctaagccaccccaacccttcgcatctaggatgacaccatgtcaagatccacacctaggatgatgatgttttatgcatcaacttcaagatcctcattatatttgctaattatttttaaaataaaaagtccatttattacgtgaaaccctaactcagacttggagaacaagtggcattacaagtggttggttgacatgtaaagttaacagtcacatcaacacctaatggaacccttctaacaacagagatctattacaaaagctnttatatgttagtgacatatcgcagagcataaatttatta

SEQ ID NO: 269961 - DNA, 420 bp, Glycine max
agcttcttgacatcctggaggactatttgaatatttattttgggcctaaaacgtatgagagagtggatggatctgtttcagttgctgatcgccagtcagctattgcacgctttaaccaagacaaaagtcgatttgttttcttgttatccactcgctcttgtggacttgggataaatttggcaactgctgacactgtcatcatctatgattctgatttcaatccccatgcagatatccaagcaatgaatcgagcacacagaattggacaatcaaatagacttttggtataccggcttgtggttcgtgctagcgttgaagagcgcatcttgcagcttgctaagaaaaaattgatgctcgatcagctttttgtaaataagtctggatctcaaaagaggtagatgatatttaaaatggggactg

SEQ ID NO: 269962 - DNA, 329 bp, Glycine max
  unsure (1)..(329): unsure at all n locations
tctatanattggtccaaagacattnttattacatactttcttttttatgtcacacatccgcactgctatttaacatttattttaatatattctataaaaaaatataaattttcttttatggtttcttttcatattgttttttaacattaacattttatgtttttaaagtttatattaaattttttaatcttgaattttaattacatatatacatatattgnggaaaaaaaacttattttatttagtctggaaaactcttatcattaccttttaaacaaatttttaatctttttatgtcaatgttcctcgtctcatttaatgaatgaata

SEQ ID NO: 269963 - DNA, 385 bp, Glycine max
  unsure (1)..(385): unsure at all n locations
agcttgtggatgctgatataataatttcctctgacctaatattacatagaaggaaaaaaatagagatggatattcattatatagatagaagaaaagaaaacacaatcattttctactttctagtttttctaccaagctagtaaaatggaattgtttcaatccacatctttcatagaaacaaactaaatttgtcactcagtcaatagtaaagaggatacaaagtataatttaattgatgacattgtcatactgttagtccttcaaatgtattattattgttgatcacgcanacttggtcatcaagtggttccccaacacctcgactatcatcatggagaatacgctttgagagtaaacatgtgtaatactttgtttgccataaata

SEQ ID NO: 269964 - DNA, 357 bp, Glycine max
  unsure (1)..(357): unsure at all n locations
tgcggactataccttcgaccgaacatggccgtgtttctatctattcccggattcaaagcgggctacagcaccggctccgcttccctaactgtattggaagcgggtgcggtggctttatcctttatggntttctgaagttntaacatgaccttcgagatggaagccatttgatcttttaaggccgatagatcggccttcatttgttcctgcatgccctcttcattatccatttttctggatcgagtgttataagggtgccttggtggtttcttagttatgatgaaattcctaaagaaataaacaacgatgagtatgccaccaaaacatgagtatgcaaatggatgatcggagcacttg

SEQ ID NO: 269965 - DNA, 388 bp, Glycine max
tacgtttttggagagtagttataccataattctctttagctctatccatgggatccctggaatcttccacacaaaccgaccgtacgcatctatttctacccaaatacaacacttatgaagtattctactccaaatcccaccgaggttagggaaaaaggaaaggaggagaggaggatattgcttaacctacgtggcagctagaccaactgatgagaatttggactaacagttgttacgagagactagaccctcagctgatcgggatacattgagacaagtatgaatgagagcgagaacgacgggagttcctgactgatgaagagaagaaagagacgtgtttgagtgggaaccgagaatgatctgatttgatgctgagtgccctcgacca

SEQ ID NO: 269966 - DNA, 439 bp, Glycine max
gaccttgaaactcagcttatgagagagtcaagatcatttggaggataataaaactttgctaaacagccacaaagggagatagaagttgtcttcgaacccggagattggtgttgggtgcacatgataaaagataggtttccggaacaaaggaaatcaaagcttcaaccaagtggagatggaccatttcaagtgcttgaaagaatcaatgacaatgcttacaaagttgagctgcccggtgagtataatgttagttccaccttcaatgtctctgatttatctctttttgatgcagatggagaatccgatttgaggacaaatccttctcaagagggagagaatgatgaggacatgaccaagagcaagggcaacgatccatttgaatgacttggacgacctatgacaagggcaagagcaatgaaagccaatgaagctcttctac

SEQ ID NO: 269967 - DNA, 464 bp, Glycine max
  unsure (1)..(464): unsure at all n locations
gcacttgaacccnttgatgcnccatgagacctgagaccctgaacgcctgctgcgtgtcagcttaacgtaagcccgaatttttactactatgttttttgttgaactattgtctatcagaattgccgttccctggattacggggattatttaagcgcacgcttatacaaaaaggttcatctagttcagttgaaataaggaagataccggcttgcaaaattggggcgaaagatgaatccagttcatcactgcttcgttaccgcccaacatattatgaatgtaatgtcccggtacttcccagcttaccatgacaaaacagtctggacctatgtgaagatctcaattgattcaccccatggctgcgtaatgaatcgcattcttcacctggacatatgagcaacctcccgctttcataggtgcgtgctcatgcctcttcctggaaataaataaacaccctattcaacgac

SEQ ID NO: 269968 - DNA, 498 bp, Glycine max
  unsure (1)..(498): unsure at all n locations
attgtccctttgatgaaccnatgtgatagcgatgtataacctctcagctnnaactctgcttgctggtacncacaagacttttggggcggttatcgctgattgtcctaactctgcgacgagtactacggcggttgagctggactaggacaatagaatgcgcatgatggtgagtatcattctgaaagatgctgatgtgcctgatgctgataaagatgttccaacatcttccaccttaagcgcatccgtgcctgatgctgagatagatggtgcacatccttctgctcaaatgctgaaaccctcgcgtcaccgcgtgaataggagatatcataagatgaggatcatgccttagaggagactcctgcatcacggtcgccagaaactgctgcaggtgacctcgtagacctgcaagaagtcgaatctgatgaagaacctattgccaacagggttggcacctgacattgcgtaaagacttcaaaacagagaggtgaataccccccg

SEQ ID NO: 269969 - DNA, 434 bp, Glycine max
  unsure (1)..(434): unsure at all n locations
agctntatacacgggagcaaaagatacaagtatcattcaaggtaagctatttggtcagagagcttgtgtatgttcaatcatggcctttatcatgtcctcatttatacatttcattctaaaattcatagattcatgcaaagattattactcacagctagttgttcactcacagtttaaggtcacactctcgccggtttttggttcaatcttttctttcacaatcaatctgtctactgactaacaattctgattgcaagttcacattcttgttctttctttgttcaacatgcacatttgctcaaattcatgaaaggaaacacaaattccattaaaatcatgcattcaatttaaaacaaagtcatacacccattttcacaacataggaactataggttgtgcttgtaggccatttggttccatggttgctgttggag

SEQ ID NO: 269970 - DNA, 421 bp, Glycine max
ataggcaattgtaatgacataaaaggttgaagacctattttctgaaaggctcgaatgcaatcaaaggtttcagcagaaaagaattccatatcaataaacttagggtcaataatggaacgagatgagaaaatattggagtaccgtttctgctgttcgtcggaagaaaacactggggaagaggacaatgacggtggaattggagctgtggatgcgctagaggctccagaacgatgagctgttgacgccgaagcggaggcggaagaaccctgtcgtttctttgatgattctgccatttgagggagtggtgacagattttaatcggggaaatctacagatgaatgaataagacgaggatttccatttacgggagttgatctgatgaccaactgagcgagatatgaaagtttgaaggcttacgaat

SEQ ID NO: 269971 - DNA, 451 bp, Glycine max
agcttcccttaccttacaactttccctcaagctaggtctttgaagaagagaagagaagaagatgatcttgagctctatccatggtttccctccaatcaacaacaccaaccgaccatacccatctaatacaacccaaaaacaacacttaagaagttttctacaccaaaacccaccatggttagtgaaaaaggaagggaggagaggaggagaaaactcaccttccatggaagctcaaccaagctcaagaagaaagggacaaacaattgtcacgaaggacttgacccttagctcaaagggattcaatgagacagggaagaaggagaggagaatgaaaagagttcatgaatgaggaagagaagaaagagagtatttgagtgggaaaaaaaaaaattctatttatattctcagtatcctcgaccattctcacttaaactcacatgaaacaaaacta

SEQ ID NO: 269972 - DNA, 460 bp, Glycine max
ctcaagctgcacccggaagcctaatttaaacgagatcattttgttcaagctcgcacctcgcgtagcttgaaggcttagagggttgggtcgaccctcattttcacacaaaataaaacaaagaattaaatttgaagaatcttgcaaggtgatggtgaggagtgtgagctagccgacgatggcaataatgtggtcttgtagggcggaagagaggatttttcaactaatgaggatgaatatcttgttgttgttgttgaagatggagatggtcttgatgaccttggagagctcgacggggagtgagagaggaagaggaggtgggcgaaggtgatgaagcaacgttgggtgtcgaagggatgatggtttggcaggggagtggaaatctatgagagggagatgcggatggtgtcgagggtgctcaaatgcaaatgatgacaataacatcacagatgggagaacaaat

SEQ ID NO: 269973 - DNA, 462 bp, Glycine max
  unsure (1)..(462): unsure at all n locations
taagcgacctgctgcatgcaagcttctcaaggaagttctctcaagacagcttctcttggaagctaccttgtctataaatagaagcatgtgtaacacttgttgtaactttgatgaatgagagtcttgtgagacacaactcaaagttcaacttctctctctttttcttccttcaattacatgctcccccctctctctttctctccctctttcttttcctccattgaagcatcgttccaagcttcttatccaaggctcatcttggtggtgaagctccttcttccatggcttattccctagnggatggcgcctcctctcacctcttctcctttgtcttccgctgcatctccatggtggaaaatcaccattaaaggacctcattgaagctcaaagatccagcctccatagaagccccacaagcaagcttccatcaagaagattcctaaagaagctagagcttagcta

SEQ ID NO: 269974 - DNA, 453 bp, Glycine max
tgtattgatttaaaacaaaaatgtaaaacatgtattcaagcaaagcaacctataatgggttttactacatgtattgaaagagaaactaacttacttgaattagttcatagtgatgtatgtgataataatgatgtgttaacacgtggtagtaagagatactttattactttcattgatgatttctccaaatattgctatgtgtatttagttaatcacaaaagtgagttgtttaataagttcaaagtatataaaatagaagtagaaaattaattagaaagaaaaattaaaattctttgttttggtagagggggataatacatatttttatatatgaataatttttttgaaatgcattgtattattcatgaagtgacatctttgtatgcttctcaatctaatggtattgcagaaagaaagaatcgtaccttgcttgatatggtgaatgttatgctt

SEQ ID NO: 269975 - DNA, 157 bp, Glycine max
cccaaacccaatctccgggttcgaagacaaccttctttctccctttgttggcgttggttagcatagctcttatttttcctctcaatttgatctttgactctctcatgaagcttcttcacatagtccgcctttgcttgaccttctttatgcttaaaaa

SEQ ID NO: 269976 - DNA, 433 bp, Glycine max
  unsure (1)..(433): unsure at all n locations
agcttaaagtatgcccgagtcattcatccctatgatatgttgttgaagtattggcgatcagaattgccattccttggattacggngttgaaccaagctcatgcttttacaaaaaggttcatcaagtcaagttgaaatatggaagtaaccgtcttgcaaaattggggcaaaagatgaatcgagtcacatcactgcttcgtttactgccaaacatatttaggattgtttatgtccttgttacttccagtttcaccttgacaaagatgtcatggaccatgttgaaaatctaaaattgattcaaccccatgtcctgcgtaaaaattcgcaatacttcaactgtacatcattcgcatacatccatgcttttcattggttgcattgctcattgcattctttccttgaaaaataaaataaaataaaataaaataaaatga

SEQ ID NO: 269977 - DNA, 433 bp, Glycine max
  unsure (1)..(433): unsure at all n locations
tcagtccctgaganactggttcccagaagacatcagggagtgattattgctgangaccctagctctgcaacaagtcctagggaagtagacccggagatggacaagaaaatccgcagtattgtgagtagcattctgaaagatgcttctgtgcctgatgctgagaaagatgttccaacatcttccaccccaagtgtttccgtgcctgatgctgagaaagatgttccaacatcctccgctccaaatgctgaagccctcccgtcacccagtgaagaggaatcaacagaagaagaggatcaagcctcagaggagactcctgcaccacgggcaccaganactgctccaggtgacctcattgacctggaagaagtcgaatctgatgaagaacccattgccaacagggtggcacctggcattgcggaaagacttcaaaaca

SEQ ID NO: 269978 - DNA, 429 bp, Glycine max
  unsure (1)..(429): unsure at all n locations
agcttgtgcaaatcaaatcactcctacattntatctctagcatgcattgtatgttggtctcgtcctttgtcacgggaagccggaaggtccatatcaccttcttaattgtacacatggggcactgcgcccccaaaggcgcgagtaagaagagataattttccgggctctcgtgtccgtaaaatgcattcatatcatgcatcgcataagcatctcttcataacatcataatggacatatcctgcatttgtccgttatcatattccagcctcacattttgcatgagtcatggcatcatcatgcatatgncgttcaacaaacttttgatctgcaaaattgcataccatttgttttcatccttgcgttntcctctacaaaacaaaaacaaaaaggggaagcgtgaaacttcacactacattcttagttgcatgt

SEQ ID NO: 269979 - DNA, 440 bp, Glycine max
  unsure (1)..(440): unsure at all n locations
gtctctaagcttctctaccactccattattgtcctccttacgcattatcaaanagccaaagttcgtgggaatcaatacagataaaataatgaagtggacaaagatcaattataagtcatagccaaccagaatcataaataaggcatagccaaaatataatccaaacagtcataattcaaaaccacatagaatctagacatagaagactaaagtgctaatactaaaagataaatagagtgcagagaatgataactgaaatagcatagccaaaatacaaggcttaaaagataatgagaaactaaactctaagaaggtggaggtggtggtggaaggtcgaagctctgatgaatataacccacatcttcttcaagttgcgtgagacggatatccatgccggcgaagcgagtatgcagagaatcaagacgttcaccaacataagt

SEQ ID NO: 269980 - DNA, 391 bp, Glycine max
  unsure (1)..(391): unsure at all n locations
agcttcaagcacagatgctgttactgagggtatgtttttttnttttttttaaattataatatgtagtgattcctgttatgggtcaacattggagtatgtacggctctatttgtttgcatggtaatggtaggattagatgggcaacaaaggtatggatgggttgaaacttgaaagtcaagcttcttgctagtagggattctagtgatattttgtgactgctccaagaaagtggctatagaaactgatctataagtgaattttattgccaatgctcttgtggtgtaatggcaatggtgtggcattcgggacctgtttattaatgattttctatttgaaagatgggagaatatcttggntatagtctactaagtgtcattcttggaaaaaagtt

SEQ ID NO: 269981 - DNA, 448 bp, Glycine max
  unsure (1)..(448): unsure at all n locations
ggcatgatttacattctccccctttctcaagcatattcttaattcttcttgacatcatcaaaatcttcatgatttacattctccccctttttgatgatgacaaccacctgtaggttaggagcaacaacaaagaaaaaatatctatttgcatatagtttactcccccttggttttgcaatgattgcttatatgagacagttgaagatttcatatttttcatatgtaaacaaattgtctcataaacaatagataattnttcttactattttatctccccctttgtcaacatcaaaaacaaatcatgaatagagaggataaagatgttaccacttgttgcaatgtatgagaatcaagtgataccaaaaggcattaaaacaatcattcaatattaatcaagcaaaaacaagtacaataacacatcaatcaaacacaatcaaacacaatcaat

SEQ ID NO: 269982 - DNA, 425 bp, Glycine max
agcttcccagttatggagagctaagtcctttgttgtttcttccttgtaggtacttgatgtaaatacctgtatatctatttaatgatgtttcgtgtgttcactgtgctatcagaacttcattctagcatgcttttgccttgatcacgtagatgcatatgttgttaggatcatccaacagtgaaaactggtctgattcttagaacttgataggacaggactagtttatcgtattatcacgaaggatcaggatatggtaacctagttgtttgtatgtttgtcttaatgcggttttggtcgagtttagtccaacaagaggaatctgaggatgatgcttgatcgggattaggctagactatcatgaggaatcgaggtttagtatttcaggagacaccatataacacatgagcattgttaagtagagaata

SEQ ID NO: 269983 - DNA, 445 bp, Glycine max
tctagaatggtgtaccagatgatcgtggccccatccaagctatcttggaagaagtgcatcaacaacttctcatccctggaatgtgcccccatcttgcgacaatacattttgagatggttctttggacaagttgtccctttgtacctatcgaaatcaggtaccttgaatttcggggggatgacgatgttcggtactaagcaaagatcagtcatgtccgcaaacggatagtcgccaaagccttcaacagccctcaatctctcttcgatgagatcgagtttcctcttttcttctgctgccgtgcgtagccctcctgtggacaaaaatattggctgtgctggggagtttcgaggttctcccatgaggttgggctgaggtagtgcgttgggtgccggcccctcggcagggaatggggagtaggaatcaatgtctccttgggcatgccctc

SEQ ID NO: 269984 - DNA, 291 bp, Glycine max
agcttctcggctcatgctttgaacgcctctagtattacacccgtgcaggctaatgcacccacccagagggaagctccacaagttccaactccgaacacgactcgaccgcccggtaattccaacacgacaaggaacttccctccgaggccattgccggaattcaccccgctcccaatgacgtacgaagatcttctaccatccctcatcgccaatcatttgggcgtgggaactcccggaagagtcctcgaaccccctttcccgaagtggtatgaccctaatgcaacttgcaag

SEQ ID NO: 269985 - DNA, 452 bp, Glycine max
ggacctatgaaactcagcttttcctcacaaatgttagatttgtagtgttcattgttataactttgaaattagaaattgacaaaacaaattaactgactcttatgaaacaaaatcttaaatcattagcaagtgtgtgaagcctttgtttcagaagaatgaaagcagagcatgggaattaaatagtgtttaatggtgctcctttacttcttttctttttcatttaagaagtagaacttatctgactttcagtttctttgatgaaaattggtggaagctaagaaaaaaaattataaatggttgaattgtatgattagttttggtgatatggaattcaaattgcaaattgtaaggttctatcaaacatagattttctgtaaagagtgctgtcaaaaactattggttctctgtataggtagcagagatggaagctattcttcaagaacataacaatg

SEQ ID NO: 269986 - DNA, 333 bp, Glycine max
  unsure (1)..(333): unsure at all n locations
agcttgctagcaaagatgtgctgttgccttcggattgagcttgaacttgggcctgagtcagcccctgaccctgtgttctccttctccttctcctctttcaaggcacggattagtcgatttggcagatacagataccgatcctganagcgggaacgatttgcgacaattcttcgcccagttctccatccccaaatgtcaccctcttccggccaattttcggcgcatatggaaatccctcgccggacatttccggtgccactgcctgtaaattcaataatccattattctgcttcatctccatctccatctccatcttcatctcgaacgctactt

SEQ ID NO: 269987 - DNA, 404 bp, Glycine max
cttggatgcatagaccatgttatagttatagtgattcatgactattttatagtggcaacagaaaccacatgagcaaaacctattacaaggattcctccagccacagagggtctatatttggtagctacaacaaggtcttttatatgaaccttatacatgtttgtaggggagaatctcttgctacatgtttaacatcatgtactagttctcctagattatctagtatattcattttcttacgagcaaaatgacttctccaagtgtatggaccatacatcataacatcactaactgtctgacgtcttgtcgaaacggcacacatacaagcgaacaacccactactagctctgatctcaaaacgacatatattcagtcagtgcccgtctttcatcaatctggattag

SEQ ID NO: 269988 - DNA, 397 bp, Glycine max
  unsure (1)..(397): unsure at all n locations
agcttgagatgaggaagtgtataagggtgaaactttctgcttttattcgttgaccacagagtggtacctggagatatgtcgcgggggtcacgagaccttggggacgtcaggtggggtgctattgcccaaaaccaagcttgaccaatcccgacccaacccgggcatagtcagtcagtgagaacctgtgatgtacctaagcaggcgagctcctggcagtcaacagataagaggaacaaagaccacanagtaaggaggcttgtgtggtggctggctagctgtgaatattgtgtgatatatgggttatggcctctggtaatcgattaacaagggtgggtaatcgattacaaggcttaaaaatgaagacaggaggctaagatggtctctggtaatcgattac

SEQ ID NO: 269989 - DNA, 436 bp, Glycine max
  unsure (1)..(436): unsure at all n locations
tcaggctgctcaattgctccatgttgctgcatggaagggcaattgtctgtatggtggtcagcagaggagcccaaaccacaaacccttgcgacaggtacagatttctgattcaaggccagctgggttaccaagttgatcaacgcatccagtttgccttcaagcttcttagtttcagatgatgcaaatgggtttgtagctacctgtcgcaacctacccttcagcgggagggcgacgcgtgactcgcgggatgcgtgttccacgaaaggaatactcgcggagtcgccaccaacgtttatttgaggaaaacgtcggaaaaaccggaaaagacgcgatctacgaacttttaagtgaaaaggttcgggagttgtatttacgcacggagaaggtattagcaccccacacgtccgtcccaagggacggcagcctntaatcgaat

SEQ ID NO: 269990 - DNA, 430 bp, Glycine max
tgcaagcttctcgatatattatgcgcctgaattggacttctttgtgacaagttatgacaattttaatttctcgagagcattcgttgttcaatttcgagcgtctcgatatattatgcgcctgaattggacttccgtgtgattagttatgaccatttgaatttctcgacagcttccgttgttcaattgcgagcgactcggtatatgatgcgcctgaattggacttccgtgtgacaagttacgaccatttgaatttcttgagagcttacgttgttcaatttcaagcttctcgatttattatgcaccttaatctgacttccgcttgacaagctatgaccatttgaatttctggagagcttccgttgtgcaatttcgagcgtctcgatatattatgcgcctgaatcggacttccgtgtcataagttatgaccatt

SEQ ID NO: 269991 - DNA, 399 bp, Glycine max
gcttcatataagctgaaccattttatcaataagcacaagctgagttttattcagaatattaaagcctatctcttttatcttactgagagtgatgctcctaaattcttgagagattcaagaacaccctggctgtatcaaaggactttcacaacctgtgtgtgttgccctcgctggaaagagtgattcttaccttactttcatctacacccttgttcttgcaaaccacattttcagaatatccacctctgcccataattatctcgcggccataactcccattgtacgcactcaaatcaagagattcttgatcctaaattgagtgacaaaacgagacctttcacctcgatatggaatcacctcatatggagccctgtagctacagatatagccatttctata

SEQ ID NO: 269992 - DNA, 444 bp, Glycine max
agcttgtgccatcccacatggttggagaattctcgtttaatagtgtgactctgactggtctccctatgattttacctagtgagagtgacctgactttctaatgtatggtttgtcttgtcatgtactcctaggcgcctgacgaggtttttcactgacatggtaccacattgcatataggattgagtcttagtgtatctgttgcataatgcatgtgtattgatcgatattgattgacttagtgatattgtattttgatcctcaagtacgtgaatgatgtgaaaatgaatgacacgtgttgtattgtgatgtgatgttacacggcaaagaggtataatgacgtgaactatgtttaagtaagctgtatttcatttattgttaatttttattcatgagctttaaattaatgcattaaaaatagaagagaaagtagcaatgtacctctag

SEQ ID NO: 269993 - DNA, 437 bp, Glycine max
tttctaaaatctgttacaaacagttttaacttttggttatcaattacataccttgtgtaatcgactataggcttttaaattcaaattcaaaattttcaaattgtttcagaaatcaatttagccactggtaatcaattacatcctctggtaattaattaccatagaggaaatatcatatttttgaaaacataattgttcttaaaaaactatttgtaaaatatttcctttagccaaatctatgcagcatcaattaaggaattctttctaagatcctagctaagcacatcattcttcttgcatttatgaattcttgacttgaatcacgctcgtctttggcatcatcaaaacttcatatcatatatgcttctataggtaagacttacgaaaaattttaccaacgaatatttatcgtacgtaaaatcaatgacttgtaccta

SEQ ID NO: 269994 - DNA, 435 bp, Glycine max
agctctgatgcaagatttggagaggttaatgaaacttcgagatgatgctctccatgagaggttggatcaaatggaaaatagaaatcataatgaagaagaaaggaggagaagagggaatgatggtgttcctagacaaaaccgaattgatggtattaaactcaacattcctccctttaaaggaaagaatgatccggaggcctacttgtagtgggagatgaaaatagagcatgttttctcatgcaacaactatgaggagaaccaaaaggtgaagcttgccaccatggagttttccgactatgctcttgtgtggcggaacaagctacaaaaggagagagcaagatatgaagagccaatggttgatacatgggtggagatgaaaaggatcatgacaaagcggtatgtgccggctagttactcaagggaattgaaattcaa

SEQ ID NO: 269995 - DNA, 453 bp, Glycine max
  unsure (1)..(453): unsure at all n locations
cttgatgctagtgttgaatgtgttaaaggtaaacagaccaaaagctagaaattaggtgcatatagagctacatacgtcttggaattgatacatacggacatttgtgggtcatttcatacatcttcatggaatggtcatcaatattttatatcattcatagacgattactccagatatgcatacttatttcttatacatgaaaagtcacaatctttggatgtgttcaaaacatttaaagttgaagttgaaaatcaactcaacaaaagaatcaagagtgttagatctgaccgtggtggtgaatactatggttgatatgatggttcaggtgaacaacgtccggngccttttgccaagtacctagaggaatgtggaatcgtcccacagtacaccatgtcagggtcacctagcatgaatgatgtggctaaatgacgaaacataactcttaaggatatg

SEQ ID NO: 269996 - DNA, 389 bp, Glycine max
gaccatgtatttacagggaatatggctctgagtttatcaagacatcgtataattgatgatgatgatgataactcagacgaccttcttgaggggatgtcttcgtgatcctagctaattcgattgtggtaacaaaaggattcatcacaagagttaagaaaaactcctatggagtccttgtatgtgagatactctacaattgaactacgcttaaataaacatgtagtatttaacttaaactcatcatatgttttatattaaattctcatattagcgtactgccacatgatatcttttttacatttacaacagcgaagtgatatgagatctatttagagacaagttgcagaattgcaagaacacatttacaaacatatatgtttgatatgaga

SEQ ID NO: 269997 - DNA, 475 bp, Glycine max
  unsure (1)..(475): unsure at all n locations
ctatagaccactcaagcttcatgatgatgaatcaagttgattcaagtagttctgattatgacttagatgatgacttaaatcccaagagaatgatttcaagatggagtcaacgtgttcaagatcaagataaaatcaagattaatttcgagtttcatgaaattacatcaagaagaatcaagattcaagagaagatgacttcacaagggaagtgttgaaaagaatttttcaaaaatcaaacatagcatatttttgttttacaagaaaagtttttctcaaaattttctaaggtaccagaggttttactctctggtgatctattaccagtttcctgtaatcgattactagtggcagagtttgatttcaaaagcttttaactaaatttgcaacgttccaattgattntcaaatggtgtaatcgattacaatatattggtaatcgattaccagtgtatctgaacgttgaaattcagattcaa

SEQ ID NO: 269998 - DNA, 272 bp, Glycine max
  unsure (1)..(272): unsure at all n locations
agcttggcctgacgtggcctattccctnccctatttgagacgttttcagctcagtaagctttagctttgtggggatagttcttgaatatctagaaaatattttcattaagagtctagtactaatataaaaggattagtactttggttttgtgtatcacattttatctatcaataataattccagtttatcagcctgagccatcggctctcttttctttcttccctaaccctaaaattataattctcaacaagcttcatcccataatcatact

SEQ ID NO: 269999 - DNA, 433 bp, Glycine max
tcttatccaaggctcatcttggtggtgaagctcttttttccatggcttattccttaatggatggcgcctcctctcacctcttctcctttgtcttccgctgcatctccatggtgaaaaatcaccattgaaggacctcattgaagctcaaagatccagcctccatagaagctccacaagctagcttccatcaagaaaaaaaaaaaagtccttactacaaagactactcataatgccccgaaatacaaggctaaaaccctatactattagaatggccaaaatacaaggcccaaacgaagaataaacctattctaatatttacaaagataagcgggtcatgcttagcccatgggctcaaaatctaccctaaggctcatgagaaccttatggccttcccttggatctctaacccaatctacttggagtcttctaccca

SEQ ID NO: 270000 - DNA, 427 bp, Glycine max
agcttctaacttgattatgattttagttacttaaatttgaatcattgttaattttggtttcctgaatttaaatttcctttatatatagcccttcaatttaaaaaaaatgatttttttactttttagtctttcttatctaattttttgcagttttacgattttttttacggctagagaaactaaaaaggatattttttcgaaattgagaggttataaaaaagcaaatttaaattcagaaacaacaacaaaatagaaaaaatatagttaagccaagtttttaaaggatgaagttgcctacaggccacaagtcatacaacacctttgtctttaatgaacccctatgtaaacgacacttgatggtttttgcgtttaacctaagaaaatcgcccaagacgacacatagtatccaaaggaagttcccactaac

SEQ ID NO: 270001 - DNA, 435 bp, Glycine max
  unsure (1)..(435): unsure at all n locations
ngcaaataggtatatntgtttcataattctgtttgaagctaatttgatacagtatacaaaaattgagccacctctctaagtgtaaagtgtggctctgaatatgaatcactttttgtatgtttggagatccaactttagatttgcatccaaaggtgttaatattaaggattaaataaaaaggacattcgattaaaatcatttcataacaaatatcattatttgcttaattatgtctctaacttagtngatcgcatgacctacaggatgtgtttggaatgaacgagaaaaattctatattctttttaatgggatccacatctttcattctattctaaatgtttaattcaaagatgtttctttgtatctttggttccatctttctattctcatcctctaaatcatacgcatccttatttcaccactatcttgttctct

SEQ ID NO: 270002 - DNA, 418 bp, Glycine max
  unsure (1)..(418): unsure at all n locations
agctntgtcagttactaatttttcaaatacaagttttgtatgtttcttactattttggtcaaattaagttatgtatgtttcttggacatgatcttgtcatgcgaaatttgaacatgagaggattcattcccaattcaccacttactacttttatgatttagaactattggtcaacctattaagagtgatctagaggtaacttgtttatctttgtagttgttattcacctcgtaggaaaatatttcgttgtttttgtgcaaatgtttatggatcggcttcattgttcttagtattattttagctactcattaatgacaatattttgttattgttttcataattttatttatttggattgtcttgtgtgtatagggacanatttttctcgtctcatgatatgtgtgacattgtcacttgt

SEQ ID NO: 270003 - DNA, 408 bp, Glycine max
  unsure (1)..(408): unsure at all n locations
ntaacaatgtgaaaagatggatagaaacaaacggaggagatgattttagtacacatctaaatgattcttgttaatgtcgcagaaacaacatcaaaaccaaatagtaatcacactaatttctaagccaacaaaatcgacttaatcatgtctcacacaggcacgacaactttcttcctagccatgcttggtcttacaattctcacacttggaggggtgctaaaaattgaaatcacaatcgaaatttactgtttacgtgcacacttagaagggactttcaacaaatttaatgatcgcatatattatgtttgttaaaaaaaaattggatcagacattgcactaatatgcttccttggcttacatgacagctggaagggttcggcgtgagtgacccacaagacaaagatgcat

SEQ ID NO: 270004 - DNA, 437 bp, Glycine max
  unsure (1)..(437): unsure at all n locations
agcnttttagaactatcatcacatgacgctttattgtcacagaacaagttgctttctaagcaacttgagatattaacagaaacactcggtaagctacaaactaaattgtctattggtcaacctacgcactcttctattttgcaggttacaggttgtacaatctttggttaggctcacgaaataggccaatttattcccactgaagaaaacactcaagaaattcattatatgggaaatcaacagcgacaagggtatacttaagaaggattttcaggcttccaatagggtcctatcgcaacctacccttcgacgggagggcgacgcgagactcacgggtgcgtcttccaagaaaggaatacgcgcggagtcgccactaatgtttatttgaggaaaacgtcgganaaatcggaaaagacgtggtctatgaatattaagtg

SEQ ID NO: 270005 - DNA, 347 bp, Glycine max
  unsure (1)..(347): unsure at all n locations
ttaccatgcagtgtaattgattaccaaaagataagtttgtaaatcaacttttcaaaagggttttgaaatttgaattttgaatctttgaatcgattactagatgtttgtaatcgattaccaataatgacacttcaaaaaacacttttaaaagtcacgacccttcaaaatataactgtgtaatcgattaccaatgagaaaattttagataagctttttgaaaagacacatctctttaaaccattctgaanaggcatgatggacttatatatatgtgtgtctgactttgaanaacataagagagagatgttctaagagaacttaattgtcaaatgctctctcaacaacta

SEQ ID NO: 270006 - DNA, 437 bp, Glycine max
agcttgacattggagtcaatcgtcgcctagacggtttgtgcacacgcttcattcttagccatattgttggtgcagtcaaaccccagtctggctataaaaggtatacattgattgtctagagagaccaatattgttccaacgccatggcctagaatgtttgaagctccgtcaaaccacacgatccacttgtcccgatcctcgtctagcttttcctcaaacaaggccatgatgtcctcatccgggaattcgggatgcatgggttgatagtcgttgagaggctgctgagccaaataatctgccaaggtgcttccttttatcgccttttaggtgacatagactatatcgaacttggatagcaaaacttgccaccgggcgatcctcccagtgaaagcatgcttctcaaagatgtacttaaccgggtccatcttggatatcaa

SEQ ID NO: 270007 - DNA, 440 bp, Glycine max
  unsure (1)..(440): unsure at all n locations
nggccgccacggagtttccgactatgctcttgtgtggtggaacttgctacaaaaggagagagcaagaaatgaagagccaatggttgatacatggacagagatgaaaaagatcatgaggaagcggtatgtgccggctagttactcaagggacttgaaattcaagctccaaaaactaacccaaggcaacaagggggttgaggagtatttcaaggaaatggatgtgctcatgattcaagcaaatattgaagaagatgaggaggtaactatggctcgatttcttaatggtttgactaatgatatccgtgatattgttgagctgcaggagtttgttgaaatggatgatttgcttcacaaagcaatccaagtggagcaacaattaaaaaggaagggagtggctaagaggagttttaccaactttgattcttctggttggaaagaca

SEQ ID NO: 270008 - DNA, 277 bp, Glycine max
  unsure (1)..(277): unsure at all n locations
agctttattcatggttctataagcaatgagatcgattttacaaccatattatttcatcatctcaagcattccctttatctcaactaaacaccctaacctcacataagcatncactaagcaattgaagaatacaaagtccaataatacatctgaattctcaacaaaatgaaggacaccaccaacttttttaggtttacctacacatgcataagccctcacaagtgagcacaatgtaatacaactaggttntaatctttctgaccgcattagtctaaac

SEQ ID NO: 270009 - DNA, 424 bp, Glycine max
  unsure (1)..(424): unsure at all n locations
ntagaagttggggtcacttattatttaactcattgatttgccgttaaaactaatggaaaaacgagagtgtgtaatatttttgtttttcgtcttgtatgaacatccttcagtaaaatgaacatttctctctatatgattaactttggattttgagtcatacctcatccaaatctagacatacatgactttttatactggtaaagtttataaattttttgtatatgataagtataagttatgcaatagttctataaattctctatagaagacaaaaatgtaaacttgagttttaatataaatgtttaatcagataaatatatctatgtataaatttggtttgagttggattagattgaatttcaaaatgaaatccaaaatctgattttatccaaaaaaaatgggttattatattttaattgtcaac

SEQ ID NO: 270010 - DNA, 416 bp, Glycine max
  unsure (1)..(416): unsure at all n locations
agcttggttaaaactctctgtggttggcctgttgttgttgttcagatgaaaccaacgaggaaggtgcgttgaagtcattgtttctgtgtgcatgttaatattaatccatttttgcattgtcaggtatttacttcangtcatggtttaccacaaggagctaatataaaatttctcttctgggacagtggatggacataccttattgataaccatagcacagagttaataggttaaaggtaggaatgaattactattgaatggaagcttcaaattgattttttttttcatggctaataactttagctatgacctanattattattattaacctatgcttatatgttctatggaaggatagtgatgttgatttaagtacttctccaaaagcacttgataaacaccataataaacttact

SEQ ID NO: 270011 - DNA, 394 bp, Glycine max
  unsure (1)..(394): unsure at all n locations
agcttcaagcttaatgtccttcctagcgatganatttctagctcctctacacctacgttgttgaagcttggatgccaagttggatatttgatcttgagggtctctatttggactntggaaatatcattgtcaaccatgttcttcctaatctcaaaaaaattattgagatcgaagttcttgggaagtttctcattctttatgctctcataccttatgatgatggagtgcacctcaatggggtcatcttgtggccaagtcagtggtggagcatcaccataattgccatcatacataatcatgcaagctttgactccacacacgttataaaattcagtcatattcttcattagtgctttctgtctcttcgagagagccaaatcacgatctctcccat

SEQ ID NO: 270012 - DNA, 410 bp, Glycine max
tctccgccaattatctataaatagggggagaagtgaagtgactattggttcagccccttacgcacttctctctctttcgaatttgcttggaaaaattgtttccgtgaagaaaatccaagccgaggcgcttccgaaacgtttccgtaacgtttccgcgaggaatttcgcgaaggtttccaccgttcttcgacgttcttcattcattcttcatcggtcttcgatcttcaacaggtaagtacctcgaaccaagcttttcgattcattctatgtacccgtggtggtccacattgtgtttcgagtatttttattctcgtttcatttactttatataccccctattgacgtgcttaaaccactttatttaagtcatttctcgcttaacctaagactaaacaataaatttccaccga

SEQ ID NO: 270013 - DNA, 1023 bp, Glycine max
  unsure (1)..(1023): unsure at all n locations
tgtctgtctatctctcttcccacaatctaagattacattttgctnnnnccaagcgggatgacctgtaccgtctcaacgaccgcgagcacttttgttcgtgtgaagaacgggtctcttctttctcaagactgcatcctggggccaaaagtgggagttccgcatctctaataaggttggctcaccatggcgcatctccagggcttacccgtgcctctttggtggcataagtcagcaccgatccccctaaaatatagaggagaactccccaacctgggggaagacaaccgcacctcccacatgaggctctcgagataaaataaacaccctccccagccgcttatgctcgagatatttgtctgatcgtccggcctcgcagcaaggagactcttctctataacaccctctctggatctccccgcctggataaccttgagcacgtgtataccaaccttgcacccccttagacgagaagcatcaaaattttcaccgacattggggtcaggtgacacactttaatcttacaattggcggcctccctgccgccataacttggacacaagtccctcctttagacattagaccccgcccggttggtgcatcctttaccgacacccccccatggttaagcctctagatgtatgtggcggtcttattgcacacaagtcaatatagttcctcctcaagtgtgggaaggaatggaacaaataatctttctcttaggcacaaacgcctccacttttccatggcctccatatggtcaccatacatcctaagagagcctagtagcgggctttatttattaatataaaaaaattaaaataaatnnncgccccggncngnnnnnnngatggcgctctccatataccaatatccactctcatataaccagaatactcttctaatatcatttgactccaaaaatatctcccgntcccagccccccccccntctccccaaaaaaaaataaatataaccggnntctnnttnntntnnntttatatatttaattaatcccacttaact

SEQ ID NO: 270014 - DNA, 352 bp, Glycine max
  unsure (1)..(352): unsure at all n locations
ccatgaaaattaccctcaaaatagattaattgtttattttacatcaagtacttcatagaaattcccaacaaaggattttaaccctccatttcaagggagcagctttcacaaataggaaagggttttagagaaaataccacattacctagcaatggggatgtcttcttcacctctaagaaactagaaaataactttaaaacctagaaatttcctaaaacgtangacctttgcttccttgcttagcttttcctctgttttctacacacaatttgcagtccattcatacctctttcataatctcatgccctctctttttttttctgtgcaaatcaagcttataaaggggtttctg

SEQ ID NO: 270015 - DNA, 308 bp, Glycine max
  unsure (1)..(308): unsure at all n locations
atctagcagaacgntaaataataatgcaactgaatacacttgcttatgttggacaggtgacaaacaagctctttcagcttaattacatatcaagagatgttgaaaagtttgcaacaaaaatgctgctttctgctggagaccatgaagtttcaaatacaggtcttttgcaatctggacatactgaacaaatagctgaggcagaggtggtgtactatttttctcgtgtcatttctctaaataatgctccttgtgataattgatgtgcagagttctaatatattggaatgagttatttgattctgatcttg

SEQ ID NO: 270016 - DNA, 317 bp, Glycine max
tatcggaggtgacctgcacggtatggtgttctggcatggagaagggatgatggtcagtctgactagttgatatggatcttgaatgcaaaattaaacaagaaaacgaaatcgaattgagataagtttcagcctgcttcattcattctacttattacatatttatactgaatttttactatattttgacttcaaatcttttgtaacaaaattggtgttggcgcctaaatgaattacttacttattggagtggctacttagctgaatctgttttacgagctcgtggctcctaactcccttgttgatagctttggtgcttt

SEQ ID NO: 270017 - DNA, 339 bp, Glycine max
tgattgggccggagatgaacatgataaaaaaagcacccatggatttgtggtcttcatggggaatacaaccttcactttgtagaagccagcttcatgatgatgaatcaagttgattcaagtaggtttgatgatgaccaagatgatgacaaaaatccccaagaatgatttccagattgagtcaacaagttcaagatccagattaatttccagtttcatgagaagaaatcaagaagattccagaatccagagaagtttgatttcgagattctagagaagaaatcaagaagacttcacaagggaagtattgaaaagattcttcaaaaaacaaacatagcacaa

SEQ ID NO: 270018 - DNA, 531 bp, Glycine max
  unsure (1)..(531): unsure at all n locations
tagctagcaaacactaccaaaaacttacataggaaataatgataaattgacctgcacaaaagattaaaataagatctaaaaaccatcctaagttacaaacaaggcatcctaagtaagttactaacctacaaatatcctttatgtcttttgagtagcaaattttagttctcttttccttatagccaagccaaactatatatacatatattggtctctagtaatttagcgaaaaaactggatatatccatagagtatttcatcccgtagtttccaagttacctctacctgaaaatatgcacagattaatctaacaacatttttcatttcctcaagcatattgtactacacaaaaaggagacaacatcttgaattagaccaaaataaattctctacacataatgaccaaagacattatcatcattttgtataagcttactagcttagcttctaatataaagcatataccacanactgtgaaccttaccccaaataacaaactaatataagcctttaatataaagcatataccac

SEQ ID NO: 270019 - DNA, 445 bp, Glycine max
  unsure (1)..(445): unsure at all n locations
agcttatcgaagcaagcaagaaatataatcaattattggcacaaaatccatcgtgccaaaggcatttgaaatggtaacatcttttaatattttatattcattttcttataagttatataataataacgagttttttattttgtgattggttttatatgatatatgaaagtttggtgaaatttatataaaggcatcatgcattagattatattatttaatttggcttttactatatttaattntaatagaaagaagattcaaaatatggtaaatggccatatgctctggaagtttggaaggccacacacatgagatctaatggaacttggtgcattccaaaaggagaagaaatcatggtaaagaanaaattcattntaaagtcttggtgtcaatattagaattaaagacattaattgtattatgatatcatatctagttatatttt

SEQ ID NO: 270020 - DNA, 525 bp, Glycine max
taagcccgttgccgttgtcccatagatcccctcggaacttgttcctgctccattcttcctttcgggccctatttgtttcccgctctaattcttctaccgtagtcatgttgacatctctcagcatatcacactctttcctgaccctagtgactatcatctttagcttttccttgaccactcttgttttttcaagctcccctttcaaagcttgcacttcttcgctttcctcaaggacttcaacttctttcccacttaggccttttagctttgggagccaagttatcccttacgtcctagacttcaaccacttgtgatagccgccgatgacgccattgctacttcccctaagcctcttatctttcctttccactatattccatgctttacgaattctctgaagtatcttcgcattggcttcattgaaacctcgtgccacgaaaagcgtgatgatgttctccgacggtgcacctctcataaggtagcctagttgtcttatggtcagcatgggattataattaatacaac

SEQ ID NO: 270021 - DNA, 1177 bp, Glycine max
  unsure (1)..(1177): unsure at all n locations
agaagtcttgactacttttgtncntnntctgnntcttcntnnnnnttnannntnntnnnnnnnnccagcccgaggtttgatcatcttatacctgttctcacaatcgactgcaagcatgctaactaggtgactcttacaaccaatatcctaagccatacacaagccgtctgcatgtttctgaaaggaggacatgtataattttttacactctgtaaatagataataatcaatcgcctgctccaaatgaaggcttgattcttataaagttagagactgaggtcgttttatatacaatctcaagaactgggaagtgaagttcgttgtctctaacaaaaagaaaacacatgtggtatgtaaataagaatgcacgcattccacatgatcacgtgaataatagtggagggtggaaggatcacacaaacgaagcgctagtaaaatggacctgtgacctaccctattaagaggagcattngcgatgcgaaccacggatgacctcgtcatcccactgtttagattgaaaattactgttgtcgtagcgataatacataggatagactatctatccggtggaccaaaagtatgcgaatcatgaaaacaacctcctgtgtgttgggcacaccgtcagagataaaatatattgtgtcacatgagatgacatcgaaataaaatggctccattcacgcacaggggctactacagtgttggtcgtctggcaaaccaagctcaagttcttctccgatgagactattctaccaacaacaagaatacggccgtttttcttccacgtnagcggcaaggcaagcaaaataaattacccccttgaggagaggggagacactggctttctgctgagggggacgagcaaaaattccaatacatagtgtttaattttttgtcgcatctatctggtgattatttcgaaatatgaggggttatcgctatgtnccnatttnnnanaacatttattaataagaaacatatcttggtccccacggggagaaaattttctcgcgtctcttctgatactctcctcctgttggacgctcctgttgttgtacacttactatcnntgttnnttgttcactatagagcaaaagctcgcgcaagagttngttntnnntgnnnnnnnnctctcntcatatgtataattctacnattctcgtctatactcgatccc

SEQ ID NO: 270022 - DNA, 972 bp, Glycine max
  unsure (1)..(972): unsure at all n locations
tctcttatctcaactccactctacaattatgccctttctcacggcgactactctcgtatatacatataattcttcgtacaattctcccccnnnnnnnnnccgcccgagttgattccatctcatacccacactatanaanacncaagctttaccaatgaaacatacggagacttttatggtgccgttaataaagtagtgccttcctttccagaccccttgcacaacaagtctgtgggtcttctaacccgtcgtaaccttctggcgtggcccggaaaaattatccgtatggtgcgagattatatatgtgttctgctaagcaaatttttcacatcacaaataaaattaaaaacaaacaggtaacgacacggtatatggaaattaacggacaccacattagaccacttacaaaattacctggttcttgagggacgggttacaattttgaaattgacaacaacgtattatagtcgtttcatattatttaacaatgctaaagcctacacataatctggcagtgattattatcttttcaacaataaatctctactaaacgatagcatgagcatactcccatccatttctgacgagagctaaagaagcggattctataggcaacatacaaataattctatacaaaacgcgcccacgtgatacggtccggagggtgaaactcgagttattttaatatactcaacaggttagaaggcaattatgacaagaatagcgtgttttcctcgacaactccatgagagtggcggaaggaccaatcaccaattaacgcgggttaagcgcaaaaaaaaaactggttacttattcgaataaacactagccttccaccttaaattaacggtaagggacaaaatcttctcaattaaacttggaaaagaaaaactggaccaaaattccttaaaaccccttctcccacccagataaaggaatacttttcacacaaaaaaattcgttgaacccccc

SEQ ID NO: 270023 - DNA, 907 bp, Glycine max
  unsure (1)..(907): unsure at all n locations
gaccgcatgaacctttaacactgtcccggaacttaaataccgctgcgtcagctttggagaaaatggacactcatttttccaagtctatctgtcaggtctgagagaccgtaccagttttcttgcgaattctaattatgtgggtcattaagtctatcatatgctgacaatagctgagaagcccgagaatttcttttcgggcggagtatagtgtctgccatacttcttggccttggctaaccataggggaagttcttgacttctgttcaaggtaagagcaaaccgatccctccacatggttgcctttggtgtaaaaagtcatcacccttctctatcctctttttccgcgtatacttgggcatactcgtacgcgaccctatgctcgtgggccgtgctagaactactcttctggacttgggatatactacatgtggcttgttccataacctgaacactcttttgactgacatactactctttaaacaccttggtgcatatctttcctcagttggtctgtgtcccaactccaaatgtacgctctttctcagctttgttttgtaggcttcggatgcttttcgatcacacctcggggacgcactacttctggagtccttcaactcttaatgatattctccggtaatctcttattatgaaactgccgggtttttgaaatatttagtattgttaattnggggggggggggccaccaaaaaatcctccggccaatgcgggaaccttagtgccaaacttttgaggttcccggcttttttaatactntttttaaaaaaaanttaaaaaaannnaaattaaaaaatattttttttttccccttcagnatttacctaattaataaattcccctaccnnccnctgttgncttctattttttatatttcttatagtgtggttcg

SEQ ID NO: 270024 - DNA, 834 bp, Glycine max
  unsure (1)..(834): unsure at all n locations
gcccgtgatgatacatcaagagccacagaaanataaaaaacctcaccttgagattaaacaacggaagctctccacaaaattaaattgtcattacttttaactccgaagtcccattcaagcgcctaatattatcgagacccctcaaattgaacaatggaagctcttgagcaattcaaatggtcataacttttcacttgggaagtccgtttcaagcccctaatatatcgagactctccaaattgaacaaccgaagctctccagaaattcaaatggtcataactttttacttcggaggcagattcacgcgcataatatatcgagatgccccaaattgaaccaccggaagctctcaagaaaatcaaatggtcaaaaacttttcacactgaggtcagaattacgcgcataaaatatccagacgctcaaaaattaacaacggaagatcttctaaattcaaagggcataacttttaacacggagtccgatttcagcgcatcaatttagaaagctcctaaataaacaacggagctctccaaaaattcaaatggcattacttttaactcgagggcgatcccgcccctaaatatccagacctccaattaacaatgaaactttggacaatgaaagggcttacttttacactgtggcccaatctgccctaatattttagacccctaaattgacaaccgaactctccgaaattaaatgacctatattttcctgggaggccgattaagccttacatttcaacaccttgaattaaaacggaacctctcaaaattcaaggttttatttttattctgggtccatataggccctattttataaagctcaatt

SEQ ID NO: 270025 - DNA, 968 bp, Glycine max
  unsure (1)..(968): unsure at all n locations
tctacttattatattttatttactgttttgtatgttcttnnnnncaagccgcttgaactttgtctttgcacgcgaactaggacgcgctgcaaattacagtgtggattatagatttctggtaaaatgaagcaaaaaggtcctcctatatgtaaaacaaagaacttcctgcaaatctttcttgtttctcctgtacaaaatacattctttagtatggaaagggggacacattggttgaaggggtatatataccattgtgcataatctacaattatgtttagccaggtaggactacctattaagagtggccgaaaacaattgttcaaaatatatgctagaactccttaatttaggttatctgaatacacttcaatttataaactacattagtgaattaatgagttattaaaaacaggattagagcattttattagagctgacatgtaaatttatgaactcactcaggaatatcaatttcattttcgctgacttagactacacaccgcatgtttgcgaggttaaacagttatcagcttccatccgttttacaagtgacatggcttctggctgtaatgacattccaaaacacggcaacatttattcaatataggtccggtgttaagatgttgaaacagccactttgtaaaatattttctccaaacatctttttttaatttttaaaaaaataatattttttttttaaaaaggggttnnnnaaaaattccaaggcccttgttatgctaancnnnngcgnnngctccttatactataataagaggtgtgtcttcccttacaaaaactcttcttaattggggtatctttgtgtttaccccgcgcatttctccctcttttgatgtgtgctggcgtggcttaatatataatactatatcttctgcggtggtggcggngnctttcnnnntntcnnntaatttattncttatatattttggatcatctgtctctcatcactt

SEQ ID NO: 270026 - DNA, 1095 bp, Glycine max
  unsure (1)..(1095): unsure at all n locations
gttacctcagttttcttgctcatgcctcacagtcatatgcttcacccttgtatattcttagatttatctcttactacttcttctatttctncnncccccccgttgatgcaatctttgcgagcgaannaaaaaactcacctctggtcctttgcgtggtatgtatgaaagactggcttttcttacagttcttttaacaaaccggcccatacccaacaacctaccggggtgtttcttatacttagaactagaattggtgacccccgttgatatgcacccggttttgttggtggaatacttgataataattatgtatttattatgttaataaaaattttcttttcttccaatgaaatatctacccaatgaatcgctttatctttaattattttttattttatttcatttttttcatcttgttaaaaaaaaataaatgttttcttgtaaaagccatttaaacaattatcctcaagatggtttggcacttttttgaaaatcttgaaatttccttcttcatccttcttttttaaggcgcagaatataaaactagaacgcaaatattatctggttatagacttatttctaaatttcttttgggaaatcctttccttaaattattctgagaataagattncttcttaattaccnctttgaatacaagaagtttcaccactcagatattttcatttttaaataaaacaacaaccaatatgaggcttctatttttnttataaattaattaacacagccttcgccgatttcttttgtacaccaatcttgtattcacaaccatccaatgttggtttgtcatctaggaaccttttaattttaaacccgctttttacaatttttaatatatgttttttctgacccaagatgtttttcccccattaaattattagttattcctttaatatcacttcttacagtttttattttataaatttaaaaactttaaattctgatctccatgactattcttaaaactttatattttattaatactgtgtactgtgggtaatcactttttttactttctattaaacttataatctgaactctcttcccatgtatattactttattggttttatctttt

SEQ ID NO: 270027 - DNA, 332 bp, Glycine max
ctggaactacttcacatggacttgatggggcctatgcaagttgaaagtcttggaggaaagaggtatgcctatgtgggtgtggatgatttctccagaattacctgggtctactttatcagagagaaatcagacacctttgcaactgtcgagcacttccacatctttggaagtccatgttacattttggcagatagagagccaaggagaaagatggatcctcagagtgatgcaggaatattcctgggatactctacaaacagcagagcatatagagtgttccattccagaaccagaacagtgatggaatccatccatgtgggtggtgatgatct

SEQ ID NO: 270028 - DNA, 411 bp, Glycine max
tggttacctctttcttcactatacatcaagaatcaccgggttgagtcttctctgtggttgtcttactggtttagcctcatcttctaaatttattcgatgcatacatgtggatgggctaataccaggaatatctgccagggtccagcctatagctttcttatgcttcttgagaacaaataacaacttctcctcttgctcatcagcaagggaggcagatataattactggaaaacttttgccatcatccaagtaagcatattttaaattagatggtagaagcttcaattctggtgtgggcggctggatagtggtagaaagagatggtttctcagcctacacctcataaagaaagtccaggtatttgtacttacttgaacatggttagtttgatctgactctataaaatcaatc

SEQ ID NO: 270029 - DNA, 931 bp, Glycine max
  unsure (1)..(931): unsure at all n locations
cggccacgcttcnttttgaaccccntttgttagtccgcttcgacaccgggaacctctagaggtgacctctagcatgcagacttttatctaaagcgcatgatggtggatgaagctcctgctccatagcctatctcctaaaggaggcgccacgctaccccttttacattgtctatcgctgcatctccatggtggaaaatcaaccactaaggatccctttgagcttgaagatccacgctccatagaaagtccgcgaacctgctttcatcgagaaatacgataaaataatggcacatcacacgcctgatgcattatttcaataagaagaaacatatattcagattaatgttcttgttgctgataatacttgaccatatgatgccgcccacctgagaacgtctgaatctgctaccccacttaagagacctcatgagttggtacaggaacctgagcatctgcatntttaccgtctcacacttactttacttgccaggaacaaagagtgtataacattttgtcctctaacttccccgcacagcggcagatattgtgtcagcgactttatactttagacttctgagagagcattctttgtattgactcgacaccagttgtgctgagcctaatcatggctattggacagctaaactccttatgagacttatgccctattgcaactgattaggaaggaaattcagcggaccacaatctttttcctctacaccctgtgagcagagaacctcggaaactttttgtcccaaccgtgtcaaatattgaaaattgcggtgccttggcaaaacccagttttcaatgggtgcttcccaaaaaaatttccccttttttcccggtgattttttcacttnacatntnttttatatataaaatttaaaaaccccccgcgggggggggcctcccccccgcgcaaaaaataaaa

SEQ ID NO: 270030 - DNA, 370 bp, Glycine max
ttagtcaaacaaaataatccaaaaatgtcaaagaattgggtgttgaaaaagcataacaagactttctgtgattggtttaaagatacaatctttgcaaatgagaatgctttataaacattaagaaagctagcagatgggcctaaaagaaatgttatatcttggaaaggatatgacataaacatgtattcattttacacaaaagcacaagatgacaaaagtacaatgcagaacagcggggtcatcctaagggctgaatctcaacacttcgcaagtgtgaatgacgccaatccctgtgtagcttccatcccttactttgggttcattgatgaaatttgggagcttaactatgggaaatttactatatggtttt

SEQ ID NO: 270031 - DNA, 535 bp, Glycine max
agcttgtattacttatattacaataaaaaatttgtattacttatatgtacaaatgaatgtgtatagtttttataaattatgtaaaataatttatatgaataattttaatacatataatcctttgtatataataatcttgaatatgattgtttttcgtaaataataattatttttctgtgaatgataattgtgatctttaccttaactaaaaaatatgtggttaaaaaatatgtttaatttttttgaaacacagcactcagtttttctccaaattaaaacagataatttaaactaaatgtaatttatatttagaattgacataacaaagaaataacatagtatttgaaatgaaaaaaaaaactgagaaataaaacgtcaataatagagtttaaaattatatcattccctagcaataaaactaacaactatactttcaaatgattttattaatatcatgttaaatattaaaaattttttaatactatgatattatttagaagtaggtcttataagatgatatatctcattgaatcta

SEQ ID NO: 270032 - DNA, 466 bp, Glycine max
ttatctggttaattaccccttgaatatatggtccaagtttttttatagtttaattgtgttcattaaaaacaaagggtacgggggtaattaacctacttctacgtagtggtgaatttaactgttatgatgagtaatgggtgattcatgaaaaactaacctaatgttatcataatcatatctatgtacatatatataagtgttaatgatcatcttaaatttatgtatggtgttttgcatataatagtagaatttaccttggtaggttccttcacgatttgaaattaattgcatgaccattttctctgagggctcttaattagctctcataacagcacggtccttcaaattgtaacaaatgtttctctgtattatcattttcttttccagcaacgagaaccgagtatattctacatgtttcatggtaacttgttttcattcacgcagactattttcgtattaatgtgct

SEQ ID NO: 270033 - DNA, 1005 bp, Glycine max
  unsure (1)..(1005): unsure at all n locations
atttctccatcctaataatttcagcataagtattgggtttcgttaatcccancnannnncagcccgcgcttgaaccacttgaacctcttgccaccgggancccgngaangncaagnngggccgcaagccttcaaaacataacgangaagattattctcccagcttggatgaataaaatcgcacggcaggaggaggggccaaacacctgttcctagaaaccaacgtagcctctccgacttgagcaatacacgttggatgcgctgtatcccaaacgcagaanagagatccgccctctcccctccctggggaaatatagtaaaggangggtgagcccggcgctgaaccaatcaaaaggaagttgtttctttacccacgaggaactcggcccaagaacttaatcctcagactaggcactggccacaattcgaaatgcggcgcctaaaacaactatggagcacaacccccttcctttgaccgccgcgaaactattatggtgatagaatggacgacgcccaggacaaagtaatactcaaaccaaaatgcccaaacaccccaataaacatccaccagaccccccagaaaacaactacccacctgagaagaccgatccttccccccgcccacgaatcatcgttcccatgagaacaagcaaataaaaccctccaggccagaccggggtccccacccccttgatccttccagacggaaaacaagggtccctccccaaatacccaacacactaaaggaacctctaaagagttaaagcttagtaaacaactcttaaatggagttctatcaataaaaataataattattaattaaaaataaacccccnagaaatagaaaaaacactaggccccccgcncgtgggtgacgttctgggcctgtcggccccacccccccctcccttntntctgttacgttgagcatacgcgaagccatccacacacgccccagcnnnnnnttntnttccgtntcctccgctcacccccccctgccacccca

SEQ ID NO: 270034 - DNA, 920 bp, Glycine max
  unsure (1)..(920): unsure at all n locations
cccgccgccgcggagtcgcggtactgccgacacctcaaccgattgcacggtgaaactaattccgtagtctctttatatatatcnnacannnnnccccgggttgatgcctgctatncgctaacnnagnnaacnaanaataccgcgcgtgtacctcgccataatctcttgaggagaacaatatttgcacaggagcatgcactgtaaccggagacttgctttataagggtatatccaaagggatagcgcctaaccatgcaatgaaaagaggctcttcaaataactaaaattgcatacgatgggactccccgccttttgtttgtagccacaggatgcctgaaccccacggaccaaaaccaaaccttaaaaggaacccaagggaattccaccggccgagcaagaataaaaggggcgtaagaaacaaaaataactgccccttggggaacgcaacccccgaaagaatgccccaaaaacacggggtcccgcgtccttacccgaaattttccccccctcgaacaggggttttcccccaagaaaccccgccaagcgttcccctagaaccccgtctggggcccctcgaaaaaacctctcgggggcccgggaaaaaaaaacttcccttggagtgaaaaaaaaatccagaaggtgggaacctcgggaccccaaaaggccgattcttgggccggtgggaaaaaaggggagggggtttccccccccccgcttgggggaggagccccccaaacaaaccttgacaggcggatccccggggaccctgaagggacccccgtcaacagggggtcaaggtgaatggccggaaaatccatgggggggggccccctttttggaacaaaaagcaacttcacaagggcgaaacaaacaaaggctgaaacctccatttcctggaggaataacaaaaaccctgtaag

SEQ ID NO: 270035 - DNA, 388 bp, Glycine max
agcttggagaggatgcttctatggaggaaaagaaagagggagagaaagagagaggggggagcaccataatgaaagaagaataagggagagaagctgaactttgagttgtgtctcacaagactctcattcatcaaagttgaaacaagtgttacacatgcttctatttatagactaagtagctttcttgagaagctttctttataaaacttgcttgagaagctagagcttatctacacacactctctcataactaagctcacctccttgagaagcttgcttaagaagattcctaaaaaagttagagcttagctacacacacctctctaatagctaagctcacctccttgagatgagaagctagagcttagctacacacccctataataac

SEQ ID NO: 270036 - DNA, 177 bp, Glycine max
tattgagtccacaagttcaagatcaaatttaatttccagtttcatgaaaagaaatccagaagattctgaatcatagaagtgtgattcccagattcttgataaaatgaattcagtttcacgagaagaaatcaggacgacttctcaacggaaggattgaaaagagttttcaaaaacaaa

SEQ ID NO: 270037 - DNA, 272 bp, Glycine max
  unsure (1)..(272): unsure at all n locations
acttatgaaaaatcaagaacaagcttgntcgcacatcgttcgcgtgtatgatatctactcgacaaggtttgaagtagagaagaccttcaatcctataacgcaacgtggcggacaaaagtgggcaattaacttgaatgaccattattgtcaatgcggaaggtattctgcgcttcactatccatgttcacatattattgcagctttgggttacgtgagcatgaactactaccaatatatagatgttgtttacaccaatgagcacatattaaaag

SEQ ID NO: 270038 - DNA, 463 bp, Glycine max
ttaaagccttttcatctttaggttcattctctttagactttaaattattgatttatggtgattgtactgtacaatgagacttgtatttcaatggtttatttaattgactattgactattgatgaatgatgaccggcttttcatttaaatattattgtaaaagatcgtgatccggtttattttatgttaataaattcaaaatgaatccaacgtaagacttcatgtatctagcctaactctttatatatcactaggcttgtaaagtctagtgggggtgagtattacaagacaatttaacaattgatgcaatgaaaaacattaaaaaatgaagataaaatactgtatcttgtagccatgattgggaaaacaagccataagcatagagtttaattgaaatctattgtcagttgaaacttagttatcagtggaaaaatgaaggaagggtgcagcaaagtatgcgtcac

SEQ ID NO: 270039 - DNA, 1223 bp, Glycine max
  unsure (1)..(1223): unsure at all n locations
agccgctctttgatcactttgccgcgatcttaagncacctgcagctgcagctntaaggagtggctcatagtgtcttctcacattatctcttagacgatgtaggatagctggagtggctgaaaaagaagtccaacgttctgtcaaagaataataacgggctgcacaatgctcatcgcatgatgacgagtcccatgaagaaccggacctgcttgattcactagagtcggatgtaatgcccaggactatccgcctgtaaataccggagttgctcttagcattgatgctgcgagagacacgacgtgggcttccatgtgcatgacatcctgcgcgaagatactggagccgctcctagcgtcgatgttgccggatccactatgtcagattcgatgtccaggacatgttgcccgagcatactgtacatataacatctgttatatctttgacagagtattgtgcagtttgcacagcatatatgatctatccttaggcacgaatctatagaacctttgngntccgattaccctactcttatagttccttgctgcgatcaagataaagattaaatctatactacgaacgttgttttttatcgctacctgcaaatctcggagaatgatgatcgcatcatctacgtagtgccgcccgaacctcctggtgctaatctgaagtgcccagtctcacacccgcgaatcatactgtttgtagttggactgactgtttgagcactgctgtcctacctatagagaccatgtgnactttcttggtgaactattctttcctaacagcggcagcattcttatgactcgcattnggcggcggagttcaatcatatctttttcttccgggctgctagatttgtatggaatgcccaactctagtataacttctttcctctatgtcattgttaaattgttaataaaaacaaaaaagggggggggggggtnnntnggagggtgnnnnaaaaatacattttttattaaatagatcgcatcactnctcacncacttcgcggcccggccggnnacagcgggcgcgctactatatanatggtccctatcgctcgctggcgcgncctgttcccttcntatcntcgtccgcggatcttcgatatcttcgtgttattctataagatatananccgccgttttcattttattnnttttcnatcctcctcctntnttacagttcgttgctgatctacaaactaaagtgccggtcggcct

SEQ ID NO: 270040 - DNA, 199 bp, Glycine max
aaagtgttaactgaaaagaacgagagttgccaatcgaagagtgtgagaaagcaactagaaaatgattcaatattcctcatcaaagagtggtacaaagtcatgaccgaattatatcgttgaatgacagcccctaatcgggggagctaatgaaaaacaaaaggaatatgcggagaggtctttggatcggacaatatctgaa

SEQ ID NO: 270041 - DNA, 1197 bp, Glycine max
  unsure (1)..(1197): unsure at all n locations
cgttagagttctatgttgtgccgtagctcttaggaaatcctagtacttcgtgaaaatgaatttaactcctgtcaaattgagacaagtttgactgctattttcaataatcaactgttatctgatgcaaacttataggatgctagttaaatactataccttgccaacaaggttggagaataacacttttttctagaatggacgagctaggatccacgtatgtccttagctttagtgaagaactccgtagctggaatagaacacgagtgattgtagcttgacacagcaatattgatggggcacccaacattctttgagaatggcgaaactgtccctgctaactttctccttacggatcagagtgattcgtataagacgtacagatcaaagtgatctgtaattattaagaatatcgtacggatcaacttgatccgtgagaagcatctcatgactttcactggtagtgctgtgtgcacctagccaccactcgttgaagagcatcgntgcggtgctnatttggaggactcnacacaantcatcatctctctttattgcttctgggcgccggttgtgtcncganttcttctcattcttcttaatgggtcggaggcacanttanatcgacacactactaattctcgatttcattcgttcctgagtttttgattcttaatatgattcgatatcacatataactgaaggaattaatagtctcaatgaacagattatgagcgtgtttcaattctttctccaccaccaatcacattgtcttgaacaatattctgtaggaactcntttagactaatcaaccatctcaaatattatgtgcggngcgtcggttaatacctaaagaaccactccttcagaatatctctgtctagtcttatatatcattacacagaatgatcactatgtcgtgctgtnnnnnngaagatatcatatcatatataatagatcccttctgcgctatcacatatattctgtgtgtctgtgtatgtannntctgctgtgtnntttatcgacgtccgcacgtctacgctgcgtctcttcncctttctnngttgtcctcntctncacattcatttaataatatatcatctaactgacttgttcctctagacaacnngngnnnntgtnngnnnnnnnnnnccngggggggcgcgccgcgccgcgccgcccnccgtctgtgngtcggaggga

SEQ ID NO: 270042 - DNA, 298 bp, Glycine max
tctaaaccgccttgctagcgtgcctttctatcacaggcccaaacccgcactattgcctaaacactacagctgtgttcctgcgcaaatcccatttgccccatcaccggatgaggatcctgtccgtgccttgttcaaactgactcacacgggttcagtgctaacatacctgattgagtcagaagacttggctaataaaattatcggctcgactacccccttcctgttgccttgcttcctatcgggtttgacatgtgagatgcaccgcacagtccatgtccaccagcctatgactgtggac

SEQ ID NO: 270043 - DNA, 346 bp, Glycine max
  unsure (1)..(346): unsure at all n locations
acgatgcttgattatgattaggctaaacatgcatgagacatcggggtttagtagtccaagagacaacatagaacacaggaacattgttaggtaaagaacattcttaataacatcagtccaccctgtaggaagaccaacaagttgtctatctgtttttacacaccactactcacctttacttgcttttgaatagtttagtttacatacttgtctataccacacaccaaacttttatcacaagacacctatttactgaaccacaactttaccaagtaaaacaagttccccgagacttcgatacttggtattcacttaccattntatactacttgagcaatccgatgca

SEQ ID NO: 270044 - DNA, 652 bp, Glycine max
tgttccgaaaagtttacggaaatacttcttccggaagaagaattattgaagggcaattttgccacttcactgtttgctgggtgccccagcaataatgctgggtgcacgtagcaactcccccgtgagcagtgttatcagactggtaatggtaaggcaattgttttgttcgtacgtctaattgttggaatactcaacacaagataggaaatttcagtatgtgtaatagacttatagaatcacaatcggtatgaaaggatattattaaaattgtccatcctgtactagatgtaccaacaatttaagtggtgcacaaagcaattgcctaatggtaatggtaatggttaaggatccaccctttaacccacataactttatctatattaaaaatatattaataattaataagttgcaaacttttatacaaaaatttctatatatatatataatataaatatttatatttataatatatacttatatataatttaaaagagtgtattcaattaagaatttaaaagatcttttttttataaaagaacttacagttttaatcaagaatttttagaaatttttttagatgacaatggaattctgtagtatttaaataagaatttttattacttaaaaaataattatctatattaaaaaccta

SEQ ID NO: 270045 - DNA, 384 bp, Glycine max
  unsure (1)..(384): unsure at all n locations
cacatgtggtactaggtggcggtctggcgatagtgcacaacaaantttcacatgcacaaagcgcgcataaacccatcataccctggtgcccacctccaactgagctcacgtactcccacatagcccatatactcgcttctctcaacaccgggtccccatcaatcctcccaagcttccccaacattagagggatacaacattcaaacagcacacactaccacagccaagaaaacagggcaaaggcagaaaactctgctcaaaacaccaaccaaaatcacatgctttctcacttaaagatcccagtaacaattacttcgatccaattcgttaaccggttgatcgactccaaaattgtactggaagtctatagtacataagcctaca

SEQ ID NO: 270046 - DNA, 510 bp, Glycine max
tcttatccaagctcatcttggtggtgaagctccctcttccatggcttattccctagtggatggcgcctcctctcacctattctcctttgtcttccgttgcatctgcatggtggaaaaccaccattaaaggacctcattgaagctcaaagatccagcctccatagaagccccacaagcaagcttccatcacatatggaactattaaaaaaatcattagtaaaaaaaacataaagttattgtgatagtaatttgttgaacaatgaaatagttatttgttagaaataaaaaccaaaattgtagttgtattttggtcattacattaaatttttattagaattagtgttgtcaactttatatatttcacaaaaaatctatatgcatttatcaatatatttaagtaataaaaaaagtttatgaataaataataagacattggttatgaattattaaattgggattgattgaagtattgcttgaacgctcacaaattattatgaatcctttaatgtg

SEQ ID NO: 270047 - DNA, 1033 bp, Glycine max
  unsure (1)..(1033): unsure at all n locations
agacgttcttatgttaacaaaagttttgcttttgccaatataaacccggtctcgtcggtgcacttagagaggtagacatgtgattgggttgcctttagttataaaaaaaaatctagtagttagcaccttgaatagaattattgaaaccaattaggtggggattaaaaaaaaaaaagaatgttgaattccaggcgaacgtggaattcagagaagagagaaacattacgcatctagaccacacaaggtggtcccaatatctggttcagccaataacagctcatccttccatatccttatcttttcattttttttctctctcatttctatttnttctctcaaccaaattaacttcatcctcntncgaataataaccaattatattatataataaattanaggaaggaganggaaaagaaaaagaaaatctaatagtatactagcatagtatttcctttcacaccacagtttgtgagtgagcctttcagtgtgaagtgctctgcagcggtcatcattcaaatgtcagtgttggntggagcatatatgtccaatgcattttcaggtcttcttggcgaatagatgagcctggctataactctctttttttaattgaggttgattcattaaatggtggttattggacttcattatttcagctgttgtgttataaatctattagtggggggagatatatttttaagactggaattttttttcaataatttttcttttcagacacattgagttgacagggtgtcggtgatttatagcatggtttctggcaggatggttcctgttggaagttttcttcttatattgggtgcacaanntaaattttatttttttatttttttataaaaattntagatannnnnnnnnnnnnnnnnnnnnnnnaannggggggggccggcccccgcccgcgggggtttnnnnncncnnttcncccccctatctgctactgctctatctattatattgcnntnnncnntnnnnnntngttngntgcgtnnnanttttccgccgctccgcccccccg

SEQ ID NO: 270048 - DNA, 493 bp, Glycine max
tataactgcatggtgtgccacaataactgataagatgcaaaataaatttagaaaaaaatcattattccctagatacctattaattgcaagagagaaatgatctaaaaatagtattatctaatgtaagctgaatggctgatccttcaagaaatgtatataatcatttcctataattattagaaattatttcttatttattactgttactattgtttgaattaaattaaaaagaaaataatatacagataggacaaggaatctttcctaaaagacaaaaacagacaagaaagctttcttttttctttacttaaaattatagcattcctctcttagtaaattcaccaaactcctgcaattcagatgttaaaacacagaatcctacttcataagccttatctgggctcagatttaatgagtcaaaatcctaatataattagcaatttactcaatcttggagaatgttgctatcaaacaaattcacaattagtttaag

SEQ ID NO: 270049 - DNA, 337 bp, Glycine max
gcttgtcatgttttctggtgatgcagactttgctgatggagctcataatcttctcaataaagaaagtgaaatacgccgtggtggatttggagttgtttatcgaacttttcttcgtgatgggcatgcggttgcaatcaagaagctcacagtcttcagtttgatccaatcccaagaagactttgatagagaaattaaaaaacttgggaatgtcaagcacccgaatctcgtggcacttggagggtattattggacttcatccttgcagctccttatttatgagtacctatccagtgggagtttgcataaagttctacatgatgatagcagcaaaaatgtc

SEQ ID NO: 270050 - DNA, 629 bp, Glycine max
  unsure (1)..(629): unsure at all n locations
tgaggattgtgtaccttccagattggatggttatcggtttcaatgacttagtctctacgcatttcgtccttgggggttgtgtaccctttgggttggatcattcccaatccatagcttaacccttccgattcgtgccttgagtccaaccttgcctcatcatatctatgtctaatctaattatctctaaaagcctaaacgcaccataaaatcgtcatagacacaattaatcacacctcgagaatcttgagatatgggagaatattttgaaatgtcataatgcattgactcatgaatataagagaggatacacatagtaaatgatgataaatagtcatctctttgacctaagaagacaagttgagcaatacaatttgcttgagtactctggattangttgtgtccatctacgagaaaacctttttctaaaataaatataaatatttgtgttcaatttgtctcttcctttacttctttattattatatttattcctaaatataaagttcttttaactaattcatatcatttaaaagaaatttaataatttaagtagtactattaatttgttagaaattggattatcttttaaaatacccttataatttttctaatcctattataagaaataaa

SEQ ID NO: 270051 - DNA, 1035 bp, Glycine max
  unsure (1)..(1035): unsure at all n locations
tcttctcttattttccccggaactcgcgttcttacttctgcgcgagtctccaaagcttttctcaaagtctaacgcatagtggaggttgcctagcccttgaaagctaggtatcaaatacgcttgtggcaaacaaaatatttaggtggtatggggctcaaaaacctctacagattcaacttctcgttattgggaaagcaagggtggcatttcatggctcacccgaaagttatggtggctcacattttcaaagctagatattaccttagaggggcatttttggacacggatattggtcctaacccgtcttactcttggcttaacatttgcaattcccgaatagtgttgagggagggtcttaagtggaagataggcgataaatcccttatcaatgagtggaggaaacgtcgaataaaagaactactggtgacatgtctctacccacttgttgctggatcgaagaactgctagtaagattgctgagcctgatatacgagaagatatctctgtttaaatatattttgatctacgtgacaagacttaacctcttatatgctcaaagataaggagggacatgatgatgattttcgttgaagcccaatatattgtcgtttctgtgaatagtctcccctgaagaacctataaaatcccgctccagtaatgtagcagatatggctccccttcaccaacagaagagatggctccttcttttaggtgaagatcaatatttttttaaattgggaagcacaaaaattttttctgtccccaaattctataaatggactacttgttgatccatataacacaaacactttttttattacgataataaaaaaagtggggaagggatataacatatatataatcacacacncactatnnnatttttcggtntttcctnntatatattggttgtgggcgtccggggttatatatatatattaattaacaccaaaggaagaaaaataaataacagaaaaaacaaancnnnantnntnntnaatnntnantatattatctcaccgcgggcgggttttt

SEQ ID NO: 270052 - DNA, 352 bp, Glycine max
tccttgagaagattcctaaagaaactagagcttagctacactcaccttctataatagctaagctcacccccatgccagaatacatgaaaatataaaagaaagtccctattacaaagactactcaaaatgccctgaaatacaagggtaaaaccctatactactagaatggccaaaatacaaggcccaaaagaaggaaaaaccaattctaacatttacaaagaagaatggatccaaccttgacccacgggctcaaaaatctatcctaaggttcatgagaaccctaaggccttctttagtagctctagcccaagcctcttggagtcttctatccaatacccttgggggcgggggg

SEQ ID NO: 270053 - DNA, 308 bp, Glycine max
aaaaaatgctcccatatacaatcaacgcagcttcgctacctagattatttacacgtacttccaaggtgtatttgttacttacatcacacacatctacctggctaaattcacatacatgcataccccaagcattttggggtaccaaaaattgcacatgtgcacatcttggtatgtctaatacctatacatacacaaacttcatgatgaatcttgactatctacacaataaggcgctacatttcatgctcttctcaatttttgctacctaaagccgcatgcaaattcaagtatattttcctttgctgact

SEQ ID NO: 270054 - DNA, 259 bp, Glycine max
aactaccttcgctactgagtatgagagtcaccggtttaagagtgctgcgcaccaacagcgcttcgaggccatcaagggatggtcggaaatacgggagcgacgcgtacagctcaaggacgaccagtgtactgatttccacgacgaaatatggcacccgccgtgggcatcactggttactaccatggccgagcttgatccataaataggacttgagtgttatgccaatgcttggccaacaaatgagggcgtgcgtgacatg

SEQ ID NO: 270055 - DNA, 252 bp, Glycine max
agcttgtgcattcaatatcctgatgaaggtgttccatatgttctcaagactggactaatacatttgctgcccaagtttcatggtcttgcaagcgaagatcctcataagcatcttaaggagttgcatattgttttttccaccgtgaagccccctgatgtccatgaagatcatatctttctaaaggcttttcctcattctctggagggagtggcaaaagaatggttgcactaccttgctcccaagtccattttc

SEQ ID NO: 270056 - DNA, 453 bp, Glycine max
tgtatactgaattgagtatggcgcacacattgcatgtctgatatgccttttaaaggcttgaatagtgcgagaaaatgagctgcattttctggaaaacgcaatgaactcgctaagcgagcatgctgtgctaagagagttcatcaatactcattgtatgtaagcgtttctctaaagaactcgctaagcgcgcttaccgtgctaagcgagttcatcttttgaggatgaacactcatcctcttgctgaactacctgtggctaagcgacgctgaattgctaagcccaggtaacttaaccaaattttttttgtaatagacatgcgctaagccgagcattcctgagccaagcgcaattggttgcggcatccgctgagctaagcgagcttcactcgctaagctcccataacatagtgaaatttttgctcagtttaatgccgctaagcgcagcttattcttg

SEQ ID NO: 270057 - DNA, 1068 bp, Glycine max
  unsure (1)..(1068): unsure at all n locations
ggacgcgcnattgaaccccttttggaaccttgatatccatctcgnacncgcngaanctctatagtcgacctgcaagcgtgcaaggcttgggtgatggtgcgcacactgatgggttccactgaagaggttgctggggatagacccacgcaggtgttgaagagacggcatgggcctcttctttctttctttttgcccctggtgccccgattcttttggcgttcacgtttgtggaggaaacgtaatcaaactttactctcttcaatccaaccttgattctttccccggcaaacaccacatccgcaaagctggacggcatgtgacccactagcttctcatagtagaacactggcagagtgtctaccatcatggtgagcatctctctctaaccatgggaggagctatcttgtgccgccaatcccttcatcgctgcgcatattctttaaaggttgcangctctttctgaacatattctgcaggtgagtacggtccggagcctatcataattgaccgatactgcctatgaaagccggatcagatcttcaagaccgatccggagcttcaattaatgacacactacggctccgccactttctgaagaatgatcacagctttatctttgatggccctctacagagacattgagtgtttggagagcgccttttctgcaaaccgccttacttggagaaacatgtcttacaacccgtgtggacgaaacccactccacctatttttaggaaacttctttttggggggctctggaaattaactaatgtgggaaatgtgttatagggggnccccccccccttctttttttgtttggggtttgaggaaaagcttttaaggtatggttatctactcctgccccccccccccctcgcgccccncccnnnnnttatngatatatanngaaaaaaataattaaaatattatttattttatatattttaataaaaatattaanntatttatttttataattatatttnnnttnnnncntcnaataaatatccccccgagggcccgccgcgcnnnncgttcntnnncccgnctactctcctcctcgccccg

SEQ ID NO: 270058 - DNA, 253 bp, Glycine max
tgacattcccgcacttagccgacgtttcaaaatcaaatcaggttttttttaacatagacttggattagcatgaagacaagtccacttaacgaggtctgcaaatcaaaaaagctgcaactctccctgggatctgggctggcttaactaaaatgatgcctcttaagtacagaggagcatgcgcttagctgataaggactcacttaccactcacattgccgcaaggaattcagcttagctgccatgattggcgctt

SEQ ID NO: 270059 - DNA, 256 bp, Glycine max
  unsure (1)..(256): unsure at all n locations
aaactcagcggcaccaagctccggatgagctctagctatcacccacaatcgggtgggcaaactgaggtcatgaatagaattgtcgaacaatatctttgcgcattcgtacaccaccaaccttctacctgaggtcgctttttgacttgggccgaatggtcatacaatacttcngttcattcggccaccggcatgttcccctatgaaattacatttgggaagaaaccacccttgttctctgcgatacattgaaagaaca

SEQ ID NO: 270060 - DNA, 390 bp, Glycine max
  unsure (1)..(390): unsure at all n locations
tangctctattccatcaccatcacgattaagcaccttcaacaaggatctaaaaatggttcttgtgactctgcctagtaagaatgtttacctttcatattggtgtctccatgtttacatcagagactaaaatttctgtcaaaatatttgtaccatttacacgaacatatttatgttacgtttactcacacatgtgacatgtctatacttatttagctttggtagtaggacgatatgtttggtcaattgttgtgaaataccctaacaagtagtaatatgatactgcctggctcctttcaaagagtaacattttggctatttgattaatgattaattaagaattgcatgcattccatacacttttgttggtttgcttangatgagaaaaaatt

SEQ ID NO: 270061 - DNA, 233 bp, Glycine max
tcataatgcatgcaattaatgcctaacaagacccctggaagatcatcttttcaatctttctttacctcccctaccctggaacacaagattagagatcatgctcacatgcctttctatacatgctaatttgcaattcttcattcataaccaccttgtggcatgttcaaaacaaatcaggtccactgaacggagtctaaatctcgatcataacaatatatacatagttcatgcgt

SEQ ID NO: 270062 - DNA, 548 bp, Glycine max
  unsure (1)..(548): unsure at all n locations
tgacagcacgataagctagaaagagcttattttgttgagcttatctctgaaactggtataattaaaatagagcttatttgaaggctaaaaatgattttcatgagcccaaaaaagataatgtaattttttatggccaaataatatatgttcataaaacaaaaatttaaggattgatgatcctgcttgtggtgtgcaagtttttgtgcaagctatgtgaagctactgcctgcaatgaagacatatgaatatggctttcgtgtgtttttgttgacattttgtattgtattggtatctgggagaactagcaaggaatttttctccacagccttttacagattaattcttattgcaattggtgctagcatatgcttgtttgtaaatattttcatataccccatctggtctggggaggatctgcataaattggtggtgaaaaatttcaatggagttgctgcatctttagaagggttgcttgaatttccccatatgttctgaatcccttgcaagatttgttggtgctttttatgcctggntgctgtacttaattt

SEQ ID NO: 270063 - DNA, 239 bp, Glycine max
gatcggtcatgtttcctggccgatgtcgacttgtcattttttcgatcaatatcggtgaataatatttttttgccgagatgggctaatgttttgctggccgaacaaatgggaacatgcaagtttcggcccaaacaaaaggtcagttgagctcgcacaaaaaaacctaaccaacttaaattgtaaattttttatgcaacaccaaaaaaagaaaacttcctctgccgtaaaaaaaacattat

SEQ ID NO: 270064 - DNA, 608 bp, Glycine max
ttgatttcctttgttccggaaacctttcttttctcatgtgcacccaaaccctatcttcgggttcgaagacaaccttctttctccctttgttggcttgtttagcataacttttatttttcctctcaatttgatctttgactctctcatgaagcttcttcacatagtccgcctttgcttgaccttcttaatgcttaaaaacagaaacattaggcataggcaaaagatcaagaggagttagtgggttaaaaccataaacaacttcaaaaggagaacaattagtggtgctatgaacagctctattgtaagaaaattcaacatggggtaaacaagcttcccaagtttttaagttcttccttcaaactgtcctaagcaaagttcccaaagtcctattaacaactttcgtttgcccatcggcttgtgggtgacaagtggttgaaaataacaatttagtggccaacttgctccacaaagtcctccaaaaatggcttatgaacttagagtccctatcactaacaatgctccttggcaaaccatggagtctcacaatcttcttgaaaaacaaatcagccacatgggaagcatcatcaatttttttacatggaataaaa

SEQ ID NO: 270065 - DNA, 1180 bp, Glycine max
  unsure (1)..(1180): unsure at all n locations
ccccgaatttttcaatccgagccaggagttcccttccaactcaagtgaaaggaccacccacagcagaaagaacattggcccaacacacagatncagccactccccggccagtcaataatacagcttctggcacgagctataataatgcacggcgcccacccccgaaagatgatttctcttctattcccatggcgtactccgagttgtggccttcattattggagaatcatttaatggtggccatacccgggaaggtcttccagccaccataaccccaagtggtacaacccggatgccaagtgtgtgtaccatagtggagcttccagacacaacattgtactctgcatnccgtntatgtataaggtgcaacacttaattaatgtcggctggctatcattccaagagaacggccccaatgttaaaaccaacccactagccagtcatggagaggctagcataaattccatcanagaggatgggccatcgcaggcaaagaggtagaaaaggtggctcttctatacgcttcatcttgccatcgctgcangccgcgtgcattgtcttccgttgcggagacgaaagggacgaatgtttgnntcactngtgagtactcgatattgaaacccgcccactgaggagtattgctcaccgctcatgactggggcagttctatgttcaagaggaggagaaccacattcttgcgcgagaaagagtcccaacccaagctatatatgtactagaagggacgtcatgcataccccgagtgcaacgcgcgttgtataatataagcgtgctgaatatcctccattgaaaagtaccaatgacctgtccagacaacaccgcttggtacccaggtgtgttcctctctgtgctcggagaccgtaaccttaatccccaaatgtcatgaggtaaaagtagaacgtgagnnannnnacagagtatagaaaaataacgaatttgactatctccctctgtgggcgggnantgtggtntnnnntttangngngggccanccgtcctcatattctctctcttctcgcttgttacttcncgaactcacattcttantattctcanntatatttcttctatcatatatattatatccgcgggcggcggctgcggtggggggtgacncccccccaccccccctccccccccgtttcattctctcaccaccccg

SEQ ID NO: 270066 - DNA, 493 bp, Glycine max
ttacgcgccatgcatgactactatccatttcgtacgtagtcttccaggtaaatgggtatcttcttcttcctcttgggcctaacttcactctcctcctgttgttcctttgctaattgcagacccctcgagttattcgtaacactctcgtgcccatcaaacaacaccttgtcctcaaggtggtgaagctccttaaagtctgaccactcttcccacgatgtttcttcaagtggcaggcctttccactgcaccaacaccataagttttggtcttgactaagagggaattagtttggacgctactatggctaaaggagtgacgacagggtgattgtccaaagccataggtggaagatcaacagtgcctctcggacatgcaatggccacatagggtttaaagagagaagaatgaaaaacggaatgaatgcgtgaatggtctggtaattgtagctggtaagctactttacccatgcgtgctgtaatttggaagggctcat

SEQ ID NO: 270067 - DNA, 380 bp, Glycine max
  unsure (1)..(380): unsure at all n locations
gcttggaagtggtaagcaacgcttatgtcaagtcttctccggtgcaaccgctctcatctggcaccgcattgatggtagcccatgtgatgttaaagcatgggtgcaagccctcatgcagtttgggttggaacaacgatggcatggtgagcttggtagagttcaaagcaaaacgcggaaggttcgggctaggatataagcctacacgcgccgacgtaaggagaagtgccctataaaggagaggtataagcatgggccagccacaaggaccgcccattctcattcgtttgcatgtttatttttgttgtgatcaaacggtatagatccaacaatgagtcctataaaggtactaataccgaagacccagacatcgattntgagca

SEQ ID NO: 270068 - DNA, 534 bp, Glycine max
  unsure (1)..(534): unsure at all n locations
ntggaggataaaggttccagctaggtttccggtgtttgcgtggagattattaaaagataggctgccgacaagaaaaaacttgcagagaagacagattcaactcacagattcactttgtcctctctgcaaaacccaacaagaggatgcatcccatcttttctttcactgcaacaaagttcaacccatatggtgggaaaccaagtcatggctgcaagttaagggtgtttttccattaagcccacagcagcacttccttcatcatttgggtgttcaacctgctggtgtaagaaagaatagatggcattgttggtggctagctttaacctggtccatttggaaacttaggaatagtatagtcttctctaatgtgaattttgatgctaataatctatttgaagaagccatattccttctatggtcttggcttaagggttttgagaaggatttcacagtgcatttcaatcactggtcaagtaatctaccacaaagttttatgtatcagcacgggattgcatagttatgaaaattatacat

SEQ ID NO: 270069 - DNA, 247 bp, Glycine max
  unsure (1)..(247): unsure at all n locations
gatttaaccttagtttcactttggttgtcaatcaatcaattaatgatcggttagattttattttaacaatgatcaaacgagattaccacacaaatgatcagntgaaattcattgtatcaattattaggcgagataaccacttagattaacgattaaaagctcgttaaaagcggaagaaaagaaaacccgaagtgaaagaaatgaagatgacaacccacaaaacaagaaatgaattgaaagtctcgga

SEQ ID NO: 270070 - DNA, 629 bp, Glycine max
ttgaagaaatgaagggcgaacttacgtgctatcatttgaattcttcttgtaaagctttatgtaaattctttgtaaagttcaaaagctttcaaaataccttgtacatcttagagaaaaaactaagagcttagattgtatatccgcctatgagacgtttaagaagtagtcaatgagccaaccaaacaacaaatcttttgattattttagagctagtagtgacttagtaggacaaaagatattgagttggttaagtttggtttgtaagagccaaaagtgatagtgaaaaatacttgtaattagtgaaatttggtggtttatcaagaactggacgtagtctcagtggtaaagacgaaccgatataaaacttcatgtgtctgatatatatctctttgtgcttatctagacttgggtttaaatttgattttgtgctttgaaaatatggttttgcaaaatttgtttcaattggttgattgtgtttgtttgtgaaaatatgttatctatctttcaaaggtttagaaaatttcttaagattacaaattcacaccccttcttgtaatatttggctttacataaaaaatgatatatttaagataaattaatagaaaaatgggctgatctttttccataga

SEQ ID NO: 270071 - DNA, 1091 bp, Glycine max
  unsure (1)..(1091): unsure at all n locations
gccgcgcgtgaactatgagacgtcggaacgcgacnaagagacgctgctgcacttacacttttgcttaataaaattttcttttttatgcccgaggggacgtcgtttctatgactttcagccttactttaccgttatccaccctcttaaaaatttttttggatcccggaacttggggaggcattaaatgtgtgaagcaaaaaaaaacttttgagtgtaacaacacggtggttctgaacacgattataaacacatcccccatcgtcttaagaacacactaaatctacgtctcttctcatcacttgtcttcttacttatggttgcttaaagacaaagaacgtttacacctatatatttcttgggtggattcaatccaacttagagatgattttctgtgctggccctagtccttcgggtctatgaaaatatgatgcttacttacttctacctcttcattgtttgagacctacaggtcttgttataatctaagacaagtgtcttgcctgtgctttaacaatatgttgtgagcactaccaccggtagtgggtttctgtttttaaccaagtcaaaagataatttttcatgtgtgtgtgggggagaagaataaacaagggagtcgaaaataactagagactcctgcagctggaggcaatctctggcgctttctattcggttaacgcattcggaaggactctatcatcatttgtttagncgacgtgagtgcctcgtcgtctcctcttcgatcccaatcaataaactcttcctactctcgcgatgatatacatgcttctattatcttcctcttccaacacccctccgaaattatcgatatcancnncnctctctctctaccaattactagaagcccgacccgcgtctttcatctcgcttggttaattctgcacgcgttagttgctctanatgtctcttatgacgtctgattctttgtcgtccctgttctantctctcttctctctctcacactttataaatttctctatttagttctgtcccgcgcgccccttntnnntnntnttncctctgttangattttgaaatattattgtgnaaagccgcgaggaggtgcggggggt

SEQ ID NO: 270072 - DNA, 511 bp, Glycine max
tatgaaactcaagctttaggttactgctgacattgtagctcctgtctccgaatttgggctttttgaaggtaagaacagcgctcatatctcccgcctctttctcaattcccaaattctcttctgatgcaagtgtatgatgaaccaactctgtctttgtgcccccatcattactgtcactacttttacaagggtaatcatgatcatcatcaatctcgcccttattttcatttctacacaattccccatattcttccgcctcttttgtaacagtaataactgagcgtaaccatctggaattgttcccacctgcatatttctcctcggtcacttcataactattttcaatactgcacggagaacaacttctcgccctggatctactactcttcttacttccactgattcctctcaactttctttggctttctcttttcttttcgatcttcacctgggggtctatattgacagtcatcactggtagcactcccatcccgacatgctgaacaggtac

SEQ ID NO: 270073 - DNA, 216 bp, Glycine max
ctgattcaacggcttacaaagcaccggaggctcgcagctctaaccacaagtgcactgctaagtctgatgtgtatgcttttggggttcttctgatagagcttttgacaggcaaacacccttcccaacacccttttcttgcgccagcggatttgcaagattgggttatagcgatgagggacgatgactgcagcgaagacaaccggctggagatgctca

SEQ ID NO: 270074 - DNA, 454 bp, Glycine max
cttctatataagctgaaccattttatcaataaacacaagttgagttttatttagaaaattagagtttatctcttttatcttagtgagagggattctcctaaattcttgagtgattcaagaacaccctggttgtatcaaaggactttcacaacctttgtgtgttgccctcgccgaaaagagtgattctttccttcctttcatcttcaaccttgctctttaaaaccacaattccagaaaatccatttctgcccaaaattatctcgtggccataactcccgttttatgcattcaaattaagtgattcttgagcctaaattgaatttcaaaatgagacctttcacctcgttttggaatcacctcatttggagccctgtagcttgagttattgtcatttctatatttctgtccagccaccacttaacctacgttttatcatctcattcttccatttttt

SEQ ID NO: 270075 - DNA, 350 bp, Glycine max
aacgaaggagacttagtatggatttaagaaaacaaagctagtaacagtgctctgggtcaaacacccacattactacatgaaagagctaagagtatttcgggttttacaaaggaacgtaatttggaaattccgaccacgccaatgtgaccggcgttcagtgtaggttacaaaaataacatgtatttcatgaaaggataacgtttacaaagtctctttctctaatgtttttcaaaggaagcataagacatgcaatggcggttgcaaagttagaaaagatgcacagagaagatggaactaacaagaaacaagcatataaccatggttacctcgaaagaaaacaaaagatcaga

SEQ ID NO: 270076 - DNA, 484 bp, Glycine max
tgaagggctaacctatttagcaacaatattatttaatgaaaattttattagcaatatgatatataataattattttaatgaaattgcaaaattactttatgtggtctaacgatttgaatcattttaatgtttgaaattggttaatttcaataagcatagatggataacaagaatatggactcttttcttttgggtaagggtgttcgctggccggttttaaccaaattcaagactcaacctaatcaaatttgattagtttgctttgatttggtttttacattttttaaacccaacccaattcattcatgaacgatttggttcagttcgtgccaacaggttatccatttaaattagatctttttttcttataactactattttatatcaagattcatccaaatatccaatacaattaatatcatcaacataatattctaaaatacactaatgccacttttaaaaaatattcttcaacgatatttac

SEQ ID NO: 270077 - DNA, 309 bp, Glycine max
tctcttgaacatcttgaactcattcttttgattgacctttgagctttttgtcatcacctttgttatcatcaaaacatctttgaatcaatcttgtttcatcatgaaggtttgcttctacagcgatatctcaagggggtatagttgtagacccctctaagatagaagatgctctcgagtgggagagttcaaagtctgcttttgagattaggagttttctacgcttagtaggatattatcgaagaatcatagaaggtttctccaagttagctctacctctgaccaaactgacttgaaggggtcaagttttgt

SEQ ID NO: 270078 - DNA, 457 bp, Glycine max
tgtctcagcgtttatgcgagacggagaccaacatgctagctatcatcaccaagtaccaagaagagttaagtctagccgcggcccacgagcataagattgcggacgaatatgcccaagtatacgcggaaaaagaagctagaggaagggtgatcgactctttacaccaagaggcaaccatgtggatggatcggtttgcatcccgaagagattcacgggcttctcggctattgtcagcatatgatagacttaatggcccacataattagaaatcgttaggaaacttgtatggtctctcagaccttgactagatatgacttcctttttgaaataaaatgagttggtcccatgtttctatctccaaaaacttgtgcaaatcaaatcactcctacgtttcatctctagcatgcattttctttctttacccactcctcacgtttggttttttggggaaaaacac

SEQ ID NO: 270079 - DNA, 401 bp, Glycine max
  unsure (1)..(401): unsure at all n locations
tagcttgcacagagaagcactaaacaacttttgcccagttgccaaggcaagaacaatagtcttttccattaaatcctagcaatagataatggtatcaattttatagcagccatactagtaagtgggaattttattacagctacaacaagagggtcaatcttacctgcagaagggcaacttaatattttccttcgtgctcatttgatagctcattgaccaaatttcgacaggtttattaatatttccagcacatatgtaacacatagttgtagctaatgtattactagcccccatgagttctgaagcaagtgtgtcacaaagcatagtccattcatctctctcagcanactggtaacatgtgataacatgaataatatgtaatatataataagtcaatcatg

SEQ ID NO: 270080 - DNA, 470 bp, Glycine max
tacttgtggggcttctatggaggctggatcttgagcttcaatgaggtcctttaatggggattttccaccatggagatacagcggaagacaaatgaaaacacgccagaggaagcgccattcactaaggaataagccatggaaaaaagaacttcaccaccaagatgagccttggataagaagcttggagaagatgcttcaatggaggaaaagaaagagggagacaaagagagaggggggagcacgaaattgaatgaagataaagggagagaagttgaactttgagttgtgtctttcaagactctcattcatcaaagttacaacaagtgttacacatgcttctatttatagactaggtagctttcttgagaaactcttttgagaaaacttgcttgagaagcttttttgagaaaacttccttgagaagctaagcttagctacacacactcctctcataactaatctcaccttct

SEQ ID NO: 270081 - DNA, 1102 bp, Glycine max
  unsure (1)..(1102): unsure at all n locations
cgcctttcgccccttggancttgtatcactcgacccggatcttaagtcgactgagctgcaagcttatagttgtggctctcctacacacattaacttatggatgatgggaacgtgcatttattaataaatcatgctttgatgtatgtttatcctttctccctcgagaataaatattatattcttcataggagttgccgataagtgtgaaagagaaaagaaattaaccataaatttacatactacatcaacaggtgtctcatagcaagttgaagaatacttgtgtatagacaaatggatgtgaccattgacacatgatgtgaagtcgaaaaataacangaaaagtagggtgctttatcatatcaacatgacatgctggtgcatgcattaaatgttgtattgcttcaagtcatcttgcccacctacaatgagagaagactcacaattacaccgtctttatttacgctacctactccaatatatccttgagatttgagttcaccgttacaaaattgtcgagcaagagtttctgcctcaatcttntggaatttttagtagaacacacttaacaattgttgcttggaggtcacgtgacctcacatgtattcctctaatatatgtaggacctgactaacaactttgatttatatttaagctcgctcgactgattctgaagaatgtaacatttttggcaatgattaaaaactgcctgtaatttgactgtgttcacaaaactagttgtgtcccgttgcaccagaggactcaagcagctaatgcctcaaattacatggtcgccgatacaacggaattatataaaattctataaccccctaattttctgaacgtaaacgaactgatgatcgttctgtgaagangnnncngcctacnttnttttctactactttaaataataaacaaaaaaatatcgtacacccgcactcctccgctcgtgctgtgtgcgttgaagtttattcttcttaactactttaattttatnnnnanttttnnatatttttatatatcatcttactcactcctccctgcgcccgcatagaantatatattatntaatgctcacccccgccgcgcgccggtgcgggtttcg

SEQ ID NO: 270082 - DNA, 324 bp, Glycine max
ctcagctttgttagcgcgggtctgggagacaaaggtcaagcggtttctatatgggaaaatgatgttccgagtactttggatttggtaccaccatgccctcatgattttcagttgggaaattggcgagtggatgaaccccccggcattttcgcaacaagcataatgtggacctttacggttattaaagctctattgttgggcctagggcttatagattttcctttggctaaagctttgagtccattgtttgtgaatttattgtacaatgatctttcttcatctgttgctgggctctacccatgctcattcatttgcatgtttact

SEQ ID NO: 270083 - DNA, 334 bp, Glycine max
  unsure (1)..(334): unsure at all n locations
tctcctatcttctctttaatgcactacactcctccataaagnggccacgggtacaatggcaccgacaatgctttgagtggtttgccttgggcggtgtgttaactctcttaagcatggtcaaaatgttgacagcttaggcctaatccatgatatgagatctactagcgataaaaaaagtgtactgggtaaagcacgactctcgtggtggccaatccctcctccgatcattgtgagccttactagagatgggcttgtcattatctgtcttggtcaacactgtatcagccaactcctccatctgcatatacttggccacccttgttcgtagctcatc

SEQ ID NO: 270084 - DNA, 340 bp, Glycine max
ttgagccaaaattctgactcaccataaaccctgacccaggtgagaatgtcaatccttaccctcggaagcgaaaagggaagaaggaagatttcccatccaagagaaagccaaaaaaaagaaagagccgaaggaaaattcccccatcaaagaatgggagaaagccaaaagaaaagaaagaaaatttccaatcaaagaatgggagaaagtaaaaaaggaagaagaagaaggaaagaaagctcctgatcaaggattgaaggaaaacaaaaaaaatgtgcagagaagtctttggaccggacaatatctgaacaatacagaattgttgccaaatgaacaaaaaaag

SEQ ID NO: 270085 - DNA, 339 bp, Glycine max
  unsure (1)..(339): unsure at all n locations
gcttagtcttcatattggtgcccctatctctaatactctaacccatataaaatgaggagcaatatattttaggttttggtttccatccctaattgtgtgacttacaattcatttntttttatgaaaaagagtcatgcattcccatcaaaataagtgatatgttcccaactaggttgatcccataactcttaaaaataatctattgcatgctctatattattgaaaaagaagaaattaaattgattgaatctaaaagttatatatatatatatatatatgttgagantatttatttcatcacatcggaatcatgattgaatttaaattacatcatgaatt

SEQ ID NO: 270086 - DNA, 526 bp, Glycine max
  unsure (1)..(526): unsure at all n locations
tctagccaaatggacttaccttaaattaattcctttgatagcccttttgaaccttgtttccctttccttgttttgaagctcactacaagccttaagtgaaaaaccatgatatcaccatatccttaaagaattttggagctttggaattgttttgggaataagtgtggggggtttttgtttcattggacaacttgttttcttggctatgcttcatgatgtattttgggccatacttgatgtacattgtatattggttaaatgtttgacatgctgaatgaaatgttgtttctcaaaggctatagagtcaaaaaaaaaaaattcgaaaaaaagaaaaagaaaagcaataaagttgagtgaataagatcttaaatggcacaagaatgatgaaactcttggttctactcttcatgtttaaattttatctttacttctttntattttcttatttttttcttaatatgcacttattcccctttgctcctctattcctttgggaattagccacttattccatatttctccatac

SEQ ID NO: 270087 - DNA, 347 bp, Glycine max
  unsure (1)..(347): unsure at all n locations
caatcaacttgcttcaccagcagctcctattgaaacaccaaacttagtttttaaggctacacaaagagtctaacatgctatgacaaattaaatttcacttttcttctagttcgtatttctcagaatattacacatacaacagagccgataccaaccaattgaactatgttttccaatattaacttgagcagcaaccaactctcttcaaagcagacacatcatttttcagaatcaatttctcttctttggcaagcacagatgcagttccattntcagccccctctactgctttcttgctaacaatgcggtagatttgaatcagaacttcagcacatgcattctctaca

SEQ ID NO: 270088 - DNA, 639 bp, Glycine max
tgggagaggatgctgaagatgaagcagtggagaggttcttgagccatggaatgagggagttgccatcaagattgggaatttgggtgtagtaaggggatgatgagccaaggcttggattgtaggaagcacatggacttggatggtaagatgagcaagggcttgctgctgctgatgatccaccaactatctccatgccctctgaaggcttgcatccctaattgtacacaaaatatattttcattaactgatcataatatgtggcatgtaataggatttccatcaccaaaatcttttcaaatataacaaataaatcattagtaagacactctaataaactccttcatgttggttccagtaaatatgtggattttttggtagattttattcccaaatcagtggaaactcagattaacttcaaccaataaaaaaaaatgtgttgaaaagaagtaaatgcacgagttatttaactcagcatgttctcagtatattgttgctatcaaatctaaccaacatggcataactattatttattgaataactcaacttcattcaaactaattaactataatttatcgaatagaacaattgtctctcttctatttatgttgggtactcgctacaatgtaatctctttttttt

SEQ ID NO: 270089 - DNA, 1271 bp, Glycine max
  unsure (1)..(1271): unsure at all n locations
cgggacgcgggttttgatccacttgtacccgtatgctcttagtcgaactgcagcatgccagctttgagccacaatcctgactcaccatanaccttgacctcaggtgagaatgtcaatccttacctttcgaaaccaaaagaatataatggaaatttccaatcacagaaaatgaaagaacgaagatttcccattcaagagaaagcccaaaaagaaaagaaggaaaatttccaactcaagagtgggagaaagccaacagaaaagaaagaatattcccaattaaaaaatgggagaaagaaaaaagagaaaaggatgaaagaaagcttctgatcaatgatctaaagaaaacagaagaaatgtgcatagaagtcttggaccggacaatatctgaacaatacagaattgtcaccaaatgaacaaaaagggaaggacaggacaccacgacctanaatggtctttctcctttgataccaaccaaaatcccgtgcgctagcgactattttttctcgccccgcactacacaaaananaaacagaagaagaagaagcctgatatatcacaagccacaaacacacaaatgccgaataatataactaccaaagaactcattcccanggaagcctattgatcataatccgcatgtattnttgattgaangaaatatttgcaagcaatcatacatattatgttcgatangagaacactaccttcgagatgatcctttatgattctcattttgcaaccgtgttcttaatgctttaaacaaagcacntcaattcttattgttgcgaccatcgaacctctcccgcaccatgttccctcaaaagaatctgctaacatgaatatttcttctactgtgtctatggaacacaaatttactcaattcnaacatctgtttcttaagagagaaaactctttcatccttgtcttaaactgcgcgacatatttccttcttaccatgaaagaaaagatcctcgatnttngaatattaattaatactaactatatataaactttctcctctttcctccatctctccggtgngncncnctntttttttttctctttttccacatttgtagatcattttatcaactctactttattctctctccgacnactgntcttttccttactgtccttcatcgtatattatactattatacatcatatatacacacacaanngccatnntcncnnnnnnntnnnnnnnnnnntnnnnnnnnnnntnnnnggcgccgcgccccccccccccnatgnagtgcgngngngat

SEQ ID NO: 270090 - DNA, 494 bp, Glycine max
tgcgcttaaatagcatgaaaaaacccttcgataatatgtatgtatgtaaatatgcagcttgaaatgccttgcaaaatgttgaataaaaggccttgccaaatatgaatatatatagcatgaacatgccttgcataatatgaatatatatatagcatgaagtgccttacaaagtgttttggatgggtagcgtaaaaatgtttttcaaaatatttgtatttatgagtaggtagcaaaagaagccttccaaaaaaatgtgtatatatataggatgcagcatgaaaaggtttgtcaaaaaatgtgtacatggatgtgtgtcgtaaagtgcctttcaccaaatttttatgtgtgcaaatgcatatgtgtcataaaatagcacggccccaatatgattattttataaagtgcatgttgacactcgcaccatatgaagtgttgtttggctcttgtttgtaatgattggtatatttcttgtaactaacttttccaatgtttgt

SEQ ID NO: 270091 - DNA, 422 bp, Glycine max
atttcatattgagtgcattagttactaactagcttagctattatattactaaagatgaagatgagctatctatatcgccggtgcacgagaataatgatgctattgacagcgtaagttattttgtgttactcattggtttgatttttatttaacctatcacgaatattgtatgactaattgaatacaaatcatattttgatgcagcaatgcttctcagacattgttgaagttaatccacatttaccgggatccattatagcagccaagcacacattgtccctatctcatactcaattggatggcatatcatttgaagaattatcatcaatacaactatcctctggctggggaaccaaacatatcaagactaagtgataatgatgaagcactattgatggttttttttggtatgatgcacaaac

SEQ ID NO: 270092 - DNA, 809 bp, Glycine max
  unsure (1)..(809): unsure at all n locations
cccccattttgattgcaatcnattangcgnactctagtatactcaagcttctaaactgtatacaagaatgaagctctgataccacttgttagacattctgccttagatatcttaagaaggagggggtgaatttcnagttttcctccttctttccccctttttatttttttccctcttttttccccctcttaactccctttttgcccctctcctcttaccttttctcctatcactccacttgcgtttcactctccttcccttcttcgtttcctttattacctgcctccttttgcccccccctttttttctgcttccccccccccttttgtctcctcccttctcctttttccttcttttttgctcccctttttgtcccttcctttttctctgtcccctctccttcacttccctttccccctttctctcttttcctttgatttctccctcccacactttcccccccctcttttcttttctcgcccccctcctcgttctcttctttccccttctctcctttattccctcctctcttttcctccttttttccccctaacccccctccctttttttcctcttattttttccaccttttctcttctttcttcctcctctccctttcgtacttttttccctcttcctcctctcatcttcttttcctttctctttttcttccctccacttctcccttccccctcctctcttcctccccctctctcctttcccttttcctccctctcttttttctctctcccccctcccccccttcttttctttctccctctctttcgtctcttcttcctcctcttcct

SEQ ID NO: 270093 - DNA, 1051 bp, Glycine max
  unsure (1)..(1051): unsure at all n locations
cagctttctcgggaatatacctgcctattaccttccgtagggtgtttatgaatagtaggggtattggccaagtaaggttgaagttcataatgctaatctgttagctggcccaaatgatgcccacattgtatggacataacctgatattcagatctggataacttatcatatatatagaaaattgcctcaatataaaatgcatacccttttagccgctgtaccatattctctttaacccatgcaattttcttttgatcaaaactcctacctataagaacctccttggattttccccattggtattcccaatccaaaaacgcagaggatgatttgtattcgattatgccgcccccatttctttgtaaatggacccacccaatttgtttccataatatttaagacttgtcagctggacttgttctttctaccacaccccctccacaccatattcattctttcctttattctaatacacctacaacagcacccccctcctctctcttctaatatctcctccataacacaagctccaccactctaaagcaccccactgctacgcaaaactaacctattctttccccctttctccccctgaatcaaccactctgatacaaatgaagcttttttagtcctatatgtatagtcantattactgttcctagaacaaaatactaccacttatatcccctcctcctcccccgctatgaacaacccacaaaacacaaaacacatgttacttgattaaaatatttatatatatatattaatacggggtgggcgcgcatatataaannnnnagaagannnnnnnntttttttttgaataacaaccttcttatgtatatctctctcgcntatcttttttntctttcttgtttcattgctttccgtcctatttnataaatattttttactatctcnncnnncgtatatctttaatactacatcttacactactcatctctcttcggngcgggnnnnnnngaagaggnngggttttnggngnttnntggtttntaatatcttcacataccttcttgccgcccggcgct

SEQ ID NO: 270094 - DNA, 341 bp, Glycine max
aagcaccacctattaaaacatgacaccaattattaaacacgtacctagttgttttccaaacctagcataatacttctctactccttctcaaggtgtccaacagaacttattcacaagtataacaacagcattacatcgcattattgaaaaattaaagaatgatgcaagttggccataaaactgcaggtacttcttttataaaagtcaaattctaaaaatgtttcacttattcacattgtatgactgtgctcactactctgtgtgctacttacaaatgtgtgatagcaaataatgcatttatttcttgggcactgccattaaagaccacttatatatgatat

SEQ ID NO: 270095 - DNA, 347 bp, Glycine max
  unsure (1)..(347): unsure at all n locations
ctatcttgttaaaaaatcaaaacaggatcaatggcatattctatttttattatcatatcagaattataggaagaatatctcctgctattaattgcattaattataattaatttatataaatgaacatcccatgtgtactttgatacacgatttttactctattattcctttatttttctcttattttacatatttactaggagaaagggtaaaataatagataacctctgtattacaatacttatgtagcatatttttggatgagttntcggtaccttgtacctagtataaatatattctanttgccgataaaaaatgtaacatttctataccaatataaatcattt

SEQ ID NO: 270096 - DNA, 477 bp, Glycine max
ctcagcttgtttctttctggaaaaaaaccaacattttgatcctccggagatacactgaacaacaatttggacaactgaaatattgggctatcaaaccaacctttcaaagatttaaagtgaaatcaattttaattgatgtcactttaaacttttgaaagactaatttgctctaacaaacttcagaaattgagatatcaagtatatatttgcaaaaccaaaatggtagttaggtttagtctctctttctgaaagaaatattatttcctggcaaacccagctacttcctcttactattgctttaatgagcaattgtaaacctaattaaaggaaggcatcacaaaatgtttccctatcttctttacttactgctagtgaactctgttttcttcaatctaaaaaaacgatacaaacaaacaaaagtatagcacagaaagattttatctgttaaacaatcaaaagtcaagtagatatgatttt

SEQ ID NO: 270097 - DNA, 341 bp, Glycine max
  unsure (1)..(341): unsure at all n locations
ctattcacattcacaaatcacacatatattcaccatccccagttgcccaccttcaactgagctcacgtactcccacgtagcccttattctcgtttctctcaacaccgggtgcccatcaatccctgcaagctttcataacatccaagcaatttcaacatccaaacatcatgaactatcaaaaccaagccaaaaacagggcagaggcagaatactctgcccaaagcacaaaccaataccacangttttcttattcaaataccccacgaacattctcttcgttccaatttgttcaccggtggatcaactcgaaaatttactggaggtcctagtacataagctac

SEQ ID NO: 270098 - DNA, 543 bp, Glycine max
tattggattatggggcacccgtcatatggggtactaagtggcgatcgggcgatggcgcaattcaactctcccctttccacaagtcaattataaatacaccctccctagttgcccacctttcaactgagctcaagcactcctacgtagcccttatcctcgttcctctcaacaccgggtcccgatcaacccctccaagctttcacaatatccaaacaattcaattccaattatcatgaaactaccttaaaccaagaaaacagagtagaagcagaaaactctggccaaaactcattcaaattccacagttttccctactcaaataccccagtaacattctcttcgttccgattcgttaaccattggatcgccttgaaaattttactggaggttcctagtacataaatctacattttgaccattgggatctgctagaaaatatctagaacacaagatgtactacctttcccatgactagtgctgcacaaccatttttctgcacatttggtcaagcttgctgcacaaaattgacagcttttgctgcac

SEQ ID NO: 270099 - DNA, 407 bp, Glycine max
  unsure (1)..(407): unsure at all n locations
tattttatttgtgtctcaacctcatcaaggattttctattcatgccttccatgaccatgttggcaattttgaaatcttagttattttccagctttgttgatagtattttgttttcttttggcccatgcttgtcatgttatataaatagggtaaatgtatcagattacgcattcctgcaactttcatcattactaagtgactctttctttgaattcttttgctttgatgcccctttgattcagttccattaattaatcaccttttttcttcttaatttttttcccccttccttcgtgtagcggntgaagcttttgttattgctgagatgttgttagctncaccatcttgctatcgttgagctagtcataggtattgactgaatcaactactttgctatgactactatc

SEQ ID NO: 270100 - DNA, 407 bp, Glycine max
tctggtgggacatcttgacttgctttccaatctgacattcaccgcagattctgccttcttctattttcagattgggaatgcctctaacagcacctttgtcaatgattttcttcatgcctcttaagtgcagatgtccaaatctttgatgccatattctgacttcatcttctttggagaatagacatgtggaggagtaactagtttcttgaggtgtccataggtaacagttgtcctttgatctgctgcccttcattaggacttcactcttctcatttgtcaccaagcattctgactttgtgaagtttacattgaacccttcatcacacaactgactgatgctgatcaagttcgcaatcagtcccttcaccagcagtactttgttcagactaggaagtccatcatggact

SEQ ID NO: 270101 - DNA, 343 bp, Glycine max
  unsure (1)..(343): unsure at all n locations
atctggacaattcatgtgttgcttctatgtgaagagtcttatagagcatgcatggtttgcttctcctctcaggagaagattgaatattgtagatgagcccaatgacttgataattaagagaatgcccggggaaaatatgtatgactgtcatatgagaaaaagaatagggtctaatgcatgatacaagaataaatgaaaaagaatcgagaagaaaagcatggctctaaattacacanaaatgtatatttgactctccaaaattgaggaagtatacgttctagagaataaaatataattacaattattaaccacaaacttgatgattaatattntaataaaatat

SEQ ID NO: 270102 - DNA, 474 bp, Glycine max
tgttgctccaacttttctgcttgaaaggccctacagcatataaagacctaattagctaagctgataaagtataaatagcatgtagacatctaatattcaacatatatttttttaatgcttccgtaatccctaccttaaccaaaatttgtgttacatcatcatagctagtgacatattcctcagtcagattctctatatacaatgcatttttggaatcatctttcatctgtaataatttggaccagccataataagcatgcagcaatggaaaactagtgtattagtcaataatgtttttatgataaattgtagcacaaacggatggcatatgcatgcctcaagggtccgctgggttggatcaagtaaatccccaatttgttcgctgtataatctgttcaaacaacagaagaaaatgaaacaagatcattatcattgtagcaaggaagccaaaatgggaagttttataaaaaaata

SEQ ID NO: 270103 - DNA, 253 bp, Glycine max
  unsure (1)..(253): unsure at all n locations
tttcatagaaaatcttaatgtcctgtggtctatgatgatatacaagtctgaataatgttatgatgattcatctctttatataatccacaactttntttaatcatttggattctattgttgcacaagaatctttagtgatctactgatgatctggtgcgtaaggtatttgggctaatattaataaccctcaagacacttactaattttaataataatttcacttatttggttctcatactttcttattttcatg

SEQ ID NO: 270104 - DNA, 807 bp, Glycine max
  unsure (1)..(807): unsure at all n locations
ataggagtatgtccacaggtgtgtctctctctctctctctcttgcacacacacacaaacacacacacacaccccccccattgatatgcttttgatgtaaagatggatatcttaacacattaaaaatgcatcaatatgattttcaaatgcaacaaaatgttcttctcttttcattaacagatgactggcctgtactgaatattctaatctggagcttgatatcctatgggatgcactgtctggtcaagaacacctccaactcttcgctactattaaaggcctgctcccatcttgcataaaatcagtatgtctgcacatgcctgaaattgttccatacaatcaatgattatgtgtgtgtgcgcaatatctgaaattattagctattatggatactgcctctcattccttttaattcaagatcttctgttaaaatgtagattacccaaacttcattatcacaggtgagactcacggatgccttccaagtgagagcttggagttacatttgaggaaatgaaaccccgcctcatttttgtattggccttattgttgacccaaattagtcattcctgatgacccgtatgcaagcagtttattccttcatgcatattttctggtggcttgataccagaataaaccttcttctaatttcttgactaccgcaatgaaccaaaacaaaaagggctgggtgtggctaactgaaaatgccaaaaaaggcggccctcttttttcaaccactttattgaaaaactgctttttattaacccctcggttcttggaaagggagtttttcttgtttggccctcan

SEQ ID NO: 270105 - DNA, 233 bp, Glycine max
  unsure (1)..(233): unsure at all n locations
gatgacttctcttccactttcaaaggtttcccgcttgtcctatagctgctagcctcttcggtgacaactcttcaatgggtatcatctggttatcaacccattaaaacttaattggaaaacaaacattatcatcatcagagaaatagaatctagcagacatacctttcgtgcttcatctaanaatgtagctgactccctgcctgaccattaacaactccaggagtgaatttgag

SEQ ID NO: 270106 - DNA, 468 bp, Glycine max
tttagcgtatcatatattttcattaaattggaattttgatttcctcatttctttaattgtagaattccactcacagttttggaaaaaaaattataacacagctcaaatctgagtaaaatatcgactgaagaagaaaatacaaaaccttatgcggattccataaccttatgcggataaatctgaacaaaatctgaacaaacacagctcaaaatctgagtaaaaattaacacagctcaaatctgaccaaattccataactttatgcggaaaaatctgaacaaagaacaacatacttaaaaaaattataacataaattattaattttgaaattacaaacctgattaagatatagactgaagaagcaaaaaagaaaacccgcagttcaaatctgagtacacactcacaattctttcaaaactcaaatctgagtacacatgcaacaacgttgacaagaattttgtctatttaa

SEQ ID NO: 270107 - DNA, 340 bp, Glycine max
ttcctcttattatctctcacatcgtaatttttatgtttggaggttggtcaaacctacaaagatatgtttgggaacaaagtggaataaagaatctctaaaattagtacccatgaacattttccatgaatgaagatgaggaacattctttataaaaaaatatatataaactaacaagccaaatgaacagggtaaagaaacatggagaaagttattagataagactcacataaatatgcatccaacaatgagcattagtatcataaccaataacaacagaatattcccaaacctattctatctctacaatcaatggtaataacacagaacaacaacttatact

SEQ ID NO: 270108 - DNA, 397 bp, Glycine max
tgcattgtatttcattctttttcacgaagagggtgacctgctctattattttattattggtctttttttctcctgttttctgataattttatttctcgttcccgtcatgttaacctcattgaattggcatttactataaaccaccagacagacctatagctctggaaagtgcttgtacttttcaaacttttgaaagatagtttattacacccatgtagccgttgatttgagtatttacagtaaattttagtcttactaagaatctttcagctacacataaaggaatttattgttttaactcttcctcttcataaaacgattagcaaccaagcacaatgcaagttccacataagacaatgcgtaatacggttacaaaattcagaagtaaaaaaaaaaa

SEQ ID NO: 270109 - DNA, 374 bp, Glycine max
gaacatgccattcttggcactgaataatatgtggtgaagcctgatgataatttggaagaagttaaagaagcattcatggaatatatgctgttagtcatgagcatgattcacagaatcagttagtgttttaagtaccagtaggataatgacattaactaaattactgaattgagtgtcaagaattacataaccacaactgctgataggatcttgttaattataatctgaaatattatttgccttactcctaatttgtatacttgtgattacaacttgatttctgcaaatgattctttgaatctcttttctattcaatgcaccttatactagttatgaaaccaaatcaagtttagaatctttagatgcatagctta

SEQ ID NO: 270110 - DNA, 575 bp, Glycine max
  unsure (1)..(575): unsure at all n locations
tatatgcaatgtggtaccatgtcagtgaaaaacctcggcgggcgcctaggagtacatgacaagacaagccacacaatagtaagtcaagtcactctcactaagtaatatcatagggagaccagtcagggtcacagtgttttgcgagaattttccaaccatatgagatcaacataagcttaaaggagcactcaaaccgtgtgacccccaaagcctacactccgaagagtccgtcagggcctctccctcctgattcaggtccaaccaagaaaatattttagcacacagactctatctatgaactgtacaaaacacatgacttctcaattgttctcaaaataaatttaactcgtcgtcctttaagggtcttatcattaactcgtcgcccttaaagggacttaacattaactcgtcgccctaaaaggaacttaacatcaactcgtcgccctaaaagggacttagcattaactcgtcgcccttgaagggacttatgatcgtgtgattgtacaattcatagttcacaactcaatgcacatatatatctcaatcgtatacatacttaanttatcacatacact

SEQ ID NO: 270111 - DNA, 461 bp, Glycine max
  unsure (1)..(461): unsure at all n locations
gatatttgtgttgaatgcattaaagggtaactgaccaacaacatgatattatgttcatatagangtacatatgtcttggaattgatacatactaacttttgtgggtcatttcatacaccttcatggaatggtcaacgatattttatatcattcatagacgattactccatatatgcatacttgtttcttatacatgaaaagtcacaatctctggatgtgttcaaaacaattaaagttgaagttgaaaatcaaatcaacaaaagaatcaagagtgttagatctgatcgtggtggtgaatactatgacagatatgacagttcatgtgaataacatcccgtngccttttccacagtacaccatgccagggtcacctaacatgaatggcgtggctgaaagaataaacacaactcttaacgatatggtaagaaacatgatttgcatttctacttactagagcactc

SEQ ID NO: 270112 - DNA, 568 bp, Glycine max
  unsure (1)..(568): unsure at all n locations
tgttttcaatcattggtatacttntgacttgaaatgagagaattctaaatacatagagcgtggctggttatacgttctgcatgcctcaacgtgcatctgcactggtccaacagaaaaaaatggttaaccaacatttttggatattccaataaacctgattgtgcgtcacaaaatcgattttgtggtgaagctacttagggtagcttctgcttcaaaggaaaatcaatttttaactttgggtctggtttttctcattttgcccttcattcttctcatgttgcgtgtgtttgtgagttgtgtgtgggtttcatttgtgctctgcttataaggaaacttcacttgacactccgcacacaaaaattatacatatcaatgagatggtaccagtagtaccttaacagcatacgtaattatgttgatcacataacaaagttcattaccccagatgttaatacccttcccatttaataatcactatcaaataacccaaaagagcccaacaatttttgtttgcagtaattaccagcccacccatgacttgcgtgtttgacatatgaaaatctgatgg

SEQ ID NO: 270113 - DNA, 1137 bp, Glycine max
  unsure (1)..(1137): unsure at all n locations
cgccgcgctttgatcacttgtcacgttgctcaacctgactgccgcatgcacttaacaaaaacatttacaagtacgttacaatatacagagaatggattgacaattcaccatgggatataacctattattagtaaaacaaaaaatctagggaaaaatctttcatagcccagtggacaaacgttattctttaaagagaacacatatgttacactctcgtgggaagaaacgtaattatgctattctttcgaaaaatgcgaaaggatccttgaatctcttgaacatctctaaagaactatcttttttcataaaaaaggaagagataaatttaaataacaaataaaatattttctactggtggtgtttgctaacgagaaagagatttgtcttatattatcattggataattaatatattctgtggtcctttcttagggcaattttctgggacggatagaaccccttcgaaaagaaactatttcctcccccccttgccttttccaacaatataataaatttttttaaaacgactataaaatattgttttattgtttataaaaacccaccgccccgcctatttgttttgcctcctagacaagtgaattttgaagcggggattgacttctttgtatatagggcaaaaatggagggttttccgaccataaaccatttctttgaataataaggttccgcaacacggtatatttaccctctttcatgtgctcacccaacaatgtgtttcccccctgccacacacggctaaggagaggttggtaccccttataaagtnttcngagcgtcgccacatcaaagtgaggggcagcaatatattccntctcctcatttctccctataannaaaatacatatttatttctactattattataatttatataaatatnntnnnnannnnnnnnnnnnnnnnnnnnnnnnttnnntcnangatggggggcgatgaggggattattggtaataataaaatatatttatataatataaatatatataattaatgtgaggtgggggtggtggggtgntgtgatgtgtgggtgcggngcgngnnccntnnnntaatntgataattntataaatgagagtaatatttctctcggtcgacctctctgcgcgccctgtcgcct

SEQ ID NO: 270114 - DNA, 566 bp, Glycine max
ctgatttggtaatcgattaccagtgaatgtttctgacaaaatcaaaagatgtaactcttccaaaaggtttttgactttttcaaattgggttttaagtttttctaaaacacataactcttctaatggttgtcttgaccacacatgaagagtctatgatagcaagactttggcttgcattctaagtttcttgaacacttattcaatcaatcttttacaaagtcctaaatctctttgaacttcttcttcttctttgaaccaaaagctttccaaagatttctggttttctaaaccttgaaaacttgtgttattcatcttttcattctcttctccctttgccaaaaagaattcgccaaggactaaccgcctgaattctttttgtgtctttcttctccctttgtcaaaagaacaaaggactaaccgcttgaattcttttgagtctcccttctcccttctccctagtcaacgaaatccataagacacaatctgagaatacttttttgaatcttctcctttccttatacaaaagtgttcaaaagactaacctcctgagaattcttttggatccc

SEQ ID NO: 270115 - DNA, 339 bp, Glycine max
tgttgaactagttaagattgagttaattcaacttgggatttgggcttggtagttggttgtttttcaaaaataagggtttcagctggatcacgctgttgaaagcattttataatgacctgagaaattgctgaagcccatgtttagctgtacgaagattgatgactcaaatatgaacgctttgatttccttgctcaacaagatttatcttttgtacgttaaggttgctgaggttcacacgcgatgacaaatttgagaggaaataccccgtccaagtgttcgaatgaagattcatgatgaatagccgggtcagattcttcaatattttagtgatgtttcttg

SEQ ID NO: 270116 - DNA, 513 bp, Glycine max
tttaattgtacatctgctactcttttatgtcatatgcatattaaaaagcatttggcctggaaatccctaaaaattgcatgggattttaaggctatggcaaatcctagcctggtttctggtaaagatcagttaattaattacactaccgtctgctgcggccaatgaatatttcttgttgtattccttcatttcatttgatcaaacttatttctctcttaaaaatgtctcagatttcaatgatagaaatactgccatttttacttcttacagtacgaaaaacgtacaaagtaaaccataaagatagccacaggcacaaatatattaacctatgtaacctgaaataaagcttcccctttacctcctaaagaaaaaaattggcactggctcgttctgatcttttaaaaagtgtcacttcaatttgttacatgattgattccccaacacacccctatctagctagcgctagccactctcactggggcatttgtttgctaaatcataatcagaaattaa

SEQ ID NO: 270117 - DNA, 281 bp, Glycine max
atattagagaaatattattagaaccaatttatttcaataataagagagaaagcccttgacctcactcttttctctagtaccctcactgaaatccttgttcagtagatgaatgcttccatactacactaaataccaaaaataacatcatatatcagcaaattaataacaaaagaaattttaatttgaaaaatgaaatggagctaccactactttattatgaacaatcaaccataataggtcacttttaactaaaaaaatttggacccatctcatgtttaaaa

SEQ ID NO: 270118 - DNA, 540 bp, Glycine max
ttgagtaatcgattacattgatttggtaatcgattaccagtgattgtttctaaataaatcaaaagatgtaactcttcaaaatggtttttgactttttcaaattggttttaagtttttctaaaagttataactcttcaaaatgatcctcttgaccagacatgaagagtctataaaaacaaggctttgttttgtattcattcattcattcaatcaatcaatctttcaatcaatccaatcaattcattacaatcctttacaagccttgaatctctttgaacttcttcttcttctttgtgccaaaagctttccaaagttttctggttgtctgaaccttgaaaacttgtgctattcattattttcatctcttctccctttgccaaaaagaattcgccaaggactaaccgcctgaattctttttgtgtctctcttctcccttttccaaaagaacgaaagactaaccgcctgaattcttttgtgtctcccttctcccttgtcaaagaattcataacgatacagtctgagaattcttttgattctttc

SEQ ID NO: 270119 - DNA, 847 bp, Glycine max
  unsure (1)..(847): unsure at all n locations
ttttcacacctaaataccctataagtcttattttgtttcnnnncnaagccggtttgacttttgacccttgaccggacacaggtgaccagctncacttaaatcaaaatatgctttctaatatccctagaaattgagggtgaacgggaacccctctatggcgatttcttttggaatcaattcacgccttgaactctttggccggaccccacctataaaatcctttttatgggctaaaccttacaaactttgatttggtggtgaaacaagtcaaggaggaacactcgctgagggtagttttggggctcccaaaaatgctaaactgataatttttagacactattccaagacaagtcatatctaattgagcagtttcaatcatgacttgattttccaatttacatgaaaacgtgttaacagttttggtatttaagatgatagtggaaatgagcttgaaagacaattcacttagaggccatggtaaaattgctctttccggaacctcaaaataatcatgaggcccccttaccacaatgctatatcggaataactttttgataatcaactttggaaaccgactgtaaaacagacttgcacgataatggcccttggctttgggtccaattttatacatttaatgttctccccttaaaattttgtagttattaaaaaatttttttaataaatggactcgacttaaaaaatacaaaaaaacttaacnttccgtcccccttcaaggggggattcggggcggttcacatttnttnnnnntnnnttannnnnnntcctataattgtagtgagtgtggcnnnnnaggggnnnnnngggggggngaagcccccccccccct

SEQ ID NO: 270120 - DNA, 505 bp, Glycine max
caaagtatataataataatttatgaatgaccgttcaaactataatgggagtctaatcaaaatccaactctcacaccgaaagcaatgaggactgcggacaactaataacatatgtcatcataacttatatatagtttaaaacttgtgattaaatgttaaaggtttcgaatttattaaacaaggataaattatttaatttacttaaaaacaattgttactggaattgttaattatttcatccttttgtatgtatttggcaataccccaaagaaactatattgaattctatcttgtactgtattatatatgaaggattgtccctaataaggcacaaattcacataagggatgttttatgacttattgatgacttaataacattgatttaaataaaaggggatgctgttaatcaatgtactttaaagaattaataatatttgtttatttaaaaatacaacacagtatacctatgatatttttttaaacttttttaatttttgattcttt

SEQ ID NO: 270121 - DNA, 364 bp, Glycine max
  unsure (1)..(364): unsure at all n locations
aacatactccctaacaaaacagcttaagtagttgagtaaataaatgatagggcagtgtatcgagtattgcgccaataagacctatggtgtttccacaagcaagccatgcattgcatgaagaaggaagttgagtattgtgaaggaaaataaaggtctttcgaaccaggggctggagtactcaattctttaacaagttctttgtttcttctgagacagaatgccgaaaaccattatcagtaaccattggtaataattataataataacaaataaattattgcacttctagcggntaagtgctttctagcatatcactttagagttctggtattctgtagttntattagatgtgttaccgaatatac

SEQ ID NO: 270122 - DNA, 1078 bp, Glycine max
  unsure (1)..(1078): unsure at all n locations
cgccacctctctagtcgtcggacactcccacctctcgcatcgatgtctcgttntgttctcttatctaacagtccggtcattactattttnccnnacagcccgagtttggttgcattcctactctctagcganactaataaaacttcagctttacaacaacctgcaaaatttccgaacaaacaagaagcaatggcaaaatattcaccaaatccggaaaccattaaaaaaagtnttcaaaactttggaaggttaacatttaaaaatggtgattttattaggtatacccaaaataccaccccaaattaaaaaggtccagaccttcggtgcaaaaacaagaacacgtattttcaaactttttattaagacacatatctttattatgatatgcttaaaggttccacccggcattcatgtttcaaaaatcaatgtactcgtagtcaaaccagttagattgaaagaacatgaanaatgaaattagtgaaggattatctttttaccaaatactacaaaagtacaactaaaccgtcgtttccctggaaggtgcaaaaaggacttttaaatttccttcttccttttaacactccaaggaccttcacttatcttatcccaagccgacattcagggatcctttcacccaaaatattgggaccccaacctacaggaattggcaacccacagcctaaaaatgaagagtgtcacaaccttaattggaccaaactccaaacagaatttcagaacctcgcacaagaaaattttatgccttaatcaaataacttattgggaaactcataaaccagcgaggtattgggtaaaaaggaaaaatcaagagtcttctctcttaaatcttatatctccacagaaatgtgtacatattttccaaaccttcgcccctcgaatatgaagcaattacaaccttattggctttgttttttcacaaaaatgctaaggatcatttgttttgcttaaaaggtttcttattctcactttttaataacacaaggcaccctcggttttactttgggtggcggtgttcaaaagttcacatggaaaatgtaaaaacccctttttaaaatttttn

SEQ ID NO: 270123 - DNA, 397 bp, Glycine max
  unsure (1)..(397): unsure at all n locations
atggggtacccgtcatatgtggtactatgtggcgatcgggcgatggtgcaagtcgactctccacatccacaaatcacacataaatccaccatccccagttgcccaccttcaactgagctcacgtactgccacgtagcccttattctcgttcttctcaacaccgggtccccattaatccctccaagcttccacaacatccaagcaattcaacatccaaacatcatgaactatcaaaaccaagaaaatagggcagaggcagaaaactttgcccaaaacacaaaccaataccacaactttccttactcaaataccccagtaacattctctttgttccaattcgttcaccattggatcgactcgaanattttactggagggccctagtacataagtttaca

SEQ ID NO: 270124 - DNA, 354 bp, Glycine max
taaaaccccttgttcattaccaaacaagctgaaattaatcataatcacaagccagatatcctaactatataccagagataagaatgaaaaataggaaaaggaaagaaaagctgggttccctcctaataagcgctcttttaacgtcactagcttgacacatcgtcctgttatccaggatccaagcgaaaaacaatgttcaatctttccatagctccaccatggtattgtttcaaccattgtccgttcactacccatgtcctgtcaagatctttagattgaggatcacaaagctccacaactccatattgtcaaactttattgatagtaaatggttcaaaccactttgatttaagc

SEQ ID NO: 270125 - DNA, 536 bp, Glycine max
  unsure (1)..(536): unsure at all n locations
tctatgccctctttctctgtcttaacgtcttcttcacaagaataaatagaacaccgaacccccaatcccattcgttcccgctaaatccaacgaaaacccaatggtgggcccctctccctcccatggcaacaacctcaaattcctctgcagctacagcggcaaaatcctccctcgttttcccgacagcaagctccgttactttggcggccacacccgcgtactcgccctccctcgctccgctcccttcttcggtaaaaccaccaccttctcctcccttcttggtttcccttacattgacggcgtataactgtatttgctttggcatgcttcttttcataaaaaatcatgttcaacgtgcttcggaaatgcctgattcatgtcaaacaaacatacattaataacgtccttgggaatacgctacacaaaattacctctaaagaaaaaataattctgnggacgtgcttcttttgntnnttgcgttatttattctacctaatgaactttatattataaacccacttgcatacatttacatt

SEQ ID NO: 270126 - DNA, 442 bp, Glycine max
  unsure (1)..(442): unsure at all n locations
cttgcctttgggggccgaagacttaaccatttccagcagatgcattgaagcaattgcctcaaaagccttaagccacccatcaaaggtgagtttgttacacaaccattccccgaaggtgaaggatgatgtgtcttcatgcaccggaagcgaaagcttgagacacaaatcaacaanccnaagttggtgggcttaggatttatcaagattttgagcataagactttgtatttggaagaaacccatggataagcccattcaaaattctgggtggcaaagacacncctcaaaatctcattgggtgatgccattgaaaaaactatgcattctatatggctaccaaatataaaggaagaatgtgcatcatgttaagagggaaaaaactgaatcagactcaaattcaaaatctgcagtgaagtgaattcaaacatagactactttggaat

SEQ ID NO: 270127 - DNA, 1282 bp, Glycine max
  unsure (1)..(1282): unsure at all n locations
tgcccgcgtttgaccctctgtatcgtggttgtcncgcgatccncctgagatgacctgctagcatgcgagcttcatgagtatgaatcaagtatcttctacgtgctttgatgacttcaccgatgatgactcaaagccccatgaatgatttctcgattatgtcctctagaagatatgcagaagattcttgaagcatgagatgtctgatttcatgattcgcgaaaagatgacttctcgattccagagatgatatctcgaagactgtgcaagggaagtnttgtatagattttcactaaacacacatagcgcactcttgttcttctgcacagtatctctcagcagtgtgttagttgccagagcttttcttgtctggtgtgcgagtgccagctgcaaacgtcgctttcaaaagttttcatccgaatatgctacattacgatgggattcattatggtgtaatcgattacaacatctcggtatacgataccacagtgtctgtgcgtcgagntgcagatctattttgacgagacatatgtcttcgtccacagcttggtgtatgaattacatggtgtgggtatcgatgcctgtgtcacgtttgtataccatcaagagattcactcttccagggtgtcatgtttctagaggataactctctcacggttcttgcccgcgtgacagtcttttagcacccctgactgctttatataagtctacagcgttctttattcttacacctcgagtcggtgacactaatgtctctcttctctgtctcttgctaccctcaagaattgttcggcttgtctgttgaggacaagtgttgtatttatttcttctctctcttatcgcagcagcgccgattttgtctctttcttctcactaaacacaatcgatcttgtttctgtctacatatataagagtccgcggtattgttcgtcaagtaagtatgcgcatcttcacttagtctcttgctctggcgtttgtgcggaacaagnctntntananngcctctctctcatctcatactctcctcttacgctgtgaaatatnctanctattatgcttttanatattatctcttataatccacctccnattatataaataaanaggggggggggggagcggcgcgtcgtgggggcgttanttatcttcttctcttttatatgtatatgcgtagtggtctcacttnnnnnnnnnnnanannnnnnnnnnnnnnnntnnnnnnnnnnnnnnnnnnannnnnnnnnnnttcnggccgcggtcgcgcggcgtgtcgcgcggcgccgct

SEQ ID NO: 270128 - DNA, 517 bp, Glycine max
  unsure (1)..(517): unsure at all n locations
tttgaaattttgtgtcctttcttcaacatctgacccagtgtgctggtcttcttgtttttcttccaaatgaaattaaatggcaagataggttaggtctccttgaatatcatatccaagaagttgtttgacttctactcaaacatctttcaccactttaaggaccatttctttaaggtcctgagtattgatgtcacgactgatggtttgccactaatgttcaatatggacgaggagccttgcttcccgttctattggcagtctaaccttactaggttcaagtcatttgacgagaatttgtttacccttgtggatagggtcaacaaagctattttggagcacttaccggcctcgctggatgcacgggccattttgtctcttccctcaacgagcgatccccttgctgccttggacggtaaaatgactaaccttgtcctctnttatgtttgaggtcagtgtccactgatactaacacttgcttgcactattgttgcttgttttgtaagtattatgggtgact

SEQ ID NO: 270129 - DNA, 1129 bp, Glycine max
  unsure (1)..(1129): unsure at all n locations
ttacgcctataattcttaattaaactgttcatnttatttatattanctacatatttaaacccgagccctaccaccattgagacttaggccaccggaaccgcgaacnnnaagncagcgcagcctgcagtttgatttaagaatgatgcaggtgcttctatctactttcttgaagaccacctagaggttcctgaaaaatatcacgggggacaggagaccctgttgacgccaagagaagtctattgtctcaaaaccaactcgtcacatatctgaacaaaacgcaggcttattttgtcagagagaacatatggtgtacctaaccaggcgagctgcgtcaatctcataaaaatgatatctcacccaaaccaagagcaagacgggttgccaaccgtggacttaatgatatgtgacacatggaccttgtgactatctccggggaggggtctctcatacaaagctttaaatcacgaatgcggcgatatgacattggaccaaaatcccggatgactcgatatcagccaccaacaaaacggaccacagcactttttgataattcaacccccacccctgcgcgaggatggccactgaatcacgccccttgttcctacggcaaggtgacgcctgaattcaaaggcagtgctcaacacccctgaacgatccctgtgtgaacataatagtccccacaacaccaggggaggtgggggggccctagtccgcccctctctaggaagcgtcttctctacaaaacactgagcacaaaccgaacgaatgctgtagcgctaatacaaagcacgggcggaagacaaaactcgtgaatgggcaatataaatacagtcgtaccaagttctaatgagagggagagtatactttctcaacaaccataaaacgctgcgaccccacgccaactcacacatcaacgttcggactatacattactattatatacaaactcacagtgccccaagttgtggtcctcttctctcgcntttcaccaaccacaccacatcaacataattaacaaatcataaaaataataaaataggggggggggaggcgtgttctctccataacaatatcactaatgagnnnnnntcactttttttantcnctntaatcccggccgcgcccgctc

SEQ ID NO: 270130 - DNA, 409 bp, Glycine max
  unsure (1)..(409): unsure at all n locations
tgaaggtgtgtancccaccatcttttaataagtagaacactggtaatgtgtctactatcacgggtatcatcttcttttccgtcattgggggtgccacttaagctgccaaatccctccacctttgggtgtattctttgaaggattcatgctcctttttgcacatgttctatagttgcatcctatccaaagccatatcaaaattgtactgatacttcctaacaaaagcaaccattaagtccttccaacaatgggctcggcaacgttccaagttagtatactaagtggcaactaccccagtaagactttcttggaataaatgtatcagcagtttctcatcttttgcgtatgttcccatcttccgacaatacatttttagatggttattggggcaaatatcttcttgtacttc

SEQ ID NO: 270131 - DNA, 92 bp, Glycine max
tttgagtaaacaactctattaactcgcttattcaattaggtcttatcacattcgagattgataggagccagagtcacaacctatcaattaaa

SEQ ID NO: 270132 - DNA, 382 bp, Glycine max
tgaaggtgtgtaacccaccattttttatagtaaaacactggtaatgtgtctactattattgttatcattttttctccgtcattgagggaaacacttgggctgccagatccctccacctttgggtgtattctttgaaggattcatgctcctttttgcacatattctatagttgcatcctatctagagccatatcagaattgtactgacactgcctaacgaaagcaaccattatgtccttccatgaatggactccggaaagttccaagttattgtaccaagtaacagctaccccagtaagactttctttgaaagaatgtatcagcaattcctcatcttttgtgtatgcccccatctttcgacaatacatctttatatggttctt

SEQ ID NO: 270133 - DNA, 1431 bp, Glycine max
  unsure (1)..(1431): unsure at all n locations
gcatcgttcgctctctcgtgataagtatgtcgtatattattgtcantattaaaaccacacccgcgggttgaacattgttcctgtattccatacgacccngctacaactatatggaatgctgattggaatctaactatgttggctaactactatcttgaaatctgaacgcagactccctgctcgcgagacatgatattggcactatatacgcgatactgacagacactctggcgacacttntctctgtatatccgtcttcgctctagcactgctgttatggaattccacctcccacataacatcgcgtaataacatcgaatgtggattgatcctgtgagaaaaatatatcttaacccgtgacgcttatacatgacgaaactgttatgtataantagtgtcggagtaccctcaatcggggctaaggtgtgatcatcgtccaaccggtccattanaacagttataacatcctcctggtctaagatcggagccactcttatactgaccgtgttgtttttctgtcacgtttaccacacgaccacgtttggtttgttgttaattaaacaacccatgctatacgccggcttattatattatattatacatgtaattctctctacacaacacacgacgatgntgattacaatagctggtagaccctttcatctctacaantgtggcgcatgngtgcgaagaacttagaagaaatactactgaattctatcgctaccttcgagtgcagcacccgttggttcatctaccctcaacagtggattctaagaacaatggtctatcacgtcacattattgcnttcttcatcgagtataacataaaagtgtagcacagatggtgctacgcgaactctccttctcgtatgtctttggtacaactgacacccagtatacttactcccacatggatacatgtcactcacctggtgcgacgaccacatctgatatcaacacactctcgctaataantatcgtancagacagcgccatcgccacaccctctgaggtctactgtcgcgagcttactgtctcttctcgctacaacttgcagcgtagtctctcattagaagagtccggtctctgctcactgttccattatagagaacactggtgtttttacttcttttacataacagatggtgtactcgcgttactaagagcacacaantataatgtatgtacgttatacacgacggcagtcatcatgctctgacctccctcaggtactcnttcatgacgtacatcgcgtacttactaccgctaactctccatacatccgatgtaatccattactcactagacctatgcactagatacatggctcgtggatcgcatctcgtcacacacactgcgcacacactgcgatcaccgactcttacatcattcgctcgtaacgtaccttcgggggcgtgggctcgccnga

SEQ ID NO: 270134 - DNA, 992 bp, Glycine max
  unsure (1)..(992): unsure at all n locations
cccgcacccatcttcgcgcggttgctaccttctcctacttattccgtcgataccttttcgtgctcctctannnnccnnggcacgaggtgatgcatcactcggcgaacaacacactcaagctatgacgctgataagacgggagggaaatgacatcggtacgcaacggtactttagagttatttgcatgtattagacatggtaacgaggagcaacccgcttacggctagccagtgaggcgcatccttggagtgtttgtgttttccgcaacttgtagatccttaacgcccttttttcatattctttaatacttgggagggtttaactagctccctaccgaaagataaataaagtcaattatgtgttccataaaccataataaaactaattaattttggtctatccttggtaaccactaattaattggccaggttactaaaatattacctcattttaaagttccttcttaaagggcaagttttcaaggagtataaacttgtatgagttaaatctcatttaaaaaacatttttatgagtctcttctttaaatgacatttaaatcactgtttattttaccttcatatctatatgcgtgagcaataatagcccactttttaattattggagaaaaaaacaccctttaataattaagttttggtgaaaaaaaattatcccctctaccttgggaattttttttcttgactcttgaagaaagaaattctcccctcataaagggtaggcagtatataaaccactacggaacccccagaatggatggggggggttctacaaaacttaaacccctctgtccaccaataatttattcaccaattaatattttcttttgcttagaaggaactctttttctttgttctaaaaaatctttcgattagaggacattcgttctaaaagtaattaaaaaaatatttctttacctcctgagataccgccaagaatatatattttcattatgattactttgatcttaaacaccg

SEQ ID NO: 270135 - DNA, 1108 bp, Glycine max
  unsure (1)..(1108): unsure at all n locations
tctgtatttactcataaagttcttgttctattgattatcttcgttatatcatttgcgaacnntnatcnctgccgcgccgtttgaccactctttccaccctatccacaacgattaccttcacctattatcatgatttgtctaatagtagccaccacatgtctctccaatgtgaaaatattgtccatactcttactcctctggccataagatagttgggtctacgggattggccattaaaagataattgctgcccccatgatgcctactggctcacactattgtaaaaatcaaatccctcgaggggggtctcaggccaaatctatgctatgaggaaggctttttctatcataaacccaaaatgcgcccccaccaacgtggttggctcttcccgtcgctcccaggttaaactttttttctatgggaccaagctctctacattccttgtttgctatgaataactgttttggatgatcccctccgcataatgctccctcgaagaaaatatcgctctttccacttttacaattgaacaaactctgctgttctccctggtaggagtgattcttcattgttttcacccccacatcagcattgtcgtccttccaactcttaatttgtctctagttttgtctgaccgagatcaccagttctcgactgttatctccccacaccatgaattcatgagtgttttattcctctttgagacaagacaatcggcggtacggttatcgttttgttctcaataactttatcactcgatctatcatctccatatttcctctgaatttcccgcatactatacttctctctccttaacatcttacacaccgtgtattacctatctcttctcacacctctcattctagcgtatcactcctacgtgtccctagttctaacaaattccactgattcctcctatgcgcttcatctttatccatactcgtctcactcgctcttattatttacttataatttttataattaattattatgggggggggggggggcgggaaaaagtattttatttatttctcttacccttcataccgttgatccattctcattctctctatcacctacttaaattttcacggacgtctcgtcgtcc

SEQ ID NO: 270136 - DNA, 1095 bp, Glycine max
  unsure (1)..(1095): unsure at all n locations
ccactcccacgttgcggaagtacatctctcgccgcgattatcgtccctcctaggatatattaaactcgaacgcatactacttattttgcancttccnnaagcccgaggttgattgcgaaccctatagacacacccgacaaaaacataatccttcgtctcctgatatagtgcagggcgagacattaggcggatagacacgtacgcgaactttcctttctcctagaaatacgtggccctgactccctggaggaattctcacaagtacacctcttaataatgttccgtgaaaccctaatcgttagcgtgtctcggctgtgttacctctctatcagagaacccaaatgagaattggcggccgcggaccaccatggacaatcggactcatgagacttttttgttattggagggtgtacaaactacaagccttttgaactgacgacaggacctatcaaacgtctgttcgcggatatctgcaactccccacgaaccaaacctttgagaacgaactattgtcgtctacctggaaataagaatataacatggtggcctgttgcgaggcttgcgtaaatagagggctagaaacaagaagctttgacttcaaaagaggaacatatctggtggcgcgccgtaaggaagctcctgtactaggtgttaggatacaaacatgtatgcatacttggaggccaaaaagaagattggtcgcgccacataaaggcgcgctttcacaagccaccgtaaagtaaatatttcgccctcggttcgcgcgcctgatatgaaaaccgattacatcacggcagtggccgggtggaccacatttatttcaagggtactagcccaccctaacaacgatttggcggcttgaattcccccattcccgagttacctattggaagtcggaaggcaaacaacctcactccaacaattgtcacagggctccaaatggctctaaacaaatggcgtcttcaaccacaatctctataaaactttctgaattaccttcaaacctttactctcgggataattaaccacacactcgttatcacctctattagagaaaatgcgccaacattcttaagaaggaggctcttcattccc

SEQ ID NO: 270137 - DNA, 995 bp, Glycine max
  unsure (1)..(995): unsure at all n locations
ttgctacttcacttctgctaaaaattttattatctctcatntnnaccggcttgacactgtcgttctccaatacccgctcaacttagcaaattgggaggtaggaaacaaagaccctcataagtggtaatgatattaacctatgaacaaggagaaaaaggattgttgttttcttacaaaccgattgagggttaactcaccttccccctttaaggaaagaagatcccgcagcctacttgagtgggaaagaatataaacatgtttttttctccaccactatangaaaaccaaagggaacctgcacctggagttccgatatcgttttggtgtgaacaagctcacaggaaagcagaaagaacacccttgcgtgatcttggtggaaatagaaggatatgacaaccgatttgcggttttctcaaggattaattcagccccaaaccaccaagcacaaggggtgggattttcaagaagggcgtctatcagccaaatgaaaaagagaggaccttgtccatttctatgtttacaacgaatcgcgatatgtgacctccgagttgttgaatgatatatgcttcacacatcaatcaccccctaaaggaggcggttaaggttccacttgtttttctgaaacaagaaagaggatcgtttctttttccctccctaaactctcagcaagaccttagataagtaagtaggctgcagctcttaactcaaggcgttttggaattcatcctctagaaaggcatgaagaccggatttttttgtctgtttcttaagcacaatctcatatcgcggctttgacactgtcttagaatatcttgtnnnntgagataataagtcataatcatcttctttntatttatttaatatataaaattaaggggaggggggggggggggggggttntttccatatntcattatacaatatcaaaatattacccatcgngnnttgtgtgtgggcgtgcgtcccctcccttactccttatatatataattacg

SEQ ID NO: 270138 - DNA, 1116 bp, Glycine max
  unsure (1)..(1116): unsure at all n locations
cctccctcgtcgctctactnatatctntacacatcgatcgctatccgccgtgctctcttcatcgctacgcacatcagacatcnttgtaatctgtgattgtaccgtcgttatatcattannnnnncnnaccccnccggagggtttgaattcgatctgcatatcgctanactatanacnactcaatcttaaacgcttgtgtggaatgttgttccaagctaaacacacccaagaggcaactatatttatgtgcattattccagctcacatatcgtggttgtggaactgcgcgcatttcgagagcaataatcgcgggggcacattggcataaccactcctttcatgcgaaatgggtacaatcacgtattacatagtatgacttgactagactgatttcccccccccgactagtgcaatagctctatttcttgtatacagtgataaagttcacaattgttttgggatggtggttcaaacaacaattcaaaaggttgaagtttcaatacatcaaactcgagcctaaagaatgtaatcaatgttcagatctagaccggtgagaggccgaactaccttatggtgcgcatactcataggatagaacgttgatccaacgctcccgtgctctttttagtccaaggtgccctcacacgaattggtggaattcgacccctgagatacgaccacttgcgagggggatactctaccattgaaatgatgggggctgaactcaccacatcaaaacctcctaaaggattttggtaagacacatgcctttgacaattatacattacccaaagccactgttggggagagccccttcatattacaccttacactctaaattaaaaggtgcgttacctacccttcgaaggagggcgacccgacactcccgggtgctttctaaaaaatgatgcacgcgaattcccacccaaccttatttgaggaaacgtcgggaaaacacgaatagacagttttacgacttttctcgaagcgctgacattatttacccaggggaggggttaacacccccccttctctcctagggagggagcctttatcaatgcggaacaggccccattggttcaaggcggtctacggctttttcctttatggcgccacg

SEQ ID NO: 270139 - DNA, 1083 bp, Glycine max
  unsure (1)..(1083): unsure at all n locations
cctgtctcaatatagttatactcacgactctaatcttcctatttcctatattaaagccgcganattgacctctggaaccctatctgaaccgcaacncagaattcaacttcacacataaattcctctcaattgggaaggataccatatcaacaaattttcttcttcggactgagccctcctaaactccaanataacgcggccagagataaacaatactggctgcaagtctccacacatctttattatagttcaaatggggggaggtaatcatctctccccaagaagctctttgctatgggcttcctccatcctaacgagggcagtatcatcttcatatttntcgcctatcttccctacttcgaaaatcaccgccacaccactacttaatgttggcgctcttttcaattatgacaactctaccggttccgcatcgccttcttacatcacctcgaatacaaacaaagtcatcatgacctatccctgttttcaatgaaggggatgtcttcacgacagacgaccatccatacattacacccatgggaattcacacctcactcacttccaatcagataagccagcacaaaaatacacgttatcgaattgtccgcttctccaacctaacatgcggtattaaactcacaaaccataaccattctgagctaataataatatgacgagcaagcatattctatttactcctaacatactataaccgtcacacgaattaaaccaccgccgtccgctacatgccgttcatcataagtatatacttgaggcgctgcgtcaaccttaaaattaattcgacttttgcgccccactaaaacaggcgcgatacactctggatggagccctcgtcgaccgcatactaatcggtccaacanctcacnctctccataatataacctcgcggtgacgatcactctctccctccctttctatcatttccccacactttactattatatctcttatatatttatatattataaataaaaagggccgggcccccccaccaccccggccgcgcccncgcgcactctttaccacttctccgtcgacacgttcttctctactcccatctct

SEQ ID NO: 270140 - DNA, 385 bp, Glycine max
tgcttttacaatacttagcctatgggcccaaaatctaccctaaggctcatgaaaaccctagggctttctcttgcatctatggcccaatcttcttggagtcttctatccaatgcccttggggggtaagattgcatcaatcttttggttttaaagtgaaaataaaggccaatttaatcaattactatgtaatttgaattgtttactagcgcatttgttgcgtgtaatccgttacatttcttcatcttcacctcatcaaaacctcctttactccaacatttactcctttcacctaccatagcaaaccagaacatcactttccctctataaaagccaacccaaaaccccattttagtcacaccttcaactatctcagagttatctcttc

SEQ ID NO: 270141 - DNA, 257 bp, Glycine max
  unsure (1)..(257): unsure at all n locations
agcttagcaaatggacctgggtgtttcccantctcatcatatcgttcgtaatactcatcacctctatcatatctaataattgtcacatttatgggtaattgcccttttatttcattgtagcaaatttctaaggcctccattgcctaagaaatctcgggcagccagtagacataaccgtaacgtgaataatcatcggtaatggtgaaaaagtatctttcctttccgaaagaactaacatcaaaagggccacaaatatc

SEQ ID NO: 270142 - DNA, 363 bp, Glycine max
tacctcagtgagagtgcttctagcaaaagcaacaactaggaattggtgtttataacaaatggatgttaacaatgctttcctcaatggggatctgtttgaggaagtttatatggacttgcctcaaagttacaaaaccattgctcttgatcttgtatgcaaactcaataagtccttgtatggccttagacaagccttaatgcaatggttttgcaagttttcttctaccctattacaataaggtttcattcaatcaaaaaatgattattctattttcacttatggctttggatccttattagtagtgccttttagatatgttgatgacattatacatgttggcccaaagatcttcatgtgttgctg

SEQ ID NO: 270143 - DNA, 960 bp, Glycine max
  unsure (1)..(960): unsure at all n locations
atcgtcttccttatcgtcgtgatatagtttttttatccgacttnaantttntgccagcattggcctgtggaccctgggccggaccttaatgactggggttcattgagacctttgtggtgcgatgggcacccccatattttgtgggaataatccccccgccaggttctttttttacaaaaaggccaaatttttgccagagggttgcatttaggcctggtttcttacacggaggtttccgcatttctcgggaatttcggacggcgctgatttttacaagcaaaaactttgcgcgaaactacggggctgattcattacggtaagacccctcccattaaggaaggttgacgtgacgacaatctggtttggattacgacatgggtcaattcttttttgggttgctaacaaaaaattacccacaccgtcatcggaaaaggaaaaggactagcggcctgtcacaattgaattatttgacggaaagttttataactcaggtgtgcttgcggaacattttcctttcagcagatccagcagcttaggaatggcactcccacctcttttatgttataaaaagaatcggcttggttgaagtttttcttcctttcattcaggtttgatttgaaaaagaaaaaagttcaacccctcttgggtatgtttgttgaaatgaagcccccttttcacacacccgggtaaaataaggtcgggctaagcatctaaaataaactatatttaataatattattatattttaaaaataaaaaaaattccccggggtaaaaaaaaataaaacacaactaacngggcggtgtgggcgggtgggtgcgcgtncttcaaattaggnnttatatatagggggatatagggaatgggggggtganatataaatggggtgcgtgttatgggtgttaaaaacgcgggtgcggcgcgctttttccattctctcccccctcccccccaccccct

SEQ ID NO: 270144 - DNA, 938 bp, Glycine max
  unsure (1)..(938): unsure at all n locations
cccccttttatacctctaacctcacttttttcttgtatttgccctaataatgtaatgactttncttcccgccctttgttgaaccacatagcgccttagaaactcactattagccatggggcaaaagctctgacttaccaaatgtttttccgaaggagttttgcaattctagaagagaattaactacgaccccaaaaggttttgcaaaaggtggcattccctgaaggcacaggtccccaataaaagggctactgctccgcttaacttttttcttctttttggtgaaatttgaccaccatacgtctttgtaactatgacaattattttttctttcatgcaatatgcctttcctcttcaatggattaaaatttttgaacccgtttggcccttgtggtgtaatataaaagtataatttgccctttgtctttgcaacccctttgtacttgtgggttggatgaaatagggttgtcgcggatggaacactattttgataaccgtacgaaggaagacctttgtttatgaaaaggtaagaccattatggtcttgttaaagagtagaatgatgtggggtcatcttcaagtttgattccaacctaatttataaaaacttcgtcaccctatcttttttctattttgtggagcttctccccttaatggttgggaaggagtgagtttgacttgccccctggtttgaaagtcttgccaacccaatgaggggggggaaggacgcttgaccctgttgaatttctccttcttatgggatgaagaagtaatgtaacctcccctgattgaagttggtagtcacctatatactaactttttttcaaaattttccaaagtttatttttccccattatggtttttttagaatcaaataatattccgcgttctttacttcccaaaaaacctgggtaggataatggcaatactctctctcccg

SEQ ID NO: 270145 - DNA, 1003 bp, Glycine max
  unsure (1)..(1003): unsure at all n locations
tgtgttcgaacntgtcttatnttatttcgacatcttatactgtcatcattattccataacatactgccgagcngtgacaccctttgtaccattggcacccgagaacccagggcacccgaggtcccaactttacccagggttacttgattaaccttaaaacctttagacctggtccttacttgttgaaaccacacacgcctaagtgaaaccctgatatcctttcttaagggattggacttggaatgtttggaaaaagtgggggggtttggttattggacatctgtttgggggattccttatgaggattggggccaactgaggccatggtatggtaaatgtgacccgccgatgaaggtttctcaaagctagagttaaaaaaaaaaactcgaaaaattcaaaaagaaaaaaacccttcattgggataaagcttatggcaggacaaaacctcggctccctctggtaatctatccactcctttttcctatcttgaaaaagcctaatccttcttcctatcttggagtaccctcttctaattcatccgttctggccaaacactaaaacattgactcggcttgattcgggaggaattaatttgcaaaatgggtgtcttcggtgctgggtaaatcccacataaatacgactcgggggtccctactcggagatattctgagggctttctccatgtgctgtattcttgaccctttttattctaccaaataagttggtcctcatacagattcttcttccacatatgagttgcatcctcttcttcccactttcataagttttctcgcttccgtatcatcctccaaccacacncttntattcttaaattattaggtgatccaccttctatcactgatctctttgtctgaccttattatatcaatctattactaatataatattatatattaataaaattataatataaaggagggggggggcggggggggggggggaannatnnatggactggctcccaccccaccctcctaacccg

SEQ ID NO: 270146 - DNA, 943 bp, Glycine max
  unsure (1)..(943): unsure at all n locations
cgcctgcacctaccttgttgcctctggatgactacattgtcgtgtcatgaatttcatagctgtatatatacattaatgttatatcattntnncccncacccgagggtnttgaatgcatcattagggaacttaaatactaactttcttaggttaacagaaatccgcccttattaccccattccttactttggttaaatggcaatccctccatctatttgaaagctttataaccaatatatggatttcttcaaacaaattaggaataagggattttgcccaccacctccttttccaaatggaagtcataatttttggtattaaacctaccaaaatgaaagttctcaatcacttaatatctaaacttctacaatttttcaaaataaatttgcttcagattttttgttatgcacctacaaattgagttcaaccaaacaacttggtataattacaatatgacttatataacgaagcagagctactaatggccatacatagtaccccagttaagggacttatgatgaatttttgtaacttgaaatgatcaaataatgaaccaaatgactttcatacacactaccaacaaatcccccacctaccactctagttacctgtgtgatgatgctgcacacgacgccgatgcgatagagacatgtacaacttcaccatctgtgagtaaatgaacggagtcggcacaccatagacaaactaatgagggcgaacaaactgtgtgaacacaaaggtgaatggtttaatcccaatgtcctttaaccaggtgagggacacccgaaataaccttatttccaaggaaatgtatttgagaatttaaaatgataccagttcttaaccaaaaccttaatcgtaacttttaattaataacccaatggcacatttcggcttttaagacaggtcccaaaaccgcttaaaatggccgtgtaaaaaaaan

SEQ ID NO: 270147 - DNA, 1001 bp, Glycine max
  unsure (1)..(1001): unsure at all n locations
aatttatgatctattgtatgcagtttagatgttctgaggtaangttannttnaagacgaggntttgccntttgatctctcgccccggaccttaagtacggcagctgcagcttgttacggtattgaaaacgaaaccaccttgtttctttattcgccagaccaaaaaaagtaggtttctcacggcccacaactataatcggcgtgagttggtcaatttttgcgaaagaggttaaggaggggacctttttaccaaagcaactgggggggcggtgtttactgacggagcaaaattcccttgtaccaaggcaaggatgcgacccactcccccaaaaatacggcttcggttgcacaatgaaactatgcccatattaatgtagactgtggctcaactgctaaaattctttgaaaaggtgccggttatcaagtggcagaaaacctacttatttgctgatttttttccctctccgtggttaggaaacctataacccgggggtctatgccatcatttacgagggacaaggaccgacagaacccttgttaaacaagctctgggctgattaccctaaaacggcccccttgtgtgcaaacctcttgacccccttcttactttgaggaggagcgggcgtgggctccggacacgcgttccttgtggctctaaccactttgaatggcatgttcgctataacctctcccagctataccgtatgggtgtggtcctcctggtgcgccgctcatccctctatgtctgggcgatcaattctcttaatantggtatnnntntattttattattattattatatattaattatataatataaaaaaaaaaaaggggggganggggngggaggcgcctanaaaaaaatacacccccctaantnnnttatttntagtgtgggggggggtggcgggggtataaataaataaataaccacaaccaccccnattntcttatatactttatttaacatcgctgtgtagcgcggcgccgcggcgccgcgtt

SEQ ID NO: 270148 - DNA, 973 bp, Glycine max
  unsure (1)..(973): unsure at all n locations
cccttccgcccggtatgattcctatctcntcctattgactcatgtggataaatattttcacgcgttcaaatactctccatnnnccnnncccgcccctgtttgattcatagccatatcttagcgaccctatagaaactccaacttggctcaacgttatgcgagacggaaaccacctgttagctatcattgccaagtaccaagaagagtaaggtttagccacggcccacgaccttagaatcgcggatgagtatgcccaagtttacccggaaaaagaggctagaggaagggtgatcgactctttacaccaagaggaaccatgtggatggaccgggttcgcttctaccttgaacgggaataaagaacttccccgttggtagccaagccaagcaatggcagaaacctactccacccccgaagaaattcatgggcttctcggctattgtcagcatatgatagacttaatggcccacataattagaaattcgtagggaaaccttgtttggtctctcagaccttgactagatacgacttccttttttttngaaataaaaatgagttggtcccatgtttctactccaaaaagcttgtgcagatcaaatcactcctacattttatctctaacatgcattggatgttaatctcgtcctttgtcacgggaagccggaaaggcccatattacttcttaattggacacatggggcactgccccccccaatgcccgagtaaaagaaaaaattttcggctctcgtggccgtaaaaggcattatatcatgcatcgcataagcatttctttttaacatcataatgggacctatccgcaattggcccgttatatatttcacacctcacctttgcatgagggattggattatcatgcatatgccgtccaacaaactttttgattctgcacaattgcataccaattggtttaatggtggccacaccttgcgggttccctttaacaaacaaaacg

SEQ ID NO: 270149 - DNA, 1312 bp, Glycine max
  unsure (1)..(1312): unsure at all n locations
tcgaggttctccctantactgatgttaagntatgtgatgccgacgaantgttgtgtatatngntgcttnatttttntntataggcccgcagccanatgtagtcggtcttttganatctattcgcgcacacgagtannctctanagaccacctggcagcgatgcaagctccttgtatgatgatataagaatgtagtgtgattcacagaagttttgatttatgacaatagatggttgtcaaaacagctccacagatatgagttgctcagatgttactcaggaacaagattctcgaatcaagagaagtttgattctccgattcaagaaaagatgaattctcgtcctcaaggaagaaatcaagaagacttctccagggaagtattgataagaatttttaaaaacaaacatagcacagttttgtttgtcaaaagagtttttacaaacttttgtaagataccacagttgttactctctggtaaacgatcactcagtttcatgtgtatcgattactagtggcaaagttggagtttcaaagccgtaacttaattacaatgtccaactgtttccaaatggcgtaccgattacacatattgggatcgattcccgctcatttgaccgtgaatgtaatttattgtgaaacgtcatctttctataagcttgtgtaattattcagattggtatcattccatgacaggttgagaaatcaaaatgacctctcacgtttagttattaaagtataccttcgaggttgtgaccactaaaagtataagcgtcttgttgaatgagagactcaaatacagctacaaactttccgatttaacactgagctgtggatctttctttttctttttcttgaaagctttatgttatgtgtcacatgaacgacgggtactctttcttttttctttcaaacaaacatgtaacctatatatgttgtgtcttacagcaaagaacgcgatattgtcctctcttgagaacacacgatagaatgtttgttctcaaaggaggaaccaatctgtctacaacaacacactatcccgtggtctgtccatntacttcaactctcttgctctaactatatgtctttatcattgttctgttntgcgtctcaacacctctgatgtatcacttgatcgtcctcacttcactcaatgacctctgctcacnnatatanatattatattaatatataaattatataataatatagggggggggggggaggaaaaggagcggcagggcgcncgacacaccnncnactatccttttactctttcatttntagtggtgaggtgccgtgtgtcgacgattcct

SEQ ID NO: 270150 - DNA, 402 bp, Glycine max
ataaaaggttctaaaatctaaaaagttgccccacgtcatcaaaagacacactctacttttatagacctactctgatgcaaagcaacagtttcttactgtaatgctcaacatgaaagccaactagagtggtgtttcaacattaagaagacctgcatgttatgcaagcattaaatgctccaatgaccataattataggttacgtgttttatctatttttggttttattgcttgttgctttgtctagttcaataataccgcttatcctgtaagctaaagagaagaattattatccatttagagacaacggacactttgagaaaaaggcctattaacactaaaagcttgaagacataggttatgaacctaaccgtaacattaaattctttttttaaaagctcttta

SEQ ID NO: 270151 - DNA, 1067 bp, Glycine max
  unsure (1)..(1067): unsure at all n locations
nacgtttgancccctttgtagncattgttgtcatctcgggcccgaggaacctgangcatgcttctttagaatattgcccatcaactacatgtgtctgagggaaataatataaagagaccgcccatctctctttgtcgtgggtaacactgaagagaaaccacatgcatatctttatagatgcaatagatttacactattgggaagccatagaacaatgaccttatgttccctttatattggcccgaattgcaacaatcaaaggaactattacacattggactgttgtggaccgaagattattactcttttttatatgggccaagaatatcattacatctgccctatgaatagatgaatactctagggctacaaattgttgaaatgataacgatatgtgggataccctacaagttacacatgtacgctccactcactgtacaagatctatgatgaacacattaacacgtgattatgagctgttaagatgaatgtaatgaaagtttctaacatgcactgaggtcacaccatagctatctcttgctcttaggaaagatttcaacgaaaccttctaaagtttttagtatataacacgccgcacggactgctccggatctagatagtagatgctttcacttttagaaaagcgatctaacgagtttgttaccactgtaactgcaacagaagattcttatctgttgcacctaaatatagaacatgctggatgtaatatctttgaagtaaattgagcagagcaaacgatggcaaagttattctccttatttttatacggctgcggtcctttagagtattatattcgaaaaaacccccggcatgatcgccaggaaagcgcgcaccagacagaactctnnccttttatatctcgctgtctaacgatgtcttacctcttcctcgctatgtgttcttttgtattatcttgtctacttatactttatttttttatatattatatattaataatttgactccaccccccccccccttctntncttttttnnnttntnntnnnttttttttttgggggggggggggggcgccccctcgcccca

SEQ ID NO: 270152 - DNA, 426 bp, Glycine max
tatatggtgtttacatagtccggtggaataaataaatttatgtgttgtatagattccaaagatggtaataatgggaagttcaaaaaagtttaataacatggctgatattacaaaaatggaacttgtgcgtatggcccaagaatgctaagaaaggccatgggccccacgattgaaaagaaacccactgtgcaaatagcaaaatgcaaatagcaaggtggtgagttccacccaaggaatgccaacaaaggcgaccaatgcaacattttgcccatgggccccattcgtccagagaaagcgaagatgcaaatacgaaatattgataatatatgtagagttcaacggccaatatggaaattgtttacgaaatttaaaaatatataacagttaaaatcacctttaaataatttaaccatcccaattaatttt

SEQ ID NO: 270153 - DNA, 1188 bp, Glycine max
  unsure (1)..(1188): unsure at all n locations
tttggatccatctcgacccgggattctctatagtctacctgcnagcatgcaagcctcaagggctaagatctttatgttgctaccctatctcttacaagggtctaactaggagagaatgacctctctcttagcatatttaaccttgccccaacagtgacaatggctcttcttattgcagcttcagagtgcttgtgcaagtcaaagacaaactgtgagcgaagaggaggagcattatcgattagtcattgataaaactcattatctccttcttgcctcaagaagcacattcaccaattgttgaagtatatcttgggtggacgcaagatctgcaccatacgcatgtgatgggagttatctttcttgtcataatctaaggtggatgcaagatgagagatttcatacatgtctttaaaatataagagcatggcatcattatgatcaaactcagtgctagctttatagtgattgtcttgtagccaccatccttctaaaagacctggctccatcataagaaattggatgcanggaaacattgtctttttggccttgataaagcatatgcctgctatgaagaagaaccctactattcttctttctgagatccataggtggcacctcaatcaatgcgatatgcatgaccctgcagtggtgancatttatgtgaaactaaaagaagcttggcatgatcatcactgcatgctataactcccacattatattcgccctattaagaaactgaggctaagcaaggacactatactagaagatagtgattgcctgtgcaacagagccaaatattaggtgtcatcattgcccatctgcacctccgattctatatcacttctccgcgctagagatatattctctcaccaattaagcggactaggagattccctgggagacatccggtggtaccgagaatattaaaggggagaatanttttatggggccgccccccccgcgcggggggngnncgcnncnccgcggcgctcgccgcctcccactccgtgaatattatctttnntannnttnnnnnnnnntttnttnttttttnnnnttttttttatatctcatatatagtganaatcatcccctctnctnnntctatcttttccattanatctattatgtctctgtccatcgccgcgccgantntcttatgtagcgcgcggggcgcgcccgccgcca

SEQ ID NO: 270154 - DNA, 336 bp, Glycine max
tctacttatgtggcagggcgggcttccttcactttcttgtctccaacgcgagctttgaccactgttcttccttcttgcgatgcttcttttcatgtccgcctgagtgggcttatagcctaaaccatacttcccacgatttccttgggtatttatcaggctagttatgccgccgttgttttttcctaaacccatcccgggttcataaccgttccccaacataactcgggccatcattaccattgcatcggacagacaaggctgcccaaagagggagtccacggaggaaatgctgaccacctcaaaagactggaaagcagtttctaacgattcttctgc

SEQ ID NO: 270155 - DNA, 259 bp, Glycine max
  unsure (1)..(259): unsure at all n locations
atctctactctttacaccaagaagcaaccatgtggatggatcgatctgctcttaccttgaacaggagtcaagaaccttcccgcttgttatccaatgcccaggcgatggcagacacctactccgcccncgaagagattcatgggcttctcggctattgtcaacatatgatagacttaatggcccacataattagaaatcgataagaaacttgtatggtctctcagaccttgactagatacgactttctttttgaaataaa

SEQ ID NO: 270156 - DNA, 362 bp, Glycine max
tgatgtcatccttgaccggctatcttctctcacgcctactcccctttctcccaactcgtgcccaacatacgcatcaccatgtagataccttaacaatagagccacaaaatacagaaattgacctcccaagtgttcgctccgctttcatcaccaccgtggacaccaagaagcacatcaacctcagccccgcaatgaagttatacatgctcaagcatgccaattccacctcattccatcgctgacaaccccatctctcctctctcagtttctctccctctcgttccggcgacggccaaaggatcgttcgcagtcacggtttcccttttcttctctgtcgggctccttcttggagctgccattct

SEQ ID NO: 270157 - DNA, 395 bp, Glycine max
  unsure (1)..(395): unsure at all n locations
gtccggatcttaagtcactgcagctgcagcttnctggctgaccctcaacattcaaaacaaaccccttgcggngaatacagagcctatcttcaatctcctgaagatttgtcctcaacctacaaaatctagagtaagtgggtaaagattccccctcttccaataccactggcgtatgaaggcactcattcaggctgcctgcatctattttgatcaagtgccctcgtactctggcttgcttgggtgcttgctcctctgtggtgtataaattagcataaaactccttcaccacagctacatctatgcttccatcttggagattggcgaggcatttgtgtagattatgcctctccaattccactntaaactcgtcaaactcagtatgataaatctgcaca

SEQ ID NO: 270158 - DNA, 849 bp, Glycine max
  unsure (1)..(849): unsure at all n locations
gcgtttgatcgccatctattaagcgacacttagaaacttcagcctgtgccaaagggaaaccaggggaaaaggtttttattacccaaaaaatccggttggacttctaagcccctaaaacctatttggttccacttgaactaccttcctttcttgacaccaatattgtttggtccttaaagaccaattccccccatggaccttggtcaaggtccttacctacaaaggagaatcttttgataccctttattaaatctggtaaaagaactcaaacgaaaaaaaatatttggatctttttaatcaaaaatgatcatgggggaaaatttgaaaacgatcttttttgaaaattatgtgaagaaaatggcattcaccattattttttcactcccagaacaccccaagaaaatggattttgtgaaaggaaaaatagatctttttaggaaatggccagaacaatgcttaatgaccacttaactttccaacactcttgggcttgagcagtaaacattgcttgttattcacagaacacaatttatattaaggccattcttaaagaaagctccctatgaatgtggaaaggatgtagcccaatatttcttacttccacccatngggatggcagggttcatcttaagcaccaagataccttggaaagttgacttcaatgtgatctggaatctacctgatacttgaatcatccanggctttaagcgtcaattcttaccttaactttgaagaggaatttattaattttatggcacaagcctaccctatatgtcaggctagataatttttgcaacttaaaattaaacatcgaaaatccctactgcgtccggcagaacatgtggttaa

SEQ ID NO: 270159 - DNA, 1169 bp, Glycine max
  unsure (1)..(1169): unsure at all n locations
gaacaagcttgtacgcacatcgttcgcgtgtatgatatccactccacaaggtttgaagtagaggagagcttccaccctataacgcaacgtggcggacaaaagtgggcagtaaacttgaatgatcctcatttgcaatgccgaagggattctgcgcttcactatccatgttcacatattattgcagcttgtggttacgtgagcatgaactactaccaatatatagatgttgttatacaaacgagcacatcttaaaagcttactccgcacaatggtggcctcttgggaatgaagcggctattccctcttctgatgacgcatggacacttatccctgacccaaccacaattcgtgcgaaaggtctgcccaaatcaacaacggatagaaatgagatggatggggtcgaaccatctgagcaccgaaccaaatgcagtatatgtggagccgatgggcatacaagcgtccttgtcaatgcaatctgagcgtgggagttgttcaaatccttgattatgtattgtagtcgagtgacttgtatttgttccgctctattcattgtattgatntttggggtcaatgaatcanantcaaaacattttgcttttgtacattactatctgggattaatgattccgtagtaaacctaacataaccttatcttaacactcanttgacctcgacnctaacgtaaacctacactaatctagtggttgccgactaaatatctatgatattacctaacctactactaaacctgcctagctatctagctaactagggaagtgttaaacctacttccttaccaagcctattaataactaccggacccctatctgtgttatacccacccaacactagctactactataactactgcatctacactacctattactcacagaactaagtngtggcnnnnngtgttttttatctttttattgttgtatattgggcgcgctccatacacacctacataactattgtgtgttggtnggtagaattcgntgattntatantatngatgngtttnnnntttcttcnntnccnccatccacacatacatactaattagtnntnatctactcatgcggcggcggggggggggggggnnnngnnnnnnnnnnnnnnnggggggggggnngatccccccccgccccccccccccccccccccca

SEQ ID NO: 270160 - DNA, 470 bp, Glycine max
tatcattgggggtttaactttatcattttgtcaatgttggattaaattttagcttatatattgctaatttcagcttataagtgaaaatgaagctactttagctcctatatataaccattgattaatagcaatatggcactttgagcaagatttactctctataagttttcatatcaagagtcaaatgctattgaaatggataaatgcacaatataattggtgtgtatcaaccctaacacaacaacactaccacaaaaacacacaccctatgatccacaatttgaaacgaagggaaaaagtcatgaaaagtgaaaaagaagagaacctagctgatgtaagctccattggagcttgtaggcctaggatcttcttcatcaatggattcctttgcttcttggaagatgaatggcagcggaatggagaaggaagagggagaggaaacgccacttcaaggagaagatgagtctaga

SEQ ID NO: 270161 - DNA, 372 bp, Glycine max
  unsure (1)..(372): unsure at all n locations
agagaaaatggttattaaacacacaaaatggaagtactaagtatttattacctatacttaacagaaaatacttataacactacaaaataaccataaattggaagagtttgatacaatttatacaagttttatacacaaaagttagtcgtattcatcgactaacaaagttgtgttgtaagtctttggtacccgagatgatgtttngctatgggctcgaacgggtgcccatgaaaacggatttgttgtaatcattatgaggtctgacacacatactggtagtagaggaagaacttcatttgtgttaattgggtgtgaaaggagtggtcagtataagtgtaagaagaaagaatttgttagaagagacactgggag

SEQ ID NO: 270162 - DNA, 567 bp, Glycine max
  unsure (1)..(567): unsure at all n locations
tctccaaagaacacagtatcatcagcatactgcagaacatccacaggaaccttgttcttccccaccaggaggcttctgaatcagttttgagatactgcttccctcattagccctgtcagtccttcagccactaagtcaaagagtaatggagccaaagggtctcgttgtctcaaccctcatgatacacacacacacacatatacccaactacaataataaagcataagcacccttgaaacccagcatttgaaattagttacataaaaaactgctgatgtctatatttgtctgtaattgaatttgaccttttgtatgttcttgtatgtgatcagtgtaatttgctatataaacaactgttgttcatggtgagtgaaccttaaatttcccgttgagactgaatgcaatgattcttgcggacaatttgcattagtcattgtatttagtcttgaaattgtccgtttggacagttttgngaagactggtatttttatgttacattcattcgtgatggttattattattttcattaatttgaataaatttcggtcaatgcatttcaagttggtc

SEQ ID NO: 270163 - DNA, 452 bp, Glycine max
  unsure (1)..(452): unsure at all n locations
agcttaaataatataaaatagttacgagaaaaacttggtcaagacgaatttgaattattgaaaatatgaacttgctcactcagcaaacaatgtagacgaatttaaaattcctttgaaagtaaaatatttgattaaaaaactatatataaattaaggaacttagtttgacatatatttttaaaaagaaaaatagtttgacatgattttttaaaagtaataatagagaaaacttgatatagtaaagaaaagaaatgggacatcattattaggactttatctntattaaatattattaatattggctctagtttgattagaaaaaaaaatgaataattaatattggcttacttgtgaacttttatacaacgaaatatgtagatgaaaaactatcttctattgtctagaacgaacaacaaaattatattntatctacacaaaaataatagaaatac

SEQ ID NO: 270164 - DNA, 618 bp, Glycine max
tctctaagtgggaacattttttatctctgcaatttagtattgatttcatttttttcctataaaaaaattatttttgtccttgtaaaatgtgactattttttttctacttaaaggattttaaatagtgcttttaacagtgaaaaaaatactttgaataataaaaaaagttctatctaaaacactttacagacaaaaaatctggatctgattttgtaaacactagaatgaaaaaaaaaaaattataggaacgaaaatgaaaaaaaatattaaattacataaattaaaaatatatttaagtccaacaaaaataaagtgtaaatatagaggtgtatttaatttatgaaaaataaaattgaaatagaaatgagaaagcaacatcatctattattggagattttaaaacatccccctccaccaaccctaaatgatatcttgttatatttttccggggttttgaactcccgtaaaaccaaacagcataggcaaatacgtaagttgcaagaaacattcaaccactatctttgattcttatcagaagatcgatctaattaaaatggggtttgatctttttatggtccaaccctaaatggtattatataaatattttttataaaaatt

SEQ ID NO: 270165 - DNA, 292 bp, Glycine max
  unsure (1)..(292): unsure at all n locations
agctnntcaattttcttttaactttttacactaaagagatatcatatgacatgtttgaagaagaacatgataaggcatatcctcttcatcatctgatgaggcacaagaagagtatcatatttacctcgaccctatcatctatatatgccatgagacatatggtggcttgttcatcgcctgaactgctactcttctcactatttcagccatccaaagaaaccattagacatttcttcttcttggtcccataatatatcatcttctgtagctgaggacattcagtcttcatatg

SEQ ID NO: 270166 - DNA, 538 bp, Glycine max
tgaggaagaataataatacaaccattgggagccattcctcttccacttattcattctcattccttttcccttcatattttacaccctttttgtatagttaagcccttcatggcaatgaagggctaaacaatccattgttgaggagctttccaccaaactctcttgatgtaattactctcactatctatttaatattattattagtttcattgtctctttccatgcttatttctatgtatttggtttgatcacccatttatatgctatgttagggtttaggtattggaaaatgtggttaatccttagaattggaaagaacatctaaaatgcttcattgctagggataatgtgaggtggtttatcctgtgtatacatatctattggtcatgtagttcaactagtttagttcttgagggattaagaaaggaactaggggaattaggctctctcacgtgaggaatcacggctagagtacttaataaatgtaagtgataactagagtactattaaatacagaaaaattaattatcttacgtca

SEQ ID NO: 270167 - DNA, 220 bp, Glycine max
  unsure (1)..(220): unsure at all n locations
ttatctctttctaattaaatagatattaattgtaataatgaaataaatatttcacaattgatgaccacttagaaaggttgtatatgattgtcattttcttataaataatatattaatagnggcatgaaccaactatttccaaaacttaaactattaggtgatgggtgctggtacatattggttttttatattaacacacttaatcacattagcgctcttt

SEQ ID NO: 270168 - DNA, 485 bp, Glycine max
  unsure (1)..(485): unsure at all n locations
ttgaaaatagagtgagattgaaaacatatattatggacaaaaacttagagaataattattggagttgctttaaaacttgctcttttaggcttcaattttcttaaattaataatatataaacattcttatatactattttggtggtccttattataaagtccaattaactaattatcaaaattaagaaaattggtgaatttaattgaaggcattaaagacatttttgtgaaaaaaataatacaaaggacattttaggttgaaccttataatacaggatcaagtgacacttgtaatgtggatattataataagcattagatggagtaccatattaacacccataatttttctttcactctttttctatcatgtaatatcaattaccatacttggatttctttctcttctctctttatgggncaattaatgttcaatgaaatgttttttcatttcttaactcaaattgaaaataaaaatatttatttt

SEQ ID NO: 270169 - DNA, 1084 bp, Glycine max
  unsure (1)..(1084): unsure at all n locations
attccttattttcagaagggaattctatcaatagacctcccatctttaatggagagggttaccactactggaaaacccgaatgcaaatttttatcgaggcaatagatctaaatatctgggaagccatagaaataaggccttatatacccaccacagtagaaagaagttcaatagatggtaggtcatcaagtgaaagcataaccatagaaaaacctagagatagatggtctgaagaggatagaanacgagtacaatacaacctaaaagcccaaaacataataacatctgccctatgaatggatgaatatttcagaagttcaaattgcaagagtgctaaagaaatgtgggacactcttcgattaacacatgaaggaactacagatgttaaaagatctatggataatgcactaactcatgagtatgaatatttagaatgaatacaaatgaaaatattcagagtatgccaaagagaattacacatatagtaaatcatctagccagcttatggcaagaaaattcaaatgaagatcttataacanggtgctagatgttaagtagagatggcacccaagtaccgtattctgatcagagatngctacatgttctgccttattggtagtgccgacacaatgactatggatgtcaaatgagaaatgcagaaagaaggatgtctaagctctctcttcacagaaggaccgtatgtccagagagtatcatgtttttaaggtcacatctagtaagatcagcgcatttataagaagcaaattcctctcaagtgagacacgcatggtgtgccttcaaaagaattgaaattgaaacaaccttcgaaagtgtctgttaaaaattctgaccaggagattaatttgtataatattttggggggnntggcgggtgcgggggaagataaacaaataaacaaataataccnngccctctccgcgcgcggcggtggcgcgggtcttgtttgtgtgatgataacatacttctatattttttanaggggggggagggatgggtagtaaagatatagagagngnnnnntggggggggggggggcgcgcggccccccactcgccccgccgct

SEQ ID NO: 270170 - DNA, 415 bp, Glycine max
tatgactcagtttcttggggattcctaaactatatgatgatgaggatgggattttgtgaaagatggagaaaatggatccatggatgcctttctagtgcaactatatcaattttgatcaatagcagcactactagagaatttgtgcctgagaggggactgaggcaaggagatccccttgcacctttcctatttaatatagcagctgagggactcactggtttgatgaggacagctgtctccaaaaacattttcagcagctataaagtgaggaggcaaaatgaggagattaacatcttgcagtatgcagatgatacactgttttttggaactgcaactacagctaatgttagagtcatgaaatctatcctcaaaattttcgagttggtttcatgactcaagattaactatgctaaaa

SEQ ID NO: 270171 - DNA, 326 bp, Glycine max
  unsure (1)..(326): unsure at all n locations
tgcttgatattgagtggtgtagccactctagaactgcctgcaccttagtagcattcataacaacctcttcacctgaaactatatgtcccaagtactctatcttcaatacaccaaaagagcatttaaaccacttatcaaacaaaacattttctttcaatactttgaatacaacctctagatggcataagtgttcatgccatgtggaactatataccaatatatcatcaaaaaacactaacacatatttccttaaagcatgtnggaaaatatggttcatcaaacactgaaaagaagtcgaagcattggttaaaccaaatggcattatt

SEQ ID NO: 270172 - DNA, 353 bp, Glycine max
  unsure (1)..(353): unsure at all n locations
ntacttctacatgcatgaattgatagcaacaaatacagagtaattggtgaagaggaaaaactgagcagaatttaatagtaataatagaacctcaaagagagttgtgcttgatcctcaagagaaaacaacactggagacttagccttccattaatcattagagaacgaaattttattgctaaaacgaaaagtaacaactggaattgcaaaacgaaaaagtgtctaaaagaagaagagaagcctaaaactaaaaacgaaagagcagagagaggaaaggagagagagaagagcctaaactaaaaccttggtgttattatatattttcagccccaaagcttacaaatctgttttaag

SEQ ID NO: 270173 - DNA, 972 bp, Glycine max
  unsure (1)..(972): unsure at all n locations
tcgcgtttgcccttgtactttgacccggaaccaagggccgccggttgcaccttatgaattggtctgttttacagtttttctatttaattagactgttccccaccaatctgcaacaatagaaaacctcctatataattttattaatatactttctgaaggccttggggtatgatcaccctgaaccatattattgtacagtaaccaggaacagtgttcccaacagaaggcactatagataatttcatgattcacacgcgccttggctgaataactattataggcaactggtcctggtccaaatcaataaactgtggtacgccagtgcactattgttacacgccgaagacacgacggttcttgagtatattttaccaccgaactagattcccttaaaaaacgttgttgcatgtgtgtatttaaacaaccctgggtgtgggggctctgacgactaccaagagacccacacgtaatctcgacgtgattgtgtggatcatcattcatacaccctgtattattgtttgttggcatactttctaactacttttttttgcacttaggtgattcagacttggagggaccatcccccttatgtgctgtgtgttgatttacataagagacgacatcctttataaaatctctgttcacacgttatgttgggattaacaacttctatgtatctcttctttggttttgtgggccgcatctttaatgaagaactctctctggcanagaattctttttatcctaatattatttatctattatcccacccantnnnnganagaataanattatctgtattgtcatcgcgtcgtngtttggtntttgaagaataacaaacttttaanataattaaattatttaattatataataaaaanccnntttanataaaataaaaaaccccccctctctccttacaaacnnanttgntttctttgggtgggttttctactgtcgcgttcaactgtta

SEQ ID NO: 270174 - DNA, 779 bp, Glycine max
tgtcacccaccgaaactacttgtcacgcaaagcctataaggggatgagtctctattgatagcactccaatgtccaaggttgacaacccttacaattttgacccactgaaatttctaagaatactacatatctaacgcacaaagtcccatctctataatgtatacgaggtgacgcacacgatgaaggaccaaccacggatgtactgtgatacagggtgcctctccgttccaactcacacaaaaatatcatcattataaacgacttctggtttgcctatcaaatacattaagacatgatccataagcctcgtatgatttgacggagccttttttacctcgataggcaatactatccattcttgctaactcaacctgggcctcgatgctgtaatcacctgtcacccccttttcatgcttactagtgatgaccacttttagaaccaatttgaaaagaaattggcctcccccacgtaatactctttcactcctcttgggaaaagtgttcttttacacaacctaatgtgtttaacgccctgcatggggcaaatattcttgtccttcttcctgggcccccccaccttataaacacaaggttttcctcctttgaaacagcctttttaacatattctttttcccaatctgttatttttatttggggtcatccttagcctgaaatacaaaagaagggtttggttttaaaaataggtggaacagcccaaggggagacctcaccgttcttttttggaattttccccagccactttttaatgagaccccccg

SEQ ID NO: 270175 - DNA, 745 bp, Glycine max
  unsure (1)..(745): unsure at all n locations
gcgttgccctttacttgtccctgacccgaaccacaggacgagctgcactcctgaagactaatcctgccccttttgtaagattgcaatttgacctgactaatatttctcaaacccggtaatctagaagctttttaaggaataccctattgggatggactatgggtgcgaaagaattactttcctccacaacattgttgtaaaaaaaaaaagagaagttctgtgacatgcaaaaaagaaggaagtatggcagccatgttaaaacatggaagtagattggccctaaacacctgatctaaacatgtttgacaactctcacgaaagctcattgttctttactacgcgataataagagacttgatgctatatatacctgctataaatgcgaacagtacattctgatgcagcacctcaagcagcttattttcgatctcttaaacaggactatctatttttcaaactgtgcctgctccttttgatggagatgttttttgcacctatggtggcgaaatatttactgggcactatgtttctatattaaaaaaactttgtatttttctagagagctccttctgttacccctcttanaannnnnnncgaaaaaaaaataaaaatatgatttgcaggtaacnnanntactttcctcctgcctccttctattttcttctcctcttctantctccttatttctcctatgtaccggcnnnntccnttccctcttaccttttttctacattctcatgctgcc

SEQ ID NO: 270176 - DNA, 492 bp, Glycine max
  unsure (1)..(492): unsure at all n locations
ttcataagtgaaatcaggtgcagccatctccctaagagtcctctcatgacgtggaggttgagccatgttctcagtatggaaattagtagttgaatgctcaaaatcagaatattcagaatcaccagcaacagaatactcaaaatgcacagaatgaccaggatgcacactatgcctaactaatctatgaaaggttctatctatttcaggatcaaagggttgtatatcacctggattgcccctagtcatgcactatatgcagcaaataatgtgttctcaaacaagcattatgggagggttaaaactacaacaatagtcaaacgatatcaaaatgagctgaaattttgtgagcaacaccctaaaatcatgacaagatagcacaaaaatttttagacaaaaattcaaagtttaactangaaaactgcctaaggtaagtttagaaaataagacaatatacttaaaaaacaaaaaaaacctagtgaacggatgattttt

SEQ ID NO: 270177 - DNA, 1007 bp, Glycine max
  unsure (1)..(1007): unsure at all n locations
taaaacattgttgcacgcgtttctggcccgttcactgttgttgtacaagctagtcttgaacatcaactcttcgaaggatggttatattgatagaatgcaaatctattttgtgactgatgccatagtcacatatttatagccatttgacggctgtctgagaaaccatgttaaaagacgtgtctcttggcagtttcttcgccactactcactttaaaaaatgtgactcttggcgctttatatttgcaaaatggcactgataattgattaccatngtagcgtgatcgattacacatangcaggtatgactcttcatgtgtagattggaacaccaacatttcgaactactggtgatcggatacatatgtggcgtagcctgatacgcaagtatggaagaatactatcactcgttgcggtgcgactcttgaattgtgcactggacgtacaaaaacttcggnatcgagtcttgctcgtggaatgcttactctttgtgagccctatatagaatgcggctctgatgcaattcttgcttcgtattgataccaagacaaanatctgtcaacatctctctggatactgtgcgatgtctttaacttgagaacgttgactatctatgtctggttgtagctgtatggagctgattggttgtcgagccttgcctagaagcaaacttctacaagtttattttggggatggtttcctgttttgataaattaggtggactttcggggaagggactcttgggttccctagaaaattttaaaggactcgcttgccaatcctttgtaaagttcttttacggggggcntttnnnntcnnnnnnntattggttgggcttatgatgttttgagtgttgtaggtcnnctttgnttgnnncnnnnnatttcgncgacacttctcctctttcattctcccttcccccctcttnngagttnntngtaagttgtgtagattctatatggtagtgnnnnnntnntnnnnnttnnngtgggtgcgcgggcgcggggggt

SEQ ID NO: 270178 - DNA, 331 bp, Glycine max
tgttatccaaagcaattcttggtggtgacactacatcgtccttggcttactccctaagggacggcgcctcccctctactaattagctctgccttccgttgaatcttcatggtgcaaaaacaccattgaaggacctcactgaggctcgaagatacaccctcgctataagctccacgagcaagcattcatcacttgcaaactgtacttgccaactatccatgttcaagacaatttggcatgttattatgactgtagactaacgtaccaaatgccaacttaccatacgacgatggggcggagcctatcccatttacatactaccataatgattc

SEQ ID NO: 270179 - DNA, 433 bp, Glycine max
  unsure (1)..(433): unsure at all n locations
tagaaactgctggtaatcgattaccatatatgtgtaatcgattacacagtgcaaattttgaattcaaattttaataactgttgtaaatcaggtttggccactggtaatcaattacatcctctggtaatcgattaccagagagtaaatttcttgtaaaagactttttaacttaaatttcttggccaaaccttttgctactataattggaattcccctcctatataatataccttttctaagactagagacatgtcttgatcatccatcttgaatatctttaatttctttgtcttgaataaagctttgagacgcatgtgaacctttggcatcatcaaaacattcagcttgatcctttgtctacaatctcccnctttttgatgatgacnatcccttgaatcaagacaagctatatacaagatgatagcacgttcac

SEQ ID NO: 270180 - DNA, 316 bp, Glycine max
tgagatgttataaatgattacatgataacacaatatgttataaacaaggcaaataaaaataaaatgaaggcttaaaagaaacttgaacttaccgaaatctagagctgattgacctcagggtcgatgtagccaagatgggtttcacgatctcccacgtcggactacatgtaccctttactaggagaacacaagagaggatctacaaaacaaaggactccgacgctcaagtaagcgtgtgagtgagttgagaataaatcaaaaagggagatagaacctgatatttatagcgttgaatgaaaagcctcaatccttgatg

SEQ ID NO: 270181 - DNA, 386 bp, Glycine max
attttatagttcaagacaagcaaaatgaaacaataactcaactactttgaccactccaacataactactgccattgaacaagatacttcatgtttagaattctgcattttatataatcaacatatgaaagatggagaaaatattgtaatttcatgactttaaccccacttgtggggattgatgtacgtggtgattgagttatttgttggattattgctttcatttaagaccgtgctacccatcatcacaagtacaaatgtttgttaccaattaatgtttttattacttgttcactgccattaaagacaactgatatttgatatacaaattatgttcatgatgagagagacctacattcccatttgagaatgaatgcgatgattctt

SEQ ID NO: 270182 - DNA, 370 bp, Glycine max
tagacatagaaggagagagcctgagcaaaataaggctcgcgttctaatatttttaaatgtaagcccaacatcggttttcaataaaaaaaaaaaactgatgttaatcaaatgatgttaacattaacatcggttttctggaagaaaccaatgttaacttatcatatgttaacatcggtcttctgaaaaaccgatgttaatgaactaaagttaacatcggttcttgaaaaaccaatgttaacgaagtaatattaacattgggttttcaagaaccaatgttaatgtctgttcgtttacatcgggttttcagaagaccaatgttaataaactcacattatttacaattgtgccaccaggtttatgttgacatcgg

SEQ ID NO: 270183 - DNA, 275 bp, Glycine max
cttcatttaactgtctcttgcgctggcagccacactcaacaaagtactttcgacacctactgtacgttgatttgaccaatgctgttatgggaatgttgcgacaatccttcaaaaccttgttgattcattttgagaggttggttgtcatgtggccatatcgacgtccttttctatcataaaccatcgtccatttttcctttgaaatgcgatcaatccatgttgctatggctggactcagttcacgaaatttttctaaattttgatcaaaaatgtgc

SEQ ID NO: 270184 - DNA, 594 bp, Glycine max
tatctaaaagtaatgcttaaaaaataaaattagatgaaaaaaaatatttttttaaaaaaattcaaattaacttatgcacaaactttcttagtttttagagaaattatatgagagtttctacaaattaacttacgcataattaattttagtttatagaaaaactcatttcatagtttttttaaaaaattgtctttaaaatgtttttatattagcttattcaaacatatattaacttcgataatagaagacacacacaactacaaaaaccttcaataaaagttattaccaaaataatgtaacaaatacaaaaggttagcaaatacaaaaatgttgtcaaatacaagacataaacatcatctatgaatgatttgtgcaccgtcttcgttgcgccctaacataatcattttcatctgaagtgacaccccttgcgatcctaaggcagtcttccatgatgtcatgtaactctgtgcctgcggtgaccatccttatgttgagcacacgctccaacctttgtgcgatcgctttacaagcatgctgtgacattcaaaaaaaaattattacaacatttacaataaataacattctaaaaaacat

SEQ ID NO: 270185 - DNA, 268 bp, Glycine max
  unsure (1)..(268): unsure at all n locations
attctaacagttattatcatcaattattatcatattggaatattttgtattcatattccacactttttgtagatcactttagttggaaaggaggaactttctcgaccaattgtttgatctgacttggtctaactttttctcaaaacttaacatgcattcttgtttgctagaggcttntttttnttttttacttttttaccaaagtgggattttaaacaaaaactacctaccaaattagtgttgcatgaaaaagtattacaaaccttgg

SEQ ID NO: 270186 - DNA, 482 bp, Glycine max
tgtctgctttagccctctcctccacaaaggtaaatcaagctttatgaccaacaaattatatacttatctgattgagcatataatccaagtgttggttgcttcttcgatgttagctctcacctatgttagatgccatttagttttgattttatttggatggagagaacagtgattaactatagcaattttttcagggtgctattggtcatctcctaagcgctgctggagctgttgaaacaatttttgcagttttggcaatacggcatgtaagcagtttttatttatttattttgcccacttgcatcaacttgtaaggaagcattttttcacatgctactatagcttttgtgattagtctaagagccaggccctgtatgcttaatataataaaatggtttttgtgatgcttgttgtaacaagatattgctccattaactcttaatttaattaagccagatcttgtgtttggtgatggtttcatg

SEQ ID NO: 270187 - DNA, 233 bp, Glycine max
agaagtgagggaagtgaagagccttgttcctatgatctacctcggctttaccttctctgcttacgggttactagtggccacagggaacgttttctttcttacacaagccagcggcagcatggaatcaaatatcactaccaatggtaatgatatcggtattctttttttgatcaaggagggcgtgaaacttatctcaccattcatcttctttattatcaatttcccatttcgat

SEQ ID NO: 270188 - DNA, 574 bp, Glycine max
tgtatgatggttttgattcatgtcggtcatcatcgcctggttttttaagatccaaatttcatgaatctataagtaccacgatattggtggtagttctaaagtctacaagcttctatgttgagcaaggtggtcaggtaccaaaccttatacataacttatacatgttatttttcattatagtaattatagcattaaacatttttgtgttatttataatagaattgtacactcaaagtaaaagtgattctatctatctatccatccatttatatataatctgattttgaaaaataacactttctaagacgtttctttaaaaaaacgtttatgaaagtgaactctctaagatggttcttcagaaaaccgctttagaaagtctactttctaagataattttttcagaagaaccctttataagacgtttctttagaaaatcatgttttagaaaactggcttagaaagtagagtttcttagatgggtttttcataaaactatcttagtaagactactttctaatcaagtttttggaaaactatttagaaatgccaattttttaacattttaaacaaaaaa

SEQ ID NO: 270189 - DNA, 537 bp, Glycine max
  unsure (1)..(537): unsure at all n locations
gaattctatgtactaaccatgtcagttctttctctcntttcagcaagaaattgaagggaaagaagattatatgttaaagaaacagatattgaaaaaacttattgtagctctataaagaagaccaaaatatatgatagtgaaaatctcactaacgaaaaaaaaaaagggttaaaataaaaaaggaaagataaagtgcanatggaaacaaatattttcaaattgaaaagagtaatgactaatgagtaatgtgtatgattatggacaccgccgtaggatttttcaattggatgtacgcgggacccacaggcaaatgggaattataaaacgcggcgctccaggctgcccctcatgtgcattttgctcaaatctttgattatattttatttaacaaatttggatgataatatgggatttgatgataatatagatttggacgactattatgataaatatattttttatatttatctattntatattcatttgatctatactcttcgccttaatgaccttcactaatatgtataaataatagta

SEQ ID NO: 270190 - DNA, 500 bp, Glycine max
  unsure (1)..(500): unsure at all n locations
ctgtccctgaaaccctctatgtaaatttgacagcctcatgtctcccttcctgaaaacccactaaaaactgcctaaccccccttgttgttactccataatttattctgcaataacttcttaaggcagttacatatggtcctaaatcactacacattcagttacgattaaccctttgtgcctaactagggtttcgaaacatcacaacagagacaaaccattgaacaatggattttcatcattaacatacaacagagacataccttcgatggaagcgcatacacaaactccacaaacgcgaactcgacaatgtggttgcagtcacggaagcgcagcccagtttgcgacaaacacgaactcaggcagaaggagaaacaacaataaagccctgngttaaaacgacgaacgcctaatgttaaaacgaaaggacgtacctcaatggataagtgccaaagacgatctccacaatgtggttgcagtcacggaagcgcangcaactttta

SEQ ID NO: 270191 - DNA, 253 bp, Glycine max
  unsure (1)..(253): unsure at all n locations
tctaatgacaatagcatcacttctggcactaaattgatgggagtttgaaaccatcttctcaattaaatttctggcttcaacaggggtcatgtcttcaaaggctctaccactggcagcatctatcatacttctctccatggtactgagtccttcataaaaataatggaagagaagctgctcanaaatctggtggtgaggacaattggcacatagtttcttaaatctcttccagtattcatataagctctctcca

SEQ ID NO: 270192 - DNA, 495 bp, Glycine max
tagatagaaacattgaacccatgaaaataacctcaaatagataataaaaatatttacatcaagtactcagtagaaattcccaacaaaggattttaaccctccattacaagggagcagctttcacaaataggaaagggttttagagaaaataccagattacatagcagtggggatgtctcctccacctctaagaacctaaaaaataactctaaaacctagaatctacctaaaacgtaggacctttgcttccttgctcagcttttcctctgttctctacacacaatttgcagtcaattcatacctctttcatatcgtcatgccctctctttttttttctgtgcaaatcacgcttaaaaaggggtttctgaccttgaaggcacgcttagcgccattctcgcacttaacacgggtaagtgatattttgcttagtgccaatcttgcgcttagcgcagaagagacaattacctcgcttaatgagctgcatacacactaaac

SEQ ID NO: 270193 - DNA, 445 bp, Glycine max
  unsure (1)..(445): unsure at all n locations
gcttggagaggatgcttcaatggaggaaaagaaagagagaagggggccacacgacaatgaaggaataaaagagggagagaagtggaactttgaagtgtgtctcataagactttcattcatcaaagttacaacaagtgttacacatgcttttatttatagactaggtagcttccttgagaagctttggtgagaaaacttccttgagaagcttctttgagaaaacttccttgagaagctagagcctctacacacacccctctcataactaagctcaccttcttgagaagcttccttaagaagattcctaaagaagctagagcttatctacacacacatctctaatatgctaagctcacctcttgagatgagaagctagagcttatctacacccnccctataatagctaagttcacccccatgacgaaatacatgaaaatacaacaaa

SEQ ID NO: 270194 - DNA, 254 bp, Glycine max
attaattaatgtgaaaaaataatagaaatctagaaaacatttgtttgaaattgattgcgccatgaattaaatacgggaataatgaaaaagttgttagttaagattacacaaagccttggaatttaatattcttacacaaaaagccttggaatttaatatccttacacaaaaagccttggcattcaatattctaacacaaaaaaatattttttttttcttgggtacaaatatacatttcttaatttttaataaaa

SEQ ID NO: 270195 - DNA, 290 bp, Glycine max
  unsure (1)..(290): unsure at all n locations
gaatttacctatcaatcatataatctatctttcgatatcttctttcatctctttccacactttcaatagatccttctgagctatctctcttcctccttctaaaagttgttgttccaacactttctcttccaaagaaagctctttgctcaaaaacctgcgctattcatatnttttattctcttctccctttgcccaaagaatagaaagactaaccgcctgaattcttttgtgtctccgttctgtcttacaaaagattcaaaggactaaccgcctgagaatcttttgatttt

SEQ ID NO: 270196 - DNA, 385 bp, Glycine max
ctcaagaattattttgatgatgcccaggaatttcacagatcattcaagatgaatttcaaggatgaagaaagcaagatgtcaagcaaagcaaagatctccagataagaattaagatagactcttagaaaagtttttgaaaagcacaaatgattggccaagtgagtttctatcttaacaaaaacttttccaagcattttactctctggtaatcgattaccagaggttgtaatcaattaccagtggccacaaagctttctagaaatgtgttcaaaggtattttcaaagttttcaaagctataatcgattaccaaaactatgtaatcgattaccaatgctttaaaatggttaaaaatgattttgtaactggtgaatcgattacacatta

SEQ ID NO: 270197 - DNA, 1141 bp, Glycine max
  unsure (1)..(1141): unsure at all n locations
gccgcgtttgaccttggtccctcgcccgcgacctgagagaacgcagccgccacctgaaccttaagagacagaatctgaattcattccaagaatgggtgggtttcaagaagtccacgaatggaacccacccagagcttctcccttcttcgtgaacattaccaacttccacctgtgctccttccttacagcgcggcgaccggagatatactttctatcttttgtcaccacgctataggaacatcacaccgaaatgggtttttcaatcctccccattggctctgtgagaaagcctcattcttcgtcgactactggtgaagtcgcagggagaattttctccatgccaccgccacccttgtatcatcctgattacactatgtgatcactgatgaagaagatagaagaaaacagagcccatcacccacaacagagaagtaatcactaagactcttgactgctatagaagaactcagaacagagaattacaactgacaaaggttaactgagtcccattcaggtgaactttgtcccaactctaactgagcgcgaatcatgtagtcccacatcccactatgccaaaaagtcttaccatccgtagacgcctatgtatagactctttactagcaaaataagtagtattctatactgcaggcctctacctcactttgtatanagggaggaatttctgacctataaactctcccacaagacacttgtctcaggaagtgagaaacctaaattatagcgctccagatttcacccggatggtcctgaccacttccttcccaactcttctgaaataacgggaccagtcttttaatagagangggagggaagtgtgttctcaacataaaggaattgagcaccatttcccacttcattagcgaaaggatgctgttcaaatgtgtgtgaacctccnnnnncaaatccttctcgctcacgttctcttagacctcctctccgccggtncgtngttctcgacgntaatacctcgtctcctttttctgtcttcgcctgttcgcacgtcctacatacttttttannnatcataatcttattaatacgatcttgactgcnnnnnnnacttnnntgatnnatctctctntctttagtccgtctctccacggccacctacgtcatatct

SEQ ID NO: 270198 - DNA, 325 bp, Glycine max
ttttcttcctttagtgcccttaattgaatacaccattgtttggatctctatttgggtcttaaccctctcatgcaacttctttacaaactttgaactaaattccccttttttatgtataaaagaagtgtcaagtgggaggggaatgaggtctaatggagttaaaggattgaacccatatacaaccttcaaaagggattgcttgggggctctatgaacccccctgttgtatgcaaattctacatgaggaagatactcatcccaacacttattgttggcttttagaagagccctttaaagggtggataaaaacctattcactacctct

SEQ ID NO: 270199 - DNA, 1154 bp, Glycine max
  unsure (1)..(1154): unsure at all n locations
gccacgcggttgaacctcttganacctgtnaccatctgcgaacncggggaacncanagttgacctgcagcgtgccagcttcaaaaacaaattgtgtgtttggcacatatgtccttcccgtgcgtgataataagcactaaccaaacctaacactcaatctccaaaaaagaggcggcgaatttcttattattgatattattggaccggctctcctatattgctctcttgcgataacaaaagacatagtcggaatcgcattacttagttaataatcataatccgccatttaaatatcgattcacccataggagaaacgtgagtcgaatctctgcaagttattaactttatagcccaccaccccctataagcgtcgacctgttccttcatgaatcaagatacaccattgactcgcctcgtacatacaaaacattataatattatggtagtcaaggcctgctcgtgaatacctgaaatgatatgatatggtttgtacgcactcaccgtggcacttatcgttctatatatgatatgttgagactatgattcctcatatagcacttctcttctcagtgctgctagatacaattcaaacctactgctgggattgcgactagtttaagatgcaaacaccagagacattctacacactaggcgtggattgtgatggagttaaacgaaacataaacgagaatccctgattacaactcttttcgtggtatacaaccccgcctaacagaggtggggctgactaagaagattaccaatttctcatcacaaattgatattatgtctgaacaaaaataaataaaaccaaacttttctatgttaattctgaaaacaggtatattctgatgaattttaaccggtaacacttggtatttattgcccgactataatatgatttttctcggaagaagtnncnccgtgtctnggnttcccccaatataaaaaagacataatatatatcatgatancctactttgttttttcttctctatctccctgaagcagctctctctactcctaggtcttctctctngcgacatcaccttattatgattactctttgctcagtgcgcgcagagaancnnntatatatanttttnttttatattaaaataatannggcgggcggccgcgcggaatacaaaagtt

SEQ ID NO: 270200 - DNA, 551 bp, Glycine max
ttggcaaaaagcagaagtatgtgccatgcaatgcatataagtggatcatcttctatttctagcacttcaatgacaaagtttgacaacccttaaaatgaggctccatgtctctttggaagtattcacatctaaaaggaagttacattccaacgcaattgatgttgaagttgtgaagaacagggttgagaccgaactacaaatgtacaaagatcaagtgtgttcctccatacaaaagcaaagaaaatttcacaccatttaaatagacttatggatgggtcaaaaatcacaattagatagggacgtcaattttggctggatttgaaggaaactttaaacatcaaatagataataaactacaaaatggataactcataagttgacacaatgatataaagatgtgttacgttcatagatggataacaaatagaaaagtcttattcgattctcatcaaaaaaaaaatttagactaacaacagaaaagtcttattcgatactcatcgtaaaattttcttatatccccaagcatatcaattattatttaatagaatggg

SEQ ID NO: 270201 - DNA, 1014 bp, Glycine max
  unsure (1)..(1014): unsure at all n locations
aacatattactctgatgtctgattgagtaccgcaatatatcgagacgctcggcattgtatgatgatgctctgagcaaattcaaacgacaattaatacttactctgatgtctgagtcagtctcgtcacatatgtagatgctctgaaatgaatgttgatgctctgagccattcaaacgactatatctatatactcgcgtgtaagattgagccccgtcacatatcgagatgctcgaaattgaatggtgcagcgtatcacccattcagacgacaattacgtatttatcagatgtctgattgagcttcgtcatatatcgagacgctcgacttgagaggtgatgctctgagcacattcacacgacattaatatttactgggatgtctgttcaagcccgtacatatctacatgctcgaattgaatgtgatgtctgagcacatcaaaccacggatcatcttctcgatgttgatgagtccgctggcctcctgatgggaaccggtcttttatctatagtaacacgctctttgtcctctggtggtggctccctatggcattaccaaggctgcctggcttagccaaaagttggtgcctaccaggtcttgcggggggggagcgcgcctattggacctccatgtccggatctggggaaaaggagatttacccatgtgtgcctcggaaaagaagccaaactagtctccttcaaaaaacttctgtgcggggcttatagaggaatatggtttcctaaaataatgaatgagtgcgtttaccaanacaggcgaagcttcttggtgcgggatacctattcataannnnnnnnnnnnnnnnnnncagagaaataaaataatcatcgctattatatactccttnnnncnnnnncnnccnctgcttctctctctttttcattcttcctctttcatcctcntcctnnntannannttatattaatatggtgttatggtgatggggtgggcggtatnggnnnnnnnnnngcccgcccgccccccnccccctccccccct

SEQ ID NO: 270202 - DNA, 267 bp, Glycine max
taaacattcaacttcgagcgtctcgatatattacgagtctcaatcagacatccgagtaaaaagttatggtcgtttgaattggctcaaagcttcaacattcaatttcgagcgtctcgatatatttcgggactcaatcagacatccgagtaaaaagttgttgtcgtttgaatatcctcagaagttctacattcaattttgagcgcctcgatatatgacgggactcaatcagacatccgagtaaaaagttattgccgtttgaattggctc

SEQ ID NO: 270203 - DNA, 354 bp, Glycine max
catgttgctcccctatctctaacaaaggtctaataaagagagaatgacctctctttaagcatattaaaccttgccccagcagtgacaatggctcttcttattgcagcttcagagtgcttgtgcaagtcaaagacaaactgagagcgaagaggaggagtattatggattagtcattgataaaactcattatctccttcttgcctcaagaagcacattcaccaattgttgaagtatatcttggttggacgcaagatctgcaccatacgcatgtgagtggagttatctttcttgtcataatctaaggtggatgcaagatgagagttttcatacatgtctttaaaatataagagcatg

SEQ ID NO: 270204 - DNA, 322 bp, Glycine max
tctacttatgtggcagggcgggcttccttcactttcttgtctccaacgcgagctttgaccactggtcttccttcttgcgatgcttcttttcatgtccgcctgagtgggcttatagcctaaaccatacttcccacgatttccttgggtatttatcaggctagttatgccgccgttgttttttcctaaacccatcccgggttcataaccgttccccaacataactcgggccatcattaccattgcatcggacaaacaaggctgcccaaagagggagtccacggaggaaatgctgaccacctcaaaagactggaaagcagtttct

SEQ ID NO: 270205 - DNA, 480 bp, Glycine max
  unsure (1)..(480): unsure at all n locations
agacaccattgaaacctttgggacncccgtatcctctgagtcgatctgtggcatgcaagctngagagaggacccaaagagcctccatcgtcgtcttatgcaaagtattgaccaattggtgagagagcatagagtctctctctcacaccatcttcagtgggtgcgaatggagcaattgagaagagagtaacttgccaacaccggcaatatgccgttcagcctattaaccaattgagggtgtggatttgggaacacataatccattctcgaaagctgacaaagttgaactctctggcttgtctttgatatcaaacaaattcatatcaacaccaccggtcaaaattccggaaaaattccgctgaaacatagtgttcaaactgagaagtagngtccatcctctcattttctttgaactcaacaatcttattttggctttcacttctaatggtgtctactttcttatttgggtttggattcgttn

SEQ ID NO: 270206 - DNA, 221 bp, Glycine max
  unsure (1)..(221): unsure at all n locations
gcccttagttnttagttntggtttgataattttgcaatgcctaacatgtntaatagatgaggcatatgtattgaatggtttatactaaacatgtgtgtgatatagtcttagtcattttcatgcttagtgnatgatcaaatatgaaggggattaagtattcttaatgtctaagtttcttaagaacttacttctacttgaatttggctagcaacatcgaatta

SEQ ID NO: 270207 - DNA, 386 bp, Glycine max
actaagcttctatccaggctcatcttggtggtgaagctccttcttccatggcttattccctagtggatggcgccgcctcttacctcttctcctttgtcttccactacatctccatggtggaaaatcaccattaaagggccttattgaagctcaaagatccagcctccatagaagctccacaagcaagcttccatcagtgtttaatgagaagggctaatattggctgagtattgatattgctgagctggtgggaaatttggccacatatgaacggcagtcacagcatgggttcctcgctccttctcattctctccatttgccccaggcttcctattcatcaaagcagaatatatcaaattgcctcttctcaaacacacttcgatcct

SEQ ID NO: 270208 - DNA, 375 bp, Glycine max
  unsure (1)..(375): unsure at all n locations
agcttcaagaaaaagatggcctcagcaaattccttatttccagaagggaattctatcaatagacctccaatctttaatggagagggttaccactactgganaacccgaatgcaaatttttatcgaggcaatagatctaaatatctgggaagccatagaaatagggccttatatacccaccacagtagaaagagtntcaatagatggtagttcatcaagtgaaagcataaccatagaaaaacctaaagatagatggtctgaagaggatagaaaacgagtacaatacaacctaaaagccaaaaacataataacatctgccctangaatggatgaatatttcagagtttcaaattgcaagagtgctaaagaaatgtgg

SEQ ID NO: 270209 - DNA, 429 bp, Glycine max
  unsure (1)..(429): unsure at all n locations
tatgactcagtttcttggggattcctaaactatatgatgatgaggactgggatttgtgaaagatggagaaaatggatccatggatgcctttctagtgcaactatatncaatttgatcaatagcagcactactagagaatntgtgcctgagaggggactgaggcaaggagatccccttgcacctttcctatttaatatagcagctgagggactcactggtttgatgaggacagctgtctccaaaaacattttcagcagctataaagtgaggaggcaaaatgaggagattaacatcttgcagtatgcagatgatacactgttttttggaactgcaactacagctaatgttagagtcatgaaatctatcctcagaattttcgagttggtttcaggactcaagattaactatgcctaaaaagccaattgggtg

SEQ ID NO: 270210 - DNA, 314 bp, Glycine max
ctaagtgtgcatgcactccatcagcgtggcgctctatatatctttctgttgttcatgaagtgtgtcgcactgtctcttctgttcattgaagcgtatgatctcacatatatgcacctgcatagataacggaattgagccgaacatgcataaactgtctggattggcagtctgcataagagctagtgcagctgccaccatgatctaccctcggtcatagagccgttgaatactgtccaatgctagcccttgctaagtcatgctgtaccaccctctctccttcctatttggggacccagtacaagactcaaattttc

SEQ ID NO: 270211 - DNA, 383 bp, Glycine max
  unsure (1)..(383): unsure at all n locations
ctcataagtgaaatcaggtgcagccatctccctaagagtcctctcatgacgtggaggttgagccatgttctcagtatggaaattagtagttgaatgctcaaaatcagaatattcagaatcaccagcaacagaatactcaaaatgcacagaatgaccaggatgcacactatgcctaactaatctatgaaaggttctatctatttcaggatcaaagggttgtatatcacctggattgcccctagtcatgcactatatgcagcaaataatgtgttctcaaacaagcattatgggagggttaaaactacaacaatagtcaaacgatatcaaaatgagctgaaattntgtgagcaacaccctataatcatgacaagatagcacaaaaa

SEQ ID NO: 270212 - DNA, 53 bp, Glycine max
gctgtttgcacaaatctttcttagaccatactgcaagcagatgttggacagta

SEQ ID NO: 270213 - DNA, 356 bp, Glycine max
  unsure (1)..(356): unsure at all n locations
gacttttagcacagtaatagtcattaagaattcacaacagacttagctaatgtatgatttggcttaatttctacaaaaacagtttttcaatcaaaagctctccaagcaacattttggttatatgatttgctcagtgagtatagatgtttctcaagtatgtgctcagtgagtatagtagatcctcatctgtacttcagattcctagctaagctatagataagaactcttcgagcggatacatatgcatggactacctctaaacttctctctctacaaccataaaaaagttccncaatcttgaacacataaaacacgcaccctaacttcagtacctcttagctttaaaatatcaacat

SEQ ID NO: 270214 - DNA, 131 bp, Glycine max
tctcaagcccgaggctctccaacgctacgttggcatcatggacaccatcgcttaaaaacacttcgctttcctttgtgacaacaagacggaactcaccgtctatcccttggctaagaggtcatacattcatt

SEQ ID NO: 270215 - DNA, 410 bp, Glycine max
tcagcttgttaacatgaagcctgactttctcaataggaatgtgaaccaaaggtttagtggcggtgaacgcaagcgcaatgaaatcttgcagcttgcggttttgggggcggacttggctattttggatgaaattgattctggtttggatgttgatgcgctcagggatgttgcgaatgcagttaataggattctcaccccagaacagtccttggtgatgataactcattatagacggattctggatcttttgaatcctacacatgtccatgttatggtaacttactgttgatcttcaatatcattgccagttctgaatatggaatatgtatgatacatgggtgttcacttttcattactgggattaaggagctagtcctatcacattcttttcacccttatattgggatact

SEQ ID NO: 270216 - DNA, 295 bp, Glycine max
gctttgagatgatgctttcatggaggaaaagaatgtgagagagaaagagagagggggagcaccaaattgaacgaagaaaaagagagagaaggtgcacattgagttgtgtctcacaagactcttattcatcaaagttacaacaagtggtacacatgcttctatgtatagactaggtagcttccttgagaagctttcttgagaaaacttccttgagaagcttctttgagaaaactctcttgagaagctagagcttagctacacacacccctctcataactaagctcacctccttgag

SEQ ID NO: 270217 - DNA, 416 bp, Glycine max
tcatgatgatgaatcaagtgtgaatcaagtagttttgataatgacttatagcccacaagaatgatttcaagattgagtcaacaagttcaagatcaagattaatttcaagattcattataagaaatcaagaagattcaagattcaagagaagttgatttcaagattcaagagaagacatcgagaagaatcaagattcctgagaagatgaattcaagattcgagagatgaaatcaagatggaacaagtcaagacttcccaaggaaagtattgaaaaggagttttcatgacaccaaacatagcatagttctgttttacaaaagagttttctcacatttttctaagttaccagagtatttactctctggtaatcgattaccagctgcctggaatagattaccagtgataaaacttgattt

SEQ ID NO: 270218 - DNA, 265 bp, Glycine max
gcttctagatgagttatgtctgcgaatcggacatcctgtgataaagttatgaccatttgaatctctcgagtgcttccgttgtttaatttcaagcgtctcgatattttatgtcctcaaatcagacatcggagcgaaatgttatgaccattcgaatttgtcgagagcttccgtttttcaatttcgagcgtctagatgagttatgtcaccgaatccaacatctgagtgaaatgttatgaccattcgaatttgtcgagagctcccgttg

SEQ ID NO: 270219 - DNA, 306 bp, Glycine max
  unsure (1)..(306): unsure at all n locations
tctcctccgtctatcaatggtatattctgattctctctatntaagatttcatgagtgcccaatttttgcttttgtttagcataacattgatggggtttcatttgggccatgcgatggataataaattctttggcgattgctatttacactcttacatattgctaatgtactctccttctaaatttgtttacccaaaataccctctcacaagaaaacagattctggaatttatttacactcccctctttctggaatataatttctggaaggctattctatgttatgaacttctgaatctgattacac

SEQ ID NO: 270220 - DNA, 98 bp, Glycine max
agcttgtgcgaatcaaatcactccttgcatttatctctagcatgcattctttctttctttacccactcctcacgtttggttttttttaggaaaaacac

SEQ ID NO: 270221 - DNA, 413 bp, Glycine max
tcggaagaaagtgatgaggtacaagccctaaaggcagagcttgaaagagcccgagtagtcgaagagaagttcaagtccatagccatcaaagtctgaaaagagtatgatgaactaagggacgtcaatatggccaccgctgaagccttggaatgagaaaccaagaaggcccgaaaggaagaacacgtgccagcaaagttttgaggggctttatagggcagcaatagcaaactcaagctccgaagaggtgaaaggaatcatcacaggtcaaaggcatgatcttgaaggacgagctaaaggcttaccttatgtcgaaaagaaatttgtcccaacagttaagcgagactgaagggaatatgtgggccgtcatcgatgagtgcacagagaagctaaatctagtggcgactcacgagcaa

SEQ ID NO: 270222 - DNA, 237 bp, Glycine max
  unsure (1)..(237): unsure at all n locations
atttatgagttgattntagccttagtttcactttggttattattgaattcattcaaggaaactttcaagaaaacgtcgatgatttttttatatttattcaaagatattttgattattttattattattttgacctttttttggattaaccgaaattacgatgtgaatgatcggctggattttattctaatagtaattaaacgagaatacaactcaaatgatcgggtgaaattcattt

SEQ ID NO: 270223 - DNA, 190 bp, Glycine max
  unsure (1)..(190): unsure at all n locations
cactagataagataccctgattnttgtaattatctcacaggaataccatcaatgacaatgaagtattatgtgtgggatgtgttctgactgtaaatatacttggcacttgttctttgaatgcaatttgttttgctagagtttggtgcggttactttaggtggggggtattcaatttgcacaatataatgac

SEQ ID NO: 270224 - DNA, 392 bp, Glycine max
  unsure (1)..(392): unsure at all n locations
acccatcacatgtggtactaggtggcggtcgggcgattgtgcaaaacgattctccacatccacaaatcatgtataacccaccatcccctgttgcccacctccaactgagctcacgtactcccacatagcccttatcctcgttcctctcaacgccgggtccccatcaatcctcccaagcttccacaacatccaagtaactcaatatccaaatcatcacaaactaacaaaccaagcaaaacagggcaaaggcagaaaactctgcccaaaactcaaaccaaaatcacagctntttctcacttatagaccccagtaacatttccttcattccaattcgttaaccggtggatcgaactcgaaaatttactggaagtctctagtacataagtctacat

SEQ ID NO: 270225 - DNA, 98 bp, Glycine max
agtcgacctcctgcatgcaagcttggagaggatgcttcaatggaggaaaagaaatatagaagggggcatcacgaaattgaaggaataaaagagggaga

SEQ ID NO: 270226 - DNA, 428 bp, Glycine max
  unsure (1)..(428): unsure at all n locations
cggcttccacttcatcaataaatgtaaaaaaataatagaaatcaagttaacattagttagaaattgattgcgcaatgaataaaatacggaaataatgaaaaagttgttagtaaagattacacaaagccttggaattcaatatcctaacacaaaaagccttggaatttaatatcctaacacaagaagccttggcattcaatatcctaacacaaaaaaatattttttttttcttggttacaaatatacatttcttaattnttaataaaaggctaggatttctaaagcatcataataatcccaactaggttagcaccaagaggatcaccaatcacctgtataagacgaggttccttactatagtgaatttacatgttgaaaaacattaaaataagacttcaactgccattggagaaattacaaaggaatga

SEQ ID NO: 270227 - DNA, 425 bp, Glycine max
  unsure (1)..(425): unsure at all n locations
ccgcgttggcccaaatcccacgctntgcttgaggcgggatgatatgaaagaaaatatttgattgaataattgatttactctttatatcattcatttattcattccttgattatagcctctagattgatttagtcattccttaatcgtaggttctagattttttataatctctatttattgtaagcatgctattctctaatgctatcaaaagaacaattataccaatctttacaatttatctatctatgttttttttatctgcctttttattttacttttttttacacattccaatgttaactttcttttttctgcagtttatacatttagaagatgatacaaaaggcttcaaagctattccaacaaggtttagtctttgtttaacttttctttacatttcatttatttatttgcatttctttagt

SEQ ID NO: 270228 - DNA, 400 bp, Glycine max
  unsure (1)..(400): unsure at all n locations
tatggaggctggatctttgagcttcaatgatgtcctttaatggtgattttccaccatggagatgcagcggaagacaaaggagaagaggtgagaggaggtgccatccactatggaataagccatggaagaaggagcttcaccaccaagatgagccttggataagaagcttggagaggatgcttcaatggaggaaaagaaagagggagagaaagagagaggggggagcatgaaattgaaggaataaaagaggtagagaagtggaactttgaagtatgtctcacaagactctcattcatcaaagttaccacaagtgttacacatgcttctatttatagactangtagctctcttgagaagctttcttgagaaaacttccttgagaagcttctctgagaaaact

SEQ ID NO: 270229 - DNA, 102 bp, Glycine max
aaatgtgtgcattcaccgcttatatcacttaatcacgcgagcaacaggcggttatgggccccataactgcttaaaaaatacgcccgcctgccactcatgaaa

SEQ ID NO: 270230 - DNA, 127 bp, Glycine max
  unsure (1)..(127): unsure at all n locations
atgcaagcttgtctcagcgtntatgcgagactgagaccaacatgcttatctatcatcgccaagtaccaagaagagttatgtctagccacggcccacgagcaaaggatcgcggacgagtatgctcaag

SEQ ID NO: 270231 - DNA, 365 bp, Glycine max
cgatgtcatccttgaccggctatcttctctcacgcctactcccctttctcccaactcgtgcccaacatacgcatcaccatgtagataccttaacaatagagccacaaaatacagaaattgacctcccaagtgttcgctccgctttcatcaccaccgtggacaccaagaagcacatcaacctcagccccgcaatgaagttatacatgctcaagcatgccaattccacctcattccatcgctgacaaccccatctctcctctctcagtttctctccctctcgttccggcgacggccaaaggatcgttcgcagtcacgggttcccttttcttctctgtcgggctccttcttggagctgccattctcat

SEQ ID NO: 270232 - DNA, 185 bp, Glycine max
atacttggtttccatctctccaacaagtagaagggagatgtgtttccatgtgttccaccacttatcactcattccgcttcagcttcagtcaatccaagtaaaaggactaaatcatcccctaaatatttaggggctatgtccattcccagcttccatcgcaactcctccaccaaccttttgaacat

SEQ ID NO: 270233 - DNA, 359 bp, Glycine max
cgtccttggtttagacatgattggtacatgtaggattcaatttgggcaaaattggatgagggaaagagtggttttcgaaatctgcactttatgcagaattttgctgttgaaatgtgcaacataattttgtacaagtgcagaaaaatgcttatgtatggctggttgtgaaaagggtagtacatatggggttctggacattctctagcagatcccaacggtcaaaatgtagacttatgtactagaaacttccagtaaaattttcgagtcgatccaacggttaacgaattggaacgaaggaaatgttactgcggtatttgtatgtgaaaagctactatgattttgagttgtattttgggcag

SEQ ID NO: 270234 - DNA, 306 bp, Glycine max
  unsure (1)..(306): unsure at all n locations
gttagttttaccagtgggacgttactcttaaagcanaaatggcatgtaacctcctcccctcaatacaaacatcaatgtaaatttaaagcaagcttatgcgcatattttcctaccaacgttcacttgcacaagacattctatttactaaaaaaaatgcccccatatacaatcaaagtagcttcattacctagattatttacatgtacttccaaagtgtatttgttatttacatcatacacgccatctttgtcaaatttacaccacatgcatactcaaaagcatttggggtaccaaaaaatgcacatg

SEQ ID NO: 270235 - DNA, 411 bp, Glycine max
  unsure (1)..(411): unsure at all n locations
ccagcttctcatctcaaggaagagagtgatgtgtcattattttcttctatttcttaatcctttttgtcaccattttaattactgattagccataatcgtcaaattcattatgcagttttatcatttgggcctacttgactaattttgtgtttttaatttaatttcaagagaattataagcaattgggcatgaattctgaattgggcttggacttggacttgaagagagcaaacaattntattttatcaaatcttatcttatccagatcttattccatctagatattatttcatccaatcttatcttatcttgtccagattttattatattttacttaggggcctagacttaaaatagatttgtaagctttggggctgagaatctatatatcagcaccaatagtttagtttt

SEQ ID NO: 270236 - DNA, 369 bp, Glycine max
  unsure (1)..(369): unsure at all n locations
gagggtgcgtagcccaccatcttttcatagtagagtatcgatatatgtgtctaccatcacgatcatcgtctccctttccatcattgggggtaccacctgngccgccagatccctccaccttttgggcgtgttctttgaaagatccgtccccctttttgcaaatgttctgtagttgcatcctatccggaaccatatcaaaattgtactgatactgcctaacaaaggccaccattaggtccttccaagaatggactcgggaagattccaagttagtgtaccaggtaacagctaccccagtaagactttcttggaaggaatgtattagcaattccttatctcttgcgtatttccccatcttctgacaataca

SEQ ID NO: 270237 - DNA, 71 bp, Glycine max
tactctaaaatgtgggaatgtgctctaatatgtggggcaattctcgattgttttcttgcttgaatgggttg

SEQ ID NO: 270238 - DNA, 326 bp, Glycine max
gctcaaacattcaatttcgagcgtctcgatatattactggactctatcatacatacgagaaaaaagttattgtcgtttgaatttcctctgagcttcaacattcaatttcagcgtctggatatattacgggactcaatcagacatccgagtaaaaagttattgtcctttgaattggatcagaggttcaacattcaatatcgagcgactcgatatatctcgggactcaatcagacatccgagtaaaaagttattgtcgtttcaattggctcagaggttcaacattcaattttgagcgtcccgatatattacgtcactgaatcggacat

SEQ ID NO: 270239 - DNA, 109 bp, Glycine max
  unsure (1)..(109): unsure at all n locations
agcttgtgcgaataaatcactccttgcttntatctttatcatgcattctttctttctttacccactcctcacgtttgttttttttagggaaaaacaccatatcttaacg

SEQ ID NO: 270240 - DNA, 407 bp, Glycine max
ccggaagaaagtgatgaggtacaagccctaaatgcagagcttgatttatcccgagtagtcgaagagaagttcaagtccatagccatcaaagtctgaaaagagtatgatgaactaagggacgttaatatggccaccgctgaagccttggaatgagaaaccaagaatgcccgaaaggataaacacgtgccagcaaagttttgaggggctttatatggcagcaatagcaaactcaagctccgaagaggtgaaaggaatcatcacaggtcaaaggcatgatcttgaaggacgagctaaaggcttaccttatgtcgaaaagaaatttgtcccacagttaagcgagactgaagggaatatgtgggccgtcatcgatgagtgcaaagagatactaaatctagtggcgactcacg

SEQ ID NO: 270241 - DNA, 380 bp, Glycine max
  unsure (1)..(380): unsure at all n locations
gtcgacctgttgcatgcaagctntntctacanaaatatatctccctttataaatatactcattcgtttttctcatctctatttcatttattctatgttctcaactttgtttcctttcccttcaacaatacaaacccgtgatgattcaccaaagtcaaatcatgaacctaataattatctgtacacaccatattgttttccacccgaaaaagaanataataaacaaaagtcgtatctagttgtaagcagaatgaacaaaccaaacattgctcgtgcttgttgtcaaatgccagtgacaacctccactggacgaattanaagggatcattattgggtatatatatatatatatatatatatatatatatatctatatatata

SEQ ID NO: 270242 - DNA, 372 bp, Glycine max
  unsure (1)..(372): unsure at all n locations
tagcaacactcagataatgcaatctaaccttagccccttcattcttcaatctataggccagctttcctgcaaattaaagctgatcaaacttgcatgttttggatatctaaactgccaaaaacaatttcattgctcattggaagagggaagaagggtccactcaaaatatagtttaagaatttataatgtatgtataatactgatcatagttttggtgacctatactatatntgttcttgttgtcataatcttccatcctcaattgacacaataataacctttggagcactctagcttattcattaactctaaaaagataaactctttcaggaacatatagaacagaagaactacttgcagtcttaaatattt

SEQ ID NO: 270243 - DNA, 460 bp, Glycine max
  unsure (1)..(460): unsure at all n locations
cccaccacattgaaccttgtgacnccatatctttcagtcaccttcggcatgcaagcttgttggcaatggagaaatcacggtgtttgtctttagtatcccgttcttcttggaagagatgttggaaagaagattcctacagctggtatggagctccctcagacaggtgagacatggaacatataagaatgaggaggcctgagaggggtttttcggcaaacgggatagtgtgtctgcggcctgattgtgtactgccgagcgatattggatctggtagtccgtacccattaaccttgcaaggtaaatatgcttgtcaggtgtgtgaacaacctgactcatcaattcttttaagctccgatggtctgtttaaataatgaagctatggncaaagaagtattaacgccacttcttcaccgcgggcgggatggcaaacagnttctaacataatttgaggtcgaacacg

SEQ ID NO: 270244 - DNA, 400 bp, Glycine max
  unsure (1)..(400): unsure at all n locations
atcgtatctgtaaccnctgaatccattctattgcatctatgaattactagtgcaaaaatgacactctgtacctggacttctaagttacctgtagttgggttgtaacttgttttgaaagttaaaatataatgttatagtactttataatacttatggataaaaaattttaaaaaacagatgacaccgaatgggatcattctctttataatagttatagattatacaacatttattatatagatagcatacttggatcctctcatgttaataagtgacatgataatgacatattacatgagagacacacaaataatatgaagtagttaacatcattattttgcgcgtcgttctctcttatatcattgatggatgcattcaagaagatattgatatgacattg

SEQ ID NO: 270245 - DNA, 291 bp, Glycine max
  unsure (1)..(291): unsure at all n locations
agcttataagaacaaaattgccttaatcatttccaattatgcatgtgaattaggacgcatcaccaagattcaagccaaggctattgtgcaaccattcaatggggcaaacataccaatgaatataatgatggatggttcaaatctcacaaaggtaaaatatcactttcaaatgagctttcaaaactatatgacatgtagagaaaatcaaggatttcngtcacaaaatgtcaagaactttattttaaaacaattgccattttttgaaatatcctataattaaagaaaacatgc

SEQ ID NO: 270246 - DNA, 425 bp, Glycine max
  unsure (1)..(425): unsure at all n locations
cgacaagtatttaagatctgttggaattcgtgattcctgtgaattgtattgtttcttaaattgngcaaatccttgttggaccgtttctgggaatatctctgggattggtccaaagaagtcccaccattgcaaaaaccaattgggaaaattgtaaattgtgttggtcttgaaatatatcagccatgaatgcttgaagcgggtattttggtgccaaaataccttagtccaagcatcaacgtaatcccaataggtataacctaccggatcaaatggaactgaaaatctctttcctttgttcaagtccgaaccaaagtgtcttggttgaagaacttttagtatctggatggttgagtgggtgtttaaggttcggtctttttgatctttgaaatgtctgatagatactgagnttgaatctactataatca

SEQ ID NO: 270247 - DNA, 478 bp, Glycine max
  unsure (1)..(478): unsure at all n locations
ctctaacggagagggaaagaagagggcgtatnttcttctntcttcatacataatcgacggaactgggaagcggatctacacttatnttcagggcccttttaacctttgacccggtacctttagggaacttcgaaaaacctcgcaaaataaatgaatttagggccgcgttaaggatttaattcttaaaatcttggggggcggagacatgtgagataatgaatttaagaaaaatttttaaaaagagcttctttaaaaaagaaaaaatcttatgggttggtcctcaggaaacggatttaaaaatatgaaagaacctgttatacaaaaaagtttatttgcataacttggaaaattcaacttttaaaaaattgggtgaaccaaataaattcaaatgtagtattagcatataattataataggcctttgactaaatttagaaaaacagttggttttaatttttcagaaaaaaattcctcaaaag

SEQ ID NO: 270248 - DNA, 426 bp, Glycine max
  unsure (1)..(426): unsure at all n locations
cgagagaagaaaacactatggctcgatgagtgaaatttaattntgtggtgacactatggctcgttgagtgttggttcaagtaccaacttagactccatgtactaatttgtccaggtaaaattcggctggggtatgggaaagtgttttattggtgagacccaatacacttggatactctgacaaatttgtgagggcttgatgtggaagcaaagcttcatgatgaatcaacaatgattcaaagatgttttgatgataacaatgatgacaacaaaagatgatgaacaaaaagctcaagtgaatcaaagaacatctcaagagaatcaagaacaagtcaagagttcaagaatcaagaagaattcaagattcaagaagaaagcctgcatacaagaatcaagaatcaagattcaagatctcaagaatcaagat

SEQ ID NO: 270249 - DNA, 343 bp, Glycine max
  unsure (1)..(343): unsure at all n locations
acacactatatagacctataatgaagactaaacatgcantttgttatgaaatggattcattatgcgatataatntgntgtaaccccgtactaaccaaataatattattaagtacttctttggttaagcaagggaaattgtggtccaacaaaaatcatttacgcgtgcaacatacatcattgtcataattgacaacacataatgacatgcatgcctattaatagttgagcgcaacaacacattggctgacttgactacacattctgaaactaacagtcgctcgaaacacattggctgacttgacttacacattgccgacacacattggctgacttgactacaca

SEQ ID NO: 270250 - DNA, 416 bp, Glycine max
  unsure (1)..(416): unsure at all n locations
catgattctttagaatttccaccgattaatcttgctatataatctacatttgattttctatggttcaaatttcttgttcttgttcttgttcttgaaccatgaattgtgttgagtttaggttcctttgagttttgtcttgttattttttgtggctgaaacctaaaccataaaattatttcaaaaacattaaattagaagaaaacctcaaaaatatagagtggcttgttcacctattgtagttntgtcatagaagtcatgtctagtcatgaaacttgtcacataagatttcttatattgggctgaagtttatttttctcgtttctttgtctaactcatttgttcatgattggatgaaattcttctagcctattatttngattgattcaaatctttgcatgttaattagtccttaacat

SEQ ID NO: 270251 - DNA, 175 bp, Glycine max
  unsure (1)..(175): unsure at all n locations
agctntgagcaaattcaaagacataagttnttactacgatggttgattgagtcccgtaatatatccagccgctagaaattgaatgttgaagctttgagcacattcaaacgacaatatttttttactcggatgtctgattgagttccgtaatacatcgagacgctcganattgaat

SEQ ID NO: 270252 - DNA, 278 bp, Glycine max
atccgagtcaaaagctattgacgtgcgaatttgctcaaagccctaacattcaatttcgagcgggccgctatattacgggactatatcggacatgcgagcaagaagtgaatgtcgtaagagtcagctcaaagcttcaagattcaatggcgagcgactacatgtattaccggactcattcagacatacgagttaatagttgtcgtcgactgaatatgctcacagctgaaacatacaaattcgagcgtgtcgttatattataggactcagtcagacatccg

SEQ ID NO: 270253 - DNA, 193 bp, Glycine max
catggttatcctagggatgccctctctaccttttttttgcttctgtgcatctcatgggggaaatcccttgaagactcattgaactcaagaccacctcatgagctcacaaccactttctcaaagcatcaccacatcacggtaaatatagacatcccattcctaggctatacgatatgttggatgaattgcatgg

SEQ ID NO: 270254 - DNA, 393 bp, Glycine max
tggggtacccatcacatgtggtactatgtggcggtctggctatggtgcacaacaagtgttccacctccacaaatcgcgcataaacccaccatcccctattgcccaccttcatctgagctcacgtactcccacgtagcccatatcctcgtttctctcaacacagggtccccatcaatcctcccaagcttgcccaacatccaagtaactcaacattcaaacaacacaaaccatcacagccaagaaaatagggcaaaggcagaaaactctgcccaaaacaccaaccaaaatcacagctgttctcacttaaagaccccagtaacaattccttcgttccaattcgctaaccggtggatcgactccaaaatttactggaagtctcagtacataagccta

SEQ ID NO: 270255 - DNA, 365 bp, Glycine max
  unsure (1)..(365): unsure at all n locations
caagcaganagataacacggtaaatttaaagaacaatttttagctatttcttaccatttatgcactatgtcacatccaattttgtttcatgcacacgatcttcattcattacattactcctcttgacgtatacttcttttgtaaatgcatactccatttgtttcttcactgacttgacaattgctgttcgcttggatcttaacctgtatgggggagatgactagaatgccttattgttgggaatgacaatcccattgccatggcttgctggactcctggagaaatgcccagaaccagaatcatcatcggatctctctagcttagaagaattgggattgttatctactatcaaaactttactggga

SEQ ID NO: 270256 - DNA, 248 bp, Glycine max
tatagcattttaacatatatattacagccttaagaaacatttgaaagtatacaaaatgtgttgatacagcgtttatttttgtcttagtgtatttcaagtatgcatcttcactatgatgtgtgataataataataataataataatgcataggattaattaaataagaatatagaaattattggttcatagcgattattttttttactttataaattatttgttgcagaagttttttaattattttggt

SEQ ID NO: 270257 - DNA, 345 bp, Glycine max
catactagagctgaatcttatgacaggttagacatttatttagctgtgtaacctcccattggaattcttaaattgattatttcatggattgagttaaatttgctattaggtgatgcgattgtattaaacttgtttgtgtgtggcttatagaccacaagatgttgctgcgttacttgacatgatgggtgaggatcacaaacgtatacatcctgatgcgtagacccatgcgtaagacacgtattaattattttttacaaacctggctaacatgttggatgtaaaattgtttgaacttaagtttaaattcctttttattccttgcaatttagagttcattatttcttt

SEQ ID NO: 270258 - DNA, 101 bp, Glycine max
agtaccgaatttcccccatttctttttcttttttttgcaaataaaaacacaatgattcattcactccttaacttaatattatagggctctgaatttctttt

SEQ ID NO: 270259 - DNA, 404 bp, Glycine max
ctaagcccgctagaaggaaaacaatgaagaatgcattttgccctgcattctatcgttacaacacttgacagagagtgtaagcacactcaaacctaagaggctagttggcattttaagttgtcacgtgttggcacacttgactctcattgttatcccatgaaaatctagaaataacatttttagtgtttctaaattccaacacatgacaatcaagcaatgtcaaagtgaagtgtgactgcactaacaacgataagtaaacctatgaatcgattaaatcaattaaaatagatattttcaacaactgttcctacttttcttattctcttacgacaccatgactaggaactttaagtttgataaacaaaaaatcaacttgtatatcattctatagattaattttattt

SEQ ID NO: 270260 - DNA, 421 bp, Glycine max
  unsure (1)..(421): unsure at all n locations
aaagtatntaagatctggtggaattcgtgattcctgtgaattgtattgtttcttaaattgggcaaatccttgttggaccgtttctgggaatatctctgggattggtccaaagaagtcccaccattgcaaaaaccaattgggaaaattgtaaattgtgttggtcttgaaatatatcagccatgaatgcttgaagcgggtattttggtgccaaaataccttattccaagcatcaacgtaatcccaataggtataacctaccggatcaaatggaactgaaaatctctttcctttgttcaagtccgaaccaaagtgtcttggttgaagaacttttaatatttggatggttgagtgggtgtttaaaggttggtcttcntgatccttgaaatgtttgatagatactgagtttgaatctactaaaatc

SEQ ID NO: 270261 - DNA, 244 bp, Glycine max
  unsure (1)..(244): unsure at all n locations
agcnttaaaatttgaataaaaaagttcaatactgctgttaatcgagaccatatatgtgtaatcgattaccccatgccaattttgaattcaattttaattactgtggaaattatttttgggccctgggaatcgattacttctttgttatccattacctagagtaatttcttgaaaagactttttacttgcattcttgggcaaacctttgctacttaaataagaattcctttctattaatatccct

SEQ ID NO: 270262 - DNA, 402 bp, Glycine max
  unsure (1)..(402): unsure at all n locations
tactaagctctccaaatcatcattttgcatttgggtcacggatataatgcggtgcatccctttttatccttggaccaaaccaaaccccgacatgtatcatgtctagccattctacaaaccttgagccaaaatcctgactcaccataatccttaccctcggaagcaaaaaagaaaagaaggaaattcccaatcaaagagtgggagaaagcaaaaagaacagaaaggaaattcccaatcaaagagtgggagaaagcanaaagaacagaaaggaaattcccaatcaaagaatgggagaaagcaaaaagaaaagaaagaaaattcccaatcaaagaatgggagaaagaaaatagaaaaagggaggaaagaaagttcttgatcaaagaaactagaagaaatgtgcag

SEQ ID NO: 270263 - DNA, 259 bp, Glycine max
aattgcaaaatttatgcttattgtggatgagtaaccaaaaatgtttcttacagatcgtggagagcagcccacagggtccttgctccatgatgtagatgacaactgcaccatgcgcaccaaacaccttgtggtgctgtggtgacccatgtatgacaacaatattggaccggtcaagactctgcaatcttctcatgctttgaaacctgacactgactaaaataggtccagtagagaccgacataaaaaaggatcacactat

SEQ ID NO: 270264 - DNA, 176 bp, Glycine max
gaaggcctcaatcctgacactggaaaaggcttcaatgccactttgccaacattgatctttcacaaaaaacattggtagttccttatagaacaaaggtttcatctaacatgtcaaactgtctaagacattactgttataacaattgtaagatctagtcttccatgaactgaaagctc

SEQ ID NO: 270265 - DNA, 217 bp, Glycine max
gtgtaacccaccatcttctcatagtataacataggtatcatgtctactatcattattatcatctgcctctccatcattgggggcgctacttgagctgccagatccctccatctttcagcctaatttttgaaagaattctgctccttcttacacatattttgtagctacattctatccagagccatatcagaattatactgatactgcttaatgaaag

SEQ ID NO: 270266 - DNA, 382 bp, Glycine max
  unsure (1)..(382): unsure at all n locations
ctagagaagataataagagaaaaaattaaatgatttnttacataagctgaaattaacttatgcctaagttagtttgtagaaactctctcaatatagcttctaaaagatgagaaacataattcattatatcatcatagactacaggttaagtgtctgggtacaaactcattatatgtcctcattattcctgaatctctaacagcattagaagggtctaacccactgataaaatactttcataatctctttttaaaatcttctcataatttccccatagatacgtttatacccccaaagacttacttgacaaaccagcagtactcttgcaaccatggaaatcaacaagctagtcatcaagcaaatatctggtggttgtgagttt

SEQ ID NO: 270267 - DNA, 268 bp, Glycine max
  unsure (1)..(268): unsure at all n locations
tatacataccaccccattttctccccctttggcaacatcaaattgccaaagtgcatgacaatcaacacaggaatatataatggagtaaatttaaataaacttaaacttaacttaaataagtcataaccaaaacaatccaaacagtcataattcaaaactactaaaacaaagcataaaagcgaaagttcaaataccaagaaaaaacanagtgcgaaaatgatacataaagacatagccaatacacggctttaaaaacgatatgataact

SEQ ID NO: 270268 - DNA, 412 bp, Glycine max
  unsure (1)..(412): unsure at all n locations
gacttaccttgaattaattcctttgatagcccctttgagcctatgttcccctttctttgttttgaagctcattacaagccttaagtgaaaaaccatgataacaccttactcttaaggaatnttggagctttggaattgttttgggattaagtgtgggggggtatgtttcattggaagatatgatttttggccatgcttaatgttttattttggccatgcttgatgtatatatatattgcctagttcttgctttaatcttcaaattcatactgtctaaaaaaaatttcaattgctgcaaattctacaaattcatactggttcaaaaaaaaagagaagaagaaaagaagtgaagtngaataaatgatgtctgtaacaccctgatatatatatatctatatattataagaattat

SEQ ID NO: 270269 - DNA, 401 bp, Glycine max
aagcctttgtttctccctgctgtaaaaggatatacattcgccgttttgtcttctatgcttcttaacggggttagcatctttaagcacatgctcaaaataatccgtcttaatttgttccaaagataacacactattttttataataatattcgtgaacaaataaacaattattttttaaaaagtttcgaaggaaacttaaaaagtaattgtttttaaaaatcaaactaaaataagcatgcatggagtggccaattatatatgtattgatgaattagttaagattagcaactatattccttataaaagaaagattagcaagtatattgagtcatctcaccaacgagttagtgttgaatattctccttgtggatttcacagctgagatttggcaactgaataaa

SEQ ID NO: 270270 - DNA, 249 bp, Glycine max
  unsure (1)..(249): unsure at all n locations
tattataattcatagaaaatcttaaggtcctgtggtctatgatgatatacaagtctgaataatgttatgatgattcatctctttatataatccacaactttntttaatcaatttgattctattggtgcacaagaatctttagtgatctactgatgatctggtgcgtaagggaattgggctaatattaattaccctcaagacacttataatttttaataataaattcacttatttggtcctctacctttt

SEQ ID NO: 270271 - DNA, 397 bp, Glycine max
  unsure (1)..(397): unsure at all n locations
agctataggagtatgtcccaggggtctctctctctctctctctcttgcacacacacactaacacacacacacacccnccccattgatatgcttttgatgtaaggatggatatcttatcacattaagaatgcataaatatgattntcaaatgcaataaatttttcttctcttttcattaacagatgactggcctgtactgaattttctaatctgcagtttgatatcctatgggatgcactgtctggtcaagaacacctccaactcttcgctactattaaaggcctgtccccatcttccatataacagtatgtctgcacatgcctgaaattgtccatacaatcaatgaatatgtgtgtgtgtgcaatattctgaattattagctattatggatactgcc

SEQ ID NO: 270272 - DNA, 375 bp, Glycine max
  unsure (1)..(375): unsure at all n locations
tagctggagctgtagctgctgtgtaccgaccggctggtggacctggtggacgacggtgtggatgcngccctgcacattaaccggcaattggcggacagcgggctgcaggcgccgctgctcacacattcccccctggtgctggtggcgtcgcccgcctacctgatgcgccaaggcgtggtgcaagtgctcgggcaattggccgagcaccgcgccctggtctttgcggcaggcccggccccattgcgcttgagcgtggtgtcccggcagggcgccgtgaccgaagtgcaaccgaacacggaggtgggccaccgatttggtggcatcatttttaaagctgacccgcaagcgcggggaattgtgggccttaactcgccn

SEQ ID NO: 270273 - DNA, 302 bp, Glycine max
  unsure (1)..(302): unsure at all n locations
ctcgtccacgtggcccaggtcaccggtgcgaatgataccgcttgccgtcgatctccatgaagacctgggccgtggcgtncgggcgcttccagtagccgtcgaagacctcgggtccgtggacgacgatttcgccctgctcgccctgcgggacatcggcgccggtttcggggtcgatgacacgcgcctcggtgctcatgataggaatgcccaggcattgctgcttgggatgctccaacgggttgctgtgcgtgggcgcggccgtctcggtcaggccgtagccctcgctgaagcgcaggccgtat

SEQ ID NO: 270274 - DNA, 425 bp, Glycine max
  unsure (1)..(425): unsure at all n locations
ntgaacttggaacccgatctttcggatcttgatgtactcagctgcaactattactctctatcttttttcatgcactacactcctncataaagtggccacngntacaatggcaccgacatgcttgagtggtttgctttggtggggtgtaactctctangcatggcaaaaatgtgacagctaaggcctaatccatgatatgagatctactacccgataaaaaaaagtgtactgggtaaagcacgactcttcgtggggccaatccctccttcgatcattgtgagccttactagaggtgggcttgtcattaatctttctggtcaacacggtatcagccaactccctcattgcatatactggccacccttgttcgtagctcatcgaggtggatgatgtttttgcataaaaaatgacaaaaggtctattct

SEQ ID NO: 270275 - DNA, 330 bp, Glycine max
atcctgactcaccataaaccttgacccttgtgagaatgtttatccttaccctcggaagcgaataggaaagaatgaagattttcaatcaaagagaaagcaaataataagaaagagctgaaggaaaattccccaatcaaagagtgggagaaagcaaaaagaaaagacagaatattcccaatctaataatgggagaaagtcaaaaatgaagaagaagaaggcaagagagctcctgatcagggattgaatgattacagaagaaatgtgcagagaggtctttggaccggacaatatctgaacaatacagaattgtcaccaaatgaacaaaaaaag

SEQ ID NO: 270276 - DNA, 396 bp, Glycine max
agctcgtatgacgggcatgaggaagatgaacattgttgttctttgaagatatgttactttggcagggaaggaaaatgcgcacgtgggaaattcgtcatgcaatggtgatggtgtgggaaagtgtgaagatgggttgttgcttaacgaaagtaataatgatagtgttagtgttggtggcttgcttggggaatgtgacatctttgatgggaaatgggtgagggatgaattcaagccttactatccattggggtcttgtacaaacgcagattgggattttgattgccatctttatggatagcctgattgtgattatgtcaagtggaaatggcagccaaatgggtgtgacattccaaggaatggtgatgcttttgctgttgttgttacaattggaaatgg

SEQ ID NO: 270277 - DNA, 261 bp, Glycine max
tcgccttctttctgaggcgcctgatgttttataacacagtcatctgcgaatagcatattatatttaaccactgaaccctactcaatcttaccccatgcaaatcttcaatggacataccatgcttccaaagcgatgttaaaccttaatcacaaaagataaacaggcagggggacacgtggaccccctaccttgagcctctccatgtattcaccggagcaacatcctctccattaacaataactatatatactgatgatgatt

SEQ ID NO: 270278 - DNA, 100 bp, Glycine max
  unsure (1)..(100): unsure at all n locations
catgtgtaatactcaactcanattatatctttttatgcatcctttgcgcttggggaataatgggtctgtttttatttcttttttttgggagtgaattttc

SEQ ID NO: 270279 - DNA, 464 bp, Glycine max
  unsure (1)..(464): unsure at all n locations
ctgaangcgcttgatttggcgaaatattcttccaaagcccctanggagtttatgataacaaaaaggcgtgttcttattttttatgctcgacgaaatcacgatgttatgtgacacgtatttattttatttatccctcctacaccccagatatattgtaaagaattgataaaattcaaaatggattatttgatctattagattttaactcctgtattataatattttatcatataacattttacaatcacaactaaataaataaaggaataacttcttctataaatatacaaagtaaccaatctagtcatcatataatctaatattatctttgttattatatatatgaagaagacaagtacactcatatgttattacaccaacaagtatctcgtagataactttatgataaattgtaagatcattgatctaactggttaatttaattatttttatatagatcgtgg

SEQ ID NO: 270280 - DNA, 198 bp, Glycine max
  unsure (1)..(198): unsure at all n locations
tcgtttaaaaatcaaggaattcgtaagaaaaaagtattttcaagtttgtatgctcgatcagaagatgagttaggaatcatctttaatcgatcgaggtctttccacaattcgtccgaagatttaacagaaaaaagactttatgaaaaganagggatgaattaagttatatgggtgaccacccattaattatgtaagact

SEQ ID NO: 270281 - DNA, 159 bp, Glycine max
  unsure (1)..(159): unsure at all n locations
cgtacccgggatccttttagtcacctgctgcatgcagcttcaaaaaaaggcctcacanattcttatttcagaaggaatttatcatagacctcaattttaaggagagggtaccactactggaaaacccgaatgcaaaattttatcgaggcaataaatcta

SEQ ID NO: 270282 - DNA, 68 bp, Glycine max
tcacctcagtcttgcaagctccttggaataagggtcattaggaagggtacccttccacccccaccaaa

SEQ ID NO: 270283 - DNA, 424 bp, Glycine max
gcttagtttatgattatttaacactaagataggggtttttttaatatgtgtgagacattataagagtcaaatcttaacttatttatatgatagccacatatcctccagatttaatataatattcatgatcttatttaaaagtatattttgcaataagacatttaaataaggcataaatttatttttcaataaacttaattataaactttaacttaactttttgtgtagaccagcatgattaatatttaaaaagacaagtaaatgtaatattttagtaaattataaccaatctaatataataataatactaacaatgaatacttatttataaatttttaaataaatcagcctatttagcctagaagaacttttgaatgacctagaacctaacctggttaactaaataaactctattagaagtctt

SEQ ID NO: 270284 - DNA, 418 bp, Glycine max
  unsure (1)..(418): unsure at all n locations
ttctcgtcaagcacggtgcttangtgctaccactccctattaagtcgactgtgatggcttacatggactggttagggttagcaggcctatttatgatgcaatatcctaccacaaacaatggcttcatgaatgcctttgtggagaggtggcactaagaggcgttttcatttcacctgcttatcggagagatgtatatcactctagatgatgtgtcttatttgttgcatttgcctatgacaagcaagctcattaatgatgtcctttccacctttgacagagtcatgatgaagattctgttgatgactcgccttggcattccaactgaggaagagactatagaggcaacaatcgcaggtgccagggtgaagttgacgtggctggcaaagttgcatcagtggaacgtcgcgttagggtcatg

SEQ ID NO: 270285 - DNA, 269 bp, Glycine max
gtgtcatatctataatttgaagattattgtatcaaacttgaagaccataatttggagagcaaacttagcccaacacttaagactcaacttgtatttatgggctggaatttatttggatggattacttagcattttgggttgaagagttaattaagcccatttttcttattttcatgcaactcttggtcttaactttgggggcttaaggtcatatgtcttttcatcctttctatgtcagcgtgatgatgcaatcctccctatgaatggac

SEQ ID NO: 270286 - DNA, 405 bp, Glycine max
  unsure (1)..(405): unsure at all n locations
ccaccttctggtcctcctcatagttgttgcatgagatatcatgctctattttcatctcccactccaagtatgcctccggatcattctttcctttaaatggaggaatgttgagtttaataccatcaattccgttttgtctaagaacaccatcattccctcttctcctcctttcttcttcattatgatctctattctccatttgatccaacctctcatggagcgcatcatctcgtttgtttattaacctctccanatgttgcatcaaagcttgcatttggaattgcgaaagccccactccatcattatgattagtacctgacatctcatacaaacaaatcatacgtaacaagacaattatagttggtgtttgaatacctcacccactctagtgtatcacacaattat

SEQ ID NO: 270287 - DNA, 236 bp, Glycine max
acctcaacaacatttggggcacgtcatcccatataagtcctaaaggtcgcgatgataatatatgacatgttattgatatgaaccatggtgtatacaaatcacaatgcataacaataacctgcgctgcgatatgctctacttaaattatgcataataatatgagccaattacatttccctcaattttgtcaaattacacaaaaagttcctacttttctacgcgtacaatgacctctc

SEQ ID NO: 270288 - DNA, 419 bp, Glycine max
  unsure (1)..(419): unsure at all n locations
ggagtagaaacatgggaccaactcattntatttcttaaaggatttcgnatctagtcaaggtgtgagagacaatacaagtttcctaacgatctctaattatgtgggccattaagtctatcatatgctgacaatagccgagaagcccatgaatctcttcnggggcggagtaggtgtctgccatcgccttggccttggctaacaatcggggaagttcttgactcccgttcaaggtaagagcaaaccgatccatccacatggttgcctcttggtgtaaagagtcgatcaccctttctttagcctcttttttcgcgtatacttgggcatattcgtccgcaatcctatgctcgtgggccgcggctagacctaactcttctggcacttggcgatgatagctagcatgttggtctctgtctcgcata

SEQ ID NO: 270289 - DNA, 318 bp, Glycine max
cgaagcgagagagcgtggaagagtcagtcttcctacttttgtttgttgaccacagagtggtacctggagatatgtcgcggtggtcacgagaccttggcgacgtcaagtggtgtgctattgcccaaaaccaaacttgaccaatctagacccaacccgggcatagtcagtcagtgagagactgtgatgtacctaaacaagcgagcttctgtcagtcatccgattaaagaacacagaccactaagcaaggaggcttgtgtggtggttggccacctatggatcatgagtgatatcaggaatctggcctctggtaatcgatta

SEQ ID NO: 270290 - DNA, 489 bp, Glycine max
  unsure (1)..(489): unsure at all n locations
ttganncctttgagtcgcctccgatctacctgagactaactagcacactagccagaatcggacatccgngtgagaagatatgagcgaatggatatgtctttatttttcgctggagagtttccagcgtctaattatattatgcgccagatattgacatcctggagaagagatacgagcgataagatatgaccagaggaatctgcggagaacttccagcgtatcgttttaagcttagcctgaatgaagctccgtgtgagaagatatgagcgtaaagatatgaccagagatattgctgtgagattccagcgtttataatgtgaggcgcccgattggacatcccggtgagacgtccgagcgtaaagatttacaataggattcgatgatgacttccagcgttattattatacttagcccgaattggacctcctggtgaaagtttgggcgataagtttgacataggttcttggaaatttcggtgtctaattatcg

SEQ ID NO: 270291 - DNA, 360 bp, Glycine max
agacctacaagtattcaaaagcacaacatttccaaaagttatcaagtccttattaaaacaaagccatcggaagcaaagaatattattgcacaaagcactacaatccacaaaagaaacaataaagctatattccgcagaagaatcaatcttttagtgtagcaattcatgacaagctcgagaagatgtcatgaaccacctacaataacaagcaccaacggtcacaatttcaaaattcaaattgtgcaaattgtagtagtaattaaggaagcaaaagtgtcaacataaaaatttcagacgttataggaaaaaggcagtaaagaaaactaacatccacctatgttaaagggtcaacttacacat

SEQ ID NO: 270292 - DNA, 408 bp, Glycine max
cgttataaaagggaggcttaaatatattttttattttttaaatttgctagtttatatcttttagtctcccaaattaaaatatgtattttttaattttttgaatttgcaaaattttttttagtccgtcttgagataaaaaaaatataacactatagtgttcataatgtatgataagtatttgatataaaatacaagagaaattaaatttaaattttgtgtgttttaaataacttgagtaataaagtatgtgagcgtgttatgaggtggttttgggtttgtcttggtatccttttggttgagtttccatatgagtagagtgatagggaagagagtcatttctgcaacaattttgcttaagtgaggagggtcggtcacttaagcaagatcgatagcttaagagagtatatg

SEQ ID NO: 270293 - DNA, 143 bp, Glycine max
gtggatgtttttccatgttctcagtatgaaaattagtagtctaaagctcaaaattagaacatttcaaatcaccagcaacagaatactcataatgctcaaaatgcacaaaatgatcatgatgaacactatgcctaagtgatcta

SEQ ID NO: 270294 - DNA, 335 bp, Glycine max
ttcgagtgcctgtatattgatgcgcctgaatcagacatccgagtgaaaagttatgaccatttgaatttctcgagagcttcctatgtttaatttcgagcgtgtcgatatattatacgcctgaatcgaacctcagtgtaaaaagttatgaccatttgaatttcttgagagcatccgttgttcattgttgagcgtctctatatgtgatgcacctgaatcggacctccgcgtgaaaagatatgaccatttgaatttctcgagagctttcgttgttcaattttgagcgtctcgacatatgatgcgcccgaatcggacatccatgggaaaagacatgacta

SEQ ID NO: 270295 - DNA, 420 bp, Glycine max
  unsure (1)..(420): unsure at all n locations
atcggtttaaatatgtttgtaatctctataaaactattggattntgattttagttgaaattatttctttcggtcaataattatgtgacacttgttaattctcaaggcttcatgccttcacttcctctttacatttcatcttctctggtgatgagcatcacttatcaaataacaaagatactagatcacaagaattttcttgtctagaaacatgttgaacatgttcttaaggcacatcgcttgcatcaatttgttataagtcctcaaattcctctaatattttttgtcagcaatcagattgtgatactggtattgagaatcctgcattcttactttatgagcaattggaccaaatcttactctattggctccaatcttcttaatctagtacagtagcactattctcttcaaagtcatacat

SEQ ID NO: 270296 - DNA, 404 bp, Glycine max
  unsure (1)..(404): unsure at all n locations
tcttcactatacatcaagaatcaccgggttgagtcttctctgtggttgtcttactggcttagcctcatcttctaaatttattcgatgcatacatgtggatgggctaataccaggaatatctgccagggtccagcctatagctttcttatgcttcttgagaacaaataacaacttctcctcttgctcatcagcaagggaggcagatataattactggaaaacttttgccatcatccaagtaagcatattttaaattagatggtagaggcttcaattctggtgtgggcggctggatattggtataaagagatggtttctcatcctacacctcataaagaaagtcgaggtatgtgtacttactgaaacatggttatgttgatctgactctataanatcaatctcaag

SEQ ID NO: 270297 - DNA, 467 bp, Glycine max
  unsure (1)..(467): unsure at all n locations
agccaattgaacagtcgaccgggatctctgagtcacctgcttgatgcaagctcagtgggatatggtgcacccgtcatatgggtactaggtggcgatctggcgatggcacaaatcaactctctcatctccacaagtcaggcacaagcataccatccccagttgcccacctttaacttgagctcacacactcctacataacccttattctcgttcctctcagcacccggtccccatcaaccgctccaagctttcacaatatccaacaattcaattccaatcctcatgaactacccctaaacaagaaaacagagtagaggcagaagactctgcccataactcattcaaattccacaacttttcttactcatatacccccagtacattctcttcgtttcaattcgtacccattgatcgacttgaaattttactggagggtctagccacaaatctcattttgaccgtgggan

SEQ ID NO: 270298 - DNA, 339 bp, Glycine max
  unsure (1)..(339): unsure at all n locations
ggtgcgtaatgtaacgtaagttagaaattaattggtgaattttgattaacggtgatctagatttcatagaattataaagaggggatcaagtcaaaagagtctaaagtggacggcattttcataaatgactatacaactagattaaaatagaattttagtttaattagttgatgactaattaaagcgtccgattatatgatgtagaataattaaaataagttagtgttgtaataccctgaaaaattacaactcaagctgacggaggaaactctatngtgtgtcttctatgtttgtgtgtatttaatttcatgagttatatgttctcacggtgatattgga

SEQ ID NO: 270299 - DNA, 346 bp, Glycine max
  unsure (1)..(346): unsure at all n locations
cactatatacctaagctctcgagctaatgatacttgngagttagttcctcttcttccaagctatatacctgcttggtgttgatgggtatatgctataaaagttggggccaacggacatattgatcgcctcaaagctcgattggtagccgaaagttatactcagatttatggcctatattatggagatactctcttccctgtggctaaaattaacttctgttcgactctttcttgccataattgtgatccgtcattggctactatatcaggaggatattaaaaatgccattctacatggggaattagaaaaagagagttatatggagcaatcactgggatttgttgc

SEQ ID NO: 270300 - DNA, 303 bp, Glycine max
gaattatgacgcaccaactagaatcaagcccgagctattgtgcaatgcatatcaacggtgcaaaacacaccaaatgattataatgatgagcggctcaaattctcacaaaagtaaaaccatcactttcaaactgagctttctatactatcacgacatgctgagaacaatctaagatgtcaagacacataatgtcaataactatcattttcaaaacaattacccatttcttgaacctatactataattcaaagaaaaacatgcgaagtcagacgtgcacactaaattgacccaaaatattaaact

SEQ ID NO: 270301 - DNA, 403 bp, Glycine max
  unsure (1)..(403): unsure at all n locations
gacatcttgacttgctttccaatctgacatttaccactgattctgcctnnnggtatagtcagattgtgaatgcctctaacagcacctctgtcaatgatttttttcatgcctcttaagtgcagatgtccaaatctttgatgccatattctgacttcatattctctggagaatagacatgtggaggagtaactggtttgttgaggtgtccatnnnnaacagttggcctttgatctactggccttcattaagacttcactcttctcatttgtcaccaagcattgtgactttgagaaggttacattgaatacttcatcacacagctgactgatgctgatcaagtaggaatctgtcccttcaccaccgtactttggccagactacgaaggacatcatggactagcttt

SEQ ID NO: 270302 - DNA, 390 bp, Glycine max
ctaacctcattgtctctcacagtctttagatttgggagccaatccaatccttgtgtccggactctcagccacttatgatagccaccgatgatcccattactgcttcccctaagctctctgtcctttcttcatgccgcatcccatgccttgcgaactccttggagtacctttgcattgtggtcactgaaacctcgtgcgatgaaaggcgtgatgctttcgtctgatggcactcctctcatgggacatccttcgcatgaagatagaatcctgattcttccttccttctagcgagggaaccatttaacaggcgcccctccatgctagccaagagttggttccaattcgtctttctttttctacgcacgagcggggaccttgtagcagatagac

SEQ ID NO: 270303 - DNA, 424 bp, Glycine max
atgccttaatcatttccaaatatgcatgtgaattatgacgcatcaacaagaatcaagccaaggctattgtgcaagcaatcaatggggcacaacacaccaaatgattataatgatggatggctcaaattctcacaaaggtaaaatcatcactttcaaattgagctctcaaaactatcatgacatgtagagaagaatcaatgatttcaagtcacaaaatgtcaagaacttttattttcaaaacaattacccattccttgaacatatcctataattcaaagaaaaacatgcatagtcgtacgtgcacacaaaattgacccaaaatattaaactgaaaattcgcgaaactaactacattacaaattacacaactacaattaacaaagcaacaaactacagaacaaagacactccccccccccccatac

SEQ ID NO: 270304 - DNA, 264 bp, Glycine max
  unsure (1)..(264): unsure at all n locations
gcttggaggggttgatggagacccggtgctgatattaacgacgatnagggctacctgggagtacatgaactcaattgaacgtgggcaactggcgatggtgggttcctgtttgatatgtgaaaatgggataatttaatttgcgccatcgacccatcaccaccttgtcccacatatgaccggttaccccatattcaacaatcctttattgataaacctcggacaaatcgccctctacctttttttgttaccacacaaagtttccct

SEQ ID NO: 270305 - DNA, 416 bp, Glycine max
ccattaccctgaggtgtcgaattggtaagcatcacactatgttgtctggaggactgagcaactggtgtggagttaggattaacccaagtgtttgaagtcttacccgtagcaatcgaattaagaatcggttggagtgtcattggatcaacaaaagtgagtgactcatgatgccgaaaaattatatcagaacgaaagtgacacattatccgtgtgaccatacttgatgcagatttaacactggaagttaacaaacctgcctccaccgcgacctcttctataaccactgtgaccaccacctttaccaaacgacatattgtgggcaccattacctttgccataactttctctgaaaccactaaaatcattagctttgacaaaacttcatatgaatagccttaagagtaattaaccgatga

SEQ ID NO: 270306 - DNA, 64 bp, Glycine max
tcactaaagaactattttgaaaaatttttaaaaaaaggggtggcttgttttagagaaaaaggaa

SEQ ID NO: 270307 - DNA, 166 bp, Glycine max
gcaccggagaatggcgcccgagactacagttatcaccgtatgcaatcatgcagagcttccgtcggtcaatttagagcgacgtctattccgatgaccactaatgtgtcttccgccgttaaagtgactaccatgtgaatttgtcgagagctgtgcgcgctgaatatga

SEQ ID NO: 270308 - DNA, 229 bp, Glycine max
ccctaagtgaaaaccatgatatacccaatctttaaaggattttggaccttggaattgttttggaataagtgtggggggttttgtttaatggataacatgtttgtgggctatcttcatgatgattttggccatactgatgacattgatattgttaatgttgacatgctgatgagatgttgttctcaaaggctcagacaaaaaaaaatggaaaagaaaaagaaagccataa

SEQ ID NO: 270309 - DNA, 431 bp, Glycine max
  unsure (1)..(431): unsure at all n locations
aaccacttganccatgcgaacccgggatcctttgagtacacctccgtcatgcaagctcctccacacagactttcagatgcattatttattattgaataaattttattgagaaacatgcaattatttggattacttttatgaactttcactttgaaagaaatggtctccaatttttggtatcatttcgaaaaaaaatgggcttccataattggttaagtctttattaatggttaggaaaaccttcttgaaaaaaagtacctatttttaatgagaaaatcagctttacatctaataaaaaaatattatatgctctaaattgaaaattacatgattaaattgaaatataaaaggtattaaatcaaattccaagcatcttaaattagatgatgaaaaactaattttgcctttaatacctgtggccgaatagaatg

SEQ ID NO: 270310 - DNA, 392 bp, Glycine max
  unsure (1)..(392): unsure at all n locations
tcagagatatgttcaggcaaggtttttatcaacctattgagtttatattcggcagtgtattcagtgcttgcagaagccttctngaaccagaatttggaccgcaaatacatggaatgtgtgctaaatttggtttaaggaggaatgtttttgctgggtgctccctctgtgacatgtatgcaaaatttggattcttaccttcagcaataaaggccttttatcaaattgaaagccctgatttagtgtcatggaatgcaattattgcagcattatctgacagtggtgatgttaatgaagccatatattttttttgtcagatgatgcatacgggattgatgccagatggcattacttttctctccttaccttgtgcttgtgggagcccagtgacaatc

SEQ ID NO: 270311 - DNA, 382 bp, Glycine max
  unsure (1)..(382): unsure at all n locations
ataatccaaanatgtcaaagaattgggtgttgtttaagcatttctagactttctgtgattgggttaaagatacaatctttgcaaatgagaatgctctacaaacattaagaaagctagcagatgggcctaatagaaatgttatatcttggaaaggatatgacataaacatgtattcattttacacaaaagcacaagatgacaaaagtacaatgcagaacaccggggtcatcctaagggctgaatctcaacacttcgcaagtgtgaatgacgccaatccctgtgtagcttccatcccttactctgggttcattgatgagatttgggagcttaactatgggaaacttactatatgttttttcaaatgtgaatgggttgacagcaa

SEQ ID NO: 270312 - DNA, 90 bp, Glycine max
  unsure (1)..(90): unsure at all n locations
taacctttgtttacattagttacatcttntaaagccatatgtttaatacttaaaatgacacttattattggtttacggaatgacaccaaa

SEQ ID NO: 270313 - DNA, 124 bp, Glycine max
atgcaattctttatggcaaagatcaagacattaccctagaagaagtctatgcctcaataaggaccaaggagatgcaatcatatcaagactccaaatctgacgataatggtgaaagcctgaatat

SEQ ID NO: 270314 - DNA, 424 bp, Glycine max
attatggggtacccatcacatgtggtactaggtggtggtcttgcgatggtgcacaacaagttttccacatccacaatgcgcgcataaacccaccatcccctgttgcccaccttcaactgagctcacgtactcgcacgtagcccatatcctcgtttctctcaataccgggtccccatcaatcctcccattctttcacaacatccaagcaaaacaacattcaaacagcacaagctatcacagccaagcataacagagcaaaggcagaatactctgccaaaacaccaaccaaatcacagcttttctcacttaaagaccccagtaacaattccttcgttccggttcattaaccgttggatcaactcgaacatattactggaaggtcttagtacataagcacacattttgaccgttgggatctactatc

SEQ ID NO: 270315 - DNA, 406 bp, Glycine max
accttgaacaggcaactaactcctctttcataaccatgctatgtgctcgcgaatggtgcctctcttcccttcgcagcttgagttcattgttgctaccccacagagctccacgaaatttatttcggccatactcttccttgcgagccctcttggtctcttgttcaagggctcttgcagtagttgcattctcttcccgtaacccggcacactccttccgaatgtgtgtagcgtccaacttgaactttctcttggcaaagttcgcctttcctaactcgcttttgagaggctggaactttttgtcctcttccggtgcttcaaaactttctttgctgacgacttttaacttggtgagccaatctaaacctcgtacatgaacttttaaccattcatggtcccaccaatgatg

SEQ ID NO: 270316 - DNA, 277 bp, Glycine max
  unsure (1)..(277): unsure at all n locations
gaggattgatggngacccggtgttgagagaaactatgatttgtctacgtgggagtacgtgagctcatttggaggtgggcaacaggggatggtgggcctacgcgcgcattgtggatgtggaaagcttgttgtgcaccatcgcccgaccgccacctagtacgacatgtgatgggtaccccataatcctacaagcttgagatgaagaagtgttgaagggtgaaacttcctgcttttattgttgaccacagagtgcgacctggagatatgttgcgggggtc

SEQ ID NO: 270317 - DNA, 473 bp, Glycine max
  unsure (1)..(473): unsure at all n locations
ctttagtacaatggatntagctgggctatataggcaatcaagccaatgagacaaacaaaagtataacgcctaatgcataatcttttgaattttaatgagacgagaaagaagtttatgttgaatcggttaacccgtgacgctcccccaggaagattgagaaataacgaaggatgatcctaagagatgaggaccgagatcggaaagagataagattgacatttaagcatgatacataaattgagaaatgcccaccaccgctccttgtgaagaactggagagataaaatttgatggcttataaattaggacgacatgatctatccctttgaaatcttttgtagcctacattacctagccttggttatggaatagacgtccgataagctcaaatctccatctacagatttaacattcgaaaagaacggctattacttatccttccaacgcaaagaatcaataccaacccttttaacg

SEQ ID NO: 270318 - DNA, 306 bp, Glycine max
  unsure (1)..(306): unsure at all n locations
agagcactacanacattgaaggtgatgattttctgcccttgcctgaaaatcttagtgccatccactgggtccttttaaaatcttacatctttgaatgttactggatgtcatggattaatattgatatatttgttcacattccaaacagccaaaaatttaggtcatctgaagagcttgttcaattcctaaaggatggccaagctatacaggagatagtgtccaaagatggagatcatgaatccaatgacgaacaaataacatttgagtagctcacgcgtttgactcttggatctttaccaagcatcg

SEQ ID NO: 270319 - DNA, 288 bp, Glycine max
  unsure (1)..(288): unsure at all n locations
tgaaagttatttggtgtgaggttttttttttgaagggggggaaagggggtttttttaaaantgggggaaggggaaaaacaaagagagattatttaaaaaaaaaatgttggtttgtttaaaaaaggggaaaaaatggatttggtaaaaactaattgtagtaatggttaaagaaaggttgggaatttaataagataaaaggttaaattaatatttggaattattaatggaaataaagaatagaaaaggtaaaaatggtattgaaaaaaagggaataggggggaaaataat

SEQ ID NO: 270320 - DNA, 406 bp, Glycine max
  unsure (1)..(406): unsure at all n locations
cgtaggattatggngtacccatcacatgtggtactaggtggcggtctggcgatggtgcacaacaagttttccacatccacaatgcgcgcataaacccaccatcccctgttgcccacctccatctgagctcacgtactcccacgtagcccatatcctcgtttctctcaacaccgggtccccatcaatcctcccaagcttccacaacatncaagcaaaacaaaattcaaacagcacaagctatcacagccaagcaaaacagggcaaagccagaaaactctgctcaacacaccaacaaaatcatagcttttctcacttaaagaccccagtaacaatttcttcgatccaattcgttaaccgttggatcgactccaaaattttactggagatctacagtacataagcctac

SEQ ID NO: 270321 - DNA, 398 bp, Glycine max
  unsure (1)..(398): unsure at all n locations
ntgaaacctggaacccgtgatctttgagtcaccttcggcatgcaagcttttctacaaccttttctcccctttgggcacctttaaaaggcttatgacctcggaattcagcacgatattagcagtgggagtgaaagatataattctccgagtattaaacacaattagcccaacttcccaagaagaaattatcaaccagaatcccaataacttaaaatgtcaacaccacaaaacatgcaagactgaaattaaaagccacaagataaatagcaagtacttagcatataatgtaaatctaagaactaaaaccaaatacacggcgataaagactaatcgaaactaaatctaagagacggggtggtggggaaatctaacttgacgatgtattgacatctttcagt

SEQ ID NO: 270322 - DNA, 356 bp, Glycine max
  unsure (1)..(356): unsure at all n locations
ggttatgttttaatttgggttcacaaataattgattatntgttttgataattgattatttgaattaacagtagccccattgtacaattttgctagatttaatcgattatattgagacataatcaattagatggacaaaaagtcaaccttcaagtgagaattaagaaaagtggtgtcttcatgaaagctgtagtcctaaactttagctaactaatgactttggtctcactcataaacaacgtatgcaactctagtgatgcctaaattaatgaacacaggtcaagttgtctataataagtaaaattttcatatagatcgtaactttgaacatagtatacttctaaaccaagttttggg

SEQ ID NO: 270323 - DNA, 441 bp, Glycine max
  unsure (1)..(441): unsure at all n locations
tttggaccttgaacaggcaactaactcctctntcaaaaccatgctctgtgctcgcgactggtccctttcttcccttcgcaacttgagttcactattgctaccccatagagctccgcgaaatttgttccggccatactcttccttgcgagccctcttggtctcttgttcaagggctcttgcggtaattgcattctcttcccgtaacccggcacactccttccgaacgtgtgtagcggccaacttgaacttctccttggcaagttntgcctttcctaactcgcttttgagagcttggacttctttgtcttcttccggtgcttcaaaattctcttcgctgacgacttttaacttggcgagccaatctaaacctcgtatatgaactttcagccattcgtggtacccaccaatgatgccattacgaatgcctctaagctcttgatc

SEQ ID NO: 270324 - DNA, 120 bp, Glycine max
  unsure (1)..(120): unsure at all n locations
cttgtctaaactcatanaacattttctatgntctgtctttgcatatctttcaatggatcatttgaagatctcgcataactttcntgcatatgatgtttttctttgagatagtctctcatg

SEQ ID NO: 270325 - DNA, 223 bp, Glycine max
gctgacatgggagactgtaacgctacgtgacaaccacctcatgtatgacttttcaccggagaaacaggttcttccgataagccgccaggtgtgtacgggatgaacctatgctgttttgtattggagctaacaacttgtcaaggtgatgtgctgcaactggagaacatgctatcatactatcgcattgtcacaactcactatatagaggccacttcggtggaga

SEQ ID NO: 270326 - DNA, 410 bp, Glycine max
  unsure (1)..(410): unsure at all n locations
cgcatgatntacattctcccnctttctcaagcaaattcttaattcttcttgacatcatcaaaatcttcatgatttacatataatagtcgctaagttcttcacttaaactcttgcaagagtcatgaatactataggaggaatgtttttctcttttcatttctttcattatttttcttctttctttctctcttattttctctctttcatcttgacttatttcttccactctttttttttacctttttcttttctctcttgtttttctttccacaacttaagggatctcaactcatctaatatcttatacaaggggtccttatgagtagagccctcaccattaacactagatgaagaatgaagactcatgttggttcctatgttatggttcttccttggttggggtttgaaaa

SEQ ID NO: 270327 - DNA, 249 bp, Glycine max
  unsure (1)..(249): unsure at all n locations
cgggatccttagtgacctgcggctgcaactgaatagagtggattaagcctagntctctttggtatagggaatcattaaggaactttaaaaaaacgtccgatgatttttttatatttattcaagatattggatatataataatatctggactttttttggataaccgagattacaagtgaatgatcgcttggatttattttatagtaattaacgagataccacttacatgatcggtgaaattattttatt

SEQ ID NO: 270328 - DNA, 412 bp, Glycine max
  unsure (1)..(412): unsure at all n locations
tcatgccgttgaatctagattgattcaagttgttntgatgacaacatatatgatagcaaaaagcccaagagaatgatttcaagattgagtcaagaacaattcaagaatcaagagaaatttgatttccagtttcaagaaaagatgaattcaagtttcaagagaagaaatcaagaagacttcataaggaaagtattgaaaagttttttcaaaaaacaaacatagcacaattttgtttttcaaaggagttttctcaaaattttctaagttaccagagtttttactctctggtaatcgattaccagattcctgtaatcaattaccagtggcaaaattttgtttcaaaagctttaactgaattacaacgttcaataatttccaatggtgaatcgatacaattattggaatcgattac

SEQ ID NO: 270329 - DNA, 403 bp, Glycine max
  unsure (1)..(403): unsure at all n locations
ctatataacactcaagctcttcctttggtttctctactagggtttccaagcgtttgatagaatgataatggattggagcctccattnttntgtctctgtgcgagggacatttctctcaccaaacatgttattccaaaaatcccaacggtgggaatgtgtggaactaagttccaaacctagtgtacaagttttacaatgatccaacggttaacgagcccacagtcgtagctttattcggataggtatgggtgtatgcgggaaaaagatagttgtgtgcgagggacatttctcttatcacagacattaatcacacaattcaatggtggcgatatgcaaaattgagttccaaacctagagtttaaacttcatagcgatccaacggttaatgagttcgagagtatag

SEQ ID NO: 270330 - DNA, 395 bp, Glycine max
tgactccattgagaaagctctgcttatggagttgggtatgaatgctgcaccttactctactctgtttatttttcatgttctcacatagagcttgacctaaatcatctgaaggtcaactatgacacttagatgcaatgtctcaagtgctctaaaattatatatatgatggtaaaaaaaatctaaaaagttatatctaagcggtggtagttgtatccttttaagaaaactctcattttaatcattaatacagcaatatcatttttgctctctaaatctaataatattcttgtgactgtttattaaaccttatgacttgtcttactcgcagtgagttttcaagatcaatttatctaaccttttaatcgaaagatatcaattttatccttaatattaat

SEQ ID NO: 270331 - DNA, 496 bp, Glycine max
  unsure (1)..(496): unsure at all n locations
atgaancccatggatggcncctcgatctagctgacgcanatagctcataagccccgcccgngnntncgngngagagattcagtcgcaaatttatttcttctatttatctctcgngaaccatccaacctggctactgtgatatgtcgagggctctcaccatgaactttgacatatctgacttgagaaataccaattacgtgatgcctagagagagaatggctatgattcataggaacattgataagcatgaccatgcgcaacatgcctagcaactacatgggaggtaacgtcccttgttaggtggtcgatggaagaatggagtccgcgtgaggcctggggacacgtcgaaggataccactcggatttttatccatcgccggttgctctttacctacccatatcaccaccaaacatgtgtccaggaacgttactaagttaacatgataacccaatagaactggtatttgacgggggctttttaactcaagatgtgccg

SEQ ID NO: 270332 - DNA, 321 bp, Glycine max
  unsure (1)..(321): unsure at all n locations
agcttgnngcctaattgcaatctgctattccgatgtttgtgaccacgcctgagaaatgggataccattacacgcaagaacagtgacatatcattgtccatggtggtaaagctcttaattattgatgaagtccatttactcaatgatgatagaggtcctgtgatagacgctcttagttccagaccctacggcaggtaacgcatatgtcttatttccctcttttttttcatgtacaaattagttaggagaattgttaaaattattttatttcttttgatatatgaatttcagacttggcttatgacagctagcctgatattta

SEQ ID NO: 270333 - DNA, 409 bp, Glycine max
tctctttccctctcagcagcgtcacgagttaccactccctctccgtggcttttcttcctctcgctggtaagttcctctctccctcgctatctttgttttttctttcttttttcaaagtttatgtttgtttgattttgatttcatttttgaagttataagggttgcttgatttttatatttatgtctcgctatctattttgtttccgtgattttgatatgttggtgggtgtgaattgaatggatttggagttgagatagattgtgagcaccatatgtttgtgaatatgcatcaatgagaaatagagaaacaaatctatttaaatttcttgaactgtatgattttctggcggttcaagggaattgatttatttggcatctttggtatttgctgatggggttcaacgatgct

SEQ ID NO: 270334 - DNA, 337 bp, Glycine max
cgtcaggcaccgtgcttatgtgctaccactccctatcaagtcgacatgagccgggttacatggactggttagggttagcaggcctcattatgatgcaatatcctaccacatacaatggcttcatgaatgcctttgtggagaggaggcactaagaagcgtcttcatttcacctgcttatcggagagatgtatatcactctagatgatgtgtcttatttgttgcatttgcctatgacaagcaagctcattaatgatgtccttttcacctttgacagagtcatgatgaagattctgctgatgactcgccttggcattcccactgaggaagagactattta

SEQ ID NO: 270335 - DNA, 573 bp, Glycine max
  unsure (1)..(573): unsure at all n locations
cgagtccaatctntactatgngtgtcagttcatctattatantaanatnnnnnccnnnnccggcagaagctganncgtcgagatcngcgantttcaatcgacccgcagcatgcaaccccgnccgncctacccgattanacctacacttattccgcatccatatcttatcactctaacagaacacccacccgaggatgacaagtcggtaccacgatccagcgcacgccgcatcacgacgaagattctacataagcattgatcacaattcccagtactcggcatgacgcctccagtgaatcctctgcagccctaacacaccgcgtagaagatggacacgccaccagccacgcttcctccgctgataccataaccacctgctccttcactaccaaaccaatctctgcgggagcatcgacgggaccaccccaacccagtggatctaacgccgccctaacaagcaaccgacggtacggctcatccccattatcatgaatgtcacccggcaccacgcgggcccaaatcagaccgagacatgaacttctaccctcaactcaggggctacacacaaagacc

SEQ ID NO: 270336 - DNA, 401 bp, Glycine max
ataagtcatatgtgactggctaatcagcttcacagatatacatgtatatataacaagtagtaacaatgtgctttacctggaacttatataatgaaacaacttccacaacaacaccgatggacgaaccaagttcaactacaacaaactaattcaacttcacctgcagttgatataatgagtaatggctttagaagaactcatagccaaaccaagttcaagtacaacaaattaattaatctttttctcaaccaaagtatgtcaaactacttcgtggatattaaaagtgttagttattcatgtgacaggcaaagagagttgtaagacaataattcttgtttaaaactgtcaatgaagtattgcggcattaatttgatacaaactgatcaagaacaattgataca

SEQ ID NO: 270337 - DNA, 436 bp, Glycine max
  unsure (1)..(436): unsure at all n locations
agctntaagcgtgttataattaaatccttctttttataaaacaaacaaatcctaaactaggttggggtaaaaacagtctagattctaagcacaaccacaaaacaactagagttggcccaagaaaccaagcatagccaccaaacaagaagatgagtacaacaaaccccaaacaagaagatggttgcaacaaaccaaacatagagtagtcaaacaagaagagaggtgtaacaaaccaatagcaactttcaagtaagaagagaggggcgcaacaaactaatcacagctactgaactagaagaggggaaaagcaaaccaactgcagcccgcaaacaagaagaggggtgcgcgaaactaagcacagtcatccaacaagagggccctaacaaatcaagggaagctgcanacaagagaagggcacaacataacatgcgcagcc

SEQ ID NO: 270338 - DNA, 380 bp, Glycine max
  unsure (1)..(380): unsure at all n locations
ctgctgtcgtagttggcactggttactgtgacacatgcttacaacaggatntattcacgggcaaccactatatttcaggtgcatttccactgcttgacttatttttcttaaaaaggttcagtttcatatctcttaactcttacacacatgctctaaattttgattatgaagtcatgttgtcttatgtttttctatattcatgatggcaggtgcatcagttgctgtagaatgcaaagatgggtatgggaggtcaaagccaaggtttatgaaagaagtgaagacagatgagcatggggagttcaaggtgcagttgcctttctcagtgagcaaacatgtgaaaagaataaaaggatgcactgtgaaactaataaatagcagtg

SEQ ID NO: 270339 - DNA, 450 bp, Glycine max
agcttccttgagaagattcctaaagaagctagagcttagctacacaccctcctataatagctaagctcacccccatgccaaaatacatgaaaatataaaaaaaatccctattacaaagactactcaaaatgccctgaaatacaaggctaaaaccctatactactagaatggccaaaatacaaggcccaaaagaaggaaaaaccaattctaacatttacaaagaagaatggatccaaccttgacccatgggctaaaaaatctaccctaaggttcatgagaaccctagggccttctttagtagctctggcccaagcctcttggagtcttctatccaatacccttggggggcaggattgcatcatcccctccaccttggaaaggatttgacctcaaatcccgaggttcttcatactctacgctcccttcctcgacacctgaaaaaaaacatat

SEQ ID NO: 270340 - DNA, 361 bp, Glycine max
  unsure (1)..(361): unsure at all n locations
tctcggctcatgctgngaacgcctctagctcaacacccgtgcttcctaaggcacccacccagagggaagctccccaagttccaactccgaacgcgactcgaccggccggtaattccaacacgacaaggaacttccctccgagaccgttgccggaattcaccccgctcccaatgacgtacgaagatcttctaccatccctcatcgccaatcatttggtcgtggtaactcccggaagggtcttcgaaccccctttcccgaagtggtatgaccctaatgcaacttgcaagtaccatgggggtgccccggggcattccatcgaaaaatgcatgggcccttaatacaaggtcaacatctaatggat

SEQ ID NO: 270341 - DNA, 430 bp, Glycine max
agcttgccacccagctcgcccaggcgagcagggttgcttcctccagaatcaacagccttctggaggaatcttctagagggcccaagtgggcctagttgctatttgcacccccatttttactaagtacaccccctgcctttttttggtgattcttttttcgtaaagttaccgaaacttacgaattttgcaacgatacttgtttctttccgtaatgttacggaaccttgcggattacataatcatcccctttctttacttacggaatgttacggaacctcactaattgcgcaacgatgcttccatttgatttctggtgtgccacggaaccttacggattgtgcatcaatattttcttttattttccggcatgtcccggaatttcacaaattgtctaatgatgggtgccaagcaccttacaaggaccaaacaa

SEQ ID NO: 270342 - DNA, 441 bp, Glycine max
  unsure (1)..(441): unsure at all n locations
aatactccagcttatttgtgggagccttgtagatcaccaatgaattcgtggatcatatacgcgaagctcattatgatgacccgtttttgcaaggcaaggtgttagatgtaatgggggataacggtgtggagtttgagaaggacacaaccgggttaattagatttaaggggaggatatgtgtgccatctttagatgatttgaaagttaagatcttggaagaagcacataaaagtcgtcttagtttccatccaggaatgactaagatgtaccaagatttgaagagaaatttttggtggcattgcatgaagaaagatgtacttgaatatgtatcgagatgtttgacatgtcaaaaggctaatgctgagcaccagcgaccatcangagaacttgagccattggaaattttggaattgaaatgggagagcatatctatggattttg

SEQ ID NO: 270343 - DNA, 433 bp, Glycine max
agctctgacgcaacatttggagaggttaatgaagtaatgagatgattaactccatgagaggttggatcaaatggagaatagagatcataatgaagaagaaaggacgagaagagggaatgatggtgttcctagacaaaatcgaattgatggtattaaactcaacattcctccctttaaaggaaagaatgatccggacgcctacttggagtgggagataaaaatagagcatgttttctcatgcaacaactatgaggaggaccaaaaggtgaagcttgccgccatggagcttttcgactatgctcttgtgtggcggaacaagttacaaaaggagagagcaagaaatgaagagccaatggttgatacatgggcggagatgaaaaggatcatgacgaagcagtatgtgccgactagttactcaagggacttgaaattc

SEQ ID NO: 270344 - DNA, 453 bp, Glycine max
  unsure (1)..(453): unsure at all n locations
ntgatagatntcatagtaagcagaataactggagcatctntgtctatgaatcatccaacataatagggaacaaattcatagtaaccctcgagtacaagaccgagatgactatagagtagtattccctcatatttgatttccccatttccaacaacttagtatatgttttattttcatttgaaaatgttgtgacatgtgtttcaataaatccaacgaatgaaaacaaaataaatgttaaaacaaggattctttgataaaattattttcacctcaaacgtaattttataacatgttcttagttaagtacgaggctttccaccttttgcttgacaatggcaaaggagatgcacattcagagtaactagcgagctagctaaaaaacctctcgtgacatttgaccaggggaaagaaacatgatgtccaaactctggggcacaaaatatcaacatatat

SEQ ID NO: 270345 - DNA, 108 bp, Glycine max
  unsure (1)..(108): unsure at all n locations
agcttgaatcggacatccgtgtgacaagntatattcatttgaatttgtcgagagcttccgttgttcaatttctaacttctcgatatgtgatctgcctgaatcggacat

SEQ ID NO: 270346 - DNA, 373 bp, Glycine max
tataatatatcgatacgctcaaaatttaacatcggataacttttcacacggatgctcgattcaggcgcataagatgtctagaggctcgaaattgaaaaaccgaagctcatgagaatttcaaatggacataacttttcacacgaatgtccgattcaggcttataatatatcgagatgctcgaaattgaataacggaagctcttgagaatttcaaatggtcataacttgtcacactcgggtccgattcaggcttataatatatcgagacgctcgaaattaaacatcggaagctctcgagagattcaattggtcataatttttcacacggatctccgattcgggcgcatcatatgtcgagacgcgcgatattgaac

SEQ ID NO: 270347 - DNA, 414 bp, Glycine max
  unsure (1)..(414): unsure at all n locations
agcttattgatttgtcattaactgaaccccgaactttaaatgattatctcctaataccttgtttagattctaggagggcatctggttcaagacaaatttgctctaaatttgggggagaaaagttgaaaagaatgaaaagaaaaaggttaagcatcagcacacacaacaattaagttgtatgttaaaaaaataaagaagaataaattgtgttgttacagtaaggtcaaaagcaacttgagaggaaaagatactgagaaagctactggtataatacaacaccattgggataagtcaaggatttgtgctctcttanaatctaaacctttgaatcctaaaacaaccaatgaatttttgtagccaaacctcactacaagcttgagaaagtccttctgattctggttatacatttctgac

SEQ ID NO: 270348 - DNA, 337 bp, Glycine max
  unsure (1)..(337): unsure at all n locations
tctagatttcatagaattagaaaacgggtaattaagtcataaaagtttaaagtggcaggtattttcataaatgactatacaacttgtttaaaaataaaattttagtttaattagttgatgactaattaaagtatctgattatatgatatagaataattaaaataagttagagttataacaccttaaaaaattataattcatattgataaagaaaactctatgttatgtcatcgatacatgtatgaatttaatttaagtaactatatgattgtaatcatgaaatttcgtgccatgtatgaatatatgtgtatttgattngtctagtaaaacttgatag

SEQ ID NO: 270349 - DNA, 425 bp, Glycine max
  unsure (1)..(425): unsure at all n locations
agcttgggaaaaagcaagaacatataggtgttatagatagggggagctacatgaacaacatgaagactaaagcttgaagcttggataaaagcttaaagaagttctgtcttttacatgcncaactcccttaaggggcattggtattagtttttatattgaatattgcatcttagtccatatggtatcttttgtgcatcatgcatcattatgagtaagtgagaagaaaaatttctaaagttagaaaagtttcttcggaagacaaaactctctgttttaattgattacaaccttattgtaattgattatacaagttgtctgaagcttgcagagttatatctcatatcagtttaattgattacagccttatcataatcaattatagagttgttcttgagacaatgactgatttattcaggagtctctac

SEQ ID NO: 270350 - DNA, 418 bp, Glycine max
tgcgaaaggcttgtcgctggagctgacccatcaactatcctaactctttcagagtggcgattcttaggctcttgatcttgacttgatagaacctctttttaagccaaggcgtctgactcgatcccatgttttactaaagtgaaataaaacccagtgcgaatcaagactccgacatctatcacaggtgaaatggatgaatgcatgaagaaatgtgtatggtacagatgcattttacggatatgagagcccgagagattatctccttcttacctacaacattcgggcagcccgatgcatgctttaagaaggtgatatggacctccagtcttctcgtgacaaagtgaggggatcaagacgcaacccgtgcatgatgacatgatgcagatgcgaaaaaagaaaggggaacaaggagatgtac

SEQ ID NO: 270351 - DNA, 435 bp, Glycine max
  unsure (1)..(435): unsure at all n locations
agctntnntaattattttgtttaaattgtatgtgaatttaaaagtaatcaccaatttacattattatgttaaacctttaataaccctaattagtcacgtaaccctaaatcctaagtattgaattaatcataaaccctaattgatgaggaaataataaaccctaattagtgcaccctgagtagtaagctaaccctaaatcctaattagttaagcaatcctaacccctacctaataacataacccaaaccctcattaatcaagtaaccatgtaatatattaaaaatgctaatatttttgtacttaattgtaattcagaaaattataagcactaaaaaatcaagtttaaaataaaagcgactcacataaattataagtctaaattattntaaaataaatatcactctcaaactatataaacaaaaacttacaaatgaa

SEQ ID NO: 270352 - DNA, 409 bp, Glycine max
  unsure (1)..(409): unsure at all n locations
tagtcgttgtgaacttgtcattctatgaactatagctngaattttaaattaatatgattgatcgaggccgtacccgaatcaaataaacatganaatgtagtaactaggaagtgatcctatgtcgtttcccaacgaacagtgacaaaccanatgttcataatatacttgcagtaacactaacgattgggggggtttgtttgttttgtgattaaagagcagaacaagtaaactggaatacgaaactactaatattaaaaacgggttgtttcctttgattcaaaagtcattctcttatcctgngttaaggagaattcgtccttaacagtcaaccacttaatccaaccctatttcaatntaccaagcgaaaatcaacttaggattntcaatacgtgaataggcaccacataca

SEQ ID NO: 270353 - DNA, 388 bp, Glycine max
  unsure (1)..(388): unsure at all n locations
agcttggagggattgatgttaacccggtgttgataggaacgaggataagggctacctgggagtacgtgagctcactcgaaggtgggcaactggcgatggtggatttatgtgtgacttgtggatgtggagagtcgacttgcaccattcnccgatcgccacctagtaccacatatgacgggtaccccataatcctacaagcttgaagcgagaaagtgtggaacagtcagtctccctacttttattcgttgaccatagagcggtacctgcagatatgtcgccggggtcacgacaccttggcgacgtcaggtggggtgctattgaccaaaacctaacttgaccacatccgacccaacccgggcatagctcagtagtgagaacctatgaccta

SEQ ID NO: 270354 - DNA, 382 bp, Glycine max
  unsure (1)..(382): unsure at all n locations
cttgatctaccaccaccgccgccaccatcattttagttnttctcttattttaatattactagtactttgatttctagccgtgtatttggctatattattatggcatttgaacaatttagtatttctttatttgcatggtgtgtttgaaaaattatgaattatgttatatgactatgtgacttttctatatatttgatctagtcatgtttcttgcttcatgattggtttgtatttttccatgattgttgtgtgaatgattagttgtatttgcatgtttcatacttgttacgcactctggctttttgttgattccaaagggggagagaaatanggattaaatcaagaactcacatgagtaataaacttaatttttagtgaatca

SEQ ID NO: 270355 - DNA, 340 bp, Glycine max
agcttattctaaagcgggaagagaaaaaagaaatttcatagaaaaactaaacccaagccgagaagcacagaagcaactcacggtttgcgaataattttgaaaaggacactattagaggccaggagaggtgcaacagagagtaccccgtgaaagcccttaacaacttttgaaagtcagacacgacgtcattctcgccgcccccaccgtgctgtgcagaggcaacatcgactgtgtgcatctcagctcctgcgaaatcctacaacagaccaacgaccacaacgaccaatccataattctaatgcttatttgcgattaagagcaaaaacgaacatcgtacgac

SEQ ID NO: 270356 - DNA, 322 bp, Glycine max
attccacaacaaagcacggagcacatgtgtggacatctaagctgaggagttcaaattagggatacacggggctaaattatataactcgatcgctcaggcgaattaaactattcatagacataatgggagctattcttgtcttgactaccaagatgacacaaattcacttacaccaacaggctgcacacgagaagagaaatgattattagttactaagaagaggtatatgtgtaaacctatatgattcaatggagaatataaattttggctcttgtttcattgacggaatgatatttcatgcaaagctctacttctacatttc

SEQ ID NO: 270357 - DNA, 428 bp, Glycine max
  unsure (1)..(428): unsure at all n locations
agcttcttggaggtttgatggatcctcctctaatgtataggccatataatcgggcccatagtatttagcaattcttgctctcttacctcttcgaggctctatttctggttctagttgtgcaagattttcactactaatagcaggaaggtgactagatgaagtacccccactattccttaatttaaaaggaaatttattttcataaaaatcagcatcatttgactctatgatcacttttgcgtttaggtcataaaacctatacactttgctattaataacataaccaatgaacactcattcataggctctacttgcgagtttaaccctcttggggtctaggatccttacataggccaaacatncttaagttctcaaataggacaaatttggctgtcttttcattaatatctcatagggagatgtcttgc

SEQ ID NO: 270358 - DNA, 121 bp, Glycine max
cggaggatctggactgggccatcttatatatctggcctgaaatgagagagcccagatacatattcctgttcatcacaagtctatgaaccagcatcgtcctgtgcatgtttagatcggacgt

SEQ ID NO: 270359 - DNA, 403 bp, Glycine max
agcttgcttctacaaaagggagaagagagacacataaagaattcaggcgattagtccttgttgaattctttttggcaaagggaaaagagaatgaaaaagatgaataacacaagttttttatcaaagaacttttcttggaagagaaagtgttgaacaaaaacttttagaaagatgaagagaaatgaatcagaaattctgtagaaagagttgaaagagattgaaagagataattgattgaaactcatgtcatggtcacatatttataatctcttgatgactcaaagtcaaagcttgtaactcttggcaatttatttaaaaactaatcacttataaagttatgactttcgaaaaaatcttcagaaacaagtcacttgaagaattgtgacttttggaaatgtatttt

SEQ ID NO: 270360 - DNA, 334 bp, Glycine max
tcttcgatctctggatagtgggcgattgttgtgctaagacacaaagacacggattcatagatggcatatagattgttggcacaaaactatggagctgtgtgctaattgaagcactaagagaaacaaggttagcgagatgtccaactgatttatgaatgctaaccaggttctcgcatccatcaagcatcaattttcttaaattcatggctctagacacatcaagagattcagaaaccttatcacaaccggagatattcatgtaagtcaaatggtctaactgcaaaacatacataaaatcagataatcattgacaacagtacatcaaaatcatgtc

SEQ ID NO: 270361 - DNA, 405 bp, Glycine max
  unsure (1)..(405): unsure at all n locations
agcttcagaccaaagcaactcanaatctaggtatctaaaacccctcaattcagtggattctcaaggtttgagaagtgaaaatgagaatggggtaattctggagcaaactctcatctcacacaagtctataacattaatctaaactcgctcaaactggttttatgacgaaaactctaccgaatcaaaatttgactcctcaacacccaatttaccctagaaatggctcttgccctcactttggtcattcattttcctcctttgtacagcccaagctttcccacagtcctaaatgacatttcaaactaggattaactcactctaacctccaattaccactaaatnctgatttggctcttcaaatccttaaagcatcacacttttccactcatatcactacattctcac

SEQ ID NO: 270362 - DNA, 438 bp, Glycine max
  unsure (1)..(438): unsure at all n locations
atatatatgttacataacaatgaaagcaaaattgaattgattattgcttatatagaaatagttaaacaaacctgccaattatgggttttgcggaattttgcaaattcctcccttgtttctggatcaaggccatacttgactataggatcagatatttgctgaccttcattgtcagcaaagacaaattttgaagtcaatgaagacttaaatngccttcatcttgctgcaactgttgacatcaccttcttttttgcattctcaccttcagggatatcaaatttgcgctgcataacaaaaggtgttatgtaacagtangtaaatgaatcctttaaaagtaacttaacaacaaaatcaagaatggaagtgtatntagaatgacttaccanaatatctttccatattaagctctttagatcgtcngggacaacatttcaattc

SEQ ID NO: 270363 - DNA, 424 bp, Glycine max
  unsure (1)..(424): unsure at all n locations
agctnttcgattcattctatgtacccgtagtggtccacattgtgtttcgtgcattnttattctcgttntgtttactttctataccccctggtgacgtgcttaagccattctacttaagtcatttctcgcttaacttaaaaataaaattaatctccaccgaacgtttgaattgtattatccattaacttcggttaaaataaattccgaccgttcggtcgtgccgtaaccacgttggaaatcaaaaagaggtaaaaaaataatataataatcaaaaagacatcttttagtaaaataaagcggaaaatcaatcggaccgtttctctttgggatttcttattcttaatcgaatcgattaataactaaagtgaaactaaaggctaacattcactccgctagtcaagcccgccacaaaaatacggttttg

SEQ ID NO: 270364 - DNA, 246 bp, Glycine max
ataaagcgcccgacggaactatgttccgctcccgagtatgacagccaccgctttaagagcgctgaacaccaacagcgcttcgaggccatcaaagggtggtcatttctccgggagcgacgcgtccagctcaaggacgatgagtatgccgatttccaggaggagatagttcgccggcggtgggcatcactggttacccccatggccaagttcgacccagacataatcctcgaattttatgccagtgct

SEQ ID NO: 270365 - DNA, 399 bp, Glycine max
  unsure (1)..(399): unsure at all n locations
agcttgtagggttcaccccanattccgtcgtcatatgctaaacttgattcatatctacttgataattcaatggtagccataaccctagccaaggttcatcaacctccatttctccgagaatacgactcgaacacaacgtgtgcttgtcaccaagaagncccggggcgttccattgagcattgtacggctctgaagtgtagggtgcgacgtctaattgatgctggctgaaattcgaggagaatcgtgtgtaaatcctgacattgacaacagatgccacacatggggcaatcttgaaagctgttgttagatgtctctaatgactcaccacgatctttaactttcaccggaatgtgggtgtaagccattggtctgtctgctcaagcaacctgcgctcctgag

SEQ ID NO: 270366 - DNA, 395 bp, Glycine max
cgttagtgtgtgttaaatgtctaaaataaagaaaaattatgtataatgtttctctgtttaaaactttatcagtgaaaataaaatattttgaatatgaattttgtagtatttttttaattagattaggttggtgttaatgatttattagtgtgttaataattcatgaacgtttcaactttcatttaaaaaaattagtagatcatatttatttgaagaaagtattttgagtatgaaatttattttaatatgaagttgtagtatttttttaattagattaggttcattcttttgtgttaaaaattgataagcgttcaagttgaaagtgttatttgatgatgttttgctgcttcttgtatcatatctaatttaatatatctgtagtaattttgtaatta

SEQ ID NO: 270367 - DNA, 449 bp, Glycine max
  unsure (1)..(449): unsure at all n locations
agcttgcctctggagctgacccatcaactgccctaactctnttagactgttgatccctaggctcttaaccttgacttgatagaacctcgttttaagtgaacgcatttgacttgatcccatgttttactaaagtgaacaaaaatcggtgcgaatcaaaactacgacatctatcatgggtggaatggatgaatgcatgaagaaatgcatatgacacagatgcaatttatgaatacgggagcccgggaaattgtctcctttttagatacaacgtcttggggtaacacagtgcccgacgtatgtatttaagaaggtgacaccgaccctccattggtttgccaaagagaggggattaagacagaacccgtgcatgatgcatatgcgaaaggcacaacacgaaaatattaacaaccaaatataagccaaggcgtacatgtcactttgactacatg

SEQ ID NO: 270368 - DNA, 435 bp, Glycine max
  unsure (1)..(435): unsure at all n locations
tctggttagatgataaatctccacaaatctaggattcttttgagcaccaatacctctcatactctcagacacatctgctcaactctcgggcctaccttctattattgagaggagcaggaaagttgtttttagctatgtcaaagattgagtatggacatgtgtcaaccattggtcaactcgtcatctgtctaaggttggtaaggaaatacttatcaaatcttgcactcaaccataccatcatattgcatgagtgtgtttctgttaccggcttctcttgaagatcaaattatgaaaatgatgaacaattntaggtggggtactatcgcaacctaccctttggcaggagggcgacgcgagactcacaggtgcatcttccaagggaggaaaatgcacggagtcgccaccaacgtttatttgaggaaaacgtcagaaaaa

SEQ ID NO: 270369 - DNA, 268 bp, Glycine max
tcgatcaccaaaacattgtagtcgattacaactctttgaaatcatttggaacgatgaaaattcaatttgaaaactttttcaaaaataatttgctactggttatccattacaaccatctggtaatcgaattccagacagtaaaaactctttggtaaacatgatttgagagaaatcatgtactactcaattctcgagaataaagtttcatacttatcttgattaaaccctctgttgattcttgaactttgagtcttgaatcttgatcttg

SEQ ID NO: 270370 - DNA, 435 bp, Glycine max
  unsure (1)..(435): unsure at all n locations
agcttcttatccaaggctcatcttggtggtgaagtctcttcttccatggcttattccctagcggatggcgcctcccttctcctcttctnctttgccttccgctgcatctccatggtgaaaaatcaccattgaaggacctcattgaagctcaaagatccagcctccatagaagccccacaagcaagctttcatcaagtggtaatcagagcacaagagcttcaagtaggtgctccttacacctccattaattttttttctttaccttctcttccattgttggttcttcattcttctccatgtatctcctcacatgtcttgttctatatgtttttaacatgattctttagagtttccaccgattaaacttgctatagaagttagatttgattttctatggctcacatttcttgttcttgttcttgaaccatgaatttt

SEQ ID NO: 270371 - DNA, 443 bp, Glycine max
  unsure (1)..(443): unsure at all n locations
ntactatgcagagaatatccaaggaaaataccttcatctgacttagcatcaaattttcctaagttatcttttccattattcaatacaaaacatttacaaccaaagatatgaagatgtgagatgtttggttttctgccattgaacaattcatatggagttttctttaagatgggtcttattaaagccctatttaaaatgtagcatgcagtgttaacggcttcagcccaaaaatattttggaagaggtgtatcatttaataaagttctagcaatctcttccaaagatctatttttcctttcaacaacaccattttgttgaggggttcttggtgtagaaaagttatgctcaatcccatgcttatcacaaaataattcaaattctttattttcaaactcacccncatgatcactcctaatagatataatcttgagaattttcttatn

SEQ ID NO: 270372 - DNA, 395 bp, Glycine max
  unsure (1)..(395): unsure at all n locations
agctttggcctttatgttgctcaccatgttgttccccctatctctaacaatctcttcctttgtggctttgatgatgccaaacttgaatatgacattgagtgcatttggagggtctgagtgatgtaagctccattggagcttgtacgcctaggatcttcttcatcaatagattcctttgcttcttggaagatgaagggcagtggaatggagaaggaagagagagagtagatgccacttcaaggagaagatgagtctagaagaagctcaccaccataggaggccatggataagagcttggaggaagaaggagatgaatgaagggagaccgagagaacagcaccanattttgtgctctacaagatctctgaaatatgaagcttaatattcacatgatc

SEQ ID NO: 270373 - DNA, 396 bp, Glycine max
  unsure (1)..(396): unsure at all n locations
tctttgaganaacttccttgagaagtctagagcttagctacacatacccctctcataactaagctcacctccttgagaagcttccttgagaagatccctaaagaagctagagcttagctacacacacctctctaatagctaagctcacctncttgagatgagaagctagagcttagctacacacccnctataatagctaagctcacccccatgacaaaatacatgaaaatacaaaaaagtccctactacaaagactactcaaaatgcctcgaaatacaaggctaaaaccctatactactagaatggccaaaatacaaggcctaaatgaaggaaaaacctattctaatatttacaaagataagcgagctcatacttagcccatgggctcaaaatcta

SEQ ID NO: 270374 - DNA, 389 bp, Glycine max
agcttggccaatcccgacccaacccgggcatagtcagtcagtgagaacctgtggcatacctaagcaggcgagctcctggcagtcaaccaataaaataataaaagtccacgaagcaaggaggcttgtgtggcggctggccagctatctctattttgtgttatatctgaaaaatcccgtctggtaatcgattaccattcgtgggtaatcgattacagggtctaaaaattgaaacacgacgttcagtagcctctggtaatcgattaccaatggtgtgtaatcgattacacaatgttatatgctactggcaatcgattaccaattgtgtgtaatcgattacacagtgtcatatgctactggtaatcgattaccatttatgtgtaatcgattac

SEQ ID NO: 270375 - DNA, 367 bp, Glycine max
  unsure (1)..(367): unsure at all n locations
ttgagccaaaatcctgactcaccatataccttgacccagggtgagaatgtcaatccttaccctcggaagcanaaaagaaaagaaaganaatttccaatcaaagagaaagcanaaagaanagaaggaaaatttccaatcaaagagaaagcaaaaagaaaagaaagaaaattcccaatcaaagaatgggagaaagtaaaaaaggaagaagaagaaggaaagaaagctcctgatcaaggatcgaaagaaaacagaagaaatgtgcagaaaggtctttggaccggacaatatatgaacaatacagaattgtcaccaaatgaacgaaaagaaggaaatgaaaccatgacctaaagtggtcttctccctttaa

SEQ ID NO: 270376 - DNA, 425 bp, Glycine max
  unsure (1)..(425): unsure at all n locations
agcntttatttatgaacaccatggacaaaccatatatatgtgtggcaacaaacatgacaatggatgacagatgatattaaattcaatcatagaagacaaggtaattctatatatgctaaattagaagttattacccatactcacaatgtttattactatactaatcacaggtattcagctgattgaaaaggaaacaatccatctatgcttgactgaaattgaaaatatgctgcaagccaacagaaaaagcctatgagatttntctttgatgccatacccaataggatatgcaggcaacccacacnataataagctcatctacaatgaaatggcatatgacaaacaaatactggtggcagaatttaacagactctaccattcattgaccagtatatgccaattattacagttttactttaaatgat

SEQ ID NO: 270377 - DNA, 513 bp, Glycine max
  unsure (1)..(513): unsure at all n locations
cgcnttttgataccctgcgannactgngcncnnttgaaanncttgancccgttagaannncgngacactctagaagactccagctttcttgataagctctcttgagaaactttcttgagaagcttctttgggaagcctccttgagaaaactcctctaaacactttcttgagaagctttcttgagaaacttacttgggaagcttctttgagaaactctcttgagagactagagcttagctacacacacccctcttataacttagctcacctccttgagaagcttacttgataagctttcttgagaagcttgagcttagctacacacacctctcttatagctaagctcacctacttgagatgagaagctagagcttagctacacacccctatgattgcttagctcaccccatgccccatatacatgaagatacaacagaaaagtgcccactacatagactacttcaaaggcccctggatacaacgctaaaaccctatactactagaatggccaag

SEQ ID NO: 270378 - DNA, 403 bp, Glycine max
  unsure (1)..(403): unsure at all n locations
ttactaattgtggttatttgatttttgtattggtttcttttataataaactcaccacttacaattttagtaccgtgtggttggtacctgtgatgatcgcgaacctttgttcgtgggagcagaatgaaaacagtagtggacgagaagtgagattctttttgtggagccgtcgagccaacctgatgacattgggattattttgggagagagttgtgttttgttaatcaactgctccatagctggttccgtaattctttctattgatttgaagatgtaaataacaaatttaataatatgcatgagcaaatttattttccattatgtgaatgatgtgtactangttactatacatacatacatacacacatacatacatacatatatatatatatatatgtatgtct

SEQ ID NO: 270379 - DNA, 343 bp, Glycine max
  unsure (1)..(343): unsure at all n locations
nggagagaatcttgaaaanttttcatcttttacacgcctaacttccttgagtggcatttctattgggtgttatattcaatgttgcatcttagtccatatcatatcttttgtgcatcatgcatcatcatgagtaagtgagacgaaaagtgtctaagttagaaaagtttcttaacaaggcaaaactctttgatttaatccattatagctctatcggaatcgattacacaagttgtctgaagctagtagagtgatgtctcgtattggtttaattgattacaaccttctcataattgattacatatgttctttgagacaacgactaacttattcaagtgtctatata

SEQ ID NO: 270380 - DNA, 416 bp, Glycine max
agcttgtaggattatggggtacccatcacatgtgttactacgtggcggtcaggcgatggcgcacaacaagctcttacacattcacaaagcgcgcataaacccaccatctcgtgttgcccacctccaactgagctcacgctactccacgtagcccatatcttcgttcctctcaacaccgggtccccatcaatcctcccaagctcttctcaacatacacgtaaaacaacattcaccaccgcacaaactatcacagccaacaaaacacggtaaaggcagaaaactctggccacaacaccaaccaaaatcacagctcttctcacttacagaccccagtaacaattacttcgttcccgttcggtgactgttggatcgactcgaacattttactggaagtctctactacataagcctacatt

SEQ ID NO: 270381 - DNA, 376 bp, Glycine max
agcttaacaaaaggcatgcgaagcgggcccaatttctagagcaattcttttatgttatcaaacataaaaaggcaacaggcactattgtagccgatgctctctctccgcgtcatgcattactttctatgccttgaaacaaaattgatcggtcttgaatgttcgaaaagcatgtatgaaaatgacgaaacttttcgagaaatttctaacaattgtgacaaattttcacaaaacggcctctttacacatgaacgctttcttttcaaagaaaacaaatcgcgtgtgcctaaatgttctactacaaatttgcttgctcgcgaagcacatgaacgaggtttaccggcgcattctggcgtccaaaacactctagaaacatcac

SEQ ID NO: 270382 - DNA, 343 bp, Glycine max
atcgcatccactaacttacgttgagcgccgtccaactgatggtactcgtcaccaccatggtagacgccactttcagtgaaggaagattagtctgggtagacgccacttccggttaaaggagataagtctgggtagacgccacttccaatgaatgaagataagtctgggtagacgccacaaggattaccttgataagtctgataattggttcaacaaggaacccagagagaaactctcaccaaattttatcataatgccaaaagtcttttctattcaaaacataaaccaatacttatagtgtagctgaacaaaaagataaaaatagacatgggccttctaaaca

SEQ ID NO: 270383 - DNA, 349 bp, Glycine max
  unsure (1)..(349): unsure at all n locations
agctctggtagctnttacctttattaggtggctaatatgtgaaggttttccatgtttcatctagtcattaacatatagagcttctcaccaaagttcttacatcttcgtgtcacaaattttctatggacaagattggtattctttccaccaccactatcttgcaggggtgtactaatatgatagaacaattagttacataaaaactcagagtttgctatttctttgtactctctcttttcaaatgaaaaaaattgatttcaactgtcaacaaattataactaaaacgaatcaaggatcgacattactaacatccatctctaatctcaacccttgattctttttcattata

SEQ ID NO: 270384 - DNA, 306 bp, Glycine max
  unsure (1)..(306): unsure at all n locations
ggttattcaccccccattgatagatttcttgcttcatttgtaagttagccccatttgctatatgggctgccacacagacctatttttagagctcacccctacaggaatttcaaggtaagagaatggaacattcatttgactacaattgagagaagatgctggcttcctacaccagtgcttcaattggccaaacacccacattatctcttattggagtttatcttaagaccagagacctattcatagctcttcaggatacactctanaattttcccgtatcttctccatatgcaatggccaccttca

SEQ ID NO: 270385 - DNA, 409 bp, Glycine max
  unsure (1)..(409): unsure at all n locations
agcttgaaggcaaactggatgcattggttaacttgttaacccagctgtttttgaaccataaatctgtacntgttgcaagggtctgtggtttgtgctcctctgctgaccaccatacagacctttgcccttccatgcagcaacctggagcaattgagcaccccgaagcttatgctgctaatatttacaatagacctnctcaacctcagcagcaaaatcaacctcagcacaacaattatgacctctccaacaacagatacaaccctggatggaggaaccaccctaatctcagatggtctagccctcagcaacaacaacaacaacctgctccttcctttcaaaatgctgctggcccaagcagaccatacacttctccaccaatccaacaacagcaaccaccccaacaaaacca

SEQ ID NO: 270386 - DNA, 374 bp, Glycine max
  unsure (1)..(374): unsure at all n locations
tgtactaccatcgaactcggttntagacgtgacgcattanattgaagtttctccaaggtggtctttggcatcacatttaaacttgaaccattgtcgatgagtaccttatggatgacatggtccatgcatctgacagacacatgtagagctttgttatgctctctcccctcaactggaatctcttcttccgcgaacgcgatatagntattggtagttatgtgattaacaatgccttcaaaaccctcgactaagatgtcgtgtgctacgtgggcttcgttgaggacctttaccaatagtgcacgatgaggctcggagtttatgagcaattcgagcaaagagatccttgctgggggtttattcaattgctcaactac

SEQ ID NO: 270387 - DNA, 390 bp, Glycine max
agcttatagggagccatgttaatggtagaatgtttactatcgttataagcgaactctatcaatggaagaaaaccctcccaacttctctcctgctctaagacacatgctcttaaaaggtcctccaatgactgaatggtccgttcagttcggccatcagcctgaggatggtaggctgaactcagtctaagcttggttcccaccgctctgttcaagctctcccaaaacctagaggtaaatctacgatctctatcatatactatgctacatggcacaccatgtaacctgacaaccctccttatatacaacgtagtcaacttttccaacgaatatctgatactaatgggaatgaagtgagtacacttaatccatctgccacaataacccatatag

SEQ ID NO: 270388 - DNA, 488 bp, Glycine max
  unsure (1)..(488): unsure at all n locations
tgctcaggattgaccctganatgaccttgaacctgcccatataccggccgcttcatagggagctcatggttgtggttcttgaggctctctacaaagaaggttctatagaaagagctctagatattggacgctggaatctttgacaaaattctgtatcgatatgaagtggagctcgagacgtcgtttcactagctatagaggcatgctgctaatgcctatgcatgtatgctgacgcaacatgctagagtgaaatggttacatgaaaggcgcagatattcagcttactttcatctgctgacacatcatttaagaagacatcaagctattcacagattgatccttgatgggaaatgggttcangatcttattatagggctaactgacgccttgaatcacttgaaatatagatgttatgagttgaattctaatactccatctctggatggtgtagcactagctaaccttgctcaacgcgagaatgaagccct

SEQ ID NO: 270389 - DNA, 522 bp, Glycine max
  unsure (1)..(522): unsure at all n locations
cgtttncccacggcgacagtatggcncnctgcattgaccncntttgagccnctcggattctctacactcgacccgcacgcatgcaaccttgtctcattgcctatgttataccgagatcttcatgcttgtctccatcgncaagtacgaagaagagctaggtctagccgtcgcccaccagcataggaccgcggacgaatatcgccaagcatacgcggaccaagaggctcgaggaccggtgatcgactctttacaccaagaggcaactatgtggatggatcggtttgctcttaccttgcacgggagtcacgaacttccccgattgctagccaacgtcaaggtgacggcagacacctactccgtcccagaagagactcatggccttctcggctattgctagcatacgatagacttaacgcgccacataattagaaatcgttaggaaacttgcatggcctttcataccttgattagataccacttctctttctgaatacaatgagcggtccatgtctctacccacct

SEQ ID NO: 270390 - DNA, 377 bp, Glycine max
  unsure (1)..(377): unsure at all n locations
gtttgagaagggaaaatgagaatggcgtaaattcggagcaaactctcacctcacacaagtctataacatcaatttaaacttgctcaaactggttttacgcctaaaattctgccgaatcaaaatttgactactcaacacccaattgtaccctacaaatggctcttgccttcactttggtcatctgtatttctctcttgcacagcccatactttctcataaattctaaatgacatttcaagctaagattaactccctttaacctccaaataccactatattcagatttggcctttcaactgtcaaagcctcactctntntccactcataacaccatattctcactttctaaccctaggataaccctacccttcatctct

SEQ ID NO: 270391 - DNA, 430 bp, Glycine max
  unsure (1)..(430): unsure at all n locations
agcttaacaggaaaatccattatcgaaaaaaatattgctctgtctattatcgcggnggcctgccaatccaccgatgggaatatcatttcattgggttatattaaaatcagacactcgccaataaaacttgattcaaatatacaacatgaaagcaaaatagcgaagaagaggacccaatctgctatcaaaagtgatagtgtcagatgcaagagatgaaggaaaaaacatacttattgatctgacgataaaatgatggccacattttgtgatattttttttggattctctgcatcatactctgaggataaaaagatgaagatacatcaacaactgtaaattcccacgaaaataggataactgtcgcgtgttaaagcttacttaatgctgacagccacagacagtgaatatataaagaagctgtggctacatc

SEQ ID NO: 270392 - DNA, 321 bp, Glycine max
ataacttagtaacgtatatttaaaaaacaacgatacgcaggtatataattttttgagagggatgcccaaatatattaataaatacttttttttgtaaaaaaattttctatcgaaattgttaagtttttatagaaaatatgcaaatgcgaataagcgtagtgtacttttatctattgaaagagaatttatgttatttaaaataagaaaatacaacatgatatttagatctcaccggataagagagtttcaaccatattctagtcataaaatcattctaataaaaaatatatttaaaatgtaacatacttatatatggcaatg

SEQ ID NO: 270393 - DNA, 284 bp, Glycine max
  unsure (1)..(284): unsure at all n locations
tatatcacattatatcaaaataccttaaatatatcatatacataaaattgacatcacactaattttaattccaaaaattaaaaatagttcaaaattataagttttgctcttacttatataatatttaactgtcttattcatacttaatgtaagatttctcacacttgtatttcaaacacatgaatcaactcctctaccagaaacataagttnttctatttatcacagaaacatatcacattaactatatgtgaatgcatccattgcttgatatatagagagatg

SEQ ID NO: 270394 - DNA, 283 bp, Glycine max
  unsure (1)..(283): unsure at all n locations
agcttcttaaagaggatgattggatacaaaaactcataagtagccctcttgtcaaagagctaactcaatatctctctcttaagttntagctttgatatcaataaatgaaagacaatacttgtattttcacaagttttccttgttattgcaatctttcaaaagttattctttctgttttgacatgaagcaatagctctgcctccttttgtgtctatagctctgcgtccaagatctgatgtttaagaatatgtttgtgttcctgcatttgaactcaatgtggata

SEQ ID NO: 270395 - DNA, 347 bp, Glycine max
  unsure (1)..(347): unsure at all n locations
ttgacttgtgtcatcaagagattatttatatgtgaccatggtatgagttttataaaaaaaattatcaatcatcaatcatctttgaatcgtctatctttcaatcttttttcaacatcatctctcaaacatctttcaatcaatctttcaatatctttctacagaattntctgattcatttctcttcatctttctaaaagtttttgttcaacactttctcttccaagaaaagttctctgatcaaaaacttgtgttattcatgtttttcattctcttttcccttttccaaaagaacgaaggactaacagcctgaattcttttatgtctctcttctcccttacaaaagattc

SEQ ID NO: 270396 - DNA, 536 bp, Glycine max
  unsure (1)..(536): unsure at all n locations
cgcgactnttcgtnnttnnnnagggcgnacgattcganncactganntncnccgcttgagggcggtgggagngcggnngatnctntanantctatctccangcatncaanctntgaattctatttacatcgaacctttcacatattgggacccaattgaaccatttaaaataatccgccgatcaaattgatcatacatgtgtcaaatataatatgactcatgacgagaatcatacagataaacaccaccacaccatacctgacagagaatgatcattgcgcgtattctctctactaagagtcacttatttatacgcacaccagatatatgggagaccacaccagatacactcaaatacagaacaacctaaaccttaataacatatataatatggataaccataattacatcattcataacactctcccttgtctgtccattatttgagaatgnccacaacctaattgtgtttacatctctacgccaaaaaccatcccattgcgaagcgagtgtaatctcgccaacaactcttttcc

SEQ ID NO: 270397 - DNA, 292 bp, Glycine max
  unsure (1)..(292): unsure at all n locations
agcttccttaagaagattcntacagatgcttgatcttagctacacatacctctctaatagctaagctcacctncctgagatgagaagctagagctcagctacacacncnctataatagctaagctcacccctatgacaaaaaacatgaaaatacaaacaacaaaaagtccttactacaaagactactcaaaatggcccgaaatacaaggctaacaccctatactactagaatggccaaaatacaacgtccagacgaaggaaataactattctaatatttacaaagataagcg

SEQ ID NO: 270398 - DNA, 368 bp, Glycine max
  unsure (1)..(368): unsure at all n locations
atcaagcttgtactttttgatactcaaacagcccatgtttacttcaattggcgtctttagagaacttgtcttttcttaatacacttaagccaacttataaataagcattaattgaaaaagcttatgaattgtggttaaaaaggttcgtataattaaaagcatcaaaggttttggactcaacaaatttcccataacataagatgtaaaaacaattatcaaagagacattggagaacattcaccatacaaggatagagagcaaatatgaactaatcaaattgaatggtacacatactgaaataataagggactaaacaataaatatctaaacttcatataaccggnntaacatacctgctacaacaagtc

SEQ ID NO: 270399 - DNA, 459 bp, Glycine max
  unsure (1)..(459): unsure at all n locations
tgctttagcaacattntcctaagtgttagggaaaaaaatgttaatttatgtcatatgtgtagtagtgttgaaagctcaaaagaagactcgaagtgtccttggttgtactgcaatgaagaagtcaacatactcactggatgaagagaaagattttaaaccatgagaagtattcaataactaaaggacaagaagaatgtcacaaacatgaagattttcacaatgaacatgacatgaagaataacattgttgtaacacattcaaaatggaatttcatcaacaagacaagttcattatggacattgtatctagagttccataatgaaattaaggtattcttggtggctatggaaatcttgaagaaagattttaactttcatgtgcaagtcgtggtctgatacaacctggatcatggacaaaattgagcctaaagttacaaatgttgatctntctggacaactt

SEQ ID NO: 270400 - DNA, 361 bp, Glycine max
  unsure (1)..(361): unsure at all n locations
tatcacacacacacacactctcatacacacacatttatatgcacnagagagcagcggagagggatcatttgcgccagtgacaagccacaccaatactgaaatatgacacacaaaatatgatacataatacacaatatgagaagtaacaccgcccatatgacacaattctaacacacacacattcacagaacacagagaccacgactaacttccactgaatctattaacggaaagaacagaataaactgaagcggngacagagccgcacacgatcatgccacagggagaggagagatgaaagacacacactgcctatttattgatgaaagaaacaaaagctcacaaagaggttctcacagct

SEQ ID NO: 270401 - DNA, 504 bp, Glycine max
  unsure (1)..(504): unsure at all n locations
cgcccatcganccccctggatnnactggacaccnttgaatactctagccaccagtcngattaccacancacttcgaagctgacgatgttctttattgcttcatgctattattgcacactgcnctgctatgatactgtgatgttctgttcctgcagtggctatgagtatgacagttgaacggttgtgttgaactatctgcaccaaaggctgccacggcctagctatgatgccgtcgctgaatggcactatacacctgactgctgtctggtttgcaaccagctgcatatgcaataggttgtgaacccaattgaatgatatataaagggctatacgctctatcttgtgctatttgcatgatgattgacaaactatcaataattatagagtactcgcaataatctttgatgaagagataatgagaggatttctcatattaatcctacntctgagatcatcatgtaatttactcaggtatgagttttctcgaactacatctagacgccc

SEQ ID NO: 270402 - DNA, 357 bp, Glycine max
agctttataagcgcacgtctggaagacaaaggtttcgtggtcgcaatatgcgaagatgatgttccaagcacattggatttggcacgactatgccctcctgatttccagttgggaaattggcaagcggaggaacgcccccgcatttacgccacgagcataatgtaaacctttacggctttaaaagttctatagccgggcctacgctttagagtttcttcttttgttcaggctttgcgcctctcgcttttgaatccaaactacaaggatctttcttcatttgttcctaccgctctacccattctcattcatttgcatgtctactcttttctctgaaccggcacatccgatgacgagtcc

SEQ ID NO: 270403 - DNA, 387 bp, Glycine max
acccatcacatgtggtactaggtggttttcgggcgatggtgttagtcaactctccacatccacaattcacacataaacccaccatccccagttgcccaccttcactgagctctcgtactcccacgtagcccttatcctcgttcctctcaacgccgggtccccatcaatcctctcaagcttccacaacatccaagtaattcaacatccaagcatcataaactaacatagccaagagaatagagcaaaggcagaaaactctgcccaaacacaaaccaatatcacagcttttcacactcaaataccccagtaacattctcttcgttccaattcgttacagttggatcgactcgaaaattttactggaagtctctattacataagtctaca

SEQ ID NO: 270404 - DNA, 334 bp, Glycine max
taaaatattttaatgccattaccctagggaatcaaaacacacttaatggctgagctgaactgacattgctggcaaccaaaagtcacccccaatagccaacaactcagacaccatttggtctcccaaaaggctgatgcctaagttgccaaccgtgcccttattacaacttgcactaaagcccttctagttgattaacccaaaacatatttttcggcacgcaactttacaaggattgggccattatttacacaaactacacactctaaaattgaaataaagcggtgtcatttaatcctccatttgggccatgacacaactcacaaccttgcacttt

SEQ ID NO: 270405 - DNA, 262 bp, Glycine max
  unsure (1)..(262): unsure at all n locations
aacaagggaagctctcgaganactcanagancatttcttatcacacagatgttcgantcaggcgcataatattccgagacgctcgaaattgaacaacgaatggttgtgagaaattcaaatggtcagaacttgtcacacggatgttcgaataaggcgcataatatatcaagatgctcgaaaatgaacaacgaatgcccttgagaaatgcaaatggtcataacttgtcacacggatgactgattcaggcgcattatatatccag

SEQ ID NO: 270406 - DNA, 270 bp, Glycine max
agcacaagagtttcaagtccgtgctccttaaaactccattaattttttttctttaccttctcttccattgctgcctcttcattcttctccatgtatctcctcacatgtctcgcgctaaatgctgttaacatgattctttacagcctccaccgactaaacttgctatagaaactagatttgattttctatggctcacacttcttgctcttgttctcgaaccatgaattgtgttgagtttaagtccctttgagtttcgccttgttatttttt

SEQ ID NO: 270407 - DNA, 284 bp, Glycine max
  unsure (1)..(284): unsure at all n locations
ttgatcatcctactangacgactgagaaaactggngcaaataaagagggtgaggatgagggagaaacccatgctgtgactgccattcctgtacggccaaatttcccaccaacccaacaatatctttactcagccaataacaaactttctccttacccaccacccagttatccacaaaggccatccctaaatctaccacaaagtctgtctaccgcacttncaatgacgaacaccacctttagcacaaaccaaaaacacccaccaagaagtgaattttgcagcgag

SEQ ID NO: 270408 - DNA, 423 bp, Glycine max
  unsure (1)..(423): unsure at all n locations
gttgggctgcgcctgcgcgaagattctattcgtttctcttaacctatctcgatgcccttctcgcttcgatgtaaccttcagatgtctatatactatcgggccaaacattcgaacgttaattgctcttcctaacttgtgcaatcacagaatcacncgctaaacccattaattttanaaccaaaactttgactaactattctactatcaattcacaattattcaacacgtattattaagcgcatctatgttcatgcgctaagccgtgagtctcaagcgcttagcgcctaacccttgcatctgacgtcgattcggtatgctaagctggccacagctgagctaacctaacttcaatatgatctgaatgccctcagctttaacataatcctaagcgacaactattcttgggtaaccgtgactatttcg

SEQ ID NO: 270409 - DNA, 366 bp, Glycine max
  unsure (1)..(366): unsure at all n locations
actataaaactcagcttgtgatcgatgaaggttgatttctgctttaagagggcattatacggaagagacacgaatgtcttgcgcgtgtcttcttctctgaacgtcaataacacaattgntgaccttggagtagctgttggaagatgaagacgcccttgagtgcaagaaatgaattctagaccatgctctacttagaagacaagacacggtgtgtgttttttcttcataagaaccaaagaaaaaatttataataaatccattaaaataaacccctttggcatagatagagaacactgtgctttactcatcttttaaggtagattaacgaattatcaatcgcactgagaaaaggtacagttaaatact

SEQ ID NO: 270410 - DNA, 414 bp, Glycine max
agctttggaaaatgatttctatacaaaagttagtcgtgtaaagcaactaacaattacaatgattacgattctgatttcaaggaaagaacccatgagcaatgcatcccaatgtgaaaagaaaaataagcatggatgtatgtgaacgatacattcttgaagtattgcaagttttacacaggacattcagtacaacataaggtcgaatcaattcagatttttattaaagcaacatggttcatcgcatcttgtcaaagtgaaactggaaataaaatattgacatcaagagtcctcaattctgtgaattatctacctcaatcttgtgttggcagcacacaaataagctatgtaacttgatccatcttctgccccaacctttgcaagctggttacttccatacttgaccttgacttgatg

SEQ ID NO: 270411 - DNA, 433 bp, Glycine max
tcggaagaaagtgatgaggtacaagccctaaaggcagagcttgtaagagcccgggtagtcgaagagaagttcaagtccctagccatcaaatgttgaaaagagtatgatgaactaagggacgtcaatatggccaccgctgaagccttggaacgagaaaccaagaaggcctaaaaggaagaacacgaccaaagcaaagtcttgaggggctttatagggcagcaatagtgagctcaagctccgaagaggtgaaaggaatcatcacgggtcaaaggcatgatcttgaaggacgagctaaaggcttgccttacgtcgaaaataaatttgtcccaacagttaagcgagactgaagggaatatgtgggtgcaaagagaagctaaatctagcggcgactcacgagcaaaggctataggatgagtacgccaagatatcagca

SEQ ID NO: 270412 - DNA, 287 bp, Glycine max
  unsure (1)..(287): unsure at all n locations
agcttttaacgttctttgtgttaataatgaactttgcgaaagcagctttagcaaaccatgcatataatattcttgtcgaacaaacatgtcacattgttgggaaacaaatgatcgataccatagtaatggggttcacatatgtacacccatagtagtggaataccctgttggagtactgaccaatgctgggaaatcgatgacgtctatcccttggagattcaactngtaatacagatacaaattgtttgcacatgtcaaaaaaagactgaatgtgatgctataaagat

SEQ ID NO: 270413 - DNA, 433 bp, Glycine max
  unsure (1)..(433): unsure at all n locations
ggcttgaactntagtaaaatggtnttaaagaaatttatttatttttaaagataaaataacaaanaaataagtgtaatttttagaaaatttaatatttataggttgtagctcgattattttgtctaacttttaaattaaaagggagttttaaagtataaaaatgaaagttaatgaacaacttctacttatttttttaagntctatttttttatttaacttattagtagcttttaagcacaaaaaaagttgggccaaacaaaacctaaggctatttcagttccctaacctaaaattataatttatttatttttatctaaattttctaacttaattataactctattatatttattaatttttctttaattttttataactntatcaatataatatttaataattattcttatacaagataattaaaaaaatgatc

SEQ ID NO: 270414 - DNA, 334 bp, Glycine max
  unsure (1)..(334): unsure at all n locations
agctttcttcacaacaagtattttcatttttgttttctttaataattattaacaaacgatctgttacaaatcaagctttcactatcatccgcttaatgcttactaaatgtgtacaataaacaaggagctgagggaccggccaaacctgcagatatgctggatcctgacgtcacatccttgtacctgatgacattgaccatcctgcaagctgctgcacgtgtcctgggatgctaccatgtttacggcgcataatgataattttccattgcacatacagcatgaagatctttntgaaatagcacatgctgcgnaatgcttgagcatctctattata

SEQ ID NO: 270415 - DNA, 127 bp, Glycine max
gcttcaatggagcttacatcagaaggattttaccttttccctcttcccttctctctcctaaagaagaagcaagagtgagtaccttttcacaatcaatgggttcgaggcgagggccaaagaggggagg

SEQ ID NO: 270416 - DNA, 292 bp, Glycine max
  unsure (1)..(292): unsure at all n locations
agcttgaactctaactgatggctgaaaacccatttcaaatggtctgtgcctctnttaacgcttactcgtatggctataacaatcataaaatcttatgtattcccattctacattctgctgcacaaaacgactttattgcctatccttaattgccgctacacaaagaacaccttccatttgaggctatcaatcttaaccaaacccatgcctaaccatattgaaagaaggaacatggcgaaaaaaatttggaccatttcctgattcgtgcatgtcatccttgcacaggggccat

SEQ ID NO: 270417 - DNA, 424 bp, Glycine max
  unsure (1)..(424): unsure at all n locations
tcttatccaggcattatcttggtggtgaagtttctccatccttggcttattctctagtttatggtgcctcctctcaccttttctcatttatcttccgttgcaactccatggctgaaaatcaccattgaaggactctattgaagctcaaagatccggcctccatagaagcttctcaagcaagcttgcattaagtggtatcagagcacaagagcttcaagtaggtgctctctaaacatccattaattntcagctgtaccttctcctccattgttgtttcttcatttttctccatgtatctcctcacatgtctagtgttgaatgttgttaacatcgaattttagaatttccaccgattaaacttgctatagaagctagatttgattttctatgattcaaatttcttgtncttggtcttgaatcatga

SEQ ID NO: 270418 - DNA, 291 bp, Glycine max
agctcttgtttctacaaaaacatatattctctgtatcgcataacagtccttgtgatttaatttgtgcatttctaactctccggccagagatgaagtccaaagattacacctctcgttagttgtcatttctaaatagcttaaacatgtgtgcttgagggaaacagcggccgcgaaacttcgtttaagcactcctccatgaaatctgtcttctgcctaccctcattcagctgtgctgtctactaacattttcttttctctcaaatattgcctgccctgggaacagcaactgat

SEQ ID NO: 270419 - DNA, 407 bp, Glycine max
acgcttcattgttgaaaggtatgttgctgaagatgctattgagttttgctctcagtacatcgaaatagttcaatatgtttggctctctgaccaagatccatgtgattcaagattgtcagtgcttctacaaagaagaccaattggtatcagtcaacagaatgatgattcaacacttgacatttgtgaaacgcttgctttttccacacaagtgccttttataattgaagaaaacgacgtcgatgacgtacatgcaaatcgtaatgattatgatgaaggttgatgggagaacacttctacataacagtgttgtatcaaagtaatgtttaacatattatgttatttcgaaccaatttatttaatgcgtatattcactaattgttacatatacgattcttgtcatccatgta

SEQ ID NO: 270420 - DNA, 397 bp, Glycine max
tgaagacaagactatacgaggtatcttccttgggtatagcaatatctctaagggctaccgtgtctacaacttgcaaactaagaaactcgtcatcagtcgagatgttgaagttgatgagtacgcttcttggaattgggatgaagaaaaagtggagaagaacgttcttatacccgctcaactacctcaagaagaagttgaggaagaagacccaggtgaaccaccttcaccttcaccacaacaataagatcaagaactatcatcaccagagtctactccaagacgagtaagatctttggtggacatatatgaaacctgtaacttggccatactttgacctggaagctcttgagaagcgtcacaacatgaagtatgggtcaaggcgatggaagaagagata

SEQ ID NO: 270421 - DNA, 213 bp, Glycine max
agcttgatgatagaggatgcacgaacagagtttgtgcaatcaattcgtggggctactgactcaatggtggaggatggatgaaccacaatcaattcgtggggctccgaataagatggtggaggatgcacaaacaacattaggcaatcaattcttggctctctggactcaacggtggaggatgcatacactaacctcaattcatggcgcttctac

SEQ ID NO: 270422 - DNA, 264 bp, Glycine max
ctcaagcctgtgtcgcactttcaactggcgatgttgaatatataaacgtttgaagcctatggactcaaagtctttggatgacgcaacaacttatagactttggagatatcctcaatcacattcctcttaaatgggacaacacaagtgctcttaatctaacgaagaacccaattatgcattcttaaaccaagcccacacgaaataggcatcatttcctaagagaacatgtgtctaaaggggactgttgcattgagctcattgata

SEQ ID NO: 270423 - DNA, 296 bp, Glycine max
  unsure (1)..(296): unsure at all n locations
acagcatgacgcaatgcatttggatcttgccaatgagaagtgcgctagggatgcgcatcaaacggacttgattgtggtatctgccgcgaattgcctcttgtttccttcactcttctatgagggtggtcacgctttacgccgccctacagtgccatggcctaaactataacgacgttggctnttatggtccactaacacaagctctcacgactcctcttactagtattattgagaggaacgttgctaaacgatatgcaacttcatgtcattgtcacaacattcccaccttccatttt

SEQ ID NO: 270424 - DNA, 493 bp, Glycine max
  unsure (1)..(493): unsure at all n locations
cgggtttgaagcccttgcanatttgagacgctgaaatctcgngcaccgtatgatgactcagctcgtgccagactgtcgctgtcgggttgtatgataatcgattgtttcgctgcactcggagacttcggctgacggcccaacttcatgaccttggagttatattgtataacatatgacttctgggtgacttcccaactgctcctcatatagcgacgagctccttatacgttctacttcccagctcgcggaggttatgcatccttttctactagatcatgtcgttcaaggagactgctgcatcgatctcttacgataaagaacatccaccactctactgtagcgatagataggctcctcatatattctgcttgatgcaactggatggcatctgacctgcacctagtgatggatacatggtgattctatcatccgatatgttcccatgggcttcagcgcacgacacacaggcatgttacagaggtgaatatcaaag

SEQ ID NO: 270425 - DNA, 401 bp, Glycine max
agcttaatgaacctcatatccaaatgcaaaacatgctgatgattcattcaagcaatcacaaacaagtaatcctaactatatgcagcgatgaataaaattaacaagggttgggttgcctcccagtaagcgctcgtttaacgtcattagctcgacgcatcttacttcatatgtcttgaaaatacatgagagtggtcatcctcttaatatctccttcacgatactgctttaatctctaaccatttactacccatggtctgtctacattttctaattgaggatcaaataattccacagccgcgtagggcttgacatctttgatgatgaaaggtccagaccatttggattctatcttgcctgtaaataatttcaatcttgaattgaacaacaacacttgctgtcct

SEQ ID NO: 270426 - DNA, 395 bp, Glycine max
  unsure (1)..(395): unsure at all n locations
tcacggtgtgcaattattgaagcatacaaagctntaatattagtggtttcaacatcctcttctgaagctaccatgtgcaaacattaaaatactgtagttntgggctttttcagtcctagctttttcattgctagcttcacgacaatcataaatggaaaccatgtggtagcttcatgagtgctaaacactattgttttcggctttttcattgctgcgcattgactgaacaacacactacatcaaacaagcttcatgtaaaatcaaaatggtgcagttttattcagcattttgcagcactttaactacatgctaataactaatgttgttgcattaaacgggcgaaaagatcactgcattcttgcatgaaaacacgcgaaatggtaaaccaaacagct

SEQ ID NO: 270427 - DNA, 356 bp, Glycine max
agcttagtcgccaagtgcaaatgagtcgagtgattgaagagcgcttctagtacacagcctgatatccgaaatcagatgtgtgtaatctctttcttcttgatctttcggtgaagtttccaggacaaaactctccttaacggggatgaagttgtaatattcagttcttcgtacaaaaaaaaaagatttctatttcaaaattactccaagttttagaccttaaatccatgacacgaaatgatttttgttaattaaaataatgatttcatagtatctaaaaaataactagagtcaaatgatgttttagaaaataaaaacatattttaattggttatttatttaataaaacgagaaaataa

SEQ ID NO: 270428 - DNA, 369 bp, Glycine max
  unsure (1)..(369): unsure at all n locations
tgagccttgtggatgaaaaanaacatggttgggagaaaatatctccactaaaggtggtctaccaagttttttgatgaaaattagtcatcggtttaaccaataaattatctccaagagtacaaaaatggttatttctctatagttctctctcatgcaattcacataacaacaataataataaaaataaataaataaattcttttttcttttttcttttttacctatcaaaccattttaacttaaatatttttcttcatttctaacatatttctctttgaccaaataacttttatttatctttatttctcacatatttctcttcttttcttttctcatcaactcgctccattttagactatatgacgtttt

SEQ ID NO: 270429 - DNA, 389 bp, Glycine max
gcaagcttggtactacatctgggtttgattcagcattaaaatatatattcttctaatcattacatgatgttgttctgattataatgaattaaatgaagagctcattgttttagggttcaagatgtgtacttgcacggcgacatcttcaacttcctccaaccattccaagtgttgacgccgagaagaaaggcttacgaagaacgctctttgaacgacttgcagacgcgtatggagatgaaatcacatccatgcttactgtccagcaccgtatgcatgaacttatcatggattgcgcttctaaagagctctatcacagcaccgtactcccagtttttaaagcgtgtctcaagattgcattcattgcacagcaatctttatatgccactaca

SEQ ID NO: 270430 - DNA, 449 bp, Glycine max
  unsure (1)..(449): unsure at all n locations
ataatttaacatatntacagccacaaatgaaaacttgttcattgtccagtccctcctaccctctctcctatctcctaccacaacctcaacaaaccaaaaaaagacatacttcaaatcacagacaacactgctggggccaatatcctatcttttttcacccaaaaatggggtattagagaaaagaattacaatgaagagagttaaaattaaaaaatagacttctttatcgaattttcctttccaaagtaaaaattggcatttctaaagtagtcatctaccgctattgtttttcattgtttaaatgcaatgacccgtccctcatcaacgttaggctcagactggcaaacctctctcgcgaatactgccttgatgcttttctccaatctgtgccagccttcatcattgtagcaaattcgtcgtaacttatccttccatcctgcaatttcatg

SEQ ID NO: 270431 - DNA, 384 bp, Glycine max
  unsure (1)..(384): unsure at all n locations
agcttcttagtttcagatgatgcagatgggtttgtagctacctcatgcactcctctaatgactatggcatcatttctggcgctaaactgctgggagttggaggccatcttcctaattaaatttctggcttcagcaggagtcatgtctccaagggctccaccactggcagcatctatcatacttctctccatattactgagtccttcataaaaatattggaaaagaagctgttctgaaatctgatggtgggggcaactggcacatagtttcttaaatctcttccagtattcatacaggctctctccactgagttgtctaatacctgagatatcctnctgatggttgtggtcctggaagcacggaaaaattnttctaagaatactc

SEQ ID NO: 270432 - DNA, 438 bp, Glycine max
  unsure (1)..(438): unsure at all n locations
tgtgtcgcactntcaactgccgaggctgaatatataattgtatgaagtttatgtactcaaagtctttggatgacgcaacaacttaaagactttggagttatcctcaatcacattcctcttaaatgtgacaacacaagtgctattaatctaacgaaaaacccaattatgcattctagaaccaagcacacagaaattaggcatcatttcctaagagatcatgtgtctaaaggtgactggtgcattgagttcattgatagtgaacatcaattagtagacatcattgatagtgaactangcatattcgatgcatctagcatagaatgacatcttatntgcataagggtatgtttcactttgtcattcatatcatnntgtcttgnttgggtatgtgtttagcttagtgattcatgtgcattctttagttggttgaatatcaca

SEQ ID NO: 270433 - DNA, 434 bp, Glycine max
  unsure (1)..(434): unsure at all n locations
agcttgttcgcacatcgttcgtgtgtatgatatctactcgacaaggcttgaagtagaggagaccttctatcctatcacgcaacgtggcggaaaaaagtggacagtaaacttgaatgaccattattgtcaatgcggaaagtattctgtgcttcactattcatgttcacacattattgcagcttatggttacgtgagcatgaactactaccaatatatagatgttgtttacacgaatgagcacatcttaaaagcttactccgcacaatggtggcctctcaggaatgaagcgacaattctccttctaatgacgcatggacacttatccctganccaactacaattctttcgaaaggtcggccaacatcaacaatgataaggaatgagatggattggctcaaaccgtctgagcacccggcaaaatgtagtagatgtgg

SEQ ID NO: 270434 - DNA, 426 bp, Glycine max
  unsure (1)..(426): unsure at all n locations
ntgagacgcatgtgatnccttggcatcatcaaaacatcagcttgatcctttgtctacatctgtgtccatgttttcgacttctttatttcaatttccaaattttggttaatatattcttttctacaccctttccacaaataattcaaaattagatttattaaattagttgtaagactcaagattctgtggttcgttaataaattaatccaatcaaaaagttgtttaaaagtgtgtgttataactttttctaactagaaatatctagtttttactctttaaacataaataaaactctaattaaacattctaattaaaactctaattaataaacttaaaagtatgtgttataacatgcttcctacactctaattaaacattctccctcggcaccacatantttataaaataaaatatttttagtctctt

SEQ ID NO: 270435 - DNA, 321 bp, Glycine max
cttaaatcacaccttacgatgaaatgggcccttgcctctgatcaagatgatgtcgaggacactgtctgtgagaaataccgcatcagccaagataagtgggcccaattttgccagactcgcagagacccttcttgggaggtatgttccttgccatctaactttgttttctttaaaaaagttgatgttgttatagatcattctaccaaatcgaaacattattgtttaaatttttcacgatgtgcgcaagatggcactagccattcataagctgaatactgtcccccacgtttagtctcgtgggggttatgactatttggagca

SEQ ID NO: 270436 - DNA, 299 bp, Glycine max
  unsure (1)..(299): unsure at all n locations
agctntcggtgatgctaccaaagctactaaggtctttatcgatctcactatctctggtgctctgctaaagaatgaaggacaagcaaaatccattactgctaaggctgatgaggtcgtccaattggtacaaccttttcccgtgccccagcagtttgaacccttaagtgacacacttccactcaaaaagatgcatctaatgtagtatttcttttcacaagcaactcgaatgttgctcctatcaactttgttcgcccctgcgctctcgtagaagataaagtccaagtctttttgaattacgc

SEQ ID NO: 270437 - DNA, 417 bp, Glycine max
  unsure (1)..(417): unsure at all n locations
ntntttagttgaattctacaaataattcacttccacatcctcatgtacatgccatgggaccgtgggaatgggaagttaagtgatgactntattcccccaatttattcaagtataaagaggttcctatacatttgaagaatgagaaaaggaaaggatacatcaaagatggacacatcaagcataaaagggtgaataatttaaatatataaaaaaggtgaataatcaatctatcctctacaacagcagntgtttttgtgttgtctattctattaagtattggtgtcaacggtactaaatgaaacagataacataaaanaagatttcaccattgcattatctaaatcatatactgataaactcagttgaaaaaaaaaatatttctattgcattatctaaatctataatagcanataaaaa

SEQ ID NO: 270438 - DNA, 295 bp, Glycine max
  unsure (1)..(295): unsure at all n locations
agcttggacttcctgtgttctgngaacctctcttttttcaggtgtacccaaacccaatcacctggttcaagcacgactttctttctgctcttgttggctcgccttgcatagctcgcatttttcttttcaatttgaaccttcactcgctcatgcaacttcttcacatactcagctttagcctgcgcactcctatgcttaaacatagcaatgttacgcatacgcaacaaatcaacaggagtcacaggattaaatccatacactatctcacatggtgaacaattagttgtgctatgga

SEQ ID NO: 270439 - DNA, 430 bp, Glycine max
tgaggaatcacaggaaacctctagggatgccgctaggaaaacttataggtaagagatgagtttatcgcaactggggttagaatgaacatgtgtagggatccttagaggattaaattggggtttattttgggatgtttgttgaattataatttttcctttatgattataaatacaatattgatgtcctgatgcgaattggttgataaaatggagtgctcttggtgttttcatttttttatacctatgattttgattaattgattttgatataattgtgtgaaattatttgaggggttttactccccatgttgtgataaaccttttgtataaattgttatattgagattatgaaattgtgcttcacattgtgagtatgtgataaattgaacctgtgatgaatgagaaatacatgtgtattgagatgtgtgta

SEQ ID NO: 270440 - DNA, 429 bp, Glycine max
  unsure (1)..(429): unsure at all n locations
agcttgctctaaatntacattgatgtttgtatttatgggaggaggttgtatgtcatttttgttttaagagtagtgtcccactggtaaaactgacttntcaaatgtttgccttcgcaggaaatggccccgaggaagctcgcctcaaagaggtccaggaaggacaaggcagccgaaggaactagttccgctccggagtatgatagtcaccgctttaggagtgctgtacaccagcagcgcttcgaggccatnaagggatggtcgtttctccgggagcgacgcgtgcagctcagggacgacgagtatgctgatttccaggaggaaatacggcgccggcggtgggcaccactggttactcctatcggcaagtttgatccacaaatagtccttgagttttatgccaatgcttggccaacagaggacggcgcgcgt

SEQ ID NO: 270441 - DNA, 117 bp, Glycine max
cggttcgtggtacttacccgttgatgatcgaagaacgatgatgaacgaatgaagaacgtcgaagaacggttgaaatctttgcgatattcctcacggaaaacgttaccgaaacgtttc

SEQ ID NO: 270442 - DNA, 338 bp, Glycine max
  unsure (1)..(338): unsure at all n locations
agcttgtctaggatcaattncagagtccttctattaggcaacggagtnccagattgaagaatcaccgcagctcacaaacaaaaaaagacacagagcatattgatgaaaacacacaaaggacgatgcagaaacacacaccaccagtaccctttcagcagccatcacttcttttctcttcaaattatccatatataatattaaacaaatacacccacaaccacaacacaagcaccccaattaaaatcacacgaacctgaaacagaaacagagtggagccctttcgattccacttttctgccctttacctgccatcattagaaattaacacatgcacacac

SEQ ID NO: 270443 - DNA, 339 bp, Glycine max
  unsure (1)..(339): unsure at all n locations
ntntccatcgagcatacattaatagaaatccttcactaccacaaggtaatccagcagctattcggtcaacatcaatatttgtcttaccaagtgctgttgcttggtcataaggaggaattacatcatataagcttctttctgcaagtttctcattttcatcctgtgcaagtaatcttacttgtttggtaaccttcttagtcaactttacctattgacaatgtgcataggaaagatgagaaattaaataaaacatgattaacaattagccatcttgctacacagtagacaggctctacttgcattntcacaagaataatntaacattttattgatagaaga

SEQ ID NO: 270444 - DNA, 443 bp, Glycine max
  unsure (1)..(443): unsure at all n locations
agctntgatagaggtaaaacttcaaaaccttattattntttcttgcatcttcttattcctttaacattttttattgaatcttctttttaccttctcgtttccatgcatatattctttcttcatggggaaagccaactagcgcttctccttcttttccatgaaggaatattaaagatttaatgtgaagaagacttttaaaaagactatcaggtcagactaaactcttaaagaggccagactgagccaaaataaaagtctttgataggctataagtcacgcctcaaaaattcatcgtaggctaggctcggaccttttaaagcccgatctaacctattcccacccctaatgacaagtgtcaagtatagtttaaaaaaaaatgtttttagtggcattatgctcatattttctaagtatgtcttttggcttgagctttcactacctga

SEQ ID NO: 270445 - DNA, 447 bp, Glycine max
  unsure (1)..(447): unsure at all n locations
tccggagcatgtagacagacttgacagttgccaagacataacatgtatagagccattatgagattcccatcctaaggaatctgtctaataagcattttgagatatcattatgtcataccttaatttcgtacggagactattgcttgatggcatgcaacctttgattgaccgcttcgaagtacttggcaccctttgttgcacaatatgtgaagtcccgagacgcgccggaaatcaaaaggaagcgtggttatgcgatccgtgaaattccgtaacgcgccggaaatcaaaaggaagtgtggttacgcaatccgtgaaattccgtaatgcgatggaaaccaaaaaaagtattgtcacgcaatctgtgagtttctataacttcttcgaaagctaaaaaagagtanatacatgatccgtaagggtccccatacctatggaaaaaaatatgta

SEQ ID NO: 270446 - DNA, 447 bp, Glycine max
agcttatatcaagtaagttatgctacacttcacataaactattagttattcaacaatttatatatttgttatcatcaaaactatgggtattttggatcatccagtcaaagcctgacatgagaattgtccagagatgcaacaacactagactcattttaaaaaaaaaactatagctttgtaataatttttttctatattgtttttataaataaattaaagcttctatttattttatatctcattttttattcaaattaaaatgtgacatgttattaaaaggtatcattcttttaattaattttcctagcattttacaatcatagattcttattgattgaattttcaactctatgatatatcacacatattgaagaactacacacaaaatcacattatacagaacactacactaacactagtattctcataaagaacaaaactttgata

SEQ ID NO: 270447 - DNA, 392 bp, Glycine max
aatactcaagcttaacatacttagacatcaagtgatcatgaattccgaaatatatggggagtaaatgaatgcacattttatctatatacaattgtttgttgcttccttgaatcttgatttcaggtattgtattgtcatcatcaaaaagggggagattgtatatgcaattggctttgatgttttgatgatgatcatgatgatgtgttgcaattgatgcaaatgggcttttcaagattataattcaagacaatacttcaagattacaagtcacaacatcaagatgatcactagaatattaggaagggaattcctaattgaattagcacaggtttggccaagtgatttaaaataaaaagtgtttctcaaaggttttactctttggcaatcgatta

SEQ ID NO: 270448 - DNA, 405 bp, Glycine max
  unsure (1)..(405): unsure at all n locations
agcttgaaggcaaactggatgcattggttaacttgttcaccctgctggccttgaatcacaaatttgtacctgtcgcaagggtttgtggtttgtgcttctctgctgaccaccatacagaccttcgcccttccatgcagcaacctggagcaatcgagcagcctgaagcttatgctgcaaatatttacaatagacctcctcaacctcagcagcaaaatcaaccacagcagaacaattatgacctctccagcaacagatacaaccctggatggaggaatcaccctaacctcagatggtncagcccttagcaacaacaacagcagcctgctccttccttccaaaatgctgctggcccaagcagaccatacatttctccaccaatccaacaacagcaacaaccccagaaac

SEQ ID NO: 270449 - DNA, 430 bp, Glycine max
  unsure (1)..(430): unsure at all n locations
ntgaagggctgaaagggacgagtcaagggtggaaggcatgatattagaggacaagttgaatgcttgtcaaaggtctaagagaagtttgactgaacagctgagtacgacggaagagaatatgttgacaatcattgaccagtataaagagaagctaaacctagctgctagccatgagcaaaggctagaggacaagcatgcgaaggtatcggctctgcacgtggaaaaagaagcaagagagagagtgatagaatcattgcatggaaaagctatgaaatggttggataggttcgctcacactctgaatgggagtcaagagctttcaagcttgttaaccaaagccaaagcaatggcggatgtatatacagcttccgaggaagttcatagtcttttcgattattgtcaacatatgaaatgagtgatgtcccacata

SEQ ID NO: 270450 - DNA, 419 bp, Glycine max
  unsure (1)..(419): unsure at all n locations
agcttacgaacccanacttgtagcttcaatgcaatgaaacatgcttgtggctacgaatccaaaatttggttttagaattagaaaaaaacatgaaaattacgattcgcttgcgagagtttttgctcgaatttgggctgccccatgtttgatatagaggtagtgtggaaaacaccttgcaatagtgtgtatacataggtaaatataaggagcatgaaattcctagcaaagtgtgaatgattgtcttcctaaatgaatgtatgatagtgtggaatgtctttntgaatgcaaatatgcgcacgatgtaattagctttccaatatgcatataaataaatatgagtgaaacagtaaaaattcgtatggtgtactctaaatgtatgtaagtagtttgcgatagccaatcgttacgatataaattac

SEQ ID NO: 270451 - DNA, 336 bp, Glycine max
tccttgagaagattcttaaagaagctagagcttagctacacacacctctctaatagcttatctcacctcattgagatgagaagctagagcttagctacataccccttataatagctaagctcacccccatgacaaaatacatgaaaatacaaaaaagtccctactacaaagactactcaaaatgcctcgaaatacaaggctaaaaccctatactactagaatggccaaaatacaaggccctaatgaaggaaaaacctattctaatatttacaaagataagcgggctcatacttagcccatgggctcaaaatctaccctaaggctcatgagaaccct

SEQ ID NO: 270452 - DNA, 408 bp, Glycine max
  unsure (1)..(408): unsure at all n locations
ctgatgcatgcaagcttaatgaagccacaagaaaagatcactacccgtcttccttcatgtgttcttatgcttgagagacttgcaggacaatctttctactattttttggatggatactcgggttacaattagattgcagtagatcctcacgaccaagaaaaaacagctttcacatgtcccttcggtgtttttgcttatcgtcgcatgccattccggttatgtaatggccccgctaatttccatanctgtatgacggctattttttctggcatggtagagaaacgtattgatgtctttatggatgatttttcagttcttggcgcatcttttgagaaccgcctagccaatctagagaaagcgttacaacgctgtggagaatcccatctggcgcttaactgcgaaaaatat

SEQ ID NO: 270453 - DNA, 452 bp, Glycine max
  unsure (1)..(452): unsure at all n locations
tccttggggccatttcttgcgaaggcaaacatttggaaagttatttntaccagtgggacactactcttaaaacaaaaatggcatacaacctcctcccataaacatcaatgtaaatttagggcaagcttatgcgcatatttccttacgaacgttcgctngcacaagacattcttttaactaagaaaaatgcacccatatacaatcaaggcagcttcgttacctagattatttacatgtacttccaaggtgtatttgttacttacatcacacacatctccttggctaaatttacatacatgtatactcaaagcattttggggtaccaaaaattgcacatgtgcacatcttggtatttctaatacctatacatacacaaacttcatgatgaatattgactatctacacaataaagtgctacatttcatgctcttttcaagttttgctacctaaag

SEQ ID NO: 270454 - DNA, 428 bp, Glycine max
  unsure (1)..(428): unsure at all n locations
agcttctatcgctctcattcatctttactcgttctatctcagaccttttatctctgctgcctaagattttgcatacacctcccttaaagcgaagtgtgtagtctctctacatcatttggccaatgcttagaagattttcttttacgctaggaactagtaagacatcatggatgagtcgcgtacatttatatgtctccaccatgacagtgcctttgccttttgatttaaccacacttacatttcccactccaactttgactttgacagactcatcaatacttttgaaaatagtctcattcttggncatgtgattgctacatccactatccaagtaccagctttcctccttttcttttattgagtcttgagtggccgacaacgcacattgttcttgatcatcgctctctgtgatattagcttgatgccta

SEQ ID NO: 270455 - DNA, 410 bp, Glycine max
  unsure (1)..(410): unsure at all n locations
gtacaaacttggtagcattacttattatccaaagagtttgttatccatagtgatcacgagtccttaaaatacttaaaaggccaaggaaagcttaataagaggcatgctaagtgggtagagtttttagagcaatttccatatgtcatcaaacataaaaaagggaaagggaatgtaccggttgatgcgctgtctatgagacatgctttacttgctatgcttgaaactaaactgtttggtctcgagtctttgaaagacatgtatgtgaatgatgtggactttgctgaaatttttgctgcatgtgaaaagttttctgaaaatggttactatangcataatggattcttgtttaaagcaaataaattgtgtgtgcctaagtgttccattagagagttgcttgtgagtgaatcaca

SEQ ID NO: 270456 - DNA, 372 bp, Glycine max
agctttataatttgaattataacgttcaacaactgctggtaatcgattaccatatatatgtaatccattacacagtgcacactttgaattcaaactctaatagctgttgtaaatcagttgtggccactggtaatcgattacatcctctggtaatcgattaccagagagtaaatctcttgaaaaagacttttttttaacttaaatttcttggccaaaccttttgctacttcaattggaattcccttcctatttaatgtaatcttcctaagactctagagactgtcttaatcatccatcttgaatatcttttatttctttggcttgaataaaactttgagaaacatgtaatcctttggcatcatcaaaacattc

SEQ ID NO: 270457 - DNA, 251 bp, Glycine max
agatatgcctcacgggtcacgagaccttggggacgtcatgtggggtgctattgcccaaaaccaagcttgaccaattccgacccaacccgggcatagtctgtcagtgagaacctgtgatgtacctaagcaggcgagctcctggcagtcaacagataaaatgaaaacaagaccacaaagcaaggacgcttgtggtggctggccaactgtgaaatttgtgtaatatgtggatagtggcctctggtaatcgatta

SEQ ID NO: 270458 - DNA, 345 bp, Glycine max
agcttaaggttaatttcaatgctgctaacacactacctagtgagacgcttaccacgtatgtcatacaaagatgatttactttgtggggcatatcaaaacgcgaaccaagttaacaactctgctctaagtaaaaacattatttccacctcaagacctttagagttgttacatcctgatctatctggaccaaccagaaacacatctatcactggaaagaggtatgaacttgtcctagcgcatgactattctagatggagatgggttatgcttctatctcacaaggatgactctttcaatgtcttctttaaattctgcaaaagagttcaaaacgaaaaaagagtatgc

SEQ ID NO: 270459 - DNA, 331 bp, Glycine max
  unsure (1)..(331): unsure at all n locations
ngcaacatcggagaacatgaanaactgtctttgcagagacagagagggaaagatgtgaaaacccagttacctaggggaattntgcgatccgctccgagtcaactacactagtttggcactaggtttgatcacatgtcaatgagctagttacagaaatgatccaacaattgaatcagctcggctaagggtctggttttcgattcaaccagccgggccgagccgagtttaataacactgattgggagggttccttacttagtattgaaaatcttgctctcaatttgatagtaggtagtaaagatcttattcatggagtatgtctcattaagat

SEQ ID NO: 270460 - DNA, 381 bp, Glycine max
  unsure (1)..(381): unsure at all n locations
agcttgttggagtagagattgctcatgctgaatgagagaatgccctgcatggcgctctttttntaataagagtccgcccaaatattaaacaatacaagggagcctacagaaagaaattgagaccgcaaaggcttactttattctgatatgaaacaacgtatttacaagcatggaacagatagccactgctaacaaaaagatagcaccacagaaagataacaccactaacaaatcatgcctagagaataagatcaaaactgctttatcctatcagccaacatgacttttatttttcctaaaaaatagcataaaaattttatctactataattcgttacgcagctccaacagtcaaatcttaacactcctccttgactctgga

SEQ ID NO: 270461 - DNA, 359 bp, Glycine max
  unsure (1)..(359): unsure at all n locations
tatatatcttacgntttaattgtccctggtcctcatacaacttttcatatgctntggatcatgcttcacttaccactttttttgtttcattccttgcatttcaataccttgaccaattttctgcattgttgcacccctgcaaggttttgaagctctcttttgcttttaacctttcttgaaccttctcatcccatcactaagattccttatctcttaacccannaacctttgattcacccaagattgctttggcaaactttttcttatcttttagccatgtcatcccaaatgaggttaacactgccttataactcccaattacctttctccaataaattctgcttaaaagtcaaaagttt

SEQ ID NO: 270462 - DNA, 64 bp, Glycine max
cccacccaacccgggcatagtccggccgtgagaacatgtgacgtacctaagcacgcgagctcct

SEQ ID NO: 270463 - DNA, 396 bp, Glycine max
  unsure (1)..(396): unsure at all n locations
gcttcctcggagccatttcctgcgaaggctatcatttggaaagttatttttaccagtgggactctactcttaaaacaaaaatgacatacaacctcctcccataaatacaaacatcaatgtaaatttagagcaagcttatgcgcatatttccctacgaacgttcacttgcacaagacatcctattaactaagaaaaatgcacccatatacaatcaaggtagcttcattacctagattatttacatgtacttccaaggtgtatttgttatttacatcacacacgcctncttggctaaatttacatacatgcatactcaaagcatttcggggtaccaaaaaatgcacatgcgctcatcttggtatttctaatacctatacatatacanacttcatgatg

SEQ ID NO: 270464 - DNA, 396 bp, Glycine max
  unsure (1)..(396): unsure at all n locations
agctntaacttcatcgcccctcacagtctttatatttgggagccaatccaatccttgtgctcggactctcaggcacttatgatagcccgccgatgatcccattactgccttccctaagctgtatgtcctttcttnacgcccgatcccatgccttgtgaactccttggagcacctttggattgcggtcactgaaaccccgctgaatgaaaggcgtgatgctctcgtataatggccctcctcttatggtgtagccaagctgtcttatggcgaggacgggattattatcaatacaacctcatgttctcatntacggaacatttgacatccttcgcatgaagaacaattctgattcttccttctttagcgagggaacaactaacagacgcccttcatgct

SEQ ID NO: 270465 - DNA, 311 bp, Glycine max
  unsure (1)..(311): unsure at all n locations
tagaagattattcaaatggtcataacttttcactcggatgtattattcaggtgtatcacatatcgagacgctcgaaatcgaacaacaagagctctcgagaaattccaattgtcagaacctttcacactgaggtccaattcagccgcatcacatatcgagacgctcgaaatttaacaacggaagctctgacaaaattcagatgctaataacttttcactcggatgttcgattcaggcgcgttacatatcgagacgctcctaattgaacaacagaagctctcgagaaattccnatggtcaaaaattttcacac

SEQ ID NO: 270466 - DNA, 345 bp, Glycine max
  unsure (1)..(345): unsure at all n locations
agcttntaatggaagtcaagagcaagcaattgtgccgacccgccgactggtgagcacgtatatgagcgggttcaacaattcaatactgcatttggcaagatccaaccgaacgatcaacgtcacagttgcatatggaacaacacgtccattttctctgatcttccgtactggtctgatcttgacgctagacatcgcattgatgctatgcctgcgcagacacatgtttgtgacactgtgattgtgaccctccttaacattcaacgcacgacgaaggatggnttgaataccccgccaagactagctgatatgggcataccatcacagttgcatcccaggcttgatggg

SEQ ID NO: 270467 - DNA, 150 bp, Glycine max
gccaacattctttaacccaaacgacattactaaccattcgtttattccaagtgctctaatacatattgtgcatgcttaactattgcacttaattttcacaacagtattttaattcttcacatctcttgcttagcttgatcccaataagtt

SEQ ID NO: 270468 - DNA, 450 bp, Glycine max
agctctatggtctgttaccatcgggttctgaccgtgtttgacatcgcattgaaattgttttgtacggcgtctcacgtatgcactgtattcatttgggtatcagaaaaatgtatgacccagttgccaaccctaatgggccaaaacatgttttgtgttttagtaccctaatgacccttttaaaaaatacaagccaattctaggctacaatatacacttgcccacaggcagccatggtttatcaaggatgaatcaacgatcaaatgtgttataactcaacaactcacaaactctattgtgataggagcaaagttggctacgacattgcaccagtgacgcgcactttgcatatattattattattgcactcatttgtttatttgtaaaaactttcgttcttattcttatactttatacattggacgatttaacctaatataggtacactattgc

SEQ ID NO: 270469 - DNA, 384 bp, Glycine max
  unsure (1)..(384): unsure at all n locations
tctcttggaccttgaacaggcaactaactcctctntcaaaactatgctatgtgctcgctaatggtccctctctttccttcgcagcttgagttcattgttgctaccccacagagctccacgaaatttattccggccatactcttccttgcgagccctcttggtctcttgttcaagggctcttgcagtagttgcattctcttcccgtaacccggcacactccttccgaatgtgtgtagcgtccaacttgaacttctccttggcaagtttcgcctttcctaactcgcttntgagagctnggacttcttcgtcctcttccggtgcttcaaaactttcttcgctgacgacttttaactnggtgagccaatctaaacctcgtacatgaac

SEQ ID NO: 270470 - DNA, 336 bp, Glycine max
  unsure (1)..(336): unsure at all n locations
agcttgccttanagaggtccaggaaggacaaggttgtcgaaggaactatttccgccccggagtacgacagtcaccgctttaggagcgttgtacaccagcagcgcttcgaagccatcaagggatggtcgtttctccgggagcgacgtgttcagctcacggacgacgagtatactgatttccaggaggaaatacggcgccggcggtgggaaccactggttactcccatggccaagtttgatccacacatagtccttgagttttatgccactgcttggccaacagaggagggcgtgcgtgacatgagatcctgcgttaggggtcagtggatcccgctcg

SEQ ID NO: 270471 - DNA, 390 bp, Glycine max
tccattcactttgcatgtagttcggatgagaaaatgtcatcctaagattagattcacaaagagacataaatgcaacaaaattgtgagagaacatacagttcagaaaagaaaattcaacacctagagaattttaattaacaaaacatacagtacactgcatcaacataactcgaaagcaattaaaaagcttatcatcaagccaaggaacttgcactcgtgctcaaaaaagaattagaaaattcccccactaagatagtatatttaaaatcctagatatatattaacaagacatttagaaataaacccaattacaccaaattaatttcaataaacccacaccatgtactcacccattagttggattactagttgtggtcaacttcacaggat

SEQ ID NO: 270472 - DNA, 403 bp, Glycine max
agctcgtgtttaatttatttgcagaatacttgtattttcattgcaggtaatgatcttgttaaggttgctgctactactatgttaaatagagttccagatctttgcagaatacttgtagtttcattgcagactgaagtatatgcttttcttctcttttgagatttcttctggtactgtttcattggttcttaaaatgatcttgttgagggttgggcttcactgcctgtgatgtttgcgcgctcacattctattgccatttatttttaattataaggggctaacaacctgcatcacatatttctggcaggtgcttgtatctgttctactggaattgaacttttgaactttctcatgacaatatgtataacttaaggcgaaatgctctttttaactagataagtga

SEQ ID NO: 270473 - DNA, 405 bp, Glycine max
  unsure (1)..(405): unsure at all n locations
actcagcttctatccaggctcatctnggtggtgaagctccttcttccatggcttattccttaatgtatggcgcctcctctcacctcttttcctttgtcttccgttgcacctccatggtggaaaatcaccattaaaggaccccattgaagctcaaagatccagcctccatagaagccccataagcaagcttgcatcacccttccattccttccatttcacctggatccttcctttttcatgttcttgctgttgctatcctttcgtaaaaaaatttgaagatttggtggtcccgtgaagtagtagttccgtatttgaagatttggtggtcccgtgaagcaagtgttccgtatttgaacgttttgtagatcgtggtcttcctatttcgtcggaggtacgcatttatgg

SEQ ID NO: 270474 - DNA, 387 bp, Glycine max
agcttgtgcatataatactctgatgacgatgtcttatatgttcttaaatctggactgatccacttgctgcccaagtttcatggtcttgtaggtgaagaccctcataaacatctgaaagaattccatattgcctgctccaccatgaatccttcagatgtccaagaagatcacatttttctaaaggcctttcctcattctttagagtgagtgcgaaaggactggctatattaccttgctccaaggtctatcaccagctacgatgaccttaagagagtattcttagaaaaaaatttccctgcttccaggaccaccaccatcagaaaggatattttacgcattaggcaactcagtggagagagcctatatgaatactgcgagagatttaaa

SEQ ID NO: 270475 - DNA, 451 bp, Glycine max
  unsure (1)..(451): unsure at all n locations
gctggtttgggcatagcaccccacctgacgtccccaaggtcttctgacccccacgatatatctccaggtaccactctgtggtcaacaaacaaaagtaggaagactgactcttccatgctctttcacatcaaacttagtggattatgaggcacccgtcatatgtggtactaggtggtgattgggcaatgacgcaaatcaactctctcatttctgcaagtcaagcacaagcataccatccncagttgcccacctttaacttgagctcacgcactcctacgtagcccttatcctcgttcctctcagcactgggtccccatcaccccctccaagctttcacaattttgacagtatttttctgcataatatggcagattttgaaatccaacttgcctacantacaatttgctcaaattggatcctacaagtcctaaatcatgtataaatcatattt

SEQ ID NO: 270476 - DNA, 375 bp, Glycine max
agctctacagcagattctattaatgacccactatcttagaattaaaataacttaatgccattaacctatggaattaacaaaaacttaatggctgagtgtaactgacattgttggcaaccaaaagtcacctccaacagccaacaagtcagccaccatttggcctcccaaaaggctgatgcctaagttgccaattgggcccttattacaacttgaactaaagtccttttagctgattaacccaaaacatatttttggtcacccaactttacaaggattgcgccattatttacacaaactacacactctaaaattgaaataaagcggtgtcatttactcctccatttgggccatgatacaactcacaaccttggactt

SEQ ID NO: 270477 - DNA, 339 bp, Glycine max
  unsure (1)..(339): unsure at all n locations
tgtagcanattcaaacgacaataacttttaactcagattncttattgaattccgtagtatatcgagacgctcgaaattcagaacaaaagctctgagcaaaatcaaacgacaataactttttactcggatgtccgaatgaatctcgtaatatatcgagccgctcgtaattgaaaacagaagctctgagcaaattcaaacgacaataactttttacttgtatgtccgattgtttcccgcagtataacgagaccctcgtaattgaaaccagaagctcgtagcaaactcacacggcaataaatttttactcggatgtccgaatgaatcccataatatatcgag

SEQ ID NO: 270478 - DNA, 381 bp, Glycine max
  unsure (1)..(381): unsure at all n locations
catgcaagtcttctaacaattgcatgctgtgcaacctatttattttttagtcatgcacattgacggatgcaatatctgtggcgaggcccatgagtcaagcatgtgcatggtccaagatgatgtatccaaagaagtccactgtatgatcattccacaccatcaacggttccatcaaggacgacctccaggatacaatcaggggggaaaattctcttacggccaaggttcgacatcccancccgggaatagctccaacaaaaatcatggagtttcatctaatcagnctcccaatcaacgcgctgatttatatgagatcaccactaagctagaagacactttgaatcacgttatgtacgtttctctatcaaatcataagagcac

SEQ ID NO: 270479 - DNA, 435 bp, Glycine max
  unsure (1)..(435): unsure at all n locations
agataagacatgaatttccagaattatcgctgntagnggttattgaaaggccatgcgtttctgatctagccaactttaaggtagcaagaatccttccaaaggatttgaattggcagcataagaagaaattcttgcctgatgcccgactttatgtctaggatgatccacacctgtttaacattggagctgataatcttttaaagagatgtgtgacaaanaggagtctaacagcataatatggcacttacttaattcaccttgtggaggtcattatagtggagacaaaacagttgtcaaggtcctagcatcatgattcctttggccatcacttctcaaagatgcccatgaacatgcaactcattgcgataatgtcaaagaatgggacgaatctcacggcataatgaaatgccactacagaatattatgcatgtagag

SEQ ID NO: 270480 - DNA, 329 bp, Glycine max
  unsure (1)..(329): unsure at all n locations
agctgtgcacttgaggtttctatctcaccnacattaatcgttatacacattagacacaaacaactacgcagtttacagaaccttgtccgcgcgtactagtaataataatactaacccaaacacaaaaagagatgctaaagaaagccacacaaaactgtgctatacaacacattcctaagaaaaagtaccaactaagagaaaagccacaccatcacaagacataccttgatggtcgcaactagtcccaaactgaaaaaacatcaacctcatcagtcaatcgcttaatcataaacattacaaacaatcacatttcacaaaaaaaattaaat

SEQ ID NO: 270481 - DNA, 437 bp, Glycine max
  unsure (1)..(437): unsure at all n locations
ntgacttgagtcatcaagagattattaatatgtgaccatggtttgaatttcacatcatctttntcaacatctgtttcaacaatcaagaaatctatctttcaatcttctctctcaacatcgttcaactctttcaacagattntttctgattcatcttctcttcatctttctaaaagtatttgttcaaaactctctctttcaagaaaagttctttgatcaaaaactggtgctactcatcttttttattctcttctccctttgccaaaagaacgaaggactaaccgcctgaattcttttatgtctctcttctctctttccaagagaatccaaaggacctcaactgagaaatcttttgattctttccttccccttaaactaaagatctcanaggactaaccacctgagatatcttttgttcccctttaccaacattcaaag

SEQ ID NO: 270482 - DNA, 368 bp, Glycine max
agctctctataaatattatgaaaagttgtaagcataagagttccattccttataaatatgaaaatttctaaaattcatgctagatgtaagttatacaacatttcccatctatttataagattcccgagctatatcaacatagctaaaagcttgaaccacaccaaatgaatcacattctaagaggtcatgttcggaaggtgcggcgtccctaaattcatgactcggttaatagtaataatttaaataacaaaaaccatcggaattttttttttctttttctttttcatttctttctctctctaccataactaggtctagaacgaaaatccttactataacagcctgaatggccactcacacctctattc

SEQ ID NO: 270483 - DNA, 338 bp, Glycine max
tattgggctgtaaagacctgcaacttctctattgatcaggctttataggaaaggaagttgcaactaagtgagctagatgagatccgtttagaagcctatgagaattccaaattctacaaggagaagaccaagaagttccatgatagtttgatagctaagaaggactttgtggttggacagaaagttttattgtataactctaggttcagactcatgaatggtaagttgaggtaaaagtggattggtccttttgtggtgactaatgtttttccttatggtacagttgagatcaaaagtgaatccacagattagagcttcagggccatggacactggctg

SEQ ID NO: 270484 - DNA, 249 bp, Glycine max
  unsure (1)..(249): unsure at all n locations
catttattctttgctcagtaccttatcaattcctattacgaagntgatctattatgggatattgcatgagttgggaactcctgccatgtgtacgaacagcggaaaacattgttgtattaacatgtggcggcgatgcagtaattttccaagaccaacgtctcttcggatatggcttatgcatctaaaatagtcatggtgcttctgattcggcaaaaacagatcgtagaacgggatcctctcatgcaaatg

SEQ ID NO: 270485 - DNA, 394 bp, Glycine max
  unsure (1)..(394): unsure at all n locations
ggctagttttctcataaagatcaaccccttggttggaattctatatgggttgacttctttgctccttattgaaatggttccccggatgattcgtccagcttgagccctatgtgaaattcctcccttggctgaatctcggtggtcctccttggctgtagccttggaattcatggcgattatgggctcccatgtatttcacctccctggaagaatcttcttgggctatgcattgccctagctcatgtgctccaccatagatgtggcatccccctattttcatgactgaagagtgaaagggacttatcgcttgtagttattgagggagcttgctgagggtctccgtcaaggcctctatctatcangtcaatagcttgttttgggcaagtgttgcatc

SEQ ID NO: 270486 - DNA, 246 bp, Glycine max
  unsure (1)..(246): unsure at all n locations
agcttnttgatatgcctttcgataatctcacttttacctntggtaaagcccacaatctnattaaagacttcacactgaactaatcaatgaatcttaacgcaaacacaacataacaaaatctataatcccctaggcaatgacctcttaacataatgccttcaatcagtaataccacattatcttgatacccgacttcacaacataaacaatctgtacatcatcatccgttacctaaccatgattgct

SEQ ID NO: 270487 - DNA, 355 bp, Glycine max
cgtgttcatgtcacgcccttagtgttgtctatgacaatcggtctccatgtgttcaagaatagccaaacacgaagtcctatattattaacacgctaacgcctaataatgaacttataagcacgaacagccaaaaattttatcaagaggacacatatggagactgttgacaacatacctttacgcatttatctaacataagcaatttttctggttttgcaggcatacaaagtcatttaaggatttcacacaagagcactttgtacaagcactaatatttctgattttgggatgaagccatcttcctcagtagctcttatccagcaaagtcctatgagtaataataacactgataaaa

SEQ ID NO: 270488 - DNA, 429 bp, Glycine max
cgcaagcttgagttaacttgagccttccacattgtcttatcttcatctcttccaaattgtcttctttgttccatggaaaatgtcccaagtgaatcatcaactccaagtgcttcaatcaattgatcaacccaaataaagtacccacaatatccaacttcatcctgaaaagccccaaatagaaaccctaaatcaaaaccctcaatgtgaaatcaaaaccctaaatcaataaatgtgaaatagacataccttattaattgaacaagtgaaaaacgcccttcctctgttaatatttgttccaacaacacgcctaacagcccttctaccacaaccacaaaaaagaacaacttgtgatgaaactcttgttcgagatgatgatgcattgctcctctgcgacattgttgatagtaagagagaacgaaatggtgcgat

SEQ ID NO: 270489 - DNA, 367 bp, Glycine max
  unsure (1)..(367): unsure at all n locations
tcggatgaaagtgatgaggtacaagccctaaaggcagagcttgttagagcccgggtagtctaagagaagttcaagtccatagccatcaaagtctgaaaagagtatgatgaactaaaggacgtcaatatggccaccgctgaagccttggaacgagaaaccaagaaggcctgaaaggaagaacacgaccaaagcaaagttttgaggggctttatatggcagcaatagtgagctcaagctccgaagaggtgaaaggaatcatcacgggtcanaagcatgatcttgaaggacgagctaaaggcttgccttatgtcgaaaagaaatttgtcccaacagctaagcgagactgaatggaatatgtgggccatca

SEQ ID NO: 270490 - DNA, 361 bp, Glycine max
agctctactaaaccaatcacacacacacacacactatacacacacacatatatatgtaccacagatcagcggagagggatcatatggacaagtgagaagcaagaacaataatgaaatacgacaaacaaaatatgataaataataaacaatatgagaagtaagaaagcaaatatgaaaaaattttaaaacaaaaacatcaaagaaaacagagacaacgactaagccgcactgaatctattaaaggaaacaagacaacaaactgaagcggcgacagagccgcacaggatcagtccagagggagaggagagatgaaagacacaacttgataatttattgatgaaagacagacaagcttacaaag

SEQ ID NO: 270491 - DNA, 423 bp, Glycine max
  unsure (1)..(423): unsure at all n locations
agcttcaagtctgcttaacataacactntttagtttactattttcttatattgcttcatgctattagtgcaaactgttttgctatgttctgtgtttttttgatcgtgttggggttctgagtttgaaagttgaacggttgtgtttagctttctgaaccaaaggttacaagggccttggtatgttgttgttgntgtatggcactataacacatgaatgcactttggtttgcaacctgctgcgtctgcaaagggttgtgaagccaatttaatattaaataaaaacaaatgctntctctctttctctctntgnatgtttatngaacaattataaatatttatagattatcttcaataatatttgatgaaaatataatttaataatattctatattaatccaacttcttatatagtcatgtaatttac

SEQ ID NO: 270492 - DNA, 321 bp, Glycine max
agctctgtggttgatctatggatggccttcgtgtatgatcgcgtggatggtaataataatggttgacattggctgagtaatgacatcgccgagttggtgggaaatttggccatgtcggaatggcacctacagcattggcttcttcctccttctcatcctttctattcgccctagttttctcattcatcacagcacgatgatcaaactgcctcttcttagacccacttcgatccttttgtccgtgaaaactaaactacctaagcttgaaggtgcgatccaccattttctcatactacaccacccgcaacgtgtcttctatta

SEQ ID NO: 270493 - DNA, 358 bp, Glycine max
ctacccttattttccaatctaagtaagcttctacattgaccttcctgatgcaatcctacctcgcaagggcattggatagaagactccaagcagattgggccacagatgcaagaaaatgccctacggctctcgtgagccttataatagatgtcagacacatgggcttagtatgagtccacttatctttgtacatattataataagagttcattattattgttccttgtatttacggctccatgactgtcgtacgataccctagatatgtacgattctccatccctcgtattctaaggcacctatgctagcttttatattattggtaactatataatttcacatgcgttaaggcatattt

SEQ ID NO: 270494 - DNA, 396 bp, Glycine max
  unsure (1)..(396): unsure at all n locations
agctcggccagcttcggaagtcctatgaaattgatccttagccaataatggcgtgaaaggtgctgctatggttgcgtaccctttaatgaagcgtcgataaaaaacctgataaacctaggaatccnctcaacgctcgagtcgactgaggggtcggccattgttgcacgacggcaactttcgcaggaactggttcaacgccttttgcagaaaccaagtgacccaggtattccacttgttgggtcgcaaaggaacatttggatagtttcacgacaaagctgttgtcggtgagagtttgcaaggccatccgcagattctcgagatgatcagagaaactctggctgtatattagaatatcgtccaagaagatgataacccatttatgcaagtagggtccaa

SEQ ID NO: 270495 - DNA, 435 bp, Glycine max
  unsure (1)..(435): unsure at all n locations
tcatgatgatgaatcaagttgattcaaggtagtttgatgatgactaagatgatgacaattagcccaaagaatgatttcaagattcaagagaagaagaattcaagattcaagagaagaaatcaagaagacttcacaagggaagtattgaaaagatttttcaaaaaacaaacatagcacaattttgtttttcaaaagagtttttctcaaaattttcaaagttaccagagtttttactctctagtaatcgattaccagtttcctgtaatcgattaccagtggcaaagtttgatttcaaaagtttttaactgaatttgcaacattccaattgttttttaaatggtgtaatcaattacaatatattggtaatcgattaccattgtatntgaacgttgaaattcaaattcaattgtgaagagtcacatcttttcatagaat

SEQ ID NO: 270496 - DNA, 336 bp, Glycine max
taagtcacctgcagcatgaagcttaggtctgtttcatatttatatcaaattattgttgcaacaattgttcttttatcaagtccatgcaaaaaaagcatctgagtccatctcagtattcgggaaagtccttcattattttcatccccaagatacacattttttttaaaaaaaacctttttgttgttttctcgatctacaaaatcttcgaagagtatcggtggtccttcttttcacaagctcgttacttttaacaaaaaggttggaatctcaaacaaaattataatccaagactacaccatccaacactataacgcgtgtgaaaataaactaaaaata

SEQ ID NO: 270497 - DNA, 427 bp, Glycine max
ggacctatgaaactcagcttaaaagtctctctatgacttgaaacagtcacctagagcatggtttgagagatttgcccagtttattaagaagttgggtgatcgttgctcggcaagtgtaccggggcacgcaagtagtattaaaacggtaagaattctgagtatcgatctcatggaacttgttttacttggtaaaagttgttgtttggcaagcaagcattggtgatacaattaatggttgaaaagagaaataaaagtatgatctagtctaaatgaaagcgagtaaagtgagtaatggtgtgtgacaacaaatatgcgaacatgttggttcctcctacagggtattttgatgtaatttaaggatatttctctacttaatagtgctttggtattctatgttgaggtcctaactactaaaccccgatgtctc

SEQ ID NO: 270498 - DNA, 437 bp, Glycine max
  unsure (1)..(437): unsure at all n locations
agcttgcacttggaactgctaacagcccactntatcattaggattagtacctgacatctcaaacaaacaaatcaaacgtaacacgacaattatagttgctcgttgaatacctccaccactcaagtgtatcacacaattatggcttttctctaatgaaacactcttgccttttaccactctaattccccttgagttcttacgcaattcaagagattatggccacaacaaagaacaattcaccaatatgtgtaaggtaaggctagacaacgaaaacgttaaccaagaaaaaggctaacaatgntcctacgccaaatgaaggaaacaaaattcagacattaggaattcaagtaacaatcctttatgcaaccaatatattaccttagagagtttttttttttaagttcttcaagcatgaaccattcagcccaatttttttt

SEQ ID NO: 270499 - DNA, 385 bp, Glycine max
  unsure (1)..(385): unsure at all n locations
nttcaattcattctatgtacccgtggtggtccacattntgtttcatgtattnntattatcgntttcatttgctttctatacccccttttgacgtgcttaagccatttatttaagtcatttctcgcctaatctaaaaataaaataaattttcaccgatccgttgaattgtatcatccattaattntggttaaaatgaattccgatcgttcggtcgtgccgtaaccacgttggaaatcaaaaagaggtaaaataataatataataatcaataatataccttttagtaaaataaagcgaaaaatcaatcggacgttttctctttgggatttcccattcttaattgaattgactaataactaaagtgaaactaaggctaaaatcaactc

SEQ ID NO: 270500 - DNA, 434 bp, Glycine max
  unsure (1)..(434): unsure at all n locations
agcttagacaagaagcttcaatggaggaaaagaatgagagagatagagagacgaccgcgcatataattgaacgagaacaagagggagagaagttgaactttgaaatgtgtctcacaagactctcattcatcaaagttatgataagtgttacacatgtttctatttatagcctacgtgatggaagcttgcttgtggggcttttatggaggctggatctttgagcttcgatgaggtcctttaatggtgattntccaccatggagatgcagcggaagacaaaggagaaaaggtgagaggaggcgccatccactacggaataagccatggaagaaggagcttcaccaccacgatgagccttagataagaagctggaaggatgcttcaatggaggaaaagacagatggagagaaagagaaaggcgggaacactaaattg

SEQ ID NO: 270501 - DNA, 347 bp, Glycine max
  unsure (1)..(347): unsure at all n locations
tgccacccagctcgcccaggcgagcaaggttgcttcctccataagcaacagccttctggaggaatcttctggagggcccaagtgggcctggttgctatttgcacccctatttntactaaatacacccccctgccctttttttgggtgattctttttttcgtaaagttaccgaaacttacgaatttcgtaacgatacttgttttctttccgtaatgttacggaaccttgcagattacataatcatccccttttttgacttacggaatgttacggaacctcactatttgtgcaacgatgtttccttttgatttccggcacgtcacggaatttcacaaattgcctaatga

SEQ ID NO: 270502 - DNA, 401 bp, Glycine max
  unsure (1)..(401): unsure at all n locations
agcttataagaacaaaattgtctcaatcatttttaaatatgcatgtgaattangaagcatccacaagaatcaagcccacgctattgtgcaagcaatcaatggggcacaacacaccacatgattatgatgatggatgactcaaattctcacacaggtaaactcatcactttcaaaccgatctttcaaaactatcacgacatgtagaggagaatcaaggatttcaagtcacaaaatgccaagaacttttattttcaaaacaattacccatttcttgaacatatcctataattcaaagaacaacatgcaaagtcatacatgcacacaaaattgacccataatattaaactaaaaatccaacgaaactaacaacattaacaaattaacacaactaacacattaac

SEQ ID NO: 270503 - DNA, 322 bp, Glycine max
  unsure (1)..(322): unsure at all n locations
nggacaatggtaatgcaatcttgcataaatcctagatgaatcttctatagaaacttgcatgaccaagaaaaaaacacactttctgcacagaagcatggtaaggtagagaagtaataacatcaatcttggccttattgacctcaatacctctactagagaccaaatgccttagaactatatcatcatgtaccataaaatggaatttctcaaagttaaaaacaaggttagtcacaatgtagtagtcaagaacttgagagaggctatccaaacatgcataaaaaaggaaccataaacagtgaaatcatccacaaacaccttcatg

SEQ ID NO: 270504 - DNA, 434 bp, Glycine max
  unsure (1)..(434): unsure at all n locations
agctcgagacatcatccattacgagttntctagaacaacttgagaaaccttcccttacatgactgttgagacaacaccctcaagaagaacaccttaagttatctgaacttagctactaatggtttctttgagtgtgctttacaagacatgactaaattcacaaacacagagaatgtgtgaaacatacgcctacagttgaagctctctagacataaaatgcatattcagactaaaaccactataaggagagttgttcaaaaccaagaaagacaatcatgttttctacgccgaacagtccaaatatcaaaagttgtatatgatcagaagcatcatgctgcgagtagctttagtcaagggatacacatcagacactacatatgactaagggatcatcacaagatgcatggtagaattgtttagtgaagacatacgtg

SEQ ID NO: 270505 - DNA, 391 bp, Glycine max
  unsure (1)..(391): unsure at all n locations
tcacaaaagtttatatggcttgaaacaagcatcgaggtagtggtacaagaagtttaatgagtttatgagcaactcaggattcataagatgtgacatggaccatngctactatgttgagaaatatactaatagttatgttatccttgtcgcgtatgttgatgacatgttgattacaggatctagtatgatagaaattaatagtttgaagcaatagttggcagataactttgaaatgaaggatcttggtccagctatacaaatccttggtatgagaattcttagaaacagatcagaaggagatttgaagttgtctcaggagaaatatatacacaagttgcttgacaggttttaccttgaagaatctaagaccaggaataccnctttgggatct

SEQ ID NO: 270506 - DNA, 402 bp, Glycine max
  unsure (1)..(402): unsure at all n locations
agncttcacaatatccaagcaattcaattccaattaccatgaactaccctaaaccaagaaaacagggcagacgcagaaaactctgcccaaaacacattcacacattacagctctccttactcatatatcccagtaacattttcttcgtttcgattcgttaaccattgaatcaacttgaaaattttactggaggctcctagtacataagtctacatcttgaccgctgggatcttctagaaaatgtctaaaacccaatatgtactacctttcccataaccagcaatgcacaagcatctttctgcacacaatcaaaaatctgctgacaattcaacaacatntttcttgataatacggcagatctcgaaatccatcttgcccacatccaattttgcccaaattgga

SEQ ID NO: 270507 - DNA, 380 bp, Glycine max
  unsure (1)..(380): unsure at all n locations
tccagactattggtacgccatttctctctctctctctccgccaagtgtctcctttttcactttgtgtgtgcggaactggctatgtctcgctcttgacttttttttattcgggcgcgtttgcgacggctgccacggaaaacgccttttgggtctttgcccctttttctgacacacaccatgttttgatctcttgaccatttgaatttgcttttatttggcggggggggggcacncctaccccttcttaccacctcgacccaccctctgtccttaccccctccccctcccagccctccacttcctcctctccccctcccaccgcttcaccgccctcctccgtctccccactcagctcctcccccccccccctcccccttccc

SEQ ID NO: 270508 - DNA, 289 bp, Glycine max
aactgcgaacgcgagtatagcggccggtcattccaacacgacaaggaacttacctccgagaccgttgcctgaatgcaccccgctcccaatgacgtaagaagatcttctaccattcctcatcgtcaatcatttggtcgtggtcactcccggaagggtcttcgaaccccctttcccgaagtggtatgaccctagtgcaacttgcaagtaccatgggggtgccccggtgcattgcataaaaaaatgcatgggccttaaatacaaggtccaacatctaatggatgccggatgg

SEQ ID NO: 270509 - DNA, 368 bp, Glycine max
agcttggtggtcttttcataaagatcaaccccttgtttggaattctggacaagttaacttctttgctccttgctgaactggttccccggatgattccttcagcttgagccatgtgttaaattcctatcttggctgaatcctagtgatccttcttggttgtagccttggaatccgcggtgattttgagctcccatgtagttcacctccctggaagaatcttcttacgctatgcattgccttgactcgtgtgctccaccgcagatgtggcatccctctatttgcatgattgaaaggtaatacggacttactgcttgtatttgttgacggagcttgctgacgggctccgttagggcctctatcttttgggc

SEQ ID NO: 270510 - DNA, 307 bp, Glycine max
cggacctttatcatagcagataacttctctctatctgaaacgtgagtagtaagaggtttagaatcagccattccaaacctcacaagtatctcctgaatgtaagccctgtgagacacaaatagccttttctgagatttgtccctatagatttgcattgctaagaatttcttcgcagtcggatcttcagagtttgcatatcacacatgcattgtgctgcaataagcgtgccctctacatatagataaagatagagcattgatccatgctccaccttgttgtgataaacacaacagtcatagagacttct

SEQ ID NO: 270511 - DNA, 416 bp, Glycine max
attattgctttcccatctgacattcaccacagattctgtcttcttctatattcagactgggaatgcctctaacaagacctttgcaaatgagttttttctagcccctttagagcgacagtcaccatacgagatggcatatgccgactttttgttatttggagggaatatgtgctgcagaggatctggctttgtgcggcgctcctaaggtggaggaagactatagagggcttcttcagagaaggagagaatacgctctcgacttattttggggctgattgagtgagagaaacatggctttttggtattaaacaggaggtgattcttttttgttattattttattatatactatgcctcatgtctccctttgagtggagcaatatagggctcgcttacgtttggactgaaaccatactg

SEQ ID NO: 270512 - DNA, 540 bp, Glycine max
  unsure (1)..(540): unsure at all n locations
aggggnttttgatcccatcgatataactgacactatataagactcaggctcctgagctagcacagcgatgcttacgctaggtgtttgacgactgtttctcgaagatatgatgtgacgagcgaatagagatgctctgatagtggttcggttgcgacacgtgaaggcagaggaacaccaggcatgtttcactcgcgacgagcgtgattgttctctgcggacacacgagacttatcatggggagctggtcacacttgtgtcagagacatactatatttagatccgttgctgctatacaacacaagctctttgctcctctccaagcacatggcgacgagctacttacttttgcttaacttaccaatgatcacccggatagtgggcgtgatctaaacccatgcctatattactatatataagtcttaaagaacgcgtatcctacggctatcatatgcattttatgacactgaagtcgaaattatatagaccgatctatacgtgtgtatatatactctcgctgatccacagaacttagtgtcatat

SEQ ID NO: 270513 - DNA, 439 bp, Glycine max
agccttgtatcccagggaggggattcgagcttaatgctaatgggcagcctttgaagattctgaggaagaacatgactactctagctcagacatggagcattctttccttttctaacctcattctcatctcccacacatctaatgtgaccttggatagagccaaattgatttatgggattattacgaagatggacatgaacttggggtacctcatctcccaccagatctctctgattgcacagcatgacacatccagacttggattccctaccttgatcaaagctctatgcaaggccagaggagtttagtcagactctagatccctgccattaacttggcatatattaagaagaactgttggaatcttgatgatccaaccgttaagcacagcttcagcgtgcttagtgcgacagaagaatctggcagggcatcaatatca

SEQ ID NO: 270514 - DNA, 465 bp, Glycine max
  unsure (1)..(465): unsure at all n locations
ctctcttgttntaattcatatattgttataatataaaataatatctcacatatgtatacttatatctaaattatcagatacataatagaagatatataaactaacgcataaacgtatatagcatgtatagatatcaatgtgccaattccaaataaagtttacgtgaaagaataagacaattaggtaatcaattacacttttatatatagcaaatggaagattgacattcaagctaggagttcacgattctcaaaatattaatacataaaagtgagctaattcaaatacaaggatcacaaaaattgaatttcacgtcaccacaaattacaataaacaaatgaatatatatagtgtaaaaaaataagaatcacgatactgcaaattgcacagttaatgtaacaaactgaaatagaagaaggggtgtgggaatngaaagcaaatngatatcaattattagtagtgcat

SEQ ID NO: 270515 - DNA, 442 bp, Glycine max
agcttggaaggttgcaggattggtgttgaacggttgaggcttattttattatatcatcaacaattttccttatcctacaagtctatcttctttaacttcaagccattattgcttttcaaaactacatgtaccttgtcttgtactgactataactcccactttttaatcactttaattcaagtggattaatttaatgtcatgtgaaaaattgagtatattctttaaaaacatggcactatctatgaacaatgttcctctaatttgtaacctatcgttagacaattaatgaagttggcagaagacgttgatgtcgttgattaatatgctcccctaataataatttcgggacatctctaaaggtagtatcataattaaatttaaattgaaggtttcttaacaagtaattactaattaagaaatattaaaaaaattaataatatat

SEQ ID NO: 270516 - DNA, 481 bp, Glycine max
  unsure (1)..(481): unsure at all n locations
gcttgatgcttcaagaacgtccaaataatgcaccagctaattatgctagtcggctctttctagttntggtttttcagttgctagctaccccaacactagagtagactttagcacctaaatctccaaacatatataactacattaattggtttgactattttgacttatatggtcatccttttttttattatatttatagtgtaatactaattaatggtacttctttactttcatctcgttgatcatgtgagtgctactcggtgttttgtatgctcttcttgaatttcctgataagcatttatttcttgaggaatagtttggaattataaaatgtctagatatcactgctgattcgaaattaatctcatgaatgtgtggtagcagaagatgtgaaaagatcccatcgaagtacttgaatntgatatctctatgcacagaatcgatgctttcagaaatcatctttggatctnntttataaaat

SEQ ID NO: 270517 - DNA, 447 bp, Glycine max
  unsure (1)..(447): unsure at all n locations
agcttgcttctacataagcatctcttcatggcatcttattggatgcattgttcctgcatttgtcacttatcatttcatgcattgcattttgcattagtcatttattcaccgtgcatttgcatctaacatgttttttgtacaccttctattttcatgttcgctcatgcatgatccttgcattttcctctgcaaaacaaagaaagtcacgataaagctcanacaatgcatcattcgcatacatccgtgcttttcattggttgcattgctcactgcattctttccctgaaaaccaaactttaatcattgttatcataagggaagaacgcactttatgacacccttactgaacacatgctagagctggagtaatggctgaagtagacgaggtgcaagagcggatgaagaccgacatgaaggccatgaaagaacagatggccacaatgatgg

SEQ ID NO: 270518 - DNA, 481 bp, Glycine max
cgcctagagagggaatccacggaggaaatgcttaccacctcgaaagactggaaagcggtttctaacgactcatctgcagcctccacataaggcatagaggatgggcagcttaccaagatgtcttcctcgcctgatacgatgaccagatgcccttccactacgaatttcaacttttggtggagtgtagagggaacaactcccaccgagtggatccacgggcgccccaacaggcagctgtaaggggggttaatatccattatttggaaggtaacttgacaggtgtgagggcctatctgtacagggaggtcaatctctcccctaacctctcggcgggtgccgtcaaaggcacgaaccaccatggaacttggctttatgtgggaagcattgaatggtaatttctccaaagtgctcttgggcatcacgtttaaactggaaccattatcgatgagcaccttggctacaacgtggtccatacacttga

SEQ ID NO: 270519 - DNA, 221 bp, Glycine max
  unsure (1)..(221): unsure at all n locations
agcttctagatgcattgtccatacctanatagaggtattacactttatatttgaggcgggattgacaatactcttaaggaatcatttagacaaatatctcctgccagccatgaaatgccttatataatgccctatgactcctgctaggtaacatatacctatctacaaacactacatgagtcactaccctctcatggactgagcaattgaatacctacttg

SEQ ID NO: 270520 - DNA, 422 bp, Glycine max
  unsure (1)..(422): unsure at all n locations
agcttctggtgggacatcttgacttgctttccaatctgacattcaccacagattctgccttcttctattttcagattgggaatgcctctaacagcacctttgtcaatgattttcttcatgcctcttaagtgcagatgtccaaatctttgatgccatattttgacttcatcttctttggaggatagacatgtggaggagtaactggtttcttgaggtgtccataggtaacaattgtcctttgatctgctgcccttcattagaacttcactcttctcanttgtcaccaagcattctgactntgtgaagtttacattgaatccttcatcacacaactgactgatgctgatcaagtttgcagtccagcccttcaccaccagtactttgttcagactaggaagaccatcatggactagctttcccat

SEQ ID NO: 270521 - DNA, 436 bp, Glycine max
  unsure (1)..(436): unsure at all n locations
ctgagggttgttcaaatgcagggataggcccaacactcggagtcccacaagggagagttactagtcctatgtgttgattaanaaaatatcaataataaagtgcttccagctggttatgagcccttgacctcaaacaaaactatgcctgctttaaccactaagacatattagctatgtttgtaatgttgggattntgcatttctcttatttttgttgttgagaactaatccgcataaatctttggaattgaatgaaaatagacagcattgttgttttgtcaaaaagtgtgagcattgtctctgctagggttcttccttgaacaaactgatcttatcaggaattcactcaattcttgtggcgatcctctaggcttatcaaaacctcgtgtttgtggcgcctctngattttctatcttccatggttttgtcctatatgc

SEQ ID NO: 270522 - DNA, 128 bp, Glycine max
gttttcaaagcccgtactatagcatacaactccttatcataagttgcactactaagggtaagaccacttaacttttcactataataagccgttggatggcctctctgcatcaacacaatcccaatacc

SEQ ID NO: 270523 - DNA, 380 bp, Glycine max
agcttcctctgccgtaaaaaatatattatcggccattgtttgtaaaaaaattgcgcaatgtcggctgataaatatccgtcggggctatttaactaccgatgtcggctattgttttttctattccacccctgaattatatttggatgatgcctattatgaaatgttcggtcggggtcatccggtcatgcttctttatgaggcctcgatctgtcgtctttcctagccggccgacgtctgctagcatgtttttcgagccatatctgtgtgaatcatgttttctttttgccaaggagggctaatgttttcgtggccgacaaaatgagaacatgccattgtcggccgaaacacaatcccgcacgatataccctagccgacctaca

SEQ ID NO: 270524 - DNA, 422 bp, Glycine max
  unsure (1)..(422): unsure at all n locations
gcttcacattcaatttcgagcgtctcgatatattacgagcctcaatctgacatccgagtaaaaagttatggtcctttgtattggatcagagcttcaacattcaatttcgagcgtctcgatatgttacaggactcaatcccacatcacagaaaaaagttatcgtcgtttgagttggctcagagattcaacattcaatttcgagcgtctcgatatgttacgggactcaatcagacatccgagaaaaaagttattgtcgtttgaattggctcagagcttcaacattcaatttcgagcgtctcgatatgttacgggactcaatcagacatccgagtaaaaatttattgtcgtttgaattggctcagagcttcanagttcaatttcgagcgtctcgatatgttacgggactcaatcagacatccgag

SEQ ID NO: 270525 - DNA, 405 bp, Glycine max
agcttgtaaatatttattggtatatattgcttgttccattaggctctttatgtctttagaggttacttcctcgttgacatcttttgtcttgaatgaaattgccatgacaggtttattgttactgtctttgatattaggtagttgatattgtgttgcgggaggtaattccgattggattaactcaccatcattcacttgccaatttgttgacatttgttgttggatcacctatgatgtcttgtttccaagggtaatctatatcctttctgatggcataagcatgaaaccaatcaaagaaaaggacattatatttgactctttcgacaaattcatagaacttgtcttggatttgttttctgtttgtacccttttaatgttggaaaaaccatctcctttgaggctcat

SEQ ID NO: 270526 - DNA, 465 bp, Glycine max
  unsure (1)..(465): unsure at all n locations
ctagagcatcgccatgataaggtctatggaaggtcctggatgagctggagctggtggtggagcagaagtgggtacaagaaggtcctgaggagtggatgaggaagggatctcagctgctctggccctagccttgcgagtccttggaaagtagaccgaagtttcatccaggttccaacaatttttcatgatatatgccaaattaatggttgggctcagtgattcataagagagggaataagaaatgactccttttgccttacagagagctgtgatcaaggcaggaaatcccaacctagaggagttggactgagcaatgagtgagatttgtcctgaaattaatgctccaatgttcatgtccatcctcatcaccaacctataaactaactatgccctgtccaagttcaggtcagatgtatgagatgtangggcgaggttagaatatgatagcacactccaagtctgtac

SEQ ID NO: 270527 - DNA, 421 bp, Glycine max
  unsure (1)..(421): unsure at all n locations
agcttatgccataactaggattggaagtgataaattgctgcttcaatcctgcatttaccactcactttcggtaacataaaaagagcattcttagatggggaatgtgaaatttaaatgactagaaacacaaatgtgtcacagaaagtctacaatctacgtagctgcactaagtaaaatcagatgtcctaatctaaactaaaaggaagactcatttaatttcctaatcctaggtagaaagtacaaccaaatctttagatgaaatacgagactacagtcatccataaggccacaaaataactaatatagcatcgcacaagtcatggggcactanggcaatggtgttacatttatgcagcttacacaacggtatgaacaaatgtgaagtgtttcactgtgcacagctccaataaccatattacat

SEQ ID NO: 270528 - DNA, 441 bp, Glycine max
  unsure (1)..(441): unsure at all n locations
tcttctccactggccccatgctgtcacactatttaattcatcctatctcatattatgccatgttaatttctgttattcaatcacttcattaaatcacacttcattacgagaatgagaacaatgtttattgtcctttctgcacatgcagccaggaaggggagagcttaattagaacttgaaactaatacaaacgattttgcactacaagacattgtttgtgattctgtctgttttggcactttaatttaaccccattttaagccgctgcttttatttattgatggctttttctaagaactggagtgtactttgctttcattatccccgaccaaaggtagcaactatgctcctaattattctcctataattaattaagaatggcatgatcacttgatttttntatctgggacaaaactgttcaagcattaattgaagttaatt

SEQ ID NO: 270529 - DNA, 333 bp, Glycine max
  unsure (1)..(333): unsure at all n locations
cctataagactcttcatatgctcctaattgaataaaaacatctgtggaagaagacaagctagtgattataattttaaaacgtgtttggagtaagcatttagtattagtgttattagacaactgcatanatgcttatatgataagttatttttataataaaaaggagagaagggctgaattttagttttatatgctgtttttataagttaacttcatatagtatctttaatgggttccttacactcaactntaaataatgttgaataatttttttcattacaatagatgatatggagttagttatataatgttacttaaaacatttatattaaa

SEQ ID NO: 270530 - DNA, 446 bp, Glycine max
ggatcactaagaacgaaacatttaatgaactcgttagtcaaagttaggtgacctcagtgaaaaatacagaggcaagtgcatttttaaaaagcactaatatataagattaattgtacgcgcacaccacccatcttaatgtattcatggttgtaccgagctgacattatatgttctgtaatcaacataccaattttgaagaagttatatgacaagacgtaaaataaaatggcaaccaaaagtcagagaagtggaataagaattgtatggtctttgaactcaacaacaaacaactgaacagacatatggccctgatcttggtataccatcggcactgtaaaactaaacatgcacttcataaatagatagagtccctctcgtctacttttctttcagtgataacaggacacaaaaagtacggttgattgaggttaagccgttgatcactc

SEQ ID NO: 270531 - DNA, 291 bp, Glycine max
  unsure (1)..(291): unsure at all n locations
agctntgcagaattggtcttcgccagtgaaaggatcatgtgggtccgaaaagaggcaaatttgatcatcctactaggacgactgagaaaactggggcaaataaagagggtgaggatgagggagaaacccatgctgtgactgccattcctgtccggccaaatttcccaccaacccaacaatatctttactcagccaataacaaactttcttcttacccaccacccagttatccacaaaagccatccctaaatctaccacaaagtctgtctaccgcacttccaatgacgaaca

SEQ ID NO: 270532 - DNA, 313 bp, Glycine max
  unsure (1)..(313): unsure at all n locations
tccatcaagttatgaccatttgtatntctcgagatctttcgtggttcaatttcgggcgtctccatatgtcatgtgcctgaatcggacctccgtgagaaaatctatgaccatttgaacttctctagagcttccgttgtgtaatttcgagcttctcgatatctgatgtgcctgaatcggacattcgagtgaaaagttgggacaatttcaatttctccagagcttccggtagtcaattatgagcgtctcgatatgtgatgtgcctgaatcggagctccgagtgagaacttatgaccatttgaattgctctagagct

SEQ ID NO: 270533 - DNA, 423 bp, Glycine max
acctgcatgcgagcaagcttcggtattcaatttcgagcgtctcgatatattacgggactcaaattgacttccgagttaaacgttattggcgtgggaaaatcctcagagctttggaattcaattgcgagcgtctcgatatattacgggtctcaactcagacatccgagtaaaaagttattgtcgtttgaattagctctgaggttcagaattcacattcgagcgtctcaatagattacgggactcaataagacattcgagcaaaaagttgttgtcgcttgaattagctaagagcttcacaattcaatttcgagcgtctcgatatattatgggactcaatccgacattcgagtaaaacggtattgccgcttgaaaatcctcagagcttcggtattcaatttcgagcgtgtcgatatattacgggac

SEQ ID NO: 270534 - DNA, 454 bp, Glycine max
  unsure (1)..(454): unsure at all n locations
aattgcaatgtagttcggctatgtttcttcgtgctagctcaaccgaagntgtatttcggccgacgccggcattttgtcggccaggaaaacattagcccacctcggcaaagaaaaacatgattcaccggtattgacagaaaaaaatgctggccttagtcggccaggaaagatgaccgatcgaggtctaaaagagaagcatgaccggattacgccgatcgaacattgcctaatagatatcctccaagcattattcaaggattgaatggaaaaaacaatagccgacatcggtagttaaatagccgtgactgatatttttcagccaacactgcgcaacttctttcacaaacgctggccgataatatttctttacggtaaaggatgctttcgttggtgggtgtcgactataaaattttcaatgtaggtcggctaggttntttcgtgcgagctcaaccaa

SEQ ID NO: 270535 - DNA, 225 bp, Glycine max
  unsure (1)..(225): unsure at all n locations
ataacctacaggacgaaggacgtgttactgntgaagttaatgaggagttgtgattgccagttgactccagggagtatggcattggcgcacaggtattaatcatatcagccggactaacatagtatttggcttttctctaatagatgatgatttactagaatggttatggaagttaactggaacgatctttattggatttgaaattctctactctcagatgatgag

SEQ ID NO: 270536 - DNA, 470 bp, Glycine max
  unsure (1)..(470): unsure at all n locations
gtgccaactaactgtcattngcccaatggggtatatgtgtttcgtatattattcttcgactaatgctagtaaacactctatagaacactctttttaagctccaacacacaccttactgtatttgttgaaattgattgggattcatgaaatgatatgggttccacatcatatctaatacaatctaattcgtaatttcttgtgaactgttgaatttatacctggtggtgctggtcctttccaaattgttggtcctgtgcttgtgcttttataagtctattccctttcagaaataggctaatatagttaaaagtttcctttataaattctagtggtgggtaatgattgttaaagcttacacttggttcagatgtggtattttcctaggttctttacgcattctgctattagtcctcttcttgattgtaagcgataatgaatcagaacaatacctgccatgtgaaagagtccat

SEQ ID NO: 270537 - DNA, 446 bp, Glycine max
  unsure (1)..(446): unsure at all n locations
agcttgtttaacagcaagaacatccataccatctacttgtacaaagtataaatattcatttgaaaattaaaaaagattgttcaaaaagactacttactatgtatatttaattaacctgtgtatagatatgcagacaggtatgcatacaactgcataccaacactcattaaaatatacacctaaacaatggtagaaaactccaactaataaagacaacatatagccaacataatcctacatatttagccatcaaaacatgaaaacaggaataaagcccaaggaggaggctataaaaggagagtccacagaagcatcaacatccaatgcaaaaacaaaaaacacatacatccctcagaaattaaaacctcattcagatccttataagagatctggcaagatctaatgatcctaatttaanaaatagaaaacaacattaaaagcagcag

SEQ ID NO: 270538 - DNA, 373 bp, Glycine max
  unsure (1)..(373): unsure at all n locations
cgtcccacatgaaaaataacctcataagatagtntgatcagtttctatagaaactgcaatttattgagagtctcttttttttttttgtgaacttaatgtgatgagagggtgggtgggggggctagctgtgtcacaaatttcaatggaattgatatcagagcttgcatgtaaagcaattaacggaccttcaaagattaaaagccaagaaagatgtatgtacaagatgttgttgcaacatcataagccatgcatgcttttggaggacttatacaagttctctatgttaaggggggaaaaaaacaaagggtcttggcttcggttcgtcactactatgtctggaattatctgtttcttgatctcgttctctactatt

SEQ ID NO: 270539 - DNA, 438 bp, Glycine max
agcttagaacaatatacttgtccttcacttaattgtctttgggcttggttaccacgatcaacaaagtactttcggcacctgctatatgttgacttgaccaatgctgttatgggtatgctgcgacaatccttcaacaccatattcacacattctgagagattggttgtcatgtgaccatatctttgtccagatgtatcgtaagtcatgctccatttttcctttgaaatgcgatcaatccatgttgctatggctggactcaattaacgaattttttctaaattttgatcaaacacatgcttgcaaggagtgtacgctgcatcaatgttgttaccatcaaaagttgtaggtagatatgaaagagaaaattaacttcatttataaaataaaccttacccaatttcttgaacatctctttttggttcgcgttgttgtatttgc

SEQ ID NO: 270540 - DNA, 475 bp, Glycine max
  unsure (1)..(475): unsure at all n locations
tcctatgaaccctcaggttattttgttattaaataaatttataagacataattgactatttgtagttaacttaattattagcattaaatttataatacttttccaaatttatctttaattttataggggacctattcatcttctctaatcttcataggagagagaaagagataattcatggtattttagtcaaaatagttaatgcaccatatagatgaaataaaatcttataataagaaacaaaaaaatttgttgactatgtcttgtaaataaggactaagttagtattttaattaaattgatgtttgaaagtttaggtagttggatcagtctttggtgccattgttggaggcacgaatttggatgaaaggaagcgatgtgcagaggaggtagccaagcgaaatgtatcaggtttctttntcttttggtggtnntgaaattgcgattagtggttttgaaccttctttaattatac

SEQ ID NO: 270541 - DNA, 409 bp, Glycine max
agcttcacacctacaacaagatgaatctaaagcgatatggcggttagtacaaaataatttagctggtatactttggtgatcaaggaggcaaagaaagaaattgaagttttctggtaattgaagagaccagagccaagctttgcttcttgttgtagcagtagtgggggatcgggctcaagtcaaacaacagtatgcagatttagctgagtattctccatcacaagcattatcccaaatgacaatatcctccacattatcatttagcacaacactttcaagctcatgtttcagccaatcaggaataggagtagcctataagtttaaattgcaccctccatcctcgaagatatcttttataagaagcatcgaatcctggatgtgaatataatgtaaagaaagtcccaataca

SEQ ID NO: 270542 - DNA, 464 bp, Glycine max
  unsure (1)..(464): unsure at all n locations
ctgaggacgacttcctcttcaagctctgttctctgcaggtcttctttcaacaaaatctctcanaactctctggattcagacccttctctctctagaatctctcacatgcagaagctcttcgagaaaatggccaaaatcccctccaaaatctgatttccggcttaaataggtggctttgttggtgcttgcgtgcttagcgcgactattgaccgctcagtgcgcattagtggattttggcttaacgcgtgcttttcctgctcagcggatgatctgaagtggtgcgctcagcgggtggacccttcgctcaacgaacatgcacaactcatccttcttccagattcttcctcgcgcttagccgatgagtgttgcactcagcggatgtctcgctaagcgagcggatganaatcaacacttcacaaactttcctaattataccttgaatgagaggaaatgattattaaaca

SEQ ID NO: 270543 - DNA, 453 bp, Glycine max
  unsure (1)..(453): unsure at all n locations
acctgcggcatgcaagctnttcaaatggataaaaggctcacattcactttcttctacatcattattaaacttgtccaaataaataataaagtcatctcgactcagagaaaatcatataagtctcatacaattaatatacaacctatatcctaatgtcacatcctatcacagcgtggtgttcccgtgtcctctagcatgaggttcttcatagtcatgcacctattcatctgctcccccgaacacaagttcaagatcatcacaggatccaaacataacaacacacagggagtgagttatcacattcctagctaatagagaaacaagacaatcaaatatacatattatataaatgagataccacttgcttaaacatagctcacgtaacttcaccacttcatcattcaaaattcactgtgtaattatcactcacattacacaagagtcccacacttc

SEQ ID NO: 270544 - DNA, 377 bp, Glycine max
acattgacagagttaaacataacagggtatgcagtagctgattataactttatgtcatctctcgctaaagttttgccaacactcaggtggctagatgatgaagaattatcttgacacaggacatgttgtaacccagttctcatttggtcctcattggcatcagatgctagattgctactatggattgtgctaataatagtgggtaacatattttactgtccatacaaaatatcaaatgacgtccttgatgagtaatacaagctcctttttcaaatctcagtgcttcaccttagtcatggagaatgtgcagtgtatctatacagtccttgaacatgtacacgatctatgatattaaccttgtgaagcttgaattactc

SEQ ID NO: 270545 - DNA, 261 bp, Glycine max
  unsure (1)..(261): unsure at all n locations
caagtgatgcctcatgaatcctcctgtgcttgtgccactggtacccgggagagcccttatcttatatatgaccgtgttggatgagtctatggggtgtatgttggggaagcatgacaagttcatatagatggaactagctatctattacttaagcaagaagttcatggcatgtganatgaactactttttgctcgaaaggacatgttgtgcccttgtgtgggcagcccattgtctatagcagtacatgatgagctacatcac

SEQ ID NO: 270546 - DNA, 416 bp, Glycine max
  unsure (1)..(416): unsure at all n locations
cgagccattgtcctgaanaagtccctaaatgaccattttgccctcccttttgggtattntccgcattcttttctaaaatgtcagaaaaccttacggattacgcagaaattggtgttaagcagctcaattcggctagcaagaatccaaatgtttacaaatgatcatccccaaacgaaattagggtatgacaccaaggaagaaaaacctgtaaacaaaaggaaattgaagtcctataaaacataaaaagggaggacatcgaagtcctatagagcataagacatttgaagttntttttccaaagcatagaaatagaggacgtngagtcctaagaagcacanagacaaagacattgagtcctatgaaggataaagacaaggacattgagtcctataaggacgaggacactgagtcctatc

SEQ ID NO: 270547 - DNA, 398 bp, Glycine max
agcttaacctaaaagaagctttatctatcaaccttattaacgtaactttgtttcttcgaagtgagattaatgttgttcttcacgaactggcagttcgagtctacaactttgaacctcgaccacttcaatgtacagggcttcttcgtcaataaggttcaatgcttgaaactgaaacaacatatacgttgagggcaagcaagaatggtgaagggttcaatcgaaggtcacaaggctgtctacagggttcaatgcttgaaactgaaacaacagatatgttgagggcaagcgagaatggtgaaaggttcaatcgaaggtcacaaggctgtctacatggttcaatgctcaaaggttcaatgctacgtctcagtgctgcattcataggataaggcaatacgttg

SEQ ID NO: 270548 - DNA, 468 bp, Glycine max
  unsure (1)..(468): unsure at all n locations
cactggaattgcaatgttccatataatatttaaatggtgtattcgattacaatatattggtaatcgattatcagtgtatctgaacgttgaaattcaaattcaattgtgaagagtcatatcttttcataaaatgcattgtgtaatcgattacatgattatggtaatcgattaccagtgacaagttttgaataaaaggtcaagagatgtaactcttccaatggttttctcaaagattttctcaaggttataactcttccaatggttttcttgaccagacatgaagagtctataaaagcaagaccttgacttgcattcaaacaactnttagaactttnttagaacctcttgaacaacttttgagaaatcttgaaacctttccttctcatctttcttcttcttcttcctttgccaaaaagctttctaagttttctgttttccaaaccttgttcttctacagaaaacaaaagt

SEQ ID NO: 270549 - DNA, 382 bp, Glycine max
agctgggccattgatcctacatagatctcactatttctagttggtgtgtataattgggattgaagctcccacacagaagttcaacatcatgcaatcctcaaaggaagattatgatgttaacaacctttcccaatatataaactagaaagaaagaaagaaatgaaaacaatcttcactaggcaaacattaaaaactattaaatggatgtccaactcaaaaaactatggcagcaaaggaatgtaaggcatctagagatgaacacaagttgtctggtcgagtagaacctaatgaactccaatactaaggctaaaacttccccaagtaccttaccacaattaatgccaaaaaggtggtagacaattactgaacctataacgacata

SEQ ID NO: 270550 - DNA, 477 bp, Glycine max
  unsure (1)..(477): unsure at all n locations
tcatcatcttgagganntttttccaaagaaatgaaggcacatgttactgagcattcttccacattattagggattcggagttgaatcacgaggaacaaccttgaaggttcctaatccttttgctataaaacaaggtaacataacaaaaataaaaaaaaaatgtatatgaagaaaaatggatgttcaacatcatggtcattgatacacatggtgcacaagataagaaagtctacactaattgtagatgtgaccatatgaatctctcaaaggacttttataatgttacaagggatatacataactaaacgttgactacaaattataaaagaggtctcttttgttgttatgtcaactttcagtgcaaacaaatagagggttntcaaggttcaaggagaatgaattccttaagatacanaataagttgggttgattggaacaaacaccaagtaccagataaagtttatattcttcatttca

SEQ ID NO: 270551 - DNA, 308 bp, Glycine max
agcttagaggatatgaggtcttgaaggaactactttttaagattgaaaaactctatgaggagatagaaaccttgagggataacctaggcaagttttttggtagtcatgaagcccttaacaaaattattaaggtgcaaaaaaacccaaagacaaatctggccatggtttcaaaggcaaaaggttgtgcatggtgaagaagttattgtttggtatttttgtggaaaagtgggtcatgagactcataagtgcaaggacctccctaaaagggcaacccattaaagggttcgtctagagcttactagcaccct

SEQ ID NO: 270552 - DNA, 428 bp, Glycine max
  unsure (1)..(428): unsure at all n locations
gtgaatgctctattcaatggagttgacaagaatatcttcagacttatcatcacatgcacagtggccaaggatgcatgggatatcctgaaaaccactcatgaaggaacctccaaagtgaagatgtccagattgcaactattggccacaaaattcgaaaatctgaatatgaaggaggaagaatgtattcatgactttcacatgaacattcttgaaattgccaatgcttgcactgccttgngagagaggatgacagatgaaaagctggcgagaaagagcctcagatccttgcctaagagatttgacatgaaagtcactgcaatagaggaggcccaagacatatgcaacttgagagtggatgaactcattggttcccttcaaacctttgagctaggactctcggatagggctgaacagaagagcaagaatct

SEQ ID NO: 270553 - DNA, 354 bp, Glycine max
  unsure (1)..(354): unsure at all n locations
agcttgatatttcgcagagactaacgtcgncttcttctccctttgtcaatcgcggccgacaaagcccgttgacacgcggtgatttacgtaatcttccgcgctctcaagatctgtcatattgacttttgagtcacgcagactggcggaaatacccgagtggttatccgtataaactttttgctatctgtaagacgaaaagcttgatagcacgcagagactaacgtcgtctactgcgcccttcgtcaatcgcggccgacaagcctcgtgacacgcggagatttacgtcatcttccgcgctcacaagatctgtcatactgactcttgagtcacgctgactggcggaaatacccgagt

SEQ ID NO: 270554 - DNA, 332 bp, Glycine max
  unsure (1)..(332): unsure at all n locations
nttcgtcnacagaaacaaattgtctatcggataactcactcttgttntccgcccgtcagcgtgactcanaagttagtatgacagatcttgtgagcgcggaagataacgtaaatcttcaagtgtctacaggcttgtcagccgcgaatgaccaaaagcgcacaagacgacgttagtctctgcgtgctatcacgctttttgtcgtacagacaacataaagtttatacggataaccactctggtattatcgcccgtcagcgtgactcaaaagtcagtatgacaaatcttgtgagcgcggaagatgacgtaaatctccacatgtcaacggcgcttgt

SEQ ID NO: 270555 - DNA, 445 bp, Glycine max
  unsure (1)..(445): unsure at all n locations
agctntactacatgggttcttttataaccgacgcatatgaaacgatgtttattcacactcttttagtagtttggaaaggtattttctacattgatttttttctgaaccaatgaacatcggtttttttgtaatcgatatttttattcaccttacaacatcgattttgaccaaaattgatgttatttttgcattntttgtatatttcttactatacgacatcggttttgggaagagccgatgttctatactagattttaacatcgattttcataatcgatgttaaaatagatacttttaacaatggttgttttgatattaagtcataatcgatgttgaaagctcgtaaaaatcaatgttaaaaacttattttctagtactgtaggcgcaattttcaaatgagaaagtatcttatatgtgtggaattgcatgtaatatatgatgtgaa

SEQ ID NO: 270556 - DNA, 475 bp, Glycine max
  unsure (1)..(475): unsure at all n locations
ggattgatggngacccggtgttgagagatacgaggatattgtctacgtggtagtacgtgagttcagttggaggtgggcaacaggggatggtgggtttatgcgcgcattgtggatgtggaaagcttgttgtgcaccatcgcccgaccgccacctagtaccacatgtgatgggtaccccataatcctacaggcttgagatgaggaagtgttgaagggtgaaacttcctgctcttattgttgaccacagagtggtacctggagatatgtcgcgggggtcaggagaccttggggacgtcaggtggggtgctattgcccaaaatcaagcttgaccaatcccgacccaacccgggcatattcggtcagtgagaacctgtgatgtacctaagcaggcgagctcctggcattcaacagatcaaaggaaaacaagaccacaaagcaaggatgcttgtggtggctggccagctgtgaattatgtg

SEQ ID NO: 270557 - DNA, 344 bp, Glycine max
agcttataatatatcgatacgctcgaaattaaacatctgaaactctcgtataattcaaatagtcataactattcacacggatgtccgattcaggcttataatatatcgatacgctcgaaattaaacatcggaaactctcgcgaaattcaaatggtcataacttttcacacggatatccgattcgggcacataatatgtcgagaagctcgatattgaacaacgaaagttctttacatatcaaatggtcttaacttttcacacggatgtccgattcaggaatatcacatatcgagacgctcatattgaacacaccaagctcttgagaaattcaattgggcctaact

SEQ ID NO: 270558 - DNA, 484 bp, Glycine max
tatgcgcatgcttccttacgaacgatcacttgcagaagatatcctattaaccgataaaatgcacccatatacaatcaaggcagctctgatacctatattatatacacgtacttccaatgtgtattagatacttacatcacacacatctccttggctaaattcacatacatgcatactccaagcatttggggtaccaaaaattgcacatgtgcacatcttggtatttctaatacctatacatacacgaacttcatgatgaatcttgactatctacacaataaggtgctacatttcatgccctttttcaagtaattgctacctaaagccgcatgcaaattcaagcatattttcctttgctgactaaaattgtattcaaattatatatatattgtatggaatatgaattctttcatacaacattcaacatatttatatattctttgtttttgtgagacattctgactaccaaaaattatatatacag

SEQ ID NO: 270559 - DNA, 440 bp, Glycine max
  unsure (1)..(440): unsure at all n locations
agctatagaacacctaacttgaaagctcgtctaatttctttccgtgaagaatttcgtgcagtatggcgcaattatagtgaactgtagcttacataaaatttgttggacttggatgtaagtgctttctgccttagaatttgtacatattaatatgcttaacgatttggtgcttatttgaaaagcttgtaaaatgcatctgtccattgaagtgattgagaaacagatctatatcttataggtgttaggttgaatgtgtatcctcttaagttgcatattttctgtcatcacatgataaattaatcttattctcaatcaatatgttcataaatctcattctcaatcaatatgtactatcggaactttcgtctaacanaatgatacatacatattggaagactgattggttttctctttttaaagggtagtcttgttatagatct

SEQ ID NO: 270560 - DNA, 484 bp, Glycine max
  unsure (1)..(484): unsure at all n locations
gcttcttatcaaatactntntcctctnntttcttcttgtttctcatataccacttctagttcagttgtcactagttntactatcatctcatctttcctttgtttagtcattaacttgtttgatgtgtatattagaccacttcgagtcataccatcttacaatgtttgtaacaccaggagctacttccttggtattctttgattggtttccatcaaatccttccgcacttacgccatactttcatggcaccgccttgttatctttataaggggaagcctttggtactcgtatagtaaccaaatttggtccactaggagtctagtaagtagcacccctagtgtaatggacaactaagggcttcgggaaggtcattgatgaaccaattgtcaatacatcattttcaaagtatcctacctatatgttagggttntatttcacattanattccacttatgggtcaagtgtaacccaatcatgatgtagt

SEQ ID NO: 270561 - DNA, 400 bp, Glycine max
caagcttgagaagcatgtgatcctttggcatcatcattacattcagcttgatcctttgtctacacccttctttctccttcttcatatcattccctaacattccttgacccatcaaaaacaccttgtcctcaaggtgttagggcttcaaacaatggcttccaacatcaataccaggattctatggtctgttccagcaagactcctctaggtccgtagccatccataatgcaaacacagctggttggcgctggcatgcaaccatggtaggtccatggtattcaattcctatctcaaacaacgtcatgtttctcccttcgagagctttgtcatttggtgttgttgcacgaccatacgaagcaacagtactgaagaacttgttgcatgaaacagtggcatgagt

SEQ ID NO: 270562 - DNA, 484 bp, Glycine max
  unsure (1)..(484): unsure at all n locations
tatgtgaatctcggttgtttctagctccggactataaaaggctatggagaaaagtgttgcaaaatattgaaaggaatttgcagccatgttttttgtgaagcttcaaatgataaactgaatatggatatattcttcggagttattggtcagtgatcacacttcatctactttaaagggtaagaatagtatgtaaaatgaactgatgaagataatgatgccagggaacccaaattttggtcccagagaaaaaatagaatcattaattaattaattctataaaaagtaccacaagccccacctttntgggggattttctggaacataacatggcaggtatggtcatcaatagcatgagctaattaggttgtttcattntgtaattgcgaccactgttgtgctcaaacttttgatctttaagccaatgccactaattgtcacaacttttcatctgctctgattatgtcagaattagaaactcagaata

SEQ ID NO: 270563 - DNA, 210 bp, Glycine max
agcttgtttaatttgataatattcaatttcatagtatattagagtaattgagaaaattttaacctttcacttttttcttgttattacatcgtatctagtagttttcaagtacattaatttatacttgtgatgtttcttttgctcatgaacagtatggcttgcagaagacaatgttgctaaaagatcatatgttataaaccaggtaagtgt

SEQ ID NO: 270564 - DNA, 439 bp, Glycine max
  unsure (1)..(439): unsure at all n locations
ctcttgttggaggaacccttactcaagctatcctaaaatgtttacaacanaccataaaaatttcatcacactcatagcaaatcagaaataaatggcgtgaatggtttatcattacagttacaacaaatcaaacacaagtggtgcacaaatcaaacatgaatggtgcgaatggtttttctttgcaactactatccacaaagtgagatagaggttagggattaaacaaatcanagcacaaaagtaataatgttatttgtagtgtgagaaaataacaattgaagattgctaaggcgcggaaaaaattcaattacacttctccaaaaattgagataaagcttcaagattaagaaaatacaagtgaaaaattaaaagtaataatgttatctgaggtgtgagaaatcacatttgaagaatgaaatgtgtggagaaaatcatgatt

SEQ ID NO: 270565 - DNA, 339 bp, Glycine max
agcttatgaccattcgaattttttgagagtttccgttgttcacactctagcgtgaatatgagttatgtccccgaatcggacatctgtgtgaaaagctatgaccattcgattttctcgagagcttccgttgatccacctcgagcgtctcgatattgtacgaccccgaattggacatctgtgtgaaaacgtatgaccattcaattttctcgagagcttcctgtgaacaatttcgagcgtctagatgtggtatgtcccctaatcggacattcgagtgaaaacttatgaccattcgagtttctcgagagcttccgatgttcaatttcgagcgtctcgatatat

SEQ ID NO: 270566 - DNA, 445 bp, Glycine max
tatcaatatatcacacgttgagttttattcagataatcagagtttatctctcttatcttagtgagagtgattctcctaaattcttgagtgattcaagaacaccctggctgtatcaaaggacattcacaacctttgcgtcgtgccctcgctggaaagagtgattctttccttcctttcatcttcacccttgttctttcaaaccacaattccagaaaatccacctctgcccagaattatctcgtggccataactcccattttacgcactcaaattaagtgattcttgagcctaaattgaatctcaaaacgagtcctttcacctcgttttggaatcacctcatttggagccctttagcttcaggtatttccatttctatatttctgtccagccaccacttaacctacgttttaccatcccattcatccattttatgccaagaaccacc

SEQ ID NO: 270567 - DNA, 434 bp, Glycine max
  unsure (1)..(434): unsure at all n locations
atgcttgagccaaaatcctgtctcaccataaaccttgtacccaggtgagaatgccaatccttaccctcggaagcaaaaaaaaatgagaagagaatgaaaatttccaatcaaagaggaagcataaataggaaagaaaggaaattcccaatcaaagagtgggagaaagcaaaaatgaaagaaagataattcccaatcaaagaatgggagaaagataaaaagagaaaagaacgaaagaaagctcctggtcaaggatcgaaagaaaacagaagaaatatgcagagaggtctttggaccggacaatatctgaacaatacagaattgtcaccaaatgaacaaaaaagaaggaaaggaaaccacgacctaaaatggtcttctcccttaattaccaaccaaatcccgtcgctatcgaccctntatctcgcccgcactaacaa

SEQ ID NO: 270568 - DNA, 188 bp, Glycine max
gctatagaacaaatgcctaatacattcttttatgcatgtgattgtgcatttctatccgtgcggcaaaacacacctgatgattgtgatgatggatggctcaaataattacaaatagtgatactatcactttcttaatgagcattcaaaactttcatgacatgaggaggaaaaacaaggatctcaagtct

SEQ ID NO: 270569 - DNA, 330 bp, Glycine max
agctttaagatagcacaggattttataccaaatgttccacactaattattccctattttattgtcaaataatgcaactaactatcatgaatttcacaaagtagaggcataccatgtagatttttgtatgatttccatgcaagcttattgacatcatgctcaagccctttgtcatcagtttccttgacaccagatggcgcattctgcagagcatagagtattattatattgaagacagatgcatacgttccatcaatgtgagtgataatttaaaaaatatgaatattattatagtcaatacagatgcagaggtttcttcactgtgaaaatt

SEQ ID NO: 270570 - DNA, 449 bp, Glycine max
  unsure (1)..(449): unsure at all n locations
tatcttataatcaagcatccanaacacgtattcatgtatatngattaacactctcataatnttatnttttttgttattgttcttccaatcttattcgttcttccttcgacacagacacatataagcaaaatgcattatttaaagtaaattattgttatctaaacctctgccgatcctatataataatattgcatatgcatntcttgaaatggaatcttatacacatataattaagtgataagccatcatgtttaatgtgtcaatcaagcatatgaactaaattattattctttagaaactaattatgaatactaattaatgaagatgattgcttagtgnggaagcatacatgatgcattaactgatgaagtatgacccacaaattaatatataacacatatcacaaagtcaaattaatagagctagttgatcaatttacaaacaaaatt

SEQ ID NO: 270571 - DNA, 432 bp, Glycine max
  unsure (1)..(432): unsure at all n locations
agcttgagcttgttgctgctgtcccatagagcccttcagaacttgtttctgctccattcttcctttcaggcctttgtggtttctcgctctaatgcttcgaccgtagtcatgttgacatctctcagcacatcacactctttcctggccctagtgactgtcgtctttagcttctccttgaccactctcattntttcgagctctactttcaaagcttgaacttctttgctttcctcagggacttcaacttctttcccacttaggccttttagctgtgggagccaagttatcccttgcgttctagacttcaaccacttgtgatagtcgctgatgacgccatttctactaccctaagctccttatctttcctttcccttgattccaagatttacaaattctctgaagtatctttgcataggcttcattgaaacctcc

SEQ ID NO: 270572 - DNA, 451 bp, Glycine max
  unsure (1)..(451): unsure at all n locations
ctgagtagccatctgccccatctaattngtcaaactcttaatggttgctcttgtctcttgctgaaattgcatattctggatggtcatttgcctcactaactcctctaaggaaggttgagaaggggcctgacttgcttgttgtctttgtcgctattgctgcattggaggaggaacatatggcctgcttagactatcaacattctagaaatgagggacaaattgttgttgctgctgttgttgttgtggaggatttgcccatctcagattcggatgattcctccaacctggattgtatttgatgcttgaaagattataattattctgctgatgttgagctttttgttgagggggtctattataaatgtatgcagcataggcttcacgttgctcattgactccaggttgctgcaaagaacgatagagatctgtatggtgatcaacagaagaacat

SEQ ID NO: 270573 - DNA, 377 bp, Glycine max
  unsure (1)..(377): unsure at all n locations
agcttgcatgccttactatgtatgtattgaagagatttgtgagattgattacggngaatttagagtacctcttttcaaatgtaagtgggtgaatggaaacacaggtgtgcgtaaagacaaaatgggattcactttagtagaccttaaaaaagttggttacaaggacgacccattcataatggcagcgtaagctcgacgtgtgttttatgtagaagatccatgcgactctagatgggcggtggttttgcaagggagaacaatttgtatcggtcaccatgttgatggatcaacacttgatgtcactgacatgccgtctttctccaaagatatgccttcaagtactgttgaacaggaagaggatgatgtatatgcaaatc

SEQ ID NO: 270574 - DNA, 414 bp, Glycine max
  unsure (1)..(414): unsure at all n locations
gctgtataagctctatataagccatatctttagttgatgtgggactattccaccatccttgaggctgcaatataggtagcccacatagaggctgacactaatgctgtgtaagggtatccgcaattaatgcggctctccaacaataattgacaagctgtccatggaggatatctccaagaaaatgttttttgttacgggtggcgcaaggggttgttagcatccatcaataaacgtttgattntattttattactgtaaatattctgtcttattacgttagagtgtgaatattctacacattaggaaatcagctctctangatgctgcgattaagctaggatattctgctctctctgttatggtaggaaattctatttatggatcattggttcatcctgtccatcctctctgttag

SEQ ID NO: 270575 - DNA, 381 bp, Glycine max
tgtgtattattcgccacctatactcttcgcagtataatactatctgagttcagctgaatatttctcagctcaataccactcagacaggcactcaaaggactcaccattcgaggcttccgtataagcgtaatgtaaattatcataaatctagagagagactgatccaactatatctgaataaataacaaccggaatcactctgtttccgatgaacacaaatatactatttatgctcaatgatacacggacagcacatatttctagatgcggagctgtacccattctctcacaccaccgaaagacacacatcctaaaagcttagtctctatatctccactatagcgagttccatccccacataggcaatcttcggaataatgc

SEQ ID NO: 270576 - DNA, 101 bp, Glycine max
gatgcatgagtatcgactcggcataatatattctgcttagagaactagcctattgtcttattggctcccgattgtcgtctattgggaggctttctgaccac

SEQ ID NO: 270577 - DNA, 167 bp, Glycine max
agcttgacacaagacattgaagtctttgaaatgataataagagattgaagtcttgacaaaagacattgatgtatttgaaaatgtaaagaagacattgaattcttgacagaagacattgaagtctttgaaatgtaaagaagacattgaagtcttgacaaaagacattg

SEQ ID NO: 270578 - DNA, 333 bp, Glycine max
ctcagcttggctgttaagagagaaatcttatgaccaaagtgttccagttctctttctagggtaaaatagggtgttgaggagccaaatgtcgattcggtggaatcttcggtgtaaatccagtttgagcgagcttaaattgatgttatacacttgcgtgatgtgagagtttgcttcagatttacctcattctcaatttcacttctcaaaccttgaaaatccaattaattgaggggccttggatacctagagtttgtgttgctttggtctgaagcctgtccttggtttacacatgattggtcatgattcgggacttgttggatcaatctgcgcaaa

SEQ ID NO: 270579 - DNA, 406 bp, Glycine max
  unsure (1)..(406): unsure at all n locations
agcttgtganatcaatggaatccaagattccgtttgatacaagtcgttctattctattcttagaaatgtgacctaagcgtttgtgctataatactcctgagtttgtatcatcaattctaagcttagtaccatgcaatcttgcattaaaggattcaccataggaggctacagtatcaagtaaatgtagattatcattaagcaagagagaaccagatccaacaatatctgaattaaaagacaacctgaacacattgtttccaaatgaacacaaataacctaatttgtccaaataagaaacagataccacaattcgtctaaatgacggtacaacanaagtgtctttcaaatccaaatataaaacagtacataatagaaatctaaagtgccctatagctttcacttccac

SEQ ID NO: 270580 - DNA, 457 bp, Glycine max
tggtcaacattagagcaagtgtaactcgaacttaacaaccatatttcatgtgcaagggactttgaaactgtctttggctctggcatataccaatgtgctcaaaacgctgcagagtacaaaaaactgattgtaagcaaagaaaaatagaagaaaaagttcctatcttatgaatatattcatctaacctgattgaacatacaaactgctcgcatagcctgaggatactcttcaaacttttgtttccaaaatagatatctgaatcctttttctttaggggtggcgtcaacagtccatgtaggtttatctctctgctcaccttcatcagcaattgcaatttttaaaacaccataattaagcgtagtccatgtctctcttgcactgagtattctatctggtggagaaactacatcatcattacttctagaagcggcatgtgcttgtatttctatcacataat

SEQ ID NO: 270581 - DNA, 442 bp, Glycine max
agcttattactaaacttagtttacaatcatgaactttaatgtaaacagttcgcagggtagcttctatttcgaagggcaagggcaaggcttgccttcaaatgaagttagtttacaatcatctggcactaattttcctgtttcttttttcattgatagattgctcatctcataccatcaagtcatttgaatcttttccatgtagttatgtacaatgttagtgtgtctctgcctttattaatttttgcactgaattgttacctttcttcaattgtttcattcttattgatttgagtcttcttttgcaatcttaggtgcacactaataggaagtcaaatatctattcttgcggagggaaagcaatcataagggacttttatactatatcctttttgtgtagtgattttgataccgtgttttggttattccacatttcacgtttttt

SEQ ID NO: 270582 - DNA, 231 bp, Glycine max
ggacttaccttgaattaattcctttgttaacccttttgagcctcgtatttctctcgcttgattgaagctcactacaagccttaagtgaaaaaccatgatatcaccatatcctgaaggaatctaggagctgaggaattgtattgacaataactgagggggtctttatctcattggataacacgtatagttggctgtgcttcatgatgcattatgggccacacttgatgttca

SEQ ID NO: 270583 - DNA, 444 bp, Glycine max
agcttgacaaccgaagaaaaccgtgttgaccaacatatcaaggaggtttttttatgtggttttaattcaattaatattattgttgctgtgctcattgggttttgcaagaagctctgattgttatcatatgattgaaaacttttatgcataaaattggttacaatgctttatattttgagggtaatcatatatgctagtgaatggtggctgcctttatgaaacaatatgatatctatgagaaaccaaaccgataagttaaagctattttacttattcttacaacttgatttatttgttctgtacttctcacttccatatttttggtgtctgctcaagcatatattgacattgcgacaccctctaccccgacatatatatatatatatatatatatatatatattggtaaacaaaatcacatgggtaaaaggttcacattcacttc

SEQ ID NO: 270584 - DNA, 473 bp, Glycine max
  unsure (1)..(473): unsure at all n locations
agcttaaacaagtagttgctttaggactngatttacactaaanaattaattagattggattatggtatatcttcttataatgagtcaaccaatgacagatgttacccaaaaagagccttgaagcatataacctctaggcccaaattctaaaccagtaaaatgtaagatgtgctagtgagatgaaatgtgatgcagtgcttgttaatgaagggaaaaaaaagaagctaaaaagctccaccatggcttgaaaaagaattgataagggtttcttattttcggtaatctattatatggttggtgcacaataatttagaaggcaggatatgtatagaagtntgtatgaccaactaaagtgttcataagctaagtactccacaaacttatgtacctgtggccatatattcaggagcaacatagccatatgtgcccattacccttgtagagacatggctcttatcaccagctggtccatc

SEQ ID NO: 270585 - DNA, 447 bp, Glycine max
  unsure (1)..(447): unsure at all n locations
agcttatatctgataccgagctttcgagggctagtgtttcctcctcgcttacgatgtgaaacctaaggaagcagtgggtattcgaagggaaggaagaaggagagtatagagaagagaagaaagagagttcaggaggaagaagaagcttctggattttctttttttcattattcgaagcttacaagctatttatatgcacatgggaccaagcttaaccgtaagtggttagttagctgttatgccctaactaactactaccaatgcttacaatttcaataaccacctttcccacctaaagctttntatgaacaagtccctgcttgagcctgctcagcccagttgatagtcgtcccaatgcttgggcatcttctttagtcgcctcgattgtccctgtgccatgccttcgtcttcaacctgggccttgtcctcttcgttcataacaatatc

SEQ ID NO: 270586 - DNA, 486 bp, Glycine max
gcttatataagtatatatatattctaatttatgcacaaatagaatttattcttatatattatattctaaaatataatatataagattataaaaatataataaattaaaaaaataaagtttgaattttgaactattttcacataaaacttatattaatactatattttgcaccaaatattcaaatggacatgtgggtgtagtggtataagaatgtgccacttactccaaggaccatagttcagaaaatcagtccgactgggatccggtggcaaaactgggtcggtttgggtattgggctggtcatgcatctggctggtgtgacccgaccacgttttaaaacactggattttcacacaaaaaagttacaaaacgatgccgctttgaaaaaacctaaaaaccttcagtcgatctcgacccttctcttcattatctgatttctctagtattcctcttctgactggtgccaaatgagattccacatctcat

SEQ ID NO: 270587 - DNA, 446 bp, Glycine max
gcttccttctagtgttaatattttgatctcaaattctcaatacattattagagtcacctcatctaggtattatccactttattggtagatgacttgtctcaattttatctttagttaaaagtgtctcggtgagttaagagaattttttttttttataggctcacattgacattaactcttattttatgacacattgatacaatttttatctcaaaattaatttgattcgtcactctaatttttttagttacttatatgttattttttacgcattcacaacttctttcgtttagatataattcagataattaaattgaatggatgttatttaacttaagcatttagataaagtaataaatgatttttttgatatattacaataataataataaaaaaatgataaaaaatactattattaaaggtcaattcattagatttaatattta

SEQ ID NO: 270588 - DNA, 450 bp, Glycine max
  unsure (1)..(450): unsure at all n locations
tctgcatggctgacaacttcagttatttacattcgttatctntctcaacaagtataattagtcaaccgttaataaaaagaagacaagaggtatcatgagagtaataaagaaatgaatctcatttttcataacagaggaaactgtgatgacttatctacaaaacccataagaaaatagaaatgcaacaacactttagcactcaaaatgcaatttcatcctcaattaacttaaatatattnttagtcttttaaatttgagttacttaaatatgtttgtggaatgttagtataattgttttgtaaaaaattccaatgtaaaaagaatagatatgagtagtaaactttattaaaagacaattgatcgaataacttcccgcataaaattattgtacattaactgtaactcttaagtaatatgatgatatagaatatgtacataataatatatcac

SEQ ID NO: 270589 - DNA, 390 bp, Glycine max
agcttcttatccaaggcaattcttggtggtgaagctccttctcccttggcttattccctaggggatggtgcctcccctctcctcttctcctttgtcttccgctgcatctccatggtgtaaaatcaccattgaaggacctcatcgaagctcaaagatctagcctccatagaagctccacaagcaagcttccatcaactacgtccactaaagaagggtttgtgaggaatggcttaagtcggtgtccattgaccttgaagctcttgtttatggagtcgcttttgatctcaactgtaccataaggaaaaacattagtaacaacaaaaggaccaatccacttagacctcaacttaacactcatgagtccaagcctaatattataccataacactt

SEQ ID NO: 270590 - DNA, 467 bp, Glycine max
  unsure (1)..(467): unsure at all n locations
ggtaatcgattaaactgatatgagacatttctctgcaagcttctttcactngtgtaattggttacaatcagtctgtaatcgattaaaacagaagagttttaactatagaggaaatgttctaactttagaacttttcttctaactccaacatgatgatgcatgatacacatatgaaatgatagagacaaagatgcaacacacaatacaataatcaatacaaatgtcattcaagagagttgggcatgtaaaagacaatttcttcaagctcttctttaagctntaaggctaagtcttcatgttgcttcccctatctctaacatgcaatagtttcaactagtccgctaatcatcttaggatttcttcgtcttgttactacaaccggtgtggattatcaggtggaattattgtcattgggattcttagaaagttcggtggcaactgaaatacactaacttgtctggcatata

SEQ ID NO: 270591 - DNA, 432 bp, Glycine max
  unsure (1)..(432): unsure at all n locations
agcttcctatggatttaatagtgtcaccatagttctccaagtaaacctatcaagaggtgatccctcttgctgtctgattntcaattggacaagcacgtaaattggaattgtgagcttaacaccaattacaatgttgaccagagcataataattctgacccatcattgcctgacatgtggtgaggccttggaaaggttcttttaccaactcatagtangtgtcattcttgcttgtagtgtanggtgtgttatactggtagatgtttcctgaaacaaaacatangaacaatgattgacttatcggactntntaatcatacattataaaactaattatttcacacttcgtgttaattaagtactagtattaatgacaaaatgagcaataacatattgaatccttatttgtggcagcataagctcggagacactta

SEQ ID NO: 270592 - DNA, 378 bp, Glycine max
gctcgaagaagttttggctgttacatgcttgactctctagagtcgcatatgtattggatgttatcttgtgtggtgcatcttaatacatttgatatttgtgttgcatcatgcatcatcatggatagtgtgaagaaaagtgtctaagttagaaaaatttctttagaggcaaaaactgttttaatcgattacagagttgtcgtaatcagttacaacaagttgtttgaaccttatagagctaagtctcagatcggttcaattgattatagtagcattttaatcgattacactgttcgttgagataatgattgatctatccaggagtctctgctttgatcgattaccaagtggatgaattgattacttctttctcgttaagtg

SEQ ID NO: 270593 - DNA, 425 bp, Glycine max
  unsure (1)..(425): unsure at all n locations
agctntannaattgaattaaatcgttcagaaactattggtaatcgattaccatatatgtgtaatcgattacacagggcaaattttgaattgaaattttaatagctgtttgtaaatcagttttggccactggtaatcgattacatcctctggtaatcgattaccagagagtaaatttcttgtaaaagactttttaacttaaaattcttggccaaaccttttgctacttcaattggaattcccttcctatttaatataccctttctaagactctatagacagtcttgatcatccatcttgaatatctttaatttctttgtcttgaataaagctttgagacgcatgtgatctttnggcatcatcaaaacatcggcttgatcctttgtctacaatctcccnncttttgatgatgacaatccctgaaatc

SEQ ID NO: 270594 - DNA, 353 bp, Glycine max
  unsure (1)..(353): unsure at all n locations
actcagctatactatatcgagacgctcaagattaaacttctaanactctctttatattcaaatggtcataactntttacacggatgtccgattcgggcgcataatatgtcgagagtctagaaattgaacaaccgaaacttttgagaaattcatatggtcacaactattcacacggatgcccgattcaagcttatgatatatcgagacgctcgaaattaaacgtcggaaactctcgggaaattcaaataggcataactattcacacggatgtccgattcgggcgcttaatatgtcgagaggctcaaaattgaacaacggaagctcttgagaaattcaactgttataacttttca

SEQ ID NO: 270595 - DNA, 402 bp, Glycine max
  unsure (1)..(402): unsure at all n locations
atctaacatatatattttgatcatgngcgtgatcaagtgcttgatggagaccggattccatcaatggattccctcataactagagctgtctgcgagccttaagtatttgatgatgagactactactgatggagtggagacgtcagccctcgttgcatctcgagggagaggaagcggccgcaacactagaggacgtcgaacaggaaggagcggaccttctcattgcacctattgcctgaggaggctagaagatactatgtatacattacttggttgtcctgactaggcacacaagattctaaataatagaaagccgagttcagattttcttatgaggagtaccagagagatgctgtaagtctaaatacgagagacctanccatcaagctcaaacattgtccag

SEQ ID NO: 270596 - DNA, 470 bp, Glycine max
tagcttctctttatactagtcaaggattgtctcatattgcttattccctctttgcaccatattaattactgattagtcttaattgtcaaattaattaggctgttttattatttgggctcatttacctaatttgatgtttttaatctaatttcacaaattaatgaaacatagggctcaatctggattttggttgtggacttgaagagggcaaataaagcagcgcttaccttagttaatttctaattaggagatcgcaatgttattttatgtggttcagtgtttatttcgttttgggccagaatattataatagggcccagtgactctatttaaatagcagtcttgtgatttgtgcaaggctattctgttagactattattcagagcatacggtttatggtttttacgtttttctggtctaatgctactgttcacgtaatgcaagtttccaatttctgcttctaattacaat

SEQ ID NO: 270597 - DNA, 417 bp, Glycine max
  unsure (1)..(417): unsure at all n locations
agctntatacgacttcatagaatttaaggcatatgataccctccttttcagttactggttgcacaactttccaaatttcattctcccctattttaatttggattgttattaacagaaataaggttagaacacacctgcacaggagaatttaaaagtgagcttgaaagtacctctaagcttcaaactttaaaatctaatcatctaaacaccatttgcctctgggagggaacaaaccatgtatnttgttcttcattcttttaacaacagtttaggcatggaagaacttggtattaatatctccaagtttaacccaattttctcaagatttctgatagtggagcaattcttgaaacanagtttggtcataatctctttggagttgcttttcaagataaactaatcttgtagaatcgatcc

SEQ ID NO: 270598 - DNA, 420 bp, Glycine max
  unsure (1)..(420): unsure at all n locations
ctcaagctggaagagaccctaggctnggaggaatagttcccgtgaggaagttgaaacttatgtccaaagcaacgagggttgaacagttgctgagcgtgggtggaataaaacccgtgaaccggttgttctgcaggtaaagttccttcagaatattattattcccagcgtcaccaccgcacagcgttgtcgggattgagccgctgaagttgttggagctaagatccagcgactctaaagtggagagcttcgtcagagactccggaaggggaccaaggaacgcgttgaacgccaccgcgagctctntgaggctnttcattggcgtgagaacgtccataggcagcgcaccggcgaagaggttgctggagatgtcgaaggactgaagagaagtgcaagcgccgaacgcttcggngagagcgcctg

SEQ ID NO: 270599 - DNA, 287 bp, Glycine max
  unsure (1)..(287): unsure at all n locations
agctntctccactaagtngccttattcctgaaatgtcttttctgatggccatggtcctagatgcaaggaagaacttctccaagaacaccctcttaaggtcatcccaattgaaaatagacctgtgagcaacgtagtataaccaatcttttgccactccctctagagaatgaggaagaacctttagaaaaatatgatcttctttgacatcacggggcttcatggtggaacaaacaatatggaactccttaagatgcttatgaggatcttcacctgcaagaccatgaaac

SEQ ID NO: 270600 - DNA, 254 bp, Glycine max
ccgcgacatatctgcacgtaccactctgtggtcaacgaataacagttagaagactgactcttccacactctctcacttcaagcttggaggattatcgggtacccgtcatatatggtactatgtgtccatcaggcaattgtgcaaatcgactcttcacatgcacaaattacacataaatgcaccatccctagttgcccaccttcgactgagctcacgtacttccacgtagcccttatactcgttactctccacac

SEQ ID NO: 270601 - DNA, 307 bp, Glycine max
  unsure (1)..(307): unsure at all n locations
agctacatttcttctattgttgaagccacttctcggtgttgttgacaacaaagaaacatttgaggttaagataagatttttctcttttctccttangatcagaaggagctagaaagtttanacccattatttagtgaaatgaaagaaattatcctaagtagactgtaccattatgctttccataaaatgtttggggcgtccaataagcatgtaaaatggaagatggattcacattttttctatattagtatcaggacctaaggaaatatatattctcttaacaaaaagcctatatcttttctaattc

SEQ ID NO: 270602 - DNA, 464 bp, Glycine max
  unsure (1)..(464): unsure at all n locations
tgatgggtaaactggaatgctcatgtgatgcctccttacaaaatgcactagagcttggtcttggatatctaaatcaaatcccatcatatggtcatcgagaagttctgatcttatattcggctctcagtacatgtgatcctggtgatctcatggaaaccatccagaaatgcaaaaagagtaaaataaggtgctcagtcattggtcttgcagctgaaatgtttgtgtgcaaacatctctgcgaggaaactggagggacttattctgttgcactagatgaggttagtttgttgattttgatgatacccatgtagatgtagtacaaatacaaataattatctatgannagttattgaatntttatagtcaagcaaccttaatttaagcaagtacttaagatattgctgatcaccttagaatttgtttgcatctttcaagtgtttgaaattcatgaatgtatgcattat

SEQ ID NO: 270603 - DNA, 438 bp, Glycine max
  unsure (1)..(438): unsure at all n locations
agcttgtggactataccttcgaccaaacacggccgtgtttctatctcggcccggatttaaagtgggttgcagtactggctccgcttccctaatcgtactggaggcggttgtcgtggctttatcctctatggttttctggagttttaacatgacctccgagatggaagccatttgatcttttaaggccgatagatcggccttcatctgttcctgcacaccctcttcattatccatttttctggatcgagtgttataggggtgcctgggtgttttcttagttatgatgaatttcctaaagaaataaacaaaggtgagtatgccacccaaacatgaatatgcaaatgaatgatcagtgcacttagatccacccaaaggtttttaggtaacttaatgagtccagaacttctcattntataaaaagaacaaagctntcatcta

SEQ ID NO: 270604 - DNA, 467 bp, Glycine max
  unsure (1)..(467): unsure at all n locations
cctagttctaattctcgcanatccaacataataacaatcaatatttataggagagtacacaagtacagatcaagataaagagaacataatttatcacacatttcgtcaccaacgactataatcctttcaacataaactcaaaaaccagataggtcctataacctaatcagttgtctaagttggcggagtgagatgaagatttttagtattagaaattgaatttaggcaaggtatttaaaaaaagtagtgaaagaaaaaaattactgaaagatgataggaattgatcttcttctcaattacagtagagtgaagtgacgaaagaatctgttgcgattggagaccctcgcatctcttcttctgcaaactctcttccctacggttcttttggatctccaccatggtatccatggcgaccttcatcggcatccatggcgaccttgtagcggttccgacgaacctcggtcctg

SEQ ID NO: 270605 - DNA, 446 bp, Glycine max
  unsure (1)..(446): unsure at all n locations
agcttctattgctctcattcatctttacttgggctatctcagaccttttatttttgttgtctaagattttgcatacacctccttcaaagtgaagtgtgtagtctctctccatcatttggccaatgcttagaagattttcttttaggctaggaactagtaagacatcatggatgagtcgcgtacatttatatgtctccaccatgacagtgcctttngcctttgatttaaccacacttacatttcccagtcgaactntgactntgacagactcatcaatacttttgaaaatagtctcatccttggccatgtgattgctacatccactatccaagtaccagcttcctccctttccttttattgagtcttgagtggcgtagaacgtacattgttcttgatcatgctcctctgtgatattagcttgatgcctatttttggtgcgacaattt

SEQ ID NO: 270606 - DNA, 467 bp, Glycine max
tagcattacttattacccaaagagtttgtcattcatagtgatcacgagtccttaaaatacttaagaggccaaggaaagcttaataagaggcatgctaagtgggtagagttattagagcaatttccatatgtcatcaaacataaaaaagggaaagggaatgtactggctgatgcgctgtctaggagacatgctttactagctatgcttgaaactaaactgtttggtctcgagtctatgaaagacatgtatgtgaatgaagtggactttgctgaaattctagctgcatgtgaaaagttttctgaaaatggttactataggcataatggattcttgtttaaagcagataaattgtgtgtgcctaagtgttccattagagagtggcttgtgagtgaatcacataacgaggggatgatgggacactctgtgattcaaaagaccctgtaaattctgcaagagcatttcttttg

SEQ ID NO: 270607 - DNA, 448 bp, Glycine max
caagcttgtgtggagcttcaatggagaatgaagaatattagaatggcaacgtgagggagagttatggctgtctgaaatttctgttttgctgagtgaggagagagaaaagctttttggtcttaaataaaaggtttttcctctttttctattattttattcaagctctgccacatgtccctatttgattggagcaaaaagggcccactttctctttttgactgtgacccatactcagtcacaaaagtgagaaaaatttgacctttgaaacgctacaatcctgcctcggtttgcgtgccgcttctctgattccagtttctcgcgtttctttgcgtccgtcggggccagttttcgaaagcaagcaatatatatatcaaaacgctcagaataaaaccccgagcgtggttcagaggttggtttcgttaaattctaagttgcacgcaaaacgatg

SEQ ID NO: 270608 - DNA, 473 bp, Glycine max
  unsure (1)..(473): unsure at all n locations
tacccgtcacatgtggtactaggtggcggtcgggcgatggtgcaagtcgactatccacatccacaaatcacacataaattcaccatccctagttgcccaccttcaactgagctcacgtactcacacgtagcccttatcctcgttcttctcaacaccgggtccccatcaatccctccaagcttccacaacatccaagcaattcaacatccaaacatcatgcactatcaaaaacaagaaaacagggcagaggcagaaaactttgcccaaaacacaaaccaataccacagctttccttactcacataccccagtaacattctcttagttccaattcgttcaccgttggatcgactcgaannatttactggaggtccctagtacataattctacatnttgaccgttgggatctgctagaaaatgtggagaacccaatatgtactactctntccctaaccagcaacacaaacattttc

SEQ ID NO: 270609 - DNA, 437 bp, Glycine max
agctagccatttaaaaaggcattgttgatatcaattttctgaagatcccaatgaaaggaagtgactaaagtcagaatagttctaattgttataggtttcacaactggggaaaatgtttctttgaaatcaaaatcaggctgttgatggaagccttttgctacaagacgtgccttgtacttactgacagacccatctgaattatgcttgactctaaaaacccacttgcaaccaattggttgcctagtaggaggtttaggaaccagttcccatgtattgtttttgagtagtgcagccatttcttcatccatagcatctttccacttaggatctttaagtgctgttttgacagttttaggcacagcatgagttagaagcaaggttggttggagtctaggcttgacaattccattttttgatctagttgtcataggatgaat

SEQ ID NO: 270610 - DNA, 459 bp, Glycine max
  unsure (1)..(459): unsure at all n locations
agcacctaatgtcatattagatgggaattgtgtatcttaacataagagatttcagatggactttaatcataatcccacagctgaccttttcacgagatctctacttaaccctttggttaaatgatcggccaataaatatgcacatagaatcattagattctagcatctcgtgactctataaccgagttcacagcaacagaatcattagattctagcacatagaatctatatgctttagaatgttcagctgatccaataaatatgcaatctatacctctttcacctatggttttccttttaggttctgtaagcctgactacagccctacatccncaaattttgagataactcanattaacatagcctcaccccanaatccttcacttaaacccgaataggataacatggaattcaccatttctttcaaggttctattcttcctttcagctacaccattct

SEQ ID NO: 270611 - DNA, 450 bp, Glycine max
  unsure (1)..(450): unsure at all n locations
agctagtatggagaatgtcgaagctataaaagtcatgctaaggtcttttgagctggtatcaggactgaagattaattttgctaagagttcttttggtgcttttggagtatcagctcaatggaagcacctcgcggccaagtatttgaattgcagcttgatggcttttccttttgtgtacctgggtattcccattgaggccaatccgaggcggagtagaatgtgggattccattattcacaaatgtgagagaaaactctcaaattggaagaaaaggcatatctcattcggnggacgagtgacactgatccaatctgttctaacttccatccctatctttttcttttcttttttcaggattcctcaatcggtggcaaccaaattagtaaagattcagcgtgtattcctttgnggaggggagcatgatcaaaagaagatagcttggataagttg

SEQ ID NO: 270612 - DNA, 465 bp, Glycine max
  unsure (1)..(465): unsure at all n locations
aaaagtgaagaaagatttgatagataagaagactatggtttcggtgaacaaagcgtgcaaagagagcatgaatgtgaagcaagtgggcaaaatataggtgctctccacttatcctagaaatttctaggtaatgtgagtcacaacaggatctttcataacaacacttacatgtcttgagtgaatgaatttccagcctgagagaggtaggcacccaaagtctatatttaatttgttaaaaattcctaaaccaaaatgaaccttctgttttagaaaagagaggcagcagagcgagcaacaacagggtttggtgatgttgctgagctagttgttttttcaactatgattaaccaattgaggatgttgcatgtataagagctagaggtaccaaacaagttactgatatcatntatcgacattntgtatacacaggggatggtactcttcattatgaatacctggaacttc

SEQ ID NO: 270613 - DNA, 245 bp, Glycine max
aagctttagtctcatgtatctttagaccatttacctatgcagtcggacatccgagtaacaagttattgacatttgaattgcctacgagctctcgttttcaattgggagcatctcgatattttaaggactctaccggacatccatgatataagggattgtcaattcacttttattagagcttccgatgacaatttcgagcgctttgagatattacgggactcaatcagacatccgagctaagagtt

SEQ ID NO: 270614 - DNA, 398 bp, Glycine max
  unsure (1)..(398): unsure at all n locations
tgtggaagttaacacgacaataagctctttctatgatgtccgattgaatcgggtaatatatcaggacgctgaaaattgagacttgagcctgcaagaggattgaagcgattataactgtatacacggatcttcgacagattgccgtgatatatcgagacgctgtatattgacaaaagaagctcgcaggaaattcgaacgacagtatgtttctactcatatgggcgattgagctccgaaatacataaagacgctcgaaattgagagcagaagctctgagcaatttcgaacgacaataactgtatactcgaatgtcctgtngagacccgtcatgtatcgagatgctccaaagtgaaaacggaagctcgtcgcaaatttatacgacgataaatatatacatg

SEQ ID NO: 270615 - DNA, 422 bp, Glycine max
agctttccacgaagaggtctacgatagacaccgttatgtgaaggacctatgctgcccctgagtttgatagccaccatttacggagcgccgagcactaacagtgcttcgatgccatcaaatgatggtcgttccacagagaggggcgcgtccagctcaacacgttgaagaatactactacgaggaacctagaccttcaaattctgttgtattggacaccttctgcttctcaagtcatagtatgacacacctagttgctcatgatcctaagaatttaaataaaacaagcacaggctcggaaagtagtcatacctcacaaaatatatagatgtgtgcttatgtagcaagataccttatatatgcatgtatgtagcataaaaatacctcacgaaatatatatgcttaggtaacatgataccttggat

SEQ ID NO: 270616 - DNA, 224 bp, Glycine max
gctctaaactgccacgatgcgcctcactaatggcgtatctgccatgttaacttgctaagactctcatgcaacactaaggcgaggacacgctctatctttcacatcaaaatatatacacggactgatttgcataatgggtacaaagctatggatcacaatgtctattcactctataaattgctcatatactggcttagttttgatccaatataatattgatataa

SEQ ID NO: 270617 - DNA, 344 bp, Glycine max
  unsure (1)..(344): unsure at all n locations
agctagcaactnttggtgaattgtgttganttctatgtgggtgcagctacaatcatttcccattttccagttttcatctttctcatccatgatgagctttcctctgttctaacttctaagtgtgggccttcaagagccagcattccacaggaaagaaacagacccactttgctttcattaagaaagccagtgattaagtaataatgagccagctgctctcagcttcgtgggcccgcctgcaattttttccaactggcacatcttcatatgcaagttgagtctaaaatagtgtaatgacacaactatctcccactcaagtgtatatgtgactagattacaaaaca

SEQ ID NO: 270618 - DNA, 540 bp, Glycine max
tggggtttgactacgcaatctattttgcgacactatctattacgcgacactatcgcatactcaagctcgccacccagctctctcaggcgagcaagtgttgttcctacacaatcgacagcctatatgagggcccatgatggcctggctgctataccgcctcctattatcactacatacaccctctgccttttgatggtgattctttatatgcacatttactgattctatcctatcatctcgcgactctatattccttttcacagtatcatagaaccttgcggattacatattcattctatatgcttactaacggaatgctgcggcacactactagctgtgcataccatgctcacttatgatttcccgtgtgtgaccggaccttacggcttgagccttacttccttctattcttttacagcttgtaccggaacttctcacccgcctaatgataggttgcacccaacttgataagaccggacttaacatgccttgcaccgatctattgttccctgacctacaccaggatgacaggtgacctcg

SEQ ID NO: 270619 - DNA, 262 bp, Glycine max
tcgttataagttacacaattgggcaaactcgctatatgagaataaaagcatgctgatgacgcaagacctttcgctacaccacgtgccttgtacttactgacatacccatctcagttatactagactctagatacccagctgagactaattggttgctttgcgcgatgtttaagaaccagccgccatgccttgtgactcactatggcagacattacttcatgcatcacatctatccacttaagatccttaagagctgctctga

SEQ ID NO: 270620 - DNA, 347 bp, Glycine max
tttcgtcttacagtatgcacaaagtgtatactgataaccactcgtgtggtttctgccgtcagcgtgactcataagtcagtatgaccgatcttgtgagcgctgtagatgacggatatctctccgtgtcaacgggcttgtcggtcgccattgacgagtggcgcagaagacgacgttaggctctgcgtgctatcaagctcttcgtctaacagacagcaaaaagtgtatacggataaccactcgggtatttccacccgtctgcgtgactcacaagtcaatgtgacatatcttgagagcgcggaagatgacgcaaatctccatgcgtcaacgggcttgtcggtcgcgattga

SEQ ID NO: 270621 - DNA, 397 bp, Glycine max
  unsure (1)..(397): unsure at all n locations
agcttcttatccaaagctcatcttggtggtgaagcttcttcttccatggcttattccctagtggatggcgcctcctctcccctcttctcctttgtcttccgctgcatctccatggaggaaaaccaccattaaaggacctcattgaagctcaaagatccagcctccatagaagctccacaagcaagcttccatcaagtggtaatcagagcacaagagcttcaagtaggtgctccttacacctncattaatttcttttgctctaccttctcttccattggaggttcttcatttcttctccatgtatctcctcacatgtcttgtgctaaaagttgctaacatgagtctttagagtttccaccaattaaacttgctatagaagctagaattgattgtctat

SEQ ID NO: 270622 - DNA, 481 bp, Glycine max
  unsure (1)..(481): unsure at all n locations
tctcagctcgtgccgggaactcatcgaatttatcacccatacagtctagagcgcccgcctccatccaaagggaggccccccaagctctggctccaaccacgactcgcccggctggcaatgcccactttggcaccgtttccaacgcgatgaggaactttcccccgaggccaattccagaattcaccccgatcccaatgacgtacgaagacctcttgtcgtctctcatcgccaaccagatggtcgtgatatctcccgggaagatctaccaacctcctttcccaaagtggtatgaccctaacgcaacttgcgcgtaccatgggaaaaccccgggccactccatcgaanaatgcctggcccttaaatacaaggtccaacattngatggacaccgaatggctgacatttcaagaggatcggcccaacgtgaaaacaaacccactcgccaatcatggagggnggagcagtaatgtcgtcgagttggg

SEQ ID NO: 270623 - DNA, 239 bp, Glycine max
  unsure (1)..(239): unsure at all n locations
agnnctttgtttgccatttcaccaccaccaatatgttaccgtcttctactatgagaggttttcttggcaaaaatctcttcatcatccccacatatccctccacccacttcgatctccgacaacgtcgaagctgtgttgggagaagccaggggcagggcacttgttggaggtagaggagtggttctcgacgatagaattctgcttcctgagaatgggatacangttagagcaagtgaact

SEQ ID NO: 270624 - DNA, 349 bp, Glycine max
  unsure (1)..(349): unsure at all n locations
ctaagcttcttgagttgctaatctcttccttattagcacttgctatgaggatatcatccacatacaagagaaggtggagaacacactctttcttccttntcagaatatatacacaattgtcatacctatttctgatgaagccatacctgatcaagaactcatcaaacttcaaataccacattcgagggcttngcttcagtccatacaaagattttttcaacaaacacaccttgttctcccctctttcaaaaccttcaggctgattcatgtaaatggtttccttcatatttccatgaagaaaagcagttttaacatctagctattcacgttccaaatcatactgatttac

SEQ ID NO: 270625 - DNA, 149 bp, Glycine max
agcttgatgatgatgaatcaagttgattccagtatttttgataatgacaaagatgatgacaagaagcccaaagaataatttcaagattgagtcaacaagttcaagatcaagtttaatctcaagagaagaaatcaggacgattcacgaat

SEQ ID NO: 270626 - DNA, 217 bp, Glycine max
  unsure (1)..(217): unsure at all n locations
ngctagcaaactcagaagtgagtttctctctattgagagggttgtatcaataatgacaaatttctctcatagagaacttatctcgagcatctctctctaggaaggcttcaacttagatacgacatgctccttggtgacctcttaaaggttcaaagattatcgctggagtgaagcctgctcaactaacatacttcttgaagaagccggacaatgtgat

SEQ ID NO: 270627 - DNA, 435 bp, Glycine max
ctgctgctgcagcttgctgagagcttatacagaatcaagaacaattttgttcgcacatttttcgcgactatgatatccagtcaacaatgcctgaagtacagaagaccttcaataatataacgcagcgaggcagacaaaagtgggcagttaacttgaatggccattattagtaatgcggaaagaattctgagcttcactatccatgttcacacattattgcagctagaggttacatgagcatgaactactaccaatgtatgaaggttgataacacatatgaacacatcttaaaagcttactccgcacaatggtggcctctcgagaatgaatcgacaatgcctacttatgatgacgcatggacacttatccctgaccctactacaattagtgcaaaaggtcggccaaaatcaacatggataaagaatgagatggatt

SEQ ID NO: 270628 - DNA, 476 bp, Glycine max
gcttctagtatctatatctagaccaaaatccaattagtaacatctatgtctttaatgagttgttcattatttcactagacaattatccctgaattatccatattctttctagactctaccttaaaaacataagagctcaaccatgctcaggtatcttatgctaatatctcattttctaccatttcaatagtctaaaaacactatccaatcatacaacaaagtactaacatcttctaccacacacatggaaaattgggatgctacactggttgtacataataatgtcgttgtgtgaataggatgaataacaagagtcataaatcatgctttaacactcagaaatctaaaacacatattcatcagttctctaagaaaccgttttctcctcaccaagaaacccactgcataacgcattgagaactctggttctctggctcaaagaaagtcatatacttattctctaggagttccacaga

SEQ ID NO: 270629 - DNA, 446 bp, Glycine max
  unsure (1)..(446): unsure at all n locations
agcttgtagcgccatcaaggaacatgatggacatatccaaatcttgttctcgacatgtgcatgactacgatttcggatcaggaacaggaacacaataaatcacactagaaggaggttgaatagtgtgttggttaaaatataaaagcttttctaatggaagatgtttattaaataaaccaatttataaagactattgtccagtgaatgagatgagttttcttaagcacaagtggactttcatccaatgatgtataaaacttatttccagtgaaaaccttgtgcgtataatgtatcaataatggactttaaaaatactttcacatgctaaagaaaggtagtaaaaatacttcattntatactagttcactcaacctgagtcatgtctagttntcctttaccaactagtaaagggttccactaatcaaactggattataacaagtattc

SEQ ID NO: 270630 - DNA, 480 bp, Glycine max
  unsure (1)..(480): unsure at all n locations
cgatattattgcataatgcactattacaaactntntcctctctgtttctctcacttgtttttctattgttttctgacgtgcctacaactgagtccgaagacccattatatagagaaaacagaaagaaaaagacaaaagtcccttcagtcaagaacagtaaagttattgttcatttaatttgtcatagggctctttttactaaaaaaattntatagatagacccagtgttagagtctntgcaacagtaaagattcccaccttgaatttacagttgtattttggcaagatacttctgtcttcagttctttgttgattntgtaatagtaacatcttcttctttntagatattttcataatagaaaatgtctgatgagtcttccattgagagatcagtgaatggaaaaggagggagttgttgtctatgacatccactagcttcataaatctctttatctntcttctctttttggaagaattgga

SEQ ID NO: 270631 - DNA, 448 bp, Glycine max
  unsure (1)..(448): unsure at all n locations
agctntcaacaagtttcttcacaaataactatcatgtagcagaaaactagcaagactacccatcatatctcccaaaaccccatacccacgaaatcaaaggagaaagaagtccacccaaacctgaagtttcgaagtcccactcgtagacacgcacctcacgactccggaaatgccctccttttgcgatttggagcggaaatgggcaccaaaggttgaagctttgtgtggagcttcaatggtggaggaagaagagagaaagctacgtgagagagggagagaaaaggcttctgaatttttttggggctgagtgaggagagagaacatggctttttggttntaaataaaagggttttctctttnttctattattntattataaactatgccacatgtctccatttgagtggagcanaaagggcccactttccctttggactgcgacccatac

SEQ ID NO: 270632 - DNA, 490 bp, Glycine max
  unsure (1)..(490): unsure at all n locations
tcggtgaaagcctaccaatgcataggctngataattgataaatgttttcccatgatatgagtgaagaaaaaaaaaataccttaagtcttcttttacaacactgaaagagaagaaaaaaaatcattagacactcaggacaagcttgaatattctctccaagcaaacagaaattaacatttagaattgttaacacttgtgtaagaaacataatagaataagatcatcaactaaaatacaacacaagcatttcccttctctccaagcacatggcaacgacctacttacataagcttaactcaccaattagcacaagtaaagcaagcaagaaaaaaacccaagcagaaattactatatatatgtattaaataatgtttatctacaggctataatattaatattatcaatcttaagtcaaaattatatatatatatatatatatatatatatattattttccagatccaaaaaacttagtaacatataaccttat

SEQ ID NO: 270633 - DNA, 447 bp, Glycine max
  unsure (1)..(447): unsure at all n locations
agctatanaatttgaattataacgttcagaaactgttggtaatcgattttcatatatgtgtaatcgattacacagggcaaattttgaattcaaattttaatagctgttgtaaatcagttttggccactggtaatcgattacatcctctggtaatcaattactagagagtaaattcttggccaaactttntgctacttcaattggaattcccttcctatttaatataccctttctaagactctatagactgtcttgatcatccatcttgaatatctttaattgctttgtcttgaataaagctttgagacgcatgtgatattttggcatcatcaaaacatcggcttgatcctttgtctacacctttatcatttangaacaacgacctgagtgggtaaacgcacagagacagattctgcaccctttatcattcaggaaccacaacctgag

SEQ ID NO: 270634 - DNA, 444 bp, Glycine max
  unsure (1)..(444): unsure at all n locations
atccgttgaagatatggaggaagaacatgaccaccctagctcagtattgaagtgttctttacttctctaacctgattgctacctcccatacttctgatgtcaccctagatagagccaaactcatttatggcatcatcatgaagatggacatgaatgtggggtacctcatctccccccagatctccctcattgctcagcatgacacttctaaacttggattcccagccttgattacaactntatgtaaggctaggggagctcagtctgactcgaggtccctggagagccagagtcctgccattacattggcatatattaagaagaattgatggaatcttgatgatccaacgataactttcagaggacccaggaaggccagaggaaagagatctgaggccctttccacttcagcaccagagacagaagttccttcttcttctacaa

SEQ ID NO: 270635 - DNA, 466 bp, Glycine max
  unsure (1)..(466): unsure at all n locations
gagctgctgcatgcaagcttaaaggcttatttatttatttatttatctcattctagcattaaattaaagagtgagtgtataatacaaatctgctctttcggcatgattttgcttttctgcttttccaaacacattcaaagcagatccctcacgatataaattatcttcagccctaactggattgactttttatcttgtaaaaacaacatatttcggaaacatcaattgagtagataaaaattccataatcatacccaatcaaacatgtcaaccactaacatctttcaaaggaaagataactgaagattgccactgaaacatgccataatatcattaattcattattattcagattcagacacttccatttaacatgagtagattcccttcttattttcaaaaaacaacacanagttaggggttaattaaaaaatcactgttatatttatttatgtgtggatcacct

SEQ ID NO: 270636 - DNA, 469 bp, Glycine max
  unsure (1)..(469): unsure at all n locations
attgaaattaaaagacattacaagtgatagttataaggtgatgtatctaaaattgattgaaacagtggccaaacattaattatacatctatttatttaaaatatactacaacaaatggagaattttaaaattgtgtattaggataataatttttttctttaattgtgtgaagactttacccgtattcacaccgaaatcaatctcttgttataaattcttttgaactttattagtttgagtatggtgtattatgctcttctatagaagcttatatntatagtgttaaagaaactatgaatttgatctttttagaagagagatttgatttacaataatctcatatttctttattntaataaactctccgatttaatgcagagatacttntcacataatcacatgactaaatataagagaagattgattatatattaattatataacaataaaagattattcgtatntttat

SEQ ID NO: 270637 - DNA, 390 bp, Glycine max
  unsure (1)..(390): unsure at all n locations
agcttcagatgcaagctcanaggataattataattgtttagaaacaacaaacacttgaaaatgaaaacctataaatactagatgctttgaagaaatgagtaacgaacctacacgctatcattcaaattctttatgtagaaaactctttgtatattcttataaagtttgaaaagctctcaaaacatcttgaatactctaagacaaaaaactaaatgcttagatttcacatttgtttgtaagatgattaagatttaatcagttagcaaatcaaacaacatatcttcttatttgtatagaaccaacagtggcttggtaggacaaagaatattcggttggtaaagcttggcgataaactntgttgtgagagctaaaagtaacagcgacaaatac

SEQ ID NO: 270638 - DNA, 465 bp, Glycine max
  unsure (1)..(465): unsure at all n locations
taactcttggacaaaaaataacatatntgaatttttntaatatatataccagtttactaatgtatatatacttgttttttttaatatgaatacgttagcaagttatacctagatattgtcttaaaatacaccaataatatacctagatattntaattaatatataattagagttatattattattattattattattattattattaccaaatactccaatatttctatgataaaagcaaatgcactttgacaattaaaaagttacatttcttataaaatatgaatcttctatgagtctagcatattctgattaatatataggaaaaaataaanaaatattagtcaattcaattganaactgatgaaaaccataattntatnttgtggaaacacatgaattgtccatgtcattggtcaagaaaacccaagaagaataaaaaagatatgatgatgaacaagtcaag

SEQ ID NO: 270639 - DNA, 358 bp, Glycine max
  unsure (1)..(358): unsure at all n locations
agctactaccataccaaaatgttatgagattaatatggattgcagaaattatgctaataacaatgctctgggtcaaacacccacgtcactacatgaaagtgctaagagcattctgggttttacaaagggacatcattttgaaattccaatcacgccaatgtgactggagttcagtgaagatcacgaaaattacacccatttcatgataagataacgtttacaaagtctctgtgctctanggtttttcagatgaagcgtagaacatgctatggcggtttccaaactcagaatgatgcataggtaatatgaaactaacaacaaacaagcttataaccatggtttccttaaggaaatccac

SEQ ID NO: 270640 - DNA, 260 bp, Glycine max
  unsure (1)..(260): unsure at all n locations
tgtattatacgcctgaatcgacctgagtgagaaagatatgaccatttgaatttatctagaacatacgtggatcatatttgaacgcctctgtctgtgatggaccttaatcggacctccgtgtgaacaggtatgaccatttgaatttctcgagagcttccgttgttcaatgtctagcgtctcgacatattatgcgcccgaatcggacatccgtgggaaaagctatgaccatttgaatntctcgagagcttccggtgttgaat

SEQ ID NO: 270641 - DNA, 284 bp, Glycine max
  unsure (1)..(284): unsure at all n locations
agctatacgcaagaagctgttgttaagacattattatcactgagaatcgattactcgggggatggtatgacttcaaattatgagtacctgtaggaacatatgttcggccaaagagcctcgaagcctttctccggtaagcccttactataaaccaaattcatggccaagctcttngcagattaaatgggaatcccctctctatatagtatgccctttctaagacttatagactgcctcgagcctccatcttgaatatcttaaggtgcttagtcttgagtaaagat

SEQ ID NO: 270642 - DNA, 332 bp, Glycine max
tcttaagcacttctatctctctcgaaatcgctgaggaaaatgatgtccgtgaagaaaatacaagccgaggcgcttgcgtaacgtttccgtgagaaattacgcgaagattctcgaccgttcttcaagattcatcgttcggtcttcgttttcttcaatcttcaacgggtaagtacctcaaaccgagcttttcaattcattctatgtacccgtggtggaccacatgtttgttgatggatttatattctcgatttcattgtctttatatacccacttttgacgtgcttaagtcatttatctaagtcatttctcgcttaatctaagagtaaaataaa

SEQ ID NO: 270643 - DNA, 315 bp, Glycine max
  unsure (1)..(315): unsure at all n locations
agctntctatgcatagaatattcaaggaaaatactgtcatctgacttagcatcaaattttcctaagttatcttttccattattcaatacanaacatttacaaccaaagatatgaagatgtgagatgtttggttntctgccattgaacaattcatatggagttttctttaaaatgggtcttattaaagccctatttaaaatgtagcacgcagtgttaacggcttcagcccaaaagttttttggaagaggagtatcatttaataaagttctagcaatctcttccnagatctatttttcctttccacaacaccatttt

SEQ ID NO: 270644 - DNA, 350 bp, Glycine max
cgagtgcctgtatattgatgcgcctgaaatcgtcattcgagtgaaaagttatgaccatttgaatttctcgagagctttctatgtttaattttgagcgtctcgatatattatacgcctgaatcggacctcagtgtgaaaagttatgaccatttgaatttcttgagagcatccgttgatcattttcgagcgtctctatatgtgatgcaccttaatcggacctccgtgtgaaaaggtatgaccatttgaatttctcgagagcttccgttgttcaatttcgagcgtctcgacatattatgcgcccgaatcggacatccatgggaaaagctatgaccatttgaatttctcgagag

SEQ ID NO: 270645 - DNA, 376 bp, Glycine max
  unsure (1)..(376): unsure at all n locations
agatgcggcttgcaccttttcggcgtgctgctanggctgagcgttggaacctttgctcactagcgtccccattacacaagcctgttggtgcccaactcttatgcagatacattactcggggcaaaagttctatatataattttatcgattaatttaggattatcagttggaaactaaagagatgcatctataatttcattcaatttaaacctcgcatggtgaacctctcgagatatttgggtaattttgcaaattaggccgtgtgacctcgcatacttgaaatctaatacttggtcattgccgtttattatcatattagatgtattgtctacagaaagttctgcccgtatctcaaggcctcaaaatccaaggagag

SEQ ID NO: 270646 - DNA, 294 bp, Glycine max
tgcaaactaaacttgttagtttttgtttacataaataacttgttagtttgtcaccatagtttagatttaattgattttgttaattacaattatccaacattcaactatagttgaataatagaaaaaaataactttttaatgataaaaatgaaagttttgtattaaaataataataataataattcaattttattttgcaaatgccaaaccttaattttgttcaagaattatttaaaaattgaaaaaatggaaagaaagaaaacaaattaaatgaaagggagaattaaaagaaac

SEQ ID NO: 270647 - DNA, 444 bp, Glycine max
  unsure (1)..(444): unsure at all n locations
agcttgatgtcaatgtaaatagtatcagtcacagtgtttctaatggcgtttgaggccatgcgcactcggttaccgacatgggtggtaacattgagttggagccttagggagtcatggtcgccctggctctctgaacagggttggggaatgtggcaaagttggagatggagatgaaaaaagagtgtgtggaactaaagaagctccacctttccttgtggtggtggttggaggagagtgtantggaggttgaacgggaacagtttgtgttggtcttgctttccttgtagagttgtgctctcaaggttaacatcctctatatgatggctagtcaagaaactgctgtagaaaatccaaggaatgtattatgtgagattagatgcagatgaaggtaaagtgctagtggataaacttacgtgaatgggttattttttttaaaaaaaaaat

SEQ ID NO: 270648 - DNA, 477 bp, Glycine max
  unsure (1)..(477): unsure at all n locations
ttctcatatttacagaatgcaccacatggtgacattgttctccaaactttatctgttaattattgaggaggtccactagttacaggatttgtaaatacccggaatcagccagaaactcgaccttctgatgaaatagctgatagccgcaaccatgtatttgatatagatggaagtgtctacttgcagaagtggatgaaatctccatcttgggggtctagtatttccactagtttttggaagaacatttcagtaaaaggtttaatattaagtaagaatcttgttgtggctgatttatcactcatagaaagagcagcaaaaacaagcaaacataagtaccacattgtggagaagactcaagccaccattgatgctgcaactctacaaggcatacccagcaacattgatcttttcaaggttggatgcttaacttgctcttgtcttctntgataatattaagtaactagtaactactagatt

SEQ ID NO: 270649 - DNA, 436 bp, Glycine max
  unsure (1)..(436): unsure at all n locations
agcttgaggagtaacattaaatttcagtctagcattttcatctgtttatgagtataaattataaccacttttcacatgttagcattattagaatgcttcattaatattattttattgctgtaccatcttgcttccttattgtcttttaggtttccatttctactttttttctcctagaaaaagcttgttgagttagaatctttaacaacttgtgctgttcatggacattngtgtttctaactatgacaatcttctgttttaggctgttaaaatattaacgacagattatgaaccctcagatttagacatcctttatgctgagggagttacttcatctaatggngtggcttgtgtggagttttcatttcccaatcagcttctgacgaaactgttgacactactgatctacatgattctttggtcaggtatgtgaaaa

SEQ ID NO: 270650 - DNA, 142 bp, Glycine max
  unsure (1)..(142): unsure at all n locations
actccctagatcatattattagaggtaattctactaaatatttctaatgggttaacccttattgttgtcaaattggcgtgtccttgtccataactctncagatatngagcttaaaaagtatggacacttatcatgtgtattt

SEQ ID NO: 270651 - DNA, 428 bp, Glycine max
caagatgatgctgaacattgttactaggagaggactgagaacaatgtgagaacatggtttttagagagtgaatggcggaagcaacagaacagaattctcatccattctctctctaagaactggccatcacaaggaaaaagacgcgagagtggtgtgaaggatgagtgctcaaggcatcaaaagatgtggacggagaggttcttacttatgcgtgggtgcacagcttacattggtgggacgggctggttacttgattctgcacatctgaaggcctcactcatgagttctctgcagccatcacaccacaacataatggcatagctgaaaggaaaaacaggactttgcaagaagctgccagagtcatgcttcatgcccaagaacttcctataatctctgggctgaagccatgaacacagcatgctatatcg

SEQ ID NO: 270652 - DNA, 341 bp, Glycine max
  unsure (1)..(341): unsure at all n locations
tggagcctactctctacttttctacttagcctttcgctgcatctacatggaggaacagcaccaatgaacgacctaactgaagctcaaatattcaacctacatataagctacataagcaagcgtacatcaagtagggatacgagcacaatagcttcatgtaggtgctccttaaacctccattgagtttggactataccgaacattccatcgtcgcctattcattggatacatgtatatgatcacatgccttctgctaaacgatggaacatgattctttagagtttccaccgattaaacttgctatagaagctagattntattttctatgggtcaaatttctt

SEQ ID NO: 270653 - DNA, 458 bp, Glycine max
  unsure (1)..(458): unsure at all n locations
tatcagtcgtttccatatgtggttctataggaaactctttgtctgtnattgtacttcgntacagggaagcgagaatatagagtggtgagaggctcgcaaatatgtgccttgtcgtgtgcagtttgtaagacatgaaaacgttggtacctcccaatatgatcatatgaacttctccagtgtaactcaaaagcttcagattcacacggttgtgtacttataccagaactttgccccccttgaagttctgaaagagatctagaaaggtcaccatatgaagaaacatgcactgtagttgtgttgcctccatcaaaccggtctaaattattattatcacaaatcgtcacattggataatgattcagacttctcttctaagtgctgtgatttctcttcactggtacacggctntaacaaatgttgtacagcaacaagtcctagagtattagaaaattggttact

SEQ ID NO: 270654 - DNA, 437 bp, Glycine max
  unsure (1)..(437): unsure at all n locations
actcattcttctattgtgttgaaaatgatattgcaacccatcttctacaaaaatattaatgcaatatatatagtagacaatgatgttatctaatatactactagactaatacggtacacacccatttttatcttttaaatattgcattccagaaattgagaaaaaaaaaaaaatccttgccacaggaaagtgtttttccactatatatattgcatatatgatgtagagcanagctatgaagcatatacaacctccagcacattcaagccttcaagcacaaaaatggtaaccgttgtggcatcttataatatcactccaaatcaagcaactcccaaggatcctttatggctatcagttattgaacaaagtgggtacctatgtcatgtacccactctctacatntacaaagcanaacataactgcaacatcgatcattg

SEQ ID NO: 270655 - DNA, 434 bp, Glycine max
agcttacacaaacattcacctgtccaacacacacttatcaaatagtctttatcaatccatagttccaatcaatcatgcttaatatgatgatcgtgaatgaatgatgtgtactatggttcaaattgctagtcgttctcttgaatcacaaggcctgttttaaagtagaaaatgtggaacacgagatagatatggtagctagagccatggtactgtagtccccacttgaaaagcactgaataacactacagaatgtatgacaatggaagaagaaaaagaagtgcaaacttgtcaggaggaattagatggtatggaggaaaaacctgctgggcatgtggtatttaaagaattgaagaacaatagtccagcagaaaaggctatagtagaggtgaagacccttcctgaacatttgaagtatgtatttttaggagaaaatg

SEQ ID NO: 270656 - DNA, 434 bp, Glycine max
ctctaaattcgtgacgttgtgtttagcgccaccctttcgcttatcacgagtaagtggatctgagcttagcgccagtcgtgtgctgagcctggttgaagacaactgttgtgctgagcgcattgatctcgctcttagcgtgcggccttgatgatgatgccctaccagattcttctgtcacgctgaagttgtgcttagcggtggatgcacgcttagcccactgatgagctaagctcaactgtcacttttagcacttcatgacttatcctcattttcatttgaaattacacatatttcatcattaaatccaatggacatattctagagacagctgtaaccataaaatcaccacaaaataaccataaattggggaactatacaagttgtggaaaatgttttctatacaaaagttagtcgtataagacgaataacagtag

SEQ ID NO: 270657 - DNA, 387 bp, Glycine max
  unsure (1)..(387): unsure at all n locations
agcttgaggataaagacttcttattctatttatcttctctctcaaagaggctctctacttggatggttaggaatgaaggctcctacccttatttatactactccatctccacaatgaatggtggagattacttgtatcctaggatgaagattaattctctagaatgctccacacattctaggagtctctacactcttttattccctttcatactcttccataaggttccagcccacacatctccagaatattccagaggtttccacatccttccataagcttctagagagttctacactactctagagttctccaggatgttctagaaaattctacacttttctagaaagctctagaattttctagaacctctncaatttgtattta

SEQ ID NO: 270658 - DNA, 237 bp, Glycine max
tgcttgagaagcttctatggaggctgaatctttgagcttcaatatagtccttcaatggtggctttcagccatggagtagcagcggaagataaaggagaaaaggtgcgatgagacgccatccattagagaataagccatgaaatgagaagtttcaccaccaggagagtgtcttggataagaagcttggagaggaagcttcaatggaggaagagaatgaaagagagaggaggggggggg

SEQ ID NO: 270659 - DNA, 316 bp, Glycine max
  unsure (1)..(316): unsure at all n locations
agcttccatcatggtgcaatataacatcgaatcttttcgaatcgatgttggttctgcattattttntacattatcttgctaaccacattgattcttagaagaatcaatggtgtatagtagatttcaacatcggttatcataactgatgttaaaaatgatattgttaacgatagtagtttcaacatcagttcataccgtaaaaattgatgttaaaagtttattttcttgtaataaatgaataccaaattaatgcatgccagatgtangtaaaatcaataacaataaatgtttttgttggtatacaatatacaatata

SEQ ID NO: 270660 - DNA, 293 bp, Glycine max
  unsure (1)..(293): unsure at all n locations
ctcagcttgatgtgttgaaagaatacatgttgtcatatcaaaattgtgagaatgtgaatgtatgcatacatgattntgatgatgccaaagaagaaccaaacaaggctgcttcaaatgataagcattngcttcaagaataattcaagattgcttcaacaaacaaagccttgtttcaagattcactaaagaccaagccttgccttataacaaagtgctttcaagacatgcaaggctctggtaatcgattaccaggaagtgtaatcgattaccagaagacagggttgagaaatagc

SEQ ID NO: 270661 - DNA, 278 bp, Glycine max
  unsure (1)..(278): unsure at all n locations
agcttgagccaaaatcctgactcaccataaaccctgacccanggtgagaatgccaatccttaccctcggaagcaaaaaaaaggagaagagaaggaaaatttccaatccaagaggaagcataataaggagagaaggaaaatttctcatcaagagaaagaaaagaagaggaaagganattcccaatcaaagagtgggagaaagaaanaagattagaaaagaaagaaaactcccaatcaaagaatgggagaaggaaaaaaagaagtaaaaaagaagaaagc

SEQ ID NO: 270662 - DNA, 406 bp, Glycine max
  unsure (1)..(406): unsure at all n locations
ntataagtgcgggtctgggagactaatgtcaagtggtctcgatatgtgaagatgatgttccaagaactctggatttggtccgaccatgccctcctgatttccagctgggaaattggcgggtggaggaacgtgccggcatttacacaacaagcataatgtaaacctttacggttttaaaagctctatagttgggcctaggctttagagttttcattttgttaaggctttgtgtcttttgtctttgaatgtataatacaaagatctttcttcatctgttcctggtctctacccattctcattcatttgcatgtttacttctttntctaaaacggcagatccgatgacgagtcccccgaaggtactaatacctgngacccgtctataatttcgagcaagatatgaacca

SEQ ID NO: 270663 - DNA, 329 bp, Glycine max
  unsure (1)..(329): unsure at all n locations
agctttntattctaatttagaaatccatgaaggttctctaaactctgaagtttatgggatcaagatggtcattgaccaatccctattttatgatttaaccaaattgcctagtgaaggtgtgccttttgagggtgcactgattgatgaatggaaattcgatttctctatgcatgatgcccgccggttggtttgcaccaaccaagcggatatgaccggaagacttcttgtcggttcattggcttttgaaagtcgcatcctccattaccttatagtttgcattntgcttcctagatcttcaaaccttgcccaagtttctgaagaagatctca

SEQ ID NO: 270664 - DNA, 460 bp, Glycine max
  unsure (1)..(460): unsure at all n locations
ngtatattgtcttattcaaaactggaccactntcatattcttctttcgcattggcataatgttcaattactgtcaaggcttttggagcatctataacttgttcaactatattgtgtgcaacatttcggttgataagctgcatcaaatctctctttttcctctgtattctttcagcacagaaagtattttttggttctcaattgcttggcaactatagtttgtatctctcctttgacgatcttcttccgtatcgcatccagagaagcccccttctcaagctcttctaacaatacttttcttgcttcctcaaattccatctaattcaattaagcagtgagtgccaaaaagtattgttagagaaaatgaaatatgatngacaatctaagtaattaatatttaatactcagcagaaaaaagaagaaatcagaaaagatgttataaagttacaagttgttggtcc

SEQ ID NO: 270665 - DNA, 444 bp, Glycine max
gcttcaccttttgtcctcctcatagctggtgcatgagaatacatgctctattttcatcttccactccaagtaggcctccggatcattctttcctttaaatggaggaatgttgagtttaataccatcaattcggttgtgtctaggaacaccatcattccctcttctcctcctttcttcttcattatgatctctattctccatttgatccaacctctcatggagcgcatcatctcgttgtttcattaacctctccaaatgttgcatcaaagcttgcatttggaattgcgaaagccccactccatcattaggattagtacctgacatctcaaacaaacaaatcacacgtaacaagacaattatagttgctgtttgaatacctcacccactcaagtgtatcacacaattatggcttttctctaatgaaacactcttgccttttaccac

SEQ ID NO: 270666 - DNA, 470 bp, Glycine max
  unsure (1)..(470): unsure at all n locations
gttttaagttcttcctcanaactgtcctaagcaaagtttccaaagtcctattatcaacttccgtttgcccatcggtttgtgggtgacaagtggttgaaaataacaatttagtgcccaacttgctccacaaagtcctccaaaaatggcttaggaacttagagtccctatcactaacaatgctccttggcaaaccatggagtctcacaatctccttgaaaaacaaatcagccacatgggaagcatcatcaactnttttacatggaataaaatgagccattttagaaaacctatcaacaaccacaaaaatggaatctctaccattgcttgtttttggcagccccaaaacaaaatccatggataaatcaatccaaggatactccggaattggcaatggagtatacaatccatgaggctttaccttagactttgcctttntacatacaatgcaatgttcacaaaatttctgcaca

SEQ ID NO: 270667 - DNA, 425 bp, Glycine max
  unsure (1)..(425): unsure at all n locations
agcttaacaaactctgatnttgtagtattccttttgcacgaaaagatattatttatgctactaaggaatagtatatataactatgtaaataagcaagcaagaggaatgaaaaattacctttatttgatttctcttctcttatccatggaggccctggtcctcgaaactagtttctaagttggagactcgtatcagtctatcatgcattcatcatgaacttcttgattgatgcaacaattatctaaactagtgaagcaacatcaccgcaccaaccaagatcacatgcacgcaatcaccatgccgtccataacccgcatgctcccattcctctctacatgcaacacaagctcatcttcactctcaacaacccgccttggttcttctgttgctgaatcatataaatcactcatctctaatttataatt

SEQ ID NO: 270668 - DNA, 487 bp, Glycine max
  unsure (1)..(487): unsure at all n locations
aagctctatcaaggctcatcttggtggtgaagctccttcttccatggcttattccctagtgtatggcgcctcctctcccctcttctactttgtcttccgctgcatctccatggtggaaaaccgccattaaaggacctcattgaagctcaaagatccagcctccatagaagcctcacaagcaagcttccatcaagtggtaatcagagcacaagagcttcaagtaggtgctccttaaacctccattaattttttntctttaccttctcttccattgttgtttcttcatttttctccatgtatctcctcacatgtcttgttctaaatgttgttaacatgattctttagagtttccaccgattaaacttgctatagaagctagaattgattntctatggttcaaatntcttgttcttgttcttgaacctgaaacctaaaccataaaattcttacaaaaatattaaagtagaataaaacctcaaaaatctac

SEQ ID NO: 270669 - DNA, 413 bp, Glycine max
agcttcttgcatagccgctcttggtgctcagaaaatcccaaaaacaaatccctcttattactatctattttgaattctttagttcctgaatgtacaaccttcaaattgttgctcgttcccctctttcttttctgcaaaaaagaaaatcaaatgctgtcaaaacatggatgaagtcctaagaaaatcaatatcaaagaaaacatggatgaaatcacaattaaaaagcacaacaacctatctttcagagtcctttggttaatttgtcttgtctccttatgtggtggggttttgtttaataatcttatacttttgccttccaaaaaaaacttatcactaatcctcttttcattaatccaattttgtatgttattgtataaaagatcatgggttctccacctgccttcactcctcct

SEQ ID NO: 270670 - DNA, 489 bp, Glycine max
  unsure (1)..(489): unsure at all n locations
gcttcacagatgtcttcacaaataatcatcacacagcagaaaactatcaaaactacccctcatatctctcaaaaccccatacccacgaaaatcaagagggaaagaagtccacccaaacctgaaatttcgaagtcccactcgtagccacgcacttcacgactccaaaaatgctctcctttcacgatttggggcagaaatggtggccaaaggttgaagctttgcttgaagcttcaatggagaatgaagaagaagacagctacgtgagagagggagagaaaaggcttctgaatttctgctttggctgagtgaggagagagaaaagctttttggttttaaaaataaaaagggttttcccttttttccattattatattcaagctttgccacatgtccctatttgattggagcaaaagggcccactntctctttttgactgtgacccatactcagtcacaaaagtgagaaaaatctgacctttgaaacgctaaa

SEQ ID NO: 270671 - DNA, 457 bp, Glycine max
  unsure (1)..(457): unsure at all n locations
acctgcggctgcagcttgcatttgatagaaaaacgaaaaagtnttatattattagttacttcgannngtcacggccaatcataaaaatccacagcaaggagagactttcaaacaatccaataataaaggataaagatgatggcggggttcccatcggaaacaagtttgattgttcaagttggtcactctccgcggatgaagattacataatgttttgctttggaaaggatgtggcacaaggtgacaaaagtgttaatgaagtgcataaaatattaaggccagcgaatcgcaaggtatgccattttatcaaaagaattattcgcccaattggcctttgtttgataaattgaattattatattccctgttacttcgtgtgactcaagcagctgatatatggtgagaatgaagaacaagttagagacctgaacattcatgagacaatatcanatgctaat

SEQ ID NO: 270672 - DNA, 350 bp, Glycine max
  unsure (1)..(350): unsure at all n locations
tatatattgagtagcttcagatgccgaacacaactgctttaaaagaggagtgaaggaggtcattaaaggtataaggagaggccataacggggctgactgttgtcgtgctaactatggctttctcacagaaacattacacatgcttaccctaatgatccggtattgtgaatgcacattgtgtgtgatggctgcgaacatgtcaccgattgatgtcatcactcatgttcctattctttgtgaagagtctgacgttccttatatctatgttccatctagagaagtacgcaaccaactctgcattncatatctagactatgctngngtgccatatgcccttatgctattattga

SEQ ID NO: 270673 - DNA, 317 bp, Glycine max
  unsure (1)..(317): unsure at all n locations
agcttatctanatcatatgagtttctattccgaatctattaatgaaattctaaatacaagatatatcattccgcaaatattgtaacataagataagagtgtcatggtgcgtattaaaacctattatgtattaccggccggacacttacctattgaaactaaaattaaatcgagttcggctcacagccaactagatataaactgattctaatacaatgttgtttgtgttacaaatcagtaattataaggactataacaacttaattcgaatagatataagtcaagaatntaaatccctatatattttctcttttttta

SEQ ID NO: 270674 - DNA, 416 bp, Glycine max
  unsure (1)..(416): unsure at all n locations
agtcccttaccaccttgtggtaatgctttgtattataccatccatcaaagaccttaataggcttaggaccccaatcaatgctcttagatttcatgaggataaggcagtgatcagagtagctcctttcaacgttgtgctgcgaactgtctggccacttataaagccaaccatcagagacaacagctctatccaatttgcttttacaggaaccattaggcctaacccatgtgaactgcttacccacactacgaatatctttcacctccatgatagcaagccaatcattgaaatctgacatgatgctggactctgaatntccatgattgcttcccattctctctgaagggtgcctaatacaattaanatcgccaataagacaccagcatatatcttgggaatgcagcttccttctactc

SEQ ID NO: 270675 - DNA, 356 bp, Glycine max
  unsure (1)..(356): unsure at all n locations
agcttcgaatgcgaaggacaatattgtagcactgtttgtagattgtatcttattctggtatatacaccatacttcatccatatgtacgatgtacttgntcctttgtagtaattattacatgctaacaattgataattgtggcaggctaaggaagagataattgtagcagtaggaagtaacacctgtagctggaggctcactatttgcagcattaggaagtggataggttgcttattgaagacgctggagcccttttttgattttgcttcggaatgaacagtaagttgtgtcatcgaaggacgaaagcagagtttactattgtggatgttggagaactaactataatatcttaatgc

SEQ ID NO: 270676 - DNA, 438 bp, Glycine max
  unsure (1)..(438): unsure at all n locations
gctatatttaaagacgtacttgaatattataagctagctaaattgacttgcctaataattatgataatatattttaagatnttgtttgtgatcataatattgatacgaaatagtctccgtcgaacgcagtaaatcctagaccacttagttaagagatacaaatcactaccacttatatcaatcattgttggttgtataatttttaagataattattataaaaattaataagctaatatagtacataaaaattggaattgggataacattntaacaaggaaaaatattatatattcttaaatttgggaaatcaagaaaaatatagaaagaataataaagggaaaataacttatttgattttttgaagaanaaaaaatatggtatcatgatgaatntatggtgtttcccaaatgcatttaagaaattttaaaaatntata

SEQ ID NO: 270677 - DNA, 432 bp, Glycine max
  unsure (1)..(432): unsure at all n locations
agctntacagcagattntagtaatgacccactatcttataattaaaataacttaatgccattaacctagggaattaaaaaaaacttaatggctgagtgtaactgaaattgtggcaaccaaaagtcacccccaatagccaacaagtcagccaccatttggtctcccaaaaggctgatgcctatgttgccaattgggcccttattacaacttgaactaaacctaactaaagcccttttagttgattaacccaaaacatatttttggtcagccaactttacaaggattgggccattatttagacagactaaacactctaaaattgaaacaaagnggtgtcatttagtcctcctccatttgggccatgatacaactcacaaccttggacttttctccttgaaacttgggcttgtattcaaatagtatggacagcac

SEQ ID NO: 270678 - DNA, 240 bp, Glycine max
cttctgctttattgtgtcccatatggaccacgaattgtgcagggtcagaaccttgggacttccgcgggtgctttcccagaccaactgaccaatccctacctcccagcttctcggtcaatgaaacctggatgtacctaacacgcgactcctggctgcacaataaaagaacacttaccactagcaggctgctgtggtggtgccactgtaatttgtgtatctgggattggcctcggtataatt

SEQ ID NO: 270679 - DNA, 418 bp, Glycine max
  unsure (1)..(418): unsure at all n locations
agcttcaatggagcttacattatgtggtatcaagatcatcttcatctaggtgatgttcttttgcttcctctatctttttgttcggagaattctctttaattcctagttcttcatcttattctccatgtatatcctccattgtcttgtggtttggtgctgtttacagtatattaaaaaaaatgaattaattaaatcttagatctacacttcttcttgcatttctatggttcaaattttgtagatctactcttgaatcatgttgttgtgttgattttaggttctatcattntcgattcataatattcttgtgctgaacctcagatctaaattttcttccaaaatattgattagaaaanaaacacataaattcaagtgtaaatcacttaatccatgttgtcttacagtcatgtttagtcat

SEQ ID NO: 270680 - DNA, 442 bp, Glycine max
tcggaagatagtgatgaggtacaagcccttttgcagagcttgttatagcccgggtagtcgaagagaagttcaagtccatagccatcaaagtctgaaaatagtatgatgaactaagggacgtcaatatggccacagctgaagctttggaacgagaaaccaagaaggcccgaaaggaagaacacgaccaaagaaaagttttgaggggctttatagggcagcaatagtgagctcaagctccgaagaggtgaaaggaatcatcatgggtcaaaggcatgatcttgaaggacgagctaaaggtttgccttaggtcgaaaagaaatttgtcccaacagttaagcgagactgaagggaatatgtgggccatcatcgataagtgcaaagagaagctaaatctagcggcgactcacgagcaaaggctaaaggatgagtacgccaagatatc

SEQ ID NO: 270681 - DNA, 394 bp, Glycine max
agcttggtggacaatctcaaatatcgcaggtgggtttagagctcaaatacaggtgaggaaatgttaacggatctcttaatctatcttacttaggtatcaattgtcatatgcaagggagctagtttgaattttgaatattcatttattagtatagttttaaaactagctcttatttaccattctttacatagaaatagtgaaacctttcaaaaagtattgtttggtggtgtgcatcttatcataattgttattttgattattgttgcaggctgtcattaaggccaatattattcctcctcttattcaaattcttcaacatgctgagttcgacgtcaagaaggagtctgcctgggcgatcttgagtatcactgttggaggatctcgtgaccatatc

SEQ ID NO: 270682 - DNA, 476 bp, Glycine max
  unsure (1)..(476): unsure at all n locations
taaggacgcanataaatagcacanaaggctatatgcgttaattatattaacatgtataaatntctagagtacttgtaaataattttaaaatattaaatgaaacatgaaatgctactatatctttattaaaatatttttgatttcaatttgttactaattatttttaatagactaaatgaacatgactgataaattaataagagagggacattgatgagtatcattaactcgatgacgacattggttgttaaggtacgtgtttgtttgatatctttgttaacctcaacattntatggagaagaagaagaaaaataataaaagtggttcggttctctaacgtgactggaaaaacgctcatncaatttggtattgcacgaattcacgacaacgacactatggagtatggactaagcttaaaggaggacggcaccctatcataattcatacatgaattttttagatataatttgtacatg

SEQ ID NO: 270683 - DNA, 216 bp, Glycine max
  unsure (1)..(216): unsure at all n locations
agctntaacctcatcatctctaaaagaattacgtttgtctgatttcctcatcgcaattgaagatacgtaggtgcgagggaaacacccttgtcgaccacaccaaaattaaaaacataaaaagcataaaaagacataataatacataaaaacataaaaatcataaaaagacataaaaacatgagaaggggaaataaaacanattgaagacatgatatt

SEQ ID NO: 270684 - DNA, 293 bp, Glycine max
atcttcacctcaccatgttgcggagacgattggttagaccattactcagaacatctatctaaggccaaatggtgcacacaacatcacaaggaaggtgcgatagaggcaacatcgtaacggcgttctccaagactttgtaaatgagaaaaatataacgatactctgctgacaaactataatgatgacaggattgattgtgagaggacttcgtcgaattgatgtgttcgaggcaaaatcatgttcgctctatgcatcatagtggtgaaagatctagactctaacattctaaacat

SEQ ID NO: 270685 - DNA, 281 bp, Glycine max
agcttctaagaggcaatggacattatataacttatatatttttttggtgtccactcgctaagcgcaccactcgtgctaagcaccattttcttcacacgctaagcgagctcttgcttgcactaagcgcattgacccctgatcattggctgaacgttctcgctaagcgcacagactcgccaagcgcacaaacctctctggaaattaattcttatggattgtgctaagcgagcctattcatgctaagcataggccactactgcatttaatgagcattaattcgc

SEQ ID NO: 270686 - DNA, 369 bp, Glycine max
ctatagacaatgcagactcttcaactgttctgcacccaagtatgaatcagctcctccttctcatcttttatcacggtgaggccggttttcttcatgattacctggacagaactcacccattggctgtcggagataggataaatgattccagtttgcaaaagcttggttaccttctatctcactacatcaagaatcaccgggttgtgtctactctgtgtctgccttactggtttagcaccatcctcaagattcatctgatgcatacatgtggatgggctaataccatgaatgtcacgcatggtctagcctatagacttcttatgcttcctgagaactgataacaacttatcctcttgctcatagcaaggg

SEQ ID NO: 270687 - DNA, 116 bp, Glycine max
caaaaatgaaatccttgagactcctgatattaaagggggatgggctgccagaaagtgctctaaatggtagcaattataaaatcttgaggcgtcgtgcacaactgtaacccttgaat

SEQ ID NO: 270688 - DNA, 478 bp, Glycine max
  unsure (1)..(478): unsure at all n locations
agaatctaagcttnttatatcaaattcattgttgtttgttagtttgctatccatgcttgttcagtacaaaatctagcatctctttgctttcagagaacccccatacatcactccagtgattaactaaatctatcaaaacaccaaatcaaagtttcaaaatgaacacagtatcccccaagtcaccaatgaggtgcctcttataaaagcaccgtctagcatctacaatacaagaactgcaaaatattgttagcctgaagccatgttcaagtcacggagcaagaagaacaagattaaagctgtattcaaactgcaatttcaggcaactcaggtgaaatgaagcgaaataagtatttatccattatatactaaatgacaaaatgagggttggcctagtagttacaaagttacaattggtcatttgtcatatggccaggaagtctgaaatataatacagaatcacttatcacattgtagatta

SEQ ID NO: 270689 - DNA, 943 bp, Glycine max
  unsure (1)..(943): unsure at all n locations
cggtgaaacataaacacacacgaacacgttgannattattacttttnttannnnaaaaganaaagaacgagcgctgannccccnnnnnaaaaannaanngggnnnnnnnaannnagggaggggagagatttagtatagaggaagatgggaggggaggaaaaagataaaaaaaacaaaaaataagaaaggagaagaggagaagaagggaaaggagaaaagggggggagagagagggaaagagagagaatagagaagaaggaagaaaagagggaataaagaaagaagggagagaaaggaaaaaataagaagaaaaaagaggggggaaaggaggaaagggaaagagaataaaaagaaaaaaggagaaagagaaaaaaagaggggagaggaggaaaaaagggagaaaaaagagaaaaagaaggaaaaagatgggagaaagaaagaatgaagaatagagaaaggggagggagaggaaaaggtgagagagagagaggaagaaaaggaagagggaaaggagaagaaggaaaaaggggaaaagaaagaaggagaaacgagaaaagagcctggagggagaagagaagaggagggagaaaaagaggagaaagaagaggacagaaaagaggatggaaggagaaaaggagcgcggaggcgaacgagcgagagggaagacgcaggacaacagcaaacaaagagaagaggagggggaacaggaacgaaacagcacgaaggaccaggacggaaaagagaggagaaggcgaaaaccggcaaaggagaggccgaaggaaaaggaggagaagaagagcggccagagggaacaagcgcaagggagggaagcacaggaaaccgggaacaagaagaacgcaacagcggggacaaaagagccggagagagacggaggaagcgacagacaaaaaaagggagagcgacgggggaagaaagaaggaca

SEQ ID NO: 270690 - DNA, 988 bp, Glycine max
  unsure (1)..(988): unsure at all n locations
agatgtatgtaantaagtantgtatcttaaatatttattattctnnatactcanaataaattaattttantactctcttcnnnnnnnnntaggggnagatgacccttggagttctacnnnnttgnnnnaaaaaccataatgtttnaagttgggttattggtaaaaaaaggtaatgaaatttttttaaaatagtgcnngagganaattaaaggggagaggaatatgtaatgaaaatggggaagaaataaatggaagaaaaatgttagtaaatgggttttatatggaataatggagatagagtggnggatagtatagaaatatattatattatatggtataatataaggagggttttgtgaaaaaagatatttaaaggagaaggtttgtggagatatttggaaaattttattaattaaagtgaataanttaatttggcttggggatggggaattttaaaagatttgtggggaaaaaaaaaaaatggaatatttataattaaaatatatgggggaaatttaaaaatggaggtggtattttgtacggtgtttgggaaaataaagtaaaaaaattatttggtttcaagtgcaatattttaaattagcaaaaaaggacatactaatgttagatgggtgtgaaatttaaagagggaaaagaaaaaaaaaattttttttaaaatgtttatatagaaataactaaaaaaaagaattttaaataattaagtgattaaattaatggtgaagaaataattgagggaagagggtatataggagaaagtgaagtgaatgttaatataggcgagaagggattttagtttttgtcgtcaacatagataggtagagggaaagggtggaaattagatatggaatataaatgggaaagaaaaaagtgtaaagggcgagacgtgggttatataataatgtggagagaaaaataaagggatataaacgttgagaaagaaatttaattaattttggagagataaagaaag

SEQ ID NO: 270691 - DNA, 949 bp, Glycine max
  unsure (1)..(949): unsure at all n locations
cgcgacttacattacctatactataaantatgtttcttttcanntcaaccccggtgcctggcctggaacggacataaagacgcggctgcaatgacaaaaggcgtatttaaacatatgttaactaggaggaggcgcgggattggaaaaaactaatttcgctccattatccataaccagatatcagcgcggatggaagcccattaaaaaaaatacggctcgtctaaagaaagtgtgttaacacaacccccttcggagaagagcagaaccatccccacgacgtgggggctacaacagtgtaatatgggcgccgacaacaacacgattttgacaaccacggtggaaaaaaggctgggatagggccattatacgttagtgcgggacatttttccgccgaggaacccctctgaaaattcccctgataggatggggtcggcaccgacattggttagaagtcataaagaaacgcgagggaagtctggctgaaccctctcgtggtccctcacattcgataaaaaacgggctactcaacagaaatacggctcaatatctgccctatttctcaaacataacattgaaggtcaccggcccttatgtggattcttgcacaaattaacggtgaaatcgggtcaaaaatttcaaaaaactgtagcccatcgtctcacaattgcgtcgaatcggggtcgtcaattgggatgaaaattaataccaccttagcgatgggatcccgattcataagggtacacatttctacggcagtcacagtacttcatcattaccttgtcctaccgactagtatttactttgcatagaccgcgccaacagtgccccatgactacggttcatctagtattactctatangatactaatccagaatataaattanaatatannnnanaaccaccgggtgnnaanaccccgccggcgataatataggtccccagccccct

SEQ ID NO: 270692 - DNA, 856 bp, Glycine max
acctgaaacctacgaagcatgcgacactacagaaactcaagcttgtagcgctcgggcgatacgaatatgggattgatcgggtgaaattaccctttacacaccaaatgattttgaggcgttagagttgagaccgaacgcgttgaaaaatgatacaacgatgcggaatgaatggtgtacgaactgaaagcatcatggatgtgctcaccaaaacgtacccgaggcgatacagaagcaccatggcttggatagtggtcacggaaacaatcttttttcaccagaagcgctgaaatacatagccggaggatccagtagacttggaacatccccctttatatttttttatatgaaaaggagagacgaggatgatgtcacaatgacacatggcatctcggaagaactcttgtggacacccgaaatgctatagggaggagggggcttaaggatttgtactcacgtgcgcattcttattccgacgatccaatctcgtaaggagagcttgattgtgcctatcataggaaccccatgcagagaatataaatctgcgctatatgttggcttggacgcccttccaaagacatttttaattattaaagtactacacttgccgtttaaacccgatgcagtggaccgggtgtttattggacatttgcatttgaattcttcctcaatggcccaggggtttctgcgtttgtgtccctctcccacaaggcgatgcgtgggatgtgtgtcccccgccccacatatgtgactttacaccgttggcagcgcccacccgctcctctctttcatctccaccagaccaattgtatgcgcccttccctaggacctcctagtgaatcttggaacgaggagaacg

SEQ ID NO: 270693 - DNA, 277 bp, Glycine max
gttttcgtgccatacccagtgccaaaccctaatttcgttcagggactatcattcactgatgttttgattctcactagccgaactgcattgttcgacaccagttactgtacaagacgaaagattgttcaatgttttgattaaaaatgcgaaagataccaaaagaagggacaaaagggtcttttttctgagtttctgggaccctggctcgcccaggctagcatctggctcgcctgggcccccaagttacttcagcctgaagggactagctcgcctgggc

SEQ ID NO: 270694 - DNA, 565 bp, Glycine max
taagagagaaaatatgtccatttagagacaatgaatacttaattgaagaaggcttatgtataccaaaatctttgcgaacatgaagtaagaattgaagtgctcattattcaaattctttatggtaaaagctctctatgtaaatttttgtaaagttcaaaaaagctctcaaaacactttgctcatcttgagagaaaatgcttagtgctgaaattgtttattagtctataagatgatagagtgttagtcattatgcaatcaagccaaaaaatcttctgatttgtgttagagccagtattggcttggtaggacagagaatattgtaacaagcttggtgtagagcttgagtgaatgagccaaaagtggcagtaataaatacttgtaacttcttgaagttagtggaactttgtggtttgccaagagctagacatagtctcgtggttgagacaaactaagtataaattcatgtgtcttattttctttcctggaatttgaactaacataaggtttgaatttgatctttactttttgaaaatactgttgcagtcaaacgccaatgtcgtgatga

SEQ ID NO: 270695 - DNA, 342 bp, Glycine max
  unsure (1)..(342): unsure at all n locations
agcttctcccncaattttctataaatagggggagaagtgaagtgaataagggttcagccccttatgcgcacttctctctctttcaaatttgcttggaaaaattggttccgtgaagaaaatctaagccgagacccttccgaaacgtttccgtaatgtttccgtaaggaatttccggaagggttcgaccgttcttcgacgttcttcattcggtcttcatcgttcttcgatcttcaacgggtaagtacctcgaaccaagcttttcgattcattctatgtacccgtggtggtccacatngtgtntcgngtatttttaattctcgtttatttactttntataccccc

SEQ ID NO: 270696 - DNA, 524 bp, Glycine max
ttagcctttgattgttccatgttgctgctccccctatctctaacaatctccccctttttggctttgatgatgccaaacttgaatacgaaattgagtgcatttggagagtcttgagatggattggaaacatgatcttagtgttcttctgaagtatacttgacacttaataaatgatttaatcatgcatcatcattgtgtaaaacttatacaaaacaatgcacaatatgctatgcaaatgtagtatgcaattgtgtcaatatgcactatgcaatggcttcttcttcttgttctcccccttttggcattaacaaggccaaaaagttaaatggacataatacaaaacacacaattaaacaaagaaataaaccatatttcattaatcacttaagacattacctaaactgtgtgataaaaaacaaacttaagcttcattatcaaaacacacaaaacatgacatgataaaagaccataaaatagcgcaaacaagcacatgagcatatctaagtctcattcttattcgagtt

SEQ ID NO: 270697 - DNA, 452 bp, Glycine max
  unsure (1)..(452): unsure at all n locations
taagtcacctgccgcatgcaagcttgtaggattatggngtacccatcacatgtggtactaggtggcggtcgggtgatggtgcacaacaagttttccacatccacaatgcgcgcataaacccaccatcccctgttgcccacctccatctgagctcacgtattcccacgtagcccatatcctcgtttctctcaacaccgagtccccatcaatcctcccgagcttccacaacatccaagcaaaacaacattcaaacagcacaagctatcacagccaagcaaaatagggcaaaggcagaaaactctgcccaaaacaccaaccaaatcacagcttttctcacataaagaccncagtaacaattccttcgatccaattcgttaaccggtggatcgaactccaaaatttattggaagtctatagtacataagcctacattgtgaccgttgggatctact

SEQ ID NO: 270698 - DNA, 638 bp, Glycine max
  unsure (1)..(638): unsure at all n locations
ggaaaaggatcgaagcgggtntgattataggcaaatttgatcaccctactttgataagtgagaaaactagggcaaatgaagagggtgagaatgaaggagaaacccatgttgtgactgccattcctatacgggcaagtttcccaccaacccaacaatgtcattactcaaccaataccaacccttctccttacccaccacccagttatccacaaaggccatccttaaatcaaccacaaaacccacctaccacaaaaaaatgcccaaacaccacccttagcgaaaaccaaaaaggaattttgcagcaaaaagcctgcaggattcaccccaaattccgatgtcatatgctaacttgatcccatatctactcgataattcaatggtatccataaccccaaccaaggttcctcaacctccatttttccgaggatacgacttgaacgcaacatgtgcatatcatggaggaattccgggacattacattgagcactgtagagctctgaagcataaagtgcaaagtctaattgatgcgggctggctagaatttgaggagaatcgcttatgaatcctaacattgacaaacgacaccacacatgggggcatttttgaaagctgttgttagatgtctctaatgactcatc

SEQ ID NO: 270699 - DNA, 325 bp, Glycine max
agcttggtctagagtagggtcattattttatttaccatcattttaactttagcctgacgtggttcgtaccctaggtaaaatagagaatacattccaagtattagaatatcacaagtttgtatacttgcctaatatgtagttctcagttcgaaccaattagtacctccttttctctattatacaattatgtagtataatataatagcccctaccccacaagtgtgttgagattttcaattcttttagtttctttcgaaataattgtaaacctttgaacaaataattagtaacccttttactcaacattcgtattttccaatgcttc

SEQ ID NO: 270700 - DNA, 771 bp, Glycine max
  unsure (1)..(771): unsure at all n locations
atccagctgggcatattgtttatcaagctcttgaacctattaaaaaaagccataggatcattcaatcggatgagcaatatgattgaacatggaaagaaataatgaaagataagcttattaatgcttttattcaaatatatatatatatatatatatatatatatatatatatatatatatataaccacctttttgaaaaaactatccaagcccaagtctcctgaattccttgcatattctcctaactcaacgtcaccacctcattggccttggtcacgtggaatttcaaatgattcctgagtaaagaaaaaaatagatcatcaaattaatatatatggttcaactttaacactgatgttgctatctgcacgttcttggtaaactagccacacaagttattgctatccaagcacaatattctacataccacaaaagcacatactaatcttagatgcatgtaaaattcaaacagtaacagaacaaataantcttttcaaaatttttatatgatctcactacanagactttntaattattaagtactacactacttgtaagacctatgtagtgacacgttattatggatatatgcattgaattttcattagtgcacaggtattctgtttttgtccccccataacagtcaatggaaagattgaattccagcccaatacattgacaaattccaagtaaggcctactgcatcaactaatatgcaaataaaaaatgcatttcagcttcagaacatttattacttttgtaaaataaaan

SEQ ID NO: 270701 - DNA, 417 bp, Glycine max
agcttgtgcttaacacttttctttacttgaaaagaatcggaaagatcgatatgtatgaggacttggaattaggataaaatctaagtatctgaatagcatcaccacattaacaaataatataaatgtcatgttatggagagcccgataaaaacaaaacaaattaatgaagcctacactaaaaaaaaagtcatgcatgattgcatgttataactattttgttataattatcttgataccatttaccaactgtcgcttgtgtgcctaacaaccaagtgtcaattagtggctgtgaagatcaaccacacaacgaattaatgactaagaccttgcaacaagaaaaccaactgaaatgtttaaaaatgtgctcatttgatcttttaattaaccgttacaaattccatttttctacattatgaa

SEQ ID NO: 270702 - DNA, 577 bp, Glycine max
  unsure (1)..(577): unsure at all n locations
tttgtccacaagaaaatcatttgaatccatttaaaggtccaacaccttaacggcctttttttttttacttttatcggttaaagcgaaccatttaaaagtctaaaatcaacaccccgcataaatttcttgtttttcaaagaactacgtaggtctgagttcctcgtcgtaattgaggatacataggagcaaaagccccgcttttgtcgaccccaaaaagataaaaacataaaaaagggaaaataaaataaatttgaaatcatgattttgcacatttgattaaaggttgtcatcccttgtgacggacgtgtggggtgctaataccttccccgtgtgtaaacaactcccgaaccttttattcttaaaatttgtagacactctggtttttctaacattttccttanataaacattggtggagactccgcgcgttttccttccttggaagatgcttncatgagcctcacgtcgccctcccttcgaacggtaggttgcgacagttggcgactccactanggactggttttagagagttaggccattttaatttgtgtgcattttttaccatgacttttctcttt

SEQ ID NO: 270703 - DNA, 308 bp, Glycine max
  unsure (1)..(308): unsure at all n locations
agctntaaccaattcaggataaataggcaattgtaatgacataaaaggtagaagacctaagttctgaaaggcttgaatgcaatcaaaggtttcagcagaaaagaattccatatcaataaatttagggtcgataatggaacgagatgagaaaagattggagtaccgtttctgctgttcgtcggaagaaaacactggggaagaggacaatgatggtggaattggtgctgtggatgcgctagtggctccggaacgatgagctcttgaagccgaagcggaggcggaagaaccctttcgtttctttgacgatt

SEQ ID NO: 270704 - DNA, 434 bp, Glycine max
  unsure (1)..(434): unsure at all n locations
tgaggttgagcttggcttgtaagagctaaaagtagccatgatagaatacttgtaacttttgagaagttagtggaacttggtggtttgtcaagaactgaatgtaatcttagtggtagagacgaaccaatataattccatgtatgtgatatatgttcatttcttttcttctttaaactgacctaaggtttgaatttgattttgtttttgaaaaatcttttcttttacaaaatctaatttcatgtctgaaagtgttttagttaaaatttgttatttgtcttacaaagttcttcttcaaacaattactttgttctttcacaaaaagactttaaaattatctaaactcacaattcaacttcccttcttataatatttttcctttgcaatccatgtattgcgggtgntacanaacacacccctaaagtttttgcccatga

SEQ ID NO: 270705 - DNA, 324 bp, Glycine max
  unsure (1)..(324): unsure at all n locations
agcttaacanaagacatgcgaagtgaatggaattcctagagaaattcccttatgttatcaaatataaaaagggaaaaggtaatattgtagctgatgctctttctcgacgtcatgcattactttctatgcttgaaacaaaattgattggtcttgaatgtttggaaagcatgtatgaaaatgatgaaacttttggagaaatttttaaaaattgtgaaattttttcagaaaatggtttctttagacatgaaggctttctttccaaagaaaacaaattgtgtgtgcctaaatgttctactagaaatttgcttatttgtgaagcacatg

SEQ ID NO: 270706 - DNA, 349 bp, Glycine max
tcccgtatccgtacttggaaggatctgattaccgccttcctaaggcagtatcagtacaattctgatatggcttctgaccgtactcaactgcagaatatgttcaagaaagagggtgaaacctttaaagaatatgcgcagcgatggagggatttggcggcacaagtagctcctcccatggttgagaaagagatgatcaccatgatggtagacactctggccgtgttctactatgagaagctagtgggttacatgtcggtcagctttgcggatctggtgtttgccggggaaagaatcgaggttggattgaagagaagaaagattgattacgtttccttcacaaacgtgaatg

SEQ ID NO: 270707 - DNA, 324 bp, Glycine max
agcttgttcgcaaatcgttcgtgtgtatgacatccactccacaaggtttgaagtagaggagaccttctatcctattacgcaacgtggcggacaatagagggcagttaactcgaacggtcattattgtcaatgcggaacgtattctgcgcttcactatccatgttcacatattattgcagcttgtggttacgtgagcctgaactactaccaatatatagatgttgcttatacaaatgagcacactttaaaagcttactccgcacaatggtggcctcttgagaatgaaacggctattactacttttgatgatgcatggacacttat

SEQ ID NO: 270708 - DNA, 575 bp, Glycine max
aacgattaatatattattatatttaaggcatacgagtaaataatatatttgattttataaaaaaaaatttaaaaattatttttttgcacaagaattatattttttatataaattattggatgagtacttgttgggaattgatatacacaatccccaacaggagagatagaaaaaaaaattcacatccatcataaatcaagaaaaagaacggttttgggagaaaaacgaagatgaacaacacagacaagaagagagagtttaatctgtgggtggatgtggagggaccttgcccgccctatttttttatattggattaatattggatatgttattttaaaattagaatatttttatctttaacaatatttcatgcacttataatttttattttgaagagaataatacttttagagtaatattagaattatctttttatggtcttcattgtgaagataatttctttatctatttataatatatgttactagtaattttcacttttcatgtttttctttttataatcattattgatatttttaaaactataattaagtacatctataattgaacaattt

SEQ ID NO: 270709 - DNA, 952 bp, Glycine max
  unsure (1)..(952): unsure at all n locations
tggtggcctagactgcacaaccggatcaccagacgaagccgctgaagctgcagctgacgtagttaattattcgattctcagtcacccggtcagacctcggtcccgtagaacattccgtttatattctcccccatcgatccaattcatgtgggtgtgctggaggggcaaatagtcgaccacccacttatcgccttcgctaccgccccccataatgcgggacctgattgtcactcctttaggaaccacttccaaatcatgcgtggctagcgcccatctatgggaggtctaccctcatccggaggggtcccgacccccatttctctattagggggtactataagaattggctccttactactgttagagcccactcctcgaccccttacaaagtgcgcttacaacttcccccttagataacacatatgtggggggccatctcgccctatatttatacaaacttcttggcagcgaagggggtaaaatttcttgcgtcttcaaatagaaaaactgctcccggaatcacaccatcacggcgaaaaccttcgctacccccctaaatacacttcgctggcataaaccttcgccatgtgatttctagttctcctctcgcccatttcctccacattttctcccaaaaataataagtctctaccgcgctgtcttcttccgttctatcatgacgccgccctccctctttataccactccaccttcgacatttcggactctctcctagcacaccttctgtgttcctctaattntngaaatcactatatgcctaaaataacacacttcaacttgaccatcaattcctattctctctntatttttccaatcatccgacctacctcctatatatatcaatgttttgtttangtatttctaatttatgttaatattaataaaaaannnngggatagggtgaaataattgaccccaaaaggcagaagggg

SEQ ID NO: 270710 - DNA, 501 bp, Glycine max
tttagattatgcttacgcacatgtgaggaaatgcagaccgcacttggggcagtctcattacgagctgatcttatgcccgagtgtgaacgaatccccgacctcttttttttaaaagttggagacactttggtttttctaacatattccttaaataaacattggggggagaaacagcacgaattgcttcctatctagagggtaattttaggctgaagtttcccacacctagaatggcaagtgtgacggttggggacacccctttggacagtttttaaggagatagggctttttaatttgggggcctttttaacaatcccggccctttggggggtgcccttatttttttaggggctaaataccataacaccttggaaatttggctaatgggcggcggaattaaatatgcgctcaaaaaaacattatttgaggtcacacaacttcctttttaacctcccccttttttaaggcctcttacgctcctggtaataagaatgagcgacg

SEQ ID NO: 270711 - DNA, 334 bp, Glycine max
  unsure (1)..(334): unsure at all n locations
agcttgaattcattctatgcacccttatgggtccattctttctttgtgtgttttcatcttcatctcctctactttcggtattccttttctgcgttttaagcgagtttcggccgatcatttaagctgtaatctcacttaattgatgtttaaatgaatttcaaccgatcgtttgtgttataatctcgttcaatcccccttaaaataaaatccagtcgattgttcacgtcgtaacctcagttaaaaaacanacaaaaaaaaatatctaanaataataaaagatctaacaaataacaataaaataataaaataagtgttagccggacatcttactttg

SEQ ID NO: 270712 - DNA, 605 bp, Glycine max
taataagtccatttatagattgaaacaagcttcccgccaatggtatttaaaatttcatgagatcatttcttcatttagctttgaagagaatgttatggatcactgtatatactacactgtcaagggtagtacgatttgttgacttgtattatacgtcaatgatattctgcctgcgactaaagataaaggatcgcctcgtgaggtgacactatgcctctcatataactttgatatgaaggatatggctgacgcatcttatgtcataagcataaagatccatagagaaagatctcgaggcattttaggcttgtctcaagaaacctatatcaaccaagttttagagagatttaatatgaaagagtgttcaccacgtgtagctcccattgtgaagggtgacaaacttgctttgagtcaatgccccaaaaatgattttgagcgggaacatatgaaaaatattccatatgcttcagcacttggcagtcttatgtatgctcaggtttgcactagacctgatattgcattccctgttggagtcttcggaagatatcaacgtaatctatgtattgaccactataaagctgcccagaaagtgatgagatatcttc

SEQ ID NO: 270713 - DNA, 384 bp, Glycine max
  unsure (1)..(384): unsure at all n locations
agctnggatggtgttgagcatactgatgagtatcatgagggggtgactganggtttggtcaagcaggagccgaggtcacggcatgagcattcccttcttttcttnttgccccaaccgctctgaatcttctgttgtttgtgctggcaggggcgacatagtcgaacttcccgctttttaggcctacctctatcctctcacccacgaatactagatccggaaagctagagggcatgtagcctaccaacttctcatagcagaacactggtagagtgtcccattatcatggtgatcatctacctttccatcatgggaggtgctacctgagccgccaaatccctccatctctgggtgtactctttgaaagattgtgctcctttttgacat

SEQ ID NO: 270714 - DNA, 577 bp, Glycine max
ttgtcttcatgaatcatatcgaaactgatttactggtcttttatggccatttgtagtttcctcttccccatgtctaccacacagcttgcggtggacataaaaggtcttccaagaattaggggaatgtcagcatcttcttcaatgtctatcactacataatcaactggaaagataaaatgtttgaccctaaccaaaacgtcttcgatcactctgtagaagcaagcgtcatgatgatgaatcaagttgattcaagttgttttgatgatgactaagatgatgacaaaaagcccaaagaatgatttcaagattcagttaacaagttcaagattaagtttaatttcaagtttcatgagaagaaatcaagaagattcaagaatcaagagaagtttgatttcaagattcaagagaagaagaattcaagattcaagagaagaaatcaagaagacctcacaagggaagtattgaaaatatttttcaaaaaacaaacatagcacaattttgtttttcaaaagaatttttctcaaaattttctaagttaccagaagttttactctctcgtaatcgattaccaatttcc

SEQ ID NO: 270715 - DNA, 221 bp, Glycine max
  unsure (1)..(221): unsure at all n locations
caagctttcggcccatgtcgaanacccctccagtctagcgcccgttttacaaagggtacccgctcaaccacaaagggcccncattcaaaacccggcttctacacaacctcaccccgccggcagccctaatccgagcacaagtgccaatctgagaatgaatctttgggtaaagaaacctgtggagtttgctcccatcccgatgctgtacgcagacttgctac

SEQ ID NO: 270716 - DNA, 593 bp, Glycine max
  unsure (1)..(593): unsure at all n locations
ttgtgtaatcgattacacttatttggtaatcgattaccagtgtttgtttctgaataatctaaagatgtaactcttcaaaaaggttttgactctttcaaatgggttttaagtttttctaaaagttataactcttctgaatggccttcttgaccagacatgaagagtctataaaagcaaggctttgttttgcatttttaatcaatctttctaacaacaatcttgaatatttttgcttttccaatcaatcctttacaagccttgaaatctctttgaagttcttcttcttcttcttttgtaccaaaagctttctgaagttntctggttttctaaaccttgaaaacttgtgttattcatcttttcatcctcttctccctttgccaaagagaattcgccaaggactaaccgcctgaattctttttgtgtctctcttctctcttttccaaaagaacaaaggactaaccgcctaaattcttttgtgtctcccttctcccttgtcaaagaattcaaaacgacacagtctgagaattcttttgattctttccattccctaatacanaagcgttcaaaggtttaaacccgctgagaattctttt

SEQ ID NO: 270717 - DNA, 326 bp, Glycine max
  unsure (1)..(326): unsure at all n locations
agcttatagggtaaaagtctcacgattgtcacgtgctcatgcaacaattgttagccgtggctatacgagacatcttgccaaacaaagtcaggttagcgataactcgcctgtgctttttcttccatgctatatgtagcaaagtcattgatccagtcatgtttgatgaagtggaaaatgaggccgcaattatactatgccagttggagatgtattttccccctgctttctttgacgtcatgattcacttgattgtgcatctggtcagagaaatcaaatgttgtggtcctgtttatctacggtggatatacnccggtgagcgatacatg

SEQ ID NO: 270718 - DNA, 551 bp, Glycine max
tggaaggttgtcatacctcacaaaatatatgtatgtgtgtttaggtagtgaaaataccttggatatgcatgtatatagcataaatacctcacaaaacatatgtatgtatgtttaggtagcaagataccttggatacgcatgtatatagcaaaaatacctcacaaaaatatacacatgtttaggtagcaaaatacctcgtgaaaaaaaaaagaaaaaaacaaaaacaaacaagaacaaaaaaatatatctttcagctgaaaagccagcacgcttttgaaaagaaataacttccagcttttctttgaaaaagattcactgatcataaccagtttttgaaaaaaaatgtgtatgcacctgaagggtgaatgctatgaaaattttcccaaacacccaaaatggactcggatgaatgcataaattgataaaggagcatattttggaaacattgggttgacttaaataggaaaaatgaatcctgagccctagtgtcacatgaccataaaaacttgatgcttgagtgtccacatgggtgcatgcatgaactagtttgc

SEQ ID NO: 270719 - DNA, 327 bp, Glycine max
agcttgaatgtcaccaagtcttggtgaagatgttccataatatgccaaaggagaatatccaggatggtgaggctgggattcaacaaacaaaaaatgtgttttggaaggaacccacatatgggagatacaagattaatttcgacacatcaatttctaagaatggtggaacatggatagtttttatatctagagataaagaaggacatgtgctagcatctactaccaaactacttgacttcgtccttgagccaagggaagtagaagcttatgcttttagatgggaaatttgcttagctcgtgaactgctttttgaaaacctaatctttg

SEQ ID NO: 270720 - DNA, 523 bp, Glycine max
tcttatccaatgcactctcttagtggtgaagcttctccttccatggcttattctctagtagatttcgtctcttctcacctcttctcctttatcttacgctgcaactccatggctgaaaatcatcattgaaggaactcattgaagctcaaagatccaacctccatagaagcttctcaagcaatcttccatcaagtagcccatcacctatgaacttcacatgtatgcatgcttcacttggagtaattatgggatgagtgaccttctgggaagtttctagaaaagcatgagtaaggacaaagcatgctaaaaagtcttatgttggtttgtgggaacaatcattgcttatgaaagcaatcaaagcaaattgtcgaagtctcgaaaagggctacctacagagggttctgaccagtggaaggttctgaacaagaatgatgatgagtgaagtgccatgacatgaagtgtcatagtgtgagagcaatcgagaacacaaaatcagggatgttataaatggtatcagaaaaaa

SEQ ID NO: 270721 - DNA, 295 bp, Glycine max
gcatgcaagcttgcggggaattgtctacgcactatactagaacttcgtgttatctaattactatatgcgtccccctctaaagggaacaaaaaactctttatttaagtgaaattacacattgtaactttctaatcacaagtaagattattcattcctaaacgtcaaactactaaaattatatatatgcgcgcgttatttaacaacgatacgacaatccacgattcctaaggatatactgaaacctgcggccaacaactgacgcaaaccacgtgaaactaaggaatttctgctatgt

SEQ ID NO: 270722 - DNA, 834 bp, Glycine max
  unsure (1)..(834): unsure at all n locations
ggccctagccgtggcntccttacacccaaaatctgaaccatcttgtaaggagaaaagttcttcagttgtctttccgtttttttaaaccatcagcgtggctgcaaagacatataacaaacttttgcgcacccgacaaattattatcatcccacgggtaatgggcatgctggtncgctactgaacaatggccccttttttcgccttaaaaatttaacaaggggggtgcttatacacacatatagggctacattcgtttgactattaccaaatatgtcttatcacccgatagactggcctataagagtacaaagcgtgctattgtttgcccgagcattaccttcaatgcttattgggcagattttcttgcctcaccgcagtgaacgattggctcctaagttgactgtacccatttactgctacacaaggttttcccttttctaactcaatcatatgattttgactaacccatgaaagttatctttgcacgccaaggttaacctgttatttaattattgataacacctgcacacactcgttgatgagccaaagcttttcacagtcgatactgacttagtgggtcgatagtggagaaactgccgcctcctatcgacagtgatgccttcccatggctcagcactatctctgacgatgccttaaagccacaaatcgcattgtgttacctatgaggattctctccgccgcaagtggggaacccaaggtcgcatatgtcaacatttcccctcctttcgcttttaaattcccctgtttttcacagtatcgcatggtaatgttaaattgaacactccactttattctccgatctatcaactctcc

SEQ ID NO: 270723 - DNA, 1034 bp, Glycine max
  unsure (1)..(1034): unsure at all n locations
ctcggtgtttgtagaccgntaaggcgcacgacgacacgagtaatgccgnagctgtaactgctactgtactgtctacacggcgttcgcggatgggagcattaaggttcggaggagggactgctatgcgaaacagcacaatttggcgatcaacttacggaggcagatgtaaacgtgaaacgcacttgcgttgtatggtggtggggcgcggttgtctctcgcagacctatggccatatctcctttcggggtgagggaaaaccctcctcttgggaggagccatctagggtgcaaaatctcccatttgggtgactctttaataatgatgctccttttctactccttggccatctttctcctggcccattccattgtcatatcttccttctacagttcatcttgatcttcctaattgtaaagatgtttctctctggtaacactccgaaatcatccttctgctggctattaaactactccatgtgattttcttcttcctatgccatgtcttctattcactcgggtcgcttactctctttacctgtcgcaaccttcctctccggactccttctctcctctttattctcttgcaatcacgcttctacttctttctcctcgtctttactctccctcaattagccttatatctatgcttcatattgacttgtcctctctctctcgcgtacatttcacctactcttattcatccgaccttctctctcttcctactgtcctccctatctattactactatatttttcctccatcacattcttcttcatctagctcccccttctatcccctccctcgtcttactccattaactctatacttctttcgaactcttcatggtatgtattgagttcatatgagttttttagttantantaataatatattaaaaaaaaaaagaaaaacgcgcgggggatcccaangagccgcaggcggacnccactcccgcgcgagtattntttntgtggtgtgtgtgnngttgtgtggtatctagctttgctggtcgctcgtttctacctcgcgttgact

SEQ ID NO: 270724 - DNA, 917 bp, Glycine max
  unsure (1)..(917): unsure at all n locations
cactcatgtctcagtagtttgacttcnactcantttctcttcctatgccacactacctnttntatatctntcttcttaatttgccttnnnnnnnnnnnggggnnnncccttgaacctatcgatctatgcgacactcccgaancatanaatactgaagctcatagtcactagatactagacatgacggcgagtgtaagtttttgggactaccctatttccgcacatactaccacacaaggtcgaagtgagagtgtgaatgtctttcatgtatgaagggaatggaaacatatcaaagaccttcttatgaatcgactatcactatccaaaagtacagttttatgattacctatgaatcgattcttactatgttgaatctaacatgaagaagaagaatgaagaatgatttgcgtgcctagagaatccttaatagtgagagtgaggatgaagaatgaacaatgggagacatggaactataacactgcttacacatgaaaacaagttccttgagaagatttctaggagactctagcattcagagtaggttgattccagattcagagaccagaattcacagtcaacatcaattctttaagacctcacctggaatacttgctaaagatctaactatactaaaatacaatacaatttcaaaaacatagtgaatggagatgaattccttccaccattcacatttccttataaaagaacaacttcggctccagtcatgcaagtctaattcatgccaacccattaacatggattgcccaatccattgtctgcaaaccggggctcgttacctatattaggatccttaaacaaagtttccgcgcgctcaccttcaatttaacccccgcggtcanactttaactaaccgtcgtttgagcgtgccccnttttcccttttatttccccaccccc

SEQ ID NO: 270725 - DNA, 279 bp, Glycine max
agcttcaaggatatcaaattccgcctgacaaataataaattaggttttattgctatattggtaagaatttataaattttggctaataaagaaaatcaaagatgaaaactaaaatacctgaatatcctcccatatcaaatcctcttgagcagcagggacttccttccaagtctcgtatgtcacgtcgaccttatcacgagtgacaatcccaaaatatgttcttaatttcttcttgtggggaccgtcgacctttccgatcgtaggatcgacgtggaccact

SEQ ID NO: 270726 - DNA, 581 bp, Glycine max
tctcccaattcaattaaatttatttccaaccatacacatcaaatattcacttaatgcatgtaaaattacaaaactactcctaatacaaaaactagtctaggtgccctaaaatacaagggctgaaaaattctacacttctaaggtaccatacctatattgtggagccctaaatacaagaccgaaaaataatgaaaccttaatctaatatgtacaaagataagcaggctcatacttaacccatgggcccgaaatctaccctaaggctcatgagaaccctagggccttctcttgcatctctggcccaatttttttggagtcttctatccaatgcccttgcaaggtaggattacatcattccctcccccttgaaaaggatttgacctcaaatcctgaggttcttgaaactctgggcttttttcctcaatacttttaaaacgaacaaaaacatatgtattagtggtgtttggtatgttgaagtaaggtaaggtcttaaaacccatttcctgggcatctttccatgaaagaacatcgttcctcagtaactcaatgagtggtgctaaaagtataaaaaaatatgggac

SEQ ID NO: 270727 - DNA, 322 bp, Glycine max
  unsure (1)..(322): unsure at all n locations
agcttgcacttgaggagggaaggatatttgcagttaatgaacaactttcttaacttattgtccttcagattttactgtttcattntgctaatatgtaaatataaatggtataagggtatcgcgtaaaaacatggtctatatttacttctaagattggtaggggtaaaaatgaccatgtccataagccatagccttatattatttatatttacaatgaacaacgaattgtccataagcttccaattaacgattcccccaattcaattcaaacaaattgcaattaaaaataaaaaggttatagagagaggaagcgaacaacgaa

SEQ ID NO: 270728 - DNA, 516 bp, Glycine max
taaaggagcactcaaatcgggtgtatttacccccatggcctagactccgaagagtccgtcagggcctctccctcctgattcaggtccaacccaaaaaacattttagcacacagactttatctatgaactgtacaaaatacacgactcctcaattgttctcaaaataattttatctaatcgcgcttgtgattaaactcgtcaggtcccaacagtggttcccatcataatactcgccacgcattaactcgtcgcccttagattcatagttcacaaatcagtgcacacaacatctcaatgcacatatatattacaagtcaatacatactcaatttatcacatacatttggtctcaatcacagtggtataatctcaatttaacatgttatcacacctcatgaatcatatacacacaactactcaatttttttcaaaatcattttaactcgtcgcgcctcaaagtgattcaacttgtcgggttcccacagtggatcccatcataatactcgtcgcctaaaa

SEQ ID NO: 270729 - DNA, 313 bp, Glycine max
  unsure (1)..(313): unsure at all n locations
agcttgtgctaatcccacatggttggagcattctcgctaaatagcgtgaccctgattggtctccttgtgantttacctagtgagagtgacttgacttactagtgtgtnggttgtcttgtcatgtattcctaggcgcttgacgaggtttttcactgacatgataccacattgcatataagattgagtcttagtatatctgttgcataacgcttgtgtattggtcgatattgattaatttagtgatatcgtagtttgatctctgagtacgtgaatgatgtgaaaatgaaccagacgtgttgtgttgtgatgtaat

SEQ ID NO: 270730 - DNA, 476 bp, Glycine max
tggattgatttggtctgacgagggatcgaggtttagttatttaagctactacatagaacacaagagcatgattgattagagaaatatatttatatgcatcagcttgtttatttgaaagacccaacatttctacctactactgttacttttacttaccttgcattttatagtttttagcataaaagtttagtttaaattctgtttgaaattatcaatcatacatgttctctcaacaatgcttcatttctgaacttaacttatgctaacattaattccttgtgttcgatactcggattcatccattttaatttttaaatacttgacaatccagtgtgctttccggcaaaccgcaattcccttgaatatatttgtacgaagaaaaagtggaacaaaatgtaaccgccagggaaatccaacaagtacctactacaaaaaatactcagattccctccaccttggaaaggatttgacctcaa

SEQ ID NO: 270731 - DNA, 260 bp, Glycine max
  unsure (1)..(260): unsure at all n locations
agcttgataacacgcagagactaatttcgtcttctgcgaccttcgtcaatcgcggccgacaagcccgttgacacatggagatttacgttatcttccgcgctcacaagatctgtcatactgacttttgagtcacgctgacgggcgtaaatacctgagtggttattcgtataaactttttgctgtctgtaagacgaanagcctgataacacgcagagactaacgtcgtcttctgcgaccttcgtcaatcgcggccgacaagc

SEQ ID NO: 270732 - DNA, 492 bp, Glycine max
cttcgtcttacagaatgcaaaaagtttatacggataaccactcgggtatttccgcccgtcagcgtgactcaaaagtcagtatgacagatcttttgagcaccgaagatgacgtaaatcaccgcgtgtaaatgggcatgttggccgcgattgacgaatggcgcagaagacgacgttagtctctacgtgctatcaggcttttcgtcttacagacagcaaaaagtttatacggataaccactcgggtattttcgcccgtctgcgtgactcaaaagtcagtatgacagatcttgtgagcgcggaagataacgtaaatctccacgtgtcaacgggcttgtcggccgcgattggcgaatggcgcagaagacgacgttagtctctgcgtgctatcaggcttttcggcttacagacagcaaaaacgttataccgataaccactcaggtatttccgcccgtcagcgggactcataagtcagtttgacagatcttgtgagcgc

SEQ ID NO: 270733 - DNA, 387 bp, Glycine max
  unsure (1)..(387): unsure at all n locations
agcttctcctcttgatgcttctatggttcttttccccaaataggcactgtggtgtgctctagaatctgtgccctttcttctgcgtacaatctgtctaagagtttgtaaaagtgtgtgtcagagtgtgtgtaccctaattctgcacaagacaggctntaaataggctctgaattcacgacgttgtgcttggcaccaccctctcgcttagcgcaggtaagtggattcaaccttagtgccagtcctgcgctgagcctggttgaagacccctgctgtgcttaacgcactaatctcgtgcttagcgcatggccatgatgctgatgctttgccaaattcttcttcgcgctaaacacgctgaagctgcgcttatcgatggatgcacgcttaacc

SEQ ID NO: 270734 - DNA, 534 bp, Glycine max
tttgaattaaaacattcagaaactactggtaatcgattacttatatatgtgtaatcgattacacagggcacattttgaatacaaattttaagagctcgtgtaaatcaggtttggccactggtaatcgaatacatcctctggtcatcgattaccagagagtaaatttcttgtaaaagactttttaacttaaatttcttgggcaaaccttttgctacttcaattggaattcccttcctatttaatataccctttctaagactctatagactgtcttgatcatccatcttgaatatctttaattgcgtaggcttgaataaaggttctagacgcgtgtgatcttttggcatcatcaaaacatcggctggatcctttgtctacatagaggtggaccccgaaaaggtgaaggccattcttgagatgccggaaccccgtaccgagaggcaagtctgaggtttgctgtgacgattgaagtatagtgtcacattcatatcatagctcactgctatatgacagacgatgttcacactcttactc

SEQ ID NO: 270735 - DNA, 1082 bp, Glycine max
  unsure (1)..(1082): unsure at all n locations
ctttggtcattacagtaacatgaagaataaaataaacacaacatcaaaatgtatagcagaagcaaccagagaacacctaaaaatatatggaaatttccaaaatatcttatgcttattctatataaaaatatagtaaaaattatattatatattatgatattatatatatatatatatatatatatatatatatatatatattagtatcttgcaaaagggtaatattgccatttacatatatatcttatatcatctcctaattcacctcaaacatagcagagggtagcataaatatcgtctaatagaatatttggcgcacatcacacattgaatagtatataagcttattatggtcctagccctatctattcctatccaaactttatattttaatctgggtaccacacacagccctcatagtaattataagcatctataaaatcttgtgagaggtatatcttttattatcgctctcttccactcgaaagattatattacgaaccggcggaggnatcntcttggaagtcttaacacacaacgggcgataaacaccgaattactctcttttatggacatatgtggagcttggagaaatcgccacaggagatctctcttcgcttaattataaaaaatatataaagttcttcctcttacggaaactacaaactgtcttattcttggtcggggaggcaacaaaaaaaagaaccattggggtgcacaagccttctttcttttgagaatgggtgcgccagtgggtttaactcctctttagtttgggagacccaaaaagtggggtgctccccactattaaaacgaggaggttatcctctatgtggctgttataggtcgtattttctcanccctcgggacacgactccagaaattcatcttgcctctaaactatatatcaaggtctatatattagcggtgtgtgcctacatctanctatcgtacttagtcagcgcgtatcctcatccagacgatctattcacgatacctgcatacttcgtcantccttcactcccgatctattggtatcgtaaggtcagaagagtgcggnnnntactcttcgccgtcgcctt

SEQ ID NO: 270736 - DNA, 637 bp, Glycine max
taaagatatatccaccctttgctggtgcagctgtatcagcaattactctagttgtttcatttggggttgctgtatctcgtccttgcctaactcttaaggtctttgaagtcattgtgatcagcactgacttttaagctacttcaaaatttaaatgattggattcattatatacactgaaatgtctgatgaaactggcttattataatgtgctaacttctttcttcacaaaataccttctaattgaagttctaacctttgtaaaattgtacagatgatggaagatgctgtgcatttcctcggtaaggaaactgttattcaagcaattgctagatcagcaacaaaggtaagtagatttgccaatgagattgcaggaccctattgggccaatatctatatttattcttgtcctcatagcattgtttggactctggagtagtaagcagttggcattctagccttctctacaactgctatgtatggctgtctatgttgccaaagtttttcttcctctacagaaacaaaagtcttgctaaaatttggtttactgctctgccagtgatacttttacaaatgtagtgagaaatttttcactgattattaagtactctgtaaatgggctgtattattttaaagaact

SEQ ID NO: 270737 - DNA, 271 bp, Glycine max
  unsure (1)..(271): unsure at all n locations
taattttttgctttaccttctctttcattgggtgttcttcatttttctccatgtatctcctcacatgtttagtgctaaatgttgttaacatgattctttagaatttccaccgattaaactagctatagaagctagaattgattttctatggttcaaatttcttgttcatgttcttgaaccatgagttgtgttgagtctaaggtcctttgagtnttgtctcgctattttttttttgtggctganacctaaaccataaaattctaacaaaaat

SEQ ID NO: 270738 - DNA, 652 bp, Glycine max
tatattcttgaatcaaaatttatatggtttgttatgataaaaaaaaaggaaagattgttagaactagttgatctatcactagacgatcccttcattactaatgacttaagtgtaagtgtacatgacacatcatatgaagcttatgtagtaatatatcccctatcctttaactctgttaatatggttgtccacactaccttacaagaacttgtttatattaagttatacacaatgtccattgcgttgttaataaaacaagatttaattattaaaaaccaatgactcatctaatgtcccttttatcaagcatccaatggacattaatcacttacatgaaactttctatttgtattaagggtattcttataggaatctatctcaattatgttattccttgttacttgatttaagtaacatttgaattctgtatgattaatacaaatttggaaagaatttatccaagatcaatatgctaatggaatcgtgacatacatgccatattttggaagattcttttctctcctccaactaacactacgcaatagagactgacaatagtcagaatttgaatgcgctaatcccagagaagatttgctcattcatcatctataaaaggtgactcaagtcatcattcacaatcatgaatttcaaa

SEQ ID NO: 270739 - DNA, 418 bp, Glycine max
  unsure (1)..(418): unsure at all n locations
agcttcttcttgtttctctccccaattgagaccaacatttntcttgagcacttcattgagaggtgctgccaatgtgctaaaatccttcacaaatcgtctataaaaacttgctaagccatgaaaactcctcacctcggtcacggacttaggtgtaggccattcttgaatagccctaaccttctcctcatcaacttgcactccttttgaactcacaacaaaaccaagaaacacaacatggttagtacaaaagatgcatttttcaagattggcatacaatggttcttctctaagcacagtcaagacagattttaaatgatcaatatgcaaatcaagtgaagtgctatagataagaatatcatcaaagtacaccacaacgaacctttctatgaactctctcaagatatgggtcattagtctc

SEQ ID NO: 270740 - DNA, 632 bp, Glycine max
  unsure (1)..(632): unsure at all n locations
tgccttgccccttgatatatttgagggattcatggtcactatgaatgacaaattccttgggataaaggtagtgttgccatgttttcaaagcccgtactaaggcatacaactccttatcataagttgaatagttaagggtaagaccacttaacttttcactgaaataagcaattggatggccttcttgcaacaacacagccccaatcccaacatttaaagcatcacactcgatttcaaaagatttttgaaagtttgcaacgcaagtatgggggcattagttagcttttgcttaagaatattgaaatcttcttcttgtttctctccccatttgaaaccaacatttttcttgggcacttcattgagaggtgctgtcaatgtgctaaaatcattcacaaatcgtctataaaaacttgctaagccatgaaaactcctcacctcggtcatggacttaggtgtaggtctttcttgaatagccctaaccttctnctcatcaacttgcactccttttgaacttacaacanatccaagaaaacacacatggttagtacaaaagatgcatttttcaagaatggcatacaattgttcttcttctagcacacaccagataaattntaaatgatcaatatgaaaat

SEQ ID NO: 270741 - DNA, 397 bp, Glycine max
  unsure (1)..(397): unsure at all n locations
agctngtagactaacttggccctatccagattaagatcataagtatgggatgtcggngccaagttagaataagatagaacattccaggtttgggctagagtggtaagatctttcctcaagagcttccacggtagaccctcgacattaagtacaaatcccctcccagggatacacagccaggctgcaagctcctgaggattaggcctcagtctagcaaacctggagtaagagggcaagctctccccttgctccatgaccactggagtctccaaaaaggtgttgagagaatcaacatcaaattttattaggtgccgtcgaaccctaacttgcttgggagacttgtccttacggacatatagaatngcatagaaattctttacaattgccacatcaatgc

SEQ ID NO: 270742 - DNA, 293 bp, Glycine max
tcttgcgtagccgctcttggtgctcagaaaatcccaaaaacaaatccctcttattactagctattttgaattctttagttcctgaatgtacaaccttcaaattgttgctcattcccctctttgttttctgcaaaaaagaaaatcaatatcaaagaaaacatggagagaattgtcatggttattattactcgaaccagaaggaataacatctaaacaagtcattttattcttacgtttattgttgatagacacatatacccgcttacattgcctgatgtgttgggttggaccca

SEQ ID NO: 270743 - DNA, 304 bp, Glycine max
  unsure (1)..(304): unsure at all n locations
agcttgcctcanagaggtccaggaaggacaaggcggccgaatgaactagttccgccccggagtacgacagtcaccgctttatgagcgttgtacaccagcagcgcttcgaagccatcaagggatggtcgtttctccgggagcgacgcgtccagctcagggacgacgagtatactgattttcaggaggaaatagggcgccggcggtgggcaccactggttactcctacggccaagtttgatccagaaatagtccttgaattttatgccaatgcttggccaacagaggagggcgtgcgtgacatgag

SEQ ID NO: 270744 - DNA, 503 bp, Glycine max
tgtgtgatgggctgatggttgctgttataggtatcttgatgttagtttataattaatgtaatagttgtttaggtgtcttgtatggttttgcttctcgtgttagttaattaaaccacttttttttgttgttgttgtaactagcattgtttccaaatgtatatgtcagttttacttattttgatgtgtgtaattatacagattaatcaagtatatatccaacacttgagtgcttgagtctataattaaatctatctttgaaaactttgttgtgttgaattaatgttcactttgttttaatttttaattcacgcatgttgtgctcattttgacaatatgatttctatttacattgttaaattacattgttaaatgatatgtgatgtgttatgaaaatttcaattggtattaatatataattatatcaaaatcttttccaataatgatatgtcttttataaagtgtgaaatttccgttgaatctactatgatggacattttttggtg

SEQ ID NO: 270745 - DNA, 351 bp, Glycine max
  unsure (1)..(351): unsure at all n locations
agcttncaaggctctgatccgtatgacttggatcccaatgaaattctctatttataagctataaataaagtgtacctgctgtatcaagaaatgcccacatcacacattattgatataatttttttctaataattatttttatcttcaggtaaaaaaaatacgagaccctttaaatattcctactcttgattatttaagctttagataatgctttntattcagtagttttagatggactcttgcttttcataatataatatagattggagcgacgacctaaaaaagctagttactaatatttctcataagtagttaaatacattatcaaattaatgagaggatatgatttat

SEQ ID NO: 270746 - DNA, 480 bp, Glycine max
actctatcgaacactcaagcttcctaagtcacaagtcaatactttttccgcacattctaaaagcacatgccttagtatcataagagatcggctactactacccatgcttaatggcgttgatcacggctccctcggagtttagggcatgtttgagtaaactatattttttgagaactagatactcccacgaaggggttcaatgaaagcttctacgaaacaaaattaactctcgtttagttcagtattaagtaattggcagacgataacattatataagaagatacataaaaaaatttttacaaatcaactactgaatgtttaattctaattcatagaatagtttattttgttattcttatttgtttctcatagaagtgctgctgaacaactcgccgaacacgactgtagttcttttaaattatttatattgaacaaacagtagataagactcgtcattcggtcattagtcctatattttac

SEQ ID NO: 270747 - DNA, 749 bp, Glycine max
  unsure (1)..(749): unsure at all n locations
gctaaacctacgaacantgcgaaaacagacaccataaacttcgtatgcttcgtgccgaatatttacgcattgatggatacgataaattttgtggtttgtgagaaagcagtagattgagcatgggtgtatctgggacaacatatgtatacgaggcgatggctgaagttctcaagatattggctggcacaacgaggctttcccggagactatggggtttatgcgctggttgagcctaaacatctcggccaactggttgggatgtgaagctactacctgtcccatattatccatacctcacttcgttgagttagaagaaatgaatacctatccatgtatgagtggagactcgtctgatccattcaatctcccattaatcataataattttgttgcgaatattggcagaacgattgtagagtcaaatcttggcaacaccattgaaactgttaatcgatgaatatatctttccataggccataggtaaacatctttaaggccatggctttatcatattcatgcacctttgtacatatacagactgagattgctttatgattatacaaagaaagtgttaacccttagacaattgacactttgcgcgccttggattggcccgtcctgccccgtttatcaatcttgtaaaaatttattctggtatcaggcgacatcccttacctttttggacgttttggcccccgatgctttttcccagcaagaaacggatacgcaatttttgtcttttttcaaaaa

SEQ ID NO: 270748 - DNA, 341 bp, Glycine max
  unsure (1)..(341): unsure at all n locations
agctntatcatcatcagatagtgagccaatgaactcctatctcttctctctgcagacatgttccatctacacaaccgcatccacctccatcacccatccatctgttaaacaagtggcctcagttatcttaagaagggggggttgaattaagatacaaaaactatcccccatttaatttttttaacaattcaacccttattatgaattactctaagaacaattcaaaacaaacttctttaaagcgaaatataaacaataataaataaaagaagtttaagggaagagagaatgtaaactcagtttttatactagttcccttatgttcagataaccttacaact

SEQ ID NO: 270749 - DNA, 603 bp, Glycine max
  unsure (1)..(603): unsure at all n locations
cggagagggtgcttcaatggaggaaaagaaagagagagagaatgagatggaggggggagcacaaaattaaaggaagaaaagaggaaaagaagttgaacttcgaagtttatctcacaagactctcattcatcaaagttacaacaagtgttacacatgcttctatttatagactaggtagcttgcttgagaagctttcttgagaaaacttccttgagaagcttctttgagaaaacttacttgagaagatagagcttagctacacacacccctctaataactaagctcacctccttgagaagcttccttgagaagattcctaaagaagctagagcttagctacacacacttctctaatagctaagctcacctccttaagataagaagctagagcttagctacacaccccctataatagctaagctcacccccattccaaaaatacatgtaaaaacaaaaaatagtccctactacaaagactactcaaaatggcctggaaaatacaaggctaaaaccctatactacaagaatggccaaaatacaaggcccanaagaggaataacctattctaatatttacaaaaaagagtggacccaacctgatgga

SEQ ID NO: 270750 - DNA, 335 bp, Glycine max
  unsure (1)..(335): unsure at all n locations
agcttgtgtattcaaaacacatgtgtgtgtgagtgtgtgatttggattcattctggcaaaatcttaaaattttaaaatacaacacaaacatatcaaatgctttattgcatttggcatctcacttgtacaacccatcgttctgtttgatgcttcaagcattntaaacaagcctgtactatagatcgagctggtttaaaatcattatcaatcattatatgcctaatttggtgttgttagattagaaaccaccaatatatatacaactggtatcaagagcaaagagaagtgcaggtgtgtacagctctgttgtttgccctaactgataaaattccaca

SEQ ID NO: 270751 - DNA, 569 bp, Glycine max
ttgcacgtgtccgtcaaatgtatggaccacatagtggccaaagtagtcattgacaacgaatcttcccttaatgtcatgcctaaaactacattggataagctgccacttgatggatcgcacatgaggccaagctccatggtggtaagggcttttgatggtagttggtgtgacatgagaggggagatcggtctcccaattcaaattgggccacacacgtgccagataacctttcaagtaatggacataaaccccgcctacaattgcctgctaggttgggttggatccattctgttggggtggtcccgtcaatgttgcactagaaattgaagtttgtggtggaaggatggctgattacagtgtcaggggaagaagatatactagtgagttgtccatcttctacgccttatgtgcaagctgtgaaagagtcattggaaacatcttttcaagcattagaaattgtgagcaatgcttatgtggaggcttctccgctgcaaccgcgtctatcttgtgcctccttgatggtggcccaagttatgttgagcgatgggtatgagctcagaatggtaatg

SEQ ID NO: 270752 - DNA, 385 bp, Glycine max
  unsure (1)..(385): unsure at all n locations
agcttagacacaacacacttgcatgcatgcaaattgaaattactactatcaaacacaaagttcaactctagttgccatcaacttaacctattccaaagccctaaacatattcttttcatttatgtgtagatcatagtcttcttttctatattcatgtgtctcactatgagttaaactgggattaactcttaacttattagtcaatttttatgcaactcatttcataattatagcttacttgtttttgaagaccttaccacaattatacttcacaaaagttgtaattggaaatctctttgtaactntggtccatgcataataactctcttaagggtattcataatgaaccgttcttctatagaactagatctatacatgaaaatct

SEQ ID NO: 270753 - DNA, 510 bp, Glycine max
ttattatgcgaaaatcttgtgaaaaatccctattttatgttagatttcgttcaaaaggataaaatgaaagaaattaattgcgttataaatgtcggttattttagtatctaattttacaaaacttactttagtttttgattttgccaaaaaaaaaaactactccttttaatccttttccactattgttttgcatcaaaaaataaggagaataacgttttctaaagttagaaactaaaataaagattttgtataattaagtaccaagtggccaacatgtatcgggagaaaggcaagtggtggaagaaaaggatttttaacccccattttccttccatactagaaacaaacaattaagctagccaggtctgttccacttcatttttgttttcccctaggaaaacccaacttattcggtagctaagaaaattgtagaaaatcaacaccttcatagcggaggaagaataacaggaaatgagattcttaaatttagaacagggaattgtaatatat

SEQ ID NO: 270754 - DNA, 239 bp, Glycine max
agcttgacaggtttaggtgctactactggtagaggcacttcaatttgcttgccagacctcaaggtgatggcactcacattttttggattctgcacagcttgtgaaggcaatttgttagaattttgggactgaacttggttcaactgaatagccatttgcccaatctgatttgtcagactctaaatgaaggctcttgtctcttgctgaaattgcatattctggatggccatttgcctcac

SEQ ID NO: 270755 - DNA, 593 bp, Glycine max
tgcatgattcacattctccccctttgtcaagcaaattcttttttgatatcatcaaaacctgcatgatttacattctccccctttttgatgatgacaaccacctgtaggttaggagcaacaagaaagaaaaaatatctatttgcatatagtttactcccccttggtttttcaatgtttgcttatatgagacaattgaagatttcatatttttcatatataaaaagttgtctcataaaaaatagatattttttcttactattttatcttttatcttttctctccccctttgtcaacatcaaaaacaaatcatgaatagagaggagaaaaaaaatgttaccacttgttgtaatgtatgagaatcaagtgataccaaaaggcattaaaccaatcattcaatattgatcaagcaaaaacaagtatagtaacacatcaatcaaaaacacaatcaaaagcaatcaacaaaacacaataaaaaacaattatcaaagacaatcaaaactcaataaaaaacaatcaacaaccacaattaatcaattataaaatataatcaatcaatcaaactaacaaacattgaatatcaaacaagcaaaaac

SEQ ID NO: 270756 - DNA, 357 bp, Glycine max
agcttgtccttggtttagacatgattggtacatgatttgggacttgtaggattcaatttgggcaaaattagatgagggaaagagtggttttcgaaatctgcactttatgcaaaattttgctgttggaatgtgcagcagaattttgtataagtgcagaaaaatgcttgtgtatggctggttgtgaaaagggtagtacatatgaggttctggacatttgctagcagatcccaacggtcaaaatgtaaacttatgtactagagacttccagtaaaattttcgagtcgatccaacggttaaggaactggaacgaagagaatgttactgcggtaattgaatgtgaaaagctgtgatgttggt

SEQ ID NO: 270757 - DNA, 427 bp, Glycine max
ctcagcttgattgtaacacataactgcgaataattgttgaggtttgatatgtcaacatccattaattggtttgtgaagcttctagaggtcatttctttcttgttactatatatatacttatttggattacaaaatggaagagtagacaaccttctccggctctataattaagtcaaggcaccaaatgcatgcttgaattattatggcatgcttttacaattatctaccaattcagtggacttttatcatagggattaatgagaggaaccttcaatagggagactataaactaaccataattacctgactctcaccaatgactttttttacttataatccccaaaacaaacgggtctataagttatacactcctaaaagatgctttcatactaaaaaggtgcccgacgtggttataatttacatggtt

SEQ ID NO: 270758 - DNA, 355 bp, Glycine max
  unsure (1)..(355): unsure at all n locations
agctngctctaaaattacattgatgtttgtatttatgggaggaggttatatgccatttttgctttaagagtaatgtcccactaaaactaactttccaaatgtttgccttcgcaggaatggccccgaggaagcttgcctcaaagaggtccaggaaggacaaggcggccggaggaactagttccgccccggagtacgacagtcaccgctttaggagcgttgtacaccagcagcgcttcgaagccatcaagggatggtcgtttctccgggagcgacgcgtccagctcagggacgacgagtatactgatttccaggaggaaatatggcgccggcggtgggcaccactggttactcccat

SEQ ID NO: 270759 - DNA, 202 bp, Glycine max
tagcatatgacaccggaatttggggcgaatcctacaggctttttgctgcaaaattccattttggtaggtgcttcggttcttgctaaaagtggtgtttaacattggttgtgtggtaggtgggttttgtggtttgatttagggatggcctttgcggataactgggtggcgggtaacgagatgggttgctcttggctgaaccatg

SEQ ID NO: 270760 - DNA, 224 bp, Glycine max
  unsure (1)..(224): unsure at all n locations
agctngaccaatcccgacccaacccgggcatagtcggtcatgtgagaacctgtgatgtacctaaacaagcgagctcctggcagtcaacagataaaaggaacaaagaccacaaagccaggaggcttgtggtggctggccagctgtgaaacttgattgatatgtgagatatggtctctggtaatcgattaccaagggtgggtaatcgattacaagggctaaaaatg

SEQ ID NO: 270761 - DNA, 361 bp, Glycine max
tcttggggttggcaggctattatagaaagttcattgagggattttctttattggctttgcccctaactaagttgactcgtaagaatgagaagtttgtttggaatgagaagtgtgagcaaagtttccaagagttgaagaggcggttgacgacagctccagtgttaattttgcccgaccctaagagaacatttgaagtgtattgcgatgcaagcgggcaaggcttggggtgtgtgttgatgcatgagggaagagtattggcgtatgcttcacgtcaattacgtcctcatgaagtttactatccgactcatgacttggaactagcagccggggtctttgccttaaagatttggaggcattattt

SEQ ID NO: 270762 - DNA, 408 bp, Glycine max
  unsure (1)..(408): unsure at all n locations
caagcttcacctttggtcctcctcatagttggtgcatgatataacatgctctattttcatctcccactccaagtaggcctncggatcattctttcctttaaatggaggaatgttgagtttaataccatcaattcggttttgtctaggaacaccatcattccctcttctcctcctttcttcttcattatgatctctattctccatttgatccaacctctcatggagcgcatcatctcgttgtttcattaacctcctcaaatgtttcatcaaagcttgcatttggaattgcgaaagccccacttcatcattaggattagtacctgacatctcaaacaaacaaatcaaacgtaacaaaacaattatagttgctgttgaatacctcacccactcaagtgtatcacacaatta

SEQ ID NO: 270763 - DNA, 555 bp, Glycine max
tgcatgatttacattctctccctttctcaagcaaattcttaattcttcttgacatcatcaaaatcttcatgatttacattctccccctttttgatgatgacaaccacctgtaggttaggagcaacaacaaagaaaaaatatctatttgcatatagtttactcccctttggttttgcaatgatttattatatgagacagttgaagatttcatatttttcatatgtaaacaaattgtctcataaacaagatttcatatttttcatatgtaaacaaattgtctcataaacaatagataatttttcttactattttatcttttatctttctctccccctttgtcaacatcaaaaacaaatcatgaatagagaggagaaagatgttaccacttgttgcaatgtatgagaatcaagtgataccaaaagacaataaaacaatcattcaatattatatcaagcaaaacaagtacaataacacatcaatcaaacacaatcaaatacaatcaatcatcaaatatttcaaattaaattaaaaatcaactaactatacacaataatt

SEQ ID NO: 270764 - DNA, 341 bp, Glycine max
  unsure (1)..(341): unsure at all n locations
agctntgattaattaagtagtgagttcactaaaacaatattggtgccatatatattagcctatgtgcgtgttttgacctttttaaaaaattttaagttattataaagcataaaataaaatgaaaattagtaaggaatggactggggaaagagcatggagagaagagagagccaagagtggggtcagagagataaagggggagagtatcattttttttgtaatcaagagtggggttagagagatagtggggccactcacctagattttatgtgtggtcantttttacatatgatgtgacttcaagttgaaaactaagttttctaccgaaatcatataacatt

SEQ ID NO: 270765 - DNA, 628 bp, Glycine max
ctaagctttatatagacttcagagcttcaatatgttgagagatcccatctagttgttgtctaatagttttggcgcttgacacaaggtcgtttattgtgcagagaaagtgaggaccacaaacagtttctgccgcatatcttcaaagaattacaatctgtgaatgtcgcctagtgcttagagctgactttcatcgtatgaatcaaaggaaacattaacaacataggacaaaaggaattaagaatatcaagacaaggcaatttaaatcttccattttgtgcgctatggcacgagtgtcttactgaacatatggacgttactttctgatgattgtttttagtacttgagaatcgagtaattgttccactgcttttgtattgtgagccaagtgcttaagcacttgtcttctcattactggatgttgatgcggtatcatccaatgactgatactttgcctaccgtctagaacctttcagtttatgcttttccgtttgtatcttataaagatatatgaactcgtagcttaagtatgaaatgttaatacactaaaattatactttgttaacataaaaaacatagtaatttagttgtttggtagagtccaatgtaacttggacacaactagacctaa

SEQ ID NO: 270766 - DNA, 323 bp, Glycine max
agcttctaaggaagctacctagtctataaatagaagcatgtgtaacacttgttgtaactttgatgaatgagagtcttgtgagacatacttcaaagttccacttctctccctcttttattccttcaatttcgtgctcccccctccccccctctctttctctccctctttcttttcctccattgaagcatccttccaagcttcttatccaaggctcatcttggtggtgaagctccttcttccatggcttattccctagtggatggcgcctcctctcacctcttctcctttgtctttcgctgcatctccatggtggaaaatcacca

SEQ ID NO: 270767 - DNA, 549 bp, Glycine max
tgcttctacactaggatgggtattttattgaagggtagaccattaaaagttttcaaggctttggataacaaatcagcagatgacaaggaactacaaaaagcaaaaaatgaggttcatgaccaccgcaatctttacttggcaaaggttttttttctcctttgtaactcatgtggagcaggctattgatgcttcatatttaataggactaacatttgcaatgtactgctatattgtaataggagggacttattgttgagggaactacaactgcagaaggggtttcattcatgtcaagcatgaagagacataataggcctttgaaactttacgatcatccataggacacttaggtctattcacaaatcataacatgcaacataatatctgggtggtttattggaaaggaacaaagaaggatatccaacagtttatagccgaatgtgaagtacacaagaaataagcatcaaagatagtacctcaccagtctcctacaaccattgcctatgctcatccaaagtaggagtgacatctccatggatttcatcaatg

SEQ ID NO: 270768 - DNA, 432 bp, Glycine max
  unsure (1)..(432): unsure at all n locations
agcttgcttcagaaaataataacactaaaaaatcaggtcattcactttaaattatgaccaataatattaaagtacattcaagcattcattcatttattcggaaacaattgggagattgaaatttttgctcacgaaaaaaggatacaataaaaaaattactatatacaaatccatgctacctgttcattntcaccatccttcttcgaaagaaataaatgccaaaagcagacagaacatgatacctcatacatggcttcgagccttttgagcaccagatcgaggaatagccaacacagctatgagtccactgataagggctgaaacagctgccacagcaaaggctggtgagtntccttcaccaaatagctgatcccatggtccacttcccagtgacactattatctgttaanacatgataaacatgtaacttag

SEQ ID NO: 270769 - DNA, 443 bp, Glycine max
tccaatccatcttcttctacttcctctctttctccttctcattctcctgtttctcaaccactctctccagcagaaactccacaaaatagaactgctaccacttcaaagagttactttggcctagctactatacttgctctagcaattggaggctgtgcctttatctccctcctagttttgatcatctttgtatgctgtttgaagaggaccaagagtgaaagcagcggcatactgacaggaaaagcaccttgtgctggaaaggctgagatttcaaagggttttgggagtggagtggaagaggctgaaaagaacaagttgttcttctttgaaggttgctcttacaagtttgaccttgaagacttgttaaaggcttcagctgaagttcttggaaaggggagctatggaacaacatataaagctgctttggaggatggaacaacagt

SEQ ID NO: 270770 - DNA, 372 bp, Glycine max
  unsure (1)..(372): unsure at all n locations
agcttctccccaattttctataaatagggtgagaagtgaagtanaaaagggttcagccncttaggcacttctctctctttcgaatttgcttaagaaaattgtttccgtgaagaaaatccaagccgaggcgcttccgtaacgtttccgtgagtgatttcgcgaaggttttcgaccgttcttcgacgttcttcattcattcttcatccgttcttcgttcttcaacgggtaagttttcgaatccgagactttcaattcatttcttgtttgtaagctttcatctttatttcgttcattttcgatttcttttcttccatctttaacgcgctttntaccgttatttaagccgttttctcacctaataaatgataaaat

SEQ ID NO: 270771 - DNA, 648 bp, Glycine max
  unsure (1)..(648): unsure at all n locations
tgcttgtggagcttctatggaggctggatctttgagcttcaatgaggtcctctaatggtggttttccaccatggagatgcagcggaagacaaaggagaagaggtgagaggaggcgccatccattaaggaataagccatggaagaaggagcttcaccaccaagatgagccttggataagaagcttggagaggatgcttcaatggaggaaaagaaagagggagagaaagagagaggagggagcacgaaattgaaggaagaaaaagggagagaagttgaactttgagttgtgtctcataagactctcattcatcaaagttacaacaagtgttacacatgtttctatttatagactatgtagcttccttgagaagctttcttgagaaaacttccttgagaagcttctttgagaaaacttccttgagaagctagatcttagctacacacacccctctaataactaagctcaccttcttgagaagcttcctttganaagattcctaaagaagctagagcttagctacacacacctctctaatagctaagctcaccttcttgagatgagaagctagaacttagctacacaccccctataatagctaagcttacccccatgacaaaatacattgaaataccanaaaagtccatact

SEQ ID NO: 270772 - DNA, 241 bp, Glycine max
agcttctatcctctgtttcaccttgactattataatattattcggtttctccaaagtgagtaatttactttatagagcaaaataattcatcagtctttaatgagaaaaacaatggtcaatattacatatggtgaaatatcaacgattaagattactttactcttactcagttaagaggaaccaaattcattatcataatatatcccgtgtacattatctttcatctacacatttaagtgaa

SEQ ID NO: 270773 - DNA, 410 bp, Glycine max
gcttgttgctacccagaaaaaggcaccagagagtggttggatattttcccaaccgccgcaattactggaccatgctgcccgaatggattgaccgcccgggaaatactagtgggaacaataccgaaatgagaggggaaagcttccccaaatccgaattcagaacaggtccatattttacgaataaggcagaagaattgtgccacacgacagggtgaaaaggaataggggatagctcaatgaacatgtgggaactcatggcatatccagtggcccaaggaagtgccatgccacaattacagacatgtctggccatcaaagacactgataataattacttgatttgctactttgtggatgactagcccctttcaccaaatttgaccttaattgggttaaaaatatgtgctttt

SEQ ID NO: 270774 - DNA, 370 bp, Glycine max
agcttcagaaacacaaagctaaacgatctttcaacatcaattggtatgctccacaacctagagaccttggatctaaggcaaactatggtgcgcaagatgccaagagagattaacaagcttaaaaaactaagacaccttctagcttatgatatgtctaaaggggttgggtatgggcttcaaatggagaacggaattggagacctagaatctctacaaacactacgtgaagtggaaacaaatcatggtggagaagaagtatttaaagagttggaaagacttacacaagtaagggttcttggcttgaccaatgttccagcaggattcagaaatgttctgtactccttgataaacaagttgcagcacatggaga

SEQ ID NO: 270775 - DNA, 547 bp, Glycine max
tgtagaactcttttggcatcatacgcaaaccagactgtcttagatccaatgtttctaggttgtgcaacaagcctattgattttggaagatttcctatgtttaaattcttcaagcttaagtacgtcaaaagggataaatccccaaaattttctgtgagcggaacataattatacagtgaatcaccttcaaaatgaagtacccttaataacctgtagtttgtaggcattctcttctcccaggattctgataattcttcatcactaaaaacatgaagtgatcgaatgtttgagtttacaacacttcccatcaaattgttggaaccggatgctattgttaggcgacgaatcatcccacttcttggcgagttctcacgctcatatgcagaatggcaaagcttaaatcttcatttttctcacggataatttcatgtactacgtcatgaacaccacagcttttaatttttccacccttagtaaatgaagatacttgaaccaaacttctttggatcaacctcatttaaatatttttctgccactttctcttaaag

SEQ ID NO: 270776 - DNA, 287 bp, Glycine max
  unsure (1)..(287): unsure at all n locations
agctttncaatgggtaaaaggctcacattctctttcttctacatcatatccaaacttgaccaaataaataataaagtcactctcactcatagaacgtcatataagtctcatacaattaatatagaacctatatcctaatgtcacattctattagagcgtggtgttcccgcgtcctctagcatgatgttcttcatagctatacacctattcatctgctgctccgaacactagtccaagatcattacaggatccaatcccacaacacacagggagtgagttatgacatt

SEQ ID NO: 270777 - DNA, 603 bp, Glycine max
tgaatgttcataagttctattataagtattatgttactttcttcttcatctaaacaacccatgttcacagcactcttaccaattttacctaatatttaggtactgaacataacttacattatcctcctgctatgttactatcgcttatcattcaaataacttaagagaaattatagtaaattttaacaagtgaaaatatttatatgttatgaaccaattaataattataattaatataacctttaagataagtcgtaattatagttttgatccctaactaatatttaatttttgtatttaactttataataaatatttacttttacgacttttgatgtattaaaaaaattattataactttaaaggtgtattttcaaaaatgaaacaaaatataaaagttataatttttttcacgactttactgtaaaaaaacatgttacaacctttttaaacaatcaaattcaaattttatcctcattattgtaaatttgaaacaaaaattcttgattggccatttggcccctttgggactcatgtggtcccaaaagcctttatcccgcgacagctagaatatatggtccataactgattcttatatttaaa

SEQ ID NO: 270778 - DNA, 372 bp, Glycine max
  unsure (1)..(372): unsure at all n locations
agcttncattcccgagagcatttgttatttaagcatttcagcctttgctttcatgtagcttaagagaaacgtcatttcttctcctttctttcttccaaagccatttctaacgtcccaagcactttctccatcacccgcagccaccattagccaccacaaaccatcattgttctccattgaaaccccacaccgagaggaacccttcaaccgaagcggaatcttccaacttggcttgcgggttcggtagagagcgaaacctaatctgacctttcggtttctttcgaggtaacctgtagaagcaaagcttatggtgaatcanaggtgattcacaggtgttttgatgatcacaatgatgataacaaaagatgatga

SEQ ID NO: 270779 - DNA, 708 bp, Glycine max
tcattaagaggcttcctctagaagcttcctcgtggcttctttgagaagctttcacaagaagcttctttgagaagctacatccttatctatccacccctctattaactaaattaacttccttaaaaataattacggatgaaaataacgcaacaaataatcaaacatcaaacataattactaataatatatagatatatatatatcagggtgttacaactctcccacccttttagaaatttcatcctcgaaatttaccttactcacacaaggatgggtgagcttctcgcatctgaatttctaattcccacatggcatcttctcctgatgcacctccccatatcaccttgaccaacgaaatctctttccctcttacgtgttttgttcgccaatcctcgatcctcaaaggcaatatttcatatgtcaaattctccttcacttgtacatcatccaattcaatcacatgggatggatcacggatatacttacggagttgagacacatgaaagacattgtgaggattagaaagagacggcggtagtgcaattaggtatgccacagggccgactttcttaagaatttggaaaggaccaataaagcgaggtgtgagttttcgggatttcaatgctcgaccaacccccagaccatggagtgactctcaagaatacatgatcaccaacctcgaatccagatctttcctctctatcatga

SEQ ID NO: 270780 - DNA, 251 bp, Glycine max
ttacagccttatcctaatcgattacacaattgtttttaatacaatggtttatttatttagcactctatgctctaatcaattaccatgtgatataatcaatgacttctctttctataagtgttttagaactgatcaagaacactttaatcgattacattgcggatctaatcaattacattgttcttgagacgcttccagtttttgggaagaatattgtaatagatcgaacagataatataattgattacttt

SEQ ID NO: 270781 - DNA, 574 bp, Glycine max
gctttcaaatgactcataagatgatatggcataacattatatattgcttttagaccctcatttaatgttgtatgtctgagattctttcttgcaaaaaacattctcctaggatctttaaaagtcccatgaagaataaatgaagttcacaatctggaagtgttgatcttcatcaaaagacacactctactggtgcaaacttgttatgattgaagaagcgactttgctacggaagtgtagaacacaccaatttatcaacctagactttgcatgaagaaagaacttgcatttaatgcaagcattaaatgctccaatggcctcaagacttcaaacaaagaatagagtgaagaatccacccattgtgagacaacgaatacttgaagatgaaggcttaaaattagaagaaactttgaagaaacacgatacaaacctacttgcaaattatttagtcatttctttcttgtaacaaactttctgtagaattttatatatatactaagctctcagaacaccttgtaaacccttgagagaaaaactaatgagagaatatctatctataagaccatctgatatttgt

SEQ ID NO: 270782 - DNA, 286 bp, Glycine max
agcttcaacattcaattacgagcgtctcgatatataactggactcaatcagacatccgagtaaaaagtaatctgtcgctgaatttgctaagagcttcggtcttcaatttcgagtgtctcgatatattacgagactctatctgacattcgaagtaaaagttatcgtcgcttgaatttgctctgagcttccacattccatttcgagcatcccgatatattacgggactcaatcaaacatccgagtaaaaagttattgtcgtctgaattcgtcagagattaacattcaa

SEQ ID NO: 270783 - DNA, 491 bp, Glycine max
ttgaggaaattcaaacgacaataccttttgacacggatgtcggattgagtcacgcaatatctcgagacgcttgaaattgaataccgaagctttgagcaaattcaaacgacaataactttttactccgatgtgggattgagtcacgtcatatgtccagacgctcgaaatagaatacccgagctctgagcaaattcaaacgacaatacctattgactcggatgtccgattgagtcacgtaatatctcgagacgctcgaaattgaataccgaagctctgaccgaattcaaacgacaataactttttactcggatgtgcgattgagtcccataatatgactagacactcgcgatttgaaataccgaagctatgagcaaattcaaacgacaataacttttatcttggatggccgattgagtcacgccatatgtcaaagacctcgaaaataaataccgaagctttgagaaattcaacgacaatacttttactcggat

SEQ ID NO: 270784 - DNA, 914 bp, Glycine max
  unsure (1)..(914): unsure at all n locations
agtgagcggtgaactctctctacttggaaaaaaacccccccccccttgctaaacgaccaattctcctgaagtccctttagactttttttagagccccaccgggggcactttatgtaaaaaataattttccaactaaggcgccatcatcccaaaaagaaaaaacctttgtaccacccccccacctaaagggtaagaatggttcttgtataccgttgatgatcttttgactatttgagggccaacagtcttccaagaaagaaggcattgcacgataattctcaaattgaccgaccaccgtcttatatgcccttgcatgacacctacctttccccccacttcgcgatagacgcttacctcctccactcatctatccattaaagtctttcctggtccaggtaaatcatttcccaatcaacatatcccctatgctgacccagtagcgctgagcttcgcacgcacaaccttcacctacaattggataacttaactcgtctcgctccttatcttacgctctgcgccctgatcctccttcttattgagtcgtcgcacgtcttatctatcgtccattgccttctttactcctacctcgaactctccgtctctcancacagacatccatgacagtcacacgctacgtactcatcctgtctaccatactcacacctcgatcctttcggacttctcacctcacctattgtcatccattataccggtcgctcatcacagttacataccctatctcatcaatcttcatactatcactatgtcgtcatatctccctatacgctatttacttgcacgctactcgcatctgtcattctagtgtcgctgacttctcgtaccgcntacgctccaatactcgcactctcgcactcctatatcgctctctcctcatcatgcgtctcctgctcctn

SEQ ID NO: 270785 - DNA, 375 bp, Glycine max
  unsure (1)..(375): unsure at all n locations
agcttgtagaacgactagacatgatatatgtcagggtgttggtttggccaatggttcaggtataaaggaatgtcctacattatttccatgacacgtgtgcaacaatgatgattcagaaattttatgcaaaattggtcatgcatgcacctatgtggacactcaagcatcaagttntgtggtcatgtgacactagggctcangattcatttttcctatttaagtcaacccagtgtttccaaaacatgctattttataatttcatgcattcatccgagtccattttgggtgtttggaaaaattttcacagcattcacccttaaggtgtatacacattntntcaacaaaacccttttgtgttttgatcagtgaatcttt

SEQ ID NO: 270786 - DNA, 656 bp, Glycine max
  unsure (1)..(656): unsure at all n locations
tgcctcaaagaggtccaggaaggacaaggcagccgaaggaactagttccgctccggagtatgatagtcaccgctttaggagtgctgtacaccagcagcgcttcgaggccatcaagggatggtcgtttctccgggagcgacgcgtccagctcaggaacgatgagtatactgatttccaggaggaaatagggcgccggcggtgggcaccactggttactcctatggccaagtttgatccagaaatagtccttgagttttatgccaatgcttggccaacagaggagggggtgcgtgacatgagatcctgggtaaggggtcagtggatcccgtttgatgccgacgctatcagccaactcctaggatatccgttggtgttggaagagggccaggaatgtgagtatggccagaggaggaaccggtctgatgggttcgatgaggaggccatcgcccagctgctatgtataccggngcaggattttgcccggactgctgcatggaggcgagtgcgaatcatgcgcaccaacatgaccaccctgacccagatatggatgacggtgctcctcagcaacatcctggccaccgatcataatttccgacctttccatgccgaagtgtcagctggtgtacgccatcctgacacggatgagcatccatgtg

SEQ ID NO: 270787 - DNA, 317 bp, Glycine max
atcattcgtcctattataggtgctaaacgattcacaccaatcatgataataccaaaaagacttcgctcataaataatgggaagagtatctggggagtctattgttaccacattcatgacccaaacatttcaattcttcgagctatagcatatttggaaaccacatacggggaaagatgctcagccaagcgggacatattagcaagtgaaaatctaattcagagtaacaaatcgataagtataacagtgactttagctcaccctctattgatagatctcatatcaatgacttgccgtacattgccatttaattcccat

SEQ ID NO: 270788 - DNA, 927 bp, Glycine max
  unsure (1)..(927): unsure at all n locations
cccctcacatcacatatgcacacgcggntttatctcatcnntaatatagtantnttcnanggtacattancgtagctatntacttatacatnacttntnaccnnnnnnncnnnaagggcgagtgatacctagttacangcgactatatacaacacccaagcattanaagtcctgaatcgatcaactagaagccccggaccagacaaagcttaatctgctaaagggcaaaaaaacctgctagaccctcaatatagccaacgacccaacattactttgatcagcataataaataatgtctactgtcccttaccaaatgagtgcaccaaccatatgcaaaaaacaggtcgctcccttccaaagtgaatgaataaattggatagtgcatacttttttatcacaatctgcaaacaaaaataatgttcaacgtgttctccagccacgattgacttaaaaatattatgcctaaggactggtaataaaaggtttaaaaaggcatttgaacagaacacttccttctccccaatataataacaggcccgctcaactgtgaaactcacttctctcatctgctatagtgtaacatgagaaacttccagcttgtcagaacattaatttgaaaacaacactgttttttgaaaaaagtcacactcttaacaatcaatctataagtttttaaaaaatgtttcccaacccttgtacttaaatcttaaaaatccaccagctgggaaactgtttcacaacccttcttttgtttcctcaaacctacggaaacaaatgttaaataacgtgtttttttatcagtaaaaacctttcaatgctctgggaacaaacatattttaaaacattaaccaacaaggtccatatgcaccatacctctcaaataatcccacgtaacagttctaactaaacgcttagcgcccgacaacg

SEQ ID NO: 270789 - DNA, 323 bp, Glycine max
  unsure (1)..(323): unsure at all n locations
agcttctcagatatggagagctaaatcctctgttggttcttccttgtaggtactagatgtaaatacctttatatctatttaataatgttttatgtgttctttgtgctatcagtacatcattttagtatgcttttgccttgatcacgtagatgcatgctttgttaagatcattcaacagtgggaactagtttgattcttagaacttgataggacagagctagtttatcatattatcaggagggatcggngtatagtaacctagttgtttgtatgtttgtcttaatgcggttgatgcaatcctccctaggaagggaccagtcact

SEQ ID NO: 270790 - DNA, 515 bp, Glycine max
tgaaggtgtgtaacccaccatttttcataatagaacactggtaatgtgtctactatcattgttatcatttctttctccatcattgagggaaccacctgggctaccagatccctccacctttgagcgtattctttgaaagatccgtgccccctcttgcatatgctctatagttgcatcctatctagaaccatatcagaattgtactgatactgcctaacgaaggcaaccattaggtccttccaggaatggactcaggaaggttccaagttagtataccaggtgacagctgccccagcaagactttcttggaagaaatgtatcagcagtttctcatcttttgcgtatgcccccatcttccgacaatacacctttagatggttcttggggcaagtagtccccttgtacatgtcaaagtccggcaccttgaacttgggaatgaccatgtttgggtactaagaacaactcttctatgtcaataaaggcataatctctgcctccttcaacgaccctgagct

SEQ ID NO: 270791 - DNA, 1208 bp, Glycine max
  unsure (1)..(1208): unsure at all n locations
cgggtttgaacctgctcgcactcgcgatcctctagagtcacctgcggcatgcaagcttanccatanatgatatgttcacgttgtggagaggaacaatttccatgcctatatgttggacctcccataacagtatagactccgcgccgcctttcacattcatgatttaattccttctgcacgcggtgttgttattgagaaggaggatctcaccgatctgatgcatagtctcttcatgggaagaagatgatgcaatcctccctcggaagggaccgcccactacacccctgagctcgaggctacgagagaattgggctactactgctgaagaatgccctatgtctatcatgaacctcaagatagaggcttgagctcatggccaattgtgggtcctattatacttggtcatattcaactaggatgtattagttttggtccttgtgtctagggatgcataacgtaagagggtgcccttgaatatgagatnttctttcctttgtatgtaaagcgcatatactatatgttcgactccgtagaatgatcgcctctcacatgcactaagagaacattncacgagtgcagaactacataagttagatgtctcgttgantgcaagtacataaaacctatacgggaggttgtcatctcctccacacaccttggcgcccacgcctaacactctttcttgcatatatgataccgtcctagcgacccacacacttctgtgatcttgcatgtcttgttaaggccgaccactcaacacctctctctatgagattggtcgttctcctccaactgattcatgcgggggagctctgttcacccccaaattgtgaggtgtggtaagcgcggggctgtttcatttttgcttataggtccccttgagagaggcggcttccccttactctcttctaatgaaggtttcgtggcgccaacacggggcgcgttcctccccctcttncntctgtnctnntttcatacgtctcgcttcttgttgtctntgtctccgtcnnacgccgttctttcntttctacgccccatcgactcacttgactctgctcctgtctctcgcttctcgcacccttttncttcnncatttncttttccgcccgcantcaccctccactcctctgctcttctcttctttntntatntnnnnnnngnnnnnnntcccttctcccatgcttcgtgcactctcatctctctcaccc

SEQ ID NO: 270792 - DNA, 376 bp, Glycine max
ctgggcaccacccttttttaaattggctaaaaaggcaaaacctttgttgtacacatctatgtaaacgacacagactctggtgcgaacctccaaaagatatacttacagttctgtgggcttatgaacagggaaattcaaaagagaatgaagggccgaatgaagtgaatgctatggctctgcaatcatctcccactaattatagcggatatttgtgctatgggagaaatacacctaggacatacttgacatgttgctatctgctgaagccacacccatgggtatgactatgtatgctggtctaagcattgctgaggatgaaataggccctgatactctctaaaagatcactgctcctttaccagagagagtatttttt

SEQ ID NO: 270793 - DNA, 261 bp, Glycine max
agcttttgagcaattcagatggtcataacttttcacttggaggtgcgattcacgcgcataatatatcgagatgctcaaaattgaacaacggacgctctcgagaaattaaaatggtcataacgtttcactcagaggtgcgattcaggcgcctaatagatcgagacactcaaaattgaacaacgaaagctctcgagaaattcaaatggtcataacttttcacttggaggtccaattcaagcgcataatatatcgagacgctca

SEQ ID NO: 270794 - DNA, 255 bp, Glycine max
gaaaaagattgtatgaaccagtgaaggtgcaaattgccaagaaaaatgaaagctatgtcaagcaagccccaccagaaaaagaagggaagggtacttgaacacgcgggattgatccttgaacatttgaagacaaatgttttccaagaaggagggaatgatgagaattatgaaactggccaaatacacgcttaaggcccaagtggagaatgaccaacgccccagtggagaaagacaaaacccccccgtggataaaga

SEQ ID NO: 270795 - DNA, 333 bp, Glycine max
  unsure (1)..(333): unsure at all n locations
agcttgcagaanatgtcgatgttgagtgtatactatntttcttccatgtctcaattgtacatagcttgtgtcttcttcatagataacgcatgcacgatggcccttaacactgtatccactcaaattcccgtatgttggaaagtcattaatggtacaaaatagcattgcatgcaacttgaatgtctcatttcgatacccatcaaagacagtaaccctctagtcccaaacctttgtcaagtctttaatcaagggatgagataaacagcgatgctatttcctagttttgttgggctcgatatcatcatagacaacatgatgtatctttacttcatg

SEQ ID NO: 270796 - DNA, 344 bp, Glycine max
caacaaagcttctgcaggaagctacctagtgtatatatagaagcatgtgtaacacttgttgtagctatgatgaatggagagattgtgagacatacttctaagttccacttctctccctcttttattccttcaatttcgggctcccccctctctctttctctacctacttctttggctccattgaagcatgcttgcaagcttcttatccaaaactcattttggtggagaagctccttcttccatggcttattccctagtggagggcggcttctctcacctcttctcctttgtcttctggtgcatctacatggtgaaaaatcaccattgaaggacctcattgaagc

SEQ ID NO: 270797 - DNA, 389 bp, Glycine max
  unsure (1)..(389): unsure at all n locations
agcttcagattacataaagcaaaagaaaatcaaagattcgggaactccaaacatgggagctgaaccagtcccttgtgttatacactagttntagccttctagctgaaataaacacacacaaatattttcaaaattgaaatcaaaacaaaagtcaaaagtagtgattagtgaagcaaagaaggagcttttgtgtagaggcaaaaatccccattaaacttttgcaaaataaacatttgtgctcattttttttgcaaacacataaggctntgatgacaagtctctcaatgaccaaacatcccaaccccatagcatccaaaaattcaagcctttttggtttcccatatgtgtattccttcaaagacaatccaattagagacaccatcagatac

SEQ ID NO: 270798 - DNA, 561 bp, Glycine max
ttgagtttcttcttcatgaatgcaggaagaatcaacaattaactggaaggaactgactcaaacttgtgagatggcagaaaagtgcctaacaacaaactactatggtgcaaaggaaacaactgaggcatttcttccccttcttcaattatccaactcacctatgattgtcaatgtttcctcccaagcaagattgttaaaggtacaatagtggctaaacttttcttttgaaacttgaaatatgattttacactaaagtctcaacattggcaaatttgtgttatgttgatgtttcaagggatagcaaacgaattggttaaaggggtgtttgatgatgctgaaaatcttacagaagagagaatagatgaggtactcaaagtttatcaaagacttaaaagaaggctcacttgaaaacagaggttggccaacctttttgtctgcttatatggtctcaaaagcagccatgaattcatacacaaggattctagccaagaagcaccaaaacctttgcattaattgtgtgtgtcctgggtttgtgaaaacagacataaacagaaacactgg

SEQ ID NO: 270799 - DNA, 304 bp, Glycine max
agcttgtgcttgttttattaaaattcctaggatcatgagcaactaggtgtgtcctacaatgacttgcgaaacaaaaggtgatcaaataacaagcagagatttaaaaggtactatgttgcctcctagtagcgcttctttaacgtcttgagctggacgcctgatgacttgtcgatcacggacctagtactttgcttaccttcggctgtggacttggtcgcctattggtcgaccatgtgtcgtaggcaatactctaacctttttgtggatgagctgaggggctctataggtggcgacggtgcattta

SEQ ID NO: 270800 - DNA, 559 bp, Glycine max
ccaaaacacagcaacacaaaatctaggtgtccaatacccctcaatttaatggattttctaggtttgagaagtgaaattgagaatgggacaaatttgaagccaactctcacctcacacaagtctataacatcaatttaaacttgttcaaactggatttacgcctaaaatttcaccgaatcaaaatttgactcctcaacacccaaatttaccctagaaatggctctttgttcactttggtgatttgtttttctctctagctcagcctaacctttctcacatgttctaaatggcatttcaagctaggattaactcattttaacctccatttaccacaaagtccagatttaaccttccaactctcaaagcctcactctttttccactcataacaccacattctcactttctaaccctaggttaactctacccttcatctctaacagttttccataagcaatttcagcacataaacatcacaagcatcattataaaaaccctaaaactgaatgggtaagcttaactcatccaaacatggcaagttcaacatgcttttcaacaaa

SEQ ID NO: 270801 - DNA, 175 bp, Glycine max
acaagcctattgactttggaagattttctatctttgaattcttgaaaactaagtacgtcgaaagggataaatcccaaaaatttctgtgagcggaacatacttatacagtgaatcgccttcaaaaagaagtacccctaataacctggtgtttgacgcattatcttcagcgaagatt

SEQ ID NO: 270802 - DNA, 561 bp, Glycine max
tcctccgaacttggttgtgttgtcctttcttgcaaaatttttctccttctctctgtgttggttctcctgcgagcggcttctatctccaaatctaatggagctaaattccctcttgaagagttgcctcgcatacaacaagtgctaagcaaagcaccaattaaccagatgaagagaaaataaatcctagctaactattctcaaaatcaatcggggaataaagaataaatgtttacgaactgaactatactatctaagtggaaagaaattccccagcgatggcgcgaaaaacttgttaatcgtgttggctgctcttcggcaagtgtaccgaggcgcacaaataatatattgaaagggtgagaccgagtatcgtatccacaggagatttatttcactcacaaaatgtgtattcagtgagcaaaaatttgtgtacaaccaacagtgaaatgaatatcaagctgggtttttgttctaaaatctagttaagcacacactaaatatctcaagattgagaagtaacaacagtcaagctaaagcgccggggtgctcactcgattatccttg

SEQ ID NO: 270803 - DNA, 344 bp, Glycine max
  unsure (1)..(344): unsure at all n locations
agcttgcatagttatgtcttgtatcgatntaattaattacagccttatcctaatcgattacacaattgtttttaagacaatggtttatttatttagtagtctatgctttaatcaattaccatgtgatataatcaattacttctctttctataagtgttttagaactgatcaagaacactttaatcgattacattgaggatctaatcaattacattgttcttgagaggtttccagtttttgggaagaatattttaattgattgaaaagataatataattgattactttgttgaaataatcgattacattgtgtatttaatccattacaggtggctataactattt

SEQ ID NO: 270804 - DNA, 588 bp, Glycine max
ctcagatgactcataagatgatatggcataacattaagtagtgcatttaagaccttcatttaatattgtatgtctgagattctttcttgcaaaaaacattctcctaggatctttaaaagtccaatgaagaataaatgaagttcacaatctggaagtgttgatcttcatcaaaagacacactctactggtgcaaacttgttatgattgaagaagtgactttgctacggaagtgtagaacacaccaatttatcaacctagactttgcatgaagaaggaacttgcatttaatgcaagcattaaatgctccaatggcctcaagacttcaaacaaagaatagagtgaagaatccacccattgtgagacaacgaatacttgaagatgaaggctaaaaatagaagaaactctgaagaaacacgatacaaacctacttgcaaattatttagtcattctttcttggtaaatactttctggtaaattttatatatatactaagctctcaaacaccttgtaaaccttgagagagaaaactaatgagagatatatctatctattagaccatctgatatttgtcaatgtgcaaacttctaa

SEQ ID NO: 270805 - DNA, 371 bp, Glycine max
  unsure (1)..(371): unsure at all n locations
agcttccaagaatcaagatcaagattcaagactcaagattcaagaatcaagagaagacttaaacaagataagtatgaaaaagttttttcaaaaattgagtagcacatggattnttctcanaacatgtttaccaaagagtttttactctctggtaatccattaccagattattgttatcgattaccagtatgcaaaatggttttcaaaaagctttcaactgaatttacaacgttccaattgatttcaaaaagttgtaatcgattacaatgttttggtaatcgattactagtgtacttgaacgttgaaattcaaattcaaatgtgaagagtcacattctttttacaaaagctttgtgtaatcgattacactga

SEQ ID NO: 270806 - DNA, 609 bp, Glycine max
  unsure (1)..(609): unsure at all n locations
tcaagaataatggcctcaacaaacttcttattcccataaggaaattcaataaataggcctcctatttttaatggagagggttaccactactagaaaacccaaatgcaaattttcattgaggcaatagacttaaacatttgggaagccatagaagttggaccttatgtacccaccatggtggctggaaatacaacaatagagaaacctagagaagagtggtctaaagaagaaagaagaatagtgcagtacaatttaaaggctaaaaacatcattacttctgcctaggaatggatgaatattttagggtgtcaaattgtaagagtgttaaggatatgtgggacactctacaagctacacatgagggaacaattgaggtcaaaagatctaggataaatactctaactcatgagtgaattatttaggatgaacacaaatgaaagtatacaagatatgcagaaaagattcacacatatagntaatcatcttgcatcattaggaagaacttttcaaaacgaggatctcatatataaagtgttaagatgtttaagtagagaatgcaacccaaagtaacagccatcatagaatctagagaattttctattatgtctc

SEQ ID NO: 270807 - DNA, 342 bp, Glycine max
  unsure (1)..(342): unsure at all n locations
agctngcttgtggngcttctatggaggctggatctttgagcttcaatgaggtcctttaatggtgattctccaccatggagatgcagcggaagacaaaggagaagaggtgagaggaggcgccatccactagggaataagccatggaagaaggagcttccaccaccaagatgagccttggataagaagcttggaaggatgcttcaataaaggaaaagaaagagggagagaaagagagaggggggagcacgaaattgaaggaataaaanagggagagaagtggaactttgaagtatgtctcacaagactctcattcattaaagttacaacaagtgttacacatgc

SEQ ID NO: 270808 - DNA, 417 bp, Glycine max
tggaacagatttacggacaacattctcggccggaacatcattccggatagaaatgtttaaatttattatactgagttcgatgagtttaaagtggagttggagaggcgtaatcttcacaaacgcctcaccaacctccaagatggaagcatagacgtggctctagtggtggaattttaagctaatctatatagcccagaggaaccaacccctaaacaagctcgagtaagagaacatctgattaagatcgatgcagatagcttgaatgaatttcttcagactccagtggtgttagagaaggggaaatctttacccacctactctagtgtcataccctaattttgtccggggattattacttgatgacatgcaacctttggataaccggtttgagatacttggcgttctttgatgctcaat

SEQ ID NO: 270809 - DNA, 359 bp, Glycine max
agcttggagaaccaagccaatcagaatgctagacgaaatatagatgggaatagaggtaacaatggcggtaatgacggaccgaggcagaaccgggttgagggagtaaagctcaatgttcctcccttcaaaggtagaagtgatccagatgcctacctggactgggaaatgaagactgagcacatatttgcctgcaatgactacactgatgcgcagaaagtcaagctagcagcagctgaattctccgactatgctcttgtttggtggcataaataccaaagagaaatgttgagagaggaacggcgagaggtatatacatggactgagatgaaaagggtgatgagaataaagtatgtgcccac

SEQ ID NO: 270810 - DNA, 616 bp, Glycine max
tgcgcacacttcttttcgaacggttacttgcacaagacatatttataactaattaaaatgcacccatatacaattaaagcaccttcgatacctagattattctcatgtacttccaaagtgtatttgctacctacatcacacacattttctttgcttgatacacatacatgcatactctaagcactttggctatcaaaaattgcatacgagcacaacttggtatttctcatacctatacatacacaaacttcatgatgaatcttgactatgtacacaataaggtgctacatttgatgctcttttcaagtggttttactacctaaagccgcatgcaaaatgaagtatatttttttttgattactaaaattgtattcaaattaaaatgtatttttgttatgtattttctttacataacatgcgacatatttatagatatttgcgagacgtttgactacaaaacattatatgtgcatacatccaaatattttgctaccatacccaaaagaaaattgcaaaagattttgatcctatttaaacctaccattatgatgagcaaattcttaccatctaggcataggaaaatatgtatcgtgcccatacttatcctggtcaaaaa

SEQ ID NO: 270811 - DNA, 326 bp, Glycine max
agcttaatgattatgtaattttcttcatactgcttctctggaagaaattatgcttagagacaaagatattagaattgtttcactattttacttttatagtaaatgtaatcttattctattgtttgagtaatacactcttaagtgaaacaaaatttgtgtgtaaaactgagggatttgggctgttttctaaagagaaggtatgcattccataataattataagtggtacaagaataatgtttcttccattatatctatgcaagtattttttgtttattggttatcttcagctctctactaatactagtatatgctcgttaaattcaa

SEQ ID NO: 270812 - DNA, 1196 bp, Glycine max
  unsure (1)..(1196): unsure at all n locations
cgcggagnaccggantgtagnatctcgnagggtttgttnttttatatcttctctntacactcgtctatcaccataagntttacganttantctntctnntactcntnatatcancannnnacctnnnanaagggcgntagtganngctgtgatagtcactgcgcatangtaatcgancactcacannnatatttaataccttcttccctctaataattatatggctcttaacctcacatatgtaatatccccttacaggtattctctatcactattccgcttctcctcttattcttaatagggcgaaggtgggattcaactcactttgacaaactccaatactccaacatcttttcctcttcaatcgtcttaagaccttaagaccatcacatgggaacgccattagatatcattgcgaacctctattgtacctccactcgatggttggtgtctgacacattcaatcatatgtaagattacctcacgagaatgaactggtcgctattcaaccaattcaatgattcatctgcacttacccaccttctaaatgctaataaatactctactacattatagcctaaagaaatggactgaatattcttcttggttgtcaacactcttcataatcgataaaggatattgtgtggacacatcttaatatccatccacattatcggacacacattgaatgtgaccaacgatcctacgaatatacaactccttacctcactagttgaactaatttatagatctaacacctcactgcaatgttcccaacgaccttgctcaaactccattcatcacattatatcatgatacattctcttgttctaatttaggaaaacaatctctcttacacgaaggatcttcatatttaaaaacagcttaccaattctgtgccttctctactagcctttcccaaatggctaaacgcccaccttctgaactcatgaaaagttatctctttactggcgtcgtagataactttaatctgggaacaattctcacgtacacngtcaaggggacctatccaccggaattcaatcttcctatctatgaacaactattatacataggataaaacgngtccagcgttccctctcaccgccataaacctttcattcctagactactaacgtgagcataacactacactcactcctacttctaaataactatagcaccagctagactct

SEQ ID NO: 270813 - DNA, 292 bp, Glycine max
agcttggcgggttcaggtgcacgtgctgctaatggtggaggcaattgaatttgcttgccagacctcaaggtgatggcactcacatttctcggattctgcacagtttgtgaaggcaatttgtcagaattttgggactgagcttggttcatttgagtagccatctgccccatctgatttgtcagactctgaatggaggctcttgtctcttgctgaaattgcatattctggatggtcatttgcctcactaactcttctaggaaggttgaggatgagcctcacgtgcttgttgtca

SEQ ID NO: 270814 - DNA, 592 bp, Glycine max
tggttatctccttcttcactacatcaagaatcaccgggttgagtcttctctgtggctgtcttactggtttagctccatcctctaaatttattcgatgcatacatgtggatgggctaataccaggaatgtccgccagggtccagcctatagccttcttatgcttcttgagaactgacaacaacttttcctcttgctcatcagcaagggaggcagatataatcactggaaaactcttgctatcatccaagtaagcgtattttaaatttgatggcagaagcttcaattctggtgtggtcggctggacagtggtagaaggagatggtttctcagcctttacctcataaagaaagtcagaggtatgtgtacttcctgaaacatggttagtcctatctgactctataaaatcaatctcaagaggtaaaacaccaccaccaggcatgcaatcaatatcactctcagattcactctcagcatcaaattcagacatatgatcaagtacaatttcagactccatgcatgatgagtgagaggcatgcatattttaataaagatcagccatgtattcctcaacaacatggtcaattttttcagc

SEQ ID NO: 270815 - DNA, 347 bp, Glycine max
  unsure (1)..(347): unsure at all n locations
agctntaaccaattcaggataaataggcaattgtaatgacataaaaggtagaagacctaagtttctcatctacatgttntgagattgtagattttaatcggtgaaatcaaaagaaaaatgaaaaagaagaagattgcactttacgggagtcaatttgatgaagaaatgagtgagatacgaaggtttggaggtttgggaatggaggtaccgcgcaaggaggaaggggctgcgcaggagattctgaaaaacgtgatatttatagagcaggacgcgtggtaatcgattacaagtaattgtaatcgattacaggaggaggcagcctactggtaatcgattacatgaatact

SEQ ID NO: 270816 - DNA, 581 bp, Glycine max
tttatgtgaaaagatgtgactcttcacatttgaatttgaatttcaacgttcaaaggcactggtaatcgattaccaaaacattgtaatcgattatagctttttgaaaataattggaacgttgtaaattcaatttgaaaactttttcaaatccattttgctactggtaatcgattacaacaatctggtaatcgattaccagagagtaaaaaactctttggtaaacatgttttgagaaaaccatgtgctattcaatttttgagaaaaccttttcatacttatcttgattaagccttctcttgattcttgaatcttgagtcttgaatcttgatcttgattgttgagatcttgaatcttgaatcttgattcatgactctaaactttcttcttgagtcttgaattcttcttgattcttatcttgaactctttaactgttcttgattcacctttgattcacttaagttgttctttgattgatctttgagctttttgtcatcacctttgtcatcatcttttgttatcatcaaaacacctttgaatcacctttgattcaccatgaagctctgcttcaacacttttctcac

SEQ ID NO: 270817 - DNA, 349 bp, Glycine max
  unsure (1)..(349): unsure at all n locations
agctntataagtgcgggtctgggagacgaatgtcaagtgttcgcgatatgtggagatgatgttccaagtacttcggatttggtccgaccatgccctcctgatttccagctgggaaattggcgagtggaggaacgccccggcatttacgcaacaagcataatgtaaaccttcacggttntaaaagctctatagctgggcctaggctntagagttttctttatggtaaggctttgtgtcttttgtttttgaatttataatacaaggatctttcttcatctgttcctggtctctacccattctcattcatttgcatgtctacttctttttctgaaacggcagattctatgac

SEQ ID NO: 270818 - DNA, 436 bp, Glycine max
cgatccgtgaaattccgtaatgaggcagaagtcgaaaagaggtgtttttgcgcaatccgtgagtttccgtaacttcttggaaagctaaaaaagagtaaatacataatccgtaaggattcgtagccttgcggaagggaaataagtatcgttacgaaattcttaaagtttcgtaacgatacgaacaagaattaccaacaaaatagaagggggggtgcatttagtaaaaaaggggtgctaatagtaaccaggcccacttgggccctccaaaagattccttcacaaggctggtgcttatggaggaagcaaccttgctcgcctgagcgagttgggcggcaagcttcttcccaattttgctataaatagggggagaagtgaataagaaaagggttcagccccttatgcacttctctctctctccaaattgctgaggaaaatt

SEQ ID NO: 270819 - DNA, 385 bp, Glycine max
agcttctggtgggacatcttgacttgctttccaatctgacattcaccacagattctgccttcttctattttcagattgggaatgcctctaacagcacctttggtaatgattttcttcatgcctcttaagtgcagatgcccaaatctttgatgccatattctgacttcatcttctttggagaatagacatgtggaggagtaactggtttcttgaggtgtccataggtaacagttgtcctttgatctgctgcccttcattagaacttcactcttttcatttgtcaccaagcattctgactgtgtgaagtatacattaaatccttcatcacacagctgactgatgctgatcaagtttgcagtcagtcccttcaccatcagtactttgt

SEQ ID NO: 270820 - DNA, 672 bp, Glycine max
  unsure (1)..(672): unsure at all n locations
tataacattgctagtgctatttattgaacaaacattaagcatctaaagaagttccaacataactgcaataaacccaaacacaaaacaccaaatttctcgaaaccaaaccaaatgaaatttcgaaaaccatacacacataaaaggattgattggaatttgtgtgttttattgatggaatttgtggtagacatttgcagatcatgattaagactagaggattaggccatgtgttacgtaggattatggctagaagtctggggagaggggatggtgatgattctgacggtgctccccaacgctgaaggccgaccgcatcagcacgcaggcgacgagtacttgtcattgttgacgatgttgtgcctgcagtacccacggactcgcctgcgaactcgcctacgatactataggcagaggctgctgtagctggggataagcccatggtagatgcagatgcacaagacatcggtccagagacaaacacacagaatattggtgcacaagatgctgcanatgagcctgagggaattcctggtggacccaggaacccatcagtgcttacagagtatgctgaccatgttgcggccagtgtatggtctggacaggtatttataatattcaagtctgataagtattctttcttattgagtntttggtactgaatgacattatttg

SEQ ID NO: 270821 - DNA, 363 bp, Glycine max
  unsure (1)..(363): unsure at all n locations
agcttgtgactcttgacaatntcataaaactagttacttaanaagttgtgactttagaaaaaatcttcataaataagtcacttgaagaattgtgacttttggaaatatatttttcgaaattagtcactggtaatcgattaccattaaggtgtaatcgattacacatcaacagatgcaactctttattttgaattttgaaaattaaaatgtttagaagctctggtaatcgattacaagtattttgtaatcgattacacaagtttaaaatactttaaaactgtntaaacataagttataactcttgaaatttgaaatattaccgttntaagacactcggaatcgattactgccttctggtaatcg

SEQ ID NO: 270822 - DNA, 591 bp, Glycine max
  unsure (1)..(591): unsure at all n locations
tatgatgagtgatagtttctttaatattagtgcttaattattaatttcctagactctcactttcttttccttgtgtggtgttggcagaaatatgattcatattttacccaaatcagttcccaagattcaaaaatggtcagaggtgactttggctccttgcgtgattatgatttctgggataagaaatcccgtcaggatataaatcaaaagagaaatttttagagttttaccaatcctttgcatcacaagaactcttccctggatttgctaacagatataaataccaaatcccaatttctttctctccatgctcacaccttcatttcaagcatccatctaagattacccgataagaagtaactctcaattcctggtacatattggccatctatcttcttataattatgttttcacttatcttttttatcttttgctttgctaacgacaatagagacgaattcttcataacccangataagagagtggcttctaaatcagacgaaacaaccccgttttaatattagtagcttcgcattccattttatctgttctgctctttaattaccaaacaaccaaccccccnccccccca

SEQ ID NO: 270823 - DNA, 349 bp, Glycine max
gcttattggattatggcgcacccgtcatatgtggtactatgtggcgatcgggcgatggtgcaaatcaactcttccatttccacaagtcaggcataagcacaccatccccagttgcccacctttaaattgagctcacgcactcctacgtagcccttatcctcgttcctttcagcaacgggtccccatcaacctctcatagctttcacaatatccaaaaaattcaatgtcatttgtcatgaaactaccctaaaccaagaaaacaaagtagaggcagaaaactctgcccaaaactcattcaaattccacagtttttcctactcacatgccccagtaacattctcttctgtct

SEQ ID NO: 270824 - DNA, 560 bp, Glycine max
cctaaaatattggacatggcagtttgttgtcgtccgtcctgtatgttctgttttgatgattgcattacagctacgcggctgtatccaaattggttgagctgggcattcaccatcgttcttaacatatctgtgtcgttagccttgtattctctggtggccttttaccatttgtttgctaaagaactggcaccacacaaacctctagctaaattcttgtgcatcaaaggaattgttttcttctactcttggtaggtaagctcatacagaaaaaaaaaacctatttttacatatagatcaatacaaataattggactagttgatggttctcaaccatttttcctttggttttattttttattttttttcatattgcttttacttatttattttggtgtagccaacaagacaataaactcaatgtaggaaatttcaacctaaaaaagcagagaggatcataatgctttgggggttcatgccaaggacatatgtcatgagaagacaaagcataattttgaaatggcacaggagagcataagataggtacgtccacacttgacagt

SEQ ID NO: 270825 - DNA, 365 bp, Glycine max
agctttgagccaaaatcctgactcaccatataccttgtctccaggtgagaatgtcaatccttaccctcggaagcaaaaaaaagaatagaagggaaatttccaatcaaagaataagagaaggaaaatttccaatgaaagctaataaaagaaaagaaggaaaattccccaatcaaagagtgggagaaagcaaaaagataagaaaggaaattcccaatctcagaatgggagaaagtaattgaggatgaataataaggcatgaaagcttctgatcagggatcgaaggaaaaacagaagaaatgtgcagagaggtctttggaccggacaatatctgaacaatacagaattgtcaccgaatgaacaaaaaa

SEQ ID NO: 270826 - DNA, 343 bp, Glycine max
cttaactcggaggtccgattcaagcgcataatatatcgagacgctttttattatccaacggaagctctcgagaaattcaaatggccataacttttaactcggaaggcggattcaggcgcgtaatatatcgagacgctcgaaattgaacaacggaagctctcgagaaaatcaaatggtcataacttttcacacagaggtctgattcacgcgcataatatatcgagacccctctaatttaacaacggaagctctcgagaaataccaaaggtcataactgttcactgggatgtccgagtcaggcgcataatatattgagacgcttcaaatagaacaacggaagctc

SEQ ID NO: 270827 - DNA, 365 bp, Glycine max
  unsure (1)..(365): unsure at all n locations
agcttcaggctgttcaattgcttcaaatnngtgcacataagggcaaaggtatgtgtggtggtcggcagaggagcataaaccacagagtctggcaacaagtgcagatnttttattcatggtcagttgggttaccaagntaaccaatgcatctagtttaccttcaagcttcttagtctcagctgatgaagatgaattcgtggctacttcatgcactcctctaatgacaatagcatcacttctggcactaaattgctgggagtttgaagccatcttctcaattaaatttctggcttcaacaagagtcatgtctccaagggatccaccactggtagcatctatcatacttttctccatgttactaagtc

SEQ ID NO: 270828 - DNA, 582 bp, Glycine max
tcgaatgcactattcaatggagaagacaagaacatcttcagactgattaacacttgcacagtggccaaagatgcatgggagatcctgaaaatcactcatgaaggaaccttcaaagtaaagatgtccacattgcaactcctggctacaaaaatcgaaaatctgaagatgaaggaggaagagtgtattcatgacttccacatgaacattcttgaaattgccaatgcttgcactgccttgggagagaggataacagatgaaaagctggtgagaaagatcctcacatccttgcctaagagatttgacatgaaagtcactgcactagaggaggcccaagacatttgcaacatgagagttgatgaactcattggttctcttcaaacctttgagctacgactctcggatagggctgaaaagaagagcaagaatctaactctcgtgtccaatgatgaaggagaagaagatgagtatgacctggatactgatgaatgtctgaccaatgcagttgtgctccttgaaagcagttcaacaaagtgctcaacagaatggacaagaagcagaaaccacatgtccagaacatccctt

SEQ ID NO: 270829 - DNA, 1181 bp, Glycine max
  unsure (1)..(1181): unsure at all n locations
tcactactcancntaccatatgcacactntntacatnatttatatntggctactgcgccactaaccctacacaactgaggggatttgtancctgacgcactctcgacacgagatcattaaaaccgacctgcagccttcatgcttatgttgggccaactatgatgtataatggttccgcgaaaactcctgaaagctaccagaaagctctgtgcgtgaaggaaaattccaccaccatagctacatgtctttgaagcataagggcacggctccacctgttctcttatacaactcggaactatgagacgtccacgacctacaacgtaagtgtgtaatgccttaaaggatttcagtccacaggcctgtttattcctctntcctataccaccaatatcattgttgctcgttcaacacgtcattatattcacatcaatgctaccaatgtccctaagacttcacttagaatggaagtatctctggggaataaagatgtggaggggaacaaaatccgcgctctttacactcccgccaacatcaaaactcgcattaaacgtgttctttagagaaaataaagaacgagtaactataatacctcaaccgttcaacaaaatatatttggtgggctggtcacagtgataactatagccgctctcaactactactagacctcccgctcacgccatttatcaccccgtccccatccgcgcatacggtatcaacatataactctctctcactttgatggaactggggagcgttatttaactttgacaagcaatacacctcatgtccctccacaccgcgcacgatgcgtagaacgcttccacaactggccaaccccccctgtaattgtctctttcactattcatgagcgacgctccacaatgaacgatcacggcgtatcatgttcccttagtaccggtattctccactgtccgcagtgaacgcatacagactctatactacacatcttatacttctcttcacattaatgacaatgccgagcacagcactcctttcacacttgtaacgagcgtacaatcgtctcccctgacatgcgctccttcaatcgtaattcagcttcacataatatatgataccaacccctactcccgtactaatgtgtgcaccacttattatactgcaccttactgtcgcgctgactaccgtgccctncaccgccg

SEQ ID NO: 270830 - DNA, 343 bp, Glycine max
cctctaactacaaaagctaaaaattatttacaaactcctccttctatgtgcatacagaacaaacaaattattcgctcgttcttttgcttccacaacaataccaactatataatatattttctattaaacatctttattcaattttctccttcatctatcaatcatagtaaattacatatatatctctctttaactgaattcttatactttcctttttgcacaaatgaatgcaaaagtatattttattcgaccacatacattttctttattaaatacatgaggacaattcactgccatttataaatggactgttcctttcaataagactatctacattcccatt

SEQ ID NO: 270831 - DNA, 265 bp, Glycine max
  unsure (1)..(265): unsure at all n locations
aatcattttattagattatgtaacaactaccaactaactttaattaaaataagttttattctctttatatatcaaaggttggacgtgttggcatggcatcattaattggtgaaagaagattctctttctctctctggctatatatatatgnatatatatggatcaagcttgcactatggtttataggcggacaaaataatgtgattaaatgaataactgcagtataatttcaaggatcaacctagcacaaagcttgaaaatcgac

SEQ ID NO: 270832 - DNA, 607 bp, Glycine max
ttgacattatgatacatggtgcctcctcattgttgaatggagcagcttcaaaattgataatggacaagaaagttctcagaaattttactctaccaacaacatcagggttgtccaagaatgaagaattgaatttggcaaatgacaaatgacgagtcttagtattgatctttgtttctttcccaagttcttctgatctaaaataaaaatctccaccgagtgacgttgctagatcatgcatgaggtcatgcatcacaaaccatttccgatcagaccaactacttctatttgtacttgaacgttggaaaaatgatctcgaaaccaaatcatcaaaatactcatgaccaacctcttctaaagtcctaccatttcttggtttcttcaaaagatcttcggccatccacaacaagattaattcatttttttcaaactcgtaatcttgtggatacaacgaacaataaacaaagcacccgtttaaatgtggagggagatcatgataactaagtctcagtgctggaataactttacactcactttcagaaagttcccacatgtcactattcagaatattattccaatccccaatgtcatgctttcttctcaacatgcc

SEQ ID NO: 270833 - DNA, 312 bp, Glycine max
agcttatatctctcccggataacatccatcacctcaccgcacttgaaaggttgagaattgtcggtgtcctgaactgtgtagaaaatgccagccacatgtcggtgagttttggtccaaaatatcacatatcaaacacatcttcattgaagaaccagaaaagctggaggaagaataagacgaataggaatgatttgttgacacataagcgctgaagggcctttggcaacccctggacgtggatcaagaatggtcaaacgtgaaaaaaagaggagaccatgatgtttgattatcgtggtggacgtgattcatgta

SEQ ID NO: 270834 - DNA, 629 bp, Glycine max
ttccaggtggacaagagcataattgattatcttcaaaagcaatcttggtacgactacaataactaatttgggagtatggacgagcatttcacactagctagttactgtataattgatcactttattgtttcaatcaccccatacaacagacctaataaataaaatttaatgtatgggggttattaatttttatacataatatttgttctgtttggagtttgatttgatttaatacatattgcttgagtttaattaataaaagaacctattcttgctggagtttctgtttgcgagtttaatagactgtttgtgtgtcaacagtgagtgctatgcatcttaatatgttaattactttccctaagtctaccaccacgggcctatttaggtcgccccctattttgtgcccataaataagacttgtttctttgtgtgctaacaatctaattaattctaaggttcatcataccaacgagtaacgacacccaatgactacatacatttgtcaacctcacgagtgtcattgcccgtcaaggacttgatgcatggcttcatggctcactaattatgcaaagttcatgtctcctgctgaagacaccactcatggaataagaaagaatatatatgatact

SEQ ID NO: 270835 - DNA, 385 bp, Glycine max
  unsure (1)..(385): unsure at all n locations
gatgcttaagttggtgataacagggttcaaaccaacatcacaatatgtgtgaacttacttgggcaatctcaaatccacgtccttcgccaagtatgatgttttttgcgggcacacaaacattttcaaatgttacttctgcatgcccatgcggtgcattatcaaagccaaacactggcaatggtctctttatgtgaacgccaggagtctggacatccactaagatcatagaatgcttgttatgcttcactgcattgaagtcagttttcccctgtccatatngttttatcagtctctggtctctattgacatgaacggcacatggactgctaatgcaataactttcaaccaatactcaccatgactatcagaattctacattttggat

SEQ ID NO: 270836 - DNA, 369 bp, Glycine max
gggaccacttggactgggagttaaccaccgcatcatgctttatccctctaattcgggcataatatacccctgagaccatcaatgtacagttactacttacaatatgatcgaattacctaccaaccactctaaaaatttcttggttaacacctaaacagttagttgaaaggcaaatgactgtatacaacttggtagaatacataatggagaacggtcaaggtgttatctcaaatctcgacgaaaaaaacctgtgaaataaaaattatctattattgtccaatcataaattatcaattcattaatgtttattataattatcttcagaggcatattaataatcatttattaggattctttgagaatctaata

SEQ ID NO: 270837 - DNA, 307 bp, Glycine max
tgacaatcctgagagtcactccatcgccagttttcatcagcccaaatgccaccgcaagcttctcactgtggtacctgagggcatactccctttcttccccttccaactcgtgcatcgcggactctggcacgggtgcatagcctgcatccttgcaccttcatatcaactcatccaagaaacaataaatctcattagtctcacggtgagacttgtcacccatgctaaacagataacttctattgtcaacatctatggtgctataacccacttgcttctaatgcctctttggatatcacattctaccgat

SEQ ID NO: 270838 - DNA, 553 bp, Glycine max
  unsure (1)..(553): unsure at all n locations
tactcttgcttgcaaaggcccgtccttgatatttgttttcaaaaacgatggaagttctttatggttaagctaatgcttggagaaaaataagatcttcgtaagacccaaatagtgtgggctgttggtgatttttagtactcagcttactatccagaaaacctaaaaggttcttcttataaataatataaaaaaaagtctaggaccatcatattttatatattttttaaatgaaataactttctgtgtccacttgangagtgtcatctatccatctaaatcaatatttccttttgcttgctcttataatagcgttatgtctaattgtaacttatgatatagtataatataatttaactaggatgctctgtcccctttcccttgctctattatgtttatctttatcttattattcggtatttttgcctttatttcttgcttgttttattcttacctctttattattagattccactcagtacttctttgatattaattaaatttaaatttctaccataaatattatgtatagtttacattttcgatttttttccaa

SEQ ID NO: 270839 - DNA, 386 bp, Glycine max
  unsure (1)..(386): unsure at all n locations
tcacctgcggcatgcaagctntctccactaagttgcctgatgccaganatgtcttttctaatggcagtggtcctagatgcagggaagaatttctccaagaacaccctcttaaggtcatcccatctaaaaatggacctgngagcaaggtagtatagccaatcttttgccactccctccagagaatgaggaaaagactttagaaagatatgatcttcctggacatcagggggcttcatggtggaacaaacaatatgaaactccttgtgatgcttaagaagatcttcacctgcaagaccatgaaacttgngcagcaaatgtattaatccagtcttgagaacatatggaacaccctcattacgatattgaatgcacaagctttcataagt

SEQ ID NO: 270840 - DNA, 644 bp, Glycine max
agcttaatctaagtggttgaggggcctttgccatgtataatgtttgagcctgcagaaacacattgctgggaagggtgacctcagttttttaaacagcatttgtcttaccctgaaagggggcatgtacttggaaatgattttttcccaatattctcacactttacggaggaaggttggctccattcctaaggctgagcaatttaggaatatgttgccatatgaaatgtctaaaatacttattcgtgccatgttataaaaaaacaatcggtttatcaatgttcagggtgaaatgtctaaaatacttattcgtgccatgttatcaaaaaacaattgttgcatcaatgttcacaatcctcaaccaccattggcctctgtccgctacctccagttgccaaaattcagccatcttgttcctattgatgattgtcaatggctgatgacttcagtcattgtcgatgattgccagcatttgactatccttagctagtgacagtgggtgagggtgactatggccaccactgctgttcactgaaatccagccgttttatgcacatgttaataattaatgatggcctgcaacttcatgtgagtgtataactcctttctgttttgaattacctagtgtaactatagtagctaactct

SEQ ID NO: 270841 - DNA, 361 bp, Glycine max
  unsure (1)..(361): unsure at all n locations
agcttcatggtgaatcanaggtgttttgatgataacaatgatgataacaaaagatgaagacaaaggtgatgaanaaaagctcaaaaggtcaatcaaagaacaactcangtgaatcaaagatcaatcaaagaacaactcaagtgaatcaagaacaatttaagagttcaagataagaatcaagaagaattcaagactcaagaagaaagtttagagtcaagaatcaagattcaaggttcaagatctcaagaatcaagatcaagattcaagactcaagattcaagaatcaagagaaggcttaatcaagataagtatgaaaagtttttctcagaaattgagtagcacatgaattttctcataacat

SEQ ID NO: 270842 - DNA, 619 bp, Glycine max
cattgcaaagcagatatcgggtctgctattgcataagtatctcagatatccaatcaacttcctgaactcagtagcatcaaccagttcctctttaggatccttctccaacttaagccctggttcaattggtgttacagagggattgcaattcagcataccaagtttctttaagacctcctgtgcatatctgctttggtgcatgagcactcacttctgtacttggttaaattctaatccaaggaaatgtgataatttccctagatcagtcatcccaaactcagccatcatgaactgcttgaaaatatgaatctccttttcactgctgccagtcacaagcagatcatctacatatagacagaccagcagtaaattggttgaacaattggcccttatatacaccacatgctcactcttgcatttactaaagttttgtttggctaagactccatcaatcctcatgttccaggcccttggtggctgttttaaaccatacagggcttttctgatccagtacaccttgtcttcatgctttttcttctcaaagcctggtcactgtaatatgtatacctcctcttctagataaccattcaagaaagctgacttaacatccatatggtac

SEQ ID NO: 270843 - DNA, 295 bp, Glycine max
agcttgtagagaagcctatcagatgtctcattatatgctctgggaggatctacaagctgcttggaagcatctatcatgctatgatcagagcatcttgaggtcgagagagcatatgggaatgcgtaatccactgaccgacgacatttcgacatacctatctccaatgcttagaacccacctatagactcctgagttagcctatatataatctacaagtcgtcgtacattactagagcacgattgtaggatctaggtgccagaatatatgtaattttgtataccaacattctatctt

SEQ ID NO: 270844 - DNA, 403 bp, Glycine max
tcgcacagaaggtcttcgccagtgaaaggatcaatgtgggttcgaatagaggcacatttgatcgtcctacctagacgactgaaaaaactggggcataatacgaaggtgagaaagaaggagaagcccgtgctgaggacgacaatcctatactggcaagttacccaccagcccaacaatgttattactcaatcaataacaaacactctccttacccgacaaccggttattcacaaagggcatacctaagtcaaccacttagattgtcttccgcacttccaatgacgaagaccacgcttatcacatgcagattaaagcactcgcgaaaatgaattttgcatcacaaagcgctgatgggtcacaccacacttcgttggcatatgctaaacttggtcccgtatctact

SEQ ID NO: 270845 - DNA, 398 bp, Glycine max
  unsure (1)..(398): unsure at all n locations
ttgaagccttaagtatagaagcttgaagaaatgttttgtatgaatgttttggctttttacatagtctaacctcgcgcttgagtggcatcttgtatctggtctgctattcttggnntgntgcatcttnggtaccgtttgaatatatgttttgggcatcatgcatcnatnnatagtgtntgtgaaagaaaaagtttctttaagttagaaaattttttcttagaggccaaaaactctctgttttaatcgattacagagttgtcgtaatcaattacaacaagttgtttgaggcttaaagagttaagtctcatcagtttaatcgattacagtagtattttaatcgattgcactgttcgttgagacaatgactgatttatttangattctttattttaatcata

SEQ ID NO: 270846 - DNA, 636 bp, Glycine max
  unsure (1)..(636): unsure at all n locations
ccttatgccaagaaaagtactgtgtagaattgattaagaagtttaacatggaaaagtgcaaggaagcatcaacaccaatggcaacatccacttatcttgacttggataaaaaaaggtaaattggtagatgagtcaaagtacagaggtgatgtcgctccattggtagattgggcacatctagtccggtatcgcatgaataaggcatagtgattaaatgctcctttgccctatcctcacttagttactatgttccttcaacattttaacatccctcttaattctgaaccttatgttccaatcaaaagatctttcttgatcggtgctgctgtggttgcctcctttggttaccgcaaagagcgtgatggctcttgggtaaaaaagggtgctcaaccaaatgatgatgaaggacacttaccgngtgaaggtgacacttctcttcttcagagtattttaaacaggtttgatggacttcaaacctatgttggtgagaggtttgactccttggaacgtcaagtggacacacgattcgaggagatgatctcaatgattggcaaggttgaagaagatgtcaccattattcgcgactactttgatttaccttcacccacaccatcacgttagacattactattatta

SEQ ID NO: 270847 - DNA, 345 bp, Glycine max
  unsure (1)..(345): unsure at all n locations
atccttagagtcacctgccgctgcagcttaacaatcaatttcgagcgtctcgttatattactggactcaatcagacatccaagtaaaaagttatcatcgtttgatatggctcaaagcttcaacattcaatntcgaacgactcgatatatgatgggactcaatcagacatccgagtaaaaagttattgtccttcgaaatggctcagagattccacattcaatttcgagcgtctcaatatattacgggactcaatcagacatccgagaaaaaagttatttttcgtttgatttgctcaaaggttcaacattcaatatcgagcggtttgatatattacgggactctatc

SEQ ID NO: 270848 - DNA, 495 bp, Glycine max
tagatccaattcaaacgacaataactttttactcggatgtctgattgagtcccgcaacatatcgagacgctcgaaattgaatgttgaaactctgagctagttcaaacgacaataactttttactcggatgtctgattgagtcccatcatatatcgagacgctcgaaattgaatgttgaagctctgagccaattcaaacaacaataactttttactccgatgtctgattgagtcccgtaatatatcgagacgctcgaaattgaatgttgaatctctgagccaattcaaacgacaataactttttactcggatgtctgattgagtcccgtaacatatcgagacgctcgaaattgaatgttgaagctctgagccaattcatacgacaataactttctactcggatgtgtgattgagccccgcaatataacgagaccgctcgaaattgaatgtggaagctctgagcaatatcaaacgacaattaaccttttactcggat

SEQ ID NO: 270849 - DNA, 351 bp, Glycine max
  unsure (1)..(351): unsure at all n locations
agctnttntcagtcgtttgtaaaggtgattgggtgttataaagcggcgatgcctactgtagactgtttttctcccatgattaagttgtatgtaacttgtgttttcttcacagatggggcatgcatgatgacccttaacactgcaaccgctgagattcccatatgctggaaagtcattaatggtacaaaagagcattgcacacatttcaaaggtctccttgcgaaacgcatgatacactacaaccccctcgtcccacaactttctcagatcttcaaccaacggacttagataaacatcaatgtcatttcctggttgtcttgggcccgatatcatcatagacaatatcatgta

SEQ ID NO: 270850 - DNA, 686 bp, Glycine max
ttcacaatgtcaaatcaattcaatcccatttgtcatgaaactaccttaaaaaaaatagagtggaggcataaatctttacacaagattcattcgaattccacagagttttcctattcacatacctcagtaacatcctctttgttccgattcgttaaccattggattgccttaaaaatttaacagggggtttcctcatacagaaatctaagttttgaccgttgggatctgctaaagaatgtctagaacacgagatatactgcctttccagtgacagcaggaactagcactgcacaaccatttttttttctgctaattgggcagttttttctgcataattttgtagattttcgaaatctagcttgcatgcatccaattccactcaaattggatcctacaagtcctaaaccatgtataaatcatgtccaagcaaaaaacaaacttcaaaccaaggtaaagcacattataggtatccaaaacccaccaaatttagtgaattttcaaggtttgaaaggtgaaaatgaaaattggggtaatttggggtaaactctcatcttcatcaagtctataacattgaattagactcgctcaaactaattttaaggtcaaatctccacctatttcaaaattgacctctcaacactcaatttacactataaatggcttttttttttacatttgccactcat

SEQ ID NO: 270851 - DNA, 1111 bp, Glycine max
  unsure (1)..(1111): unsure at all n locations
catgtcgtcgacttatcgtcatatgtcatgcatntattntattagtatagatgtttttattatactctnngantccagcactcacagcgtgaccctgttnatcgttcacctcctcgtacaccgcgcaactctatattacatctcgccgctcgcacacctggctaatggtctatttttgcatatatcttaagaaccgtccatgtcgccgtttacttcatctaattgactattgaaaacttaatctttagatagaacggctcatgttgtgctttactttgttttaattgaatgcggagatcttccatctcaaaaaagacgcggtcatgttgcgatcttattttgctttattgaatgcggagatcttgattctggagaacttgaatttagagatctccttcatcgttgcattattttttgcgcaattaataatggtgattttaaaccatcacaactcaacctgatttttaatctgatgcacgtggctaaaaaaataccacaattactataaattattcccctgcccacactaaaaacaactcctgctgcggcgccacacatttttctctttcttctggcccaggcacaaattttctctcccccccatctctttttttggcgctctctcatgctcactaaccccccccccttctaaattcctattttctttgggtaggaaactttcccgtctcggccccctctttacccatttccctccaccccctcgtgacattccctccctccccatcactcttcccacgaaggggttgtgtttcaccaactctatataaccagaagtaaattttcctacacttctctctctaccttcacctctcattaatccattatcaacgcgactcctacttctctgccaccatatctccttatcttctagcgggctcctcagttctttcaatcatctcttgctcaccttgacgacttctctcacctcttttacttgctactttcatcttctctagttactcctgattattttatgttttattaattataaaacaaaaaaaannccgcccccctcgccggttatatttattatgtcgccattctctctactcactctcctccatanccactnacccactcgctacttact

SEQ ID NO: 270852 - DNA, 541 bp, Glycine max
ttagaaaaacttaaaaaccatttgaaagagttattacttttagaaaaacttgaaaactattggaagagttacatcttttgattatggtcagaaactatcactggtaatcgattaccaaatcaatgttatcgattacacaaagcttttttgtgaaaggatgtgactcttcacaattaaatttgaatttcaacgttcaaacacactagtaatcgattatcaaatacttgtaatcgattacagcattttgaaattaattggaacattgtaaattcagttagaaagttttttgaaaaccaatttgctactggtaatcgattacaataatctggtgatagattaccagagaggtaaaaggttgagacaactcatgtgctactcagttttttgaaaaaactttctatacttatctcgactgagtctctttttattctgaaacttgatcttgattctcggaacttgaaacttgaaacttgattcgtgattcttgaattcaacgttcctcttgatacttgaattgtacttgattcaatcttgaactcat

SEQ ID NO: 270853 - DNA, 445 bp, Glycine max
  unsure (1)..(445): unsure at all n locations
agcttttgaatcctaganaaaccatgaattgttggaagcctaacccattacaagcctagaaagtccttcagattcatttttgtgtgttcattactgtatgatatgagatgaaatgcaaaggttggagcttgtgttggttgtttatgatggaataagcccaaacacttgagtttaagtgaaacaatgactgtgagggttttgttggatcaagtggcctcaaaataattaagaaggggggttgaattaattattcctaaacctttagtaattaaaaatttactcttgtaaggctcttactatgttgttaagagaataaggagtagaagagaaatttaaccaaaagtaaaacaagaattaaaatgcacaacggaaagtaatagagtatggaagaaggagacatacacacaagagtttttatactggttcggaacaacccgtgcctaca

SEQ ID NO: 270854 - DNA, 585 bp, Glycine max
  unsure (1)..(585): unsure at all n locations
tatgctgcaaacatttataatagactccctcagttgcaaaaccaactacaacagaataattatgacctttcaagcaatagatacaatctaggttggaggaatcatccaaatttgagatggacaagtcctccacaacaacaaaagtttgtccctccttttcataatgctgctggtcgaagcaagccatatgttcctccttcaatgcagcaacaacagcaacagccacaacaaagacaacaagcaactgaggctcctccttaaccttccttagaagaattagtgaagcaaatgaccatcaagaatatgcaatttcagcaagagacaagagcctccattcaaagtctgacaaatcaaatgggggagatggctacacaaatgaatcaagctcagtcccaaaattctgacaaattgccttcacaaattgtgcaaaatccganaaatgtgagtgccatcaccttgaggtttggcaaccaaattcaagtgcctccaccagtagcagcacctgcacctgaacctgtaaagcttcattcttcactagaaaaagaggatgagatagttggtgtcataccctaatttcgtctgggg

SEQ ID NO: 270855 - DNA, 330 bp, Glycine max
gcttgccacccagctcgcccaggcgagctcagctcgtccaagcgagctatgttgctctctccagaagcaaccgccttttggaggaatattctggaaggcccaagtgggactaattgctatttgaacccccatttttactaagtacaccccctgccccctttattggtgattctttttccgtaacgttacaaaactttatggatttcattacgatgcttgttttctttccgtaatgttacgaaaccttacggactaaccaattaaccccttttttgtttctgggatgtcacagaacttcacagattgcgcactatacactttcttttaatt

SEQ ID NO: 270856 - DNA, 526 bp, Glycine max
tccatcaagtagtaatcaaagcacaagagcttcaagtaggtgctccttaaatctccattaagtttttttgctttaccttttcttccattggtgcttcttcatttttttctccatgtatctcctcatatgtcttgtgctaaatgttgttaacttgattctttagagtttccatcgattaaacttgctatagaagctacatttgattttctattgttcaaatttcttgttcttgttcttgaaccatgaattatgttgagtttagggtcctttgagttttgtcttgttattttttgtggctgaaacctaaatcataaaattcttacaaaaatatcaaagtagaataaaaccttaaaaatctagagtgacttggtcacctattgtagttttgtcatagaagtcatgtctagtcatgaaacttgtcacataagatttcttatgccgtgctgaattttatattcttgctcctttgcctaactcatttggtcatgagtgtatgaaattctcttagcctattatttgatttgag

SEQ ID NO: 270857 - DNA, 325 bp, Glycine max
  unsure (1)..(325): unsure at all n locations
agctntcaatagcaacagtcccttttcccttgattgagatgaaatcaccatttccaatttttactctggaaacaatggttttgtcaagttttttaaagagattcangtcattggtcatatggtttgtgtagccgctatctattaaccatgaatcactggaactattgcttgtggcaaagcatgttgcaacaaagagttgctcatcttctcgttccttcacaaccacctttgcttcctctgatttggacttgcatattcgctctacatgtcccatatngctacactttctgctcttgacatctggcctccaccaacattttctttc

SEQ ID NO: 270858 - DNA, 535 bp, Glycine max
tctgctgcaacatttataatagacctcctcaacaacaaaaccaactacaacagtataattatgacctttcaagccaaagatacaatctaagttggaggaatcatccaaatctgagatggacaagttctccacaacaacaacagcctgtccctcctttccagaatgttgttggttcaagcaagccatatgttcctcctccaatgcagcaacagcaataacagtcacaacaaagataacaagcaactgaggttcctcctcaaccttccttagaagagttagtgaggcaaatgaccatccagaatatgcaatttcagcaaaagacaatagcctccattcagagtttgaaaaatcagatggggcagatggctactcaattgaaccaagctcagtcccaaaattttgacaaattgccttcacaaactgtgcagaatctgaaaaatgtgagtgccatcaccttgaggtctagcaaccaaatttaaagtgcctccaccagtagcagcacctgcacctgaacctgtcaagctttattctacac

SEQ ID NO: 270859 - DNA, 317 bp, Glycine max
gcttgagcacctctttcctcacctcttccttcatttatgggttgagccttctctggggctgcctgactgatctataggcttcttccatcattattctgtgcatgcaattggtagggctaactcctttaaaatcatatatgtgtcacccaatcgcttccctgtgtctcttgaggacttctaccaacctgttcttttcttctactgctagttcactgctgatcaccataggcgtgtgctcctcctacaagaacacatacttttgatggttgggtaggtaagatcttcagctctaccttggtcttctcggatgtactcct

SEQ ID NO: 270860 - DNA, 524 bp, Glycine max
  unsure (1)..(524): unsure at all n locations
tgtactttaccttatgagccgcatanttcggactcccacaagttgttccacaagttgtccgaacgatactcgccccctatcagaatattcaaaagtttgaagcagcttggtattattatatcttacatgagtcgaggtcctatataaaagctaatttggtgacgagctcacctgctcaggaaatgcactcaaaccataatcggaaatctttatatttcctagtgaatcacagaaaagattttcaggctgctcaaggcaggacgaaaaaaagaaaattttaagaaatcacagtaaggacaacaaacaacttctcagatctcactcaatgcaaacctttaaatctcagtgataaactcccttactgtggcaagaatctacaccggcaataagctgttggaaatatcttctagagtcagcttcactaacgcggccatggagtatcctgacaatcatattattcaccatcaaacattttccataacttgcattgtgattgataaaaggcacagtaaaagcttcaaaaa

SEQ ID NO: 270861 - DNA, 414 bp, Glycine max
  unsure (1)..(414): unsure at all n locations
agctntntgaaaantagttttatcagtcaataaatttgcaacatctgacatcatgacattgagagattgagcctaatacttaaaaatagtccaaaaggtgaaataaacaatagtataattggtgtatgtagatcatttatgttatggaccaaatatcaaaatgacattattttcttatataaaattgacttatatttattctaaaaaaatattgtttgttatcataagaataaaatttactaacttgggtgttaacgaatttataacaaataacacattatttctacctatttgtgcatcaatatacttatatttatattttntntaaacattgtttattagcactagaatcaaacttaggtgttaagaaatctataacaactaacacacattatttaactaacttgattaaat

SEQ ID NO: 270862 - DNA, 596 bp, Glycine max
  unsure (1)..(596): unsure at all n locations
tcgacttgagtcatcaagagattacaaatatgtgaccatggcatgagtttaaaatataatccttcaacatctttataatcatcaatcatctttgaatcatctatctttcaatctttttcaacatcatctctcaaacatctttcaatatctttctacagaattttctgattcatttctcttcatctttctaaaagtttttgatcaacactttctcttccaagaaaagttctttgataaaaaacttgtgctattcatctttttcattctcttctccctttgccaaaagaatgaaggactaaccgcctgaattcttttgtgtctctcttctcccttacaaaagattcaaaggactaaccgcttgagaattcttttgattcatcccttccccttaagcaaaagatttcaaaggactaaccgcctgagatatcttttgtttcctctttacaaagattcaaaggactaattgcctaagaattctntgtcccaacacattggagggtacatcctttgtggtacaagtagagggcacatctacttggggattgttatactgagaacaagagagggtacatctcttgttgatcaattcaagtgga

SEQ ID NO: 270863 - DNA, 371 bp, Glycine max
  unsure (1)..(371): unsure at all n locations
agcttagtaggtctcgacctttctatctgctccaatctttnttcttgtgagcccatttacaaccaattggttttatatcctttgaagcttcaactaaagtccataatttgttgatcttcatttattccatttcagattccatagcttcttgcaatttcttacaatctaagctttgcatggtctcttcatagcttcttggatcatcatcatcatgataaaactcatttgatgtgtcatctaggaccatcaagtttaatctatcaggtgcatgatgcactcaagtagatcttttagaagcctcatacattgggtttataggttggtaaattgattctaagattggttcattaacctaatcttgaactataact

SEQ ID NO: 270864 - DNA, 536 bp, Glycine max
tgttacaaatatcgtcaacacgaaaacccttaagggattctgtgagcatgtctactagttgatcttcgaagttgataaacttaatgatgatatctcttaaaggtaccttctcttgcacaaagtggcaatcaatctttatgtgtttagtcatctaatgaaagacatggtttgaagtaatgtggagagcaacttcattgtcacataatattttggtatgttgaacgtctccaaattttattagttagagaagtttcctaagccatgtgatctcgcatgtagctacttccatggcatgatactcaactttggcactggatctagcaatggttttttgcttctttcttctccatgagatcaagttccctctaataaggacacaatatctagaagtggagctcctgtctgatggtgatcttgcccaatcaacatcagagtagcaaacaactttgacctttcctttctcttcatatagaaatccatgacccaatgcattcttgatcttgaagtatgcacattgtagcaataaaatgactatc

SEQ ID NO: 270865 - DNA, 337 bp, Glycine max
  unsure (1)..(337): unsure at all n locations
aacttaattagaagaatcaaacccttaatatatatagttcccaaatcatttntgtaaaccataatacctggattccctgaatataatccaagtcacataacttacgacctaattattaagtcatgtttagagagcgaattgtttaatttttaataaaataaatataattaatcttaaggctcattgtcgaatttaaaattcaagggtgcaactctcaattggagcaacttgatgagatttctggacacacttgggttcagatgtaaaaacacgtgaataaaaatttaaattaaaaccatatagatcaattttgtgaattaaaattaagtggaaaact

SEQ ID NO: 270866 - DNA, 557 bp, Glycine max
ttatgtaccaaaaaatttatctcagcttttgctcacggatgaaaacatagtttccccacctgatatccctaaatttctatgaaaacccttgaattatgctcgacatcaaaataaataattgaattatcgcaaaaggcataaaacaatcatttttaaatagttaattgtgcatctattgaactcaaatcaccattaggtaatgaaatggactctaaagattggtccgtcaatgtacgagaaaattatatcattgtttcgatcttttcgagggtgattggggtataaacatcctcaatatcttttatttggcatatatactctatatgattatcctatcatctcttcatatctattgatagacacgaagcatcttagtaactctatcatttctaaatatttttttatgattgaaagattcattatattaactaacccaagatgatatttatttaattggtgatctcaaatttaagttttgaaatagtattatattaaactgataaacgagttttggtatttataacaattctatttgacatgaattttttggaaaatgc

SEQ ID NO: 270867 - DNA, 265 bp, Glycine max
  unsure (1)..(265): unsure at all n locations
ttggcttattccctagaggatggagccttccctatcctcttctactttgccttacgctgcatctccatgatgaaaaatcaccattgaaggacctcattgaagaataaagatccagccttcatagaagctccacaagcaagcttccatcaaggtatgaccatttgaatttctcgagatcttccgtggntcaatttcgggcgtgtccatatgtcatgtgcctgaaacggacctcccgaagaaaatttatacccttcgaacttctcta

SEQ ID NO: 270868 - DNA, 588 bp, Glycine max
tttcgattcattctatgcacccgtagtggtccacattgtgtttcgtgcatttttattctcattttggttactttttataccccctggtgacgtgcttaagccgttttacttaagtcatttctcgcttaacttaaaaataaaataaatttccaccgaacgtttgaattatattatccggtaacttcggttaaaataaattccgaccgttcggtcgtgccgtaaccacgttggaaatcaaaaagaggttaaaaataatataataatcaaaaagacatcttttagtaaaataaagcggaaaatcaatcggacgttttctctttgggatttctcattcttaatcgaattgattaaataactaaagtgaaactaaggctaaaatcaactcgcctagtcaagctcgtccacaaaaataggcttttgaagtttgtcatttcaatttctcactaagtaaaatggatcattttttatgtccaacgccttaaaatgatcacctcttaaagtaaaaagaatcacttgattagaaagaactacgtaggtctgatttcctcatcgcaattgaggaatacgtaggagcaaaaggaaacaccc

SEQ ID NO: 270869 - DNA, 419 bp, Glycine max
  unsure (1)..(419): unsure at all n locations
agcttgtacgtccaaggtgcgaanagagtaactaaattaagataaaacaagttatatcaaaagctagagtatacaagttcactcaaattcatgagctatgttcagctcttcttcaaatccttgatgagatccattaatcacaaaatggactacaaacaagtattatacattgccacttctgtctacaacaagtgttctctaaagatcactcttggcacacccttaatcttccactgagattaacaaacacttaggtattcttttgtcactaagtcacttctgacattccaaacaacaatttgaaatattagaagattcacaactcttaaagagaggatatacaatgtagctcgaatacaaacaaatagctctacaaagtaaagaatgactctttaagcacaagtatatgatcatccaat

SEQ ID NO: 270870 - DNA, 591 bp, Glycine max
tagttacaaaggatcatggtttaatccatgggatataacaaatgaatcaaaaacctcaagtggaagaagagagaaaaaagaaggaaaaatagagattcaagctatgaaagtgagaaaaataacaaaaggtcctaaaaataaaaatttgttacgaaggctcttttaatgagagttacagttttttttgccatgtcagcatatcgtaatagcgaggacaattttcctaacaatgagtcttcatctcttgcaaaaggtcttcttctcttgaatcttcatgctttctggacccattctcattgtgacaaaagattaactgttgtaacgaatttttgtagggtgttcttagtctcagactgaggaattgttgtggcaagtgttcacactctttcacttgatatctggtcttgctcattgtcgccacaactctacaactcctttttccttttcctcaaaaatgttttcgtgatatctaaaattcacacaaaaacattaaaaactctctttatttcctaaactaaacgttatactggttattcataaaacaaaggtgtattaacaaaatcctaaaattctagataattgttacaaaat

SEQ ID NO: 270871 - DNA, 332 bp, Glycine max
  unsure (1)..(332): unsure at all n locations
agcttanagttctcctcattgataactttcaacttggagagccaatctaatcctcgtgtgtgaactcttagccatncatgataaccaccgatggcgccatttcggatgcctctaagctccttgtcttttctcaacggacttctccacgccttgtggattctttgtatcaccttgagactttgcgcgcctagatccctcacaaggaaagacgaaagactttcttctgttggcgctcccctcatggagtaccctagctgtcttatggcgagtgcgggaatataattaattcaacccctagtccctatcaatggaacattagggtagtccccaca

SEQ ID NO: 270872 - DNA, 499 bp, Glycine max
gaaagactgggaaacctctagaaattctagagattgtgaaaccttcttgggccttctggaagagtatgaaaggatatgggacggagcttaagagtgtggagactcctataatgtgtggagcattctagacaattaatctccaccaatcattgcggaggtggagtaatataaataacggcaggagccttgattcttaaccatccccgacaagagtgagttcacttcttaaagtgacaaagctaaatagttagagagcctcttggagagagaagataaatagctggggaagtgtcgatcctcaaacttgagtgagccaccgtatagagagccaatttggacacacatcctggtaaccctactattcttttcggtagtggaagaatcttcgtatcggagaagtatccgtctgtgctctcatttctatctcttattactacgtgcctatcttaacttttgaagcgggatagtccgaagttttcaacacatttctcctcctatt

SEQ ID NO: 270873 - DNA, 198 bp, Glycine max
aagcttctcaatgaagctacctagtctataaatagaagcatgtgtaacacttgttgtaactctgatgaatgagagatttgtgagacacaactcacagttcaacttctctccctttatatttcttcaaattcgtgctcccccttctctctttctctccctctttcttttccttcattgaagcattctctccaagcttct

SEQ ID NO: 270874 - DNA, 605 bp, Glycine max
ttgagccaaaatcctgactcaccataaaccttgactccaggtgagaatgccaatccttaccctcggaagcaaaaaaaaagaagagaaggaaaatttccaatcaaaggaaaaaggagaaggaaaatttcccatcaaaggaaaggaaattcccaatcaaagagtgggagaaagcaaaaagaaaagaaagaaaattcccaatcaaagaatgggagaaagaaaaaaagagaagtcaaaaagaagaaagctcctggtcaaagaaaccagaagaaatgtgccgagaggtccttggactagacgatatctgaacaatacagaattgtcaccaaatgaacaaaagaaagataaggaaaccatgacctacaagtggtcttctccctttgattaccaaccaaaatcctgtgcgctagcgactgtttcgccccgcactaaacaaaaacagagaaggaaaaagccaacaaaaaaatcaaaagccaaatacacacaaaagccgataaacccatcaaaagaacccattcccaacggaagtcctattgatccatgatcacgcatcgtgattttgatttgataggaaataatttgcaaagtcaagtcatgacatatctatg

SEQ ID NO: 270875 - DNA, 1294 bp, Glycine max
  unsure (1)..(1294): unsure at all n locations
ctagcctgattaattcttactcacattaacagataaatagttgttcttataannnttaagcccccgattganctgaactttgaaatcgaatcggtacataacacccctgctgccaatatcttgtgcgtgccagatatacacctcatggtttaagactgcaatactactctctttgctagggaaaaagatgccctcctttatgaaaagctttaacctatcttaaacaagagagaatcacaatactgacatcggctttttatgacacctacaccggcaacaaaaacttttaacactgggcacaaaattcctgggggagttaacggtcaaaaattgaccttcgctctatatttcaaggcgtactgcggaaagtatcggtccaatcttctcaatccacatatcgaggtcctctgcggtaactctaaaaaagagttcaactcttcggcctccccatacccaaattatacatatataacaatggtggggctggctacgggtcgtctcttatgagacgcttgctccgacatcaanacaccatacacttggtgcgtctcatacggacgctcctctcatgtcgcncatcatcttctactttagcttcgctatgagtatacnacacactatttcatctattcctatangtaagcaactcatacgcaccatacgtgtgatcgacgcntacgagatatatactgatgacgancactataaacgagnctcagttacacataactgtgtgctagccgagcctgacagacagacctatatacctgntcttcctgctcattatctatcgaactnctgctgacttcatggcgtgtgtgcgtagatctaatatcttcacaacacgcatctatgataataccgacgtcantcgatacactcgtacgcgagtcttcgtgacatgcgcatgacgcngcatcatttcatcacatactgatgtaatctgtgacgttctctaacactccacgtatctgatgctcancacacgtctgtgtctcgctctacatctgcngtattncacatacattgcgtctctaacacaccatctctcnctagacaatctactcncactcgccctcctcattgagtancgtactactatcgcgtcataaaacccatccgctttcacaatacatgatatccgcctatactgacgtctgtcgtatgacactcgatgcaataccacgtcaccgcgatcacactcacgacctacgtttgtattattttattatataatttttaataaacaacaaacacgaacatncgcatcccancgcgcaacttatattcgggt

SEQ ID NO: 270876 - DNA, 433 bp, Glycine max
tgctcatccttggcctgagtggttccaactcatgaagtgcttgctctacaagggatacttctgtcgcgaagagggaaaaatgttatgctctgctggtatgggcatgaaggatttcaacgctcttagaaccaagtgggcctcaatttcggtagagaccactttcttcttttaaggtgaaatatacatcttaaaagaaagagttgcttggattgcttatggcacatgatataatctgcttgatgtttacataatcattggtgtattctgtttgtacaaaggcttggccgcgcttcagaactctgtcagactgtgatattcaattggacaagaacctatgcttgatttataccatttttatattccatatttgagttctatatagttcggagcgtatgttgtattatgataactttattcttatgttgggtctgct

SEQ ID NO: 270877 - DNA, 396 bp, Glycine max
  unsure (1)..(396): unsure at all n locations
agcttctcaaggaagtgaacttagttattaaagaggtatatgtagctaagctctagcttctcaaggaagttttctcaaagaagcttctcaaggaagttttctcaagaaagcttctcaaggaagctacctagtctataaatagaataatgtgtaacacttgtggtaactntgatgaatgagagccttgtgagacacaactcaaagttcaacttctctccctttttcttccttcaatttcgtgctcccccctctctctttctctccctctttcttttcctccattgaagcatcctctccaagcttcttatccaaggctcatcttggtggtgaagctccttcttccatggcttattccctagaggatgacacctnctctcacctcttcttctttgtctt

SEQ ID NO: 270878 - DNA, 558 bp, Glycine max
tattcgattgagcccaataatatatcatggagctcgtaagtggaaatcgaatgccgacacaaattctgatggccataactttcgactcggttgtccgatatatttttatgatatgttcagaccgtcgttggtgaaaaatgaagcccatcgcaaattcaaacggccataccctttcctctggatctccgcataaggctggaaacctatggagaaacgaataaagcaacaaggaagactcgggcgaatttttacgggcaaacattttgactcagatgtccaattgaggcccataatatatcatgtagctcgaaagtggaaatcgaatgccgacgcaaatttggatgaccataactttcgactcgggtgtccgatatatttttatgatatattgagaccgtcggtgttgacaaatgatgccaatcacaaatacaaacagccataacatttcctccagatctccgtgtaaggtcattaacctattgagacacccgaatatcaacaaggaacactcgagcaaattctgacagttgaaagctttgactcggatattccattgag

SEQ ID NO: 270879 - DNA, 299 bp, Glycine max
  unsure (1)..(299): unsure at all n locations
agcttctggaatactatccgccggaatcggacttctgtgtgacaagttatgaccattagaatntctcgagagctttcgttgttcaatttcatgcttctcaatatattatgcgcccgaatcggacttccgtttgaaaagtattgactcattgaattcttcgagagcttccggtttcaatatcgagcgtctcgttatattatgcgcctgaattcgaagtttgtgtgaaaagttatgacaatttgaatttcttgacagctttcggtgttcaatggtgagtttctcatatactatccgccgga

SEQ ID NO: 270880 - DNA, 488 bp, Glycine max
  unsure (1)..(488): unsure at all n locations
gggacaggtttggcgcatctattagcgaccttatattctcagctcgcgcacggagtttcgactatgctcttgtgtggtggaacaagctacaaaatgagagagcacgaaatgaagagcccaatggttgatccatggacggagatgaanaagatcatgatggaagcggtatgtgccggcttagtactcaagggaacttgaaattcaagctccaaaaactaaccccaggcaacaaggggggtgaggagtatttaaggaaatggatgtgctcatgattcaagcanatatttgaggaagatgaggaggtaactatggctcgattcttaatgngttgactaatgatatccgtgatattgntgagctgcacgagtttgttgaatggataatttgcttacaaaagcatccaagtgagcaacaataaaaacgaaggagtggccaangagtttaccaacttgttttctagtngaaaacaaagtagaaaatgggctgtt

SEQ ID NO: 270881 - DNA, 318 bp, Glycine max
  unsure (1)..(318): unsure at all n locations
actaataattaagtatttacattgacagcatgatacattatatgaataaataactgtgtgtgcattgcttacaataaaatgtattacactaccaatataattaattaattattaatttttacattaacaaagttatttattaatataatgtatcatactgttaaatgttactccctatatttnttgtagagagttactccctanatcttagaacagaaacatctataaaaactactaaataaatagtttaataaatacttaatcaatatctgggagagatgaacaatcgttatatgtgtccctatatcacgttttcac

SEQ ID NO: 270882 - DNA, 460 bp, Glycine max
  unsure (1)..(460): unsure at all n locations
tagctctatatacgccatatctgctagtcaatgtgggaccaaaccaccacccttgaggctgcaattatggcagccccaaagaagccgcaactaaggcagttgtccaacacccttcgtgcccagtgctataagtatggagcgtgtggcaaatgcaggtggcccaacaatggatcttggataggctttgataccaagttgaaaggaaaagaactgtatattaaattttgtattgcattctctaattctcacttttatagggtaaacaactatgactataaaaggaaataaataaatactgtacaagagaatgttttacattggttctgcatatcatccatatatagagactattgatagacttgatgtctagacttactgtacaatctcttgctaattggttctgaacaacaatgatatttcttttcaagctcaaattntgttgctatctaactcattaatg

SEQ ID NO: 270883 - DNA, 575 bp, Glycine max
  unsure (1)..(575): unsure at all n locations
cccccctcctcttcatccgtccatatctcttacctatgacttttatcgcattcttnnaagccaaggaggttggaatgttganaccttgtatatccgganccctgnggatatttcgngccagcacccnttatggaagatgaatacgtgatctacactgttgttcttcaatggagagttttaaccacggagttgttgcgacagaaacagacaagaggtgagcggaggtgccatccactatggaataagccatggaagaaggaacttcaccactcagagtgtcttggataagaagctttgagaggaagcttccatggaggatgagattgaaagagacagatgtgggcacgacactgaatgagaaaaaaacggagagaagtngaactttgaagtgcgtcgcatacggttcacattcatcatagttgcaacaagcgtacaaaatattcctatttatagtctacgccactatctaaacgcaattcactctatttcatgtgaatctaagacgaatattccaagggtatcgcanaagcacattatcatatctcaaaaatatgccacagacatctgtaacattn

SEQ ID NO: 270884 - DNA, 456 bp, Glycine max
cggtccagtagttgaggaagggtgaaaggataaatgagggaggagaggtcgcgggttggaatccccgactgacatttttcacaaaactaacaaactaacatttgtgcataaaaaaaaaaagatgggttaaggcaaataaaaaaggggtggtgaaaaatagtcagataggatttaagttaacaaaactcatttcgagaaattgcagagaggaaattacctgattgagaaactatggaatatgagggttcctattcctgttcctaaaatgctgaaagtgcagtgttggtgttgttgggtacttagaaagaactagttagttaaccatttcctttgctgcatttgcatgcctcatctcttcatcatcgtattgttttggaaagtggaacacagagatcagatgcaaccaccaaatcatgccaaaatcaataattgcattgttctgctcctatgtttttg

SEQ ID NO: 270885 - DNA, 374 bp, Glycine max
agctttacagcagatattatttatgacccactaacctataattaaaataacttaatgccattaacctagggaattaaaacaaacttaatggctgagtgtaactgaaattgttggcaaccaaaagtcacccccaacagccaacaagtcagccaccatttggtctcccaaaaggctgatgcctacgatgccaattgggcccttattacaacatgaacttaagcccttttagttgattaacccaaaacatatttttggtcagccaactttacaaggattgggccattatttatacaaactacacactctaaaattgaaataaagtggtgtcatttagtcctccatttgtgccatgatacaactcacaaccttggact

SEQ ID NO: 270886 - DNA, 397 bp, Glycine max
  unsure (1)..(397): unsure at all n locations
agctctcgagagattcaaatggtcatatctttttaaacggaagtccgattcaggcgcataatatatcgagaagcttgaaattgaacaacagaagctctcgagaaattcaaatggtcataacttatcacaccgaagtccgattcaggcgcataatataccgagaacgctcgaaatgaacaacggaagctctcgagaaattcaatggtcataactgatcacacgaaagtccgattccggcagatagtataccgagactcttgaaattgaacaacggaagctctcgagaaattctaatggtcataacttttcacatggaactccgattcaggcgcataatatatcgagacttttgaaatataacaacggaagctctcgagaaattcanatggtcataaaa

SEQ ID NO: 270887 - DNA, 369 bp, Glycine max
actggatgcattggttaacttggtaacccagctggccttgaatcagaaatctgtacctgtcacaagggtttgtggtttgtgctcctctgctgaccaccatacagaactttgcccttccatgcagcaacctggagcaattgagcaacctgaagcttatgctgcaaacatttacaatagacctcctcaacctcagcagcaaaatcaaccacaacagaacaattatgacctctccagcaacagatacaaccctggatggaggaatcaccctaatctcagatggtctagccctcaacaacaacaacaacagcctgctccttcttacaaatgctgctgcccaagcaaacatacattcttcacaatcaacaacac

SEQ ID NO: 270888 - DNA, 451 bp, Glycine max
  unsure (1)..(451): unsure at all n locations
ttatacctctcccatgcatcanagagagactcagatgccatttgttggaagctagttatcctttccttgatagattcgatttttttatttcgaaaagtattgtttgaagaactcatctttgatttgctcccatgaggttagactatgatgtggttgagaattcactactaaaaaaaagactttctacatcgccctattaacatcgattattgctaaaaccgatgttaacaaaagcgcggtggcatttttgtaattaaatggagttacttaacattggttttagcaaaaccgatgttaactacttcatgttaacattggttatttaaaaaactgatgttaacatgatgttaagatgaatatggtaacatcggtttcagcaaaaccgatgttaacttcatagagttaacatcggttntaagaaagccgatgttaaggagttgattntaacatc

SEQ ID NO: 270889 - DNA, 214 bp, Glycine max
  unsure (1)..(214): unsure at all n locations
cttacaagttctcccatagagaatgcaaaatatgcagcgttgaagtaggtagagagcttctttaattgcttggggttgtcttggtcgaattggtcgcctccgtaagccaccatgtttggcttgacacaaccactacctaatgccaccaagtacagggctacgaagaatatcatggtcttcatgcgctttgctctgagcactgttctcctanatc

SEQ ID NO: 270890 - DNA, 439 bp, Glycine max
  unsure (1)..(439): unsure at all n locations
ctaggattgaagcgcagtgaagcagatcattcaattntctatagtcacacttctccatgaaagtgtatntatctaattgtccatgttgatgacatagttattacagggaatgatgttgctacaatttgtctgctgaaaaagcacttattcatccactttcataccaaagaccttgggtgtgtaaaatactttcttggtattgaggtgactcaatcaaacgaaagcatttgntatttctcaaagaaagtatgctttggataggtttttttccagcaatacactccatctcccctatttgctcaaaatacacctctttgtatactaatacccaaaatacaactttttctcacctttgagaagttgagactggccaccccgacttctgtacgacgcgctnttttttaatttaattnttattttatttttaaatgtatgtttc

SEQ ID NO: 270891 - DNA, 190 bp, Glycine max
  unsure (1)..(190): unsure at all n locations
tcgaacattagatgatatgaacctgacggcgagtcgggcacgaagaactagtgacaacaagctagtgatggagaaagcctgcgacaacgagttgatgacggggcctccacgatggtgaactgggcatgactcaagagtgagtgaggtgagagtgaaggcanagtgaanaatgagagtaattgaaatgatg

SEQ ID NO: 270892 - DNA, 446 bp, Glycine max
cccttaagaagattcctaaagaagctaaagcttagctacacacacatctctaatagctaagcttacctccttgagatgagaagctagggcttagctacacaccccctataatagctaagctcgcctccataacaaaataaatgaaaatacaaaaaattccttactacaaagactactcaaaatacctcgaaatacaaggcaaaaaccctatactactagaatggccaaaatacaaggcccaaacgaaggaaaaacctattctaatatttacaaagataagcgggctcatacttagcccatgggctcgaaatctaccctaagcctcatgagaaccctagggccttcccttggatctttggcccaatctgcttggagtcttctatccaatgcccttgcggggtaggattgcatcaattgtggtggggcatttcatgtgtctcccacat

SEQ ID NO: 270893 - DNA, 352 bp, Glycine max
  unsure (1)..(352): unsure at all n locations
cccatcacatatggtactaagtggcggtccggcgatggtgcaagacaattctccacatccacaaatcacgtataaacccaccattcgcttgtgcccacctccaactgagctcacgtactcccacgtagcccttatcctcgttcctctcaacgccgggtgcccatcaatcctctcaagctcccacaacatacaagaaatttaacattccattatcacaaactaacaaaaccaagcaaaacatggcaaaggcagaaactctgcccaaaacacaactcaaaatcaacagcttttacatacaaatagnnnannaaaatttccttcattccaattccgtaaccgtcggatcgactcg

SEQ ID NO: 270894 - DNA, 370 bp, Glycine max
  unsure (1)..(370): unsure at all n locations
tacanaaccatgctcatatgtcattgaggcatttcaccgagcacttggtgggcgcatgtttacgcatgaatagcaagagagtgggggcaatgtggcatgccccattgcttcatgatgcagcataagcctaaggccatcccttacaaccccctaactcaaaccaatcaaacatgaaaaaaaacaaaattgccccacaaatttgagcacattcccataatttagagcaccaanagaagaccaaaatacatcaatggaaagctagaaaactcaaggatgagatacttgttggagcgagtagaagtttaaaaaatgaaagcaaaatgcaaccaaaggtggcttgtgggagcaaaaaccgtgagtcccgtaagct

SEQ ID NO: 270895 - DNA, 581 bp, Glycine max
  unsure (1)..(581): unsure at all n locations
ctccactcctccgcttcctctactctcacctaccgatactatctctatccttctcgagttaatcnacnctaacagcgattgtagcctttgaatccttggtctccgcgaatctttagagaccgcacgctcaactttttcaaaatactccctcttacacaattaatcctctgggtgggtgatacagcatgtggcttctcttaaattccccacgcgccgaagtgtgctcttttactatctatcctgcttgcaaatggaaagacatctctctcaggcattcatatgtctcacaataatcttcgctatgtagctcatcctctaccacctgtggaggagaattactgcgaaatccatttcttgattctggcgataccctttttcaccaatatcgccttgtatgttcgttctacttcgattctctgttggcttatttacccacctcaactgttacgctttttttcatcgggaggttaggaaaagacacgtcctatgtctctcgatggaggtcattcaattttctccttcgccccaccccgtatgtcattccatgtgagcctcctgaaaattctgcttccacgtcagtt

SEQ ID NO: 270896 - DNA, 306 bp, Glycine max
agcttatgaccattcgaatttctcgagagtttccgttgttcaatttcgagcgtgtagatgagttatgtccccgaatcggacatctgtgtgaaaagttatgaccattcgattttctcgagagcttccggtgttcaatttcgagcgtctcgatttattatgaccccgaatcggacatctgtgtgaaaacttatgaccatccgaatttgtcgagagctttctgtgatcaatttcgagcgtctagatgagttatgttcgcgaatcggacattcgagtgaatacttatgaccattcgaatttctcgagagc

SEQ ID NO: 270897 - DNA, 384 bp, Glycine max
  unsure (1)..(384): unsure at all n locations
ctgatgcaacattnggagaggttaatgaaacaacgagatgatgcgctccatgagaggttggatcaaatggagaatagagatcataatgaagaagaaaggaggagaagagggaatgatagtgttcctagacaaaaccgaattgatggtattaaactcaacattcctccatttaaaggaaagaatgatccggaggcctacgttgagtgggagatgaaaatagagcatgttttctcatgcaacaactatgaggaggaccagaaggtgaagcttgccgccacggagttttccgactatgctcttgtgtggtggaacaagctacaaaaggagagagcaagaaatgaagagccaatggttgatacatggacggagatgaaaaagatcatg

SEQ ID NO: 270898 - DNA, 384 bp, Glycine max
  unsure (1)..(384): unsure at all n locations
atccttagagtcacctcacgcatgcaagcttccnncgtttttgatttcataattatggcttatattatcatcctaaagggtaattcattttatttttgtatgtgggatctattacacttcattttatgcttccagcaatactgttttactgcgcccttgcccgctttccatttcaaagtatattcacgttctttcttttaatcatgtgtgcatttgtttgcacgtctggatttgctatctccaaatttagcttttggtgctcaataatttgtactggctactgcctgtttcttgctctcatataaaagtagtaggtagtggttctcttgctctcatataaaagcagtcctctcactagatatcccccctgcatatgtaatgtca

SEQ ID NO: 270899 - DNA, 430 bp, Glycine max
  unsure (1)..(430): unsure at all n locations
agttgagttgagctagcgtagtatatcacgttctcgctttcactttttccccgttacatggcaatcgaattntgtttggaaataattgaggactacgttgttacggtcccaaagaacaacccttctagcaagtaaacccgagttcccttctctctctttacgattacattgctctctctctctctgttcgcattcaatctttcgcttctgaatctgcaacaatggtgctcgaggtaaatcccttttctccttcgtcttaatttcagccatgccactacaatccctttaatccaatcaattagggtttgttcatttgatcactcgtttatcactaatngctttttntgtgtgtgtgtgtgtgtgtgtgtgtgtgtgtgtgtgtgtgtgtgtgtgtataatangcgactatgatctgtatagacaattcgga

SEQ ID NO: 270900 - DNA, 609 bp, Glycine max
  unsure (1)..(609): unsure at all n locations
tctacagcaccgcgtctcatccactattagtgcacgtattcgtgatccgacnctactttgctttactgatacaaatatatttttatgcactaggacacttaaaagnnttttttganctcgtctgtgcaccgcggagactctatagtaganctgcgcgcgcgcgagcgttctcgggcgcattctgtgaagcgcacatttttaagatagttctagtgggacactactctctaatcacaaatggcgcataaccccctcctctctatacacaccatcatgtgaatttatagcacgctcatgcgcctctattcttacaaacgntctcttgtgcaagaacattatcccgaataaagcacccctctaccatcaagggcgcttctttacttagaatatttacacgtccctccaacgtgtgttggttacttacaacacacacagatacctgggtgaattcacatacatgcatactccaagcatttttggggaccacaaatcgcacacctgcgcatctcggctttcttatacctacacatacgcacacttcatgatgaagtctggctttctacacacaaaggggcggcactccatgcccttttttaagttttgcacccg

SEQ ID NO: 270901 - DNA, 307 bp, Glycine max
  unsure (1)..(307): unsure at all n locations
tcttcagtcaccttcggcatgcacgctntgaatggaagagataacatagattaaatgatatatattgtttaacattntcttccattgctatcttagtcactcctctattgtgacacanaagtcgaagctctggaggattcttgacgagtgaacagtaacctcatttacgtcaatgcgttatagattatttattgtcgttgatgctatcttggctactaattttatggcacanaagacaaagatttgtaggattcttggcaggtgaatagtaatatcattcacatcaatgcattatgaagtattgatt

SEQ ID NO: 270902 - DNA, 423 bp, Glycine max
cacagacctgcatttatagctcacccctacttgaattccaaggtgagaaatgggaaattccaattgactgcagttgagaaaagaagttgcttccctacaccagccttcagatttacccagacacccgaattggctcttattgtagtttatctttagaccagaaaccaattcaaaacatttcatgatacactctaaaactctaacattatcattagtggcagccccaaagaacaaggtgtcatctgcatattgaagtatattaacttcctctttcttctttcccacttgatagctgctgaagagattgtttgttactgctgatctcatcaacccggtaaggccttccactactatattgaatagcaaaggtgcaaggggatcaccttgccttaagtctcttaaggacaaattcctgagaagtac

SEQ ID NO: 270903 - DNA, 304 bp, Glycine max
  unsure (1)..(304): unsure at all n locations
atatgtaagttggatcgagcctttgaaaaaatcatatgataagtaatgagtcaagcnttaagtttgcgtattcaactcaaaccaagctcaagcctactaaagctngactngactcgacttctttctacccttactgtggagtataaatttactataaggaaatcgcgcttcagagcataattttgttcttagaaaaatgttatactaaaatttatatgcacgtacgaatttagttttaataattttatattaaaagtaaaatattatgtcatgagtttacatgttttattttatttaaaaatac

SEQ ID NO: 270904 - DNA, 310 bp, Glycine max
  unsure (1)..(310): unsure at all n locations
atttcggcggccaggcgatgcgcgatctcacgcgcgtgctgccggagtaaatatccggcggcgagacccacgtgttcgtgcatgacttctggagagaggtggaaagggttttcagcgaggagtttctgtgcaaggaaaatttggtgagttggtggattcgtggggcacttcgttgtaagagtgatctcacgacggagaaacgctgtttctgtaaaactcgtctcaaggtgtcgcgacaagggactngatatgctgggctccaaaatggtaaatatctttttatataatatttatagaaggaaccagaatg

SEQ ID NO: 270905 - DNA, 403 bp, Glycine max
gcacaaatggccaattatgtgcttctaaccaatgaccaattcttgtcaaaccgaaccattccccaatccgtgtcagttctaaaccatgaacaatacagccttgccttcatgcccatttcacctctttggagggaactcagaaaaatatgcaacactcagttatttgcccacaagtctcttgatgctagccaagatgttaggcgtaagatagtgcagcaactagtctccgatatccatcaaagcagccagataggtgaagcagtggatattggaacagcagcattcaagactaccataaatcttttatcaaacactatcttctctatggatttgattcactctacacgtaaagcagaagagttcaaggacttggtgaccaatatcacaaagctggttggaacac

SEQ ID NO: 270906 - DNA, 456 bp, Glycine max
  unsure (1)..(456): unsure at all n locations
cgcacggtcagagaacatggttttgaaggcattagcttctattgcatcgcctatataaaggatacggnggagacaatttatgacaatagcacaaactcgcagagatgaaatattcaaaaataataatattcaagcttaaattgctggaatcagtaaaggtccacttcacttgtccaaaggtccacttcaaaaataataatacaggaagatgtatgacacctgtcttanagcacgagtcatggccaaaatggctcctctcccatcactaggaggttgagtaatatgatatgcatcacctagtcaaaatccacatgaaataagtcaaccaaatataaactaaggctagaagaaaatcctacatatcttgcaattagacaaactacctgacatcccatagccacggacctctgcatagatnttggctcctcggttttttgcatgctcaaattcctaaaa

SEQ ID NO: 270907 - DNA, 279 bp, Glycine max
  unsure (1)..(279): unsure at all n locations
ctgaaccttttatcaataaacacaagttgagttttattcagaaaattagagtttatctctcttatcttagtgagagtgattctcctaaattcttgagtgattcaagaacaccctggctgtatcaaaggactttcacaacctttgtgtgttgcccttgcaggaaagagtgattgtttccttcctttcatcttcacccttgttatttgaaaccacaattccagaaaatccacctctgcccagaattatctcgtggccataactcctgttntacgcactcaa

SEQ ID NO: 270908 - DNA, 443 bp, Glycine max
  unsure (1)..(443): unsure at all n locations
tagtactgacccactagacctagaattaaaataacttaatgccattaacctagggaattaaaagaacttattggttgagtgtaactgaaattgtggcaaccaaaagtctgatgcctgagttgccaattgggcccttattacaacttgaactaaacctaactaaagcctttttagttgattaacccataacatatttgtggtcagccaactntacaaggattatgccattatttagacaaactgaacactctaaaattgagacaaagtggtgccatttagtcctcctccatttgggccatgatacaactcacaaccttggacttttctccttgaaacttgggcttgtattcaaatagtatggtcaacactggttgagacgctcgaaattgaacaacggatgccctcgagaaattcaaatggtcataacctttcactccgatatg

SEQ ID NO: 270909 - DNA, 238 bp, Glycine max
gatccttacagtcacctgctgcatgcaagcttccaaagaaaatggttatcttttatcttgcttgtaaacaccttttcagaattgggaccgagtgcataatatccctctcatttgtagatactggagaatttggcagagctttgaattaacagatgcatttcagtaaagaaaatcactttatttatttgataataatattttaggtgtttggctaaaacatgatagggatgatcttaag

SEQ ID NO: 270910 - DNA, 366 bp, Glycine max
  unsure (1)..(366): unsure at all n locations
atcttgactaccgacgtatgagaaacgaaaggtttctggaccgcattgcaccctgtgcacgtgctgctaagatcaacactaaagtaaccatggactatgtgaggtctctggaaaacacgaccagtgacttgttggagactgaaaatcacgattcttctgacaaaccaggtggaaggaacatacctaagctnttaatcgttggtggagccattgcccttgcctgcactcttgatcaaggactactgactaaggcagctatatatggagtagcccgaaggtttgcaaaaatgggaggaaagaggttgtgatacattatgctctatgctatgagatattgccaggccagccaattccctctggcagtag

SEQ ID NO: 270911 - DNA, 331 bp, Glycine max
  unsure (1)..(331): unsure at all n locations
agctntatcttcttgttatgtttatccttaanaatctttagataaacaccataaaatttataagagtcaatattatgttcaattaattaagtttaatcttcttgatagaatcactagattgcaaacttctagttcacaatatcaagaccaaagggataatatatcataatgtgaagtgttgattgattaatcacattagagagattcctggagttaatttggatttaaagtcagttttttccctcttcaatcattcccttaaaaaagcatcataatcaaaaaaantcaattccaataatttttaaaataaatcatctatctaaaatagact

SEQ ID NO: 270912 - DNA, 439 bp, Glycine max
tgccaagagtgtggccttcagttgaaccatatactcagagtgaggagctgagaggatgaggtattgaccagggggatgattgtctctgcgagagagagaatcagttactatattcgaggaacccactttatactgaatttcgtagtcgtatccaagcaacttggctaggtaaaattgctgttccgacgtctgaactacctgagacatgagctcacgaaggctccgatgatctgtgaagatggtgaatttatggcccagtagatattgccgccacttgcggacggcggcaacgatggcatgcaattcgcgaacgtaagctgaagcgtgttggaggcgttgacaaaatgatttgctgaaataagctatggggtggccgtgttgctgaaggaccgcgcccatggccgtgcttgatgcgtctgtttcaagtatgaaagggatc

SEQ ID NO: 270913 - DNA, 413 bp, Glycine max
  unsure (1)..(413): unsure at all n locations
cgcttgtgaggcttctatggaggctggatctttgagcttcaatgatgttctttgatggtgattttccaccatggagatgcagctgaagacaaaggagaagaggagagaggaggcgccatccactatggaataagccttggaagaaggagcttcaccaccaagataagccttggataagaagcttggagaggatgcttcaatggaggaanagaaagagggagagaaagagagaggggggagcacgaaattgaaggaagaaaaagggagagaagttgaactttgtgttgtgtctcacaagactctcattcctcaaagttacaacaagtgttacacatgcatctatttatagactaggtagcttccatgagaagctttcttgagaaaacttccttgagaagcttctttgagaaaac

SEQ ID NO: 270914 - DNA, 365 bp, Glycine max
tgctacccagctcgtccaagcgagctcagctcgcccaggcgagctatgttgcttcctccagatacttgttttccttccgtaatgttacggaaccttacagattacgtaatcatcccttttttggcttttggaatgttacgaaacctcatggattgtgtaacaatgcttcctttttatttccggcatgttagggaacttcacgggtcgtgcaacaatgctttcttttgacttctgacacgttatggaacttcacgtattgtgcaacaatgggtgccaagtacctcaaagcggtcaagcaaagggtgtatgccatcaaacaatggtccccggacgaaattagggtatgacaaacataaactaataat

SEQ ID NO: 270915 - DNA, 244 bp, Glycine max
  unsure (1)..(244): unsure at all n locations
agcttcaatntatgtgaaatntaatgctaaccctatagtttgacacccaaggaactcattttttaccttaaaatttcaaaataaataacaacatatctacagtttcagtcagggtagtagctacgaattttgaacatcaaaacaacattcaatgaaacttagcttccaaagacaacaagattagggttcaagaattggaaagacccccctttgcttgatgaagctacacgaaactacttagatg

SEQ ID NO: 270916 - DNA, 366 bp, Glycine max
cgatgtcattcagaacacactatgtagacctaaatgaagactaaacatgcattgtttatgtaattgtattcattatgcgatataatttgttgtaacccgttactaactaattaatattatcaagtactcgtttggttaagtaaggaaattgttggtccaacaaaaatcatttacgcgtgcagcttacatcattgtcgtaattgacaacacataatgacatgcatgcgtattacagtttgagcgcgacaacacattggctgactttagtacacattctgaaactagcagtcgctcgacaacacattggctgacttgactacacattggcgacaacacattggctgacttgactacacatttacgcgt

SEQ ID NO: 270917 - DNA, 254 bp, Glycine max
  unsure (1)..(254): unsure at all n locations
agcttgtggttgatttagggatggcctttgtggatgaatgggtggcgggtaatgagaatggatgatattggctgagtaatgacattgctgagttagtgggaaatttggccatgtaggaatgacagtcacaacatgggttccttcctacttctcattctctccattntccccaggcttcccattcatcaaacaggatgatcaaatttgcctcttttcaaacccactttgatcctttcgctagtgaaaactaaatc

SEQ ID NO: 270918 - DNA, 369 bp, Glycine max
  unsure (1)..(369): unsure at all n locations
tctagaggaagcctcttaatgaagcttctagagaaagctacatgaagctgcctcggtaaaaaggctgcccagccttcattataccgtggatcttcacgaaatttggtctgcaacttcacaaaagactttttcatgatctgacagttgggatctttgagaagatgtctggactgtgctaaaagcctcttaatgaagcttctggaggaagcctcttaatgaagcttctagagaaaactacatgaagctgcctcggtagaaacgcttcccagccttcgttaacagttggatcttctcgaactttggtttgcaacttcacaagacactntaccatggttttaaccgtgggatctttgagaaaatatctggagt

SEQ ID NO: 270919 - DNA, 434 bp, Glycine max
  unsure (1)..(434): unsure at all n locations
cgatgtgatatagcatggaagagtcagtcttcctactttagattgttgaccatagagtggtacctacagatatgtctcgagggtcangagacctttgggacgtcaggtgggggtgctactcgccaaaaccaagcttggctaatcctgacccaacccgggcatagtcagtcagtgagaacctgtgacgtacctaaacaagcgagctcctggcagtcaaccaataaaagaacaaagtccgcgaagcaaggaggcttgtgtggcggctggccaactatttatcttgggtgttatctgaatattaccctctggtaatcgattaccattcgtgggtaatcgattacaaggtttaaaaatggagacaggatgttaagtagcttcttgtaatcgaataccaattgtcggtgatcgaatacacagtatgatantgcactggg

SEQ ID NO: 270920 - DNA, 340 bp, Glycine max
  unsure (1)..(340): unsure at all n locations
agcttctcaagaaagcttccatgatttgagtctttgatgcaatccttcttgtgaagggacgagtcaccatagccatgagcatgatgctccaagaggattgggctagagttgctgaagaacgccctangattctcatgaacctcaaggtagatctctaagcccatgggccaaggttgggtccacttgtctttgtaaatattagaataggttnttcttcttttgggccttatattctggccattctagttgtatagggttttagccttgtatatcatggcattttgagtagtctttgtagtacggacttttttctattttcatgtnatttggcatgggggtg

SEQ ID NO: 270921 - DNA, 464 bp, Glycine max
  unsure (1)..(464): unsure at all n locations
aagctctctaaactttttgcaagaaanatgtactaanaagtaatataatattttttttattgatttttatgtatgaaattaatttcattagttatcattaacagacaaattcaaggttgtaataattaaaatcaacgcaatgtgataaaatttggaggatgaactagagtatatttaaagaatttatttataataacttatttacatcttaattgaacttattttatgagattaatacttgtgtaactatttaagaaaacttaaaaaagtaattataatatgtttataagtcattttcagcttatatatttcaaaaaactatttaaaataacttatatgaaaataatttaatcatgcatattttctcttcaattataaaaacatttcatatantaaattttacatgataaatacttattcaacaaatatttaattgagttatttatcctagcatacctttaatt

SEQ ID NO: 270922 - DNA, 292 bp, Glycine max
agcttgacgaatatagacacatcttcttcgaccttggtgattcttgactccatctcattgaagcgcatgtccacttgtaactccaaagtatcaaacctttcaccaacaaaggtttgaagaccatggaacctatccaaaatcttttgaagaagagaggaatcttctctaccatgtccttcttcattaacaggtcgagcacccgttttcacccaagagccatcatgctctttttgtataccaaatgatgcaatgatagtcgcgcctattagaaaggatctcttgattggaacat

SEQ ID NO: 270923 - DNA, 452 bp, Glycine max
  unsure (1)..(452): unsure at all n locations
ttcctgcgaaggagagagattcggaaagttagttttaccaagaaatgctactcttaaaacaaaaatggcgtacaacctccttcaataaacacaaacatcaatgtaaatttagagcaaactcatgcacacacttccttacgaacattcactcgcacaagatattcttctaactaagaaaaatgcacccatgcacaatcaaggcaccttcgttacctagattatttatatgtacttccaaggtgtatttgctacctacatcacatgcacttccttggctaaatttacatacatgcatactcaaagcatcttggctaccaaaaattgcacacgtgcacattctggtatttctaatacctatgcatatacaaactntgtgatgaatcttggctatctacacaataaggtgctacatttcatgctctattcaagtgtttntactacctaaagccgca

SEQ ID NO: 270924 - DNA, 425 bp, Glycine max
  unsure (1)..(425): unsure at all n locations
acgtccaagtttcttgtgccatacccagtgacttcctttgatggataatagacatgttacattttgatttgatagttcactaagattaatcttataaagattatctttccttttagcagcaaaaagttgggtaccatttttgtgttagacaacacacccatcttcgctagaggaaaaatcaagtccactatcacataattgacttatgctaagtagatcctatttaagccctttaacaaacagtacattatcaatggaaggatagggattagtacttatctttcctatccctactatcttccccttctgatttcctctgaaagtgactattccaccatgcatgggagtcaagcattggaacatacactnttatcttattatgtggcatgagcaacctctatccaggtaccatgattggtgttttc

SEQ ID NO: 270925 - DNA, 463 bp, Glycine max
  unsure (1)..(463): unsure at all n locations
ctacccatatcatgaggtgcagaccaatatatcccacttagtcattctctntctggaatcttgtagttntgaaatagcttatagcagaccttatgcgtaataatgtagcttatctcctgtagggcttcaattgataattctgaaactctgaaccaaacgtgattgattcctcatcaagcttcttcttcaacctcctccaagttctcaacatatcagcctgaatcagccccctgtaaagtgactcanaggtacctttcagaggaagaaacccattctctatcatctcaacaaaataatggcaagcctccctccatctctgcctctcacacaacccatgtatcaaaaccgtatacaaatccaaatccggccccgcccctgtctccttcatatcctgccatatctccttcacaaccttgatcatgtccaacctcaaaaacatccttatcanaatcacatacgtatg

SEQ ID NO: 270926 - DNA, 332 bp, Glycine max
  unsure (1)..(332): unsure at all n locations
attcaaaaagaaaggtggagaaagagatgagtgaacgatagaacaaaacttgcatgtattctcttgattttaggattgtcatcatcaaagagggggaaattgtggaagcaaagctttccaagtttattttgatgatgccaaagctttcaagaatcaagagtcaagcaagtatcaagaatcaaagagtcgttcaatcaagaatcaagattaaagtgacgattcaagagaagactcaattaagataagtattaaaagagtttttaaaatattgaatagcacatttttgtcaagagaattntcanagaanaatctttaccaagagtttactcttt

SEQ ID NO: 270927 - DNA, 454 bp, Glycine max
gagagagaggggggagcacgaaattgaatgaggaaaagagggagagaaattgaactttgaagtgtgtctctcaagactctcattcatcaaagttacaacaagttttacacatgcttctatttatagcctaggtagcttccttgagaaacttccttgagaagcttccttgagaagctagagcttagctacacacatccctctaataactaagctcacctccttgagaagcttctttgagaagattcttagagaagctagagcttagctacacacacccctctaatagctaagttcacctccttgagatgagaagctagagtttagctacacacaccccctataatagctaagctcaccccatgccaaaatacatgaaaatacaaaaaagtccctattacgaagactgctcaaaatgtgctgaaatacaaggctaaaaccttatactactagaatg

SEQ ID NO: 270928 - DNA, 110 bp, Glycine max
gtaatcttattttttctttatagacttttatgtctgagaggaatttcattaattgtcattatcagacagatactcggttgtcataattaaattcaacgcaatgggatcca

SEQ ID NO: 270929 - DNA, 608 bp, Glycine max
  unsure (1)..(608): unsure at all n locations
ccactagtactctccnnttatcatctaaggtgntccgattatgttatcgaaagacagatattataanttaaatactaggcgcgagcgtggcgcctgtaatgcccttctatctcctacatccattagagtaaacatcacggatacaagcatcgcagatgtggtctatgccattgtaaagatttatgtcggtctaaaaaacggcacttttaggtatactgcttgcacgaatgatatcactgtcgcacatgatgacggtgaggatgaatgatatgaccgtgctgtgactggcatttctatacagccatatgtgccatcaaccctgcattgttatttcttcgcctgtaacaatccttcttcttaccgctcgatcagttaatcacaagggccgttcctaaaatcaaccacagtgcctacctatcggatctttcattgacatgtcccaccttgagctgataccactaccgccgcgcagtatacgaatgttgctcggtgaattccttcgaattcaccgacatcccatcgttttttgtgggcttgccaccattactactgcaattcaatgggtctccataccccaacgatggtactaacccttacttcctatagcc

SEQ ID NO: 270930 - DNA, 443 bp, Glycine max
  unsure (1)..(443): unsure at all n locations
tganatgatgaagtgtagaagggtggaacttcctgctnttattcgttgaccacagagtggtacctggagatatgtcgcggtggtcaggagactttggggacgtcaggtggggtgctattgcccacaaccaagcttgatcaatcccgacccaacccgggcatagtcagtcagtgagaacctgtgatgtacctaagcaggcgagctcttggcaatcaacagataaaaggaacaaagaccacaaagcaaggaggcttgtgtggtggctggccagctgtgaatcttgtgtgatatatgggttatggcctctggtaatcaattaccaagggtgggtaatcgattacaaggcttaaaaatgaagacaggaggctaagatggtctctggtaatcgattaccaaggggtgtaatcgattaccaggcttgaaaacgaggtcaggaagctatg

SEQ ID NO: 270931 - DNA, 375 bp, Glycine max
agtgttttgcaggggtataccaccaactgcttgcccttcagtggcatatccgaggcaaggctctaagtcggctagattgtggaggggaatttcatgtgtctcccccatggtttgagagacatgtgcatgatcagtttgaggctttccacttttaatgagtattggagcagagttattaacatcctcactgggagtgtatgccccattgggtggtgtatagatgggaggcaagccatatggtaggaagacatgcttgttttctgcactaaatgatggccgcccatacctcctaacttcttgtcttccagacctaccatatctgaagctggatgatctatttggtcgatgtcatatgggggggtcatgtccacctca

SEQ ID NO: 270932 - DNA, 408 bp, Glycine max
  unsure (1)..(408): unsure at all n locations
cggttcgaggtacttacccgttgaagatcgaagaacgatgaagaacgaatgaagaacgtcgaagaacggttgaaacctttgcgagattcctcacggaaaacgttacggaaacgtttcggaagcgcctcggcttagattttcttcacggaaacaatttttccaagcaaattccaaagagagagaagagcctaaggggctgggatcccttttcttcttgcattcctcccctatttatagcaaaataggggaggtggttgccgcccagctcgcccaggcgagcagggttgcttcctccagaagcaaccgccttctggaggaatcttctggagggcccaaatgggcctgggtgctatttgcacccccatttttactaagtacacccnctctgctgttttttggtgattcttt

SEQ ID NO: 270933 - DNA, 101 bp, Glycine max
  unsure (1)..(101): unsure at all n locations
tctagcatgcatngtatgttggtctcgtcctttgtcacgggaagccggaatgtccatatcaccttcttaattgtacacatggggcactgcgccccccaatg

SEQ ID NO: 270934 - DNA, 429 bp, Glycine max
ctgcacgtatcagtcaagtgtatggaccatatcgtagccaaagtgctcatcgataattgttccagtttaaacgtgatgcctaagagcactttggagaaattaccattcaatgccttccacttaaagtcgagttcaatggtggttcgtgccttcgacggcacccgctgagaggttaggggagagatcgatctcccagtacagataggccctcacacctatcaagttactttccaaataatggatattaaccccccctacagctgtctgttggggcgtccgtggatccactcagtgggagttgttccctctacactccaccaaaagttgaaattcgtagtggaagggcatctggtcatcgtatcaggcgaggaagacatcttggtgagctgcccatcctctatgccttatgtggaagccgcagaggagtca

SEQ ID NO: 270935 - DNA, 336 bp, Glycine max
  unsure (1)..(336): unsure at all n locations
agctnntaagcactgaaacaactctccttctggtaacttttcatccaatatctatgtgcttatctatatgaaaaatcatctttgtttgtctttcatgcaaaagtatgcattacttattcatttacatattntttttttctagaagcaagttagatccccatgaccttagagtagactcccaaaaaaatcttgaattttcctggaaaaaaatgggatactatntgaacaattcttaacaaatcaaacaaaatcatattcacttgtgtccttcttctcttttctcatgcatgtcacgaggtaaaacttgagaaactatctatcattatcttcacaaaa

SEQ ID NO: 270936 - DNA, 463 bp, Glycine max
  unsure (1)..(463): unsure at all n locations
cgtgcanatcaaatcactcctacattgtatctctagcatgcattgtatgttggtctcgtcctttgtcacgggaagccggaaggtccatatcaccttcttaattgtacacatggggcactgcgcccccaaatgcgcgagtaagaagagataattttccgggctctcgtgtccgtaaaatgcattcatatcatgcatcgcataagcatctcttcataacatcataatggacatatcctgcatttgtccgttatcatattccagcctcacantttgcatgagtcatggcatcatcatgcatatgcgttcaacaaactttttgatctgcaaaattgcataccatttgttttcatgtttgctcatcccttgcgtttcctctacaaaacanaaacaaagaagggggaagcgtgaaacttcacactacattcttagtttcatgtgtttggggccaaccatgttgggatca

SEQ ID NO: 270937 - DNA, 331 bp, Glycine max
  unsure (1)..(331): unsure at all n locations
aggtcacatatataagaaaaaggttccacatataatgatacaactttcttatttaaagtaaaagagaagtcctcctcaaattttgttttaggtctcacctattaaatcaatcctgaattaacaagacaaagttgcacgtaaatgacgaaaaatgtaataatcatacacattgtatgaggcataagttggtagactagcctatctagaaaggccaattacatctcagtctcaatataagttggtagaatgtcattccaagtcgtggccatgcaagtgggttagatgacacattangttgtcgagtgttcacgtggtcggtaagtgtactgat

SEQ ID NO: 270938 - DNA, 407 bp, Glycine max
  unsure (1)..(407): unsure at all n locations
ttcctccagaagcaacagccttctggaggaatcttcttgacggcccatgtgggcctggttgctatttgcacccccattcttactaaatgcacccctccttctatttctttggtaattcttttcccgtaatgttacgaaactttacgaatttcgtaacgatacttatttttctttcctcaaggctatgaatccttacggattatgtatttactcttnttttagcttttcaaagaagttacggaaactcacgaattgcgcanaaacacctctcttcgactttcgccacattacggaatttcacgaatcgcgcaagcctgcttccttttgatttctgagacgtctcgggacttcatttattgtatgttatcaagtaataatctccggacgaaactacggtatgacacatg

SEQ ID NO: 270939 - DNA, 569 bp, Glycine max
  unsure (1)..(569): unsure at all n locations
ctccacttcctcattctactcctctcaattcgtattatanctattcaaatcctaccgcacnctactccatcgagcngtttagaccttggtgccctggatcgggatcattcgccacccccctttaaactttttaggaatttcactcaagaaagctcttctttgaacatcctaggctagtaatacacacatgtgtaacactagttgccactttcgagaatgagagaactcgcgagacatactttcaagctccccttctatccctcttatattgcttcaatttcgtgcgtcccccttgctcttttccccctcttaacttatctacattaaagcaccctctacaagcttcctaatcaacgcaattcttggaggtgaagcctcttacggcttggcctatctcccaatggatggcgccctccctctcctcttctcctttgctatctgcgcattatcatggtgtaaaatcaccattaaaagacctcacttgagctcaaagacacggccccatatcatccccacaagcaacattccaacaccgaactcttatacacaatatattaaccctgatgccg

SEQ ID NO: 270940 - DNA, 446 bp, Glycine max
  unsure (1)..(446): unsure at all n locations
atctaggtatccaaaacccctcaatttagtggattttcaaggtttgagaagtgaaaatgagaatggccgtaaattggagcaaactttcacctcacacaagtctatatcatcaatctaaacttggtcaaactggttttacgatgaanattctaccgaaccaaaatttgactcctcaacacccaattntaccctagaaatggctcttgccttcattntggtcatttgtttttctctcttgcacagcccaagctttctcataagtcctaaatgacatttcaaactaggattaactccctttaacctccaaataccactaaatccagatttggccttccaactctcaaagtcccactctttttccactcataacactacattctcactntctaaccctaggttaaccctacccttcatccctagtagttttccatccacaatttcagcac

SEQ ID NO: 270941 - DNA, 151 bp, Glycine max
cctatagacgtctgaaaccctatctatcgctgatcctggtttacgtctatcctgccgactgtgatgacgttgactagttggaaaatccaaactgaccttagagaactctaatataggatttgatctaccatatttcatggatgggatttta

SEQ ID NO: 270942 - DNA, 457 bp, Glycine max
  unsure (1)..(457): unsure at all n locations
tactaagctcacagctntttctttctttctggaaatatatgtatttaaaatggagttccttccgaccgcagcatgtattttatcttgacttgtttttgttttcaaggacatgtcttattttttttttacgtttttgcttccctcacctacggagtctgtggagggatacctgttaattgttattgtacttaaatattttttatttatctatatgtttgaactgtaattttggagttgggaccttttccatcgggttatcaattccctgattttcaaaattactcttttgcccgtgtgtcatgtgctgctgttcccatttcttatagtgtattttattttattattgtcagtcctgaatatgctaatttcttatttgcttgcgtccactggtctattggatatctacagtgtatattatattaaaaaaatgtgcacgatctcctttgtttcactcatg

SEQ ID NO: 270943 - DNA, 307 bp, Glycine max
  unsure (1)..(307): unsure at all n locations
agcttacaaaacctangtatctctgcataagttgcttctcttgctgcctctagggctctttttccgaaacaggcattgtggtgtgctctgggatctgttccaatcatctgcttaccctaattttgcacaaaataggctntaaataggctctgaattcgcgatgttgcgcttagcgccaccctcatgctnagcgcgagtaagtgggtttgggcttaacgccagtcgtgcgctgagcctggctgaagacacctgctgcgcttagaacactaatctcgtgcttagcacgcaaccttgatattgatgccct

SEQ ID NO: 270944 - DNA, 434 bp, Glycine max
  unsure (1)..(434): unsure at all n locations
acccatcacatgtggtactacgtggcggtcaagcgatggtgcacaacaagtttttcacatccacaaagcgcgcataaacccaccatcccctgttgcccacctccatctgagctcacgtactcccacgtagcccatatcctcgtttctctcaacaccgggtccccatcaatcctctcaagcttccacaacatccaagcaaaacaacattcaaacagcacaatctatcacagccaagaaaacagagcaaaggcagaaaactctgccaaaacaccaaccaaaatcacagcttttctcacgtaaagaccacagtaacaattccttcgatccaattcgttaaccgttggatcgactccaaaattntactggaagtctatagtgtataagcctgcattctgaccgttgggatatactatcaaacatccagaactcattct

SEQ ID NO: 270945 - DNA, 330 bp, Glycine max
  unsure (1)..(330): unsure at all n locations
gaacatgttaactatgaaaaggttattgataatggttggagccattcattagacgggtgtcctatagacggcttaatatgcaagcttgaagtcataactgttaatctcaagaaatctttctttggggataatcatgactaagataactcttgttactaacctagtgaagttatccgatatgaacatagtcatgtngtattatgagatgctaggaaagacaatgaggctaaagcccaatcagatcttgatcaagctctctcttgcatgagactttgtggaagaataggctttgtgaaatggaattgccattggatacattctatttcacat

SEQ ID NO: 270946 - DNA, 447 bp, Glycine max
  unsure (1)..(447): unsure at all n locations
cgtagaaagtgtctntgataaggtgaacatcaagatctttatcccaaccaattcttactcgttcaccaatgttcaagcaccatgttgcacttgcaacggtaaaaatgtcttcaatcacctatactctagccaccatgtcagtgatatgatccttgaagaggtcaacatcaagatctttatctcaaccaattcttactcattcaccgatattcaagcatcacgttcttgcgatggtagcaatttctacaatcacctatactccagccactatgtcaatgatacgatccttctctatcaatacatttctctaaaattctttgaacgtttcaacaataataactttgtccttgttgaagaagttaacgatgtcatagagaacaaagttattcttaagtgcaatccttatgtcttccaacatgtttatgttgaactgatgttcaatatgaa

SEQ ID NO: 270947 - DNA, 451 bp, Glycine max
cgccttgaatgataattatatcctctgcaccctgttttttagctgaatgatattgtcaaaaatttgaaccctgaacttaaataagtatctcctgataccttgcttagattctatgagagcatatagttcaaggcaaatttatcccaaatttgggggagtggaactaattgggatgcaaagaaagagagaaagcatcaacacacacaacaaataagttttatgttaaaaaaaaggaaaagaataaagtgtgttgatgtaacaaggtcaaaagcaagtgaaagtaaaaagctagtgagcaagctaagtgtattcaaaagaccattgggataagtctgagattcgtgctctctgagaatctaaacctttgaaccctagaaaaaccaatgaatttttgtagtcaagtctcactacaagcctgagaaagtgcttctgattctgtgtatacatttct

SEQ ID NO: 270948 - DNA, 189 bp, Glycine max
cccccctgcgccaaaaaatccagggcccccccgaacctttggggctttttccctttcaaaaaaaaagacaaacccggaaaatctttggtcctctttcccttgggcaaaaacaaaacaccccctgggaatatctgtgtcccccccccccacacaatattaaagacactctcctcgaaattttttgtcccc

SEQ ID NO: 270949 - DNA, 427 bp, Glycine max
cgaagcctcagtatttaaagccagaccatgtaagtttcattggtgttttaactgcttgcaaatatataggagcagtatgaaaagcaagggactatttttctctgatgatgaataactatgagattgagccatccataaaacactacacttgcatggttgaagtgctacgtctagctgcgctactataagaagcagaacaactaataaagggtatgcctctaaaggctgattttattatatgggggtctttgctttcatcttgtaagaagcatgggaatgtagaaattgcgaaacgagctgcacaaagagtctgtgagttaaatccaagtgatgccagcggttatttacttatgtctaatgttcaggctgcatccaaccaatttgaagaggcaatggagcaaagaattctgatgagagaaagattggc

SEQ ID NO: 270950 - DNA, 320 bp, Glycine max
  unsure (1)..(320): unsure at all n locations
agcttgtaggattatggngtacccatcacatgtggtactaggtggcgatcgggcgatggtgcaagacaattctccacatccacaaatcacgtataaacccaccatcccctgttgcccacctccaactgagctcacgtactcccacgtagcccttatcctcgttcctctcaacaccgggtccccatcaatcctcccaagcttccacaacatccaagtaattccacatccaatcatcatgaactaacaaaaccaagcaaaataggcaaatgcagaaaactctgcccacaacacaaacnaatatcacagcttttcacatacaa

SEQ ID NO: 270951 - DNA, 454 bp, Glycine max
  unsure (1)..(454): unsure at all n locations
tataagaacatgagttgcctcaatcatttccaaatatgcatgtgaattatgacgcataaacaagaatcaagccaaggctattgtgcaagcaatcaatggggcaaaacacaccaaatgattatgatgatggatggctcaaattctcacaaaggtaaattcatcactttcaaattgagctttcaaaactatcatgacatgtagagaagaatcaaggatttcaagtcacaaaatgtcaagaacttttattttcaaaacaattacccatttcttgaacatatcctataattcaaagaaaaacatgcaaagtcgtacgtgcacacaaaattgacccanaatattaaactaaaaatccgacgaaactaacaacattaacaaattaacatgactaacaaattatcaaaaccaacaaaactagcaaaaccaaagaacactcctccccctacttaaacaacac

SEQ ID NO: 270952 - DNA, 383 bp, Glycine max
  unsure (1)..(383): unsure at all n locations
agctntaagagcaattcctttctttttcttatcattctcctcatgttgattcaatctcataagtgccatttcatgttcctataactttctaaacaaagtagcaagagacatgctagataaatctcgtgatttagtaacggctgttaccttgggttgccattccctgcttaagcatctcttgacatccagttgtgccttcatgggttacttgtaatgtatcccacatttctnttgcatttntacaattggagactctaaaatattcatccatgccaaatgcagaagtgattatatttttggccttaaattgtattgaacctttcttatttcatcatcatcccattcttctctagggtttctatagttgcatttcccactaccat

SEQ ID NO: 270953 - DNA, 428 bp, Glycine max
  unsure (1)..(428): unsure at all n locations
tctggtgggacatcttgacttgctatccaatctgacattcaccacttattctgccttcttctattntcagagtgtgaatgcctctaacagcaccttagtcaatgattatcttcatgcctcttaagtgcagatgtccaaatctttgatgccatattctgacttcatcttctttggaggatggacatgtggaggagtagcttgtttcttgaggtgtccataggtaacagttggcctttgatctgctgcccttcattagaacttcactcttctcatttgtcaccaagcattctgactntgtgaagtttacattgaatccttcatcacacagctgactgatgctgatcaagattgcagtcagtcccttcaccagcagtactttgtccagactangaagtccatcatgaactagccttcccattccaatgatc

SEQ ID NO: 270954 - DNA, 321 bp, Glycine max
tgaaggcatgtaatccaccatcttctcatatgaggacaccgataacgtgtctactatcatcgttatcaacttcctctccattattgggggcactacttgagctgccatatccttccacctttggacgtaccctttgaaagattcgtgcccccttttgcacaagttctatagctgcgtgctatccagagtcatatcagaattgtactgatactgcctaatgaaggtaaccattaggtctttccaagaatggactcgggaaggtccagattagtgtaccaggtgacaactaccccagtaagactttcctgaaagaaatgcatc

SEQ ID NO: 270955 - DNA, 372 bp, Glycine max
gtggtgaagctccttcttacttgttttattccctagtggatggcgcctcccctcttctcttctcctttgccttctgctgcatctccatggtgaataatcaccattgaaggacctcattggagctcaaagatccagccttcatagaatcttcacaagcaagcttccatcagctgtcttactggtatatcctcaccctctaaatttatccgatgcatacatgtggatgggctaataccaccaatgtccaccagggtccaacctatagccttcttatgcttcttgagaactgataacaacttctcctcttgctcatcaacaagggaggcagatataattactggaaaacttttgtatcatccaagaagcatattt

SEQ ID NO: 270956 - DNA, 412 bp, Glycine max
  unsure (1)..(412): unsure at all n locations
gagggagagaaagatgtaggggggagcacgatattgaaggaagaaaaatgtagagaagtctgaacttgagttgtgtctcacaagactctcattcatcaaagttacaacaagtgttacacatgcttctatttatagactaagtagcttccttgagaagctttcttgagaaaaattccttgagacgcttcgtgtgagacatactccttgaaaagctagagcttagctacacacacccctctcataacttagctcacttccttgagaagcttccttaagaagattccttaagaagctagagcttagctacacatacctctctaatagctaaactcacctgcttgagatgagaagctagagcttanctacacaccccctataatagctaagctcactcccatgacaaataacatga

SEQ ID NO: 270957 - DNA, 385 bp, Glycine max
aatcctgactcaccataaaccttgacccagggtgagtatgccaatccttaccctcggaagcaaaaaaaaagaagagaacgaaaatttccaatcaaaggaaaaaggagaaggaaaatttccaatcaaaggaaaggaaattcccaatcaaagagtgggagaaagcataaagaaaagatagaaaattcccaatcaaagaatgggagatagaaaaaaagagaagtataaaagaagaaagctcctggtcaaagaaaccagaaaaaatgtgccgagaggtccttggactagacgatatctgaacaatacagaattgtcaccaaatgaacaaaagatagataaggataccatgacctaaaagtggtcttctccctttgattaccaaccaaaa

SEQ ID NO: 270958 - DNA, 366 bp, Glycine max
agatttcctgcatgtctgtctgtgtttagaattcgtacatccaacatccctatcctatgaacagcagcaacagataaactataagttccatgatcacttgcatcaaaatcatgaggaatgaactgctgcagtgatgcaatcttgcttatttgctgtgtgttatgatgcatactaccattgaccctgtcattaatattaaaaatagaatgtgtgacctttacaagggcagtagagggcacattggctaaatgatcatggtcaagaaggtaagctgcaacttctcttatacctgtctccccaaccctcactgaacgtttcaatcctggttgtccaagggctttgccaacaaaacctttaggattgttt

SEQ ID NO: 270959 - DNA, 453 bp, Glycine max
  unsure (1)..(453): unsure at all n locations
cgatcatggcaggacttggcgactgccttcattaggcagtaccagtacaatactgatatggctcccgatcggaaccagcttcagagtatgactaatcgagagcatgagtccattaaggaacatgcccaaagatggagagatctcgcagcccaagtcgtaccgcccatgacggaaagggagatgatcacaattatggtagatacgttacccacgttctactatgaaaagctgataggctacatgccagctaactntgcggatctcgtctttgccggagaaaggattgaatccggactatgaaaaggcaagttcgaatatgcttgcaatgtggcccccaacaacaacagaagagccctagtagtgggtgatcgatgccgtacccgaatcaaataaacatgaaaatgcagtaactacgaagtgatcctacgtcatttcccaacgagcagtgacaaa

SEQ ID NO: 270960 - DNA, 341 bp, Glycine max
ggatcctcatagacgtctgaaaccccatcaatccttgttcttggaaaacgtctatcctgccgactgtgatgactttgacaagttggaaaatccaaactgacctcatagactcctaatataagatttgatctagcatatttcatggatggcattttacgccaagattttgtcaagggactaaatgcaagcacccctttgtgtgtattgaatgagctcctatccactttcccaaagttagtcaagctagaacatcctccaacaatgaagatatcattctgtataccagcaacagagaacatgaacctttctctgagaaatgatcatctttctgtccattgatc

SEQ ID NO: 270961 - DNA, 471 bp, Glycine max
  unsure (1)..(471): unsure at all n locations
acgctcgagataccaactacctacaaactgggtgcncagtgcgaccaatatggaaatgagcaganaatcaaatggatggagatttcagtaatgatcttagaccagcaagactatatactaccactcttttacctctttgaagtgtaagaataaatagtctgcaagccctgcagtaatgacactgcctaatgtttgcaatgacagttatcgtaagaatcacaaaaccccgtatactacttataatattntatgccctttccatgaaagctaggaataagagtacacaacaccttttaatttagtccttacatatatagttacattacatctgcattgtcactattgtttctctgtgattcaatcaatcgttttctccttccttctttccattccctgaacattaatattgatattatttgcgagtatggaacttctaaaaactaattgaactcaatcatagtcctatccttt

SEQ ID NO: 270962 - DNA, 402 bp, Glycine max
tcccgtatccgtacttggaaggatctgattactgccttcctaaggcaatatcagtataactccgatatggctgccgatcgcactcagctgcagaatatgttcaagaaagagggcgaaacctttaaagaatacgcacaacggtggagagacctggcggcacaagtggctcctcccatggttgagagagagatgatcaccatgatggtagacactttgccagtgttctactatgagaagctagtacgttacatgccgtccagcttcgcggacctagtgttcgccgcggaaagaatcgaggtatgattgaaaagaggaaagtttgattacgtttcctccacgagtgcgaatgccaaaagaatcggtgcaacaggggcaaaaaggaaggaaggagatgcccatgcc

SEQ ID NO: 270963 - DNA, 419 bp, Glycine max
  unsure (1)..(419): unsure at all n locations
ggaatcttcaaacttattatgcctaatatctctaagccacattataactacagcatctatgcccaaatcaattgagggcttgatggctatttggacacaaccgatatgtaaatacttgtatttacgactatgttcataaattgaattttttgaaagcagatgaaattgttccctaatatcttgtcctagaggaatattattttctactggtttgattatataatcaaaattatgtttatctttaattgtttcaggaatgtacagcatatcctgagggatttctgggatgttccagtcatccatattttgatttatgtcttcgaatcagacttcctcatcgaagagatcgtgtgttgnggcaacctcgtgggtcacgttgtcttgttcattgagtaaattattggtcttgggtgaatgca

SEQ ID NO: 270964 - DNA, 381 bp, Glycine max
atattaatctatctgtgggttgtgttgctcacaggagggacgcactgcccaatagtgtacaacttacctgcgtgcactggagattgaacatctatgcaccctacggcttactcattcctcccttatgaatgacatgcgtcttcatgcacagcatgatagtcatgcttcagacaaatacttatattgttgcctccggtcatgtcaaacttacctgttgtaaacttgagtatgtgtaatcaacgaagtacactcactatctatatagctattgagaaaaacccttatcactgatcttgcactaatgaatattacggcatttgacggtgttcttacttaatattcaataacagattgtgcttacacctggcatgagataacatg

SEQ ID NO: 270965 - DNA, 579 bp, Glycine max
  unsure (1)..(579): unsure at all n locations
tccctccactccctctctctctcacctcttcttctcatnttctttantatctcgcgaccacatattctctgcgcgctttcnncnnccactctatgcattttaanccttatggtgacccgcgtactctatagtcgacctgctcgcatgcnagctcgagatgaggaaatatagaatggtgaaacttccttgctttatttccttgaccacaacagagtggccctggagatatgtctcggggggtacgagacctcggggacgtccggtggggtgcttttgcccacaacccagcttgaccaaacccccccaaccttggcattatcagtcaatgagaacccgggaatgacctaaacaggcgagctcctggcggtcacatataaaggaacacagacaccacaaccacgatgttggtgtgtggctggccactttaacctttggtgaatacgggtaatgcctctgtaacnactaccaaggggggaccactaccaggcttaaaataaggcagaggtacaaggccctgtgatcactacccagggggatctataccccctgaaaccaagctggaacaggaacctttgtcac

SEQ ID NO: 270966 - DNA, 409 bp, Glycine max
cttcgccagtgaaaggatcgaagtagatctgtttagaggcaaatctaatcattctgcttagacgaatgagaaaactggggcaaataaagagggtgaggatgagggagaaacccatgctgtgactgccattcctatacggccaagtttcccaccaaacccaacaatgtcattactcagtcaataacaaaccacctccttacccaccacccagttatccacaaaggccatccctaaatcaaccacaaagcctgtctaccgcacttccaatgacgaagaccacctttagcacaaaccaaaaaaaacaccaaccaagaaatgaattttgcagcgaaaagcctgtaggattcaccccacattccggtgtcatatgctaacttgctcccatatctacttgataacgcaatggtag

SEQ ID NO: 270967 - DNA, 249 bp, Glycine max
  unsure (1)..(249): unsure at all n locations
catgcaagctnggtgcatatgaattgtatactccggcttgttgggtagtgttgaaagtgtgtgtagnttggtgtatagtanctatcatagttccgctctaatcagcggacagctgtgtgtgtcattgtgaacaagctgccctttctctctctntgnactctatatatatgtgtctatctgaaaagcaatagatgagatgagtgtgtgagatttttcngcacaaattanatttcaactaccttctactat

SEQ ID NO: 270968 - DNA, 438 bp, Glycine max
cggaactcctggactagtactagtagcacgaggaactgacgaattgtgaggaaaagcaggtccagataccatggaggctacaagaactggctcctaaagaattattatataaatccaggatcattgggaaaatcaagtcaggaaaaaataaaaataggtccccatagtttagatataagttaatagtatagtctcaaggatcttaggtttaccacttttacagtagcaggagccacattcccagcaggaactggttgccggtttggaatagatccattaactaaaaatccatagaaaattcatgttaattataaaataaatcctcaaccagaacatcaacaaaataagccatttacgtttattataaactgctgaccagtgaccaactagacaagacaaactatagtaccctaaagcaatgtaatgcaaagatacatg

SEQ ID NO: 270969 - DNA, 429 bp, Glycine max
tcaggctgctcaattgctccaggttgctgcatggaagggcaaatgtctgtatggtggtcagcagaggagcacaaaccacaaacccttgcgacaggtacagatttcttattcaaagccagctgggttaccaagttgaccaacgcatccagtttgccttcaagcttcttagtttcagatgatgcagatgggttggtagctacctcatgcactcctctaatgactatggcatcatttctggtgctaaactgctaggagttagagaccatcttctcaattaaatttctggcttcagcaggagtcatgtctccaagggctccaccactggcagcatctatcatacttctctccatattactgagtccttcataaaaatattggagaaaaagctgttctgaaatctgatggtgggggcaactggcacatagtttc

SEQ ID NO: 270970 - DNA, 431 bp, Glycine max
  unsure (1)..(431): unsure at all n locations
ctaatgttataaccatacatgtntttaaattntcctacccgcattcttagattttcaatagcctaaaagaggcataccaaaacaaatttattaatcagataatacaaataaaaaggcatgatttcatcctatggaaacccacctctgcctttgntgatacaaacgagtgcatatcactttccatttcctttattggtgctcttggtgaattacagatgctgcaaccgtcttgtgcaaatcttctagctgttgagctaactgagactggaatatctggacaagtattctatttccttcttcaatcttatccttccgctctaaggcttacaaaaaccaattttgtgatgtcaatatattccttctaattgacacccacaagaaataccgcgtgaaagaaaatgctaaccaattttataaaacaggtttgacac

SEQ ID NO: 270971 - DNA, 453 bp, Glycine max
  unsure (1)..(453): unsure at all n locations
atcctgactcaccacaattcttaccctcggattcttataagaatagaagggaaatttccaatcaaagaaaaagagaaggaaaatttccaatgaaagcaaaaaaagaaaagaaggaaaattccccaatcaaagaatgggagaaagtttaataggaagaagaataaggaaagaaagctcctgatcagggatcgaaggacaaacaaaagatatgtgcagagaggtctttggaccggacaatatctgaacaatacagaattgtcaccatatgaacaaaagagaaggaaaggacaccacgacctaagatggtcttctccctttgattaccaaccaaaatcccgtgcgctagcgactttgtcgccccgcactaaacaaaataacagaataaagaataagccaacaaanatcataaagccataaacacacaaaagccgatagacccaccaaaagaaccca

SEQ ID NO: 270972 - DNA, 353 bp, Glycine max
  unsure (1)..(353): unsure at all n locations
agcacaaaccacaaacccttgcgacaggtacagatttcttattcaaagccagctgggttaccaagttgaccaacgcattcagtttgccttcaagctttttagtttcagatgatgcagatgggttggtagctacctcatgcactcctctaatgactatggcatcatttctggtgctaaactgctaggagttagagaccatcttctaattaaatntctggcttcagcaagaagtatgtcttcaagggctccaccactggcagcatctatcatacttcgtttatattactgaggccttcataaaatattggagacaaagctgttctgaaatctgatggtgggggcaactggcacat

SEQ ID NO: 270973 - DNA, 453 bp, Glycine max
  unsure (1)..(453): unsure at all n locations
taagctctatatagctgaccatttatcagtaagacaagttgagttttattcagaaaattagagtttatctcttttatcttagtgagagtgattctcctaaattcttgagtgattcaagaacaccctggctatatcaaaggactttcacaacctttgtgtgttgccctcgctggaaagagtgattctttccttcctatcatctccacccttgttctttcaaaccacaattccagaaaatccacctctgcccaaaattagctcgtgaccataactcccattttatacactcaaattaagtgattcttgagcctaaattgaatttcaaaacgagacctttcacctcgtttttgaatcacctcatttggagccctgtagcttccgttattgtcatttctatatttctgtccagccaccactntaacctacgtttaccatcccattcatccattttat

SEQ ID NO: 270974 - DNA, 420 bp, Glycine max
agctcattgaagaagttttgaaaggcttgaagatacaagttgaagcatttccaaaatagtacagcaagagcaaatctctaagtgagaaatctgcattttagcttcaactctcttcatgagagcgaccatgttctgtattgaacttgaaaagtctgtaataatcttagatagaagtttgagattaatattctaagtggaatcccttgttttgaggtgaaaacctatatttatgtagttaaacacaaatcaatttttttgcaaaagtcctataatggcaggcaatttaaacagaaatcattttttctgaaaaagtccggtaatggctggaaaaggtgaaacctactggtgtaactagtcttgtcaaggccgagattaaagtcaaatgggaaattgaatggttattaaaacccagtagttact

SEQ ID NO: 270975 - DNA, 431 bp, Glycine max
atagaacaagttgagtagagtccttcttaacattttttaaacacttctgctataaatgcaaacacaaaattttcctacttgctcaaagttgagtaaattccttcttaacatttcaagacactgcaaaacaatacaataatttgcctagttactctaaagttgagtaaattccttaatgtgggctttccacattcttggttatatcaccgttcacattcttatcaatctatgactagataactattagtataaccgtgagcaaggatggtccaacctatagagagtggcattaaaatgaaattgagtataaaagttcatggcttttattgtaattaagcagaaaatttaattcagctttcaggtacaatccaaaatatcctaatatacccccaaaccattgctccatttatactttcttaattcacaatctc

SEQ ID NO: 270976 - DNA, 254 bp, Glycine max
gtctcctgactatggaatacaggtcagtctggtcttctatctaacatcttcgatggggtgattagtcggttgctccattgttgttatgtccgctttacttcttattatagtcataaattctcagggtcgagatatatgttacctggcttcgtggtgggcgccaaattgttattgtcacaaatggatcgagtactcgtgcttttgcccagggccttctactatgttgaaggatctctagagttgaggggcatctg

SEQ ID NO: 270977 - DNA, 473 bp, Glycine max
tactacgctcgtactcacctataataccatgtaatagtccgttgaaagcatagaataatacttgatcatttcttccttctcttgcttctgggaggtttcttgggcctcgaacaccaagtataacacatgttttcttgaatttctttgtctagaaaaccacatcattaaccagttgagccaactagggttaagcgacataaaggttaaattaaatttaaagtgagcttttgtggtaaactaaagatgattactcttttcattctgggaatgtgccatgcatcaatgggagagagcgcactcactctttttctgcttaacgtctacggtgtgtttgttacacatgaaagttgaggggtgaaagtgaaagacaagtgaaaagagctgaaagtaaaaaaaaatgtgtttgttgtggcataaaaatttaaagttagttgtaatatgttgtggtcaaatgacaagtcatgatcaaacga

SEQ ID NO: 270978 - DNA, 451 bp, Glycine max
  unsure (1)..(451): unsure at all n locations
cggtggagtgtaaagaaaaccgtggaatgttcgagctangatataatcccacacatgccgacataaggaaaaacaccctataaagaagggaccgaagcatgcgcccgcagcaagaaccgcaagtggaagggacttccttatgtcatatcatttaaagcttcatcagcgtaggctggatgtgtgaagggcggatcgccatgatcaacaatgaagtccctcaagagcaatcaaactcagtatggtcatgccctcctgagttcgagttgggaaactggcaaattatcgaacaacccaaaattttcatggcaaacataatgtaatttgttagtccaaaccctatagctgggcctaggctttagggtttccccctttttgggcttgtcttttgctatcaaaattatancaaatacagttttctccatttgttcttgcactttcacccattctcatt

SEQ ID NO: 270979 - DNA, 423 bp, Glycine max
acttacgggaccactatttcttcaaatacggaacaactacttcacgggactaccaaatcttcaaaaactttttacggaaaaggatagcaataccaagaacaccgggatgaaggtgaaaccaaaaaggtgttaaacggaaaagtagcgcagtaaatttaaagaaaccaacatatggacaaaatcgtcattaaatatgcattaaatattattttatttttagctattattataaaattaaatttatttttacttcacgttattataaaattaaaattatttttttattatatattaagttttgtaatacaagttatcataataaatattctatattttttataaaatatacgaattaattaatttttatgattcaaattatactaaattgtcacacaatttattatttaaatttacatgcacgta

SEQ ID NO: 270980 - DNA, 368 bp, Glycine max
tatatttagagatatttccactattttatcaaacattttgatatttataaagcttttatattaagtctcttgtttttctttttctgccataacttaagcctatacataattctttaccctatgtgtggttcctaaagattagtataatcatcacatactaggtatcttttagaattttttaaatgaagaagaggatactatttcgataatcaatatataatcataattcatgataatcaatctaatcaatataatcataattcatgctaatcaatatatactatttcaataattccctgaaaaaggatacatctatatataatcataactcatgctaatcaatctaattcatcctgaaaagaggatac

SEQ ID NO: 270981 - DNA, 147 bp, Glycine max
catttaagaaccatcgaggagtgtttactaggctcattgcattaaagtagatatttctggggagcgacacatctctctggatacaggcgatcctgaaacttcaaatcatgccgccttgtacatcaagctagggggatgctcgaaatt

SEQ ID NO: 270982 - DNA, 242 bp, Glycine max
agcttgtcacaattgtgataaaccatatagaaacgattgatgatttcaattgttggtgagcccaataaacatggcttggcgacagccaacgaaggcccgtagtattgtcgggtattgctcacccgtgaacaccttgaggccgaatgagaagcatgcactgaggcagaaaaataagaaaagcgcaaaggtcacaatagtggtggcgagaactgtgcaacagcatgcccagaggcggaatggaa

SEQ ID NO: 270983 - DNA, 382 bp, Glycine max
  unsure (1)..(382): unsure at all n locations
cttncaggtgtgcgatactggtgaataaatgtggcacagtataacttgaataatcctccacggttactcttcttggctcttcagccatgattgggtcttcaacaagttctatatgagaatgccctgccatatgaaaactagaagatgcctcggaagatcgaggttattcttctagagttgtcgatgcttctaaatcctgcaaaaaagttctgattctctctgaactacgccttctacaagtggtgttaatctccaaatcaatgggaatcaaatcacctacagtggatcttctttgcctacaaaaaaacagaacaacaattatccagttcaaaagaataatgaatttacagtgacacaagttacaccaaagaatcgatgaatc

SEQ ID NO: 270984 - DNA, 430 bp, Glycine max
tcaagctgttcaattgcttcagattgttgcatagaagggcaaatgtctgtgtggtggtcagcagaggagcataaaccacagagtttggcgacaggtgcaaattttttatccaaggccagttgggttaccaggttaaccaaggcatctagtttaccttcaagcttcttagtctccgctgatgaagatgaattcatggctacttcatgcactcttctaatgacaatagcatcacttctggcactaaattgttgggagtttgaagcaatcttcttaattaaatttctggcttcaataggggtcatgtctccaagggcttaaccactggcagcatctatcatccttctctccatgttactgagtccttcataaaaatattggagaagaagctactcagaaatctggtggtgagggcaattggcacatagtttct

SEQ ID NO: 270985 - DNA, 164 bp, Glycine max
cgcgctcacaaaaatgagatggagggagaaactgccaggactccttacacaatattattatcaccttaatttttattttatggcaccccttggatcttttgatatgggacaaaaatgtatgatggaaatcaataacattatatttactcaattggtttttaact

SEQ ID NO: 270986 - DNA, 514 bp, Glycine max
  unsure (1)..(514): unsure at all n locations
ttgaacccatctcgtacccgtgtcctcagagtcgacctgttgcatgcaagctcgcagactagggatntatctaccacctcaaaactcaggaggctgtgtcataaatacagattcctcaaaaaacccattaagaaaagcattgttgacatcaagctgaaataactcccatccttgagaaagagcaagagtgagaacaacatgaattgtgacaggcttgaccactggagaaaatgtctcatgaaagtcaaaaccatgaacctgatgaaaacccttagcaaccagcttggctttgaacttgttgatagaaccatcagcattttcttttactccgaaaacccctttcacccaatagcttgtctattagaaggtaggggaactaagtcccaagttctgtttttcagtaaagcgtcatactcctcttgcatagctgcaaaccaatctgaattttctatggcctgtttaacagtcttgggttcagaatgagcaagaaacagtgaaggatgcagtgtangat

SEQ ID NO: 270987 - DNA, 429 bp, Glycine max
  unsure (1)..(429): unsure at all n locations
gctctacatttacattcatgcttgtatttattggaggcgggttgtatgccatttttgttttattggtagcatttcttggttaaaactaactttccaaatgtttgccttcgcacgaatggccccgaggaagcttgcctcaaagaggtccaggaaggacaaggcggccgaaggaactagtaccgctccggagtacgacagtcaccgctttatgagtgctgtacaccagcagcgcttcgacgccatcaaaggatggtcgtttcttctggagcgacgcgtncagctcagggacgactagtatactgtatttcaggaggaaattgggcgccggcggtggacatcactggttactcccatggccacgttcgatccacatatagttcttgagttttatgccaatgcttggaaaaagtgtttccgtgaagaaaatct

SEQ ID NO: 270988 - DNA, 580 bp, Glycine max
  unsure (1)..(580): unsure at all n locations
tccccctactgtctttcgtcttcatcnatagatccttatgctgttgttttctgaattgatacnnaccccgagccatgaatcattcgacacgtgcctatacgtcgacctttttgttagcaagctcgcacacgatgctttaatgagagaaatcatgagagaacgcgttattcccatcttgaatgaacaacacagggagagaattctaactctgagttgcgttccacaacactctcattcaacaaatctacaaaaagtatacacatgtttctatttattgactccgtatcttccttgagaatctctcttgtcaatactctcttggcagctgccattataaaactttcttgagaagctagagcttatcttcacacacccctcttattactcatcttcccttccttgaaaagattcctatagaaagtagatcttatctacacacaccttcttaatatcctagctcacctcctcgagatgacaagctagaacttagctacactctccctataataggtaggcccacccctatcacaacatacgtgatattacgaataacaagtccctctcaccagactactccaat

SEQ ID NO: 270989 - DNA, 389 bp, Glycine max
  unsure (1)..(389): unsure at all n locations
gctcgtagctcttagaagagaatgagcatgtgattggaagtatgactatntatgttagtcagtttgtcagattgattgtgaaggaatgcattgaccatatcccggtgagagtgtgatccttaaattttgatagaaacaactatcatttagtactgatttttgcatgaatctctgaagtatggactgaatgtatgaaattgaggatgatgaacgctatgtttgattgtgatagccacttagccaaaaagctgaccatgtgcttgaatgatttatcccttgtacccagtttgagctgaatgaattattgattgattgaaccctgagcctatacagtgttatctcctactaccttgaattaggttgtaggagagcatcatccacaggaagcg

SEQ ID NO: 270990 - DNA, 322 bp, Glycine max
  unsure (1)..(322): unsure at all n locations
ctacttgtagacatagacttgcttgaaagctttcttcacttctccttaagaaaccttacaaaggcaaaagctgctctcacagctgcaagaacagctgcaaatgctatttatgttcctccagctcaacaaggtgccatagatctacagagtgggattcttcacgcagaggagaaggattacaaaactgcatatagttatttctttgaagctttgagtctttaatgctcttgatgaccccaaggctgtatttagcctgaaatacatgtngntatgcaagattatggtgagtcaagctgatgatgtggctggaaacatatcttct

SEQ ID NO: 270991 - DNA, 335 bp, Glycine max
  unsure (1)..(335): unsure at all n locations
acatcttgacttgctntcagagctaacattcaccacatattctgccttcttctattttcagattgggaatgcctctaacagcacctttgtcaatgagtttcttcatgcctcttaagtgcagatgtccaaatctttgatgccatattctgacttcatcttctttgaaggatagacatgtggaggagtaactggtttcttgaggtgttcatacgtaacagatgtcctttgatctgctgcccttcattagaacttcactcttctcatttgtcaccaaacattctgactttgcgaaagttacattgaatccttcatcacacaactgactgatgctgatc

SEQ ID NO: 270992 - DNA, 303 bp, Glycine max
  unsure (1)..(303): unsure at all n locations
tgttgatatcgagtgtacattgtttttcttccatgtttcatttgtacgtagcttgtcttcttcacagagggcatggacgatggcccttaataccatatccactcaaattctcatatgttagaaagtcattaatggtacaaaataccattgcatgtaacttgaatgtctcattctgattctcatcaaacacgttaacccttttattccanaacttccttaagtcttcaatcaagggacttaaataaacatcaatgtaattntctaactgtcttggccctgatatcatcatagagaacatcatgt

SEQ ID NO: 270993 - DNA, 461 bp, Glycine max
  unsure (1)..(461): unsure at all n locations
aagttagatattatttattattatagtacatgtttatctatttgttataagtatattatatatatatatatatatatatatatatatattgtagttagttaattgatacttaggggtgcatatcaatgttttatacttactgttttcatttggttagtgcgtgtatactacatagattttatattgtcattaattaattgacacaaaagattttatagtgttgctatgatatgatnttgaaaattatttgagtcgaggtatatgattcatgagacatgataaattgttatcttgagattatgaaattgtgattgagattgagtataagtggcaagttgagcatgtgttaatttgtgagatatacgtgaatatgtgatgatggattgtgacattgtgagatgtttaatcgtagacatgagatatggttgtgaataagtgttcggttaatacttgatgtgata

SEQ ID NO: 270994 - DNA, 311 bp, Glycine max
ttgtttcttgcaattccaagacactagagagctttctaataggtggcatgtctaacttgtgctttttctatctaatttgcaacctgcaaaattagaatatgaaaagcctgttagatttaaggaagtatccttgggataccttaaacctacattggttgtgtccttaaggtacttaatgatctttttgatagatgttaagtgagattccttatgattggtctggaccttgcacataagtaaacactccacttgtttaagtagaaaagtgatccaatcatacctctatatcttgactcatccactggattttc

SEQ ID NO: 270995 - DNA, 435 bp, Glycine max
  unsure (1)..(435): unsure at all n locations
ctatacggagagaaaagaagctntaatggttattagagttcaactcttaaaataagataacgcacctaaattttatcctttctaaacagttgcaggtcggagtagataaattggacaaaaatttagacattggctcaatggctccatttacccattaatgatgctaataatacaagttgcttcttgaagccttgttttctttgaatttgtgggcatatctataatctatatgcacattaatcgaagcatatacaagaattctaaatagagtaaactactattccctgaatgtagcaagtggaactggtagctcctgaatgtaactaaagaaaagtacgttggacgacaaatgcagcattccgctgacaatcgagcttgggtgcttgagaacaacgtcatccttggggagcacccagccagaatccaaatccctct

SEQ ID NO: 270996 - DNA, 407 bp, Glycine max
  unsure (1)..(407): unsure at all n locations
aacataagcacttacactttgaatgaaagctggagttgctgcacatgatgtccaacgttatgtcaaagaataagatcgggctgcacaatgcacaaggcaagataaagtgtcaaatgaagaattgaagctgtaggattcacgatgtcggatacaatgtccaggacatcctgcctgaaaatactggaattgctaaaagcattgaagctgcaggatccacgatgtcggatacaatgtccaggacatcctgcccganaatactgcagttgctaaaagcattgaagttgcaggatccacgatgtcggatacgatgtccaggacatcttgcccgaaaatactggacatataaatctgttatatctntaacagattattgtgcagttagcaagagattagatgatctatcttta

SEQ ID NO: 270997 - DNA, 272 bp, Glycine max
ggcgagtctacattgattatacgaagctgaaccatgtgaccaaaaaggatcattttcccctgccattcatcgaacaaatgcttgagcgcttggcaggtaaatctcattacttttttcttgatggcttttctggctatttacaaaatcatattgcttctgacgaataaaaaaagaccacattcacctggccctttcgcacttttgcgtatagaagaatcccttatgtctatgcaacgcctcctgtactttccagcggtgtatgccttacattt

SEQ ID NO: 270998 - DNA, 405 bp, Glycine max
  unsure (1)..(405): unsure at all n locations
cgacgcanatgattctacgacctcatggaatcagacaatgtagtatgataccaagggagccaacccttccaactctacatgtgtacttgcttcccagcaaagagattccattaagatattatggccaaccaaagtttaccacattgatgatgctaatgcatgctttatgaataaccctgaggataacttcttgaaacgtatgttgccgctacccactatattctgccatcacctctttgacattcaaaagacaataatggaaattctaaaattctacatccaacgccttcatagactacaaaaagctgacaaagctaactataaggagacttggaaaattaggctggaaaaggaaaccaagagttgatgtagtagccaaacacacagctatcgtcaaaaggaaag

SEQ ID NO: 270999 - DNA, 503 bp, Glycine max
  unsure (1)..(503): unsure at all n locations
tggactagatcattgaaagcccgtgaatttcctgtaaaattctgcgaaagaacctngcnntcannnttangagaagaattataaagtatgtgttaaatgttgtacatgctgctgaatgatatgcttgttcttatatgctacttaaaaaacagaatcatgtggaattcatttgaaaaagaagacgaaaagccattaagttgagtgaataagatcttatatggaaaacagaatgatgagactcttggttctaccctctgtagtagaattctatctttaagctttcttttatttttattctaatgtgcacttacttcctattggttctatattccgttgtggattaactacttattccatatttttcccgtccttttctctgggacaatacaaccctaaaagaccttttgatcttcatgcgcttggtgtgatggttgattgcaatttaaaatctggccagtttttgggggtgcgtttatgggggtttgaagcaaatatgccctacc

SEQ ID NO: 271000 - DNA, 442 bp, Glycine max
ctgagctacagatatgctggaagcagggaataatatacccgaacctgttgctgctttcaagtatctgagaatcctataagctgcttgttgatgagctgaagaaggatgagctacaaattgacttaaatgttgcaccgcatatgtgatatcaggccttgtgtttatgaggtaaatgacgcgaccaatgagcctacagtacgatgaagttgctgtatcatcaagtggagttccagattgttggtgtagtcttacagcatagtcaatgggagttgagacaggtttgcttcctaacatgcctgcattacgcaagatatcaagaacatattttctttgaaaaatattgatcccttgtttacttcaagtccaagaaaaaaatgttaaagtaccaagatctttgattttaacaacttgatccagaagctgagttatggacttaatttct

SEQ ID NO: 271001 - DNA, 416 bp, Glycine max
  unsure (1)..(416): unsure at all n locations
catgatggttgaatcaagatgattcaaggagttntgatgataatttagatgatgacaaaaagtccaagagaatgagttcaagattgaatcaagaacacttcaagaataaagaggaaatttgatttcaagaatcaagtttcaagatttaagtttcaagaatcaagaataatcaagttgaagattcaagaatcaagataagtactaaaaagtttttcaaaacattgagtagcacatgaatttttcacaaaaccttttaccaaagagtttttactctctagtaatcgattaccagtttattgtaatcgattaccagtagcaaagtttgttttcaaaaagctttcaactgaatttacaacattccaattgatttcaaaatggtgtaatcgattacaatgatttagtaatcgattactagt

SEQ ID NO: 271002 - DNA, 268 bp, Glycine max
agcttaaagatccagtcttcatagatgccccacaatttagatcccatcagtgaccttgactgggcttcctatgatattacctaaggcgagtgacttgacttgctagtgtgtggattgtcttgtcatgtacttctaggcgcccgacaaggttttcactgacatggagccacattgcatataggatagagtcttaatgtatttgttgcataacgcttgtgtattgctctatattgatttatctgatgatattgcgtgttgactattgaga

SEQ ID NO: 271003 - DNA, 426 bp, Glycine max
  unsure (1)..(426): unsure at all n locations
ctacataagattntagtaatgatccactaacctagaattaaaagaacttaatgccaataacctagggaattaaaataacataatggctgagtgtaactgaaattgtggcaaccaaaagtcacccccaacagccatcaagccgaccaccatttggtctcccaaaaggctgatgcctacgttgccaattgggcccttattacaacttaaactaaaccaaactaaagcctctttagttgattaacccaaaacatattnttggtcagccaactttacaaggattaggccattatttagacaaactaaacactctaaaattgagacaaagtggtgccatttagtcttcctccatttgggccatgatacaactcacaaccttgaacttttcttcttgaaactttggcttgtattcaaatagtatggacaaca

SEQ ID NO: 271004 - DNA, 154 bp, Glycine max
  unsure (1)..(154): unsure at all n locations
gattacccatcgtatgtcccggaaccgcatacccacgaaatttcgagagnaagaagtccacccaaacctgatatttggaagtcccacttgtagccacgcactttacgactacaggaatgccctctttttgctatttggagcggaaatgagcacc

SEQ ID NO: 271005 - DNA, 404 bp, Glycine max
aaagttaattatttctctttattattcaatcaaaattatatcattagtaaatcaaccaagtgggtgaacataaatgattagtgtactggatttaagattgaattaatcgagtaatatccgagtttaaccctcagcgaaaataattactagatatttaagtccaaaataatatcattagcaaaaacacacaattagaatttttttaagatatttagtaagcacatcttatacttgatcaaacaagtaataacttaaggctaagcattggaagtaacactaaataaaattaaattggatgtgtcttaagaatattaattaattcttaaaaatcacattaaaaaaaaaaaagaaagacattcataatatatttttaatagaaacttaacttttattcccttccctcc

SEQ ID NO: 271006 - DNA, 438 bp, Glycine max
  unsure (1)..(438): unsure at all n locations
cggaagagagactgactagttccatacttgttactggtggaagttctcttttccccggtataattgaacgcctggaagttggaattcggatgattagaccttgtggcacacctataaaaatagttagagcactggatccagtaatggatgcatggagaggggctgcttcatttgcctcggacccacagttccatcagcaaacttttagtatactggattatcatgaaaaaggagaagactggcttcgcaattatcaactgcagtatactttgtaatatgtcattgatcacagtatagtgctgtatattgtctagaattttcgaccatatatagtttagaatgtatattctcctgtngtataatcctttgtcttggctttgctgaagctagaaccgggaacatcaacaaaagcatggtgctaaactgctactgttaata

SEQ ID NO: 271007 - DNA, 273 bp, Glycine max
  unsure (1)..(273): unsure at all n locations
gatagtaggagtgtcaaccactggtattgagggctttattattcattngtcattggctgaatatgcaccactcaaattagtatttagctcggtggattggtcatattgagagggtatatccatatttgtggcccatacacaaaatccttatcctagttgtgaagacctctaaaacttattatttgattttcttatcgaagaatttaaatcctaagcaaaggtgatcatcatcgaggactgtgtttgacgaaaaattgtctgtgttntaaagtt

SEQ ID NO: 271008 - DNA, 463 bp, Glycine max
  unsure (1)..(463): unsure at all n locations
tctagagagctntacactactttagagtgctccagaacgttctataatattctacacttttccagaaagttctaaaattttctagaacctctccaattaaggagggatcccaacagaaaggatgttcctcccacgatacaagatcaatttttatcttcttttgtgatacaaaaagctaaccctatgataataggaagtcatctatcatcctgtatcaagtattagtatccttcagaaactctagaagaatagaatactttttaaatattctaatcataggctatcttcgaactattatatatctaaaggtgactcgtagccggcacaattacatattaaaataatgtcattcgaataatagtaataaatatttcaatgtgtaaatacaacaattttatggatatggtgtgaaatttgattggtggcgtatccactcaacgcttttatccattttagacattga

SEQ ID NO: 271009 - DNA, 270 bp, Glycine max
  unsure (1)..(270): unsure at all n locations
ggccttcatttaactgtcttggggcttggcggccacactcaacaaagtactttcgacacctactgnacgttgatttcaccaatgctgttatgggaatgttgcgacaatcccttaaaaccttattgatacattctgagaggttcgttgtcatgtggccatatcgacgtcctttcctatcgtaagccatcgagcatttttcctttgagatgcgatctatccatgttgctatggctggactcactcacgatattttctaaatcttgaccaaaa

SEQ ID NO: 271010 - DNA, 446 bp, Glycine max
  unsure (1)..(446): unsure at all n locations
tgacagagtcacgtgacccgcaaattttctgattgccatgtgagaattcaatacatgcacgatgataacccttttggtttctctccccaagcgtgtagataggcactggttttagaggaacgggcttaaaaatcatggtgggtacctttctttctatcttttcaacctacattcacttcctctcttcagcccttaccggaaaaggtcaagaaaatgaagaacagaatcaaagttgctaagtaggactatctcatgatgctctcagaagctcacttgctttccccataaaggtcacaactttgttcactctcgacctcttcctcacttaaaggtgcatcttcaaggaaatgggaaataaaaaaatgttaatacaattgtgataatggagaacaagatcagagatacagntntctcacagttgatgctatatagcaaagttgacaaaa

SEQ ID NO: 271011 - DNA, 272 bp, Glycine max
  unsure (1)..(272): unsure at all n locations
gcatgcaagcttagttgaacaatgtcaatgctgctctatattttatttcccctaactaacaatgtataattgctagcttctatgggttatctgcctaagggctgattatctgtctgaagctaaagtaatgtcagatttttcttaaaataatcgaaatctaattgctttgggttatcttgtcggctagtaaaattagaaaanagaatgagctcaatattattgaagctagattatcctgtctattcatgctttcgttgaagaaaattaatttt

SEQ ID NO: 271012 - DNA, 387 bp, Glycine max
  unsure (1)..(387): unsure at all n locations
tcaagattaagtcttcatgtngttccccctatctctaacagtaggtctacttttgaataaatttctcaaaggtatactatttggagataatataacaatacctattccataaccatctacatgttttgatccatcgaaataatacccaaggttttactcctacataacattctaaaattttgacacaagtatgattaactaaaaaattgccacaatttgacccttaatagcttttaatggtacaaagtttaaagaaaatatcgtcaatgcaagagcccattttcctattctaatatccaatataaatttagatagcataaattttataacattattatgagataaaacttgaacattgaaaggcctaaatgtatacttaagttaata

SEQ ID NO: 271013 - DNA, 390 bp, Glycine max
  unsure (1)..(390): unsure at all n locations
tgctagatctggcatgcaaccattcttttgacagttatctttgagctgtgtgcaagattaaatatataagctcatcaatgttatggtttctcactaanatataattgtcgcttcgaatctccattatgcatggagactggaactaagcatccactcaaaactttcctttttcttntttcttccatcagtgcttgtgtaaacccgaatcattcttatacttatgtggacagatctattttttattcggtatcaatgctttctagttatgtgttcaccctggttatttcttttaacttaataccattctatatgatgactctatttactctgtttctggcctttacattctgttctgtggaaagctggggtctcacctattgctgaataaac

SEQ ID NO: 271014 - DNA, 427 bp, Glycine max
  unsure (1)..(427): unsure at all n locations
tgataagcagcagtgaataaataatacatttcgtctacactctntgacttatgcctctttctttgcatggctaatggccttcatgagtggtggctcgccaactttaatttttgcttttaccaaagaaaagaagtgtaaacttacaccgtattttgggatgtattgggtatagaagaagaaaaaaaaaagataaatattaatttaacaaactattagtatcaatctacaatgtttatattaataattaattagaaaaaccttctaaaaaaattattaattagacaaaagaaatgttgcatcattaatagaggcaaaaatattaatagaggcctactcatcttttaattagtaattataaatctcatagtatatgtctgctgcatatataaaaaaaaaaactttaacccgtaattatttagatataata

SEQ ID NO: 271015 - DNA, 165 bp, Glycine max
agcttgtatgaggttggctacaataatatttttgttatagaatgcaagggtcagattgtgagagagcacaagtcctagacctttcccaatgatcttttctgtttatacaatagcttctactattttgatcttaaagtcgatttgtaccttattgaaacaggacac

SEQ ID NO: 271016 - DNA, 414 bp, Glycine max
  unsure (1)..(414): unsure at all n locations
tgcttacagaaatgactatcccatcagccctcatgcctccattgatgagttgttgttctccttttagcatttttgntcactccctacaattaagtgtcattctcctttgatcttcggcttgccattgctggattttagtgctttgtttgcttgtattttcaaatttcatgaggaaatgaatgtctggattcatgcttgattgtttgaattgtagggttgtatgggatggccgcaagcctattgtgaactctgagatgaatgggcatgtcacattccctccgatccttatttttttcatgtctaaacatgcacccatcaggtgttccgtgacatgccctaatggcatttgcgtgaggttatatggaatgtagcttgtggaaaaaattgtcatatgtgactgcaactttgagtgtg

SEQ ID NO: 271017 - DNA, 466 bp, Glycine max
  unsure (1)..(466): unsure at all n locations
gccgctgaccttgaaccctggattcggaacttcgagacactcaggatgcngcttggacgaggtgagaggtatctatgacatattagagggcatggtattctcatgtgccctaaagacaactgacacactcatgtactgctctgagcaaagaagatcctcttattcgccagaagacatatcgcacatcacatcgagaccatcgtggacatttctgatgtgaaccttcaaacgaagtttatgaagcaccaatggtatatgaatgcatgaggactcttttaccgagacagcttacgtacctgtcttgagaagcttcttgtgaggctattttgaaaactttcttgagaagctttttgagaacttaagttttcctaccacacccttctaaaacccaactcccctcttggaaaaagccatgtccatccccccataatgaattcccccctttctatcttatcttgtcgggtcg

SEQ ID NO: 271018 - DNA, 423 bp, Glycine max
cgagatgagagagtgtagaagggtgaaacttcctgcttttactcgttgaccacagagtggtacctggagatatgtcgcgggggtcaggagaccttggggacgtcaggtggggtgctattgcccaaaaccaagcttgaccaatcccgacccaacccgggcatagtcagtcagtgagaacctgtgatgtacctaaacaggcgagctcctggcagtcaacagataaaaggaacaaagaccacaaagcaaggaggcttgtggtggctggccagctgtgaactttgattgatatgtgggttatggcctctggtaatcgattaccaagggtgggtaatcgattacaaggcttaaaaatgaagacaggagactaagatggtgtctggtgatcgattaccaaggggtgtaatcgattaccaggcttgaaaa

SEQ ID NO: 271019 - DNA, 305 bp, Glycine max
gcttgcataatgatgttggcatgagtcatgcatatttctatgttataatcatagtaattatcatatatgtaatcataaaaattagcatatctgtaattacgggattcagaactctttttagaaattataattatgcttaaattaggcgaagtgttatcatatatatatatatatatatatatattgcctctcctagagaagaataatatttctatgtttttaccctattttgagtaataagcctcgagctttgaaataaataaaacataatctaacattagcaacgctcaataatcatataaaga

SEQ ID NO: 271020 - DNA, 417 bp, Glycine max
cttattcgaatgtgttttttgtacccattgaaaggatgattgaatgagagcattatatataaattgttgcatcatatagaattatggtattaacccagcgactataatgtcacaaagaattatacgataaaattaaaaagaaacatatttgagttgaagttacatcaaattaatatgaaaaatagtattaacttatttcaattgagattctcaaatttaaaaagaaaaaacattaaaaatttgttgattaatcaattgagaaaatctttccaagacaaacatttaaaattattaaggttattatttttatttcattgatatatttggtttacaattaactaaaaataaaatataataacataataaatatatggatccacatgcatttttactttgactgttatgtatacaatattt

SEQ ID NO: 271021 - DNA, 439 bp, Glycine max
  unsure (1)..(439): unsure at all n locations
gcatgcaagcttcatgatacacgtattgtnnttatatgccaatagagannnaagaagaataccagtggtactcataataaaaaaaaggtatggagaataaagaaacttataacacacacaaatataatatttgtagtgtctgttgacacctccacactttggggagtctagattgatgtaattttctgtttgatattgaatctataatctataatatttgattatcattaatgaaggatatnttttgcaagtgtcaagttantactattcattgtataatacatttatacactgttgtcttcttttatattcatttcttatacacattcttctttaacataattattaacattattattttagaaatcctataaaacatattttttagataaagctatttataataatttaaataatctccattcataataattatttt

SEQ ID NO: 271022 - DNA, 172 bp, Glycine max
cgtagtttttctgagctcgaagactggtgtagatcctagcggctatcgctcttcgagacctctctctcctcttggtgatatctctctccttccatgtcggcaacctacccgtcgatccgccgccggtcatcgatccggcgaaacaaagcttgtttgatccgacacctcttct

SEQ ID NO: 271023 - DNA, 201 bp, Glycine max
cacaagtcctaaccatcccaatgatcttttttgtttatacaagtagccatctcactattgtcttctcttaagtcgcttctgaccttattgaaacacgacactgattgttttcttctctgtatcttgtctacatataacttatttgtagcgtgtgctgaagattaacctttgtcttttcattctaattgactttcctccccc

SEQ ID NO: 271024 - DNA, 416 bp, Glycine max
  unsure (1)..(416): unsure at all n locations
ttttatttctggagttcgtttaaagctcgacctgtatctttgtctctgctgtataagaccaggctaccaatcaagatattttttcttcactgaaccatgaacacttatttaggatttgatttacatgttaaacagttgctacttcttatttattccttcaatttctgagtgtatttttatattaagaatatacactgatttaggagcaccaaattgttgtattattgtatttctatacactggttattgattttatttgttgtggntaatgatttttattttattaacaaatatcagcaataatattttagttttttaaatgcctatcatttaaaaacttataggtattttaatatttntttatattcagtaaactcttacgagcttgcgagttaagtttgcggagtctctacgag

SEQ ID NO: 271025 - DNA, 354 bp, Glycine max
atccttagagaaacctcacgcatgcaagcttctactgagcaaatataaaatctaaacaagttatatttataatcctaccaaaaagaactataaattatgagaaatatatacatttttgaaaacttttatgtacaaaagttagtcgtaaaagacgactaacagtaagcaaaaggtgaaatcggtattttgtagtgttgtttcacattataccgcgtgatgcaatttcccttattcaaaagcatagtggcaggtacagcaagtgctaagctcgtcgttgatcaaccatcatctcgcgttcggctcaagacgtaaagaagcgctacttggaggaagcctagtaccttttgtttcaca

SEQ ID NO: 271026 - DNA, 411 bp, Glycine max
  unsure (1)..(411): unsure at all n locations
ngaaggtgtgtaacccaccattttccatagtagaatactggtaatgtgtctactatcattgtcatcattnttttttctccgtcattgaggtgccacttgagctgccaggtctctccacctttgggcatatccttttgaaagatttgtgccccctttntgcacatgttctgtagttgcatcctatctgaagacattatactgacactgcctaacgaaggtaaccactaggtccttccaagaatggactcgggaaggttccaagttagtgtaccaggtaacaactaccccagtaagactttcttggaaggaatgtatcagcaattcctcatcttttgcatatgcccccatcttccgacaatacatctttagattgttcttggggcaagtagtccccttgtacttgtcaaagtc

SEQ ID NO: 271027 - DNA, 352 bp, Glycine max
  unsure (1)..(352): unsure at all n locations
gcttgtctttggtttagatatgatntatacttgatttaggacttgtaggatccaatttgggcgattttggatgagggcaagagtgatttctaaaatctgcacttctatgcagaattttgctgttcaagtgtgcagcagaattttgtggttgtgcataaaatgcttatgcatggctggttgtggaaagggttgtacatattgggttctggacgttttctagcagatcccaacggtcaaaatgtagacttatgtactanggacctncagtaaaatattcgagtcgatccaacggtgaatgaattggaacgaagagaatgttactggggtatttgagtaagaaaaattgtggtat

SEQ ID NO: 271028 - DNA, 279 bp, Glycine max
gcgatggtgcacacacaaggtttccacatacaatatgcgcgcataagcgcaacgtcccctgatgcccacctgcaactgagctcacatgctaacacgtagcccatatacagggttctggtataaacgggtacccatgaatcctcctaggctgacacgacttacaagcataacatcattcaaaccgcacacgctatggcagtcgaacaaaacatagcaaatgcatagaactctgctcaacacatcaaccataatcacagcttttctcacgtaaagaccaca

SEQ ID NO: 271029 - DNA, 446 bp, Glycine max
  unsure (1)..(446): unsure at all n locations
agcttgtaagattatggcgtacccatcacatgtggtactaggtggcggtcgggcgatggtgcacaacaagtgttccacatccacaatgcgcgcataaacccaccatcccctgttgcccacctccaactgagctcacgtactcccacgtagcccatatcctcgtttctctcaacaccgggtccccatcaatcctcccaagcttccacaacatccaagcaaaacaacattcaaacagcacaagctatcacagccaagcaaaacagagcaaaggcagaaaactctgccaaaacaccaaccaaatcacagcttttctcacttaaagaccccagtaacaattccttcgatccaattcgttaaccgttggatcgactccaaaattntactggaagtctatagtacataagcctacattgtgaccgttgggatctactagcaaacatccagaa

SEQ ID NO: 271030 - DNA, 206 bp, Glycine max
tcctgactcaccataaaccttgatcccaggtgagaatgcctatccttaccctcggaagcaaaaaaaaaggagaagagaatgaaaatctccaatccaagaggaagcattaaaaggaaagaaaggaaattcccaatcaaagagtgggagaaagctaaaacgatagaaagaaaattcccaatcaaagaatgggagaaagaaaaaaagag

SEQ ID NO: 271031 - DNA, 438 bp, Glycine max
  unsure (1)..(438): unsure at all n locations
agcttgcatataaataatgtgatcgttggagcattaaatgcacatactttntcatgctaaaaaaccattcttcattgttggcgtgttgactactacaacaacaaactacttccttttgcatcaaagcaagtatgtgcaacaaagctttttttttaatggcgattgaagaatttcaaagcttgtcttcatttattcttcatagtatttgacagatcttaggagaatatatccgttaaatagatctcagacatagaatattaaataaagtcttaaatgtcatctttaatgtcgaatcagatcatgattccatcttactatcatctgaaacatcagacactaacatcacaaaatatgttctaatagcccataagacacaacttttaacctttgtatttgcttacatctaatcaaaataattaacgatcttgattcatctta

SEQ ID NO: 271032 - DNA, 442 bp, Glycine max
acaggaccactttcatattcttcccttgcattggcataatgttcaattactgtcaaggcttttggagcatctataacttgttcaactatattttgtgcaacatttcggttgataagctgcatcaaatctctctttttcctctgtattctttcagcacgaaagtattttttggttttcaattgcttggcaactgtagtttgtatctctcctttgacaatcttcttccgtatcgcatccagagaagcccccttctcaagctcttctaacaattcttttcttgcttcctcaaattccatctaattcaattaagcagtgagtgccaaaaagtattgttagagaaaatgaaatatgatcgacaatctaagtaattaatatttaatactcagcagaaaaaagaagaaatcagaacagatgttataaagttacaagttggtgttcccga

SEQ ID NO: 271033 - DNA, 434 bp, Glycine max
  unsure (1)..(434): unsure at all n locations
agctntataatagaaagaaaagtaactgcatgatctgaaatctactagtattaattgtgagtaatttaactagctacgttcaggtggaataaaaagttccaaaacaaaatgattaatttaatgaaagatattaggattaaaaatgacaatgatatgctacctttctcttttaaaacaagcataacaaaaacaaaacaggactttgagataattactctttcctatgaatataatgaactttaaaatggaaaatatcatgagaagaacaagaaaagagagagagagagacaaattaatttcttcttctataattcgatctttaatttctacaattagacaagacataaaaaaatgagaccagaatttgaaagacaatgaataatgtaactaacaaaatgaagagaaagacttataaagatatctacatcaacatc

SEQ ID NO: 271034 - DNA, 104 bp, Glycine max
atcttgtgcaactgtgtttgtactactccatgtagactaatgatgcattgaaatcactaaaaaatatgcgcatgttgttgtttctacatttaagtgacaatgct

SEQ ID NO: 271035 - DNA, 427 bp, Glycine max
  unsure (1)..(427): unsure at all n locations
tgccgcatgcattcttcacaaaaccttatcagggtcacgtgaaggatatataggcatggacagaattcatgtaacatcaagaggaacaaaacgatcatgaataagagtctcatttcatgtggccgctgaagaatgaataagagaacttactgctaaatccgcacgcccatcaatatgaggagaaacaatatatgaattttgtgaatcttgaagccatggctcagtccanatttttatctttgtgccatctaccactttccatctaatgccatctttgactaaagcttgtgaagtgtgaatactatatgtcaagtataacttgggttatgtcccaaagaggaacccaagaactccccattatggtaatattttgccttgaaaacttgtgaaacaacagcatcctggtcagaagctagcttccatcctt

SEQ ID NO: 271036 - DNA, 430 bp, Glycine max
  unsure (1)..(430): unsure at all n locations
tggcctcaacaaacttcttattcccagaaggaaattcaatttataggcctcatatttgtaatggagaggcaatagacttaaacatttgggaagccatagaagtaggactntatgtacccaccatggtggcttgaaatgcaacaatagaaaaacctagagaagaatggactgaagatgaaagaagattagtgcggtacaatttataggctaaaaacatcattacttctgccctacgaatggataaatattttagggtttcaaattgtaggagtgctaaggatatgtgggacactctacaagttacacatgaaggcacaactgatgttaaacgatctaggataaatactttaacttatgagtatgaatcgttaggatgaagacaaatgatagtttcaagatatgcaaaaagattccacatatagtaattatc

SEQ ID NO: 271037 - DNA, 394 bp, Glycine max
  unsure (1)..(394): unsure at all n locations
tctatggattgatacaagccttccgcaatgcgaattaaaatttcatgaggtcatttcttcattcagctctgaagagaatgtcgtggatctctgtatataccacaaggtcagcgggagtaagatttgtttccttgtattatacgtaaatgatattctgcttgcaactaatgataaaggtatgctatatgaagtgaaacaatttctctccaagaactttgatatgaacgatatgggagaggcatcttatgtcataggcataaagatccatagagaaagatctcgaggaattttaggcttgtctcaagaaacctatatcaacaaagttntagagagagttaacatgaaagattgttcaccaagtgtagctcccattgtgaagggtgacaaactcgct

SEQ ID NO: 271038 - DNA, 423 bp, Glycine max
  unsure (1)..(423): unsure at all n locations
agcttgtacgaatgtaagacacatcttcttcgaccttggtgattcttgacttcatctcattgaaacgcatgtctacttgtaactccaaagtatcaaacctttcaccaacagaggtttgaagactatcgaacccatccaaaatcttttgaagaagagaggaatcttctccaccatgtaaatgtccttcttcatcaatgggtcaagcaccctttttcacccaagagccatcatgctctttttgataaccaaaggatgcaatgacagcaacgcctattagaaaggatctcttgattggaacacaaggttcagaatcaagagggatgttaaagtgttgaaggaagagggtgactangtatggatatggcaatggagcatttaatcgcaatgtcttatgcatgcgatatcgaaataagtgtgcccaat

SEQ ID NO: 271039 - DNA, 299 bp, Glycine max
  unsure (1)..(299): unsure at all n locations
gtgcaggtctgggagacgaatgtcaagtgtgcgcgatattctatgatgatgctccgagtactttggatttggtactaccatgctctcctgatttccagctgggaaattggcgggtggaggaactccctggcatttacgcaacaagcataatgntaacctttacgtgtttaaaaaagctctatagtagggcctaggcgttacagttctcagtttgttaaagccttgtgtctcttgtcttcgaatctataatacatagatctttcttcatctgttcctggactctactcattctcattcat

SEQ ID NO: 271040 - DNA, 434 bp, Glycine max
  unsure (1)..(434): unsure at all n locations
agcttgtgaaatgtgaataatagganaaaaagtaaattggttatcttgtaatgctgataaaataaaagatcttgggtagttttgaatgtcctctgatcccttctctccactgttgcatggtatgattgctgggtaattttaaagattgaatgaagcctttatttattgtcgattgccactgaatactttatgcagacaattaagtaattggacttgatcatctagacctcatgctattattatgttcagatacattcaagaaaactattctaaaatttgcgatgtggagcgtgagcttgcaaatttttcactacagatgaaacttacagctggaccgaaaaaagcaggtttctaaatgttattgttgcnctttttggcataaaatagcgcattggtgatatattagttccttactaagtaatgatcttggagat

SEQ ID NO: 271041 - DNA, 462 bp, Glycine max
  unsure (1)..(462): unsure at all n locations
taatggaagagaatngcataatgagtgtgctagcaagcgacttctcagaggtcgtaaactgttcatcaatggctttcaatagatctctgaccttatcatgctagtcaattgaaccctggatactagcagatatgttggtttttatgaatataacggagagacgattagatctctcccactnttcataaaggtcaacagcatcaggtttgctagtttcagtaatagccggtggctcatccttccttatagcatagtcaatatccatccagcccaaatgaaggagaattctttccttccaaaccttataattatcacctttcaatatgggaaggtcacaagaaatattcatagattgtgaaactacaaacaaacacacatgctcattaagaaaatttgagactaaacaaatgtcatgttntgccaatgcaaatcatgtctcaatatatgaatctagtgacacaa

SEQ ID NO: 271042 - DNA, 432 bp, Glycine max
agcttcaccatttggtcctcctcatagttgttgcatgagaaaacatgctctattttcatctcccactccaagtaggcctccagatcattctttcctttaaatggaggaatgttgagtttaataccatcaattccgttttgtctaggaacaccatcattccctcttctcctcctttcttcttcattatgatctctattctccatttgatccaacctctcatggagcgcatcatctcgctgtttcattaacctctccatatgttgcatcaaagcttgcatttggaattgcgaaagccccactccatcattaggattagtacctgacatctcaaacaaacaaatcaaacgtaacaagacaattatagctgctgtttgaatacctcacccactcaagtgtatcacacaattatggcttttctctaatgaaacactc

SEQ ID NO: 271043 - DNA, 444 bp, Glycine max
  unsure (1)..(444): unsure at all n locations
ctaaggctaagtcttcatgttgctcccgctatctctaacagagatgcgaccgtgggtgtacttgtcttaaagacataataaaattatgaaaatgaagggatgtaaaattttattcaatgtatttgattgagtacaaattacctttgttatccttgatgtatctcgttaaaatcgctcaaatcaaaaccctaatttttctcttttgggataaagacttagataagaaaaaaagtacaacatttggttttgcattaggtcagaactntaggtgggtggcattccatattcgtggaattactttgtcatccaattcttatagtttgtatgctcaattgtttaggcatgttataaccttgaatgggtctttccagttgggacaaagctttcccgctcacggatcttttctggctttgcctcaaactcgccatatgagttcatcagttg

SEQ ID NO: 271044 - DNA, 169 bp, Glycine max
agcttgtgcttgttttatttaaattcctaggatcatgaacaactaggtgtgtcctactatgacttgagaaacaaaggtgatcaaataacaagcaaagatttaaaaggtactatgttgcctcctagtagcgcttctttaacgtcttgagtcggacgcgtgatgacttgtc

SEQ ID NO: 271045 - DNA, 402 bp, Glycine max
  unsure (1)..(402): unsure at all n locations
tctcaaagggcatagtgtcgcaacctaccttttcatgggctagctatgaattgctaggaattggtcattgtgaattttgggctgaaagttttacttaattgtctatacatatggtaaaaaataagaaaaaaagaaccaagtgatttggataaaaggaaaaaattagaaaaatcatacaagttgacaggaaaattagtgtccaacaaaaataaaaaaaatgaatgtgaaagggaagtgtgcttgttgttttggctcaaaagttgttctataattagagtctattttagacaaagtttanttatggaatttcaattaaaaagtagcgtgaaaacaagtgccaaaactataggtttcttgagtatattttttttttactttactccagagccattctatgtttct

SEQ ID NO: 271046 - DNA, 399 bp, Glycine max
agcttacaaggttgtctgcggtgttagttttggtgtacttgaaggcaagatttgggtggagcgataaaagctttactaaattggtggtgttattgaagaaaatgcttcctgaacaagacacattgccgaaaaatcactacgaggcacaaaagattttatgtcctataggaatagagtatcggaagatccatgcatgccctaatgatttcatattatataaaaatcagtttgcagaaatgcgttagtgtcccacttgtggggtatcatgatacaaagtccagcatgatgaattcagtgatgatgcaagcaaacagaatagtcatcccacaaaggtctgctcgtatcttccaatcataccaatgtttaagcgattgtttgctaatatacataatgaaaaaa

SEQ ID NO: 271047 - DNA, 459 bp, Glycine max
  unsure (1)..(459): unsure at all n locations
gacaagactatacgaggtatcttccttgggtataacaatatctctaagggctaccgtgtctacaacttgcaaactaagaaactcgtcatcagtcgagatgttgaagttgatgaatatgcttcttggaattgggatgaagaaaaagttgagaagaacgttcttatacccgctcaactacctcaagaagaagctgaggaagaagacccacgtgaaccaccttcacctgcaccacaacaacaagatcaagaactatcatcaccagagtctacttcaagacgagtaagatctttggtggacatatatgaaacctgtaacttggccatacttgaacctggaagctntgaagaagcattaaagcacgaagtatgggtcaaggccatggaagaagagatacagatgatcgagacaaacaacatatgggagtttgtgaatcgtccccatgggaaagatatcattggg

SEQ ID NO: 271048 - DNA, 386 bp, Glycine max
  unsure (1)..(386): unsure at all n locations
agctctttgttntttctctaaatcatacccaagtccagtcttacccatgaaacaatcttgagaagccaacaacgcatctaagtttgctcttncacttgtgaactttgccagtgtcttttccagataatcaatcttgcattgaagatactctaaatttttacaatctgagctagaagaaatattacttgatttaaattttcaaatggaatcctcaatagatttttctaaatccactttttcttttctcaaatcatggacttccttttggtaaatagtaaatttctcaatatgccatcaaacttggccttttagagttttgctcacaaaggtaagtctctgtgtctctntatgtaactctttgaatgcctctagcagattcgcatact

SEQ ID NO: 271049 - DNA, 459 bp, Glycine max
attccaagccacgactgatcagatggatactgctacttcaagtatattgatttggtcatcaaggacaagaaagggtctgaaaatgtggtagcagatcacatatccagattggtgaatgaggatgtcacttcaaaggaaactaaaataagagataagttccctaatgaatctttgctttcgattgtacggagaccctggttcgctgatatggcttattttaaagtagaaggggtcatacctaaagatctcaattggcaatagataaagaggttcttctatgatgctcgacgttatgtttaggatgacccacactctgtcaaaatatgtgcagatgatctgcttcgtagatgtgtgacaagtgaggatgcttaaggcatattgtggcactgtcacaattcaccatgtcgcgagcttaaggcagacgctaaataccagctatggcttacagtctagattctg

SEQ ID NO: 271050 - DNA, 400 bp, Glycine max
  unsure (1)..(400): unsure at all n locations
aagatggcctcagcanattccttgtttccagaagggaattctataaatagacctccaatctttaatggagagggttaccactactggaaaacccgaatgcaatattttatcgaggcaatagatctaaatatctgggaagccattgaaatagggccttatatacccaccacagtagaaagagtttcaatagatggtagttcatcaagtgaaagcataaccatagaaaaacctaaagatagatggtctgaagaggatagaaaacgtgtacaatacaacctaaaagccaaaaacataataacatctgccctaggaatggatgaatatttcagagtttcaaattgcaagagtgctaacgaaatgtgggacactcttcgattaacacatgaaggaactacagatg

SEQ ID NO: 271051 - DNA, 525 bp, Glycine max
  unsure (1)..(525): unsure at all n locations
cccccacgcgaatggagctgnacancncatctancngacactatataatactcaaactcgctcgtgagtatatattctcaagctatacatctgacatgtatgttgtcttgccatatgcaggtacagaatcctgttgacactaaatacaacgtcacaatcaaggcctaaaatatatatggaagactgcatgaactcgtggacttatcaaagggaatggtactaattgtgctagcaatgatcctcattatggtggatagttcgtcacatacgaacaaaaatcctcattaatcttgagctttacaaacaaaaacaatgtgtggactggctgtatcgttaggctgccattagagcgatttcatgcggaggactatataccaaacgctgatcatcttatgcaatcgtctcctaatagtagcctctaatacgtggtataggtaaataagatgcctacgcaccaacatttttgataatacacaaagtgagccaataatatctcgagacactgattctgctgataatgtgccg

SEQ ID NO: 271052 - DNA, 356 bp, Glycine max
  unsure (1)..(356): unsure at all n locations
gagccaaagtcccaactcaccataaactntttcctcattaggaaacacaaaaaaaaggagaaagaggaaaggagataaggagaaaattcccaatcaaagagtgggagaaagcaaaaaaaaagaaaagaaggaaagttcccaatcaaagagtgggagaaagcaaaaaagaaaagaatgaaaattcccaaatcacagagtaggaagaagaacagaaaggaaagataattcccgatcaatgatcgaaagacaacagaagaaatatgcataaaggtcttttagaccagaccacatctgaacaaatacagagttactaccaagtagacacaaaagaagggggggaaaaccatgacctgaag

SEQ ID NO: 271053 - DNA, 252 bp, Glycine max
agcttcaaccttggtgctcatctctgcctcatatcgtgaaaggagagcattttctgtgtcgtgaagtgcgtggctacgagtgggacttcaaaaattcaggtttgggtggacttctttctctcttaaatttcgtgggtatggggtctcgggagatatgatgggtagttttgttagtattttgcttcatgatggttatttctgaagactcttgttgaatgcttgctgaaactgccatgtttggatgagtcaatc

SEQ ID NO: 271054 - DNA, 384 bp, Glycine max
  unsure (1)..(384): unsure at all n locations
aagctgngattttatctgtctatttttcttttgatgggacaatcagacccctgataaacaagaaacagatcaaagttttcacaaatagaatgaaatacacataaaaatctttctcaaggaaaagagatcctctcaaattaaacatatattggtaacataccctgtggctccagcacaagccaagaggatctcatatgcagtttcacgaagatcatcatctgagatgcctagaatcagtaaaaaccacaaatcaggaaagttcatgatagctttggtttaaacctttcaattcaaatttgaggcataaatcatccaaaagttatatcttagtatttttctataaaagaagacattatataggatactatgaagtatgagatgtac

SEQ ID NO: 271055 - DNA, 225 bp, Glycine max
  unsure (1)..(225): unsure at all n locations
cagcttagccttgttcctcccaaccttacatgtttcatcaaacttgtttctaaacacccactntgctccaacaacagattttcctttggggagttctacaagcttccatacatcgttattctaaaactggtgtagctcttcttccattgctttgacccagtattaattagacatgatatcatctatgtgtttttgctcaatctcagatagtagtgttgtgttctt

SEQ ID NO: 271056 - DNA, 354 bp, Glycine max
aagcaactctctctctcctcactcagcctcacatttttagaagctctctctccctctccctcacgttgcttttctttcttcttcattctccattgaagctccaaacaaagctccaacctttggccatcatttctgctccaaatcgcgaaaggagggtattatcggagtcgtgaagcgcgtctctacgtgtgggacttcaaaatttcaggtttgggtggacttctttccctcttgattttcgtgggtatgggtttttgggagatatgatgggtagttttgctagttctctgcttcatgatagctatttgtgaagaaatctgttgaaagcatgctgaacttgccatgtttggatga

SEQ ID NO: 271057 - DNA, 578 bp, Glycine max
  unsure (1)..(578): unsure at all n locations
ctccgctcccctccactntnnctntcattgttggtntngngaagctctcngcgtctctgttgtcnttttactnattcttccctctcttcttcgactcgtcgcgagtgctccncccctttgggagnctctcgattctctatagtagatctgcacgcatgcactcttgaactcactagagacgagcatatactagtggtggatgcgttgggttcgcttctggtggcacgacactcactcgtccgagaaaaatgaaccattagctcacacattatgagaatacattaatattccatacatcatattatctaagagtgccctacaacaccttaatagtgacaagttcaagcccttcacccacaatggtgtaacacccctgcacaatcattttcaaaaaacaaaattcttcacaacctccaatttgtctcaatagagatgaaatatcatgatttacactaactacgagtttattagggacgccaatacatttttaccatgattgcttttaggatacatcgaatgttcctaccccttcaaaccaccgacactattattgagcgcacactttcactgtacgccct

SEQ ID NO: 271058 - DNA, 418 bp, Glycine max
  unsure (1)..(418): unsure at all n locations
tcttctcggattttcctaagttctttacaagcttcgaacaatatatctttttcttcatttaactgtctttgggcttggcggccacgctcaacaaaatactttcgacacctactgtacgttgattggaccaatgctgttatgggaatgttgcgacaatcctttaaagccttattgatacattctgagaggttggttgtcatgtggccatatcgacgtccttctctatcataagtcatcgtccatttttccttcgaaatgcgatcaatccatgttgctatggttggactcaagtgacataaattttctaaattntgataaaaaaatgtgcttgcaaggagtgtaggctacataaaattagttatgaataacacatttaactatatatgaaagttaataaatgtgaccactaaatatgaaa

SEQ ID NO: 271059 - DNA, 410 bp, Glycine max
gcatgcaagctagttgaatcgcatccatattccatatgcttatgattataagctcacacgtcgggcatacgaaacaatataaatgaggaaaagtgatacataataaccaaatgtatcaccagttcgaaattataactacattctagtgcattttctttatattatctcagtaagcacaaatatagatattatctacaacatagaaatgaaaaagtctctattttcatttattttccttacacaactatttgctttgaaatatagctcttgtagtacataagaatctggatcacgttggtgctgattatagtctgtactttcacagattcactcatttaaaatgtatctgcttaactcagagatagccacagagatgtatagcatgtgttgaccgattaaattccaattct

SEQ ID NO: 271060 - DNA, 332 bp, Glycine max
agcttctatagagattggatctttgagcttcactaatgtccttcaatggtgattctcagccatggagttgcagcggaagataaaggagaagaagagagaggaggcgccatctactagggaataagccatggaaggagaaacttctccaccaagagagtgccttggataaaaagcttagagaggaagcttcaatggaggaagagaatgagggagagagagagagagaaagtggcatggaaaattgaaggaagaaaaagagagaagttgaactttgaagtgtgtctcacaaaactcttattcaacaaagttctgacaagtgttacacatgtttc

SEQ ID NO: 271061 - DNA, 395 bp, Glycine max
  unsure (1)..(395): unsure at all n locations
cgagatgaggaagtgtaganaggtgaaacttcctgcntttattcgttgaccacaaagtggtacctggagatatgtcgcggnggtcaacagaccttgnggacgtcaggtggggtgctattgcccaaaaccaagcttgaccaatcccgacccaacccgggcatagtcagtcagtgagaatctgtgatgcacctaaacaggcgagctcctggcagtcaacagataaaacgaacaaagaccacaaagcaaggaggcttgtgtggtggctggccaactgtgaactntgatttatatgtgagatatggcctctggtaatcaattaccaagggtgggtaatcgattacaaggcttaaaaatgaagacaggaggctaagatggtctctggtaatcgattacca

SEQ ID NO: 271062 - DNA, 349 bp, Glycine max
agcttctatggaaaatgtgaaagttctcatagctatccttagaacttttgaagtggcttctggtttaaaaataaattttgccaaaagctcttttggtgcttttggtagggatgaccagtggaggcaaatggcagctacctatcttaattgcagtcagttaactctccctttttttttatcttggcatacccattggggccaacccgaggcaagctcatgtgtgggaacctattatccaaaaatatgagaggagataagctaggtggaagaagagatatatctcttttggggggagcgcggccctcaatcactatccttcccttctctccacctctcttttcctccccct

SEQ ID NO: 271063 - DNA, 370 bp, Glycine max
  unsure (1)..(370): unsure at all n locations
ccgagatgaggaagtgttgatgggtgaaacttcctgctntattgtttaccacagagtggtacctggagatatgtcgcggnggtcaggagaccttgtggacgtcaggtggggtgctattgcccaaaaccaagcttgaccaatcccgacccaaccggggcatagtcggtcagtgagaacctgtgatgtacctaagtaggcgagctcctggcagtcaacagataaaaggaacaaagaccacatagcaaggaggcttgtggtggctggccagctatgaaacttgattgatatgtgagatatggtctctagtaatcgattaccaacggtgggtaatcgattacaaggcttaaaaatgaagacaggaagctaggga

SEQ ID NO: 271064 - DNA, 105 bp, Glycine max
cgcatgcaagcttatggatgaagtaaccagctcgtctgttcaatctatgctacttcacgaggaagcaagcaactcgcctaaataatcatgaggccgctgtaagaa

SEQ ID NO: 271065 - DNA, 478 bp, Glycine max
cctcacgcagtagagcgcgccctagtgaacgccgccactcaaaactctatgtccacccttagttctcacatctactttatcttacgtctgtccactgcctttgggcttgagggtcacgctcaacacaatactcttcgacacctactgaacgttgattggaccaatgctgtcatgcgaatgcagcgacactccttaagagcgctatttcatctatctaattaggaagccactcttgagccaataaccttacccgagtcgtatctgtacgcacctcctcataagatcaatacgaattcttgtcatgggcggatgaccacctaccaattgctgacatgacctacaaatgttcacactaacttaatcccacatcctataggagaacttatcttgtaagcgcctactactattagtctgaaagaatgtatccctgacattcatacacctcgctcacaccttggtagaacttctttcaacaggc

SEQ ID NO: 271066 - DNA, 280 bp, Glycine max
  unsure (1)..(280): unsure at all n locations
agcttgagatgaggtatgtgtgaatggtgaaactttctgctcttattgttgaccacagagtggtacctggagatatgtcgcggnggtgacgagaccttggtgacgtcacgtggggtgctattgcccaaaaccatgcttgaccaatcccgacccaccccgggcatagtcggtcagtgagaacctgtgatgtacctaagccggcgagctcctggcagtctacagataacaggaacaaagaccacaaaccaaggaggcttgtggtggctggccacctatgaat

SEQ ID NO: 271067 - DNA, 395 bp, Glycine max
  unsure (1)..(395): unsure at all n locations
ggagggagaataaaacaatccanaatcaattgtgctctttcaagtcacgaagaattctttgtgcggcttttagatgaggagaggtaggagcctccataaagcgacacacaactcccaccgcatatagaatatccggccttgtattggttagataccttaaactccccacaagactctagaagatcgtggagtctaccttctctccttcatcaaactttgataacttcaagccaccttccataggtgtgatcacgggattgcaatcaagcatattaaatttcttcaacacttcttttgtgtacctttcttgtgagacaaagataccattctccgtttgcttcacttccattcccaagtaatatgacatgagttccatatctgtcatatcaaattca

SEQ ID NO: 271068 - DNA, 333 bp, Glycine max
  unsure (1)..(333): unsure at all n locations
tctttgagtcgatctgccgcatgcaagcttgttgcaattcttctagacttggagttataacatgcagtcctcttgaacccttacctcccactctntcgtcatgccgggactcaggaaacccaacaggttntgccttttcaatgtactctgaacaaaactcaatagcttcttttgcaatatacctttcaataatagatgcttcaagacagtctagattctttgcatacccttttatgattttcatgtatcactcaaccaggtatatccaccacaaataaatgggaccacaacatctaatttccctcaccagatgaacaattaagtgcggaacca

SEQ ID NO: 271069 - DNA, 493 bp, Glycine max
  unsure (1)..(493): unsure at all n locations
tggggnctccccgntatgaagtggcgctctgctaccgcactatacataagctagctagtatgtgctagaccgacatgtctcctatgagagctctggttatgtgtctactgtcagagngagcatgggatcttcctcaatgatgcggctcccgtgctgaccatctctatacctgtgcgcgtattctgtggaagatcacagcccctgtaggccgccatattgggtactcgcccctgtaagagcctttataccgacgctttctaacgcaagcgacgttaggtgctctcaacaatggctatgaatgttccctgctttgaccaggtaactctacctgctctgactccttgtacgaacgactacacttgctatatatgtgttgcccncgtttcctgcgttcatctgtagaggttctagcggcagcattaccttgtctttaatattcgtcccttctactggaaggctagaaggggtccatgtaaatcttctaggttcaacg

SEQ ID NO: 271070 - DNA, 165 bp, Glycine max
  unsure (1)..(165): unsure at all n locations
agctntgagggtgcgtagcccaccatcttttcatagtatagtatcgataatgcgnctaccatcacgattatcgtctccctttncatcattgggggtaccacgtgggcccgccagatcccctccaccttttggggcgtgttctttgaaaagattcgcccccctttt

SEQ ID NO: 271071 - DNA, 381 bp, Glycine max
  unsure (1)..(381): unsure at all n locations
catctatttgactntcctatgctgtgtctacatacataaaacagccccaccatcccaagtttgcaaaatcatattcatatatcattggggcatttcaccgagcacttgatgggcgcatgtttggacataaattgcaagagaatgggggcaatgtggcatgccccactgcttcagaatacaacatangcctaaggccttctcattcaaatcctcaactccaaaaaatcaagcataaaaacaacccaaaactgccccacaaatataatcacattctcacaatttggagcaccaaacgatgaagaaaatataccaatgggaaagctaaaacatcaaggattgaatcttacttgttgagtgatagaacacaaaaacaaagcaaac

SEQ ID NO: 271072 - DNA, 487 bp, Glycine max
  unsure (1)..(487): unsure at all n locations
acgtcaaccgcgcncgtgaggcttggaacatcgaganncatagagtaattgtgcaagcacgcaagcttacacatagtgtagggtgtgtatcgacgcagattttctttctgttcttcagggagaaaagaaggtgcgcaaccatctctaatgtcttcgccgattaacaggacggaaaacctgttcgttagtcttgttgagatccatagagatgcatggacgtatggtgctgatgactccagcaccgggacagccgcactactcgatagttgtcgcagattctcttgcttatcgggcctgggttggaagccgaggaagacaatcattctatgcattttggatgcacaagaatctgcgatggaatagaagagcttcctcatttcacctgtatgccgctgggtcccagaatcatactcaaatgatcacctcttgctcttatattttcactctcgcaaatgtatgcactgcttcatgatacggggcgcaggct

SEQ ID NO: 271073 - DNA, 213 bp, Glycine max
  unsure (1)..(213): unsure at all n locations
aaatgaaataaactaatatgtttttgatatttcaactatcagcatctaatcttacgtataatctagcctctaaatgcatnctaccagtgacgtataaatcgaagacgtcggatcttatgatgccagagagacaaaatctaaggaaagcatgaataactctttatgagaaagtctgaacaacttgtgccttggactataatcctttccttttct

SEQ ID NO: 271074 - DNA, 327 bp, Glycine max
gattccttcttgagcttggagctgcatggaatttctaatattctgactcacatatgctacatcatgagacatcacaccaaggcctttcagcagcttataacccaagtgcaagctagtctgcaagaataaaatatttagcaccagttttcaagcatcatgggagggaaagaattttttgacagtacctctgcattctccaaaatggcatccgttgcacctgtcttctttagatctaaaagatgctcgagatcaccagcttctggataaactgggatctgaggaatttcatcactaagtatactatttaaccacgagagaagagaacag

SEQ ID NO: 271075 - DNA, 338 bp, Glycine max
  unsure (1)..(338): unsure at all n locations
gcaccaaccaccaacactccagaatcagcatatgatgtattcggaagcttcatcagtgcgagctcgacagtagccgagctgacagaaaccgatccagacgaaatgttagtctcagttctaacccgcttaccaaccgagatcgcctgcttgaacaaaccactaattttcttatcagaaccaggcactccctgtccagctntcacaacctgcttaacctgagcaagaatttgaccttccccaagaacaagtgagtcatgccctgccgccacttcaaagagatgctgcatgacatccgcgttatacagcaaaacttggtgctcacaaagctcatgtattga

SEQ ID NO: 271076 - DNA, 392 bp, Glycine max
  unsure (1)..(392): unsure at all n locations
agctnttcatacccttgtatatatatatatacttctgctaccattcaataaagcttgagatgtagttctgatcatcttaaacattctcatttcacgttttctgctacatggccaaatacatctttgataaaagatgtcacattctttttcctttaatattattgttggcaatatttaattgttatggctgaagatcgtttttgtgatttttttaatacaacagttaaaaaaaggatgtgatttatattaaaaatatgaaaaaaatagttgcgggaagttgctaaattaattcttaaaatgattttctggctaacaaacaatttaagctgctatcgccttgttggtatctcgtgtgtggaggaaagtgctaaagctcttcatataatatatat

SEQ ID NO: 271077 - DNA, 290 bp, Glycine max
agctcttctctttcctttcaaagcaattcttcttttgtcaacacctgtttgtttgtaccccagaccaaacttcccatggtttttagcaatcttcaataagtttaccgtgccaccaccattccggcccaaacccattccaggctcatacccattaatcgaggccgtacccgaatcaaataaacattaaaaatgcagtatctacgaagcgatcctatgtcatcttccaatgagcaatgatcaaccaaacgttcataaaagataataatacaacagtaacgaattgtgggggg

SEQ ID NO: 271078 - DNA, 290 bp, Glycine max
  unsure (1)..(290): unsure at all n locations
ggtccaggaaggacaatgcggacgaaggatctattttttttcctgagtactacagacaccgtttgatgagcattgtgcaccagcatcgctacttaaccattaagggatggtagattctccaggagcgactcgtgcggctcacgtactactagtttgccgactttcacgaagagatatggagcatgctgtgggcaccactagttactcccatggactagggagatccatatacatcccttgagttgtatgccaatgctcgtccaccttagganggctagcgtgatatgata

SEQ ID NO: 271079 - DNA, 404 bp, Glycine max
  unsure (1)..(404): unsure at all n locations
tagataacattcaataaacttagcaactctaccctgattntgaatttcactaatcaccgccaaatttcataaagccttttaacatcatgaagctatttgcggatcatgcatccagcgttcaacctattgatattcctagggaatggatatggaatttgccaaggaggacagtatactttgtgacctccgtatcatctatttttaaaggtagaaaaactctacatgctcatacatttctattctagaccagtttatcacataaggtataattgtactcaccaaaaatactcatgtctaccagacctttcaacccaagaaattcagcattggctttggagaggtaagaagaccaccctaaaatgtttggttatttcttcttttgcattgctagacattntcataac

SEQ ID NO: 271080 - DNA, 419 bp, Glycine max
  unsure (1)..(419): unsure at all n locations
agcttgtacgattatggcgtacccatcacatgtggttctacgcggcggtccggcgatggtgcacaacaagtttttccacatccacaaatcgcgcataaacccaccatcccctgttgcccacctccaactgagctcacgtactcccacgtagcccatattctcgtttctctcaacaccgggtccccatcaatcctcccaagcttcctcaacatccagctaattcaacatccaaatcatcacaaactaacaaaccaagcaaaatagggcaaaggcagaaaactctgcccaaaactcaaaccaaaatcacagctctttctcacttaaagacnccagtaacatttcccttattccaattcgttaaccgttggatcgactcataatgtttactggaagtctctactacataagcctacattttg

SEQ ID NO: 271081 - DNA, 346 bp, Glycine max
  unsure (1)..(346): unsure at all n locations
cgttcatagagtagttaatttcggggacgaaattcctaaaatggtgtgagtattgtgacatcctcgaaatttctactcggaattgttgtaaacggcgcatttngtatgattatatatatatatataagtattattcagtgtatatgcatatatgttcctggtagaagtaggaaaagtgggggcaagatacgtgggttaggctgattaaggaagagaaattcataactggaacggtataggttaatttctaattaattagtctaaaaatcatcggtttgcgtggtacttaaaatntaacaaaccagcctcttgaccacgctcgggggtttattcagagcgtttgata

SEQ ID NO: 271082 - DNA, 483 bp, Glycine max
  unsure (1)..(483): unsure at all n locations
ggatgccttggacttgaanctgtaattgcgaactcccgctgcanntatggagaaagttgaaaaatttttattgtttctaaatatttaatatagagcacgtatgtttgttattgatggtatgcccacaatttacacatgttaaagggagtgtgtccctaaaagaaattatattgtaacatatgcacacaatggtttatgattaataactctttgctgcattacattcccaagggtaaactttataataatggaggttttaattatataataacataaattattgtcttgggtcggacttaccgaggcatatctaatgccacaaagactaacgaattttgtagagttctgcaatagttataggcgtattaaaatatagttttttgttgttatcaacctccccccacccccccataatttatttttatataaanattaaattgaaatgtcctcccngatcacaccccctctcccctcgctctcccg

SEQ ID NO: 271083 - DNA, 405 bp, Glycine max
agcttgttagtggtatatgaagcatgtgatgcaagtttgttactactcttgacccattgggccgttcaattggtccaattacaagagaaagggtaaagaaagtcaaagaagcattaaataatgatagttagaggcaaagtaacaatcaggagcattaattaattcaattcaaattcaaggaatgcatcacaataaggattaattgattccattcaaatttaaagagtggaatataatgggtaataaagaaatctcatagttcagaagttgcaattaatgtcacgaagaattgcaaccatttacttccattattaagtgcaggtggacgcatgaatagttcgggagggttcagcaccaacacatgaggaattcactgaaccaatcataaaaatttaaatatatatt

SEQ ID NO: 271084 - DNA, 429 bp, Glycine max
tgggcagtagtaggctccaggcaagaagggccactcttcatataaagcgtctattccaaacgcaataaacttcaaattatgacatagtttgcagacttaacgcagagttgtcactataaatttcaaaatgcacttaggtgttgcactatattatcgtatgccaaactttgcattaaggtatttaacaatcatttcaaaagaaaaaataataatagtatattttggaataatctctccatcttttatattggacatgatttcccattttcatttgttaaactaacggaatatgattttccaaaactaagcatctgttcagtaaatcatttgcacaaacacagtttcagtatcgcagcagaagaaattgacaatgcgaagtacaataagtattcaacagcagagaaatttttcgcttctctgacgtggtag

SEQ ID NO: 271085 - DNA, 335 bp, Glycine max
agcttccatcatgctgttacactcacttaagcagtttttgacactttcgcttagcggatcgctgcactacgcaagccagagagacatctggcttctcaacgaggctcgcttagcggatccgcgcgcttagccgacgtttcaaattcaaaaccatttttttttttcgcacactggcttgcgttaccgcgaggataaaatcgcttagcgaggcttgcagaacagcaaagctgcacctcttgctaaaccacactctacctggctttgctaaaatgacgcatcttaagtacagaggagcatgcgctcagctgataagcacttgcttaccactcacattg

SEQ ID NO: 271086 - DNA, 598 bp, Glycine max
  unsure (1)..(598): unsure at all n locations
attcgatacgacgctcttgtacacatatgacggagntaaacaatatacgtgtgcagttatttatactctacanaannaccgcccccctcgatagaaccctttganacacagacactatatgaaacacaagctctcttgggccatntactacaaagacgaacatcctgggatgtttgtgttacccagaaatgctacgataaaaacaaaaacagcatgcatccctctccaatgaacacaaacattcatgtaaatctaaaacaaactcatgcacacattctcttacaaacatacatccgcacaagatattcggctaacctaaaattgcacttatccacaatcgacgtatcttcccttcccagatcacgtatatgcactttcaagagcgattatgctaccaaaatacatgcattgtctatgctaaaattacacacaagcatcctcataggaatattgcgtgccaaaattacaaccgtgcgcattcgggtatttctgattacttatccatacaccaacatctgcgaggaatcttaggtccccaacacaatatagcgccacaattcaatgcctacctcagtggtataactccctaatgcacacg

SEQ ID NO: 271087 - DNA, 439 bp, Glycine max
  unsure (1)..(439): unsure at all n locations
agcttgtagaatggctagacatgatacatgtcaggtgtttggtttggttcaaggataaaagggatgccccacattatttccatgacacaaatgcaaaaatgatgatttggaaactttatgcaaaactggtcatgcatgcacctatgcgaacactcaagtgtcaaaattttatggtcatgtgatgctagggctcaagattcgtttcctctattntaatcaacccaatgtttncaaaatatgttcttttatcaatttgtgcattcatccgagtccatttcgggcgtccggggaaatttcacagcattcacccttcaggtgtagacacattntccaaaaattggttatgatcaatgaactttttcaaagaacagttggaaatcgtttcttttaaaagcatgctgtttttagctagacaacctactttttccttttttctacc

SEQ ID NO: 271088 - DNA, 462 bp, Glycine max
  unsure (1)..(462): unsure at all n locations
gaaacttccttgagaagcttctntgagaaaacttccttgagaagctagagcttagctacacatacccctctcataactaagctcacctccttgagaaacttccttaagaagattcctaaagaagctagagcttagctacacatacctctctaatagctaagctcacctccttgagatgggaagctagagcttagctatacacaccctataatagctaagctcacccccatgaaaaaaaacatgaaaatacaaaaaaaaaagtccttactacaaagactactcaaaatgccccaaaatacaaggctaaaaccctatactactagaatggccaaaatacaaagcccagacgaaggaaaaacctattctaatatntacaaagataagcgggctcatacttagcccatgggctcgaaatctaccctaaggctcatgagaactctaggggccttccttggatctcta

SEQ ID NO: 271089 - DNA, 314 bp, Glycine max
  unsure (1)..(314): unsure at all n locations
ctcctttgggttcgtcctcttcgttcctcactcctctcgtctttcagatctctctcgctctttgtcctccctctcctcttgtcactcattcacgccacncccccagcccgccgttgtgccccctatctgccttatcaatttcttcctcacctttcccctcattcttctccctttctcactttttctactctctgcccactcgcttccatcttcgcttctctgataatctctatcccctctccttcttccctctgcccctcccttcactttccccttgccctccctgctcctatactctccttctgccccccccg

SEQ ID NO: 271090 - DNA, 435 bp, Glycine max
  unsure (1)..(435): unsure at all n locations
agcttctccacttgtaacttgcgcctaaattcaaatatcatggttaatacttgctgaagagcttgcttggccttctttgttctagcccttgccataggtcctccaagttcttctaaaggttccttgcccttattccttgccttgtcctcatcacttggttccaaggattcttccacgaacttcatcaagatccttgtttttccaccagctccttatacttcttatcttctggacaacaccatgaaacttcttcatatatgtccagctgctgccaatgtctgtagagtatgttaaaatacttagtaacagaggactctccctgtcgaaggtcatggagtatgctttttatctcaaaaacagcagatgtgttgtccatgtttaagtacattctatatatnctttgcagtaccatagaacatgaaaatctttaccaat

SEQ ID NO: 271091 - DNA, 430 bp, Glycine max
  unsure (1)..(430): unsure at all n locations
gcgaagtgggtggaattcctagagcaattcccttatgttatcaaacataaaaagggaaaaggtaatattgtagccgatgctctttctcggcgtcatgcattactttctatgcttgaaacaaaattgattggtcttgaatgtttgaaaagcatgtatgaaaatgatgaaacttttggagaaattnttaaaaattgtgaaaaattttcagaaaatggtttctttagacatgaaggctttcttttcaaagaaaacaaattgtgtgtccctaaatgttctactagaaatttgcttgtttgtgaagcaccatatgaggtttaatggggcattttggggtccaaaagactctataaacattacaagaacagttttattggcctcatatgaaaaaggatgtgcagaatatttgtgaacattgcattatatgtaaaaa

SEQ ID NO: 271092 - DNA, 418 bp, Glycine max
  unsure (1)..(418): unsure at all n locations
tgtcattccttcttgagcttggagctccatggaatctctaataagctgactcanaaatgctacatcatcagacatcacaccaaggcctttcagcagcttacaacccaggtgcaagctagtctggaagaataaaatatttagcaccagcttccaagcatcaagggagggaaagaattctttgacagtacctctgcattttccacaatggcatccgttgcaccttgctttcttcagatctaanagatgcttgagatcaccagctctggcatagattgggatctgaggaatttcatcactaagtatactattaaaccaagagagaagagaacagaaatataggaagatcccaaacacacaccgttacaaaattttattagtcaacgtcacccctaatataaacctaacatgtacatgtcct

SEQ ID NO: 271093 - DNA, 432 bp, Glycine max
ctaagctcgccatcttccctgcaccaaccaccaacactccagaatcagcatatgaggaatccggaagcttcatcagtgcgagctccacagcagccgagctgacagaaaccgatccagacgaaatgttagtctcagttctaacccgcttcccaaccgagatcgcctgcttgaacaaaccactaattttcttatcaaaaccaggcactctctgtccagctttcacaacctgcttcacctgagcaagaatttgaccttccccaagaacaagtgagtcaagccctgccgccacttcaaagagatgctgcgtgacatccgcgttatacagcaaaacttggtgctcacaaagctcacgtattgaaatcccgctcacctaaacaaaaaaacacaaccgtgagttttctttctaaactaaaactagaacagaacatgggt

SEQ ID NO: 271094 - DNA, 187 bp, Glycine max
tccttccagtctatctctcgcgttcggtgaaatcttccagtacttatccttcatctgttcacactattttacctaaattgggtacgactaacgaccctctaaatgcacaaatagcctttctcatttctttaacaccccgttctctctatcatcaaatacctatttctctctctttccaccttctccg

SEQ ID NO: 271095 - DNA, 323 bp, Glycine max
  unsure (1)..(323): unsure at all n locations
catgcaagctctctcggagccattcctgcgaatgttaatttgaaagtaatttaccagtgggacgttactctttaaagcaaanatggcatataacctcctcccataaatacaaacatcaatgtaaatttagagtaagcttatgcgcatacttccttacaaatgttctcttgcacaagacattctattaaccgaaaaaatgcacccatatacaatcaaggcagctccgctacctagattatctacacgtacttccagggtgtatatgttacttacatcacacacatctccttggctaaattcacatacatgcatacccaaagcat

SEQ ID NO: 271096 - DNA, 467 bp, Glycine max
  unsure (1)..(467): unsure at all n locations
tagaganaactacatgcagctgcctcggtaaaatcgctgcctattctttgttaaccgttggatcttctcgacaattggtttgcaacttcacaatacacttgtccatgatctgaccgttgggatctttgagaagatgtctggagtgtgctagaagcttccgttcccgagagcatctcttatttaagcatttcagcctttgctttcgtgtagcttatgaaaaacgtcatttcttcttctttctttcttccaaggccatttctaaagttccaagaactttctccatcacccacagccaccattagccaccacaaaccattgttgttctccacaccgagaggaacccttcaaccgaagcggaatcttccaactaggcttgcggtttctgtagagaatgaaaccctaatctgacctttcgttttctttcgaggtaaccatggttctacgcttggttcttgttagtttcatct

SEQ ID NO: 271097 - DNA, 451 bp, Glycine max
cgtttgttactcaagagaacttcattattggttgtatccttctttttcatgtggagactacaagaggtaaagggggtctctccaactcttgaaccctatgcttgttaaacttccttgaacatgttgtcttgaaattttcttgcttgttgctttgttctcgatctaggtgctgagctattttccttgagttttttatgccaaaaatgtgttctttgagtgttaaaacatacggttagccttaaattagagttttctagaaaaatttcagtaaaacaagttttagaacattttaccaaataaaatctgtcacggacaataattgatagtgagagttgtatggactggtcttcttaaagttttgacctctaaaatgagtttattaggtgtgaaaaatataacgtagcttataagattcgtgaaaaactaattccttgaacatcgagaattagtt

SEQ ID NO: 271098 - DNA, 420 bp, Glycine max
  unsure (1)..(420): unsure at all n locations
ctcacctaatttctagaggcattcatgggaaggtattcatatactatttctcttggttgctatgttagattcagttggtttggttttggaataacttttgctgtcaaatatttaatggtttaacttctaacaggtctcttattctattttactcgtatatgatattttatagggacattcactctcaagaaatctgaattcagatggtatggtggatactatgcagacgctgctcaatattaatgaaggtatgtcatgaatcttatattcacgattcttatggtgtgatatgaccatagtactcaatggtgcgttatagcaccactatagcagtgttgccgacggtcgcagctgctccatggatgcctggngcattacatcttgctgtcgcgccggaatggcgtaatccttgctgtattg

SEQ ID NO: 271099 - DNA, 489 bp, Glycine max
tagcgatgggtatcctgtagcttgaatcctgatcttatacccaccctgctgcaactgagtctaagttcgaagtggttatctgttgtcctagatcgacttctcagagacattctgtcagaccagtgcacaaacacactgatcggtacgattagtatctttagattaataatcccacttcaattggcattaatttgcgatagagaagtgcccacaagattgtcgtatgcactagagcatgctccaaatcaagccttatttgtcttatctaaaacatatgtacatctaattagtattccctgacaccttactaactaactttgcccttaattagtctatttatatcaactgacctttgtcacatacattgctatccacatatgacttaagtaccaccggcaccaaacatttctttctattctaacatatactctacttagacggccacctttctccctgtcccacggtcctactcgcattgctgtcctcccg

SEQ ID NO: 271100 - DNA, 341 bp, Glycine max
atgaaattctagttgataattatgtcggttattactttgttatatgttgcaattgaggtactttacatgcaaagaatgaatgtgtcgatctagtgatgtttcttttaaaacctaatgaaatacaaatttattggatagagttgtgtccaagaagagattgttatgtggtgaagtatctaacatcaaattgaatggtcattgtctgttgcatgttcatctacgtagataggtattgtataaagacatgtttcgttgtctgtaaatttacagaggaataattctcttacgtttgattcatgtaaacgtacagaactataaccgaatattggtctaatgggtta

SEQ ID NO: 271101 - DNA, 120 bp, Glycine max
agcttacaaatctgttgtatatccaagcccataagtataatcaagtcagatgtagataagataagatacgaccagatctacatgaaatactatctagatgagatcacatctaagtaatac

SEQ ID NO: 271102 - DNA, 453 bp, Glycine max
  unsure (1)..(453): unsure at all n locations
cgtaagaaccaaaatgccttaatcatttccaaatatgcatgtgtattacgacgcatcaacaagaatcaagccaagactattgtgcaagcaatcaatggggcaaaacacaccaaatgattataatgatggatggctcaaattctcacaaaggtaaaatcatcactttcaaattgagctttcaaaactatcatgacatgtagagaagaatcaaggatttcaagtcacaaaatgtcaagaacttatattntcaaaacaattacccatttcttgaacatatcctataattcaaagaagaacatgcaaagtcgtacgtgcacacgaaattgacccaaaatattaaactgaaaatctgacgaaactaacaacatttacaaattaacactacttacataataacaaaaccaacaatactagcaaaaccaaagaacactccctcccatacttaaacaacac

SEQ ID NO: 271103 - DNA, 143 bp, Glycine max
  unsure (1)..(143): unsure at all n locations
agctntgatgtaatatttggagaggntaatgaaactattagatgatgcgctccatgagaggttggatcccatggagaatagagaccatatgaattgctcaagagcttccattggccaatttcgaacgtctagatatactacgc

SEQ ID NO: 271104 - DNA, 314 bp, Glycine max
  unsure (1)..(314): unsure at all n locations
cttgagcaattcanatggtaataactgttcactcggatattctatcatgcacataatatatcgagacgctcgaaatttaacatcggaagcttccgagcaattcaaatggtcataacttctaactcggaggtccgattgaggcgcataatatatcgagacgctcgatattgaacaatggcagctcttgagcaattcaaatggtaataacttttcactctgaggtccaattgacgcgcataatatatcgagacgctcgaaattgtacaatggaagctcctgagcaattcaattggccataacttctaacgtcggag

SEQ ID NO: 271105 - DNA, 430 bp, Glycine max
  unsure (1)..(430): unsure at all n locations
catgcaagcttgtggagtcttatatcttgaacaatccttntgttgatccagcaaagtttctcatagaacagcttgtagctagagcagctgattctgccggtcattttcaagatctaatgctaaatttaattttatttgcatcaatgtaaatgtttatttgttatattacatgattattgggtggctaaagaacactcatgcaggtctgagcatggaagagttgatgaatattccagctggaaagagaaggaagtaccatgacgacgtgaccgtaattgtaatcatgctagggatgaatcagaggacttcaaaggcatcaacttgcatttaagatttgccaattcttcanaaaaaataagaaagttaaaaaaacaaaacaaaactttgtacctatgtagctcttcacaggacgctctcgtgttaagtagta

SEQ ID NO: 271106 - DNA, 313 bp, Glycine max
  unsure (1)..(313): unsure at all n locations
catgtcttgggctaaatgttgataacaatgattctttagagtttccaccgattaaacctgctatagaaactagatcngattttctatgcgtcanatttcttgttcttgttcttgaaccatgaattgtgttgagtttaagtccctttgagttttgtcttgttattttctgtggctgaaacctaaaccataaaattcttacaaaaatattaaagtagaagaaaacctcaaaaatatagagtgacttgttcacctattgtagtttcttcatagaagtcatgtctagtcatgaaatctgtcacataagatttcttat

SEQ ID NO: 271107 - DNA, 365 bp, Glycine max
  unsure (1)..(365): unsure at all n locations
gcttgagatgaggaagtgttgaagggtgaaactttctgcttttattgttgaccacagagtggtacctggagatatgtcgcggnggtcacgagaccttgcggacgtcaggtggggtgctattgcccaaaaccaagcttgaccaatcccgacccaacccgggcatagtcggtcagtgagaacctgtgatgtacctaagcaggcgagctcctggcagtcaacagataaaaggaaaacaagaccacaaagcacggaggcttgtggtggctggccagctgtgaattntgtgtaatatgtggatcgtggccctctgtaatcgattaccaaaggtgagtaatcgattacaaggcttaaaattgaggacagga

SEQ ID NO: 271108 - DNA, 437 bp, Glycine max
  unsure (1)..(437): unsure at all n locations
taagctntgagccaaaatcctgactcaccataaaccttgacccagggtgagaatgtcaattcttaccctcggaagcaaaaaaaaaggggagagggaaaatttccaatcaaagaggaagcaaaaaaggagagaatgaaaatntccaatcaaaggaaaaaaagagaggaaagggaattcccaatcaaagagtgggagaaagcaaaaagaaaagaaagaaaattcccaatcaaagaatgggagaaagaaaaaagagaagaagaaagggaagaaagttcccgatcaaaaaacaataatatgcataaaggtctttggaccggacaatatctgaacaatacagaattgtcaccaaatgaataaaaagaatgaaagggaaccatgacctaaaatggtctttcccctttagttgccaggcaaaatcttgtgcgctagcaaccttt

SEQ ID NO: 271109 - DNA, 506 bp, Glycine max
  unsure (1)..(506): unsure at all n locations
cggggatcttcgcngtttgnnnncgttcgtacccgggtatctttgattcgacctgcggcatgcatgctntgatggccgaaagaagaaatcacatgtttgttttcatcaaaaagggggagattgctgatgcatctatacatgattntgatgacgccaaagaagattcaccaatgcttgttcaatgataagcattgcttcaagataattcagagtgcttcaacaacaaagccttgtttcaagattcactanagaccaagccttgcctctaaacaaagtgctttcaagacatgccaggctcttggtatcgattaccagcgaagtggtaatcgattaccacaaagaccagggttgagaaatagctggttgaaaaggctctgaacttgaattttaacatgtaatcgattaccatatgtatgtaatcgattaccagcaacgaaactcctggaaattcaattcaaagtcatcgaccttcaaatataattgtgtaatcgattacacaatcattg

SEQ ID NO: 271110 - DNA, 422 bp, Glycine max
  unsure (1)..(422): unsure at all n locations
aaccacaacctttccattccctctcattttcatattatcttctaggggggtttagagcaganaaacttcttcagtatcttgaggaatggtctagaaaccttgaagcctagtgttagttgtcttatacgactaaattttgtatagaaaaacctttttcaaaacatgtatagtttccccaatttatagttcttttgtaggaatttgtaaataaatcttgatatgttttggtacctatcattagagtacctttaattggaattaatgagaaaatctgtacaatttcatgtcaaaagagtctaaaatcttgaagtcctaaaaggatcagttgtgctaagcggaccttgtgggctcagcgcgcatccactgctaagcgcagctttagcatgctttgcgtgacaagggaatctggaagagcacaagaa

SEQ ID NO: 271111 - DNA, 368 bp, Glycine max
  unsure (1)..(368): unsure at all n locations
gcttattctacacctgagaaagaggttgagatagttgcacattagatgaagcttgctaacaaaaatattcatgtaggtggaccttcttctactaattntgactcacagcagcctcctatccctcttccattcccacctagagcaatttcaaacaaaaagatggaagaagcagaaaaagagatcttggagaccttcagaataagtagaggtgaacatacctctactagatgccatcaagcagattccaagatatgctaagtttctaaacgagctgtgcacccacaaaaggaagttcaagggcaatgaaaggattagcatgggcagaaacgtgtcagcattgataggtaaatctgttcctcatattcctg

SEQ ID NO: 271112 - DNA, 450 bp, Glycine max
  unsure (1)..(450): unsure at all n locations
tttaatctaagctagcacgcctatgaaaattactcaggggctaagcgcgacaaccactgtgcttagcatgagagcttagaaaacatttttatgcagaataggcttagcgcagcaggcacgcttagcctaaatctacaatttttcaaacagagggagatttgagcttagcgtggcaaggcgcgcttagctcaacctcacaaaaacatagcacaggtttagcgagtaggctcgctaagccttattccacaaataggaaaaatagagacgaaattgcgcttagcttagcagccaggcttagtgctgaacaaaattttgaaaaattctaagtgtctgaaatagtagtctcactcagcacacaaacgcgcttagcgagttcaccattgatgctcaacagagaagatgaattgtgcataccctaatttcatcggngaccattggtttggtggcatt

SEQ ID NO: 271113 - DNA, 508 bp, Glycine max
  unsure (1)..(508): unsure at all n locations
tgcgcggccgcgcgatggnncttcgagactttgcgatctctgagtacattagccaccatgccagcntatgataananataccattatttattgaactttgcaattattcaatatngngcccagacacagtatacacactctgtttcaccacatataaaggctcaaatatgaatgtcatagataaatataacgagatctgtttatgacgacaatgtcacacgacataacttttagaggaaattggctgatgcttacatgtggaaggtgtggccatacctcatataacattacaaacctgtacaaatattggagctcctgtttagcccaagacatatgtttgaccattcactttcaatgaagatgaccacctattatttaagatgaacaacctttgaatgacgttgtagaaactgctgtttatgtttaccagatccggcggaaataatttatctcaccctctattgtcacaatatactgacatgaccttgaggtaaatatttccacacct

SEQ ID NO: 271114 - DNA, 389 bp, Glycine max
  unsure (1)..(389): unsure at all n locations
ctgagccaaaatcatgactcaccataaaccttgacccagggtgagaatgccaatccttaccctcggaagcaaaaaacgaagagaaggaaaatttccaatcaaaggaaaaaggagaagggaaatttccaatcaaagaggaagcaaaaaaagggagagaaggaaaatttccaatcaaaggaaaaaagagaggaaaggaaattcccaatcaaagagtgggagaaagtaaaataggaagagagaaaaggaaagaaagctcctgatcaaggatcgaaagaaaacagaagaaatatgcagaaaggtctttggaccagacaatatctgaacatatacagaattgtcaccaaatgaacaaaanaagaaagaaaggaaaccatgacctaaagtagtct

SEQ ID NO: 271115 - DNA, 228 bp, Glycine max
tgaatctatagacactgaaaacgggcaataagaggtgagatgaggaaaaccatgctggactgcattctgacggtcaatttccaccaaccaataagttttttactaagccataacagacgttctcttacccaccaccagtatccaccaaggcatcctaaattacacaagctgctaccgcattcatgacaacacactttagccaaccaaaaccccaccagaatgatttgc

SEQ ID NO: 271116 - DNA, 435 bp, Glycine max
gcatgcaagcttaacatatataaatcattttctaacattactgatgcacacatagttatcccaagttgattcctcgcactcggaacctaagaatatttactaaatatcgatcgctcgcatatgcagtaaatattccagcattataattatattcttgcgctctttgcaatcaaaacgttatgctctattcctagcaacgtaacataaagagtaaaatcatgcgattcaaattctaagattactctccagtcttacttaaaatccaatttcatgacactagtgatcaaatagaatcaagcattacgagttgaatgaaattaccaataatgagtagaaaagattaatacatatataatatcgaaagggatacataagagtaaaaagattacattcaatccttaagaaaaactaaccgatcactgcgcagagcacaag

SEQ ID NO: 271117 - DNA, 351 bp, Glycine max
ctctagagccttctagtttctcaaaccttgataacagaacttgtgctattcatctttatcataccctgctacctttgccacaaagaattcgtcaacgactaaccgcctgaattcattttgtgtctctcttctcccttctccacaagaacatatgactaaccgcctgaatccttttgtgtcttccttctaccttatcaaagaattcaaaatgacacactctgagaattctattgattcttctcttttcctaatacaaaagatttctatggactaaccgcctgagaattcttctgttgtcccttcacacagtttctaatgactaaccgtctaagaactttgtcttaacacatt

SEQ ID NO: 271118 - DNA, 280 bp, Glycine max
  unsure (1)..(280): unsure at all n locations
agctntgtggagagattcagacttgagttgggaatcttaaccggcagtaaatacagctggtgggttgttatgtatatggaacgagacagtatttaaagtggaaaggagggtcatgggtaggggcttcatcctgctggagggtatgtggacgcaagacttacaaaaaatctccattgtgaatgtttatgcaccatgtgaagctgatggaaagagagctttttgggaattcattaggcaactcaaggatcttaaacctggtggtttgtggtgtatattggga

SEQ ID NO: 271119 - DNA, 401 bp, Glycine max
  unsure (1)..(401): unsure at all n locations
cattgcannaaaatgttggactcttaaactcagcccccttcctctatttatagtggaaaggggaggtggttgccgcccataggcttcttgaggaagattcttgagcgcacccccaattgataagttcacccacctccagggttgcttactgattaagtttcctaagtgcacccccaattgattagttaaccaccaccttccagagtgttctagatgaagtttcctgagcgcacccctcangtttgataagtgcacccctcggagttgcttactacttaagtttccttaacgcacccctaattgataagttcacccccttccaaggttgcttactgattaagttttctgagcacaccccccaattgattagttcacccccaccttncagagtgttctagatg

SEQ ID NO: 271120 - DNA, 385 bp, Glycine max
agctttaaggaggaggagataactaatgcagtgtgtgcttgcggaggagacaaaagcccagggtctgatgggctaaatttttgtttcattaagcatttctggagcatcctgaaacctgaattccttaggtttttctcagagtttcatgtcaatgcaaccttccctaagggcctaaattcatcattcattgctcttatccccaaaatcaaagatccccaactcctttctgactttagaccaatatccttaattggatgtgtttataaaatcattgctaaagtcctagctaatagggtcagcaaggttatgaatcacctcttagatgaaaggcaatcagcctttggtaagggcagacagatgcttcatgcagttttaattgctaatg

SEQ ID NO: 271121 - DNA, 296 bp, Glycine max
  unsure (1)..(296): unsure at all n locations
tctacttatgtggcagggcgggcttccttcactntcttgtctcaactcgcgagctntgaccattgctcttccttctcgcgatgcttctctttatatctgcctgagtaggcttatagcctaacccatacnttccacgatttcctttggcatttatcaggctagttatgccgccgttgtctttgcccaaacccattccgggttcataaccgtttcccaacataactcgagccatcattactgctgcatcggacaggcaagcttgccaaagaatgagtccacggaggaaatgcttacca

SEQ ID NO: 271122 - DNA, 523 bp, Glycine max
  unsure (1)..(523): unsure at all n locations
nccccatcgggacttagtgcaacgcgntatgtatagcgactccgccctgatacgcacacatcttattgtctgccttatcancttatttcttcttctctgccaataatcatgaccgtgcgagcaatatatacaatccaagctggaggaatcatcctattctgagatgggcaatgtactcgcacaagcaacaactagcctatctccttcactttcagagattgctgctagtcttcagagcaagggtcatatatttcctcgctccaatgcaatgagcatcgagcaacaacaacaacatagacaacaagccactgatgcccctcctcaaccttcagaatatgccatttcagcatgagacaagagcctccattcatagtctgacaatcagatggggcagatggctacttaatcgaaccaagctcagcctcaaaatttggcaattgccttcataacctggcagaatctgaaacatgggagtgcttaccgtgaggtctggtatgcaatttgagtgcttccccagagctct

SEQ ID NO: 271123 - DNA, 416 bp, Glycine max
agctttcatcacctcttcaaaggtcagccttccgcatagtgtacggaaagattctagaattgaccgcggtggaggtatttacggaagctgtcgtattcctcgcccaatactatgacaagccgttgaggtgtttcacgtctggggactcccaaatggtatcgactattgaagagtttgaggaaatatttggatgccctcttggggggagaaaatcctatattttctccgggtttcttccctccttgagcaagaatgcagctgtgcgtggagattccgcaaaagaggtggatcgcatgaagcaatcttggaatggcgtagtgggcctgcctcggaaatacttggaaggcaaggcaagggatatggcgagccaagaaaagtggtgcccgtttgcagatatatcaactttgttgattttt

SEQ ID NO: 271124 - DNA, 390 bp, Glycine max
  unsure (1)..(390): unsure at all n locations
cgcatgaattacattctcccnctttctcaagcaaattcttaattcttcttgacatcatcaaaatcttcatcatcaataatcttaagagggataggcttaaaatacagaagaagcaacaacaatcaatttaacaatgttctttaaacatgcaagacacaattgattgcaaaaaattaaataagataagggaagagagaatgcaaacacagttttatactggttcggccacatcccgtgcctacgtccagtactcaagcaacccacttgagatttccactatctttgtaaaatccattacaaagtctgaaccacacagggacaacccatcccttgtgttcaggaatcctntacaacaagagactcacagtcccttaaccaatctcattgaat

SEQ ID NO: 271125 - DNA, 405 bp, Glycine max
  unsure (1)..(405): unsure at all n locations
agcttcgcaacactccttcgtatacactctgttatattggaacaattcaaacctgagattgcaactcanatttagaactctttcccggcaaattgccccaaaaaggtcttttttataaacttatttccgaaatangattcttttggaagtaattctggcatggtactctttttaatgtagcattcataaaccatataaaccgccattgacaatggcgagttcactgcggactggacgcgtagcacgtaaacagccagcatggctggcgacttcccttaacgtggatctcgccactcctactggcgagtcagcaagtggtttcataaaccgctgattcgactgacgactttgcagctgcacgcacgtgcaggatgagcaagttgcacgctaccggagtgtacgtgc

SEQ ID NO: 271126 - DNA, 367 bp, Glycine max
taagctccttcaactgcacaaggctcttaatatttgaagagtattcttgtggaaccttcacccgacgaagacactgacaaaaacttatcttctccttcttggacaaagtatggcaggctgggggcaagtaaatattcttcccatcagaccttggatgcaactgtgatcttatacccatatcagctagatcttgacgggtattcaagccatccttcgtcttgccttgaatgtttaggagcgtcccaatcacactgtcacaaacatttttctgcacatgcataacatcaatacaatgtctaacgtcaagatcacaccagtacagaagatcaaagaaaatatacctcttcttgcatatgtgactctgact

SEQ ID NO: 271127 - DNA, 299 bp, Glycine max
  unsure (1)..(299): unsure at all n locations
tgaatgatattggacacaatattaacagtgttgtgaggtgtgttactgggaaagttaaggagaagcaacccattccttgtgagcttaaccaaagaaagacaagctactccatctttctctccctttgctttaacacctgccatcaaaatcatagacattgtataatctgcaaaaaaaaagtgaataccatcttctgcagagntagcagaagcagactcagtatccttggtgtcgaaacattcgtcagcagtatcttgtgtgcataactttcttttcttagaactagcgccttcttcttt

SEQ ID NO: 271128 - DNA, 529 bp, Glycine max
  unsure (1)..(529): unsure at all n locations
agggactcccccccccttgatgggcacgcatctagcgacgcacactatacattactctagctggtgctctattgtgcgttcattcggtgcgtagtcgacaggtatttgtgcagccccttaggcgcttatgtgtctatcggatgtgcttaagaaaagagtggccgtgcagaaaatgcaatctgatgcgcttgcgttacgtttccgtgacatttccatgagaaattacgcgaagattctcgaccgatcttcaagattcatcgttcgttcctcgttttcttcagactttaacgggtaagtacctcaagccaagcttctcaattcattatatgtacccgtggtggtccacatttagcttcatgtatagtgattctcgctttcatttactgtgtataccccgcttgtgacgtgctttagccatctattaagtcatttctcacttaatctaaagattaaataaattttgaccgaatgcctgattcgtatcatggcgctatttcncgtaaaatgactctcgacctgtctgccttcn

SEQ ID NO: 271129 - DNA, 312 bp, Glycine max
  unsure (1)..(312): unsure at all n locations
catgccagcttctgcataattagagagttctagagagagaaaggtccatattctagagagctngaaagaatttgttgtgtgaagatctgcagagaccagagctataaaagcaagctatcctaagagcttgagacgagtttgtgagcgaatgtgaggtcctagaggtggaggagacatccccactacttgtgtttctacaatctttcattctcttcctctttggtggaaaaggaagcttcccagttatggaaagctaaatcctttgttggatcttccttggaagtacttgatgtaaatatctttctatctatt

SEQ ID NO: 271130 - DNA, 263 bp, Glycine max
gtgtggaccctctagtgcaatcctccattcttctcttttttcggagccctaagaatgtcattgcctagcgctgttcatgtgtcctccaccttcgagtctggagccccgcgaatgtcattgcctagcactgttcgacaattctccattctccacttttattcggagccccatgaatgacattgcctagcgctgttcatgtgtcctccacccgcgagtctggagacccgctaacgtgattgcctagcgctgactgccaattctcc

SEQ ID NO: 271131 - DNA, 187 bp, Glycine max
  unsure (1)..(187): unsure at all n locations
gataccagatgatgtgaacctgagtaggagtggatcgttngatacaggttacgaaggttgggatgacgccactttccgatgaaagaagataagtcacgggcagaccgccactttccagtgaaaggaagataaagtctgggtagacgccactttgccatatacaggctaaagggctctcgcggagcat

SEQ ID NO: 271132 - DNA, 243 bp, Glycine max
aggagacggaccattccaagtgttggagaagatcatcttctttgcctacaagattgacttgcctagtgagtataatgtaagtgccactttcaatgtgtctggtctatctctttttgatgcatatggacgagccttggatttgaggacaaatccttttcaagacgagggagtgatgaggacatttgatacaatttggtgagagtttctctctgggttccttgttgaaccatttatacacttatc

SEQ ID NO: 271133 - DNA, 350 bp, Glycine max
agcttgagaatcctccttgagtatatccgtgtctctgttgattttccattgtcataccctaatttcatccagggaccatccattgttgggatgcgactctcgttcgacctcttcgaggtacttggcacccatcattaggcaattcgtgaagttccgagacatgccggaagccaaaagaaagcattgtagcacaatccgtgaagttccgtgacatgccagaaattaaaaggaagtgttagtgcgcaatccgtaaagtttcataacattccggaaggcaaaaaagggatgattacgtaatccgtaaggttccgtaacattaccgaaagaaaacaagtatcgttacgaaattc

SEQ ID NO: 271134 - DNA, 391 bp, Glycine max
  unsure (1)..(391): unsure at all n locations
tagacttagggtgaaacatagactgcttaacataagacggtaatgcttgcaaaactgactttgtaaccatgaccattgttagtcgtcatttatgactaacttttgtattgaaaagtttaataaaatgtatgtcttttcctcaatttatggttctttntgtaggtttgtacatatttttatgtttagtttaattnttttctcagtagatactccctatattgtgaattaatgtggttcaacttcagtttcatgtgaaaagatgaagaataagaaggttgaagtagctggtgtctcgctaagtgaggcatatgcgcctagtgagttacatccactaagcgaggcactcagctcgcttagtgggttgggagaatctggagagaatctgaaagca

SEQ ID NO: 271135 - DNA, 278 bp, Glycine max
  unsure (1)..(278): unsure at all n locations
cgcatgccagctgggactgagcattgatgaagatgctggtgaattatatgctgacatgcctcctnttgaggacgctgatgcagatgctgagggtaccaagatggaagaagctgatctaaatctgacttaaatgcctgttacgttcttagaaacaatgattggagaaacagtctttctactatggtctatgttcttcgaattttcgaaattttggaacgttggctagttacgtgccgcatgttgtacttctttattggatatttgcgtccttccctgcc

SEQ ID NO: 271136 - DNA, 311 bp, Glycine max
  unsure (1)..(311): unsure at all n locations
gataagagccctgtttcactttaactgctggaacattgggtgtaccttgcacctgagtatcttcagtatggaaaagccactgataagactgatgttttcagctatggggtggttgtgcttgaggtggcttgtgggaggaggccaattgaaagagaagggtctaagatgttgaatctgattgattgggnttggggccttcactctgaaggaaaagtgattgaggcagctgataaaaggttgaatggggatgttgaggaggaggagatgaggaaattgttgattttggggttgagttgtgctaatcctgatag

SEQ ID NO: 271137 - DNA, 430 bp, Glycine max
tgcaagcttatccctctatagctagggaggtattgttttcttttctttctccttttaacggtgaagagtttaaactttaatgatcatcatccataaaataaaagtgtaagtcatgttattttctggtctgcaggatgataccttacggaatgctgctgagagattcaaaggaaaaaattggaaaaaaattggtaatatattgatttcaatttgtacttttcgattgtacatataattattcttgactcactgccactagcatccagtgtgtgcttaaatcaatttggatgtctccaatacttactttatatacctgaaatgagctttcttcaattagacatttgttgagttgaattaaatgaaataaaaacctatgtattctatggcgagggattcactttatcttccctgggcacgttctaatatcaac

SEQ ID NO: 271138 - DNA, 187 bp, Glycine max
  unsure (1)..(187): unsure at all n locations
agctcacaccgccccaaggtggctattntcctataaataggcatgatggggagtgttttaaaggattagaatgttagcattcagtagtggaggaaaatgagagaattaagagagaagaagaagaaagaagaggaaacgaagctgaggcgttgccaaatcacaagtatgatcaatccctacatcgctc

SEQ ID NO: 271139 - DNA, 373 bp, Glycine max
  unsure (1)..(373): unsure at all n locations
ccaatgcctacaagattaaatcctaagctatcagccagatactatgttccttattgggtagttaaanaaattggagcagtggcattgcagttgcaattacccgacgctgctcgaatccaccctggttttgacatatccgaattgaaactcgcagtgggagaacatcagatcgaggcagaattgccaaaggaactacaagctgaagaacaagggatacaaccggaacaagtactggtaacaagaatgtttggtccagcaggagcagaaattccacaagtattcatcaagtggaaaggacgacatgctgaaggagcaacctgtgaggacagatcaaatatgatgcaacaattccctgctttcaaccttgaggaca

SEQ ID NO: 271140 - DNA, 358 bp, Glycine max
  unsure (1)..(358): unsure at all n locations
agctntacacaaggcaggagtgtacaatattttttttcactgcctattaacccttgtatgaagaaccaggtgccataggtatagcacattccctaacaaccaatcttgaaaagcgtaaatgtctagcatttctagctcacgtaaatgaactgaatcttgttctttttcaacgaactataactcaaggaaatcaagaatcctcatgaaataaaaaatttgcttggcattaatataattagtctagtcatagatataggcatatagcacactgcacgtcatctaatatgtctttaagacttctatggtaaaaaaatgaagtccgttgaatgccataatggcaagcctccacaagtgaaaa

SEQ ID NO: 271141 - DNA, 338 bp, Glycine max
  unsure (1)..(338): unsure at all n locations
cgtattagaatatgaatatataaacgtttattntatttagacttatttaattagatctttacttatttaaaatattcaattaggtctttttatttttaaaattttcaatcaaatcctttattttttttaaaatgtctcaatgtgattcttttcaaagaatttgcaacttaacgttgtggtcagtctcaattggacaaaaaanaatcacattcagacatttaaaaaaagagacttgattganactnntcaggaataaatgacctaattaaatattctaaataaataaaaggagcatatttgataattaaatcttttaattaaaacttaaacttttacag

SEQ ID NO: 271142 - DNA, 432 bp, Glycine max
  unsure (1)..(432): unsure at all n locations
agctcgtctcagcgtttatgcgagacagagaccaacatgttagctatcatcgccaagtaccaagaagagttatgtctagccaccgcccacgagcatagaatcgcggatgagtatgcccaagtatacgcggaaaaagaggctagaggaagggtgatcgactctttacaccaagaggcaaccatgtggatggatcggtttgctcttaccttgaacgggagtcaagaacttccccgattttagccaaggccaaggcgatggcagacacctactccgcccncgaagagattcatgggcttctcggctattgtcagcatatgatagacttaatggcccacataattagaaattcgtaggaaacttgtatggtctctcagaccttgactagatatgacctcctttntgaaataaaatgagtcggtcccatgtttctac

SEQ ID NO: 271143 - DNA, 353 bp, Glycine max
agaggttaatgaaacaatgagatgtttttctctatgagaggttggatcaaatggtgaatttagatccttatgcagaagaaaggatgagaagagggaatgatggtgttcctagacaaaaccgaattgatggtattaaactcaacatttctgcctttaaaggaaagaatgatccggacgcctacttggtgtgggagatgaaaatagagaatcttttctcatgcaacatctatgaggaggaccaaaaggtgaagcttgctgccacggatgattcggactatgctctagcgtggtggaacaagctatagaaagagagagcatgaaatgaaaagccaatggttgaacatgggcggaga

SEQ ID NO: 271144 - DNA, 369 bp, Glycine max
  unsure (1)..(369): unsure at all n locations
agcttccatcatacacgccctcgcctttgtagggctacacgccctcacctttagaggactacaagtcctcgccttatgaaggctacgcaccctcgccttcagaagactacacgtcctcaccttcaaaggactgcacgtnctcacctttatagggcggcacgccctcaccttcggagggctgcacaccccttcgcttttagagggctacgcgtcctcactttcagtgggctccacatccgcaccataagagaatttaaggccctctgcccttaatgcttaatcgagacttgtgctctccgttaacgggccagtcgcttcctgctatcacgtcctgggccaccccctgatattggaagcgcgcatctattc

SEQ ID NO: 271145 - DNA, 415 bp, Glycine max
  unsure (1)..(415): unsure at all n locations
agtagaaacctgggaccaactcattntatttcagatatgtagtcatatctagtcaaggtctgagagaccatacaagtttcctaacgatttctaattatgtgggccattaagtctatcatatgctgacaatagccgagaagcccgtgaatctcttcgggggtggagtaggtgtctgccatcgccttggccttggctaacaatcggggaagttcttgactcccgtcaaggtaagagcaaaccgctccatccacatggttgcctcttggtgtaaagagtcgatcacccttcctctagcctctntttccgcatatactngagcatactcatccgcgattctatgctcgtgggccgtggctagacctaactcttcttcgtacttggcgatgatagctaacatgttgggctctgtctcgca

SEQ ID NO: 271146 - DNA, 390 bp, Glycine max
  unsure (1)..(390): unsure at all n locations
tttacgaaaactgaggctgctattaatcgcacgtaatttatgtcccaggacaaccttgtgagctgcttgaatatcacaccctcttgagttactccgctagtatggcttgcctataatgaatactatgtaaccatccacagtatagactgcatagcaatgcacatgcattattgttattatggacacaacaaacaactcatcacaggcactaggcctgtaagggtaatcaaacaacgatgaagattaccgtcataatggctcacgatgcattgaagcaccttagatcgtcatagcagataacatggaagcgcttactaatagnctcttcacgcacacacgatattaccatgtaaaggcgctcataatcaatttcttccttcagactatacn

SEQ ID NO: 271147 - DNA, 88 bp, Glycine max
caatataatagaatcctttattgcatagataaatgaaaggtacacaccactacatgtactcatgaatgcagcatcaacatacatctca

SEQ ID NO: 271148 - DNA, 423 bp, Glycine max
agcttgcatttggaattgcgaaagccccacttcattattaggattagtacctaacatctcaaacgaacaaatcaaacgtaacaagacaattatagttgctggttgaatacctcacccactcaagtgtatcacacaactatggcttttctctaatgaaaacactctctccttttaccactctaattccccttgagttcttaggccattcaagagactatggccacaacaaagaacaattcaccaatatgtgtaaggtaaggctagagagacaaggaaaaggttaaccaagaaacaggctaacaatgttcttaggcacaactgaaggacataaacatcagaatctaggaattcaagtaacaatccttcatacaaccaatatattaccttaaagaggttttttttaaaaaacagttcttcaacatg

SEQ ID NO: 271149 - DNA, 424 bp, Glycine max
  unsure (1)..(424): unsure at all n locations
cgaaccanaaccggtgagagtgtgaacttaaattgtgagtgaacgtctagctgtgagtaataatctttgcatcaatccctgaatgttagaatgaaatgtataaatgaggacatgatgaaggccatgattgtgcatatacaagccttttgaccaaaaagcttaccttgaattataattgtatcatgtgcaccctttgtgagctgaatgattttgtcaataatgaaccctaaacctgaatgattatctccagataccttgtttagattttatgagagcatatgattcaaggcaacattacccctaatttggtggagtggaactaatgggatgcaagaaagagataagcatcgctcacacaacaataagtgtgtgttataataagaaagaaaagaagcattcaagaaatgtggctatgtataaggca

SEQ ID NO: 271150 - DNA, 357 bp, Glycine max
atccttgagtcgatctgcggcatgcattcttaattacgcgtctctgtcagttctacggagtgtctgtcacctccagcaaggctataggccccctactaatcgagctttcatcaaaaagtactgcgtccccaagcaagcgcagcgcgaaacaccacaacccgcctggggatggccagcagcgggcaacagacgcaccgccatcacctctagagttcaactcagctcatccacaaaaagggtagagcgttgcttacgacccatgtccgaacaataagcgaccaaatccaaagccaaagggtagcaaaagactaagcccgtgaccgacaagccatcatgcgtccagatcaagacgttaaa

SEQ ID NO: 271151 - DNA, 88 bp, Glycine max
  unsure (1)..(88): unsure at all n locations
gatcttagagtcatctgccgcatgcaagcttccgttntaagtttcaagcgtctcgatatattatatggctctatccgacatccgagtt

SEQ ID NO: 271152 - DNA, 392 bp, Glycine max
tatcaataaacacaagttgagttttattataaaattagagtttatctcttttatcttagtgagagtgattctcctaaattcttgagtgattcaagaacaccttggctgtatcaaaggactttcacaacccttgtgtgttgccctcgctggaaagagtgattctttccttcctttcatcatcacccttgttctttcaacccacaattccaaaaaatccacctctgcccagaattatctcgtggccataactcccattttacgcactcaaattaagtgattcttgagcctaaattgaatgtcaaaacgagacctttcacctcgttttggaatcacctcatttggagccctgtagcttcagttattgccatttctatatttctgtccagccacca

SEQ ID NO: 271153 - DNA, 117 bp, Glycine max
  unsure (1)..(117): unsure at all n locations
atgtaaggaagcgatcttaaaaattctaggtggaggactaacgccagtaccctctatgccaaggaatgatacatgatgaaacctgctggttactataaaatantggtactgcctcac

SEQ ID NO: 271154 - DNA, 451 bp, Glycine max
  unsure (1)..(451): unsure at all n locations
aagctacctagtctataaataggaacatgtgtaacacttgttgtaactntgatgaatgagagtcttgtgagacacaactcanagttcaacttctctccctttttcttccttcaatttcgtgctcccccctctctctttctctccctctatcttttcctccattaagcgtcctctccaagcttcttatccaaggctcatcttggtggtgaagctccttcttccaaggctcatcttttcctccattaagcatcctctagctggctntttttgtgcttttcattgctttaattgttgaataatccttggaaattggtcttgttaaaactctattggtttagttttcatttcattcctttttgtctttggttattgcttggctctntggatccttgcttgtgagttgccatatacggaattggaaaggagtattggtgccatatcttgaagaatt

SEQ ID NO: 271155 - DNA, 279 bp, Glycine max
  unsure (1)..(279): unsure at all n locations
atgttcgttgacattatataatatcccctctactaaacacgaaagaagatagaaaatgatgaaattacataaacaatataatacaaagggataacaagaaacatataacatattatttcccaatagaaattaattgattgagcttagtctctaatcttgaccatagatgtactaagtgccactacttatgagcatcccatgctncactcttgcttctcttacattcgttctctccataagcatggcagttttttttttccttttctgatctacattctt

SEQ ID NO: 271156 - DNA, 397 bp, Glycine max
  unsure (1)..(397): unsure at all n locations
tgcccttattaactgtctctgcgctnggctgtttcgctcaacaaagtactttcgacacctactgtacgttgatttgaccaatgctgttatgggaatgttgcgacaatccttcaaaaccttattgatacattctgagaggttggttgtcatgtggccatatcgacatccttctctatcataagccatcatccatttatcctttgaaattcgatcaatccatgtggctatggctggactcagttcacgaaattttctaatattgatcaaaaatgtcttgcaggagtgtaagctgataaaattagtatgaatacatggataatatatatgaaaggaaataaatgggaccatcaatataatatctacccatttcttcacatgttttttgtttgattatgaa

SEQ ID NO: 271157 - DNA, 173 bp, Glycine max
  unsure (1)..(173): unsure at all n locations
gaaaacgaanaccctcgagaaattcttatggttataactcgccacacggaaggtcgattaacgcgcagactatatcgagacgctcgaaattgagcaacgaatgctctcgagaaatctatatggccataacttgtcacacggatgtccgatttaggggcataatatattgagat

SEQ ID NO: 271158 - DNA, 422 bp, Glycine max
gcgaagtgggtggaattcctagagcaattcccttatgtttatcaaatataaaaaggcaaaaggtaatatagtagccgatgctctttctcggcgtcatgcattactttctatgcttgaaacaaaattggttggtcttgaatgtttgaaaagcatgtatgaaaatgatgaaacttttggagaaatgtttaaaaattgtgaaaattcttcagaaaatggtttctttagacatgaaggctttcttttcaaagaaaacaaattgtgtgtgcctaaatgttctactagaaatttgcttgtttgtgaagcacatgaaggaggtttaatggggcatttcggggtccaaaagactctagaaacattacaagaaccattttattggcctcatatgaaaaaagatgtgcagaacatttgtgaacattgcattg

SEQ ID NO: 271159 - DNA, 392 bp, Glycine max
agcttctttgacttcacaagagtaatattgctatatgtaatcttataattatattgaaaattaatcacattcaactatcccctactattttttatctcgtttatatctcttctattatttattttattgataaaataatcttacattgtggacatttgaattaattgtaattttttaataacagaattttgtatataataaaaaaatctcctgcaaatttacatgtacatggcacaaatattatgtagtaaggtactaacaaagggatgggaatatctagcatttttctactcatattttccattaacagcttataatgtaattttttcctataataaattaaaatcaattaaatttgaatacatcatatttcattaacctttaccaatgga

SEQ ID NO: 271160 - DNA, 220 bp, Glycine max
tgctgcagctcatgagaaagataatatgagttgagagacaaagctaagacagatggtcagatgatcagaccttaagttagagaattgattaagatcagatcaagttcagatcagctccagaatagatcagatcagactagattcagatcagagagacttatcagatagtttgaatttttttttcaaaactgaatagcacatatgatttttctcaaaactt

SEQ ID NO: 271161 - DNA, 426 bp, Glycine max
  unsure (1)..(426): unsure at all n locations
gacaagactatacgaggtatcttccttngtatagcaatatctccaagggctaccgtgtctacaacttgcaaactaagaaactcgtcatcagtcgagatgttgaagtttatgagtatgcttcttggaattgggatgaagaaaaagtggagaagaatgttcttatacctgctcaactacctcaagaagaagctgaggaagaagacccaggtgaaccaccttcaccttcaccacaacaacaagatcaagaactatcatcaccagagtctactccaagacgagtaagatctttggtggacatatatgaaacctgtaacttggccatacttgaacttggaagctttgaagaagcgtcaaagcacgaagtatgggtcaaggcaatggaagaagagatacagatgatcgagaaaaacaacacatgggagttag

SEQ ID NO: 271162 - DNA, 270 bp, Glycine max
agctactcgtatagagtatgagacatgcacaaagagcttcgaggcccttattgaaggctaactcgcgatagggcgagacatgatgtataagggatttggaaatgcacacagatctcatcgatgattactgagtctatgggcgatactactagcaacaatggaaaaactgcaaatattgggaaagacaaaagttggcatatattcacaacagtaaagaataacaacatagggttatcgccttgcattaaaatgaaatacttgactttcccc

SEQ ID NO: 271163 - DNA, 406 bp, Glycine max
  unsure (1)..(406): unsure at all n locations
tatgcatccctcattcaagaacatatatntatagcatgtattaatagtcattaaactttgctactccctgaatagttgatagtagtacagaaaaatgacattctccacaataatcccacttgaaactataagttgttagctagtaactacttggacatgaaaaacatagatatagatccattggataaagaaaccattctaaatatgaattagcaattgacttgatttaccaaaaggtgaatattggaaagaattgctaaatatggcctattggtcatcatcaacatcataaaataaaatttattattcgaaaccagaaaaaaccccatgtatgtctttgatcttacagttctggaagtgaatagatattataaaactgagtctattttacatattgacaaatgag

SEQ ID NO: 271164 - DNA, 152 bp, Glycine max
  unsure (1)..(152): unsure at all n locations
atcgagtgaacataaccggtgtcgtgaatacgntntcttttttctcnatcgacctcgcacaccatgggacgtattactacagaagcctcccgccgtgtcattcgacctgatctgcgagagaaccaccagcggcgatttggaggatattgttg

SEQ ID NO: 271165 - DNA, 426 bp, Glycine max
agcttgcttcacaatctccccttcttgatgatgatcatcctaaaatcaagaaacacatacacatactttttcctagtcgatcactcactcaattctccatattctccccctttgttcttgagttcatgattcacttgaaattatgttaattacttatgagagttcttgatttaatccctatttctctccccctttggcatcaacaaatagccaaagtgtgtaacaaatataacacatacatacattactaatcattcacaagatattcattgaaaaatctaaaccaatcatgaagcaagaaacatgactagatcacatatataaaaaccacatagtcatttaacataattcataatcgctcaatcatactatgaaaataaaagaaatactaaatctgtcaaatgtcataattgtatagattatctg

SEQ ID NO: 271166 - DNA, 357 bp, Glycine max
  unsure (1)..(357): unsure at all n locations
cgctgtngagagaatgcatntccatcttccaagccaacatattgttctttccatcttccagaactcttacttattcagaatttgtttcaaggcttgtataaaataaaaataaaaaatagatcatggcagctcaggaaaaaaggatataccatcggaagactaatataggtcccaccaaccacatgagaattgttttatgtaagaatgataattgctgccaatattcatatgatacatatagagaaacatgttttgccatgtgtgttttacaagatgacgaagaatatattgaagcaatcaaagaggcttatgatatgggcatggctaattatttaaggaaattatgttgttatgcta

SEQ ID NO: 271167 - DNA, 501 bp, Glycine max
  unsure (1)..(501): unsure at all n locations
cgtcactcgcgcgcacggttgancctctnnacacgtgcattgactcatttgattgaccgcgatccttagagaaganctccggcatgcaagctaattaattattttagaagttgtatatcaccttatgctggcggatcatgagatttaagaggaatatttaacctccactaccactgacaatatgataagagttcatgacttcgtgatagataaaaaacttccccctcagtacttaagcatcacggatatcttttatcactttcaagggaactctaacagtcaaaacacttactcttatataattattttttattggataatcatataacaatattttaccctattttcccatataataatagcatcaaaatttaaatgggcaccaagatatattataagaaaaaacggacatataaacatatcacaccattgaatataactactattcctaacatattcttatacaatataaacagttaacttattatacaatcccatacc

SEQ ID NO: 271168 - DNA, 101 bp, Glycine max
gcgtctcgatatatgacggcactcattcttacatacgagtcaaaacttactgtggtgtgaatgtgataggagactctattatcattagtgagcatctggat

SEQ ID NO: 271169 - DNA, 362 bp, Glycine max
caagatatcaacaaacataaacttaaacatgaccacaatctatatcttcaatgtagttcatgttctaagatgagccacaactaaaggccaatataaatcatgcaaacaaacaccgaatttgttaggatttaaactacgaattgtgtccatatatttctaagcacaaacaaactagtacaaatctggctaaattgcatcaagtcttctaaaaggctattagacaattcatatgatcattatggtctaggctcataattatacaatatatatgaacctagtggccagctttaagaaatgacactattcttaaagttgcagtctacaattgaaatcaacatacatgtataatgaagattattttg

SEQ ID NO: 271170 - DNA, 478 bp, Glycine max
  unsure (1)..(478): unsure at all n locations
cgaccgnctnncgnncgggtgagcccgtgcgaacccgagatcctctgagtcgatctgcggcatgcagtctttgtttaattaagagcatcagtatgtttttattatatttaattttctgcgggataatgatgatcgaatgaagcacaagggactctatgaaattcaccagttaatttcataataccgtgatctagtacacattctctggctcatctacctgtcaatttaacacttaacatgtttatttctatatatttataaacactgtccaagggcatggatacaattggaaaacattccctattttatggctaacaacaatatatatatcatttcatgttcctaagtgattgcaacatataataccctccttcttcacatggatataacaatctctcccttactacattttccactccttttgcttttcccgtcacaattccctctacctcaccgtcacttttctcactatcccccc

SEQ ID NO: 271171 - DNA, 298 bp, Glycine max
  unsure (1)..(298): unsure at all n locations
agagtatatctcttctatcttagtgagagtgattctactacattcttgagtgattcaagaacaccctgactgtatcanaggacattcacaacctntgtgtgttgccctcgctggaaagagtgatttctttcttcctttcatcttcacccttgttcttttaaaccacaattccagaaaatccacctctgcccagaattatctcgtggccataactcccattttacgcactcaaattaagtgattcttgagcctaaattgaatntcaaaacgagacctttcacctcgttatggaatcacc

SEQ ID NO: 271172 - DNA, 447 bp, Glycine max
  unsure (1)..(447): unsure at all n locations
cgcttataagaacaaaattgcctcaatcatttccaaatatgcatgtgaattangacgcatcaacaagaatcaagccaaggctattgtgcaagcaatcaatggcgcaaaacacaccatattattatgatgatggatggctcacattctcacaaaggtaaaatcatcactttcaaattgagctttcaaaactatcatgacatgtagagaagaatcaaggatttcaagtcacaaaatgtcaagaacttttattttcaaaacaattacccatttcttgaacatatcctataattcaaagaaaaacatgcaaagtcgtacgtgcacacaaaattgacccaaaatattaaactaaaaatccgacgaaactaacaacattaacaaatcaacacaactaacaaattaacaaaaccaacaaaactatcaaaaccaaagaacactcacccccccccc

SEQ ID NO: 271173 - DNA, 349 bp, Glycine max
  unsure (1)..(349): unsure at all n locations
ctttgccactggtaatcgattacaggaaactggttatctattaccagagagtaaaaactctggtaacttagaaaattntgagaaaaactgttttgaaaaacaaaactgtgctatgtngtttttttaaaaaaatcttttcaatacttcccttgtgaagtcttcttgatttcttctcttgaaacttgaattcatcttttcttgaatcttgaaatcaaacttctcttgattcttgaatttgttcttgatttaatcttgaaatcattctttgggctttttctcaacatctatgtcactatcaaaacttcttgaatcaacttgattcatcatcatgaagcttgctttacatatt

SEQ ID NO: 271174 - DNA, 487 bp, Glycine max
  unsure (1)..(487): unsure at all n locations
cggatgaccctagaacccagatccttaagtcatctgcggcatgcatgctttanagccatgggcttatctttctctcccttggatatagctcggtaaatgtgaactatagggaaatgggatcccccttggcgttcacacatgggaactaaggtaatacaattttcatcccacttttaatgaatctggagcctaactcaccctaacacatagaagatagccctatatggcctattaacctgcattagatcaatattcattagcaattagggcttgactctattaaacactatgggttcacatattacatccgatttttagaaggagatttggaaaagtgcacgaaaaagggcagtatcctccccaataatatgcgttataagcgttaacatgatangttcgagtccataaaacactatcactccatcgcctctctaaccactacgaatacatgatgacacacgctcaatgcgaaaatcacactattccg

SEQ ID NO: 271175 - DNA, 87 bp, Glycine max
aagctcgcctggtctgaagggctgaatggtagcaacttgacacatcctgttcttactgagtcaaggactcatcttctttatttgata

SEQ ID NO: 271176 - DNA, 400 bp, Glycine max
  unsure (1)..(400): unsure at all n locations
taccttgatcatagcctcataggtgattatgtgttacttatattaatacatgcgtgtgtgcgtatatatgtatgcatgtatgttctccagctatgaaggaaaaagaaattntaataacacacttttttattttttattaattgaaatttgttgaaaattataaaattgtgagacttgctccttattttatttttatccatatcatgtttcattgaagtggcggaaggtgctcccaaaatgattgatactattggtggttcaattaaccatcaaacaaaaatagaatcaacatctttattaggaggtatatttccatattctggttaccaaattcgttgtgttcttttccagttttccttctctttacacatgtacgtgcttttatttttttgggtcacac

SEQ ID NO: 271177 - DNA, 259 bp, Glycine max
  unsure (1)..(259): unsure at all n locations
gcatgcaagcttgtggactataccttctatcgaacacggncgtgtttatggttacgcccggattcaacgagggctgcaacaccggctccgctttcctaattgtactggaggcagntgccgaggctttatcctctatggtcttctggagcgtaacacgacctccgagatgggaaccccttgatcttttaaggccgatagatcggccttcatctgttcctgcacgccctcttattatccatttttctggatcgagtgttat

SEQ ID NO: 271178 - DNA, 385 bp, Glycine max
ttcaacagtggaaactggtctgactctattgttcttgatagtgtaaggttgagttgtcgtgctttcacgaggaatcggggtgtgataagttagttgagtatgtgtgtcttaatgtggtcctggctgagtttagtcttacaagaggaatatgcaagcgatgcttgatcaagattagactaaactatcaagaggaatcgaggttagtatctcatgagacaccataagaacatctgaccattgttagatagataatatctttttagcatcaggcacctattatgaaaaccaacgtgttctctacttgtttgtacacatcatttctctcgcgtgaatttctttctttgtgcacatataaactatacaattgttcatattgacacttact

SEQ ID NO: 271179 - DNA, 375 bp, Glycine max
  unsure (1)..(375): unsure at all n locations
gatctattgaatttctcgagagctgtcgttgctcaatttcgtgcagctcgatatgtgatacaccataatcggccattcgtgtggaaaggtatgaccatacgaaattcctcatagcttccgatgtttaatctcgtgcatgtccatatgtgaagtcgctgaatcggacattccaggaaaacttatgaccatatttaattccgagaccttcgctgcccattcccacgtctanaatattatcgtccgaaatgaccttcgagtgaaaggttccccctttgacccgcatagactccccctgctcacttaccacacttcctttcatccccttaatcgcctccgatcaccaccctaccatccanatcccaacgcttccccccc

SEQ ID NO: 271180 - DNA, 196 bp, Glycine max
agcttgtaggtcttgaatcttcttcatcaatggagtcatctacttcttgaagatcaattgcagcggaatggaaatggaagaaagatgattggagacgccactttaaggagaagatgagtcaagaagaagctcaccaccataggaaagcatgaataagagcttgaaggtacgagaaaatgagtggaaggagagggac

SEQ ID NO: 271181 - DNA, 389 bp, Glycine max
  unsure (1)..(389): unsure at all n locations
atcgtgactntctntgtttgcagaggaaaatgcaaggatcatgcatgagcgaacatgaaaataaaaggtgtgcaataaaaagatgttagatgcaaatgcatggtgaagaaatgacttatgcaaaatgcaatgcatgaaatgataagtgacaaatgcaggaatgatatgtccattatgatgccatgaagagatgcttatgcaatgcatntatggacacgagagcctgagaaatcatctgttcttactttgctcattgggggcgcagtgctccatgtgtgcagttaagaaggtggtatggaccttcctgcttcctgtgacaaaagacgagtccaacatacaacgcctgcgtgatgatatgatgcagacgcgcaaaagcacaacacagggat

SEQ ID NO: 271182 - DNA, 421 bp, Glycine max
  unsure (1)..(421): unsure at all n locations
agctntaacattacataaaactaaatgttacgctgaccattgntccgatgctattagaaaatcaatttgccattactaaggctttataaataacactatatttatattttcatgatgtattattatatcaatgttctttaatttcttgaataaaatgagatggctataatatgcacaatcaaaatgcttagcacataaacatgaccaattaaaatttaagaatttcgtcaaatatataaaaagtttatttctattacataataatatatctgcctttcttattttttagcactaacttaaatttcagtccctagatttttttacattctatcttccctatccccaacatcactctccttcctctcacttccttcccccccctcacantccttcccccctcctcaccccccatctcccctct

SEQ ID NO: 271183 - DNA, 265 bp, Glycine max
  unsure (1)..(265): unsure at all n locations
gtgatttatatttacattcccaataaatntatggctcttaaagtttctttgtatatcacatgtatttggattatgtaacgagaatattntggtgttccttctcttcccctcacaagagcacaaatgtagttggctgtattgtctgttattctttacgatcaatagattgatttggaatgtcctgtacgatcgatccatatatgggtttgtgtattacaaatatacgttgatttgccatggttaataatgctcttttaattttttt

SEQ ID NO: 271184 - DNA, 385 bp, Glycine max
  unsure (1)..(385): unsure at all n locations
catgcaagctttgatctaccaccaccaccgccaccatcatcttagttntctattatttttaatagtattagcattttgatttctagccatgtatttgttggaccttgtggcctcaataatcttaagagggataggcttataatacagaagaagcaccaacaatcaatttaacaatgttctttaaacatgcaagacacaattgattgcaacaaaataaataagataagggaagagagaatgcaaacacagttttatactggttcggccacaacccgtgcctacgtccagtactcaagcaacccacttgagatttccactatctttgtaaaatcctttacaaagtctgaaccacacagggacaacccatcccttgtgtcagatgctt

SEQ ID NO: 271185 - DNA, 132 bp, Glycine max
taaaaagatttaaatgaaatatatgaagatgatgatttcagcttccttataaagaggttcaacacatctctaagagacaaaggaaatcaaagaagatcaaatttcaaatcaaagaaaagagcagaagaatca

SEQ ID NO: 271186 - DNA, 144 bp, Glycine max
agctttaccttttcatgtgatgcacataactctgctttcaaaaatggtgtgtgatgatatcgacaaggcttgtcccagatttatttcgcgagatatagatactggcaagaagattcacctagttgcatgggatactgctttctc

SEQ ID NO: 271187 - DNA, 410 bp, Glycine max
  unsure (1)..(410): unsure at all n locations
actaagctatgctgcaaacattataatagacccnctcagcagcaaaaccatcaacagcagaataattatgacctttcaagcaatagatacaatccaagttggaggaatcatccaaatctgagatgggcaagtcctccacaacaacaacagcctatccctcccttccagaatgctgctgctccaagcaggccatatattcctcctccaatgcagcagcagcagcaacaacaacaacaaagacaacaagcagctgaggcccctcctcaaccttcagaatatgcaatttcagcaagagacaagagcctncattcagagtctgacaaatcagatggggcagatggctactcagttgaaccaagctcagtcccaaaatttgacaaatggcttcataaactgtgcagaatctgaaa

SEQ ID NO: 271188 - DNA, 232 bp, Glycine max
  unsure (1)..(232): unsure at all n locations
agcttgatgtgagaaagcgcggaatagtcagtctttctatctttgtnttgtgaccacagagtgggacctggagatattgtccggagatcacgagatcttggggacgtcaagtggggtgctattgcccaaaaccaagcttggctaatcccgacccaaactgtgcatagtcagcagggagaacctatgacgtacctaaacaggcgagctcctgacagtcaaccaatataagaac

SEQ ID NO: 271189 - DNA, 379 bp, Glycine max
  unsure (1)..(379): unsure at all n locations
cggttagcatttaaaaattctaagtctatgttactgttagtctgttaaaatgactaacttttgtgtataaaacttgtataaattgtatcaaactctcccaatttatggttattttgtagtgttataagtattntatgttaagtataggtaataaatacttagtattttcattttgtgtgtttaataatcattttctctcaatttcaggttaattaggtaagctntggaaagtgttgttttcacattctcgctaagccaatcagctggcttagcgagcgtccgctaagcgcaacactcctgggctaagcgcgaggaagaatccagaagaagatgagttgtacatgtttgccaagcgcaccgcttcatctcactaagcgca

SEQ ID NO: 271190 - DNA, 246 bp, Glycine max
  unsure (1)..(246): unsure at all n locations
catgcaagcttggaggaaggttgtgaaaggtaggaaagtgttttggtaaaaanatagaggcagaaataggcgagttattatggctatatatacccaaaagataaacgtgtttggagaacttgctaagtgccaacgctcaagtgggaaatgtatgctgatataacatgttaaaaatattacaaagttattgaccattgataatagactgtagattatgagcggtcccaaatcacttcataacactac

SEQ ID NO: 271191 - DNA, 233 bp, Glycine max
atggcttccaacgtagaggtgccaatattgaccactcattatttaggccaaggtatgaaatacaaattgagctgaatttcttgtagactgcattttatggcccgaccatcaaactgggccaaattggcccccttttagttttctaatctaaatatatctttatattaattttaaaagaaaaacttagaaaatatctggcaaaaatatgcccaacaagtttgaccttaaaattt

SEQ ID NO: 271192 - DNA, 443 bp, Glycine max
ttaaccactgctgctgcaacttgctgtccatgcataataatgatgggctgagttatcgtggtgatcggttacgaacccggaatgggtttagggaaagacaacggcggcatgactaacctgataaatgccacaggaaatcgtgggaagtatggtttatgctataaacgcactcatgcggatataaagagaagcatcgtgggaagaaagagcggtggtcaaagcttgcggttgatgcaagaaagtgaaagaagcccgccctgccacataagtagaagctctataagcgcgggtctgggagacgaaggtcaagtggtcgcgatatacgaagatgatgttccgagtacatcggatttggacgaccatgctctctgattccagctggaaattgcgagtgaggaacgcccggatttaccacgagataatgaaaccttacggtttaaaag

SEQ ID NO: 271193 - DNA, 454 bp, Glycine max
  unsure (1)..(454): unsure at all n locations
agctctaacctcatcgtctctcacagtctttagatttgggagccaatcctttccttgtgttcggactctcagccacttatgatagccgccgatgatcccattactgcttcccctaagctctctgtcctttcttcacgccgcatnccatgccttgcgaactccttggagtaccctcgcgttgtggtcactgaaacctcgtgcgatgaaaggcgtgatgctttcatctgatggcactcctctcatgggacatccttcgcatgaagatagaatcctgattcttccttccttctagcgagggaaccatttaacagacgcccctccatgctagccaagagttggtgcacaacacacaattcttgcgccgctcttttcacatccccggtcgaacgtgtcatacatggccaaaatggcgacgaccgggctctccttgccatgatgaaaggcgaggaaagcg

SEQ ID NO: 271194 - DNA, 332 bp, Glycine max
atggatacttctaatggaatatcgttacagtatgtttgaaaagacaaactaatatccatcactacaaagacacgcatttgtaaaacggtggacacaatttgactcatccaaagcggatccagaacaagtaaaactgtggttccaatcccatccataatctctcaaagcagctgatccatgaacttctgtgtttttgaaccaaaagtctcatctggcagcatttttagcaggatcaacatcaaaggaggtcttagctaataatctgaacgaagttctgcacatgttacagcaggaagaagaagcttcattctcaaagaaggaagacacaagtt

SEQ ID NO: 271195 - DNA, 412 bp, Glycine max
ttataagatatttggtatttttagtatagacaattatgctcaacttaggtaggattattgggcatgataaatctatccttttaaatatttaacataactctacacttagtacttgaatttgagaccactagctaagataaaataattttgcgccaattaatcaacatgttagcttttatcccatgtaatttgctaattacttacatatatgtgcgaaacatgataaagactaaataacttagataatacaatagtagatcatcaatgagtatgcattacagagatataatatatgatggagaaatagttctggtaaccaatagaaattgtaaaattcttcgctttaactgtgtattatacaataataagtgttaaaaacccctcatggtatcgtgggttcattgacaatgac

SEQ ID NO: 271196 - DNA, 332 bp, Glycine max
  unsure (1)..(332): unsure at all n locations
agcttcatatttncaccagatgacaagcagaatttccttggctgggagaagctgcagaatattgctcttggtatagctaaagggattgggtatcttcaccaaggttgtaaccatcccattattcactttgacatcaatcctcacaatgtgttacttgatgacaacttcactccaaaaatttctgattttggcttagcaaaattgtgttccaagaatcctagtttggtgtccatgacagctgctaggggaaccttgggatacattgcacctgaagttctctccagaaactttgggaatgtgtcttataagtctgatatttatagctacggaat

SEQ ID NO: 271197 - DNA, 411 bp, Glycine max
  unsure (1)..(411): unsure at all n locations
agcttataaatcaagtgataaaagtatanatcaagttgtcatcaattcccaaacatagggcgagtaaacgcaaattctatatatatacattcgttgcttgaatcttgatttcacgacttatattgtcatcatcaaaaagggggagattgtagaagcaaatgactntgatgttttgatgatgatcatgatgatttgatgcaaatgatgcaaatgattcaagaataccagccacaacatcaagatgatcactagtattttaggaagggaattcctaattgatttagcagaaggtttggccaagtaatctgagttaaaaagtgtttttcaagagatttactctctggtaatcgactaccaaaggatgtaatcgattaccagtggccaaaaatggtttacaacagctactaaata

SEQ ID NO: 271198 - DNA, 417 bp, Glycine max
  unsure (1)..(417): unsure at all n locations
attgaaggatgttgtggaaaattattgtctntntgatttnagaagctttactgtttttttatcagtaattacaaaaatattatcttatttttttacctcatgtcatgatttgaagaaatatgtttgctacaaagtactgatactttaatttgcttcatgcatctatatctgataccaatatattgatatatttcactggtacatatatgtgaagtgaccaattctttaaaaaaaattatgatcaaatatagtgacatgtaacatagaagtaagtataatataaaaatatacaaagtattgtttcttgatgaaccaaatatgacaantggtatgtgtatagataatttcaagacagacatgagatcgatcattgatagtaccattcttaattgtgaacaataggaaaaaatgatctac

SEQ ID NO: 271199 - DNA, 298 bp, Glycine max
agcttgcaggaatacttatggtaaaagcgaatttgtatagtacgcacattattgaatatgtaatgtgtgcaatttccaaaataaaagagaagttgttctgcatgttatccagaacagcttgctttctttgtggggtgttgctctgggcactaacagaattgctggtacatccaacacaatttttagattccaataatacccctcccttataacttcttttgggattatgctcttcacgtgagctatttttttttaccttcacattcgctctcctgagaggtattccgagagagttgct

SEQ ID NO: 271200 - DNA, 354 bp, Glycine max
  unsure (1)..(354): unsure at all n locations
cgctatgatgttaagggaaattcttgtgtgattagataccatctaaattgtagcgcctttgattaataggcaacagagcatctatatcacagtagaatctcattccaataccaccggaaatgattgatcggctcatttctctccactggcatataataacacatgatttaaactttaatgtgcttctagattaaacgaataaagctcttcattacatttaaacaatcgctnttaatnaattcttaagatgcaatgcaacaattctgaattctctttccattagagatgcttgctaaaatgatattgtagaagtggataagagtctctctatcaacgattctaaacactctattc

SEQ ID NO: 271201 - DNA, 175 bp, Glycine max
  unsure (1)..(175): unsure at all n locations
agcttctatccaaatggacttaccttgaattaattcctttgatagccctcttgagccttgattcccttttcttgttntgaagctcactacaagccttaagtgaaaaaccgtgatatcaccatatccttaaggatttttggagctttggaattgttttgggaataagcgtgggggg

SEQ ID NO: 271202 - DNA, 263 bp, Glycine max
  unsure (1)..(263): unsure at all n locations
agctctatgatgaatcaagattgattcanagaagttttgatgataacaaaggtgatgacaaacagctcaaagatcaagaacaacttcatgataacaaagatgatgatctcaagaatcaaagaatgagttcaagatgttcaagattgaatcaagaacatttcaaggttcaagaggaaattcaatttcaagaatcaagaatcaagattcaaggctcaagcttcanagaatcaagatcaagatgcccgactcaagattcacgaatc

SEQ ID NO: 271203 - DNA, 447 bp, Glycine max
  unsure (1)..(447): unsure at all n locations
agctgatccaaactgggctatatctcatttagttatatattgtgctttccaataacaatccaagtggttgttcttatgacctacattttgtgaatagggtgtcaaagtgacaaggcaaagtccgcaaagatcttctttaagttggcaagctgtgtcaacaaataagaatccttcagcaggccattacatgtctaaccagcaaagtcttggaatcatgttagcacaactaggaagagatgcctctgctgctgtaagactgtcctatctaaccacatagcttaatgcattcagttttcaacagctagttgctttctttatatgaacattctttcagcctctcattnttcattggaacttgctctgtgttaaactcttcaggcagcagcgcgccgtctaaactcaaaccgcaagaatgtggaggtcgaatcagttggcgttgctggaaaa

SEQ ID NO: 271204 - DNA, 124 bp, Glycine max
gagcactaatgtctcttatatgctctatctttatggcctacctcttatgtcccatccgatactacctctatctctcatatatgcactaatattccgtcagtattatttttactcttaataacca

SEQ ID NO: 271205 - DNA, 208 bp, Glycine max
aaaaatgattttgtattaaataaaataactatttaacatgcactaatatatatagggactactcaaaaggaagggatgatccttgattagactcatgtactataccaaattaaattaattacacaaagtgaagcccagattcgtagcccaaatattcaagcgcagaggatatgacttccaagtacaatttgatccttgaaatgatata

SEQ ID NO: 271206 - DNA, 192 bp, Glycine max
agcttgtggaaacaaaaaagtgcaacacatttgaatattttataggcttctgaagttggctttagtcttgccggtagcagctgcaagcgtggaatatgttttttcagctatgaagtttgtgaagagtagctatgtaacaaaataaatgattaatggctaaatgattctcttgtaacttttatcaaaagagat

SEQ ID NO: 271207 - DNA, 343 bp, Glycine max
  unsure (1)..(343): unsure at all n locations
agctagtaatgagcttcaaatatagaagggaacatatgctcanaggctatcgagggattaatcagggtaatccattcggctagaggcttataagaacaaaattgcctaaatcatttccaaatatgcatgtgaattaggaagcatcagcaagaatcaagccaaggctattgtgcaagcaatcattggggcaaaacacaccatatgattatgatgatggctcacattctcacaaaggtaaacttatcactttcaaattgagctttcaaaactatcataagcgactcttattttcaaaacaattactcattacttgaacatatnctataattcagagaacaatatg

SEQ ID NO: 271208 - DNA, 255 bp, Glycine max
agcttgacaggttcatgcgcatgttctgctactggtggaggcacttgaatctggttgcccaacctcaaggagacggcactcacattttttggattctgcatagcccgcgaacgcaatttgtcagaattttgggactgagcttgattcatatgagtagccatctgtcctatttgatttgtcagactctgaacggaggctattgtcttttgttgaaattgcatattctacatggtcatttgcctcactaacttttct

SEQ ID NO: 271209 - DNA, 237 bp, Glycine max
tcttaagaactccgagatgcacttaaattaattaatctacaaactgctgtaacgacacatatatggaatcaatacacaggcagaattgaatcaatttaatagtgctgtaatagtttggccctggcaacgatacatccttggaatccttacataagtcattgttgaaataaacttttccttaacttcttggcaaaattttgtactttatttgaacccccttatattatatacccttct

SEQ ID NO: 271210 - DNA, 350 bp, Glycine max
agcttgaagaggatgctttaatggaggaaaagaattatagaagaggggagtactaaattgaaggaataaaagagggagagaagtggaactttgaagtgtatctcatacgactttcattcatcaaagttacaacaagtgttacacatgcttctatttatagactaggtagcttccttgagaagctttcttgagaaaacttccttgagaagcttctttgagacaacttccttgagaagctacagcttagctgcacacacccctctaaaactaagctcacctccttgagaagcttccttgagacgattcctacagaagctagagcctagctacacacccccctataatagcta

SEQ ID NO: 271211 - DNA, 402 bp, Glycine max
  unsure (1)..(402): unsure at all n locations
agctgctaaccgnaccaaattctcctctacaactgtacgacagctgaaaagagatatagtaagacaccctacaagcaagcgctacaaaatttctacttactcaaacgttatccaaaacaggaaataacctcacgacacgcatagtcaaccaaactccccttgttctagtcaagaccaaattacaaatttatattataattgtaacaataactaatattaatatcaattaataaataaactcatgaataaataaaagaaagagagaaatcacacagcagtagcgtgatgtgctacttaacacgttccgaactaaagcaggaaatgagaaatattattatacgaagaataacctcgacataacgaaaatttgagatatcgctgaaacccacgacgttgatgtac

SEQ ID NO: 271212 - DNA, 606 bp, Glycine max
  unsure (1)..(606): unsure at all n locations
ccactcacagactcgctctgacccccctacttanttacctgtatgtgtatatgtatatgatanagacncantntnntncnntnnnatccnccccgcacaccgcggcacttcgcagcccttcctgcaccgccgtccgcntttgcagacatcagtaganacccacgcttctctatagtcgactcgtagcatgcacacttatgtctcccacatactaaggattctttgaatctgttctcaaaccagtataacaatgcgcctgaacattccacaaaccttgtcggccaagaccatgcatcatattcttcattcgatcttcactttgtatattatccggctcacgttgagatgttgtcgacacgcgtggccattcagcatgccatatccatctcgcgtaactcgggctctacncatgacatatcacacgcgatctaaggcattcaacgactggcggcctacatcaccacattaacacatgcgacaaaaatcttgcacctaactcggtgcattctgttggccaaggacaaacactttcaaccccttttaaaaatccacttatgtgacgcgcttaaccaacttcaacctcgccactgtctataaactaccccg

SEQ ID NO: 271213 - DNA, 196 bp, Glycine max
tgcaaactgtgacttgtttctataatgattgttagcaaataaccaagcagtccaaacaacacaggctcttattgaaagtatggcagattcaggatcactcgtactgttagcgcctaaacaattgatgacccgaatttataattcacttataaggggtgcccctccatatggtaatatatgcagccataggtaaact

SEQ ID NO: 271214 - DNA, 418 bp, Glycine max
  unsure (1)..(418): unsure at all n locations
agcttagaatcacagttacctcgaagaanaccgcgaatgtcagattggaggcttcgttctctaacaaaacctcgagataagcttggaagattccgctccaattaaagggttcctctcgatgtgggatttcaacagagaattacggcggtttgtggcggccaccgatggttttgggttgtggagnaaaagcttgcgatgttgggaagggtcttggggaaaagaaagggaaagacatggttgcttttccactaccacacaaaacaaagttgcacactcaagtgttttgctctcgggnaaggacatctctccactccaangtcatatccatatccaatggtacaatgtggacagtgtctatgaacctctgaacaaatttgagatgaccaacggttacaaatgaaggagggcaatttaccga

SEQ ID NO: 271215 - DNA, 486 bp, Glycine max
  unsure (1)..(486): unsure at all n locations
cttgatgcaacattaggagaggttaatgaaacaacgagatgatgcgctccatgagaggttggatcaaatggagaatagagatcataatgaagaagaaaggaggagaagagggaatgatggtgttcctagacaaaaccaaattgatggtattaaactcaacattcctccatttaaaggaaagaatgatctggaggcctacttggagtgggagatgaaaatagagcatgttttctcatgcaacaactatgaggaggaccaaaaggtgaagcttgccgccacggagttttccgactatgctcttgtgtggtggaacaagctacaaaaggagagagcaagaaatgaagagccaatggttgatacatggacggagatgaaaaagatcatgaggaagcggtatgtgccggctagttactcaagggacttgaaattcaagctccaaaaactaacccaaggcaacaagggggtngaggagtatttcaaggaaat

SEQ ID NO: 271216 - DNA, 246 bp, Glycine max
  unsure (1)..(246): unsure at all n locations
agctnctgggctgaggacctatataacaacactatagttttagttctgggaggttttttggatatgagaataattctagagttttggcaattccaatttttattactgctcatgcacactgttcacgtagaataaaatttgttntctacaatttcatttctgcttcaatctataatttcgttttctactgattaatggaaggctaagtcttcagcgttgttctctcttgaggatcaaacacaactc

SEQ ID NO: 271217 - DNA, 476 bp, Glycine max
  unsure (1)..(476): unsure at all n locations
ntgtgtaatcgattacacttatttggtaatcgattaccagtgactgtttctgaataaatcaaaagatgtaactcttcacaaaggttttgactttttcaaatgggttttaagtttttctaaaagttataactcttctgaatggtcttcttgaccagacatggagagtctataaaatcaaggctttgttttacatttcaataatcttgaatactttttcttttccaatcaatcctttacaagccttgaaatctgatagaactttgtcttcttcttctttgtaccaaaagctttctgaagttttctggttattcaaaccttgaaaacttgcgctattcatccttttcattctcttctccctttgccaaaaagaattcgccaaggactaaccgcctgaattctttntgtgtctctcttctcccttctccagaagaacgaaggactaaccgcctgaattcttttgtgtctcccttctccct

SEQ ID NO: 271218 - DNA, 431 bp, Glycine max
  unsure (1)..(431): unsure at all n locations
agcttgtaggattatggngtacccatcacatgtggtactaggtggcagtcgggcgatggtgcacaacaagttttccacatccacaaagcgcgcataaacccaccatcccctgttgcccacctccaactgagctcacgtactcccacgtagcccataacctcgtttctctcaacaccgggtccccatcaatactcccaagcttcctcaacatcaaagtcaatcaacattcaaacagcacaattaccacagccaagaaaacacggcatacggcagaaaactctgtccaaaacaccaaccaaaatacagcttttctcactaaagacccaataaaattccttaatcaattcgtaaccgttgatcgactccaaatttactgaagctatacacataacctactttgaccgtggatctactataacatcagaactatc

SEQ ID NO: 271219 - DNA, 485 bp, Glycine max
acactatcatactcagcttattaagaagcttcctccagaagcttcattaagaggcttcgagcacactccagataacttctaaaagatcccaacggtgagatcatgaaaacgtgtcttgtgaagtggtagaccaaatttcgagaagatccagcggttaacgaaagctgggcatcgtttttaccgaggtagcttcatgtagctttctctagaagcttcattaagaggcttgctctagaagcttcctcgtggcttctttgagaagctttctcaagaggcttctttgagaagctagatccttatctatccacacccctctattaactaaattaacttccttaaaaataattacagatgaaaataacgcaacaaataatcaaacatcagacataattactaataatatatagatatatatatcagggtgttacaccgtgtggtgttagctggaatatggatgccacagtggcaagcgcatccgccatctg

SEQ ID NO: 271220 - DNA, 341 bp, Glycine max
tgctgcatgcacgcttcaggaacacaaaatggaacttatgagactaatccaacatgaagattatgataagaaagagacaggaattgcacttaaagcctgatattctctctaagaagaaagtgacaccttgaatgatatagaagaagatgatgattttagtttcttcataaagagattcagtaggtttctaaggaacaaaggagatcttatacgagcatacttcagttcacacacaaatggagaagattcatcttctgttccacagtgctatgaatgtaatcatcctgaacatctaacagttgtttgttctagtttccagagaagaatggaaacatctaaca

SEQ ID NO: 271221 - DNA, 485 bp, Glycine max
  unsure (1)..(485): unsure at all n locations
gcctcttcacgtctagaatatgaatgaagcatatagatccaaataccctcaggtgctttgctgatggcttcttctcgttgcaagcttcaattggagtcttgtcttttacagacttagttggacatctgttgagtatgtaaacaactgtgtagactgcttcagctaagaatgtgttagatagtctcttctctttgagcatcgatctagccattttcgtaactgtgcgattctttctctcggacactccattntgttgaggagaatatgcaactgtaagttgccgctcaatgccttcatccttacaaaatctttcaaactcgcgagaggtgtactctatgccgcgattacttgttagtacttttatacgttntccactgtgattctcagcaagggccttgaactttctgaatacttcgaagacgtctgatctttcttttataanatatacccatgtcattctagagaagtcatcaatgaagagtatg

SEQ ID NO: 271222 - DNA, 244 bp, Glycine max
  unsure (1)..(244): unsure at all n locations
gcgctactntgggaggttgaacaagtcatcaactccttctctaaccatgcgtggctccgagggcccttcttccttccactagagtcatatagctacgatagagctcggaaattgctcggcctgactttacttgcgagccctctcggtctctggtacaagggctctggcggcaattgcattctcttacacgaaacccggcacactccttccgaacgtgtgtagcagccgacgtcgaacttgtgct

SEQ ID NO: 271223 - DNA, 447 bp, Glycine max
accttgaacgagtcatcaactcctctctcataaccatgccgtgtgctcgcgaggggtccctttcttaccttcgcaacttgagttcactattgcgtacctcatagagctacgcgaaatttgctccggccatactctatcttgcgagccctcttggtctctcgttcaagggctcttgcggcaatcgcattctcttacacgaacccggcacactccttcctaacgtgtgtataagccaacttgaacttgtgcttggcgagtgttgcctttcctaactcgcttctgagagcttggactacctcgtcctcttccggtgcttcagaattctcttcgctgacgactgtcaacttggcgagccaatctagacctcagatgcgaacttttagccattcgtggcacccaccaatgatggcattacgaacgcctctaagctcttgatctttccttaac

SEQ ID NO: 271224 - DNA, 406 bp, Glycine max
  unsure (1)..(406): unsure at all n locations
atggcatgagtttcagatgattatcatcatccatcaatcctccattgaactcatctattctcccaatcctctctccacatcatcatctcaaacatcattcactacttttcaagcctctctacacaatcttctgattttttatcttcgcatcgtctcgaaagcctttcatcaacaccttttctatcaagagaagtcctttgtccacaaacttgtggtatcatgctttatacttcccccaccccttcgccaaaagaccggaggactaaccgctcgcactntttagagcctcccttctgcctttcccaaagaaccaaggacctaaccgctgacatctttatgcgctttcttcttccttacacaacattcaaaggactaaccgcctgcgaattctttagattcttcctct

SEQ ID NO: 271225 - DNA, 472 bp, Glycine max
  unsure (1)..(472): unsure at all n locations
ngagagagcccgggtagtcgaagagaagttcaagtccatagccatctaagtttgaaaagagtatgatgaactaagggatgtcaatatggccaccgatgaagccttggaatgagaaaccaagaaggcccgaaaggaagaacacgaccaaagccaagttttgaggggctttatagggcagcaatagtgagctcaagctccgaagaggtgaaaggaatcatcacgggtcaaaggcatgatcttgaaggacgagctaaaggcttgccttatgtcgaaaagaaatttgtcccaacagttaagcgagactgaagggaatatgtgggccgtcatcgatgagtgcaaagagaagctaaatctagcggcgactcacgagcaaaggctagaggatgagtacgccaagatatcagcacanagcgaagcaagggagagggtaattgattcatggcaccaagatgcaacaatgtggacggaccga

SEQ ID NO: 271226 - DNA, 150 bp, Glycine max
agcttgtagagtagagtctcgtattgggctaatcgattataactatctcataatcgattacactgttgctcgagacaatgactaactctatcacgagtgtctgctatcatcgactaccaagaggattaatcgattatttcactcctcgtt

SEQ ID NO: 271227 - DNA, 431 bp, Glycine max
  unsure (1)..(431): unsure at all n locations
tagggatggaatacttacttgttggtgatgaacaaaagcgcanatctgaatcttaaaatgcgaaaaaggatgaccctagggctgcaaattcatcaatcccgtgggtatggcttttgaaaggggggaaaagaagtttttaaacgtaaaaacgccccccctttcgtcatttttataatttggtgcaggggtggctcgcccaggcgagctaacctgcacttttttgttgtttttttttttttttgaggggaacattaaccatgtcccctcccttctcatggattagcattttgcctaacttgaacttacttatgttagaattaggcgttgattacttattctattattacccttttcctttntaaaacaaacaaatagtaaaagaaagctgcataatacaaatgatacggagctgccttgcagcgacattccct

SEQ ID NO: 271228 - DNA, 346 bp, Glycine max
agcttcatgtcttcattgtaagtttgcgcttttgtgtacgtggcgttcgtggtctttcttcttatagattgccagttagtttcttaaatagttactactactagctagggtttcgaatgcacgtagtgttgcttggaaagctgtgtatccattaagttctggtcactatattcctcagttgcttctccttgcatcataaggtatgcactccttgttgtgtatccgttatgttctgctctccgtctccagcactgtactgaatgtggatgaatatgaatctcttgtgtatgttctaaaaatctggtacctgcctcaatctcttgaatagccatttttgttcttggat

SEQ ID NO: 271229 - DNA, 425 bp, Glycine max
  unsure (1)..(425): unsure at all n locations
aacatatattattgaaaatatccacgttcgggacgggatatctatntattaaaaatattctcatctaggatgggttattagataccttcatatgggatgtgaaaggcaataggacgttattgcatgaatatgagcttatagaccatagtgaatttgggatcgacattggttctatgaaccaaacaattaaatttgaattcattgagtgttaatgatatttattgaatgagagttatgtgaataattgtgctgattttaatttaaatttattggagtataatacaatattctattttaaattctttgtggtaccatggttgaacttttttggattattgcatcaactaagaacaacattgcttgtgaactctcttagaacttgttttattctttgtgattattatctcattaaaagtgttattttc

SEQ ID NO: 271230 - DNA, 299 bp, Glycine max
  unsure (1)..(299): unsure at all n locations
aatagatgggttatcaataccaaatgaaagtactcttccttttatctcatcatagaaagatgaaaagaggaatccaaattgaatttagctataaacacatctcagctagcgactttattaatgaatctattacgtctgacaatatattgggattaatcgaacttctattatcaatntaggagaaatttggttgtttttgtaacacgtccgtttaacttaaggtagagggccggagtcataacacagctctatccactactataaactatacgattaatatcggctttcttaacaatatg

SEQ ID NO: 271231 - DNA, 408 bp, Glycine max
  unsure (1)..(408): unsure at all n locations
agcttctacagtttcttggtttgaccattgtctctgtcatatcatctttaatggnctttgcatgcttagtcatgatgcaatcctaccccgcaagggcattggatacaagactctcagtagattgggcctgagatccaagggaaggccctacggttctcatgagccttacggttgatattgagcccatgggctaagtatgagcccgcttaggccttgtattttaccttatgattgagagtgttgtgttgggaaccttagatgcggccatccagacactcttaagattcgcctaatatacattacttgcttactttcgtcgcttattacttgtaccttccattgtcacaccgcctagatagcttgcatattaccaagtagttgttaccttatctttcacacactctttag

SEQ ID NO: 271232 - DNA, 193 bp, Glycine max
tgcaagcttcaggtatatattctactcacacctctctctctgtggcctttcgttcactggttggacacccataaactcttggaagccaaacaagcctttaatttgaaccaatgttgccgcctttgtttcttcactataagctcagcgggggtgcaaaaagtcaccactatgacaatgcaacactacccctctc

SEQ ID NO: 271233 - DNA, 453 bp, Glycine max
ctttctattggattcgtcatatcttcatctaatgttagatcatctgttccaacttcagaattatcgtcccgtccaattcttggtgttcctaggtcagatggctcatatgcagtatcactaccataatctgaggcaacagatgaactgccagcgaataatgataaactcgactggagaggtgattgcacagaataaactgtgttattggaatcggcgtctgtttcacaattctgctggcttgcatcttggaatgctaagtgattaaatgaggtataaaatatcataatttgcgagagctaacaatcgattagcacaaaacagaccatactgacatgtttgaggaaactaagtgcaagttgcaaaagataatcacatacaagatctagcagctgcttctagttcaagaaatgacgccacggcagcacatcgtgatatatcaatgtcagataatag

SEQ ID NO: 271234 - DNA, 216 bp, Glycine max
  unsure (1)..(216): unsure at all n locations
agcttgcgtactcttaagatattgtgaacataatcatattangattatacctccctcgtaagttgcataataaatccacagaanattcctaaagaaatgacaaacggcagctcaactgtctccaatattccctggtttggccgttgctccttttgtttgttagnctttcaaactgtcataaaagtccttcacaaaatcattctcttgctccaactg

SEQ ID NO: 271235 - DNA, 480 bp, Glycine max
  unsure (1)..(480): unsure at all n locations
tatcacccctaacctgaataccacctgatgtgaaccttacggagcctaacgtttgatacaggctacggagttttggatgacgccacttccagtgaaggaagataagtcaggatagacgccacaaggattaccttgataagtctaagattggttcaacaaggaacccagagagaagctctcaccaaattttatcacatgccaaaagttccctttattgaaaacaaaaaccaatacttatagtgtatctgaacaaaaagataaaaatagacatgagccttctaaacagtttgggccaaaattacaataaataaaaattattaataaaaatagaacatagttgatatgggccttcaaattaatctgggccttcagcaacaattaattgtcttggtagtgtctctgtctctaggccttcatccttctccactcggnggctatgtccttctccacttgagcattcgtncttctccacttggacat

SEQ ID NO: 271236 - DNA, 425 bp, Glycine max
  unsure (1)..(425): unsure at all n locations
agcttctagtcgtccatagacctnctctgtggtactgtctatcaaacgttgcatctgtgcattcatcgcatccactaacagacgttgagcgccgtccaactgatggtactcgtcaccaccaccacctgctccagccataattcaacaggaaaaaaaaaatgtgcaataaaaattattaagggttcaggacctcacaacactctactcacgtgtcttagatggtagtacactcgtgtctaatgctctcaatacgcttttggtaatgtattccctcttgccttttaccactcgggtttccttttaagttcctggatggaccanattagacacacaccgtaatataaaataaaaggaaagacaatataatgatcacacacaagattgatttgggataacaactcggacttgacttggataataatata

SEQ ID NO: 271237 - DNA, 473 bp, Glycine max
  unsure (1)..(473): unsure at all n locations
acactatgatactcagcttctatatagctgaaccatnttatcaataaacacaagttgagttttattcagaattatagagtttatctctcttatcttagtgagagtgattcaagaacaccctggctgtatcaaaggactttcacaacctttgtgtgttgccctcgccggaaagagtgattctttccttcctttcatcttcaatcttgttctttcaaaccacaattccagaaaatccacttctgcccagaattatctcgtggccataactcccattttacgcactcaaattaagtgattcttgagcctaaattgaatntcaaaatgagacctttcacctcgttttggaatcacctcatttggagccctgtagcttgagttattgtcatttctatatttctgtccagccaccacttaatcgaattccgcattcattaagaaccacgataataagacccaagaaccaccttattaag

SEQ ID NO: 271238 - DNA, 320 bp, Glycine max
agctcgaaggtgtgtaacccaccattttttatagtaaaacactggtgatgtgtctactattattgttatcatttttgctgcgtcattgagggaaacacttgggctgacagatccctccagctttgggtgtattctttgaaggattcatgctcctttttgcacatattctataggtgcatcctatctagagccatatcacaattgtactgacactgcctaacgaacgcaaccattatggccttccatgaatggactcgggaaaggtccaagttagtgtaccaggtaccagctaccccagtaagactttcttggaacgaatg

SEQ ID NO: 271239 - DNA, 484 bp, Glycine max
  unsure (1)..(484): unsure at all n locations
ngacaagccgacttgtttaactaacaataataataataataactttattctatcaaatcttatcttatccagatcttattctatctagattttattttatccagattntattccatctagattttatttcatccaatcttatcttatcttatcttgtccagattttattttatttcgtttatgggcttggacttaaaatagatttgtgagctttggggttgaggacctatataacaacaccaaggttctagtttacggattgttttttcggagaggagaataattctaggattntagaattccagtttttattactgttcatgcacactgttcacgtagaataaaattcgttgtctgcaatttcatttcggcttcaatctacagtttcatttctactgattaatggaagactaagtctccaacattgttttctctcgaggatcaagcacaactctctttgatgttgtgttattactatcgaata

SEQ ID NO: 271240 - DNA, 139 bp, Glycine max
  unsure (1)..(139): unsure at all n locations
agcttcattccgagtattgtagcgtnctatatttcttatcccatgcgttttggtcaagcaagtgcaaaattagaaaagaagtgttataccctaattgcgttcggggacctttgcttgatgacatgcgacttttgtttgg

SEQ ID NO: 271241 - DNA, 505 bp, Glycine max
  unsure (1)..(505): unsure at all n locations
tgacacttgaaactaagctggttctaccnataacccaggaatgggaaatttgatcgccaatatttcaacatcatttcatagggatgaaagactcgggaatacgcatgctatgcatgaaaaatgtaattatgagattgagatgcccgaagaaacatcttttcttagttaaccatgcattaggtaccttgttcactcattttgtttttaagtgaaacgggtttatgatcccaacattgttggctcatggtaccgaatatatgcaaccaagaatgtatcatgaattttcatgcttcccttttttgtttttggtttgtagaggaaaacacaaggatcatgcatgagcaaacatgaaaataaaaggtatgcagtttgtagatcaataagtatgttgaacgcatatgcatgatgatgcaatgactcatgcaaaatgtgatgctggaatatgataacggacaaatgcagcaacgatatgttcattatgatgccatgaagagatgcttatgtg

SEQ ID NO: 271242 - DNA, 370 bp, Glycine max
tagttttaccgctggatgtttctcttaaaacaaaaatggcgtacaacctcttccaagaaagacaagcatcaatgtaaatctacagcaaggttatgcgcatacttctttacaaacgttcactcgcacaatacattctcataactaagaaaaatgcactcatatacaaacaaggcgccgacgttacctagattatttatatgtactcccaacgggtattcgctacctacatctcacgcacttacttggctaaatttacatacatgcgtactcaaagcattatggctaccaaaaactgcacacgcgcacattctggtgtttctaatacctatgcatatacaaactctgtgatgactcttggctatctacacaa

SEQ ID NO: 271243 - DNA, 457 bp, Glycine max
  unsure (1)..(457): unsure at all n locations
tgtgtcacaattcattgtgacagtcaaagtgtcattcacttagcttatcaccaaatgtaccatgagaggacaaagcacatagatgtgaaactacacttcattagagatgcgattgaatctaagaaggtgaaggtggagaaggtttcaacagaagaaaacccggctgatatgttcacaaagtccctctctagtgtcaagttcaagcactgcttggacttgataaattntgaagatgcctaaagcagattggtagaagtgcagctctaaatcacaaggtagacactcgctgatttagagtcaaagtggagatttgtggtgtgtgactcacaatcacatatgacacaagtgaaaagactttaaagtagtgttgtcataactgttttaagttattataactaaactgggtttggcaccaaagcataactagagtgtacatatatattctcgatcatgtaat

SEQ ID NO: 271244 - DNA, 412 bp, Glycine max
  unsure (1)..(412): unsure at all n locations
tataatattctctaatacgacactctncttgatgttttgatcgcttaaatccaccatgcatgcatctattaatgactatttgtttattataatcatagcttcctttcgggtgctgatgtcattgatgcatgtgtttgaaggagctaaccactatgaaatctgattttttgggatccagtgatgttgatgctttgacattcacttcactatatctccagataatacagcttcttgtagatgtatgggacgacttgctgcctgcgaaaaggttgtatgctcagggaatgggaacattggaatacaaactgggaaagcttgataggagggttaaagaagcgatagtacgctataggtactttgacaggaatgaatgcgtacagctatgtattgactataccctatgaatgaaata

SEQ ID NO: 271245 - DNA, 568 bp, Glycine max
  unsure (1)..(568): unsure at all n locations
ccccgccgcaccactccatatccttcaatantcagctacgatttttcatgtttttcagantatattaannnnnnnacgtcacgccgggacnttganacctcgattgaccccntctatattcaggctctatggaaacacccgttgcatgcaagacagccgaataagtaattgtctggaccacgtcgtatccgaacagttatcgtacatggatgcagaccaaacgcgacgtccaatagcacgttggagacaccaccatccgctgctctccacttaaagccagaggcaaaggaagatggcgccttcacagcatcacgggagagggtccgcgaaacatcgatcctcgatactaaaagggccgccacccgggcaacacgctctccaaagatgggggcgaagcgcctcctatgtgcctgtagaggcgctcgtggttccaccaatgggaggggctccgctacactccaacgaagttgaaatatggggggaaggactttggacccccccaggcaggaaagatctcgcgacgaccgattcgatacattaactgaacccgcacagaacgaagggaccg

SEQ ID NO: 271246 - DNA, 422 bp, Glycine max
  unsure (1)..(422): unsure at all n locations
ctcagcttatatattctttaatacgacactttcttttatttattgattgcttaaatntaccatgcatgcatctattaatgtctttttgtttattttaatcattgcttcctttcgggtgctgatgtcattgatgcaagtgtttgaaggagctaaccactatgaaatttgattctttgggatccagtgatgttgatgctttgacatttacttcactatatctccagataatagagcttcttgtagatgtatgggacgacttgttgcctgctaaaaggttgtatgctcanggaatgggataattggaattcaaactgggaaagcttgataggaggggtaaagaattgataagtaggtttataggttactttgtagaggaattgaatgtcttatagctaatgttattgcttatacccttacgatat

SEQ ID NO: 271247 - DNA, 423 bp, Glycine max
agcttgcatagttgcatataacatcctctaaggtctatctcaacccatttctaaaaaacacaagaggaaaaaaacccaaaagggcaaaatggtaaattaccaaacgtgagggggaagaagtggaatgaggagtgaaaaaggcgaaaacttgacctgctgggagtgctagtgagagtgtctgggagagccatggacggaagaaggagcgaatccccgaagtagtgagagaactgcgaggaaatttaaaaaaaagacaaacgagacaattacggttaacagagatcacagagtggaaaatgagaggagatattccggcgaggcttacatggtacgatgccggaggcgaatttgagatggcgtcggtttctacagaggagggcgatttgggatgcggatgactgtataaaaaaaaaaaattttaca

SEQ ID NO: 271248 - DNA, 480 bp, Glycine max
ccatgatgatgaagccaagcaatttgatgatgccatatgcccatgtgattgattcaagattgattcatgaattcaagatcaagcatgaagaatccaatccaagattaaagagaagatatcacgaagcaacaagtcaagacttcatataggataagttgtaaaagattctttcaaaaatcaaatagcagagttttgttttacaaaagaattttctaaagttactagagtgattactctctgataatcgattaccaattgatagtaatcgattactagtgactagactggttttcaaaatgttctcaaatgatatgtaacgttccacaatgattttcaaatagtataatcgattacactatattagtgatcgattacaagtgaatctgaacgttggaattcacatccaattgtgaagagtcacaactcttcataaaatacatcggataatcaattataccatggcggtaatcagataccagt

SEQ ID NO: 271249 - DNA, 404 bp, Glycine max
caaatattctcctcctgttgttctcttaaggtaatggacaatcatctacgtcgcttcgacgcggactcctcttggacactgcattaattgcctcaccaaactatcagccgaagtaatatcaagccttgtgtgagacaactaaattgaatttccaactagacgatgatacatctccttatccacttctgcactgtcatcttcactcctcacattaacggttgcatctatgggagcactaaaaggtttaaagctgtcttacctcgccccttcacaaagtctgcggccatatctctcgtgggatatcacatcacctctcttacacccgctcacttcatctccacacaatctctcaccctcccaacattttcaatcaacactctttgctccacgtccacacgataccc

SEQ ID NO: 271250 - DNA, 482 bp, Glycine max
  unsure (1)..(482): unsure at all n locations
ctagccatggttctaggcttctagcccttaagaaggttaagtgacttcaaattaagtccagaagcactctgaaaaggtaagaaaccgcaataatataaaagcgcataaaataataaatatgactgcacaaccatttcgttcaccgcttgttatgattcttaattctgttaactcatggagaaatgaatgttcttatcactttgatttatcaaaaattcaatcttaaaattttacaatagaattaacttctanagaaagtttaattaaattgaagatacaaagtgaaatgaatggttgagagaaaagaaaaaaggaaaaaagctttaaattctcttttcttaacaaaactaacattctaacaactaaccttataaaaaaatattcctttcacttacactgtaaccttgttataatctaaaaaaaacctcgtatatgctataggggtaggttctctttaattntagcaacagaatttgacttct

SEQ ID NO: 271251 - DNA, 304 bp, Glycine max
agctagcacatgtgctctaagtctttacgagtgatattcacacaccacttggtgggcttatgcgagacgtgctcgctgatcaggtatacaatacatgaagggtgtgcttatcaagtaattccacgctcagcacattcagcattgacttctgacagcgagatatatgggctgagcgcgcacttcctacacttaatgcatagacaaaaatgatctgtgcccgcttaacgacacctgacccgcttagtgcacaccagaagaattgagacatcgcctatttaacaacaagcgacatacttacacttag

SEQ ID NO: 271252 - DNA, 438 bp, Glycine max
tctcccttatttgctataaatagggggaggagtgaagaagaaaatgtgttcagccttcttggcactttgtattcacttgaaattgctgaggaaaattgtttccgtgaagaaaatccaagccgaggcgcttccgtaacgtttccgtaacgtttctgtgcgtaattacgcgaagattttcaaccgttcttcgacattcatcattcgttcttcattgttatttggtcttcaaccagtaagtaccccaaatcgaccttttcaattcattctatgtacccgtggtggtccccatttgttttgtgtacttttattctcgtttcattttactttccgtacctccttttaacgtgcttcagtcatttatttaagtaatttctcgcgtaataaaaaaataaaataaattttcaccgatcatttgatctgtaatatccgctaatttct

SEQ ID NO: 271253 - DNA, 168 bp, Glycine max
  unsure (1)..(168): unsure at all n locations
agcttgttcacgacaacaccaacaaagctcaagagttcctncataacaatgatgctcaataccaacacgctctttcacaccttctatatgtatctcacgcatatttgcaatacatgcataatgatatgctcatatgcaacaactagttacaaactctattcttgcata

SEQ ID NO: 271254 - DNA, 409 bp, Glycine max
  unsure (1)..(409): unsure at all n locations
aagctcgcatgatttacattctcccctttctcaagcaaattcttcttgatatcatcaaaatcttcatgatttacattctccccctttctcaagaaaattcttaattcttcttgatatcatcaaaatcttcatgatttacattctccccctttctcaagaaaattcttaattcttcttgatatcatcaaaatcttcatgatttacattctctccctntttgatgatgacaaccacctgtaggttaggagcaacaacaaagaaaatatctatntgcatatagcttacttccccttgggtttacaatgattgcttatatgagacaattgaagaattcatatttttcatatataaaaaagctgtctcataaaacaatagataattcttcttactaatctatcttttatctttc

SEQ ID NO: 271255 - DNA, 117 bp, Glycine max
agctttatgttgacggaatcgcgtttggaaacacttatcatgcatgctttggaggactggtccgtgacactaactggcgatagataatgggattcaacggagcatgtggtcttacta

SEQ ID NO: 271256 - DNA, 378 bp, Glycine max
ctaagcttaatggcctagtgaggatggagaggtgcaagtaaggaatcaagtgtagttggatatttccattggaaagtacaatgataaggtgctctgtgatgttgttcctatggaggccagccacttactcttgtggagatcatggcaatttgataagagggctaatcatgatgggttcaccaataagatctctttcacacatcaaggaacaaagatagtgctcaaaccattgagtccacaagaagtgtgtgaggatcacagaacaatgagagagaaaattcttcaagagcagagagatcaagaaaaagagagcgaaacacttgagagttcacaaagtgatgaaaaaaagagggacacaccagagaggaataagatgag

SEQ ID NO: 271257 - DNA, 449 bp, Glycine max
  unsure (1)..(449): unsure at all n locations
agctnngaaatcagattttgagggagtctggccttttttcttgagaagcctctacatgcatgagagtctggccttggcttgaagctnttgcatgtgtacgaagttttagagagagaaaggtccaagttccagagagttctgagagattttgctatataaagatctgtagagacgagtgctcgaagcggaagccgttctgagagcttgagatgagtttgtggagggatgtgagatcctagacgtggaagagacatnctcatcacttgtattttggccaactttcatcttgttcttctctgggttgaaaggaggtttcttgactatgaaaagctaaatcctctgttggatcttccttggaggtacctgatgtaaatatatttctatctatgtaatgatgtttagcggggtctctgcgctatcttctcttcattcagtatgcctctacttga

SEQ ID NO: 271258 - DNA, 195 bp, Glycine max
  unsure (1)..(195): unsure at all n locations
ttgggncagaccggacccacaccatattcattgtttgacagcttttaaaaaaactatccctttctccatgatcattcctaagtatgcgtaggccccgtgactcaaagccaacgtagatgcctaaaaaaaatcgacctgtctggcactgtggggagactgtcgcatttattagtctctcgccactcgatgcacacg

SEQ ID NO: 271259 - DNA, 231 bp, Glycine max
  unsure (1)..(231): unsure at all n locations
agctntanagtgaattgtggtcatatcaaaacaatctcttcttaacattaatcattagaagaccgcgtgatggtttttttaataggcttaattgatataatgctcctaattaattatgcattgcgatgtttgcgtactttaattcttattgtactctggagagaatctcaatgttctctctttcttgtgaatgcatcactgttctattgcttacaaaatctctaaattttt

SEQ ID NO: 271260 - DNA, 426 bp, Glycine max
agcttgtaaaggtatgtatataataagtgttcaagattgaatgaatgaattaattgaaaagcaaaccacagcctcgcttttatagactcttcatgtctggccaagaggaccatttataagagctacaacttttagaataacttaaaaccaatttgaaaaagtcaaaacctttttgaagagttacatctttcgatttattcagaaacattcactggtaattgagtaccaaaatagtgtattcgattacacaaggcttttatgtgaaaggatgtgactcttcacatttgaatttgaatttcacattcaagggactggattcgattaccaaacattgtaatgataccgtttttgaaataattgcaccgtgcaattcatttgaaacttttcaaacatttgcactggaatcgatacaacattgtatcatac

SEQ ID NO: 271261 - DNA, 436 bp, Glycine max
agctttagagttgtggatgacaccacttctagagatttaagataagttatcggaaacgcgacaaggattaccttgataagtctgagattggttcaacacggaacccagagagaagctctcacaaaattttatcaaatgccaaaagttcctctattgaaaatgaaaaccaatacatatagtgcgtctgaacaaaatgatagaaataaacatgggccttctaaacagtttgggccaacattacaactaataaattataaataaaaaagaacatatttggcatgggccttcacattagtttgggcattcagcaacaattaatagtcttggtaatgcctctgcctctgggccttcatccttctccacttgagcctttgtaagtatgcccgcgaccatttgttggagggtatacactaactgtttggtctactcctgtcat

SEQ ID NO: 271262 - DNA, 521 bp, Glycine max
  unsure (1)..(521): unsure at all n locations
gcctgggttganctttgaaccctccaactcgaaannnctcccccncctcntatnnngctctagaacggggacgagtgcattatacatttgttcagncccctcggcacggtgtattcacttgaaattgctgacgaacactgctttcgtgcaaaatattcagccgaggcgccttcgtaccgcntccgtatcgttcttgtgcgtaattacgccaagattctcaaccgctcttcgacattcctcatttggtcttcatttgtatttggtgctccaaccatcatgtccctccatcgacgctttccattcattctatgtacccgtggtggttcccatttgttttgtgactcttattctcgtgcattgtagtttccgcacctccctttaacgtgcttcagtcatttattcaagtaattcttccggcactcaaatattaacactaacttttaccgaccattcgccttgtgatatccgctcatctctgtaacatgaatctgaccgttcggtctgccgtatcacgcttgaat

SEQ ID NO: 271263 - DNA, 397 bp, Glycine max
  unsure (1)..(397): unsure at all n locations
agcttgtgcatcannatacctgatgaggatgtcccatatgttcttaaaactggactgatccatttgcttncaaagtttcatggccttgcaggtgaagacccacacaagcatctgaaagaaattcatattgtcttctccaccatgaaaccaccagatgtccaggaggatcacatatttctgaagcgcctttctcattctttagagggagtggcaaggactggctatataccttgctctaaggaccatacgagcttggatgaccccaaaagatattcttaaanaacatttccctgttccaggacccgaccatcaggaggatatttcaggattagacactcagtggagagacctatataatactggagagacttaaatatatgtgcacgtgcctcacacc

SEQ ID NO: 271264 - DNA, 502 bp, Glycine max
  unsure (1)..(502): unsure at all n locations
ncgctncgccgcgtnnattgcacccatttcgtacgcggcgattctcgagatcggagacactgtacagtcgagctggaggcatgcaagcttttcggagtacaaacatggtaccaactcagtttatttcagacaggatgtcatatctagtcaaggcctgagagaccataccaagctttctaaccagtatctaattatgtgggccacctaggctatcatatgctgacactaaccgacaatcctatgaatctccttcgctggcggagtacgagtctgacatccgcgttggcttggtgataaatggaggagccatggactccgttanggtaaaagcaaccgaccattcccatggtggctcttgggagaaaaagccatccctcttccttacctcttttccgcgatacttggcatactatccgcgatttatgcttgtggccgtgctaaactacctttcttggacttgggatgaaagtacatgtcgtcctgtctgataacgctggacacc

SEQ ID NO: 271265 - DNA, 230 bp, Glycine max
agcttgaggatagaccttggtattgaatgttcattatgctcagagctcggtggcctcttccttgattatgacacatctcttacactgggccctttatctataattccacaccgctattttcttcgatccgttgagcctggaaaaaaaaccttattgctagtggctccctgacttcgatagggatcgtggcatacgtgctcgtgtgaacgagcacaagggccacgttagtc

SEQ ID NO: 271266 - DNA, 383 bp, Glycine max
agcttctggctgttcttaaatatattcacaaagaaaggttagaacaaagaaagtttctaactatcaagttttttgttctttccatttttcttttaaacaattaagcttcaacaatgtcatgagttaagtgtgtaactgcatcaatgtgcatgggacaggtacttgacgggtttcctatatttcacgggcattaatttcgttttgacgtttgttgctgctattctctgtgtgtgttttgcacccacagcagcaagacctggaattcctgaaatcaaagcttatcttaatggtgttgatacttccaacatgattggtgctacaacattgattggcaaggtaacattaattatttgattgtatgtaacactgtctctgttccttca

SEQ ID NO: 271267 - DNA, 503 bp, Glycine max
  unsure (1)..(503): unsure at all n locations
tcgtcatattccctccgcttntcnctnctctacgctttcttacaacnnnncnnnnnnnnnnnaagccggcctgaccatggactgctgcatctctcacngntccaaaacctctcctaatgatgatatcacacatattgtaacttgtgtactgtatactactgacgaccacattagatcacatatttgttgtaaaaagatataggacttatttgacgcagctaaaagcccatatacacaccntaacgtagctaaaggcctatatacacatccctacagggagatgctccatcgtgacttgaacccgttaaaacggctctgcctaatgttaaaaccttctcttgcctacccttttggaagtctctctacttctcatattccttgaaaaatccacttcttccaattacctcctagagctagagaaaccactatatacaaccgcgagtaccctcatctacacttgtttatacgtcaactttataatacgcctataatatatagttaac

SEQ ID NO: 271268 - DNA, 216 bp, Glycine max
agcttgtatgattatggcgtacccatcacatgtggtactaggtggcggtcgggcgatggtgcacaacaagttttccacatccacaatgcgcacataaacccaccatccgctgttgtccacctccaactgagcttacgtactcccacgagcccataatcttggttttttaacaccgggtcccataaatcttcccagctttcccacattccagcaaac

SEQ ID NO: 271269 - DNA, 258 bp, Glycine max
agcttatataccaccagcattaaggaattagggcggttgatggaacctctccaaatgcaagctttccgcaagacttacggaaagatcttagaattgaccttagcagaggtatccatagaagccattgcatcactcacccaatactacgaccagcctttgagatgcttcacattcagagacttccaattagtaccaaccattgaagaatttgaggaaattctaggatgtcctctcggcggaagaaaaccatatctttca

SEQ ID NO: 271270 - DNA, 105 bp, Glycine max
  unsure (1)..(105): unsure at all n locations
acgctttgaggtgtgagtgtgacatancagcgaaagttttctctatctgtatgtcaatatgaatttggctttaagacgcatattcgatatatatatagcactctc

SEQ ID NO: 271271 - DNA, 216 bp, Glycine max
  unsure (1)..(216): unsure at all n locations
agcttgtattgatctgacttcttccttgtaagcagataatctcattctgttcttacggccatagcgtcgctgctccgaatcaatgaagcttggactttcctcacgagcctncagatcaatgttctcaatctgagacgtcttactacacgtactacgatcccaatgaagaacaacattaagggcacatatgagacctatcaactcatgaacatccat

SEQ ID NO: 271272 - DNA, 53 bp, Glycine max
agctcgccttggcccttgatatatttgagggactcttggtcactatgaatgac

SEQ ID NO: 271273 - DNA, 323 bp, Glycine max
agctcctgtaaaatatcaagataacgagcataatattgctctttttccttcttggaaggcaccaaagggtattgttagtgtttagctctactgagctctacaagattggctaagattttgttaaaacatatgcacttatacaatgaatggaagctggagttgctgcacatgatgtccaacgttatgtcaaggaataagatcgggctgcacaatgcacaaggcaagatgaaatgtcaaatgaagaattgaagctgcataattcacgatgtcggatacaatgtcctgacatcctgcccgagaatactggagttgctgtacaatgc

SEQ ID NO: 271274 - DNA, 379 bp, Glycine max
  unsure (1)..(379): unsure at all n locations
agcttgcctaattaacctgaaattaagaggaaatgattattaaacacacaaaatgggagtactaagtatttattacctatctttaacaaaaagtgattacaacattacaaaataaccatcaattggaggagtttgatacaatttacacaggttttatacacaaaagttagtcgtattcatcaactaacaactcccccaaatttatagttctgcttgtcctcaagcaaataaagaacagctcactggtccccaagtgacaaaaacatgcaatgactatgtacaaaggtgtatgcaacacaagttattgattgcatgataaaagaatgaagcanaatgccctcatcacttgtctttcacaaagcatgcagttattcaaaga

SEQ ID NO: 271275 - DNA, 126 bp, Glycine max
  unsure (1)..(126): unsure at all n locations
agcttcggaagaaagtgatgatgtacaagcnctatttgcatagctngaaagagccccgggtagtcaaagagaagttcaagtccatagccatcanagtctgaagagagtatgatgaactaagggacg

SEQ ID NO: 271276 - DNA, 378 bp, Glycine max
  unsure (1)..(378): unsure at all n locations
catgcaagcttaaaggtgtgtaacccatcatcttctcatagtatagcaccggtaacgtgtctactatcattggtatcaattcccttctcatcattggaggttccacttgggcttctagatccctncacctttgggcatattctttgaaagattcgtgcccgttcttgcacaagttctgtagctgcgtcctatctggagccatatcagaattgtactggtactgcctaatgaaggcaaccattacgtcctttcaagaatggactcgggaaggttccagattagtgtaccaggtgacggcggccccagtaagactctcctagaggaaatgcatcaataanttttcatcttttgcatacgcccccattttctgatagtaca

SEQ ID NO: 271277 - DNA, 513 bp, Glycine max
  unsure (1)..(513): unsure at all n locations
gcacgggttgggctatgaagcttgcatacggacacttgacactaagcttgagctatcacatacacctacctctcatctatatcgtgcatctttctttgtatacccaatccgcacgtttggatggttagggaacaaacaccatcacttgaactcgccgcaaaggatccctatctcgcctgactgccatctataacgagcggtgatctagaggatactgatgaacagattaaagccgacatgtctgctctacatgacaaatggcctcacttttggagccattgctggttcaacaagctcttgtacaagaacgctgcctctgtcgttactctcaatgtggtcgcctaactcatgcgactatcattggagctacgaacatacttctcctatcacagtacactggccgagactattcaacgttcgattgcatgcttacttttcatcgacctataantgatcctatctatctgcgtatacatttcacctttcttcaggtgctcgttcgctttacttcct

SEQ ID NO: 271278 - DNA, 327 bp, Glycine max
  unsure (1)..(327): unsure at all n locations
agcttactctgatattngcgattcaatatgatgtttgctagcttatatatatagaggtagttatggatattaataagcgacgcaaataataatgtggagtgatatagtgtgactccaaacattattaagtgttggagtttgacaatattatggctcaatctgacgagcaagtgagtgtggcaccttatgtctatcatcaagaacgataggagatgtcaaagggtggacatgatacttcgatgcgaataaccggatgtgtttaacacttgatgttacattaattatattgcgagctatgaattatacaataacccgaccagtgtttat

SEQ ID NO: 271279 - DNA, 403 bp, Glycine max
  unsure (1)..(403): unsure at all n locations
agctctacattactcctcatgcttntcaccatgtattataacgatcgatttcttcgttctgccacaccattctgattcggagaaccaggcatagtgtattgcgcaacaatcccatgttcttgaagaaatttcgtaaatgaacctcgggcttgtccatcctctgtggatctaccatagtactccccacctctatctgatctcacgatcttaatttattttccacattgtttctcaacttcagccttataaactttaaaggcatctaaagcttcattcttagaatgaagtaagtagagatacatatatcgtgaactatcatctataaaggttatgaagtatttcggactatatgcatccatgtcctgacaacatatgtctgcatgcatgatgatttctaataaat

SEQ ID NO: 271280 - DNA, 211 bp, Glycine max
gccggccagcttgctttatgaatcgcgcaccgcgacacccttgtggccgcctgcccctttaacaattctcatgattgacacactaaaccgacttctgccatccctcccgtcattacattcatcaggcgtaccatcaggcgcttaaggtaccacctacgccttacacaattacccccgcctcgccctcctacaactcctgtgtacttatacg

SEQ ID NO: 271281 - DNA, 231 bp, Glycine max
agcttaacagtattacaaatctcaatatacgttgtctagtgtgagtatggatcttcatttggtaaaccatgaaacaaattgctctgtattagctgtatcaatgaaggtaggtaagttaagttttgtgcctgaacctctggccgcgcaacacttgagaaatattatggcaccgaagtacttgagtaatcttccaaggtcactcgtcgaggttgctcttcagccatgagttcg

SEQ ID NO: 271282 - DNA, 202 bp, Glycine max
  unsure (1)..(202): unsure at all n locations
catgccagctntatacaattaatatagaacctatatcctaatgtcacatcctatcatagtgtagcgtctctcgtgtttatagcatgaggttcctcatattcatccacctatctatcctgctccctgaacacanaggttaagatcatcacaagatcctaacccaggcagctaaccgggagtgagtcatcgcattcctacttcc

SEQ ID NO: 271283 - DNA, 469 bp, Glycine max
  unsure (1)..(469): unsure at all n locations
ctcctcactctcttagatcacttctctctgaaaaaactctntccctcttaccattttcttaccgtctattcacacccagcacacacaagagaacaagaagagagagacagaaagagagggagaaagagaatatcaaaaaccctctctttcaaggcatgtcatagatcgtgtttatggaatagggaggcaataacataggagataagatatataccaagttattagaatcatatgtacataatttgttttgtagcacacatttctgattccaaaatcagctgaataagaactttactgaaataggaggcagattctcatctgtagtacaagtgttccttctcatattaaattagatgaacagacaaaattgtactatgtttctttcttctttcaggatttgatcataaagcttganaatgcctggccaaccacatctttatttcctattaacacttctttatcattcaag

SEQ ID NO: 271284 - DNA, 419 bp, Glycine max
agcttgtaactcttggcaatttatttaaaaactaatctcttataaagttatgacttttgaaaaaatcttcagaaacaagtcacttgaagaattgtgacttttggaaatgtatttcttgaaaatagtcaggggtaatccattacaattaacgtgcaatcaatcacacatcagcagatgtgactctccattttaaattttgaacatcttaacgtcttaaaacaatggtaatccattactaccttttggcaatccattaccaaaagactacaactctttggtaatgattttgcgaaaacttcctgcgctactcaatggtttgaaaaactttttaatacttatcttgattgagtcttctctcgatccttgaatcttgagtcctgaatcttgattcttgattcttgaatcttgaatcttgaatc

SEQ ID NO: 271285 - DNA, 487 bp, Glycine max
  unsure (1)..(487): unsure at all n locations
cgtgttacgaacgataagaattcgaagattcttcatcttctcaaatacagtatcaatacaattaatttcttttctatgaagggggtcgagcattattccttcaatttcgctacttccctttaaatcaattataactggcattaattaagtattcataatttcaacaaaaactaaaatgcttaaggatgataaaaatcaagaaacaaagttgacaacaatattcttacattatcatcttctaatacttgaagaacatcttcatggtgccataatctgctgcgttcgccaattttattggatgctttctccttaactatctctctacccatgtctngtattagatcatgcatncacaggcaatcatagtcaacagttaaaagtgatttattaactaatgttgtaataccatctcctgagctgaaatcagatgcatctnagtacagttntacataatccaatcgttgccctttgaaaaacatgcaacatc

SEQ ID NO: 271286 - DNA, 176 bp, Glycine max
  unsure (1)..(176): unsure at all n locations
tcaccctttctgattggagcaccatctgctngaattcatgcccagaggccaaatggttctcacttgcgcctcacacaatgcgcctacgcgaccatattcgctacacaaagtatccaccctctgcctctccccaacacggtgtttacacttgacttctcttctggcatcactccacc

SEQ ID NO: 271287 - DNA, 352 bp, Glycine max
  unsure (1)..(352): unsure at all n locations
agcttctcgggggacatcttgacttgctntccaatctgacattcaccatatattctaccttcttctattttcagattgggaatgcctctaacagcacctttgtcaatgattttcttcatgcctcttaagtgcagatgtccaaatctttgatgccatattctgacttcatcttctttggaggatagacatgtggaggagtaactggtttcttgaggtgtccatacgtagcagttgtcctttgatctgctgcccttcattagaacttcacacttctcatttgtcactaagcattctgactatgcgaagattacattgaatccttcatcacacagctgactgatgctgatcaagt

SEQ ID NO: 271288 - DNA, 377 bp, Glycine max
gtttctttagtaatggcttgctaaaaaccctagttggggatgtctaatgaacaactaatgtaaatacttaatatctaattgattatgttttctgtgttcaatgcttccttcaatgcttaatgtttgtatgcttatggtctgatcatccatttgtgtgcatagttaggtgactctagcattgggaaatgtactgatgccttaaaacttgattgaagcaggattgaaacttagtcttacaagagggatctacggactaagtttggttttaattatgttgatacaataatgctgtttagtctaagcctattcttacaagagggatctgcggactaagcttatgctaaattaggctaaactttcataagctggttgaactg

SEQ ID NO: 271289 - DNA, 278 bp, Glycine max
agatccttacactagctcagttataaagtcctttaactcttttattttgaaactttaaagttcttgaactaacttttattacccttataaaatatctctaaatatccgtaaatactatacttaccacatcacttatttattttattatttagggtacaccaattttttacacccaccgaaaccattgacgcgtttttcgtaaccccacaaagacctcataaacgacttccagtgtcccgttcaaaaacaaccatgacttcattttcagactgattaac

SEQ ID NO: 271290 - DNA, 334 bp, Glycine max
atgcagctgcctcggtaaaaattctgtccattcttcattaaccgttggatcttctcgaaagttggtcttacactcctaaagacacttgttcatgatctgaccgccgggatctttgagaagatgtctggagtgtgctataagcctcttaatgaagctcttggaggaagcctcttaatgaagcttctatagaaaactacatgaagctgtctcggttaatatgctgcccagccttggttaaccgatggatctgtcccaaatttggttcctaacttcagaagacaattgacatgatctgaccgttgggatcgttttgaagatgcatggagtgtgctac

SEQ ID NO: 271291 - DNA, 416 bp, Glycine max
atttactgttcacgatgagaataatgcgttgacacacaaacactagaagatatttgccattaacataagtgcgatctttacaaccttcatgggaagacattttacgattaaagacgccttctttaacacacgctcgtatgtgatactattatcttggaaatagccaactcttgtgagatatccactggtcttccatcctaacgtgaatggattattactactaaagcccacactctgcgtgattgatattatcaacatttgatgaagcaatagtgtgcatgtgaaacagagtcttatttctctctatagaaaccttgatgcacctcatataaaggtatctagaaaaccagcatgcgaatctcagataccaacgttagaaaatagagtatatacttgctcacctctaacaacctact

SEQ ID NO: 271292 - DNA, 482 bp, Glycine max
  unsure (1)..(482): unsure at all n locations
ctanagatagctatatgcagctgcctcggtgaaaatatctgtccattctccattaacagctggatcgtgatggaagtggtgctacacttcanaagacactcgaccatgatctgaccgttgtgatccttgacatgatgtctggagtgtgcttgaagcctcttattgaagcctctggaagaagcctcttaatgaagcttctacagaaaacttcatgaagctgcctcatgatatatgctggcgagacttggttaaccagcgcatcttccgcaactttgcgttctaacgttacaagacaatttgtcatgatctgaccgccgggatcgtgatgaagatgtatggagcgtgcgacatggtatcgttccctaaagcatgatttattaaggcatgtcgccctacgctctcgtgtagctaagaagaagctcatatcttcttctatgcttcttcacatccatttcttagagaacacaagctgtactcatccg

SEQ ID NO: 271293 - DNA, 420 bp, Glycine max
  unsure (1)..(420): unsure at all n locations
agcttcatgatgatgaaccaagctatnttgatgatgccaaaagcccgagtgatttattcaagatgtgattcatgacttccagatcaagcatccagaatcctatccaagaatcccgattctagagaagaaatcaagaagcatcaagtcaagactgcatataggataagtcttaaaagaatttttcaaacaccaaataacacagttttgttttataaaagaatctcctcacattttctaagttaccagagtgattactctctggtaatcgattaccagttggcagtaatcgattaccagtggccagattggttttcaaaatgttttcaaatgacttgtaacgttccacaatgatcttcaaatagtgtaatcaattacactatattagtaatcgattacaagtgaatctgcacgttggaattc

SEQ ID NO: 271294 - DNA, 470 bp, Glycine max
  unsure (1)..(470): unsure at all n locations
tgngagctgataactcagaagctgaagtctctaatgtggtagtgatcagagcaaccttaataggaacggctaatggggtgagaattaagacttggcaggtaaaagttggtcttgtgatttgaaatttaggctgttaggcaattcacaactcctgagacagttgaaagaatagagacaatggaggtttagaaaattgaagtagaacttgaaaaaaagatgaatttcaacttatgcctactaattgttgttgtggctttacctaagttcaaaagccttttggaataagttagttaaaattcagtccagtgaacacaaattgccaaattttaggcgcacaaccgataagacaaacatggnggaagttgacgaatgatacaagaattggaacttgcgtgagaaaaatagtgcaccaaggttgacaaatntccacttcgtatgttcttgtcctcttgaccaccctttgaaataac

SEQ ID NO: 271295 - DNA, 201 bp, Glycine max
agcttcattgcctaacaagccatcttacaacaactttccctaagagactctttataacgatgcacaggtcaaagctgagtctgtgaaaagattgtatgaccaactgaatgtgtctattgccaagaagaatgatagttctactaagctcgcccacaagaaaacgagcgaagtggcacatgaacctggtgatgatcctggaca

SEQ ID NO: 271296 - DNA, 466 bp, Glycine max
  unsure (1)..(466): unsure at all n locations
actatgaaactcagctttctttttagaagctaatactttnggcttctaaagaaagcacttaacancaatttttattttcggttttaaaaacttatgaacatagattattagtattagctaaaaaaacacttttcctttgggaaaaaaacacaaacagacactaaattattcagatgacatcaagaaatcaacatattcacttagaccttcaaaatattcattaaaatttatgtataaaggacctttataaacaaaatggcgcaatctcctaaacaaaataagttgataactaaaactattggaatcatggcaagcaatatattaagtcattatagaataggtgatgttatgccattctgttaatagttaaattagaaatgacaaccagttaggaatattactgagtcagtgagaataagaatgaaattcacagaaatagaatgaactaagacactgcaacatcaat

SEQ ID NO: 271297 - DNA, 103 bp, Glycine max
atcttaagtcacctgccgctgcagctttcgttgataagttttgaagtgactttattttgccggaagcagctgctggcgaggaatatgtaccttcagatatgaa

SEQ ID NO: 271298 - DNA, 466 bp, Glycine max
  unsure (1)..(466): unsure at all n locations
tctggtgggacatcttgacttgctttccaatctgacattcatcacaaattctgccttcttctattttcagattgggaatgcctctaacagcacttttgtcaaggattttcttcatgcctcttaagtgcagatgtccaaacctttgatgccatattctgacttcatcttctttggaggatagacatgtggaggagtagctggtttcttggggtgtccataggtaacaattgtcctttgatctgctgcccttcattagaacttcactcttctcatttgtcaccaagcattctgactntgtgaagtttacattgaatccttcatcaaacagctgactgatgctgatcaagtttgcagtcagtcccttcaccagcagtactttgttcagactaggaagtccatcatgaactagctntcccattccaatgatctttcctttagagccatctccaaatgtcacataactagt

SEQ ID NO: 271299 - DNA, 367 bp, Glycine max
agcttcttatccaaggcaattcttggtggtgaagcttcttcttccttggcttattccctagtggatggcgcctcccctatcctcttctcctttgccttccgctgcatctccatggtgaaaaatcaccattgaaggacctcatcgaagctcaaagatccagcctccatagaagcttcacaagcaagcttccatcaagtggtaatcagagcacaagagcttcaagtaggtgctccttaaacctccattaatcttttttctttaccttctcttccattgccgtttcttcatttttctccatgtatctcctcacatgtcttggtctacatgttgctaacatgattctttagagttcccaccgattaaactt

SEQ ID NO: 271300 - DNA, 479 bp, Glycine max
tgcagaattggtcttcgccagtgaaaggatcaatgtgggtccgaatagagggcaaattgatcatcctactaggacgactgagaaaactggggcaaataaagagggtgaggatgagggagaaacccatgctgtgactgccattcctgtacggccaaatttcccaccaacccaacaatatctttactcagccaataacaaactttctccttacccaccacccagttatccacaaaggccatccctaaatctaccacaaagtctgtctaccgcacttccaatgacgaacaccacctttagcacaaaccaaaaacaccaaccaagaagtgaattttgcagcgagaaagcctgtagaattcaccccaattccagtgtcctatgctgacttgctcccatatctacttgataattcaatggtagccataaccctagccaaggttcatcaaccttcatttctccgagaatacaactcgaacgcaacg

SEQ ID NO: 271301 - DNA, 356 bp, Glycine max
  unsure (1)..(356): unsure at all n locations
gctccccatttattnnttacctgtgaataaattcaacctctgtggtgggaattcctatcctgngtgaaggaacacagaaccatccattgtagaccaatggataattttgtncaacatgctcctactgtatgaacacaggctgtcggtagaacatggaaaatttggtggctggcagncacaaactcaatctggaaagtcaagaatgatataattctttcaaattaaatctttgatatctctaaattggtagacaccactcttttccttatgtggacctggctaaaggggtgggaacaggacttcactgtctcttttacatagtggtcctaacaatgtcttagtattaattaacacta

SEQ ID NO: 271302 - DNA, 454 bp, Glycine max
  unsure (1)..(454): unsure at all n locations
tattacaatggtttttgcaaattatcaactttctcattcaaacagaaattctcaaaatcttgcttcatttntccctacttgtcaccaccaccaccaatgaattttatgaaaaataatgaaatcccttccatcgaaaattctcaaaatcctcctccgtttttttcctacttgccaccaccaccaccaatgatttttatacaaaataatcaaatccctcccactgaaaattctcaaatgtagaagcaagcttcatgatgatgaatcacgtggttttgatgatgacaaaaatcccaaaagaatgatttcaagattaagtcaacaagttcaagatcaagattaatttcaagattcattagaagaaatcaagaagaatcaagattcaagagaagatgaattcacgaatcacgagaagaaatcaagaagcaacaagtcaagacttcacaagggaagtatc

SEQ ID NO: 271303 - DNA, 460 bp, Glycine max
tgacgcgccctgatctcatgagcgtctaataaccgtgatccgctgtcctatatcatcagtataagcattctatacaccagctttattcctatatccgtctcttatacataatatctcacggatgatggttcaataactggtcttttgggcttatctgctgattgtaccctctgttctgatgcctctgcattagcctgatttgatgccattagaacagcctcgttctatgctataaagggtagcttcgtttgttcctccctatcattccacgggccatggaaaagcatcttgtactcaaagcgaaattattgcgaaaggtttctaaattgccaacattattatctgagacaatcctgccctgaactaaactttatagtgcataccttttacggtggccagatacaatgcgaccctggctttgtgatgaatgaacactgagaactgctcacccactgctgcg

SEQ ID NO: 271304 - DNA, 215 bp, Glycine max
tgctcgcttgtataaacaacatctatatattggagttatttatactcacgtaaccacacagctgccataatatgtgaacatggatagtgaagcgcagaataccttccgcattgacaatgacgatcattcaagtttattgcccacttttgtccgccacgttgcgttataggagtgaagctctcccttacttcaaaccttgcggagcggatatcata

SEQ ID NO: 271305 - DNA, 451 bp, Glycine max
  unsure (1)..(451): unsure at all n locations
agcttggaaagtgacaaacgactcgctgagcgagctgatgatgcgttgagtgcgtgcctgcatgacagattcccttccagattcctcctatccgctaagcgcgttgatgcctcgcttagcggatgaaactcgctaagcacattgagctcgattagtgagacatcaactttagcacttcttcaaaataactcctttntgcctgaaattgaagagaaattgacattaattccacacacaaggcttctactgagcacaaataanaacaaaacacaatttaattacaatcctacaaaaagaaccataaatgggggaaaatatatacattntggaaaagttttctatacaaaatttagtcgtataagacgactaacaaactcccccaaatttacagttttgctttcctcaagcaaagaaagaacaactcacttgtccccaagtgacaaaatcacag

SEQ ID NO: 271306 - DNA, 401 bp, Glycine max
  unsure (1)..(401): unsure at all n locations
acactatgatactaagcttacacgcggaatatgttcaccatcatcgtgatcatcacaattctaattcattcaccananagttcttcgccccttctttgtccccattctttctctntaatatactttgtccatattatcctctttctcttcctatcaaacatccatggcttccttgtcttctagtacaaaacagagcaataataaccaagagggtaaccgattttttttaccctcttgtgtttttatttattatttattttatacactcttgttggattgatcgtaatttagttactatacattttttttgtacccacttttaatattntttcgtgaacttaatgtgcagttgatgagaaaccaataccacacgatcaaaacgttctgaaaagcacgttgcg

SEQ ID NO: 271307 - DNA, 428 bp, Glycine max
agcttcctcggggccatttcctgcgaaggcaaacatttggaaagttagttttaccagtgggatactattcttaaaacaaaaatgacatacaaccttctctcataaatacaaacatcaatgtacatttagagcaagcttatacgcatatttccttacaaacgttctcttgcacaagacattctattaaccggaaaaaaatgcacccatatacaatcaaggcagcttcgttacctagattatttacacgcacttccaaggtgtatttgttacttacatcacacacctccttggctaaattcacatacatgcatactcaaagcatttcggcgtaccaaaaattgcacatgtgcacagtctggtatttctaatacctatacatacacaaacttcatgatgaatcttgactatctacacaataaggcgctaca

SEQ ID NO: 271308 - DNA, 490 bp, Glycine max
  unsure (1)..(490): unsure at all n locations
tatntaggtgtccctaatgactcatcagggtttccaagtttatgccattattgtaaaccacagttacaatgttaaatgatatagataaaatggacatcctctcacgaacacatctttgcttattcaacttccaccggaatgtgagtgtaagccattggtctgtttgctcaagcaacctgcgctcctgagtgttgacttccaagaccgttcaatcagaggttactcatcttgcacgttggtgggggtgccgtaaaacaacgagcaaagttcaaaacaaataagtttcaaaataaaaaataaaaaggcatttgattgactgtgttntcaagtaaaaatatagacgttcatgtgacctcattntgttttttttagagagaagtgagttatcaagaataggatgttggacaaatggcctcagttaccttgagaagaagaggggatngaattaagatacgaatattattccncaattaaactttcactctctctt

SEQ ID NO: 271309 - DNA, 334 bp, Glycine max
tgggaccaactcattttatttcaaaaaggttttcgtatctagtcaaggtcttagagaccatacaagtctcctaacgatttctaattatgtgggccattaagtctatcatatgctgaccatagccgacaagcccatgaatctctccgggggcggaggaagtgtctgccatcgccttggccttggctaataatcgtggaagatcttgactcccgttcaaggtaagagcaaaccgatccatccacatggttgcctattggaggaaacagtccatcagcctttctctagcctcatcttccgcgtatacttgggcatattcagtcgcaatcctatgctc

SEQ ID NO: 271310 - DNA, 472 bp, Glycine max
  unsure (1)..(472): unsure at all n locations
tacccatcacatgtggtactaggtggcggtcgggcgatggtgcacaacaagttttccacatccacaatgcgcgaataaacccaccatcccctgttgcccacctccatccgagctcacgtactcccacgtagcccatatcctcgtttctctcaacaccgggtccccatcaatcctcccaagcttccacaacatccaagcaaaacaatattcaaacagcacanactatcacagccaagcaaaacagagcaaaggcagaaaactctgcccacaacaccaaccaaaatcacagctnttctcacccaaagaccccaataacaattcattcgttccaattcgttaaccgttggatcgactcgaaaaatttactggaagtctctagtacttaagcctacattgtgaccgttgggatctactagcacacatccagaactcgttctgcactactctntccacagccaatcacacacaagca

SEQ ID NO: 271311 - DNA, 304 bp, Glycine max
  unsure (1)..(304): unsure at all n locations
agcttctggtgggacatcttgactcgctttccaatctgacattcaccacagattctgccttcttctattttcagattgngaatgcctctaacagcacctttgtcaatgattttcttcatgcctcttaagtgcagatgtccaaatctttgatgccatattctgacttcatcttctttggaggatagacatgtggaggagtaactggtttcttgaggtgtccataggtaacagatgtcctttgatctgctgcccttcattagaactccactcttctcatttgtcaccaagcattctgactttgtga

SEQ ID NO: 271312 - DNA, 392 bp, Glycine max
  unsure (1)..(392): unsure at all n locations
ngagatgaggaagtgttgaaaggtgaaacttcctcgctttattcgttgaccacacagtggtacctggagatatgtctcgggggtcatgagaccttgaggacgtcatgtggggtgctattgcccaaaaccaagcttgaccaatcccgacccaacccgggcatagtcagtcagtgagaacctgtgatgtacctaaataggcgagctcctggcagtcaacagataaaaggaacaaagaccacanagcaaggaggcttgtggtggctggccacctgtgaattatgtgtgatatatgggttgtggcctctggtaatcgattaccaagggtgggtaatcgattacaaggcttataaatgaagacaggaggctaagatggtctctggtaatctgatacc

SEQ ID NO: 271313 - DNA, 314 bp, Glycine max
aacctctaagaagaccattgctacaccgctggtcctaagtcgacctacgccaggagtaccagtactcctatatctctcagtagttgacgaagccgttagctcaacccttgacaagaggaaggaaagcaccaactccctatcttcttcaccaaccgcatactccatgacgccgagaagtgataccaaatgatagaagaggtggtgctaacactcattacctacactcaatgactaacgccctacttctaaagtcatcaagtggtaatcaaaatgaactaccccatcaagcaggttttgcgaaaacctaaactcgc

SEQ ID NO: 271314 - DNA, 299 bp, Glycine max
cgagcaatccgctaagcgcaacactcctgtgcttagcgcgaggaagactctggaagaagatgagctgtacaagttcgctaaacgcaccgcttcatctcactaagcgcaccacttcagttaatccgcttagcgagaaaggcacgctaagcccaaaatcactaacgtgtgctaagcggtccatacgtgcgctaagcgcatgagcacgaacaaggccacctatttaagcatgaaatcagattttgtgaagggagtttggactgggattcagagctttgcatgtctagggtttctagagagag

SEQ ID NO: 271315 - DNA, 470 bp, Glycine max
  unsure (1)..(470): unsure at all n locations
actcagcttggnagtggttgtttcactatctcgctaagccaatctactggcttagcgagcaatccgctaagcgcaacactcctgtgctaagcgcgaggaagactctggaagaagatgagctgtacaggttcgctaaacgcaccgcttcatctcactaagcgcaccacttcagttaatccgctaagcgagaaaggcacgctaagcccaaaatcactaacgtgtgctaagcggtccatacgtgcgctaagcgcatgagcacgaacaaggccacctatttaagcatgaaatcagattttgtgaaggggagttggactgggattcagagctctgcatgtctagggtttctagagagagaaaggtccaagttctagagagttttgagagattttgttatgcaaagatctgtagagaccagagcttgaagcacgagccggtttgacagcttgagatgagttcgtgagtgattgtga

SEQ ID NO: 271316 - DNA, 345 bp, Glycine max
  unsure (1)..(345): unsure at all n locations
agctnggagcgctatccgcagtctcagcagaagtttttgggaaagagatcatactatgtgcacgaatcttatacccagtgggttattgataggaccaagagctttggcctaccctaccgcttacctagatacctatcgtccaccatcccaccatcatccttgcctatccccttcgacaccaaggaagagtttcatgaacaattaaccaaagagaggcaagaaaaagatacttggaagaggagatgccaggaactcgagcaagagaatgagactttgaaagggaagatagcccaacagagccgtgagctttttatccagaaccagaggatgattgagaacgacgac

SEQ ID NO: 271317 - DNA, 359 bp, Glycine max
aattcacgacagtaactgaaatggacagaatttatcttgatcttaacgtatataaataatcgagactaaatataaatctttctattacaggaaccgatcttaaataattaactaacaatagtaactaatatgtactttaaagaacactaaaaactacaacaaatatattgacctcaattatactgacttacgaatcttctagtattaaagatcattcctctcaatatgctaatgagcttaaataataaaatcaaggctaaccgggttaacctgtcctcactcatccgtaagcaggttggtagctgggcggagcacgctaccgaattctgtatttctggaaaacaatattatctacttat

SEQ ID NO: 271318 - DNA, 386 bp, Glycine max
  unsure (1)..(386): unsure at all n locations
agcttgttgagagtttaactttgtcttgtatgatgtttattttangaacattacttttccttgttacgtgtatagacaattaaaattaaagcaatgaatattttctgaataatcaccataattagggctcgcgcctctatggtggaaccttgggatattcttacaagttttgatcttttgagtaagctataaaactaatactcaaagacttagtcacacttagaagttcattgtttctctataacgatgtattatgtgagaaaaattttaaagttgataaaaatattcgaataaagaataagaacataccttattaacttacggataatcttaacaacagaatataaattttgaaaaaatatattattaactaaatctcttaatca

SEQ ID NO: 271319 - DNA, 440 bp, Glycine max
  unsure (1)..(440): unsure at all n locations
ngttctangattttcctaagttctgtaacaagcttagaacaataaacttggccttctcttaattatctttgggcttggcaaccacgtcaacaaagtactttcggcacctactatatgttgacttgaccaacgctgttattggaatgttgcgacaatctttcaacaccttattcacacattctaataggttggttgtcatgtgaccatatcgtcgtccagatgtatcgtaagccatgctccatttttcctttgaaatgcgatcaatccatcttgctatggctggactcaattgacgaaatttntctaagttttgatcaaagacatgcttgcaaggagtgtacgctacatcacnattgttatcatcaaaagttgtatgtagacatgaaactcanattaaattaatgtataaaataaaccttacccaatttcttgaacatctc

SEQ ID NO: 271320 - DNA, 220 bp, Glycine max
  unsure (1)..(220): unsure at all n locations
agctataagttctttccacgtgttgtcttattttatttcctactctctctttaaacggggttttttctatgcgcaaaaagtattggccttgcttattcatcatcaaccacttgattgggttttaactattttattccctaacaccaatgttcccttcctcttgaagctncctcaaaagtaacatatcatccaccacacatcgacaaaataatggaaccaa

SEQ ID NO: 271321 - DNA, 470 bp, Glycine max
  unsure (1)..(470): unsure at all n locations
tgatatacacacattaattgaatacttgatgtcactgcattactacttgacgtaccattacttagatcacattatcttgtttgtaaaataagatcataggacttatttgcacgtaagctaaagaggcctcatatacacatccctaaaggtaagctaaagaggcctcatatacacatccctaaaggggagattgctccatcgtgacttggaaccttgtttaaaaggtgtctctgcctcaatgttttaagaaccttattcttgcctcacccttttcgtgatgtcctctattactttctccatcataccttgcaataaattccactcttttccccaaattacctccctcagtagtctagatgaagaccaccttataattaaaaaccgaggcagttacgtctacatctcaccaccttgtttntatcaagttcaacctctttattaattacgtcctaataaatattataagtata

SEQ ID NO: 271322 - DNA, 338 bp, Glycine max
  unsure (1)..(338): unsure at all n locations
agcttccttcacgttntcctccatacctagaactctaaaccttcgattctcactcgattcttcaccaaatcacgtgccgtaaagcctaatcttcctctatttcactcctctttcacttccaccgatcaaaatccagaaaaacttcatcaaatggcagagccatcaaagaagagaaagggatcatcttccaccgcaccggtgctcccatctgcgcacggccatccggacacccacagacctattcctctttttgtcattccagatatcacactgtttcatccgatgataacgctacggaccttttcagtttttctaaatatcttaacccaagacctaac

SEQ ID NO: 271323 - DNA, 472 bp, Glycine max
  unsure (1)..(472): unsure at all n locations
taagagtatctataatgaaagttactttaacaaanaaatattattttggtatgtcatatttgattctgagtgacttaaaattaaaaagaattacttatataaataactatttttgatgagttgcttaatcttgtattaaatataagagagatacataaaatatttatgaattaaacaacttataataaaaatttattaaaaagaaaattgattgaattggatgtgagataaattgaattgtttatataaacaagtaagtcttcatgttttgttgttttttttgcatttatttatttttatggactgtattgccttcagttatttttattatctatatatattttaaaatttcaaattctattattttgtctctccattcttcttcatcttagcattatttgaagactaaagtgagatggtcaagaataaaaatgataattgatataaaattgttgcagacttggtatagttg

SEQ ID NO: 271324 - DNA, 400 bp, Glycine max
  unsure (1)..(400): unsure at all n locations
agctctaacctcatcgactctcacagactttagatttgggagtcaatccaatccttgtggtcggactctcacccacttatgatagccgccgatgatcccattactgcttcacctaagctctctgtcctttcttcacgccgcatcccatgccttgcgaactccttggagtacccttgcgttgtggtcactaaaaccccgtgcgacgaaaggcgtgatgctctcgtctaatggcactcctctcatggggtagccaagctgtcttatggtgagaacgggattataattaatacaaccccttgttcncatcaagggaagcattggacactctttgcatgaagatagaatcttgattctttcctccttctagcgagggaaccaattaacagacgccccccatgct

SEQ ID NO: 271325 - DNA, 430 bp, Glycine max
  unsure (1)..(430): unsure at all n locations
ntacagcagattntagtaatgacccactaacctagaattaaaataacttattgccattaacctanggaattaaaaaaaacttaatggctgagtgtaactgaaattgaggcaatcaaaagtcacccccaacagccaacaagtcagccaccatttggtctcccaaaaggctgatgcctacgttgccaattgggcccttattacaacttgaactaaacctaactaaagcccttttagttgattaacccaaaacatatttttggtcagccaactttacaaggattgggccattatttagacaaactaaacactctaaaattgaaataaagtggtgtcatttagtcctcctccatttgggccatgatacaactcacaaccttggacttttctccttgaaacttgngcttgtattcaaatcgtatggacaacactt

SEQ ID NO: 271326 - DNA, 289 bp, Glycine max
  unsure (1)..(289): unsure at all n locations
tcgagaatacgactcgaacgcaacgtgtgcttgtcaccgagaagccccggggcgttccattgagcattgtanggctctgaagtgtacggtgcgaggtctaattgatgctggctgaaatttgacgagaatcgtgtgtaaatcctaacattgacaagagatgccacacatggggcaattntgaaagctgttgttagatgtctctaatgactcaccaggactttcaactctcaccggaatgtgggtgtaagccattggtctgtttgctcaagcaacctgcgctccttgagtg

SEQ ID NO: 271327 - DNA, 103 bp, Glycine max
agcctgatgctgctaccatatatttgacccaggtgagaatgtcaatccttaccctcggaagcggaaagaatacaatggaaatttccaatctatgaaaggaaag

SEQ ID NO: 271328 - DNA, 403 bp, Glycine max
  unsure (1)..(403): unsure at all n locations
actaagcttagattattctatgcacccatggtggtcacatcgtgttcgtgcatatctactctcgannagacgacttttcatacgccctgttgccgcgcttaagcccgctttacgtaagtgattacttgcttaacgtgaaaataaaataaattgccaccgaacgttcgagttatatgatgcgctcacttcggctaaaatcaatgtcgaccgttcagtcgtgccgtaaccacgttctgaatcaaaaanacgtcaaaaaataatataataatcaaaaaatatcttttttagtgaaataaagcggagaatcaatcggacgttttctctttgggatttctcattcttaattgaattgattaataactaaagtgaaactactgctcaaatcaacttccctaatccagct

SEQ ID NO: 271329 - DNA, 371 bp, Glycine max
tctttcaaacctggcgtggcaatggcgcaatataaaaagtgaactttcaagcatccaaaatactaactagtactacagagtacagactgaatatccgttctcgcattcaacttagatattatttcactatacattatccattgatttcatctttatatatcaccctttcacaaattctaaacagagaaagaaatagaatactgaaacatacctaaatccactgaaatatgattttttagctcaaagcttcaagtacaaggaacagggtttccaaatgttttacaacttctacagtttctcttgcatttaacctagttaaggtctgaaatatttttaattttaaaaaagaatgttatttcaatacctatttt

SEQ ID NO: 271330 - DNA, 350 bp, Glycine max
ctaagcttagaataacactactttgttataggccaatgcttcacactttctctacatgcttctaaatgagtcttggttctttcaaacctggtaagacaaatcattagtagcataagtaaaaaagaacttagaatctgcttccttaaaaaaataatgttaaaatatttaagaattaaatgatattttaagctacgatgtataactttaattatattattaaattagtattttaattatagcattatatatttaaataaaaatactaattttatatttaaattattataaaaataagataagaaatcaatcaattaattatataattaataattacatatattatatataat

SEQ ID NO: 271331 - DNA, 422 bp, Glycine max
gcaagcttataagtcttcttagagaatcaacttattatatttgaggatcagatcttagtctcagaatgtaactcgaataaaaaagttcattgtgaacagttgaaccatttgttgctagagaacttgattatctttgattcacagggttcactcgggcagagttggctttaacaatttacaaagtcttcaagccattattgacaatgaaattaatatccggtacatgatcaagtctttcaacattttatcagtacaaatattggcttcacgtgaagatctttatatatatatatatatgtaaagtagatgtgtggacatttttgtaaaatcaactttccttcctttttttagtccctattttagtaaaattgcatctcatatttaaatatatgtgctaattaatgacatctaataaattgttc

SEQ ID NO: 271332 - DNA, 182 bp, Glycine max
actaagcctgagccttagctgccttattcttgggtacgcaccattgtttctatatatttttgaggaagaagccaataagatcagtaactcctggtcttatgaactggcattggtggcaacctttttatgtcggcttgagtatcatactttagcacttatgtcaactttctattgatcagatg

SEQ ID NO: 271333 - DNA, 167 bp, Glycine max
tttttgtatacacctatgctgggatattcactcggtacgacatcaacggacctccttcggggtgacgataactcacaggaagagaaatttcaacaccaaaccagcggtaggggtcataaacaacctacgacgccctaagcacgcgagcacctggcaggatccctgat

SEQ ID NO: 271334 - DNA, 355 bp, Glycine max
agcttgacatgccgacttgtttaaataatatttataatattaataataactattatttataccatttttacggcattataaatgataagatgaaatgacataaagtgcttagagagttcacttgcatgtgaaaattttttaaaaaaaaaaactcaagttaaaaggataatgcaaccagattaatacttccaaataaaagaatgttttgtaaagacatcttcagacaatttaaatatttttatttgactatattagtataaataatctctaatccatatattgtttaatactatacttttttctattttcttttgatggtactctgtatttaacaacttgaattcaatatgatttt

SEQ ID NO: 271335 - DNA, 445 bp, Glycine max
  unsure (1)..(445): unsure at all n locations
actcaagcttaatgaaacanacaaaagtataaccctaatccataacaattcaaaattttatgagaagaacaagaaattaatgaagaattggttaacctgtgatactcacaaaggaagaagaagagatgacgaaggatgatcgaaagagatgaggaaggagatcggaaaggatgaggaaggagattgaagcacgagagagaattgaggaaggcacagcacgcacgttgtgaggaactggagagagaaattttgagggtttagaaaatgacgaggacatgctttgtcattctgaaattctttgaggacataattgtccaagcattgtttatggaatagattcccgaaaagcaaaatttcacaagctgcagaattgaacttcaggaaaagaattgctcatagctttcacttttccaaaagctaaaaaaaaattaataaccaaacactc

SEQ ID NO: 271336 - DNA, 359 bp, Glycine max
  unsure (1)..(359): unsure at all n locations
agcttctattctttgtacaagaatgaagctctgataccacttgntagacaagtggcctcagatatcttaagaagggggttgaattaagatatcacaaactattccctaattaaaaattctaatttgatgttaacccaaatcctaagattccttttaaaatgaattcctaaataattattcaaattaaacttactgaatagaagcaataagcaataataaataaaagagtttaagggaagagaaagtgcaaactcagttttatactagttcggccacacccttgtgcatacgtccagttcccatgcaacccgcttgagagttccactcaatcgcaaaaaccctttacaagttctgaacca

SEQ ID NO: 271337 - DNA, 172 bp, Glycine max
tctagccaaatggacttaccttgacttaattcctttgatatcccttttgagccttgtttccctttccttcttttgaagctcactacaagccttaagtgaaaaaccatgatatcaccatatccttaagggaatttgagctttggaattgtttcgggaataagtgtgggggttt

SEQ ID NO: 271338 - DNA, 369 bp, Glycine max
agcttatccagcttagcatattggttatcaagctctcgaacctattaaatttagtcataggatcattcaatcagatgagcacatgattgaacatgaatgttgaggctaacctaagctaaggaatggaatgaaataatgaaagatgaatatataaagaatatagataaccaccttcttgaagaaactatccaagcccaagtcttctgaattccttgcatattctcctaactcaatgtcaccaccacctccgtgaccttggccacgtggaatttcaaatgattcctgagtaaagaaaaacagatcatcaaattaatataatatggttcaaccttaacactgatgttgctatctgcatggccttggaaaact

SEQ ID NO: 271339 - DNA, 367 bp, Glycine max
  unsure (1)..(367): unsure at all n locations
tcttgactncatctcattgaagcgcatgtgcacttgtaactcccaagtatcaaacctttcaccaacaaagggtttgaagaccatcgaacctatccaaaatcttttgaagaagcgaggaatcttctccaccatgtaaatgtccttcttcatcaacatgtcgagcaccctatttcacccaagagccatcatgctctntttgataaccaaaggatgcaatgacaacaacgcctattagaaaggatctcttgattggaacataaggttcacacacaagaggtatgttaaagtgttgaatgaagagggtgactacgtgtggatatggcaatggagcatttaatcgcaaagccttatgcatgcaatatcgaac

SEQ ID NO: 271340 - DNA, 424 bp, Glycine max
  unsure (1)..(424): unsure at all n locations
ntgacttanntttaatttgttccaaaccatcaattatcaatgtttctttcaacaatgccttatttatgaatttaaccttgtctaatactagttccctgagtttgatactcgaattcatccattttaatttaaatacttgacgatccggtgcacttttcggcgaatcgtatttcccttgaacatatttgtataaagaaaaattggaccaaagcgtaactgcaggggaaatccaacaaagtatttatggcgccgttgccggggaactagattcattataagagtttagttcacttttacagcattgctttatatttctctctttgattcgttgattctttttgttcatattttanttactatacattcattgttcttttgaactggatacttgcgggtctatnttattgtatgcaaagaagatcta

SEQ ID NO: 271341 - DNA, 494 bp, Glycine max
  unsure (1)..(494): unsure at all n locations
ttgaacccttcggagnccccgngatttaaccatgancccctgagagactcaagncaccagatgcacgcagcagacttgtcgctcgtcanaaacaactattctttaatgatacctttagtggagccatattgaccgcgtatgaatggatacccccaattgcctcaagtgcttagagagttcacttgcctgggaaaattttctaaaaaaaaaaactccagttaaaaggattatgcaaccagattaatacttccaaataaaagaatgttttgtaaagacatcttcagacaatttaaatattttcatttgactatattaggataaataacctctaacccctatatttnttaaaactttactctttttaatttccttctgaggacgctcggcatttaccaccctggaatcaaaatgaattcgttactccatcattttggactccgccatcccttatccaccatcctcaanctttctcttatttctcatctcccccatcc

SEQ ID NO: 271342 - DNA, 99 bp, Glycine max
ttctggaggattcttctggagggcccaagtgggcctgattgctatttgcacccccatttttactaagtatacccctgccttatttttggcgataacttt

SEQ ID NO: 271343 - DNA, 435 bp, Glycine max
  unsure (1)..(435): unsure at all n locations
gctcaggttgctgcatggaanggctaatgtcttttggtggtcagcagangagcacaagccacaaacccttacaacaggtacatatttctgatttaaggccagctgggttaccaaattaaccaatgcatccagtttgccttcaggcttcttagtctcagatgatgcagctgagtttgtagctacctcatgcactcctctaatgactatggcatcatttctggcgctaaactgctgagagttggaagccatcttctcaattaaatttctggcttcagcatgagtcatgtctccaagggctccaccactggcagcatctatcatacttctctccatattactgagtccttcataaaaatattggagaagaagctgctccgaaatctgatggtgagggcaactggcacatagttttttaaatcgcttccagtactcata

SEQ ID NO: 271344 - DNA, 225 bp, Glycine max
  unsure (1)..(225): unsure at all n locations
agctntacattatatttttagtaaggaccatttatcctagaattaaaataacttatggccattaaacttgggaattaaaaaaaacttattggctgagggtaactgaaattgtggcaaccaaaagttacccccaccagccaccaagtaagccaccttttgggttcccaaaaggctgatgcctaggtggccaattgggcccttattacaagtggaactaaacctaat

SEQ ID NO: 271345 - DNA, 77 bp, Glycine max
  unsure (1)..(77): unsure at all n locations
tgcacgcttgtagaacggctagacatgatacatgttatggttnggtttggttcaaggataaaaggtttgccccacat

SEQ ID NO: 271346 - DNA, 380 bp, Glycine max
  unsure (1)..(380): unsure at all n locations
ctaagcttanaagcatagcctcataagaattggatagaagactccattaagattgcgctatagatgcaagagaagaccctagggttctcatgtgccttacggtagatcttgcgtccatgggctaagtatgagcccacttatctttgtacatattaaattaacgtttcattatttttgggccttgtatttacggctccatagtgtacggagggtaccctactattgtacgatttttcaacccttgtattttaaaacacctaaactagtttttgtattaagggtagttttataatttcatatgcattaagcgtactatttgatgtgtgatgggagataaatttaattgaattgcgagaagcccactcaaattacattttgga

SEQ ID NO: 271347 - DNA, 429 bp, Glycine max
  unsure (1)..(429): unsure at all n locations
tgccgcatgcaagcttctggtgggacatcttgactngctttcttatctgacattcaccacagattcttgccttcttctattttcaagatgggaatgcctctaacagcacctttgtcaatgatattcttcatgcctcttaagtgcagatgtccaaatctttgatgccatattctgacttcatcttctctggagaatagacatgtggaggagtaactggtttcttgaggtgtccatangtaacagttgtcctttgatctactgcccttcattaggacttcactcttctcatttgtcaccaagcattctgactttgtgaagtttacattgaatccttcatcacacagctgactgatgctgatcaagtttgcagtcagtccctacaacagcagtactttgtccaactatgaaatcatcatggactatgctttc

SEQ ID NO: 271348 - DNA, 101 bp, Glycine max
  unsure (1)..(101): unsure at all n locations
tgcaactacaatgggaaactccattcagagctttctacatttaatattgaacttaagagtgtanagaaagagaaagttgtactggagacccttaccatgtt

SEQ ID NO: 271349 - DNA, 443 bp, Glycine max
  unsure (1)..(443): unsure at all n locations
agcttaggaaaatgatttctatacaaaagtttgtcgtataaagtgactaacatgtacatttctcacgacttaacaattgttctaaaataattntaacacatcgcgccccaaagtgattgaacttgtcgggttcccaaagtggatccccatcatgatactcattgcgcctcatagtgattaaactcgttgggtttccatagtggatcacatcacaatacttatcgcacattaactcatcacccttaaagggtcttacagtcatttgattgtatgggtcatagctcacaactcaatgcacacaacatctcaatacacatgtgtcttacaatttaacacatagtcaatttatcacttacacacaatctcaatcacaaaggaagaattacaatacaataaaaattccagaataaacctcaatttgatcctctaacgatgcatacaca

SEQ ID NO: 271350 - DNA, 380 bp, Glycine max
tctcgctctaatgaatggggagcctgcggaaaatggagagaataacaaggagggaggaaattaaaatgcacagcggaaattaatagagtagggaagaaggagacaaacacacaagagtttttatactggttcggcaacaacccgtgcctacatccagtccccaagcgacctgcggtccttgagatttcttttccaaccttgtaaaaatcctttacaagcaaagattcacaagggatgtacccttccttgttctctttgaacaacctagtggacgtaccctccactagaactgatccacaagagatgtagcctctcttgttctcagtccaaccccagtagatgtaccctctactcgcccacagaggatgtaccctccaatg

SEQ ID NO: 271351 - DNA, 372 bp, Glycine max
tgaaatgaacaacgagctctcgagaatcattggttatttttgtcacacggaagtccgattcaggcgcataatataccgagacgctcaaaattgaacaacggaagctctcgagaaattcaaatggtcataatttgtcacacggaagtccgattcaggcgcataatatatcgagacgctcgaaattgaacaacggaggctctcgagaaattcaaatggtcataacttttgaaacggaagttcaattcaggcgcataatatgtcgagaagcatgaaattgaacaacagaagctctcgagaaattcaaatggtcataacttgtcacacgaaagttcgattcacacgcataatatactgagacgctcgaaattgaac

SEQ ID NO: 271352 - DNA, 123 bp, Glycine max
gatccttaagtcgactgcagcatgcaagcttgatagattgatgggacccggcgttatagatttgatgatatgggctacgtgggagtacgtgagctcagttggaggtgggcaacacgggatggt

SEQ ID NO: 271353 - DNA, 348 bp, Glycine max
  unsure (1)..(348): unsure at all n locations
tgcttgtggagcttctatggaggctggatctttgagcttttatggtgtcctttaatggcgattntccaccatggagatgcagcggaagacaaacgaaaataggtgagaggaggcgccatccattaatgaataagccatggcagaaggagcttcaccaccaagatgagccttggataagaagcttggagaagatgcttccatggaggaaaagaaagagggagagaaagagagaggggggagcaccaaattgaatgaataaaagaggtatanaantggaactttgaagtatgtctcacaagactctcattcatcaaagttacaacaagtgttacacatgcttctatttat

SEQ ID NO: 271354 - DNA, 295 bp, Glycine max
atattgcccgacaagaatgaatctgagtggccatctggctttgaagaatttatgtgctctttttttcattgaacgagaaatgcttcttctccctttttacttcttttcgatctttgatcgggaatccttctttgctttctcctgtgctttggtgtattcacaattttcttttatccttccttccatttcatccttgtgtgtgttttcacttttccttctccatccctttctttgggaaatcggggttagcagtcgatttgctctcccttgaggagaatccgctgtcctttgcttt

SEQ ID NO: 271355 - DNA, 216 bp, Glycine max
  unsure (1)..(216): unsure at all n locations
ntacgagaagttgcatgagaaaagacaacagcctctatgttgttgttattatagacattgnatatgacaaagtcccttgcaaattggctatgcttgaagcaacaactgtacaccttcatgatgacagagtctanaatagccactaaacaattggctgacttcaacaagattcttgatgatttggaaaatattgaagtaaagcttggagaggaggat

SEQ ID NO: 271356 - DNA, 274 bp, Glycine max
agctagttattatcccacctcctatactgaattacactagttattcttctgatctctatatgggaggcttgttgcttgatgaaagcctgcccttcaatatatctacacaaaacacggccatgttggttaattgctcttataatatcctctcagctccattgaattgtttttcaaatagtatttgcaggccatttgaagaaaatgtggaagaaagaactgggtgtatggacaccctttggtgccattacttaaaggactcagccatgaattccca

SEQ ID NO: 271357 - DNA, 417 bp, Glycine max
cttgatctagggggtcatcagattgctcgaagagtttggttagattactatgcccaggtctctctctctctctgcccttaacatagttttctggctagtggtataatatttctgaagttttggtttttaactgaccaaatgatgtcatgtgatctatgtagccaacctcacctagtgggatggggctttgttgttgtataggtttgcggcgagtgtagattcagagagagattatcttaaccatgcattgtatgagaacatatgattggatgccactaggcattctctaaatatattaacatcttagtcttgctccgcaaatacaatttttttccctctcttgtttacatgggtagacatgacttggtctttaactgacccaaacagtgttgtgtgattcatgtggctgaccttgca

SEQ ID NO: 271358 - DNA, 312 bp, Glycine max
  unsure (1)..(312): unsure at all n locations
agcttgttaaccctaanataaattctatgttttatgttgccctcaattncgaggcacgattaattagtctaagtgctgattactcaaaattgagtaccaaaaccatcaaactttaatttatttatagattcactcattcaaaagtgattacacaatctcaaagttcaatttagctttacaattccctaactctatatgatggttggcttgaaaattctggtacaaanttgtgttagaagaacaatacaaaaactataaataatttgtgttggggaaaataaatgatagttctcactgcaaagtttatgcata

SEQ ID NO: 271359 - DNA, 457 bp, Glycine max
  unsure (1)..(457): unsure at all n locations
tccaataaccaaggtagtggagagaatgaagaattcaattatattgagaaacagaaagaggaagcatctaatgctgcgcgtcggaggccaacgcgagaaacttgaaatggttgaatctttattttaaagtggcgccctgtttagtatcatcatcaccacagataaattttgggcttagtttcattataggtgcactctgttttcagtattttcttttttcttccttttaagaaaaggaaaagattatttgcttcaagggtgtagatcttctcctgtttttggagactcgagtgtttgagctagttgaagttgtacaattatttttctattaatggattctgtttttaacgcagattaatgcctagctacctttncataattaatcgaaaatccctattctaatacctactataatgcaatagaataatgantaattttcgccatttttattactgcg

SEQ ID NO: 271360 - DNA, 428 bp, Glycine max
  unsure (1)..(428): unsure at all n locations
agctntatatataaattaaaaaattattaattatccacaagtttagaacaatataattacatttgtgtaatttatctttttcttatataattgatattatctcttcttttactttatagagatgtcaaaaaacttaataaattaaaagtggacaactaataataattagtgtctttctcaattgaggaggggtcaaaatactctntccaataactatctatgtatcaatctcagtgtgtgttaattttattaatcaaatcgctgaattaaaagtttttattaaataaatgaggtttataattactccgttaaataattaaatttaatgtataatgtatttcttaaaaaagataagttaaagttgattatagaactacataaatacaaatgttgaatttatttaaattggaatgtatacgattgttgag

SEQ ID NO: 271361 - DNA, 125 bp, Glycine max
tttctcattctttatagggaagtggcaaggactggctatattaccttgcttcaaggtccatcactagctgagatgacctccagaaagtattcttagaaaacatattccctacttgcaggaccatg

SEQ ID NO: 271362 - DNA, 481 bp, Glycine max
  unsure (1)..(481): unsure at all n locations
aggacnnnnggcggcgatcatattcgtcacttaatctaagctgacactcgagattggcttgcgttgacgacacagcttcttcttcngtttatctcccgcaataacgaaccaacctggatgatggtcgcaaagcgctacttaacgaacctaatatgtattctaacacaaatccatgcggggtactgtacaataaacctatgcctccgttgccaaacgctgtgtgggaagacactgatcgaatcaccgacgcacgacgtcacaagcgctctacgacacttattggtgacactacctatctcagcatattttgaactgttgtcgatggctctatttacagtggagatactctctgtagtctacatcctgagatgctgaattgtattatttttaaaacagccaatgtgattttttctggaggatataaactccccactgatatgtatatttaattaccaacaatacttattcgtatattctccgc

SEQ ID NO: 271363 - DNA, 235 bp, Glycine max
aacgcctctatttcaacacccgtgcagcctattgcacccacccagagggaaactccccaagttccaactccgaacgcgactcgaccggccggtaattccaacgcgacaaggaacttccctccgaggccgttgccggaattcaccccgctcccaatgacgtacaaagatcttctaccatccctcatcgccaatcatttggccgtggtaactcccggaaggggcctcgaaccccctt

SEQ ID NO: 271364 - DNA, 341 bp, Glycine max
  unsure (1)..(341): unsure at all n locations
nttcgattcattctatgtacccgtagtggtccacattgtgtttcgtgcatttctattctcngtttgtttactctttatancccctgttgacatgcttaagccattttgcttaagtcatttctcgcttaacttaaaaataaaataaatttccaccgaacatttgaattgtattatccgctaacttcggttaaaatcaattccgaccgttcggtcgtgccgtaaccacgttggaaatcaaaaagaggttaaaaataatataataatcaaaaaatattctttttagtaaaataaagccgaaaatcaatcggacngtttctctttgcgatttctcattcttaatc

SEQ ID NO: 271365 - DNA, 442 bp, Glycine max
  unsure (1)..(442): unsure at all n locations
gcttccagcagtattagtcactggacttgttctangtacagaaatattcttgcaagacctaaanggtgcacccgcctgccaaagtgcagtaataatgtcatcgtcattactagaattntctntcatcaaactgtgcatgtagaggccattccaaaatagaaattcatccactccaagtattcatccatttcatataaatataacacaagtacacaactaaacaaccaaaagatgaatatgcaagatgactatatggatcttaatcaactttggcctaaatattgtgctacatgatttcatataaattgccattcagtggaaacatgcagttaacaacaaatggttgagaaaaattagtcaagagaaaggacatggngatgctacatctagtgtaaatcaatntggtntaatctcatgttgactnttataaacccataattag

SEQ ID NO: 271366 - DNA, 314 bp, Glycine max
  unsure (1)..(314): unsure at all n locations
gtggaagagtcagtcttcctactnttgtttgttgaccttagagtnggacctggagatatgtcgcaggggtcatgagaccttgcggatgtcacgtggcgtgctattgcccaaaaccaagcttgaccaatcccgacccaactcgggcatagtcagtcagtgagaacctgtgacgtacctaaacaggcgagctcctagcagtcaaccaataaaagaacaaagaccacataacaaggaggcttgtgtggtggctggccagctatgaatcttgagtggtatctggaatttcgcctctggtaatcgattaccaatgatgt

SEQ ID NO: 271367 - DNA, 456 bp, Glycine max
  unsure (1)..(456): unsure at all n locations
catgcaagctaggagaggatgcttcaatggaggaaattaaagagggagagaaagagagatgggggagcacgaaattgaaggaataaaagagggagagaagtggaactttgaagtatgtctcataagactctcattcatcaaagttacaacaagtgttacacatgcttctatttatagactaggtagcttccttgagaagctttcttgagaaaacttccttgagaagcttctttgagaaaacttccttgagaagctagagcttagctacacacacccctctcataactaagctcacctccttgagaagcttccttaagaagattcctaaagaagctagagcttagctacacatacctctctaatagctaagctcacctccttgagatgagaagctagagcttagctacacacccnctataatagctaagctcacccccatgacaaanaacatgaaaa

SEQ ID NO: 271368 - DNA, 430 bp, Glycine max
  unsure (1)..(430): unsure at all n locations
ggtgtcgagaagaaatcacatgtttgtcatcatcataaatgttgagaatgtgaatgtatgtatacatgattgtgatgatgtcaaagaagaatctaacaaggctgcttcaaatgataagcatttgcttcaagaataattcaagattgctttaacaaacaaagccttgtttcaagattcactaaagaccaagccttgccttaaaacaaagtgctttcaagacatgcaaggctctggtaatcgattaccangaagtgtaatctattacccgaacacagggttgagaaatagctgttgaaaaatgtcttgaatttgaattttcaacatgtaatcnattaccatatgtctgtaatcgattaccaccaacgaaactttggaaactcaaattcaaaagtcataaccctccaaattataactgtgtcatcgattacac

SEQ ID NO: 271369 - DNA, 429 bp, Glycine max
  unsure (1)..(429): unsure at all n locations
tacagtcacctgcggcatgcaagcttcaagtgttagaatcccatatttctgatctatttanaagntggggctgtggtggaattgtggcaactgctagcatattttgtaaatgtatttgttggttcatcaatctttgtaaatgtaaaggggtagctatataaagtatatgtactcctaaaagggtttcaataaaagttctagcttcagaataccatagtttgagatgctaatgcaacctaagcagtacttttgtaatgctataattntcctaattgtgtggttaagtgattaattcaagatgcaaaggaaataaaatttaaaattatgttattcgattatgttaattagttaaatttttatgtttattaagtttgatgtgctttagtggatttaagcaaggccgggccttattttgggattatgaacatg

SEQ ID NO: 271370 - DNA, 438 bp, Glycine max
  unsure (1)..(438): unsure at all n locations
catctactcgacgagaaagaacatgtgattagaacgttgtttgattatgtttgtcanntcgacacatcgattgtgaaggaatgcattgaccgtatcccggtgagagtgtgaacctagaattttgagagaaatgactatcatatagtactgatttttgcatgaatctctgaagtatggactgaatgcatgaaattaacgatgatgaagaccatgtttgattgtgataaccactacagccaaaaagttgaccatgtgcttgaatgatttatcccttgcacccactttgtactgaatgaaacaattgattgaagcattccatgatattcactgcgtatgagtgaatttctctgtgaagcaaacactattcggatcgaccactgcattttgtcactcgaggacaagagacatgttctttctttgtttgaggactagcaaaac

SEQ ID NO: 271371 - DNA, 417 bp, Glycine max
  unsure (1)..(417): unsure at all n locations
ctgcagcttgtatattgaactcnaacatgaggtaattaaataataataataaaattagccggaattttttaaaattcttttagtaatatttttcaatcaaaattaaattacgaacaccttaccgtaataccgtaattttttaagttcttttaacaatattttaaaattggagtttcacttatgtaattcatgtaaaaaaattattatttgaacatataagtcaaattttaattagaaaatcatccaaaaaaataaacaaactaggaaactagcacataagtttcgtgactttgtctaataaaaatatatatatctaacatataaatttaattttaaaaactacatatctaagttttgccactgtctctttccaaaaaanaaaaaaaaatggggacttttgtcactgtaaataaaaca

SEQ ID NO: 271372 - DNA, 434 bp, Glycine max
  unsure (1)..(434): unsure at all n locations
cctcatcgagactccgcgtgatgggaacgccacttctgtttctctcacatgccatgaaggctgtccctaataacgggtgggagagcatccactacactntccccgaagactgtctttcttttgtgtattaccgacagagtacggaacataggaacccgctggagcacaggattcggcattggagcaagcgctgggcgtgccggagaccaacgcggcgacgacatgcatatttcaagaatttnacgcgaaagcttacgaccaacaaanacnntttctananaaaaatacctgaccatcaccgcgcgctatctcttgcgattctcattcctcaccaatcatcataccaacggacactcatgntataccaatcaccttccccctccccccacaaacctctnaccttcaccccatcttccctacccaaggcctcctcc

SEQ ID NO: 271373 - DNA, 277 bp, Glycine max
  unsure (1)..(277): unsure at all n locations
agcttagaattgcatttgggcactcatctcttattctttatgctgnccctatatatataaaacagccncacaatcccaatcttacacaaccatgttcatatgtcattgaggcattccaccgagcacttgctgggcgcatgtttaggcatgaatagcaagagagtgggggcaatgtggcatgccctattgcttcaggatgcaacataggcctaaggccattccttacaacaacgcatttcacacaaatcaagcatgaaaacaacccaaaattgcccca

SEQ ID NO: 271374 - DNA, 433 bp, Glycine max
  unsure (1)..(433): unsure at all n locations
tctaagcttgcttgtggggcttctatggaggctggatctttgatctttttggtgtcctttaatggcgattatccaccatggagatgcagtggaagacaaacgagaagaggtgagaggaggcgccatccactacggaataagccatggaagaaggagcttcaccaccaagatgagccttggataagaagcttggagaggatgcttcaatggaggaaaagaaagagggagagaaagagagaggggggagcacnaaattgaaggaagaaacaaggagagaagttgaactttgagttgtgtctcacaagactctcattcatcacagttacaacaagtgttacacatgcttctatttatagactangtagctttcctgagaagctctcttaacanaacttccttgagaagcttctttgagaaaactttcttgagatgc

SEQ ID NO: 271375 - DNA, 395 bp, Glycine max
  unsure (1)..(395): unsure at all n locations
agctnntntttattcattctatgtacccatggtggtccacattgtgttntgtatatntctattctcggttcatttactttttagaccccctcttgacgtgcttaagccattntacttaagtcatttctcgcttaacctaaaaataaaataaatttccaccgatcgtttgaattgtattatccgtatacttcggttaaaatgaattccgaccgttcggtcgtgccgcaaccacgttggaaatcaaaaaagaggttaaaaataatataataatcaaaaaaatatcttttagtaaaataaagcggaaaatcaatcggacgtttttctctttgggatttctcattcttaatcgaattgactaataaccaagatgaaactaagggctaaatcaactcgcc

SEQ ID NO: 271376 - DNA, 458 bp, Glycine max
ccttggacatacacacttgtaaaaattactgagaattggttactttgaattctcgagctgaaagttttactgaattttctagacatctgaaaaaaagttataaaaaaagaaccaggtggtttggataaaaggaaaaaataataaaaatcacacaagttggcagaaaaatcagtatccaaaaaaaaaaagagtgaaagggaagtgtgcttgttgttttggctgaaaatttattctataattgctgcctatgttataccaatcttagttccgaaatttcaatagaaaattagtttgaaaacaagtgccaaagctagaggtttgttgagtcttttttttatagttttttttactctactctagagccattctaagtttctctttgagtcctagcttgcttctatgtccttttcatttctttaattgttgaataatccttgacaaatggtcttgttaaaact

SEQ ID NO: 271377 - DNA, 418 bp, Glycine max
  unsure (1)..(418): unsure at all n locations
agcttgatgtgagaaagcgtggaagagtcagtcttcctacttttatttgttgaccatagagtggtacctggagatatgtcacggnggtcaggagaccttggggacgtcaggtggggtgctattgcccaaaaccaagcttggccaatcctgacccaacccgggcatagtcagccagtgagaacctgtgacgtacctaaacaggcaagctcctggcagtcaaccaataaaagaacaaaagtccatgaagcaaggaggcttgtgtggcggctggccagctatttatcttgggtgttatctgaaaaataccctctagtaatcgattaccattcatgggtaatcgattacagggtttaaaaattgaaacaggatgttaagtagcttctggtaatcgattaccaattctgtgtaatcgattaca

SEQ ID NO: 271378 - DNA, 181 bp, Glycine max
  unsure (1)..(181): unsure at all n locations
tgaagtgtggccattnttntattattagggccctgatttctcagagttgttagtgtctcttcttttctctgtgttttggtttttgctttgtgacaggatttggtggagaaggaggaggacgacggtgccacaaaagttaccttatccagcgattattgaacttggccccagctttggacat

SEQ ID NO: 271379 - DNA, 395 bp, Glycine max
  unsure (1)..(395): unsure at all n locations
atgttatattatatatagataggtgtgttatgtggactagagtctgtgctcaccacccttgtattcctttctaggtgagagactcgggtactgaatcctgactctatccttgctgattagattacattataaattcaaattagattatgaccaagagtgcactgtgtgtacatggacttgagaaaatgttgacaccttaattcttattccgtcgacagaaataatctgagtcatagatttttttttgaaaatttactgtcgaccctatattatatatatgttnaatatcataaacatataccacttctacttgcgccttctcattgattaaaagaaagtaaaaatatatcatgtcgccacgactttcttgaaagttcggatataacatgttcaat

SEQ ID NO: 271380 - DNA, 247 bp, Glycine max
  unsure (1)..(247): unsure at all n locations
agcttcaacattcaatttcgagggtctcgatatattacgggactcaatcggacatccgagtaaaaatgtattgtcgcttgaatctgctcatagcttccgtattcaatntcaagcgtctcgatatattacaggactcaatcagacatccgagtaaaaagttattgtcgtttgaatttgctcagagcatcaagattctatttggagcgtggcgatatattatgggactcaattcgacattcgagaaaaa

SEQ ID NO: 271381 - DNA, 238 bp, Glycine max
  unsure (1)..(238): unsure at all n locations
tgaggatttaaacgacaataacttntactcggatgtttgattaagncccgcaatatatcgagacgctctaaattgaatgttgaagctctgaccaaattcacacgacgataaatttttactcggatgtctgattgagtcccgtaatatatcgagactctcgaaattcaatgttgaagatctaagcaaattcaaacgacaataactttttactccgatgtntcattgagtcccgtaatat

SEQ ID NO: 271382 - DNA, 295 bp, Glycine max
agctaagaggatgatggggacccggtgtgatagaaacgaggatatgggctacgtgggagtacgtgagctcagttggaggtgggcaacaggggatggtgggtttatgcgcgcattgtggatgtggaaaacttgttgtgcaccatcgcccgaccgccacctatgtccacatgtgatgggtaccccataatactacaagcttgagatgaggaagtgttgaatggtgaaactttctgcttttattggtgaccacagagtggattctggagatatgttgcaggggtctagatgcacacag

SEQ ID NO: 271383 - DNA, 328 bp, Glycine max
ggacacttagaaactacgcttacagcagatttagtaatgacccactaacctagaatttttataacttaatgccattaacctagggagataaaaaaaacttaatggctgagtgtaactgaaattgtggcaaccaaaagtcacccccaatagccaacaagtcatccaccatttggtctcccaaaaggctgatgcctaggttgccaattgggcccttattacaacttgaactaaacctaactaaagcccttttagttgattaacccaaaacatatttttggtcagccaactttacaagggatgggcaatatttagacagactaaacactct

SEQ ID NO: 271384 - DNA, 448 bp, Glycine max
  unsure (1)..(448): unsure at all n locations
agctngaagtgagacagcgtggaagagtcagtcttcctacttttgtttgttgaccacagagtggtacctggagatatgtcgcgggggtcatgagaccttggggacgtcaggtggggtgctattgcccaaaaccaagcttgaccaatctcgacccaacccgggcatagtcagtcagtgagaacctgtgatgtacctaaacaggcgagctcctggcagtcatccaataaaagaacaaagaccacaaagcaaggaggcttgtgtggtggttggccagctatggatcttgagtgatatctggaatctggcctctggtaatcgattatcaagggtgtgtaatcgattacaaggcttaaaaatggagacaggaagttaagatggcctctggtaatcgattaccaagaggtgtaatcgattacaaagcttagaaatggagacagaatgttgatgt

SEQ ID NO: 271385 - DNA, 63 bp, Glycine max
tcacattcactgtcttctacatcatattcttacttgtccacaataataataaagtcatctcga

SEQ ID NO: 271386 - DNA, 453 bp, Glycine max
cttataagaacaaaattgcctcaatcattttcaaatatgcatgtgaattatgaagcatctataataatcaagccaaggttattgcgcatgctatcaatggggaaaacacaccaaatgattatgatgatggatggctcaaattctcacaaaggtaaactcatcactttcaaattgagctttcaaaactatcatgacatgtagaggagaatcaaagatttcaagtcacaaaatgtcaaaaacttttattttcaaaacaattacccatttcttgaacatatcctataattcaaagaaaaacatgcaaagtcctacatgcacacagaattgacccaaaatattaaactagaaatccgacgaaactaacaacattaacaaattaccacaactaacatattaacaaaaccgacaaaactagcataaccaaagaaacacttcccccatacttaaacaaca

SEQ ID NO: 271387 - DNA, 317 bp, Glycine max
  unsure (1)..(317): unsure at all n locations
tagctcacccaggcgagtntggttgcttccaccataagcattccatcttcattaatgttctggaagggtctagatttaaaaattgctatttactcncccgttctttacctaatacactccttttgtgtttttctgtcgatttctttctgaaacgtcgcagaactttacggattcaatggtgatgggcgttaagctttctgaagtgatcgattgatgtccgtatgccaacaaacaattgtctccggaaaaaatctgggcttgatagtccgtttacaccctctctactttgctaaatacacccacatttacgtgttttt

SEQ ID NO: 271388 - DNA, 265 bp, Glycine max
catgcggatccgctaagcgagcctcattgagaaaccaaatgtctctctggcttgcttagcgcaaaggaccgcttagcaaaagtatcgaaaaattgcctaagtgagcgtaacaccagttacattcacacttaccagatttcggaaacttcggctctgcattctctctatccaaaaaatttgcacattttgcatttgtgctctctttttgcattatcaacttcgaagcaacaaccatacaccatacaagtaagttcctcgattcctt

SEQ ID NO: 271389 - DNA, 344 bp, Glycine max
  unsure (1)..(344): unsure at all n locations
agcttgacatgaggaagtgtggaagggtgagacttcctactcttattcgtttaccacagagtggtacctggagatatgtcgcggcggttacgagaccttgcggacgtcacgtggngtgctattgcccaaaaccaagcttgaccaatcccgacccaacccgggcatagtcagtcagtgagaacctgtgatgtacctaaacaggcgagctcctggcagtcaaccgagtaaagaacatagaccacaaagcaaacaggcttgtgtggtggctggccagctgtgaatcttgagtgatatctgtgatatggcctctggtaatcgattaccaacggtgggtaatctattac

SEQ ID NO: 271390 - DNA, 328 bp, Glycine max
aaaccaagaacgaaccgtgaatattgtataaccggtgaaaatattcgcattattacccaccgaaaccttactgagacgcccccgcttggattttctttacaggaaccattttcctcagccaatttaaaagaataagaagtggccagaagactggaccccttttctcttcactcctccttctatttatagcacaataagggaagagcttggcacccagctctcccaagcgagcaaaggtggttccttcaaaaaccaccgcctcttggaagaagaaactggaaaggccaagtgggcatgaatgctatttacacccccctttttactaaat

SEQ ID NO: 271391 - DNA, 471 bp, Glycine max
  unsure (1)..(471): unsure at all n locations
cgcgcccccgcggtttctgataccgtgatgacaccattgataacgagttaagctctttactctgctgcgtttcatagagacttgcccctggngcggaggccttgtggatggctcaccatgatctctggtgaatagatttctacggtgggtcctccattgactctgctggtgattatattcctagccacgttggaatcccaaaaaatcttctacattgaaattgttcctgggctaattatccatgttattgacttcatgagtggggggttcttcaatatgaatgcaccatctagattcatgagacccttcacaatggtacattctaaacctgcaaacaaaacatgtgaagttgtgcaaatgaattgagttggcacatagtgattcatcaaggttcaattgctacacaacacttttttgtgccacaagcatattggacgccactcacataaagttttgtgggatgtaacctac

SEQ ID NO: 271392 - DNA, 296 bp, Glycine max
ccccttggtaatcgattaccagagaccatcttaacctcctgtcttcatttttaagccttgtgatcgattacccacccttggtaatcgattaccagaagccatactccacatatcacacaaaatccatagctggccagccaccacaagcctccttgctttgtggtctttgatccttttatctgttgactgccaggagctcgcctgcttaggtacatcacaagttctcactgaccgactatgcccgggttgggtcgggattggtcaagcttggttttgggcaatatcaccccacctga

SEQ ID NO: 271393 - DNA, 353 bp, Glycine max
agcttggatagcaaagcagcttcagaagagtttatcttgtctcccttcataatgagttccacaggggtgataatttccacagtacccttattaatcttggtagggatgtcaagcacctgaaattaaatatgaacaccatatatattatcaacgggtaattccaattaagttcttaattcgttccatgaacaagaatgcagaaattaacctgaaagatagagagctgagagggatccagctctgtgttgcctgtgggaacaacaacatcaataggtgcaactaaacctacacgagcatgagctgtcacctataacaacatttataagtgagtatgttaactggcataaagggtg

SEQ ID NO: 271394 - DNA, 471 bp, Glycine max
  unsure (1)..(471): unsure at all n locations
gagcccccgcgccctgatgtgcttgcatacggaccttagaacactaaccttatataaacccctccattcttgaaacataggctttgaattttttgaccaaaccgaaggagaccttgaggctggatgtctnnctctaactactcctttcggggaatgcccgcagggaaatttcataatctaccacaaccccataatccgagcaactctactgatccaagtcccataattaaacccctaacactatgtgtgctagcctacacacaaatcatgattcagtccacaaccacttttgtccctgaagtatatccccttgtacattatngctgaactaacgaaaacctcaatgagtctatcagtccagtgttcatctaatcctaaattaaccactactgtattttgtcttaacatacgtcanactataactaataaacatttttttttcatttgactcaggatgcacgattactcacn

SEQ ID NO: 271395 - DNA, 430 bp, Glycine max
agcttgtatcgccattggcatcagcggtacacttgtatcgccattggcagcagcggaaccaaagctgactcactgcgcccatgccgctattcagactggcgagacatgctgactcactgcatgtcgccattggtactggcgtgactgcccacgttggcatgtcccgccattggcgcctgcggaacacgtaggggatggcatagcatgtgggtttgcagtgtttcaatctgaaaaaagatgggtaggcttgcagggggttgcagtgtgcagtctgaaaaagatgggtaggggtaggcttagggtttgcagaaaacgttgcatgtgaacgttaaaaatttgaacgttgggtaagttttcagctataaaaaaaatgcttgaaccttatttacgcttgcatttctccttactgagtttctggttcttcttgagt

SEQ ID NO: 271396 - DNA, 398 bp, Glycine max
taatattcaaatgaatcaaattgaaaaaattcacacacattacatttatttatagcctaagtgtcacacacatgaatttctattcaaatttcacttgaatttgaaattgaatttgtggagccaaaattcactaatcatgattagtcaattttggctatggttcagcccactaatccaagatcaagtccaagattcttcactaagtgtgcttacgtgtcatgaggcatgtaaagcatgaaggacgtgcacaaagtgtgactatatgatgtggcaatggggtgtagcaaacaaattctcacctccccctctaaaatataattggattgggcttctcccaattaattaaacttatttctcaacacacacatcacatattcacttagtgcatgtgaaattac

SEQ ID NO: 271397 - DNA, 280 bp, Glycine max
  unsure (1)..(280): unsure at all n locations
agctntatcttctttacgaatcttctcaaagtaacttcttcttgaggagagcctaattattagaggggtgtgtgtagctaagctctagcttctcaaggaagatttctcaaagaatctgttcaaggaagcttcttaagaaagcttctcaaggaagctacctagtctattaatataaccatccgtaatacttgatggaactttgatgaatgaaagtcttatgagacacacttcagagtgtcactcctctccctctatcattccttcaatttcgcgctccccc

SEQ ID NO: 271398 - DNA, 396 bp, Glycine max
aaacacttgtgcttgagtgaaacagtagccgtgatactgtggtttaagctactttccttgatatctgtcttatgcctaacttcatctatctattcaggttacattatattcttctctttgaataattgcataccttgtgaaaaacaagtgatgagggcattttactccattctcttatcatgcaatcagtagctatgtagcatacacctttgtacatagtcactgcatgtcattgtcacttgaggacaagtgagttgttctctttttgtttgaggacaagcaaaactgtaaatttaagggagttgttaatcggtgaaaacgactaacttatgtgtataaaacatgtataaattgtatcaaactcgtccaacttatggctattttgtcatgctataa

SEQ ID NO: 271399 - DNA, 423 bp, Glycine max
  unsure (1)..(423): unsure at all n locations
tttcntaacctcattgcctctcacagtctttatatntggcagccaatccaatccttgtgtccggactctcagccacttatgatagccgccgatgctcccattactgtttcccctaagctctctatcctttcttcacaccgcatcacatgccttgtgaactccttagagtaccctcgcattggggtcactgaaaccccgcgtgatgaaaggcgtgatgctttcgtctgatggcactcctctcatggggtagccaagctgtcttatggcgaggacgggattataattaatacaaccccttgttccatcaagggaacatttggacatccttcgcatgaagatagaatcctgattcttccttccttctagcgagggaaccaattaacagacgccactccatgctagccaagagttggtcccaattcg

SEQ ID NO: 271400 - DNA, 455 bp, Glycine max
ctctttggaccttgaacaagcaattaactcctctctcagaaccatgctatgggctcgcgactggtctgtttcttccctccgcaacttgagttcactattgctaccccatagagctccgcgaaatttgttccggccatactcttccttgcgagccctcttggtctcttgttcgagggctcttgcagtaattgcattctcttcccgtaacccggcacactccttccgaacgtgtgtagcggccaacttgaacttctccttggcaagttttgcctctcctaactcgcttttgagagcttggacttcttcgtcctcttccggtgcttcaaaactctcttcgctgacgacttttaacttggcgagccaatctaaacctcgtatatgaactttcagccattcgtgggtacccacaatgatgccattacgaatgcctctaagctcttgatctcttcttaacg

SEQ ID NO: 271401 - DNA, 425 bp, Glycine max
  unsure (1)..(425): unsure at all n locations
agcttgtcaagcagtgtggcttgatacttttatacatgaactgaagatcaaagaagaaggtccagctgagctatatgtagataacaaatatgccatcaagttagccaaacatccaattgcacatggaagatcaaagcacattgaaaccaaatttcatttcataagagaccaagttgcgaacgggaaattcaagttgaagttctgcagatcaaaagatcagctggccgatatatttaccaagtccttgaaatctgaaaccttcaaaaaacagagaagcatgctgaatattgttgatagcacgaaactagcttaaggaggtgtgttaaaatttaagaataaataagctaggtattgaatgatatagatattgccacgtgtaataagtactctcctatatgctgaaccatatngagtattaactatgt

SEQ ID NO: 271402 - DNA, 444 bp, Glycine max
  unsure (1)..(444): unsure at all n locations
tagctntttaggaatcttcttaaggaagcttctcaatgatgtgagcttagttatgagaggggtatgtgtagctaagctctagcttctcaaggaagttatctcaaagaagcttctcaaggaagttttctcaagaaagcttctaaaggaagttacctagtctataaatagaagcatgtgtaacacttattgtaactttgatgaatgagagtcttgtgagacatacttcaaagttccacttctctccctcttttattccttcaatttcgtgctcctcccctctctctttctctccctctttcttttcctccattgaagcattctctccaagcttcttatccaaggctcatcttggtggtgaagctccttcttccatggcttattccttagaggatggcgcctcctctcacctcttctcctttgtctttcgctgcatctccatggtgg

SEQ ID NO: 271403 - DNA, 400 bp, Glycine max
  unsure (1)..(400): unsure at all n locations
tgcaagcttaaacattcaatttcgagcgtttcgttttattacgagactcaatcagacatncgagtaanaagttattgtcgtatgaaatggcttaaagcttaaacattcaactttgaccgtcttgatataatacgggactcaattagacatccgagtaaaaagttattgtcgtttgagttggctcagaggttcaacattcaatttcgagcgtgccgatatattacggcactgaatcagacatccgagtaaaacgttattgtcgttgaataggcttagagcttcaacattcaatttcgagcgcgtcgatatattacgagactcaatcggacatccgagtaaaacgttattgtctgttgaattggctcataagttaaacattcaattttcagctgttcgatat

SEQ ID NO: 271404 - DNA, 89 bp, Glycine max
  unsure (1)..(89): unsure at all n locations
tgacgcaattctaacgacaataactttntactcggatgtttgattgatttagaatatatcgacacgctcgagattgaatgttgaatctc

SEQ ID NO: 271405 - DNA, 433 bp, Glycine max
  unsure (1)..(433): unsure at all n locations
agctaggctagcacacttggacttgtatatattatcacacgtgaganatggtctattattattacatatgnaaagtccaacttatcgaagaaaaccacacattcttggagaatcggcttgcttaatttgaaactgatagtgctggcattcacatatagagaaagccgatcacacgtatttaattagcgtggtccacaacctaaattttgtttgacattcgatgttatgataaatatatgcatgtgtgcctgcaatgtaaaagctccttagcattctcatccattctccttttcatttcacttaagtcaagaactgtgacatgaatgcaccttgcccaaggcaaactcagatccacattaagggaaagcgatacatcatgtgaaagccacttataggctaatgttatagaaagtagggctggttttcttaattt

SEQ ID NO: 271406 - DNA, 220 bp, Glycine max
tgatgcatccctaccataaatactgtcagaatattgctcttcgattaattcaagacaaatggctgacgtcttgacgttttctttgatcacatgtcttgttaatgatcccacccctcttataaataaataaaaaatacataatgatgacattgatacgatacaagtacatccctgacctaatatatatcaaaagtgacttatctgacagccgccataaacc

SEQ ID NO: 271407 - DNA, 232 bp, Glycine max
tgcgggtctgggagacgaaggtcaagtgttcgcgatatgtgaagatgatgttccaagtacttcggatgtggtccgaccatgccctcctgatttccagctgggaaattggcgagtggaggaacgccccggcatttacgcaacaggcataatgtaaaccttaacggttttaaaagctctattagtggccctgggctttaaagtttcaatttggttaaggcttggggtctttggt

SEQ ID NO: 271408 - DNA, 256 bp, Glycine max
  unsure (1)..(256): unsure at all n locations
aacaatataattagaatcatcttagttttttagaagaagagcttatgcttgaatatngataacatgtactgcaatcataaatactttggaacttaagtgctctgtgtgatgaaataatacacaatgctatcaatattcaaaaagatgaaaactctttattgaagagtaatggatacaattttgaaaagtgaacaatagatttggaaattattgataccattttacattgatattgtttccatcaaatataatattg

SEQ ID NO: 271409 - DNA, 455 bp, Glycine max
  unsure (1)..(455): unsure at all n locations
agcttatcctacacttaaatgctataagtgttatcaacccggtcacataaattctaactgcccctcaaatgagtcatggcccgagaagaatgagaagaaaagctataaagaaagaagatccaagaaggcgtatattgcttgggatgacaatgactcatctgatggtttggagaaagagatcaaccttctatccaaggactatgaaagtgatgagaacatctctcaagaagtttaagcaagaaaaacaaaagtctgacttccatctttaaagatctaagcacttgaatcatgaaaaggtaacatcaaaaccattatcttttaaattaagttggttgaaatttttctttcatttaacttggttatatgatgactagcaaaattntatttgtttgtcttttttgattgctataatgagtttgtgctcatatgtttagttgagttatcttcctttctca

SEQ ID NO: 271410 - DNA, 465 bp, Glycine max
  unsure (1)..(465): unsure at all n locations
acagacctacaattctcacacctgttgaggttaccactctcgacaccggacaatgcttgtccatactcaagggctcgacaaacttgtcacccctctacttgtcaccaccctggacatcagacaatcttcaaaaatgaacaaccttttttgcttgtaagccagctcaaagcttggggggcttatgtactgtccagggtctataaaatgcatgtggcactcagaaacacatgttaaccctccatgttagtcttggaataggagcacagatgtctagtccttagtagccaggttccccaacaaacaagttatctctaacttcttaatatttgaatatatntttacctctttatctctcgaaagatattcaattatttacaaggccacacattatctataaggcataattctctactagcttttatctttaagttatgtattatctctaaaactatctataagctaccg

SEQ ID NO: 271411 - DNA, 429 bp, Glycine max
agcttgatgttattcaaaagagactatgtctttctaaatgaagactgaacatgcattggttatctaattgtattcattatgcgatataatttgttgtaagccattaaaggataattattaagtactcgttgcgttaagaaaaaaattagttggtgcaaccaaaatcaattacgcatgtacggtacatcgttgtcataattgacaacacataatgatatgcatgcgtattaaagtttgagcgtgacacgacgttgacttagtaggaaacataaacatgaaacatgttcacgcgtgttcttttgtaaaaaaaagtgaagcaatctgtcgatgagaaccatgtatatatatgagacacgacaaacgctaataaatcacacattatcttgctttcacatactctcccaattgatacacaaagtatggcatttt

SEQ ID NO: 271412 - DNA, 425 bp, Glycine max
  unsure (1)..(425): unsure at all n locations
catgctntggaacttccttgtagtccaattactctcactttaatgtgcatagctacgattactagtgttaaacctttgggtaaaacctatgctttaggtttaattgaagatcaaatcgaaatgaccgaagtagatatagactttagtgctaagtcttaaggagcttttatcgaaaaaatgcaaaagacactaaagaggtttttaacgaagaacacatagcaattttaatgtattgngtgtcctcacatcttctctccactcgttctcttcaaattcccatgtatagttacaacttggcctaagctcttcatttccaagaaaacttttgtcttagtaaattcctactagttttagtttaatggacgaagctatccaaaatatggacactcttggcaagatgaaacacatagtcggtcctttatgga

SEQ ID NO: 271413 - DNA, 373 bp, Glycine max
  unsure (1)..(373): unsure at all n locations
agctngcctcaaggagatctangaaggataaatcggctgaaggaaccagttccgctcccgaatatgacagccaccgttttaggagcgctgagcaccagcagcgcttcgaggtcatcaagggatggtcatttctccgggagcgacgcgtccagctcagggatgacgagtataccgacttccaggaggagatagttcgccggcgttgggcatcactggttacccccatggctaagttcgacccagacatagtcctcgaattttatgctaatgcttggcctacagaggagggcgtgcgagatatgcgatcctgggtgaggggtcagtggatcccgttcgatgcggatgctctcagccagttcttgggatacccttt

SEQ ID NO: 271414 - DNA, 388 bp, Glycine max
tggacttaccttgaataattcctttgatatgttctttttgagcctttgtttcctttccttgttgtgaagctcactacaagccttaagtgaaaaaccatgatatcaccatatccttaaagaattttggagctttggaattgttttgggaataagtgtggggggtttttgtttcattggacaacttgttttgttggctatgcttcatgatgtattctgggccatacttgatgtacattgtatattggttaaatgttggacatgctgaatgaaatgttgtttctcaaaagctatatggttctaacaaaaaaatcgaacaaaaaaacttcgaataatgaacaagaccacgcataaagttgagtgaataacatcttaaatggcacaacaatga

SEQ ID NO: 271415 - DNA, 386 bp, Glycine max
  unsure (1)..(386): unsure at all n locations
cgtctcgtattattacgggactcaatcagacttccgagtaaaaatttatggtcgctgggattgcttcnagattcaacattaaatttcaagcgtttcaaatattaccggactcattcagacttcctagtaaaaaagttttgtcgcttgaatttgcttagacctctcacaactaattttcgagcatttcgttttctgacgggactcaatcgactttccaggaaaaagttttgtcccttgaatgggttaaagcttacacattcatttcaccgcttcgtatttaacgggccccatttaacatccaaaaaaaagtttgtccttggattggttaaaagcttacattaatttaccgcgtttattttacagaactctcgactccggccataggt

SEQ ID NO: 271416 - DNA, 341 bp, Glycine max
  unsure (1)..(341): unsure at all n locations
gagccaattcaaacgacaataactntntactcggatgtttgattgagtccggtcatatatcgagacgctcgaaattgaatgttgaagctctgaaccaattcaaacgacaataactttttactcggatgtctgattgaggcccgtcatatatatagacactcgagattgaatgtggaagctctgtgcccattctcacgacactaactctttactctgatgtgtgatagagtcgcccgatatatatagacactctaaattgaatgtggaaactctgtgcccatccaaacgacactaacatcttactctgatgtgtgagagagacccgcgatatatatagacac

SEQ ID NO: 271417 - DNA, 384 bp, Glycine max
  unsure (1)..(384): unsure at all n locations
agcttaacatttcaatttcttactaagtaatatggatcatttntaaagtccaacgccttaaaatgatcacccttcaagaaaaaaaaatcacttgattcacgcataagaaagaactacgtaggtctgatttcctcatcgcaattgaggaatacgtaggagcaaagggaaacacccttgtcgaccacaaaaagagaaaaaatataaaaagggtataaaggatataagaacgtaaagggaacgtaaaaatcaaagtcatgtttgcacattcgattaaaggctgccatcccttgtgacggacgtgtggggtgctaacaccttccctgtgcataaatacaactcccgaacctttcacttagaagttcgtagatcacgtcttttcccggt

SEQ ID NO: 271418 - DNA, 216 bp, Glycine max
agtgaggtttggctacaaaaaattcactgggttttctatgattcaaaagtttagattctaagagagcacacagtctagactaatcccaatgatcttttcttgttttggacaaataagcttttcactattccctttttcttaaagtggttttgaccctaatggtacaacacaacctaatggcctttttttttaaccatccacctaattggtgggggg

SEQ ID NO: 271419 - DNA, 333 bp, Glycine max
  unsure (1)..(333): unsure at all n locations
tctttcttcggttgtcgtgggccggcctttcgtggacaaaactattggttgngtcgcgatgttgggttgaggcaacgtgctgggtgccggcccttcggggatcgggggatagaactcaacatcccttcgagcatagtcttgagggtctttgtggactccttcgggctattgaggaggctctctcttaggacgggagaagcaatatggcccacatcgtcttgtaagacgggtggtgagtagttatgcggcaatccataagggtaagccgctcggttgtatcccatgtgagggctgccatcgtgccccagtgtgtaccttcccccgcctactatg

SEQ ID NO: 271420 - DNA, 425 bp, Glycine max
  unsure (1)..(425): unsure at all n locations
ttcttgtcgattcgttctatgtacccgtagtggtccacattgtgtttcgcgcatttttattctcgctntgtttactttttatacccnctgttgacgtgcttaagccattttacttaagtcatttctcgcttaacttaaaaataaaataaatttccaccgaacgtttgaattgcattatccattaacttcggttaaaatcaattccgaccgttcggtcgtgccgtaaccacgttggaaatcaaaaagaggtaaaaaataatataataatcaaaaaatatctttttagtaaaataaagcggaaaatcaagtggacattntctctttgggatttctcattcttaatcgaattgattaataactaaagtgaaactaaaggctaaaatcaattcgtctagtcaagctcgtccataaaaaatacgcttttg

SEQ ID NO: 271421 - DNA, 374 bp, Glycine max
  unsure (1)..(374): unsure at all n locations
cttttggaccttgaacaggcaactaacttcctctttcattttcatgccatatgctcgcgactggtccgtttcttcccttccaactgagttactatgctacccatgagcttcggaaattgttccggcatactttatcttgcgagccctccttgtctcttgttcaaaggctcttgcagaattgcattctcttcccgtaacccggcacactccttccgaacgtgtgtagcggccaacttagaactttccttggcacagattgcctttcctaactcgctcttgagagtttggacttcttcgtcctcttccggtgcttaaaactctctctgctgacgactttaacttggcgagcccatctanacctcctatatgaactt

SEQ ID NO: 271422 - DNA, 83 bp, Glycine max
  unsure (1)..(83): unsure at all n locations
agcttgagcctaaccttntaattaaataggccagttcaagacaggctntatgtaggccaagtcgtaagcccctgtccccttgc

SEQ ID NO: 271423 - DNA, 171 bp, Glycine max
gtatggataggaagctctgctgttagttaaaagagtttatatcccttccaaattggaaggggtaaattagttgagtaaggacagggatgaattattacaggaactttggaacaatctgctaaaggctcaggatcagatgagaagatcttgcaaccagtataggagggagct

SEQ ID NO: 271424 - DNA, 293 bp, Glycine max
gcatgcatagcttagatcacgcatccgagtcaaacgttatgttctgtcgaatatgcatggtcattctatttcaacttttaatcgccatgatatattacgggcctcaatcggacatgcgagtctaaactttatcccgtgagaattcagccgagtcttgcatgttaaatttcgagcgtcgcgataggatacttggcttattcgaagatccggaggaaaagttatgggcagtggagctgcgatgggctcttttattatcctaagagcatctcgatatatgatgagcttcaattggg

SEQ ID NO: 271425 - DNA, 397 bp, Glycine max
  unsure (1)..(397): unsure at all n locations
acattctanatggccttatccaacagtaagtttagacctcaacacctatgattgctnttgtacttatgttttcagaaagaatgtgtcgtaagtttattaacttagatttattaaaatattaaaaaaaatacaactttatcgatcacgatacctatttttacaaaatatgagaatatataaacaaacttagggtaaaatccgtttcaagtatctatatttatgatgaacattgattctagtgttcaaatttntaaattgaataacttgatctctcgactntaaaaaatagtaatttcgttccttatagtaaaaaatcattggtgatgaaggatgaaaattactatctttctaatgtttagacataaattgatcaaagttaaattacgaaaaataatac

SEQ ID NO: 271426 - DNA, 54 bp, Glycine max
  unsure (1)..(54): unsure at all n locations
gatgaacaagcaatttgatgatgtaaaagttaagttattgattangattgattc

SEQ ID NO: 271427 - DNA, 492 bp, Glycine max
  unsure (1)..(492): unsure at all n locations
gcaatgaacctttgagnnccgggactgttcatgaccgcggctgctgcttatgaactcattacactatttgtattcgattaccagngactgtttctgaaaaatcaaaaatgtaactcttcaaaagggtttgaccttttccaatggggttttagacctttcaaaaattattactcttctgaatgaccttcttgaccaaacatgatagagtctatatatagccaaggctttgtttttgcaattttgtaaatcaatcatttccaatcttgaatactttttcaaattcattcaaacaatcctttacaagccttgaatctctttgaacttctttttttttgtaccaaaagacttctgaagatttcttgggtttccaatccttgaaaacctgngctattcatccctttcattctcttctccccttgcaaaagaattcgcaaggactaaccgcctaaattctttttgtgctctcttctctttttccaaaaaaagaaggag

SEQ ID NO: 271428 - DNA, 234 bp, Glycine max
ccgaattaaataacaagttttacattcaaacttaattatattttattgtattatgggaaatctaatggttgtggtatggtattaagatatcaagaaatcaagtgatcctaaactaccacctagtctatgattctgattatcaataattgtctttttctaaattaaaaaactcaataggtatcacatacagattgatcggaccaatcgttgtccagactacctaataagaaaaat

SEQ ID NO: 271429 - DNA, 189 bp, Glycine max
  unsure (1)..(189): unsure at all n locations
cggtcgggccatcaaccaaaagacatgtttgagaataatcaccctattaatgtcattgatgggaggatataacttatacacgcgtaagagcaaacttttaaaggcccaggttctgaattaatttatactcgcaaactgtcttcattgagattgcagtgtgatcactcccttggttttttaaaaacaaan

SEQ ID NO: 271430 - DNA, 418 bp, Glycine max
  unsure (1)..(418): unsure at all n locations
agcttttgacttaactntgagtaaatgtttttctcaattcacagcttaagacaccacattttaaatttgactttcatctcaagttaatcaacacatcgaatgcatgcaatgatcactaaggacttttttggcctttaatngagctnggctaacatggaaaactgttttttttttatagatattcaaaagtaacttagaggaaggaaagcattagtctattcatttcatttcattcacttcctatcaatccttggtaccctagattttcaatttcatacatactttgttttgtcctcaatttttttttttattttttcttaactttgcttctctcttggtggtttttcttttntacttttttggttttcagatttttcctttttcaatactttacaagagagaataangataatacttt

SEQ ID NO: 271431 - DNA, 458 bp, Glycine max
  unsure (1)..(458): unsure at all n locations
cttggacgcttactctggatacaaccagatcatgatgctttctctatacgangagaaaatgacatgtatcacttgagatgtcgacttttgctacagggtcatngcctttcacctaaaaaaacgtangggcacctatcatactagtgaaatgatgggatcgagtcttttgacccacaaatcgacgaaacatcgagctatatgtggaagacatggttgtcaagtctcaaagcatagcctagcatatggcggacttggaagaaatctttggggaactccacacatatgacatacgcctcaaccttgaaaaatttactttcgaggtaggaggagggaagttccttggcttcatgatcaactcattggggatngatgccaacccccacaaatgcactaccatactatatatgcataaccctacaaatgtccaagaagttcataagttgaatgataagctagca

SEQ ID NO: 271432 - DNA, 365 bp, Glycine max
ctacagactctatacaaatcaaaatatttgctgtttggttgggtcggtgactacacatatttattgtattaacaattcataggcattttattaaagttcatatcaaggcataaaataatatttacatttatttatgttttgcattcaaacactttcaagcaaatatgtaacatatacatatttattgctaccaataatttcaaagtattcacattaatttaatcctaagacataaactttcaatcctttaatgacattcaataataatattaacaaaaatgagctagtgaaattgaaatagcaaaaaggagttgcaaataacaatttccaaaattttcttctcttcccctgcaaaagaacgtcgt

SEQ ID NO: 271433 - DNA, 431 bp, Glycine max
  unsure (1)..(431): unsure at all n locations
ccttaatttaaaaatatctctgactattatgcatatatatcatacacatgcaagaattaagtgtaagtaaattagaatttgatggtcatgcactgacagcgtaaaataattctgtactctcaaccaatgataaatcattattgacatgactttttagataggtattataaaaatcaacagacttacaatanatcgtagttagtgattgaataacaatgtaaaactattttacaagtttagtgcatcacctattttctcaataaattaaattgtatgtttaaaaattaaaagtatttgtgtgaagttataatagaaagttagcgcaatcctgtatattaatagcccttgtaataacttgatgcattatattaataattaccccctctatcccatcatcattgtaagaaaaaaatctgtccaccatgattaat

SEQ ID NO: 271434 - DNA, 515 bp, Glycine max
  unsure (1)..(515): unsure at all n locations
attgaaaaccctttgnannnncccggnganctgantaccttttgaacgntccgcganattgtgaaacgaacctgcacgatgctagctgtcttattttgcatgagatcgagttttttatattcatctaccgagaacttttccacattttatagaattagtctatcgagtctccatcaatacgacgaggtaaacgctccacttactgagagtttattcctgtaccgattaatccatacgagtaacgcaattcacatgaatgatatcccccagatatataatctacacgcacacgcataatatgattttacaccttttacgcacaggtacgaagtttatgggtaacacctttatagttctataaccttctacacctacttagcagaatgataaaccacatcgtttgagcctgacttgaacgaatcttcctagtgttcgaagctaaaaacctactaagaatatgcgaggaaggaaagctctatcaatacgtaccgcttaatcacatataaaatgggggg

SEQ ID NO: 271435 - DNA, 329 bp, Glycine max
gattcgcgggtttagatattctttgacatgtatttgtttatttgatgaatattatattcaagtatagaatgcaattagttaaaaaaaatctttcgcgccattcttttcttttccttaataaacacttgtacctttccagcgcagaggataaataatagtcttcctaaattctcgaaattgctttggaattaataaataacgatctcacagatttatgagaaatattgcgaggtgaacagaaatattgcattaatctaaacttaaaataaaataagattatgaaatatttaattgggatagagatacatgtttttcttttttacattttg

SEQ ID NO: 271436 - DNA, 268 bp, Glycine max
atgaaagagcaaaatgtggatctgtacattacttacaaagaacacagccagctatactaattatgagtaatagactatgagaaagccttgttgcatatgcatatgagattgggacatcaaatcatattacattgtctaacatcatgactttttatatggaatcaaatcacacatgcagcagtcataatgatatgtagatctgatcagtcggatgctcacgaaacttgtcctaaaccgacacctgaagagaaagcgtgcttttatggct

SEQ ID NO: 271437 - DNA, 398 bp, Glycine max
ttctggcatttctttaaaatattatgccgtggaaaaatggggggaaaaaaggaccaccctttgattaaaccttcttcctttcttttcaaaatcccattaaggaccagattgaaagtcaaagggaagttcttgattccctaatttccagctagaaagaaattaataagaaacccatgattattaaatataaattaaatcaatcaacaaagaaaaaatacaaaaaaaacatagaaggaaactaagaaactcattttcagttgatgaactattcctataagacttatgatagcaaacatcagggttgttcaagattcagtgtagtttagttctctctctcaaactgaactaaattaacaaacaattccaaaaaaaactaaactatactacttaatcttaaa

SEQ ID NO: 271438 - DNA, 262 bp, Glycine max
tgctgttgttcttgagaacgttgcggattaaacctacactgtggttgaccatgttgatgatactatgcacttttaccctttgggatattttgatggggagagctcatatattggagatttagcatttcggggtggagttcatgctgatttggacctacccatttctagaaaccctccattgaatgatgggttgtggacagctattcagaattccaacgatgacggtttgaccgatgttatcgtgcctccgaatacctataag

SEQ ID NO: 271439 - DNA, 459 bp, Glycine max
  unsure (1)..(459): unsure at all n locations
gcatgcaagctggcacactcaaagggacatctcacctatatctntatgaaaaactatcatgttcatctgtccattacacaaaaataacaccatccaagcaaacttaactgagtaaagactagttctctccttcttccataccaatatgtcctcctcactcagaatcaaattaatacttctaaagtcatgacctttttttatctaagcaaattattatatttatttctcctaatgatatagagatttctccattcccatctccacaatcaatttccctcccaccggtcacctaaacctaacaccctggcttttatggctactacaaggttgtataatctagtatacttcctatatgtgaaaataaagcactntcacccaaaggtcttgagaaaataaaagtatcctctaacccctcaaccnccacccaccttctaacaaactcaaatgccagattctttc

SEQ ID NO: 271440 - DNA, 96 bp, Glycine max
tgcaacaggtgcagatgcagatttttgattcatggcaagctgagttactaggttaaccaaggcatcaagttttccttcaagctttttattttcagt

SEQ ID NO: 271441 - DNA, 449 bp, Glycine max
  unsure (1)..(449): unsure at all n locations
taagcttgtcggtgtacctgaagatgctattaggctcagcctgtcttcattctctttatctanggaggccaagagatggctgcattcattctagggcaacagtttaaagactagggataaggttgttgagaagtttctaaaaaaatatttcccagagtctaaaactgccaagggaaaagctgcaatttcttcattccattagtttcccgatgaatctttgagtgaggcattagaaaaattccataccttgctgcngaaaactcccactcatggtttttcagagcctatacagctgaacatcttcattgatgggttacgaccgctgtcaaagcanttactccacacttctgcaggaggaaaaattaagttgaagacacctgaagaagccattgacttaattgaaaatatggtttctagtgaccacacaattttgcatgagagagttcata

SEQ ID NO: 271442 - DNA, 420 bp, Glycine max
  unsure (1)..(420): unsure at all n locations
tatagtagctattaatatttagtanacctgagtctttcatttttttattaacccaacctaaacctttaatgcgtcacttcggttggactaattattaacaattggtttggaaaaaaatttctatttgtgtatatttttacgaaaatatgatagtatggtctatttgtgtatattaacatacaacccatgaaataataccttatatggtcaaataatatagaggcacctaactattagtgatgaaaaattcattgattggttgtccactagtgtactcaacatatatggtttaccaaatataccttcttccatcaagttttgattaaagtggtcaatacccatctatttactaatgtaaagcagatgtgaatcttcnagtatgcatgtacatctattagtaagaatagaagaatagatgat

SEQ ID NO: 271443 - DNA, 426 bp, Glycine max
  unsure (1)..(426): unsure at all n locations
cgccatgaaacatgttagaatcacaatttcatattattcactcgatgaaagactggtgnctatataagacgcaccaatgccacatgcataaaggctatantttttacttgactaagattataattcttattttattaattataaaatattaaaaaattcatacactcgtattaattaatacttgactaaaacacttttattttatagttaatttattttttttattttcggtcaaagatcacgagtatttctccaatccactagatcaaaaattaattccacttgtaatacataattgtcgtaatctaaaacatttttacatacgaatgtaatctgatataaaatctctgaaaaataagaataagttcacctttatttgctctatagaaaaattcagttaatgtttcctttatctgaaagcatata

SEQ ID NO: 271444 - DNA, 334 bp, Glycine max
  unsure (1)..(334): unsure at all n locations
taatatgcatatggctgaaacagtgaatattcgtcaaagttgcttaacttggtatttcatgatctgggtgggagacttttcacgttcctataaaatttccatttctattataaaatggtaacctcttctgcagcttgatgagtggtgggagcagccaacatcgacagnttgtgactgggtaacagtggatgggcaaaatgtaactgcctggcataatcatgtgaaacaagttcttgcattttgtgacaaggagctattgtgattagaattgtaaagcacacggagtgagcaaacatttgtgaagtctcttggtcattttgtcattttagatttt

SEQ ID NO: 271445 - DNA, 340 bp, Glycine max
ttaccagaaagtaaaaactctttgggcaaacggtttgagaaaaattcatgtgctactcaacttttgaaattcttttttaatacctatcttgaatgagtcttctcttgattcttgaatcttgatcctgattcttgaaacctggatcttgaacttgattcttgattcttgaaatcaaatttccttttaaaccttgaagagttcttgctttaatcttgaactcattctttgattcttgagatcatcatctttgttatcatgaagtgttcttgaattttgagcttttcgtcatcatctttggtatcatcaaaactctttgaatcaatcttgattcatcatgaag

SEQ ID NO: 271446 - DNA, 458 bp, Glycine max
  unsure (1)..(458): unsure at all n locations
ttaagctgctcagacaaatgttgctacagtatggaggttgtattatgtttgangtaagaaccgagacttaagatcacccagtgaggtaaatgtgtcaagctaatgacgttaaagaagccgcttctgngaggcaacacagctttaatttttgttatcatagtttttgcatgcatttgatcatttggaacttgctgtataatctgtacattggagtttatcagcttatccttgaatgttagatataagggtttcaacttgtttaagaagggactaaaaaatggattanaaaacattttttgaaaaaagacagtcctttcgctaagcgcaagcctcgcgctaagtgcatctttggtcatgcgctaagccgagagtcgaaagcgcttagcgcccaacccttgcatctaatgctgatntgatccactaagctggccaaggctgagctaagccaacttcaattc

SEQ ID NO: 271447 - DNA, 378 bp, Glycine max
  unsure (1)..(378): unsure at all n locations
tgtttttccgtgagcactaaattccggatagccatcctggatatggcctaattagaaagtataattaatttcaaattccttcgaagggggaggcttgcccccagacagggcttattttgaccaaaccaaattcaggttcagttcaaattctgggggctgaatgattacgtatgaaatctaatcaaatggttggtttcaactttagacatcccaaagcggggttcctttaatttggaccggatgaggtattactcttacacaagatggaaagtgtgctaagaaattaatttatctatagctccaagcccaaccatttatatttatggaaaccgctccccatgtgtgttcactttttttttggaacggggggaaaataan

SEQ ID NO: 271448 - DNA, 211 bp, Glycine max
atgctattactacaaattcccaccttgctacaatgattcaagatagattttaaaaggaggttttcccatttcttactacattttcttttctatttaccctaggatcaaggattgtcttcatattattcaataaaactcttcatggtagccaacgatgggagataatttaaacctatgggtggacaaatgttctcagtatttaatgggaatc

SEQ ID NO: 271449 - DNA, 226 bp, Glycine max
ctgtacacatgaatgagatatggaagtatgtgtttcttcgaaatcacatagcacacgggagggaatctctcttatgacacatttactttggataagagctttggattctgaagcatgaggcatgcgttatggtaaagactcatactgctggccttcggatgaccaatctctgcatttagacctgctccattctctttcttcttgggatatgggcaatcattctgaa

SEQ ID NO: 271450 - DNA, 426 bp, Glycine max
  unsure (1)..(426): unsure at all n locations
atctntacgaatttattcaccataaaatctttcttgatgactttcttcaaactataaattgcactcgtctgactaatttttcttatggccttgcttgtatatattcaaaccaaacttcaacccattttgtatcatcttttgctcaattaattattgtagctccaattttttgtaatatattacagttctactttctgtttttcccttatatgaacacgcattcatcttaatattctcatttatgttacactctcatcattctaccatattttccctttatagcccaaaactttctattatggaatataatttgactatatcaatgatagaacttgcctttgacccatnttcagtcatgaaataagatacaaaacgtcgtataacttgaaagaaaatgtgttccccgattcgaaagaatagcatata

SEQ ID NO: 271451 - DNA, 374 bp, Glycine max
  unsure (1)..(374): unsure at all n locations
tactacgcttgctacgtccctctgtatctccatactgtcttattaggattatgttggatgcaacttataatgtctatattgaatgcaacatatgaataacaaaggagtatgcttttgtacacggatcgaaccgctcatgattataatgctttaacaaatgcgattgaaataaatgacaccttgtggtatttgtcataccaatttatatgtcacaatttggaacatgaacatttgcaatggtgtaactcatattattgcattcaataatgattgtggtgcgaaagagtatgacacatgaagctngtgacctttgaataacttccatttctcttggccgatgaatgtgacaactctctatgcaatctaactgatgc

SEQ ID NO: 271452 - DNA, 401 bp, Glycine max
tatgcttgtggaccttgtggcctcaataatcttattatggataggcttagaatgcagaataagcaacaacaatcaatttaacaatgttctttaaacatgcaagacacaattgattgctacaaaataaataagataagggaagagaaaatgcaaacacaattttatactggtttggccagttcccgtgcttacgtgcagtactcaagcaacccacttgagatttccactatctttgtaaaatccattacaaagtttgaatcacacagggacagcccatcccttgtgttcaggaatcctttacaacaagagactcacagtctcttaaccaatctcattgaataagaagaatggaagaagaattctctcttcaagagaagaatattacaataaagatcatgtag

SEQ ID NO: 271453 - DNA, 374 bp, Glycine max
  unsure (1)..(374): unsure at all n locations
tcggggccatttcctgcgaaggcaaacatntggaaagttatttttaccaagaaatgttactcttaaaacaaaaatggcgtacagcctccttccataaacacaaatatcaatggtaatctagagcanactcatgcacatactttcttatgaacattcactcgcacaagatattcttctaactaaaaaatgcacccatgcgcaatcaaggcacctttgttacctagatttatctatgtgtactttcaacgtgtatttgntacctacatcacatgcactctcttggctgaatttacatacatgcatactcaaagcatcttggctaccaaaaattgtacacgtgcacattctggcatttctaatacctatgcatatac

SEQ ID NO: 271454 - DNA, 426 bp, Glycine max
  unsure (1)..(426): unsure at all n locations
agctagaaacatatgtataaacttctctttttgaaacaataacaacagcaaagccctatcttgctaggtgaggttggctacatggataacatgacactatttgactcagttaaaaaccaatgttttagcaatgttatttaccatgaggtccttcttgaccactttctccaatgttcttcttggcctccctctccgcttcacttgactaaaacccatactatntattgttctcactagtgtgtctcagggtcttctttgtacatgtctaaatcacctaatcgattntctgttatctttttgtcgattggttgtacaccaatctctccgcatatacaatcatttcttattttgtatttttggccacacattcatcttaactntctcatttatgctatttncaaccttttctcttgctatctctttaaa

SEQ ID NO: 271455 - DNA, 360 bp, Glycine max
  unsure (1)..(360): unsure at all n locations
ctatttgagtgtgtttgacaaaatatttcaattagcttctattctttctttactagttgaaaagtttattcaactatgtagtaaatgagttctttttaatagtttctaccatttttttaaacgttatttgaagtgactgttattaaaatgttaccttctaactctttatatttatttttttgtccttaaatatttattagatttcctttaaatattttctatttaaggtaaaaaaatatttttattaattttatattttccaactacttcagtagataattntatcaatacttatgattcaataagatagctttcaagtttttagctaacttttcaactagttttgcctaacatagtatt

SEQ ID NO: 271456 - DNA, 378 bp, Glycine max
cgaatgcactattatggactgttctttatgcttcctaagcgctccctcaagtttatgaagttttatacactgagctatgacttttgttgttccaaagtcaaatgcatttggtttgtattcaagtactcgctattttttactggtttggtcttctttcgtaattcagtcagggaacgatcctgaagcttgaggacctgactttctttttcttacaaagtcaatgcgttgaacttgtatggcatactcaatcctatgtattctgaatttctctccccccgtaattgctcagcgaataatttatgtagtttaaaggcaatatatgtttcatccaaagtctatgctttaagatagatgctagatgcaccttagagatcaact

SEQ ID NO: 271457 - DNA, 178 bp, Glycine max
ataaccacccatatggacagtggagagctccatcttgtagttaattcaacaaagaccaaggagggccatccaataggccgcaacaacaagggcctaacctctatgagagaacaacaatgctggaagaaactcttgctcacatcatgcaggtctcattgtcaaatcataagagcattga

SEQ ID NO: 271458 - DNA, 619 bp, Glycine max
  unsure (1)..(619): unsure at all n locations
ataagcctttaaaggctctgagtgataccatgaaccgcctcgtagcaccttgcttgcggagcttctatggaggctttattttcgagctataataaggattctttaatgtttgtttttacaccanggagatgtatttgtaagacacatgatactatgtgtgacgaggtcgccatcctactatgcactatagccactgtaatgaatgagcattcgttatctatatatgacgtcgcctctggtatcaagcacagtcttgtgatcatggtgtgcattcttactggagcgataaactacaacgaggagatctactataagacttcatctgccgcggcatgctacctacaatctgatagcatactgaagaacgagcgatatatgatgcttgcctcttctctaacgaacgtcgagtctctctgtgtagatactgttctctacgagncacaccatcttcatcagatcatccactctgcgctatgctctcgctatctatgatactcatcttcgntggacgagagccaatacagtcatagtcggtacatcatcgctctctattcgcatggcaatagaatgtctcacttgatatacatgtcctgacatactgctcttgataatctatgcg

SEQ ID NO: 271459 - DNA, 154 bp, Glycine max
tggagaggatgcttcaatggaggaaaagacagagggagatatagttataggggggagcaccaaattgaaggaagagaaagggagagaagttgaactttgagttgtgtctcacaagactcttattcatcaaagttacaccaagtgttacacatgc

SEQ ID NO: 271460 - DNA, 487 bp, Glycine max
  unsure (1)..(487): unsure at all n locations
cgggattctctcagtcgacccgtggcatgccagcttcattctacacatgacagaaaggataagatagtttcacaaaagagaaagcttcctttcataaattntcatgcaggaggaccttcttctagtaattctgacttacaacagcctcatatccctcttccattcccacctaaagcaattctaaacaaaaaaatggaagaagcggaaaaggagatcttggagaccttcaggaaagtagaggtgaacatacctctactagatgccatcaagcaaattccaagatatgccaagtttctaaaggagctgtgcacccacaaaaggaggctcaaaggtaatgaaaggattagcatatgcagaaatgtgtcagcattgataggtaaatttgttcctcacattcctgagaaatgtaaggacccaagcactttttgtataccttgcattattgggaacagtaaatttgagaatgccatgctagatctatgagcat

SEQ ID NO: 271461 - DNA, 345 bp, Glycine max
aagccgaatggagaaggaggaaaggtgattagagatgccacttcaaggagaagatgagtcaagaacaagttcaccgccatatgaagatatggatataagagcttacaggtaggacaagatgagtggagggagagggagagacagggcacgaaatttatgcctcaaatgacgtatgaaatgtgaagtgtaatttctcaaatgatcaaagttaaaaatatgcacacacaaggcctctatttatagtttaagtgtcatacaaaagtggaggaaaatttgaatttctattcaaatttcacttgaatatgaatctgtggagccaaatgtggagccaaaatttcactaatt

SEQ ID NO: 271462 - DNA, 411 bp, Glycine max
  unsure (1)..(411): unsure at all n locations
caatctcaagaaccgagccaaatttatagtgaaagagattactttcattcacgagatttcaatttatgcactagtatatgaactcctaaatacatcggcatcaatcatcattaatctacaattagaagaaaggacttggaagtgccagcattcccataaagtgttctaaccacgttntgaggaattaagatcgctaatgagaggatattgagcttggctagccatggccaattcaaattgcttgaatgaaattggagacagagacaataattcaggtgccttcagattgtcccaacccttgacattatttgtaatggttgttgacccatcaattccaatatgtgtcacatngcttcacatctgtggatacccaatttccatctgaggttgcattttttccacatccctctt

SEQ ID NO: 271463 - DNA, 507 bp, Glycine max
  unsure (1)..(507): unsure at all n locations
acggcgcccggcccgcgcgtgnccctgtgatagcctgcttnacgtgaccttagaatctcagctctgtgtcttaatctacagacgcgttgtacttatatttcgtgcaactagaaggaagagtggtgacaaacaaaaaaagtggctataaagattaaactgattttttttctgaatatgaaacataaaagcaattggaaactaaaatgtcctttaatttcttttatgaagncatgaaatcagagtcaataaaccaagagaagttgttgaccctgggaatggaacccatgttgcatgactcatttatattgcccaacctcactccaaaaaatacctcatanattangcaacctcataaactatgatcttaaatctgttagagagggatacatccaaaggaaaagacaaacaggcttccccgaacctacacctgttgtccacgtttccatcaaaactacatcgactcgctatctcaaagaaaaagttgtcgagggcttgttaaacactacg

SEQ ID NO: 271464 - DNA, 435 bp, Glycine max
agcttcgatacgctaataatatattcctagacagattcacttaagacaactgccaaacacaaaataaacaattcaaacattgaatatgccttatcgaacatagtcgtattacacttgatattctttcgtttttgaacattacttttagcagcctcaattccgttaacaaataagattaaagaaaacaggatgaggaggctggaagtggagaacgatgaatcaaattccaaaagtggagaaggcaagggaatgtaagttgctttacttttcgttttggatttcgatgacttaatacaaagaaatattgacaatattagcttctttcttttcttttcttttggggaagaagcaatcttatttctaatatattacgactggcaaaattatgaataaaattcattaagcaaagtgaaacttgtaccattataaacaatg

SEQ ID NO: 271465 - DNA, 336 bp, Glycine max
  unsure (1)..(336): unsure at all n locations
tgagatgagtttgtgagtgattgtgagatcctagaggtgtttgagacatcctcaccacttgtatttntgcaatctttcttcttgttcttctctttgttggtaagaaagctctctagtatggaaagctaaatcctctggtagatcttncctgcaagtacctgatgtcaatatatttttatctatttaataatggtttgtgtgttctctgtgctatatgcttttcattccantatgcctttaccttgatcacgtanatgcatgatttgttagggtcattcagcagtggaagctggtataactctaaagtccttgatagtgcagggctaagttatcata

SEQ ID NO: 271466 - DNA, 435 bp, Glycine max
  unsure (1)..(435): unsure at all n locations
agcttcacattcacaaaaatggtaatcgattataacacaaggtaatcaattaaaacaacaagtttttaaaatagataacacgtatcgaccaatggtaatcgattaaaacataaagaatttaaaactggaaacatatcacaagcaatggtaatcaattaaaacatggcgtaattgattaaaacaaaaagttttgaaaaacttaccaagcaaatatcatacagaaatcaaacataaatcaattaaaacaaagagtaatcaattaaaacagaaagaaatcacgaaatgactaagaaaaacatgtgatcttcaaccaaactaagtatgcacatgaatcactaagctaaaacacagcanataatgacaaatgatatgaatgacaatgtgaaacacacttatgcaaataagatgtcattctatgctagatgcatccaatat

SEQ ID NO: 271467 - DNA, 412 bp, Glycine max
tttacaaagcttacggtaaaatctgggacctagtcatggtagaagtctccatagaggccattgcctgcctcgcccagtattatgatcaaccgttgagatgctttacctttggggacttccagctgtcacccatggtggaagaatttgaagagatcctaggatgtcctctagggggaaggagaccatacctcttctcagggttctatccctcattagctagaatttcaaagatagtccaaatcccgacgcaggaattagaccatggaaagcaagtcagaaatggggtggttggaataccgagaaaatgttgggaggcaaaagctagaaccttggcaggtagaggcgaatgggccccgctcatagacattatcgcactggtggtctatggaggagtcctctctcaaatgtggat

SEQ ID NO: 271468 - DNA, 422 bp, Glycine max
  unsure (1)..(422): unsure at all n locations
agcttgtagaatggccagacatgatacatgtcaaggtttggtttggttcaaggataaaagggatgccccacattatttccatgacacaaatgcaaaaatgatgatttggaaattttatgcaaaactggtcatgcatgcacctatgtggacgctcaagtgtcaaatttttatggtcatgtgatgctagggctcaagattcattccctctattntaaatcaacccaatgtttccaaaatatgttcttttatcaatttgtgcattcatcctagtccatttcgggcgtccggggaaatttcacagcattcacccttcaggtgtagacacatttttcaaaaattgggtatgatcaatgaatntttttcaaagaaaagttggaaatcatctcttttcaaaagcatgtcggtttttagctagacaactt

SEQ ID NO: 271469 - DNA, 434 bp, Glycine max
  unsure (1)..(434): unsure at all n locations
ggcctaacttaatttgttgtagagaaactcattgcgtcatattntttaatatctaacgctaattatatagtgttttaaacaaaaagatgtatatatagatgcggaacatatataaatgatgtaaagaaaaactactattttaacatgttccttgcctatacaggttgtggctcttgcaaatctaaagaaaaacgatgtaatcctattagttttcaagtgcctcaactccttataaaacaagtataacataatgtataatttccttataaatgcattgtcaacattgcattttttgttattatacttgctcatgatttcttctttattctttttttatggaagcttgcttgagaaccttttatggaggctgggtctttgagcttcaatgaggtcctttaatggtgattntcaaccatggagttgcagcggaagat

SEQ ID NO: 271470 - DNA, 439 bp, Glycine max
  unsure (1)..(439): unsure at all n locations
ctagcactaaaatcaaaatatttaaatttaactttttattatttgaaaaagagccaacgagaggttaagtagcatgattagtcttctacgtacccttacaaagataggatttgaggtcgattctacaaatactcgctgagatttggttggtgtagttctgtatgcatggaagcaacccttctctttatgaatttcgtttttcataaataaaatatgaaaaaaaacaaatagataaaatactttattgatttccaatgtaaagccataataaacaaagtacaaaataagagaaatatgaataaaacagaaaaacaagcaaagggcgattgtgaaattataagacacncttatatgtgtcctgtccgtttataagacattcagatactagcttaagacacatcacgacattcacctaatgcatttgagaaagttaaattat

SEQ ID NO: 271471 - DNA, 314 bp, Glycine max
tcgcgtatatgatatccactccacaaggcgcgaagtagacgagagcttctaacctataacgctacgtggcggacaaacatgggcagtaaacttgcatggtcgccattgtcaatgcagaaagtattctgcgcttcactatgcatgttcacacattattgcaacttgtggttacatgagcatgaactacgaccaatatataggcgttgcttatacaaacgagcacatcttaaaagcttactccgcacaatggcggcctctcgggaatgaagcggctatttctgcttgagaagacgcatggacacttatccctgacc

SEQ ID NO: 271472 - DNA, 428 bp, Glycine max
tagtctcgaatatgaaatatgagactcaagtctaggagtgttttaactcaacattggcctagtagacttaagttttacaagtttgtgatcccaaatttgatgattctgtgctcattttcaaaataaaactttccctaattaaacatggtttttgaattatgaaattatatagtatcttaggccaaaatcaagtagcttttttaaatatgagaacctttcaaattaggattaaatctaatatttgaattacaaatgtaaaaattatctttgccttaaaacaaacaacttctcaaattaaagagataagggatactctctaaatagatatttcttctaaaaagctcacattcatatttcttagacactataatagaagtctatgtctaagagcaaagtgaacaacacacaaactaggagagctcaacatg

SEQ ID NO: 271473 - DNA, 397 bp, Glycine max
  unsure (1)..(397): unsure at all n locations
tgtcttaatgttaatgtcacattttataatgtcaaaaaccgtatcaaattatggagatcgtggtatggtattgtaagtgacatccttggccagagtggatttgattgggatggcactaagcacatgatcacagttgagaatgaaaatgcttggaatgaatattgcactgtaagtattctttaaaatgttgctatttgttattcaaagtagataggatttgactttttctttgttttccagtcgcataaatcggctaaaccgtttcgatacaaggtgcttcaaaattgggatgatatagtggatttgtgtgctaaagatagagccaccggtcatggagctgaaactgctatggatgctgatgaagcgatgagtagagaaacanatgaagtgggattca

SEQ ID NO: 271474 - DNA, 352 bp, Glycine max
tgtaagctacatttacaaccatacattggctttgttcaccatgaggaaattcacacaaaaaattgaattagtgagacatggagttacaagatttgctaccactttcttaactgtgcaaagattgcataagcaaaaggccaatcttagaaggatgtttacttcagatgaatggttgaagtctaaggcagctaaagagcccaaggggaagcaagcaacagatgttgctcttatgccatcattttggaatgatgttgtttatgctttaaaggctatagggcctcttgtaagtgtgttgaggctggtggataatgaaaaaaaacctgcaatgggcttcatttatgaagcaatggat

SEQ ID NO: 271475 - DNA, 417 bp, Glycine max
  unsure (1)..(417): unsure at all n locations
gttcacaaatactacaaattacaaggcaaagattttgattaataaaaccaatcacaagatatatatatatatatatatatatatatatatatatatatatatacacatattattcaacatgcttaaatattgttttgaggaatgttttgacataccaccatctttttctttggctgccacacaaaaatcttgaagaggactagggtcataggcagagacaacagaggatgtcagagccaagatggcaacaagcaagcacacaaccatcgtattttttttcttcttagagctattcttaaatgattctgctatgtaatcacttgtgagaattgcattttgattcatgtgaagtttggtatttataaggatgaagcattgaattggttcgcatttatctctaccgaattaattcttatn

SEQ ID NO: 271476 - DNA, 315 bp, Glycine max
  unsure (1)..(315): unsure at all n locations
actaagcttgatgcacatatggagatgttaatgaaacaacgagatgatgctctncatgagaggatggatcaaatggagaatagagatcataatgaagaacaatggacgagaacagggaatgatggtgttgctagacaaaaccgaattgatggtattaaactcaccattcctccatttaaaggaaagaatgatctggaggcctactcggagtgggagatgaaaatatagcatgatttctcctgccacaactattaagacgaccacaatgtgaagcttgctgccacggagttttccgactatgctattgtgtggcgg

SEQ ID NO: 271477 - DNA, 415 bp, Glycine max
  unsure (1)..(415): unsure at all n locations
agctttttatgaaaggatatgactcttcacatttgattntgaatttcaatgttcagatacactggtaatcgattaccaatatcttgtaatcgattacaccattttgaaatcaattggaacgttggaaatttacttaaaagcttttgaaatcaaactttgccactggtaatcgattaccagagggtaaaaactctggtaacttagagaattttgagaaaaactcttttgaaaaacaaaattgtgctatgtttgttttttgaaaaatattttcaatacttcccttgtgaagtcttcttgatttcttctcttgaatcttgcattcatcttctcttgaatcttgaaatcaaacttctcttgattcttgaatcttcttgatttcttctcatgaaacttganattaaacttgatcttgaac

SEQ ID NO: 271478 - DNA, 265 bp, Glycine max
gatggagcttaacctagtcacacttattaagaactagctcttttcttcctctattgcctctagttgaatacacctttgttgggatctctatttggttcgtaaccctctcatgcaagttctttacaaactctgacgtagattctccttctttatgtataaaacaagtgtctactgggaggggaatgaggtctaacggtgttatgggattaaactcataaacaatctcaaaaggcgactgcttggtggttctatgaacccccctatt

SEQ ID NO: 271479 - DNA, 200 bp, Glycine max
agctccaaccaaggggagatggaccatctctagtgctagtaaagaatcaatgacaatgcttacaaagttgagctgcccggagagtataatgctaattccaccctcaatgtctctgatttatctctttttgttgcagatggagaattcgatattttgacagatccttctcttcagggagagaatgttgacgacatgttcta

SEQ ID NO: 271480 - DNA, 406 bp, Glycine max
  unsure (1)..(406): unsure at all n locations
agcttctgcaatccttntgctttgattcggttggcaattgctttaggagtgagaaactcattgtttgccatcacgaatctggatgtcacatttcagagcaaacaaaacgttatcagtaaacacactgtttccttacagctgaaattacgttataaaggaaaaaagaatacaacaaaaacagcattagaaaacaagaagcagtgtactttggagcaagcatccacgttaaataactaatgaataaagctttgattagtatacaataaataacttcactttttccctcactacgttaattgaaatcctttaaaggtgaaggtcatcaattggcaaagattcccagaggaacccaatgacaaaaacaactntactctgaatcttaacacgatgcacataataaattaat

SEQ ID NO: 271481 - DNA, 423 bp, Glycine max
  unsure (1)..(423): unsure at all n locations
cgtccacaactggctncaaagtgatgagaacataaaaatgggattcatctgaggctgatcaaacatcaatggtttcgggtttcatatcagccaatactcgacgagatgacttcatcacattgtccataatcttgggaagttctgccagtgattttggacctagaacattgatcacggcagcagttgttttgaggcagctagaagtcacagccaacttatgagatgcaatatgtcttgtaacacatccaaggcacacactaaagatggaattattcgaaggaaatctttcagccagaacttctaatgctgaaactgctgccactttcaaagaggtatctcatgaatcatcaagtactcgcataattcttaaacacaatntattaagtgattcttgagaagtttcgtcatatgaagcaaagaaac

SEQ ID NO: 271482 - DNA, 398 bp, Glycine max
agcttaaagagttgtcatgtatcggtttaatcgattacggtagcactttaatcaattactctattttttgagacagtgattgatttttctagagtctctgctttaatcgattacttctctctcgtttaagttgttcagaggtgaacaagaacactttaatcaattattttcgtcatctaatcgattacattgttcttgagctgattttcagatgttggatgaacactttaatcaattacttggataatctaattgattaactcgttgaaataatcgattaccttatagatttaattgattataggcgggtataactattttctctataaataaccacgtggtgttcacatcaaaacaatatgagaatccaaagataattagagaatactcattacatc

SEQ ID NO: 271483 - DNA, 381 bp, Glycine max
  unsure (1)..(381): unsure at all n locations
tgagataaggaagtgttgaagggtgaaacttcctgctcttattgttgaccacagagtggtacctgtagatatgtcgcggcggtcaggagaccttgtggacgtcaggtggggtgctattgcccaaaagcttgaccaatcccgacccaccccgggcatagtcggtcagtgagaacctatgatgtacctaaacaggcgagctcctggcagtcaacagataaaaggaacaaaaaccacaaancaaggaggcttgtggtggctggccagctgtgaaacttgattgatgtgtgaaatatggtctctggtaatcgattaccaacggtgggtaatcgattacaatgcttaaaaatgaagacaggagactaacatggtctctggtaatcg

SEQ ID NO: 271484 - DNA, 365 bp, Glycine max
  unsure (1)..(365): unsure at all n locations
agcttganggttagtgacagtgattggactggagatgaagatgatcggaaaagtactagtggatttgcgtctctcatgggggaacacaaccttcacttggatgtcaaaaaattagtcgatagtcactctttcaacttgtgaggcagaatacatagcaacgacttcatacatttgtcatgcagtctggcttaggaatttgttaaaaaagttgggcatgtcacaagaatagccgaccaagatctttgttgatagtaaatcagccattgttcttgcaaagactccagtgttccatgatcgaagcatacatattgatacatgttaccactacataacggagtgcatagcangataggatgtacatgcat

SEQ ID NO: 271485 - DNA, 400 bp, Glycine max
  unsure (1)..(400): unsure at all n locations
cctatgttggttatagctcggagaacgcctcaccttangaccaaaagtggtacaacaaaccactgagaaagttaagttaattgaagaaaggatgagaactgctcacagtacgcagaaaagttatcatgataagaggaggaaagatctggaattccaggttggtgatcatgtattcttgagagtcactccgtggacttgggctggtccagcattgaaatcccgaaaactaacaccgcgctctattggtccttttcaaattcttaagacagttcggcctctggcataccaaattgcattacccccgtctctttctaatcttcacaatgtctctcatgtgtctcaagtccgtaagtatatccgcgatccatccnatgtgattgaattggatgatgtacaagtg

SEQ ID NO: 271486 - DNA, 387 bp, Glycine max
  unsure (1)..(387): unsure at all n locations
agcttagtgcttgattaattgtctctacggttaatttacgttcatgcttaatgatccgttttgttcatgattatttagtgtatgtggtgcttaatcacataatgattgccttatgttaaatttcgcttagtaatttaatttagggttggattaagtggttgaactgataaaggataaattctcgtaacctatgataagagacttgcttgtgaatcaaggggaaacaacatgtttttaattatgttattttctaattcaaatttgcttgctatttaatttacaaaaacaaacaaccccccccccccccccaaattcattattgctttattactatctgntatgaacgttnggttgaccattactncgtgggagatgacctatgatcac

SEQ ID NO: 271487 - DNA, 217 bp, Glycine max
tctagcctaatggacttagctcgaattaatatctttgatagcccttttgagcctcgtttccatttccttgttttgaagctcactacaagccttaagtgaaaaaccatgatattatcatatccttaaggaatttcggagcttcggaattgttttgggaataagtgtggggggtttttgcttcattggacaacctcgcttgctgactatgcttcatgaa

SEQ ID NO: 271488 - DNA, 354 bp, Glycine max
agcttataatatatcgatacgctcgaaatttaacatcggaaactgtcgagaaattcaaatggccataacttttcacacggatgtccgattcgggcgcataatatgttgagaggctcgaaattgaacaacggaagctcttgagaaattcaaatggtcataacttttcacattgaggtctgattcaagattatactatatcgatacgctcgaaattaaacatcggaaactctcgagaaattcaaatggtcataacttttcacacggatgtccgattcgagcgcataagatgtctagaggctcgaaattgatcaacggaaactctcgagaaattcaaatggtcataaactttcacac

SEQ ID NO: 271489 - DNA, 311 bp, Glycine max
  unsure (1)..(311): unsure at all n locations
tgaatcggacatccgtgtganaagttatgcacattcgaatttcactagagctctcgctgctaatttcgagcgtcactatatgtgatgcgccccaattggacattngagtcaaatgttatgaccatttgaatttctcaagagcttccgctgtctaattctgagcgtctcgctatgtgatttcgctgaatccgacatcngtgcgaaaagttatgaccatctgaatttctcaagagcttcccatgttcaatntccaacctctccatctattatgcgcccgaatcggacatccgtgtgaaaagttatgaccattt

SEQ ID NO: 271490 - DNA, 409 bp, Glycine max
agcttctcctctagcccttctgttagggttttcaagtattagagagaaggagaagggggtgaagcctcaaatttactatctctatgcgaggggcatagctttctccaaagacattatttcacaaatcccatcggtgggaatatgcgaaaacgagttatgaaattggtgtccaaattttggaatgatccaacagttaatgaatttgggatcgtagttttgttgaaacagatttgggtgtatgccagaaaaatagaagattttggaagaggaagaagaaaaaacaaattatggaggaaaaaagagcgctaaaaagtatcataaatgtaaaaactgacttaataagtctctatctatagttacgatactctgaactcaatatttactctattttcttaatttaatatttata

SEQ ID NO: 271491 - DNA, 181 bp, Glycine max
ctcactattgctcactgtcctgaatatgaccctctatgtcctattcttcctggaaattaatactcacactaattcatcgaactagccctaactaactgtttgtgctatttaattacttatctaagtctatgtacatgcataatttttttatattttttaagtttttagatcttacttttac

SEQ ID NO: 271492 - DNA, 371 bp, Glycine max
  unsure (1)..(371): unsure at all n locations
agctntcttgagagaacttccttgagaagcttctttgagaaaacttccttgagaagctagagcttagctacacacaccccaatcataactaagctcacctccttgagaagcttcgttaagaagattcctaaagaagctagagcttagctacacatacctctctaatagctaagctcacctccttgagatgagaagctagagcttagctacacaccccctataatagctaagctcacccccatgacaaaaaatatgaaaatacaaaaaaaaaagtccttactacaaagactactcgaaatgccccggaatacaaggcttaaaccctatactactagaatgggcanataccaagcccaacgaagaaaaaacct

SEQ ID NO: 271493 - DNA, 375 bp, Glycine max
gttgcttgcacaaacataagaatcccttacacttctattgttctagacatgaatcacgcatctatggagagggaattgcatggatttatctaacatctatcagaattaaaacatgtatatgccaaatcagtaaaaataatgccaaacatcaatgtgaaataatcttcttacatgctggcaagtgtgaactgttatatattagaatcatgaaatctataaaacgtactaacatacacaaattaaagatgtgaactttatgcaatcaaattggtgcaagtatgatctatacataatacgtgtagtgcccattacttctgcccaagtttggaatcatgttgtacatgtggagaaaaatcacgtcaaatgttgacatga

SEQ ID NO: 271494 - DNA, 365 bp, Glycine max
agcttgaaggctaactggatgcgtcggtcaacttggtaacccagctggccttgaatcaaaaatctgtgcctatcgcaggggtttgtggtttgtgctcctctgctgaccaccatacagacctttgccctttcatgcagcaacctggagcaattgaccagcctgaagcttatgctgcaaatatttacaatagacctccttaacctcagcagcgaaatcaaccacagcatagcaattatgacctttccagcaacagatacaaccctggatggaggaatcaccctaacctcagatggtccagccctcagcacaacaacagcagcctgcttcttccttccaaaatgctgctggcccaaacagaccataca

SEQ ID NO: 271495 - DNA, 244 bp, Glycine max
tatttaggattattgatgtccttgttacttccagtttcaccttgacaaaaatgtcatggaccatgttgaaaatctaaactgattccaccccatatcctgcataaaaattcccaataattcgactgtacatcattcccatgcattcatgctttccattggttgcattgctcattccattcctttcttgcacaataaaataaaattaaatgaacttattaaaaagaataggaaacgctctaccgcg

SEQ ID NO: 271496 - DNA, 623 bp, Glycine max
  unsure (1)..(623): unsure at all n locations
tataagtaattctgcgtgacgttantctttcacgatgatgtgtgtacatctgtcatcncaanaccncacgtacggatanatgaatcattccntcgncattgccncccctgcattgtacccggagatcactctaatctgatctgtgtgcattcacaccttatgctgttaatcattctacacgactctcctacaaccaaggtacgttgatatctcccactacatgaatcaattattgaagctcttgcagcagacatgtactcatactaagtgtgggagagacagtcattccacctctttagatagagcgtagaaccttcacacacaacgcagtagctagcaaccaactaactaatcttgtattctacaaaatgcagttaggtccaagaccgaccattcaggtgctccaccctatccgactatccacatcaatcgatcttcccctatttgactgcatgtcaagatgaagctcctacttttagctctaactatgaacaacttgagtggattgatactattcgaaacatgtcttttcatcaacagactttagtccccattccataaactaactattagatggggcaacttggatccatattaatcaaacaacccccttaattttatcg

SEQ ID NO: 271497 - DNA, 276 bp, Glycine max
cactcagatcttgactagttataacttttcgaataaaatgagtttgtcccatgcttctactccaaaagtcagtgcgacataaatcattttcgcattttatttctagcatgcattcatatcatgcatcgcataagcatctcttcatggcatcataatgaacatatcctgcctgcatttgtccgttatcatattccaacatcacattttgcatgagtcattgcatcatcatgcatatgcgctcaacataccctttgttctacaaactgcatacctttt

SEQ ID NO: 271498 - DNA, 421 bp, Glycine max
  unsure (1)..(421): unsure at all n locations
agctntgcagatttggtcttcgccagtgaaaggatcaatgtgggtccgaaaagaggcaaatttgatcatcctactaggacgactgagaaaactggggcaaataaagagggtgagaaagagggagaaacccatgctgtgactgccattcctatacggccaagtttcccaccaacccaacaatgtcattactcagccaataacaaacctcctccttacccaccacccagttatccacaaaggccatccctaaatcaaccacaaagtctgtctaccgcacttccaatgacgaagaccacttttagcacaaacaaaaaaaaaacaccaacaaaaaggaattttgcagcataaagcctgtagggttcaccccaaattccgttgtcatatgctaaacttgatcccatatctacttgataattcaatg

SEQ ID NO: 271499 - DNA, 209 bp, Glycine max
  unsure (1)..(209): unsure at all n locations
tgaganaggttatgaccatttgaatctctcgagagctctccctgttcaatttcgtgcagctcgatatgtgatacaccagaatcggacattcgagtgaaaagttatgaccatatgaatgtcttcatagctttcgttgttcaatctcgtgcatgttgatatgtgaagcagctgaatcggacatccgagttaaaacttatgaccattttaat

SEQ ID NO: 271500 - DNA, 438 bp, Glycine max
agcctttacgaaccaaacccttatccaacaactcatttacttgagaaataacctcaagcccaagaggtgtggcaatgctaacaagtgtctttttacaaaagaggagatgtggaggttttctaagaggggaagtttctttaatgtttgtctttattgtaaaatgaatttctttcttagctaacctcttggaggagacacttacctccttacactcctccttaaccattaatggttgtccttcttgttgggggtagatttcttcactagatttttccccttttgcttcttcactttcactagaggaaggtgaagtagtagtctcatcttggctactacaaatgtcttggcccctcataatcatggttttcttggtggggcattgagaagtaatgtgtcctcttccaagacatttgaagcacttcatggagctagtattct

SEQ ID NO: 271501 - DNA, 297 bp, Glycine max
  unsure (1)..(297): unsure at all n locations
ctccatcaacaattaaagcacatattttccccatgaccctgcacctactatgagaaatgttctccctttgagtttcatctctatccttacacacaacgcattaacctcctaaccatgaaaagatcaccttccagcgcttgtacatcacattcactttcactnttaccagaagagatagaaaaagatgcactactgatattctcattacccaacacaacaatagtccttttgttacgaccttgggaggcaatgtgaccctttctaaacacttaaaacatttaatagaacttatttttg

SEQ ID NO: 271502 - DNA, 428 bp, Glycine max
  unsure (1)..(428): unsure at all n locations
agcttgaaggtgcgtaccccaccatttntcatagtaaaacactggtaatgtgtctactattattgtgatcatctctttctccatcattggaggtgccacttgagctgccaggtctctccacctttgggcgtattctttgaaagattcgtgcccctttctgcacatgttctgtggttgcatcctatccggagccatatcataattgtactgatactgcccaatgaaggcaaccattaggtctttccaagaatggactcgggaaggttccaagttagtgtaccaggtaacaactaccccagtaagactttcttggaagaaatgtatcagcagtttctcatcttttgcatatgcccccatcttccgacaatacatctttagatggttcttggggcaagtagtccccttatacttgtcaaagtctagcacct

SEQ ID NO: 271503 - DNA, 463 bp, Glycine max
  unsure (1)..(463): unsure at all n locations
ctgcagacttggtcttcaccggcaaaaggatcaaagtgggtctggaaaaaggcaaatctgatcatcctactttgataaatgcgaaaactgtggcaaatgataaggatgagaataatggagaaacccttgctatgaccgccattcctacacggtcaaatttcccatcagcccaacaatgtcattactcagctaataacagtccctctcactcaatcatccacaaagggcatccctaaatcaaccacaaagcctgtctaccgcacttccaatgatgaacactacatttancacaaaccaaaacaccaaccaagaaatgaattttgcatcgaaaaagcctgttgaattcaccgcaattctgctcccatatctacttgataattcaatggtagccatcaacccagccaanggttctcacacctcatttctctgatgatacgactcgaacacaacgtgtgctgatcat

SEQ ID NO: 271504 - DNA, 382 bp, Glycine max
  unsure (1)..(382): unsure at all n locations
agcttggttcgaggtacttacccgttgaagatcgaagaacgatgaataacgaatgaagaacgtcgaagaacggtcgaaaccttcacgaaattcctcacggaaacgttacggaaacgtttcggaagcacctcggcttggattttcttcacggaaacaatttttccaagcaaattcgaaagagagagaagtgcctaaggggctgaaccctttttcacttcacttctccccctatttatagnaaattgggggagaagcttgccacccagctcgcccaggcgagcagggttgcttcctccagaagcaacagccttctggaggaatcttctggagggcccaagtgggcctggttgctatttgcacccccatttttgctaagtacacc

SEQ ID NO: 271505 - DNA, 416 bp, Glycine max
  unsure (1)..(416): unsure at all n locations
tctacttatgtggcatggcgggcttccttcactttcttgtnctaaccgcgagctntgactatcgcccttccttcccgcgatgcttctctttacatctgcctgagtgggcttatagcctaaaccatacttnccacgatttcctttggcatttatcaggctagttatgccgccgttgtctttgcctaaacccatttccggttcgtaaccgttacccaacataactcgggccatcattactgctgcatcggacatgcaagcttgcccagagaaggagtccacggaggaaatgcttaccacctcaaaagactggaaagcggtttctaatgactcctctgcggcttccacataacgcatanaggatgggcagctcaccaagatgtcttcttcgctgatacgatgaccagatgcccttccac

SEQ ID NO: 271506 - DNA, 302 bp, Glycine max
tgcagctgactggcagtgatttaccttttttcaccttatattttcattcgttagatgagaaatccaaaagaaatgtcggtgatttccgcttttttactaaaggatattatgtatatatatatttatctcttttgatttccaacgggttcggatcaacggtggatttatttaccaagttcggatcatacaattaaacgttcggaaattatttattttaagtagcgaaatgactaagtaaatggttaacacgtaacaggggttaaagtaatgaatgaaataaatccgaaccatgggccccacgt

SEQ ID NO: 271507 - DNA, 441 bp, Glycine max
  unsure (1)..(441): unsure at all n locations
aaatatgcatgtgaattaggaagcattaacaagaatcacgccaaggctattgtgcaagcaatcaatggggcaaaacacaccaaaagattatgatgatggatggctcaaattctcacaaaggtaaacttgtcactttcaaattgagctttcaaaactatcatgacatgtagaggaaaaacaaggatttcaaatcacaaaatgtcaacagactnttattttcagaacaattacccatttcttgaacatatcctataattcanagaaaaatatgcaaagttgtacatgcaaacaaaattgacctaaaatattaaactagaacacccacaaaactaacaaaactaacaaatttaactcanacaaaactaacaaaactagcaaaaccaaaaccaaagaacactccccctatacttaaacaacatattgtcctcaatgtagcacaat

SEQ ID NO: 271508 - DNA, 434 bp, Glycine max
agctatgacctctacttgtgttgttttcattataatagaaactcagtatataacctgcattttttaaacttatttttaacatgaattatacataaagcggtccagatggtgcagttaaaaaagtcaatagatctggaagttattatttgtaatattttagtgtacgaggatttaaaaatagtagcatactagtttaattatttatgggtttaagtcaccatcatattcagtcccagaaaaaaatgtcattgtcattgtcatatttgtgaatcctcttcgtcagatcatgaaatgtgatgagacaaaaatgtctctgtccgacacataagcacgttccacttaataatagtctctgtcttccctcacagaacctgattaaaactgatgttgtacaaattgaatggtgtgatataatcctgaaagattgattttga

SEQ ID NO: 271509 - DNA, 255 bp, Glycine max
  unsure (1)..(255): unsure at all n locations
acctactggtcccagtggacctttatggtcagccatacttattccgatgaccctttcctcttttccttcgcattntctggtagctgctgctggagctacggtgcctttccggctggtgacccagccaccagcatcgctgtccactgatctacacaatggtggtggcgaccacctcatcggaactcaaaggctctttcacgcacccatctattgtgtgcccaacaccattttcgcgctccattgttccaccccatc

SEQ ID NO: 271510 - DNA, 424 bp, Glycine max
agcttgaaggagtttattgcatcagggaacaatttcactttaaaagtgggtcctaattggattcctaattttcaacttacctatttggatgtgacatcatggcagataggtcccaactttccatcgtggattcaatcacaaaacaaacttcaatatattggactgtctaacacggggattttagattctattcccacttggttctgggaaccacactctcaggttttgcatttaaacctctctcataatcatatccatggtgagcttgtgactacattacacaatccaatatctatcccaactgttgatctaagcacaaatcacttatgtggtaaattaccctatcctctcaatgatgtgtatgagttagaactttcaaacaattcattctctgaatccatgcaagaaattttattgtacaatc

SEQ ID NO: 271511 - DNA, 173 bp, Glycine max
tttcctggactattcacatacatctctaggttctttctctctggcaccacacgctcacctactaaccttgtctatacttcctctgactcagctacctttaccagcattctttgatgttccattcttctctcacgatcatactctctcttatgcacagcattagaaaccacctt

SEQ ID NO: 271512 - DNA, 344 bp, Glycine max
agctttcttaagaagattcctaaagatactagagcttagctacacatacctctctaatagctaagctcacctccttcagatgagaagctagaacttaactacacacccactataatagctaagctcacccccatgacaaaaaaacatgaaaatacaaaaaaaaaaagtccttactacaaagactactcaaaatgccccgaaatacaaggctaaaaccctatactactagaatggccaaaatacaaggcccaaacgaaggaaaaacctattctaatatttacaaagataagcgggctcatacttagcccatgggctcgaaatctaccctaaggctcatgagaacc

SEQ ID NO: 271513 - DNA, 401 bp, Glycine max
  unsure (1)..(401): unsure at all n locations
tgagctaattattgctgccccacatagctgctcggaatntatctcggccatactcttccttgcgagccctcttggcttcttgttcaagggctctcacggtagccgcatttctctctcgtaactcagcacactctttccggatgcttgtagcggctaacttgaatttttctttagcgagtcttgcctttcctagctctgattctagagcttagacttcttcatcctcttccggagcttcnaagttctcctcgctaataattttcaacttggagagccaatctaaccctcgtgtatgaactcttagccattcatgataaccaccgatgcctgttagacaagtggtctcagatatcttaagaacggggggttgaattaagatattacaaactatttccccaatt

SEQ ID NO: 271514 - DNA, 416 bp, Glycine max
agcttgggcaagatgaccaatgcaccatggatagtggccctaagccagaggatatgtgcatgcccaccaaagtgtgcctctttggcatgtaagagtaaagttgtagacatgggcctggcccggtagaattgggcactgggttatgtatgctggcccatcagcccaacttgttctcaattgtctaatcccatgcctgttcaattttatttaatttaaaagtgtgtaaataaataaaaataacttgtgaataaaagcactcagtgcctacatttgacagatgaggaagatgtgagagggtatatgtgatttataacagttcaaatcagtttcatatatagttggtaataacttgtagtcctacatactctttttcgtgtaaggatttaatcttttataattgaattactgtgaaatat

SEQ ID NO: 271515 - DNA, 461 bp, Glycine max
  unsure (1)..(461): unsure at all n locations
tccatcatataggccattcgcttgtttcatggaaaaccacgaagaacactatagtctcacgttcctcttcttacgctgaatatcaagcacttgcttccacaacttgtgaattacaatgtctctcttatcttctaagagatctatggattcccctttccaagtcctccgtactttactgtgatatcatagcgctcttcacattgctaccaatccagtctttcatgaacacaccaaacacttggacattgattgtcatctagtccgtgaaaagtcccaagttggactcatgttactactcccagttccttcttcaaatcaacttgcggatatattcacaaaggctcttccttctcaatccttcagcaccaatctttccaagctgcagttacaaaacattnttgcacctccagcttgtggcgggctaatagagaagacatataatcctaccttaaataccacat

SEQ ID NO: 271516 - DNA, 420 bp, Glycine max
  unsure (1)..(420): unsure at all n locations
agcttaactacacatgcaacaccatttaatttacatattaacatagtgccacaaagacaacaaaaacaaaaacagaaatatgaagcttaactacacatgcaacaccatttcattcctgtattaagatagcaacaaaaagagtactatgctgcctcttccagacttcaagttggtcactttaaccacaacaatgctccaagattattggttaagcaaaaaataaaggaggaaagccaccaaacagctaaaaaaatgcaggaaaacagaacaagaaggacaaatttataaaagaatcatacaacataacaatacaataacaaacagggcaggaaaacagcagcagccccgccaaacacaaacatgcacaacagtncaacttgaactgcagaagcaacgaaacaagaagaaaacaggcaagcg

SEQ ID NO: 271517 - DNA, 420 bp, Glycine max
  unsure (1)..(420): unsure at all n locations
ctaagctcgcactccaattgaaagaaatgaacgcaatgcttcgctaatgggtgtcctatcctacattcccaggtgaaatgaattcttgttttctacttgtctcccttctccaaagaaataggaagttcttcttgataatgatactgcacatgtctgataccttttcagccaggtatacaaagcttggaacagacagagaaagagtacagtagtatcttttattcgatgaaaggctccgaacaccatattttacctctattaacgacgttaaattaaaaattgttctattccgatacncaactttttgcagactgcactaaagatcattttggattctttaatttacatgattcttctaattcatgcttgacaattaatttttccacacacacacacacacatatatatagcttaagaaac

SEQ ID NO: 271518 - DNA, 371 bp, Glycine max
  unsure (1)..(371): unsure at all n locations
agctcgcatgttcaagtttcttgtgccatacccagtgatttcctttgatggatcaaagacatgctacattttgatttgatagttcactaatattaatcttataaagattacctttcttcttagcaatgaaaagttgggtcccgtttttgtgttggatgacacacctttctttgctaaaggaaatatcaagtccatgctaagtagattaggtttaatttatttaactaaaagtacattatcaatggaaggatagggatcaatacttatctttcccactcctgctatcttccctttctaatttcgtttgagagtggctattccaccatgcatgggagtcaagcattggaacataccttnttgtcctgtcatat

SEQ ID NO: 271519 - DNA, 394 bp, Glycine max
tctaaaacccctcaatctagtggattctcaaggtttgagaagtgaaaatgagaatggcgtcattttggagcaaactctcatctcacacaagtctataacattaatctaaactcgctcaaactggttttacgacgaaaactctaccgaatcaaaatttgactcctcaacacccaatttatcctagaaatggctcttgccttcactctggtcactcatttctctcctttgcacagcccaagctttctcacagtcctaaataacatttcaaactaggattaactcactctaacctccaattaccactaaatccagatttggctttctaaatcctcaaagcatcacactttctcactcatatcactacattctcactctttaaccctacgttaactct

SEQ ID NO: 271520 - DNA, 420 bp, Glycine max
agctataattatgtattgctaaggtaacagtaataagtacatcacctagtaaaaaggatgaagcaatacaacatcttggagctttctttttttggacaacaaaggtagattttattagataaaagtaccagaggtactaaagatacattaaagttatagataggctactggatataggaatcaggctgtgtatcagtcggatcaatccagaattctgaacaacaaatacaacaccttgccccacaggttttttgtttcctaattgcaaaaaccatctattaggttgctagacaacatcttgcagttgattcctttctactaagccgtgaccaactcagatgcaggtaactatatatatgtcaatgccatggcattggaatattgtgaaaatatcacaatacacacatttctctcaattaa

SEQ ID NO: 271521 - DNA, 413 bp, Glycine max
  unsure (1)..(413): unsure at all n locations
taggaattcaattccaaatcttgatctggacggtgtgttacttgtaatgcttaatgaaatccattatctcattcatgattntaatataattatcatcatcaaaatcatagattntttaggagctagatatcattcaatgtctttggttctaacataaaaagttggtttgagatgtcttctagtaattctaagatactacacattatatacaatgtaaaactgtcatacaaggatttgaaaatttgaaacaaataatataataaatctactaagtaaaatcaacaaaacataatacacaaatcaaccactcactaatgagaattctcgtgacatcaaaacatgtcaccgcctcactctcatgtccntgtcatcactttgtgttcgtcctttcctttgtacaccatgttatcact

SEQ ID NO: 271522 - DNA, 418 bp, Glycine max
agcttgaggggctgctatttttgctgtttccgtgagcaatggggttcttgagtgaggggggggcgtaatctctcgaactacgaagatgttgtccatcgactttctagtcttaatgaaagcagaatgagtttccccaataatagtctaaagcactgccgctatgcggttagccagaatcatatatacaatcttgcataacaaattacagcacgatatgggtctaagatggataacctgagaggactggtcatgcttaagaagaagcgcaagaatatcatggttgagctgctctagaagttttccagcctctaagatatcatcaccaatgagattcccacccttcttgaggaataaaacattgaaaccatccggcccaggagctttattattatccatcacagacataacgttcccaacc

SEQ ID NO: 271523 - DNA, 420 bp, Glycine max
  unsure (1)..(420): unsure at all n locations
aattacaatgcctagaggtataactaacttactaaagcattgttttgctntctaagcattatgctagtacacacatgcaacaccaacgctcgagtcatattttaggacaaccttaagatctttggatgtagcctaaaacaggaaacacattctatgttcagagcccaaaatctagtttgatcaagttgtcttacaaggattcaatagctccttcattcacaccatttgtgcaatcaaccatcactcatgcatataacatcatatccttctagcttccattcaatcacttaatactcaattaaaatcctttaaatcatgcattcgagtcaagaacaaattcagtaaatcactacaacgcactaacaataacaactatctctgggagttacaatcctacattgtttgaatcatacagctatc

SEQ ID NO: 271524 - DNA, 425 bp, Glycine max
  unsure (1)..(425): unsure at all n locations
agctntacagcccagacacctcaacaggtgagacccgacgaggctactcctcttgagcccacacctgcacaggtcgaaccagtgccaactaatccaccatctccagtggcggatccatcttcttccaagcttgaagcagctccctcatcttcacctattattattatctctgaagactctatagagtcagcatctggatgagctactactccttctgctacccctgttttccatctaacagatgaggaggatacacaggaccagtcacaggaattctaaattcttgatttttcctttttggaaattattataactactatggtttagtacatttttttttgtgattttggtttataattataactatatacttgtgttttttatgcgaatacttaatgtgcatgttttgaagcatactgaacagc

SEQ ID NO: 271525 - DNA, 334 bp, Glycine max
atgtctagagatattatagttgaaacaaaccagcacttaaattctaacgtataaagatctatagctgggtacaaaatatagtgaagaatagtcattttatagataaataattgaccatatttgctgggaagaacaccacttacaaatgccagatgatgcatgcttgggtatcttcaatttgacactatagaagatttgagaaacattaactataaaatgtaatcccttagatgatgtccataaaagaatttcattgtatagttctatacaaaatgtacacaaccatgctagatattttcaaactacaatggctcagtgtgagagtataatgaca

SEQ ID NO: 271526 - DNA, 400 bp, Glycine max
agcttaaacatctaataataatgacaatatctgattctctgtgatgctaaaattagaatataataatgaagggattcctggtttcctttgcatccggaaatcattcttatttttgaaatttaagtttgttctgctgaagtgttgctcacacttgtatcttgcgcatagagtttcttttgagcttagaggcttaaacttattttattgcttgatgtctgaagtaattgctttgtgtgctcagcccgacactgacttttgaatcctgattatgtatgtattcaataattgatattatgcttatcttataaatttagtgacatgtataatgacatatatcatccatcttgctagcctagcagctttaggtgggctgctctgtctactataaggaactgatact

SEQ ID NO: 271527 - DNA, 349 bp, Glycine max
  unsure (1)..(349): unsure at all n locations
cgctctctcattgtccgcaccactccattgttatattgtgatcttaaatgctattatccatatcatatgtatatggcaagttctaatgaacttaatcgtcctatgtatgctactgtctntatttaattacttctcgcatatatgccttaaataataaatagtcggtgtatttaggaacgttattcgttgtattaacgaacgtcttcataagtcatatgtatatggtagatttatagtagtattagacatcctaaatagccagcgtacggtgttagtgaaacttttttataaagggcagcaccaaattctgacacacccataacacaccttcaacttacaagctactatt

SEQ ID NO: 271528 - DNA, 408 bp, Glycine max
aaagatgtttctgaacctgcagagctgttattttggatctattgggtggataattctgtacttactatcgtcccaactaacctccaaacatttagcaatggaaattgttgttacaagagaattgcggtgtccatgtgtctgtagctactatccgtccaactaacctccaaacatttagcaatggaaattgttgctacaagagaattgcggtgtccatgtgtttgtacttgctatctggtaaatttgtaacacttttcgttgtctttgttggaacatctaagttgacagcctatgatgagattttacattgcaatcagtgtcacgtttgcgattgtcgtactctggactactatgaatctgaattcacaagctcttatacagaacacatgcctgtactgcggaatggcc

SEQ ID NO: 271529 - DNA, 431 bp, Glycine max
agcttgtatgcaacaacaccaatcttgtcttccattataaatgaaccatagtacttaggggccaactttacattggatatggcttgcactgaaacttggtgataagcatgtaattttacataaaccaagtcaccaatatgaaaactcctatcagatctgcccttatctacaagttgcttcattctgtcctgggtccttttcatgtggaatttaagtaactttaacatttcatcacgtttctgcaaactcctattaaccaaagcaatcttcaattcacttatgagataaggtaaatcaacaagaggagcttggccatacacaatctcatagggacttgctttaatagtgctgtggtaagtggaattgtaccaccattcagcatgaggcaaccacttggaccatgtgctggagagtcactacacatgcacctg

SEQ ID NO: 271530 - DNA, 239 bp, Glycine max
  unsure (1)..(239): unsure at all n locations
gtggtaatcagagcacaagagcttcaagtcggtgctccttaaacctccattaattntttgctttaccttctcttccattgatgtttcttcatctttttctccatgtatctactcacatgtcttgtgctaaatgttgatcacatgattcttcggagcttccaccgattaaacttgntatagaagctagatntgattctctatgggtcaaaattcttgatcttgatcttgaaccatgaatc

SEQ ID NO: 271531 - DNA, 260 bp, Glycine max
agctccttatccaagacacattcttgttggccaacctcttacttccatggcagatgccctagtggatggcgcctcctctcacctattctcctttatcttccactacatctccatggtgaaaaatcaccattgaaggacctcatgatgctcaaagatccaccctccatataagcttcacaagcaagctttcattagaaagcgatagtgatccatcttcccctcgatctgctaagctaatggattcactggcttagcaaatg

SEQ ID NO: 271532 - DNA, 276 bp, Glycine max
  unsure (1)..(276): unsure at all n locations
ctacgaatgtgatatagaaaaaatatccagaagcttnctctttctcctcttaagatcttctcttcctctctaagctcaccctcgagctcgcatttttctttctgcgagcttcttaagctcccttagattcacatattcgtcaggaggttccctagccctcgaaagctacgtatcactggcgctttcattgacgcactctgtcgcaagtatggctgaacgaactatatcgaaagctctcgcatcggaaaaattggaggaattgtttgcgaagtttgc

SEQ ID NO: 271533 - DNA, 204 bp, Glycine max
aggaaaagcatgagcggaagttttactctattaagggtaactcattcacttggatatgcgaaaagcaatgccctattgcattatccactactgaagtagaagatatttcagctactagttgatgctctcaattattatggatcaagaagcctctttagaggactgcacacatccatgagagaaacagttctatctattttgaga

SEQ ID NO: 271534 - DNA, 587 bp, Glycine max
  unsure (1)..(587): unsure at all n locations
gtacttcatagctactctcgatcgtctgcgactgtctgcatcntgnanngncncgattctcgtcgtcatgcaggtccatctcgctcgcggcgcggcgttatttcgatccatttccagagaccactnattctatatagtcgacctgcatgcatgcccgcatgctctatatttacattgatgcttgtatttatgggacgatcgtgtatgtcatttttgtctnaagaactgttttccaccggttattctatctttccatatgtttgccttcgcaggaaatggcccttagaatgcttgcctcatagaggtccttgaacgacaatgctacagaaagaactagatcctctccggagtatgatagtcaccgccttatgagcgcggtacaccatcatcgcttataatccctcaaagggtggtctcctactcgggagcaacgcgtccaaattttngncnacgagtataccgatacccacgaggaaatcaggcgcctgctgtgggcacccttggccactcctctggccagatggactcgcaatccgacattacnnttatcccatgtctgccaccacaagagggcttcccttaccacg

SEQ ID NO: 271535 - DNA, 433 bp, Glycine max
agctttgagacgcatgtgatcttttggcattatcaaaacatcggcttgatcctttgtctacaatctccccctttttgatgatgacaatccctgaaatcaagacaaactatatacaagatgatagtacgttcacacaacccttactccccaatcttttggcatgaatgcctaactttacttaatgataaatttctaattgatttctaacccaagctcttcaagttctgtccccctttggcaacatcaaaaagaactaagcaacataaacaaaatccaaacaaagccaaacattaaaccaaaataaatccatacattgtcataaccaaccaaagcaaagtccagatatataataatagtgcaagaatacgataactagtgcaacataatagccaaatacacggcgataaaacagagtactaataatactaaatac

SEQ ID NO: 271536 - DNA, 382 bp, Glycine max
agctttctcggagccattcctgcgaaggcatatatttggaaagttagtttacaagaaatataacaatcattacaaacaagggccaaacaacacttctcatggcacgagtgtcaacatgcactttataaaataatcatattgcggtcgtgctattttatgacacatacgtatttgcacacataaaaattttgtgtgaagcattttacgacacctatccatgtacatattttttgacaaaccttttcatgctacatcctatatatatacacacatctttttggaaggctttttttgtacctactcacaaatacacatattttttaaaagaacacttttacgctacccatccaacactttgtgaggcacttcatgctatattatg

SEQ ID NO: 271537 - DNA, 504 bp, Glycine max
  unsure (1)..(504): unsure at all n locations
atttggacgacataacacttgcctgtcattcctaagagctcatcgattttggacatgatccacgcgaaagaacatgtctaggaccataagcctgtaaatcagacaccttttccagcacatgtgacgatggctcatacctacaagactttatcatgatgagtatgccgcaagcaaaagcaggtcaaatgctggttataagtccaggccttagaatgtaacaataccggtgaatgtatataggacactatattantatttctgaccgaacaagatgagggtgatgaatagtgatcattaagacctaaaaaaatatggaattagtgtcaccgtaaacagtttcaaactgtttactgtttgcaccttatgataataacttgggggatctagtatacatgcaagaaccacagcttatcctattaagtgggattcacttcacataagattaatccacatacatcgactctctcataaccacacaagagtacacattgtgccattgttacn

SEQ ID NO: 271538 - DNA, 334 bp, Glycine max
  unsure (1)..(334): unsure at all n locations
agctngaaaggaaaagcatgagtggaagtcgtcacttcattaggggtaacttagtcacttggatatgcaaaaagcaatgccctattgcattatccactactgaagtagaatatatttcagctactagttgatgctctcaattattatggatcaagaagcaactagagaggactacaacatccatgagagtaacattcttatctattttgataaaaaaaaaaaagctactatcagtctttctaaaaatcctacattgcatttaagggaaaacatatagaaattaaatattatgttataagaaaccatgttcaaaatcaactttgctatatattta

SEQ ID NO: 271539 - DNA, 588 bp, Glycine max
  unsure (1)..(588): unsure at all n locations
tatcgttctttttccttcnttttgatttcgtgaatnttttctattcnttactatccagccgcgngcctgattgctagctctcgcgtggcaaccgtgatagtacacgggatactctaagtcgacctgcggcatgcaagctagaccttctggttcttcctataanttgtatgcgtgacaaagcctgctcttatttgcatcttctcaagtccaagtaggcgctccggaatcatcgtttccttcaaaaggaggaatggttgagttttatacacatcagttccggcattgtctcaagaagcaccaattactccacccttactcctacagatcattcttcatgatcgatcgtcttatgctacatcttgatcccacactttcatggaagcgcaatatttgtcgttggttcattaacgccctctcccatgatgcatcacaaactttcttgtttggacttgcgataagacccatctccatctattacgaatacctacccgtcactttcaactaacaaattatacctaccaagaaaatttagtggctggtgaatacctcacccctaatagtacacaccttatgggtgttctctatgcc

SEQ ID NO: 271540 - DNA, 433 bp, Glycine max
  unsure (1)..(433): unsure at all n locations
agctttatgagttgagggtagagctcttttcccttaatttgatgactttatcatttgtagtctctatagcatggtaaatagatgaagcaccatatgctaaaacaaattcaatagtcccaagtactttattaaacaaatgtattttgttttttttatgttgaccttgatttttaacatagggtaggggtacctatccccttgtgctttaagtaaaggaaaatgaccccttaagaaaagaaggagttgaattaaaaccgtttgacaaggataaaaaattatagcattagatgttatgttgctagctccaactgatatgaaccctcatggcacaagggctgacttangatcgtctangattaaaccttgatgaanaatgcggaaattgattaaggaaaggatggaaaataaggtggttaatctcgtgggtcttaat

SEQ ID NO: 271541 - DNA, 421 bp, Glycine max
gagctcgagtgataagcgtatgatattttgattccctacagggtcaggctgagtaagggtaacacgtacttctttcttgcctaaattaacgttgtactttatcaattccttagacatgaatatctcccaattggaaacaagtttattcaaaatgtaaagattacctcgtagcttcttagatcaacaatcttttttcacactcaatcattcgttcaacaaatctaaactcggagacttgtaaaatgtacaacttattttatcctattacgaaaaaggaaagcatatcacgatggaaaataaaatgaaattttaaacaaatattatctttcatttataaaaatgtaaattgtaactttagaaataatatgagaaattaaaatattattatctctacttacaataaataaataaagctaatgga

SEQ ID NO: 271542 - DNA, 338 bp, Glycine max
  unsure (1)..(338): unsure at all n locations
gacaaanaaagtttacgtctattgactgaaatatattaatctatccaccaacttgcgaagggaatcaagatgatggttcaaattaaacgaaaaccacacaccttggcttccgacaaacccacttcagaaatgatatctaatgcatatttccgtgctacaagaaaatgctagntagactttgagctaccttaatctcccaaaaatattntatacctctaagatccttnatatgaaaatatacacaaaaatacgtttcgaatgccttaatggcatcaccattactgtccaaaatcatgagataaccaacgcggaccaatacattaagttgcagattgtca

SEQ ID NO: 271543 - DNA, 434 bp, Glycine max
  unsure (1)..(434): unsure at all n locations
agcttggaaggatgcttcaatggaggaaaagaaagagggagagaaagagagaggggggagcacgaaattgaaggaagaaaaagggagagaagttgaactttgagttgtgtctcacaagactctcattcatcaaagttaccacaagtgttacacatgcttctatttatagactaggtagcttccttgagaagctttcttgagaaaccttccttgagaagcttctttgagaaaacttccttgagaagctagagcttagctacacacacccctctcataactaagctcacctccttgagaagcttctttaagaagattcctaaagaagctagagcttagctacacatacctctctaatagctaagctcacctccttgagatgagaagctagagcttagctacacacccnctataatagctaagctcacccccatgac

SEQ ID NO: 271544 - DNA, 338 bp, Glycine max
  unsure (1)..(338): unsure at all n locations
tcatggtgaatcaagaatgattcanagatgttgtgatgatcacatagatgattacagaagatgatgaccaaggtgatgaccaacagctcacaggtcaatcaaaggatgagttctagatgttcaagagggaatcaagaatcatctaacactcaagaggaaaagttgaagaacacttcaagattcctgacgacgggtgaattccagaatcaagcttcaagaatcaagatcaagattccagattcaagactccagaatctagagaagacttaatcaagatcagtctggaaaggatttttcacaaactgagtagcacatgaatttttacaaaacatgtttac

SEQ ID NO: 271545 - DNA, 421 bp, Glycine max
  unsure (1)..(421): unsure at all n locations
agcttattggattatggngcacccgtcatatgtggtactaggtggagatcgggcgatggtgcaaatcaactctcccatttccacaagtcaggcataagcacaccatccccagttgcccacctttgaattgagcttacgcactcctacgtagcccttatcctcgttcctttcagtaccgggtccccatcaacccctccaagatttcacaatatccaaacaattcaattccatttgtcatgaaactaccctaaaccaagaaaaatatagtggaggcagaaaactctgcacaaaactcattcaaattccacagtttttcctactcacatacctcagtaacattctcttcgttccgattcgttcgccattggatcgccttgagattttaactgagggttcctaatacagacatctaagtttgacc

SEQ ID NO: 271546 - DNA, 429 bp, Glycine max
  unsure (1)..(429): unsure at all n locations
cggtcttgggcaatagcaccccacctgacgtccccaaggtcttctgacccccgcgacatatctccaggttccactctgtggtcaacaaacaaaagtaggaagactaactcttccacgctttctcacctcaagcttagtggattatggggcacccgtcatatgtggtactacgtggcgatcgggcgatggcgcgaatcaactatcccactttcacaaatcanacatgaacccaccatcctcanctgcccaccttcaactgagctcatgtactgctacgtancccttaccctcgttcctctcancaccaggtccccatcaacccctccaagcttccataatatccaagcaatgtaattccaactatcatgaactaccctaaaccaagacaatatggcacaggcaaaaaactctgcccaaaacacattcaca

SEQ ID NO: 271547 - DNA, 437 bp, Glycine max
aagcttaacaatggcggcacccatttaggagtatcctcgccattttgttggcgggttcaggagcagctttcgcttctgttagtggcggcacgtctatgccgctaattccgttggcggcaccaccccaagaagagacccccttcataaaatgttaaagaagagatccctttacgtaaatagtttataaaggggaccccctacagtaaatttacctaaataattcaacacacaatttttggttctcttcggagacgcctttttacaatttatatagtaaatatagacaaatagagtaatagaatcttgaaaatctctaaaccgtatttggataaagccttaatacaaaaaaaaaaatacaaaagacggagaatttaagacaaaaactggtggctgaaactatggatcgggagatttgatagtagtaaaaactttacttt

SEQ ID NO: 271548 - DNA, 348 bp, Glycine max
  unsure (1)..(348): unsure at all n locations
tctatcttacactcaattcatcttctattctcctattgatcggtctactttaaagtaaagtaatatattcaattacgacttcatgctcaattcaaagattataacagtaaaaacaatttttattcacctctattcaaactgccagtttagcgcaagtgtttattcttctgataaacttgcgggcgcacaaaacccagcattgcttcaatgtgcataancatgggtacngtggtggtgtttcttcaacctgcatttcagattgtcttgatttgtaattcacacacacacttactcttaacatcatatcttctcatatctcaactgtgattcttcaaatgcgttgtgtgt

SEQ ID NO: 271549 - DNA, 421 bp, Glycine max
agcttgatttgtgagttgattttatccttattttcactctggttattagtcaattcattcaaggaaacttccaaagaaaaacgtctgattgatttttttctttttgattattttattcaaagatttttttattattttattattattttgtccttttttggtttaaaacgcggttacaacatgaatgattggttgaatcttattttaacagagattaaacgatattacaactcaaatgatcggtggaaattcattttattatttattacgtgagaaaatggcttatataaattgttaaagcacgtcaaaaggcggttcataaaataaacgataataaaataatagcttgcggaataagtggggaccactaatggtgcatagaatgcattgaacgatttgatttcgacaacttacccgttga

SEQ ID NO: 271550 - DNA, 387 bp, Glycine max
ctgagggtgcatagcccaccattctttcatagtagagtaccgataatgtgtttaccatcacgattatcgtctccctttttgcacatgttctgtagttgcatcctattcggaaccatatcagaatagtactgatactgcctaacgaaggcaaccattacgtccttccaagtatggactcgggaaggttccaagttagtgtaccaggtaacagctaccccagtaagattttcttggaaggaatgcatcagcaattcctcgtcttttgcgtatgcccccatcttccgacaatacatctttagatggttcttgcggcaagtagtccccttgtacttgtcaaagtccagcaccttgaacttgggcgggatgatgatattgcgtactacgaac

SEQ ID NO: 271551 - DNA, 424 bp, Glycine max
  unsure (1)..(424): unsure at all n locations
agcttcatggtgaatcaaaggtgattcaattgtgttctgatgataacaattatgataacaaaagatgatgaaaaaggtgatgacaaaaatctcaaagatcaatcaagaacaattcaagagttcaagataagaatcaagaagaattcaaaactcaagaagaaagtctagagacaagaatcaagattcaaggttcaagatctcaagaatcaagatcaagattcaagaatgaagagaagactcaatcaagataagtattaaaaagttttttcaaaactttgaatagcacatgagtttttgacaaaaccttttaccaaatagtttttactctctggtaatcgattaccatattgttgtaatcaattaccaatagcaaaatgagtttgaaatagttctcaaattgaantacaacgtttcaattattttc

SEQ ID NO: 271552 - DNA, 286 bp, Glycine max
gtggaacggtgagacttcctacttttattctttgaccatacagtggtacctggagatatgtcgcggggctcacgagaccttgcggatgtcacgtggggtgctattagccaaaaccaaacttgatcaatcttgacccaacccgggcatagtcagacagtgagaacctgtgatgtacctaatcaggcgagctcctgccattcaaccgattaaagaacaatgaccacaaatctacgacacttgtgtggtggctggaccgatgtgaatcttgattgatatatgggatatt

SEQ ID NO: 271553 - DNA, 367 bp, Glycine max
tgtggcatgcaagcttgtatcttcctttcctcctcttatatcattggcttctatgtcctttcggggggattgttaaaagttgaatcgggattttgttttatttgtattacagctataattagctaggagtagttacaaaattagttagctagctttacaactttgtataaaaactcattttctgtacttggtacaaaccaatttcaatgaatactcttcttaataatttgtgaccttaatgagttggccatcttttgaatgatgtttgatacatgtcacccagtgaagaaatatgtctaatgaataaatctttgggtttgaacttctattggacaaattgctgctgactctcatatgcatgtaacaa

SEQ ID NO: 271554 - DNA, 449 bp, Glycine max
tgtcaaataaatcactgcatattgtgcagtccctatcatccttctgaggaatgtacaagagagtaggcttgcaaacaaggttccaatttggataaaagtgtaaaactacttattaattagaattttatgaatcattgtttggaatattgaagaaaaaagacaacctgacaaccagctgccctgaaggaactaaaatcatggcattcaacaagaactctgcatgctctctgcatggatatcatcaataacttgaatagctgcaagattgagaatctagtaagtataaggagctgttaactaacttgcatagctggaagactaagctcctcacgtacatgccatgctcgatctttctcgaaggttgacaaacgctctggcccagaaagcaaccgatagaagtatctgaatagtagttccaaataactatcaattactgcaaatggtcataa

SEQ ID NO: 271555 - DNA, 429 bp, Glycine max
  unsure (1)..(429): unsure at all n locations
agcttcacgaccaggtggtcttcgtaatagaagagacattcggcgttgccaaggtgttttcctctcaaactctgaaattgcgattttgtgctgctttttgtgttgcttttgttgcctaggtttacattttcattccttttcattctccctattcttctgaacttttccttcctgcaggtttcttgggttttttttttacctctactaacctctgtgggtatgccttccattgtttgtgcgatttttcctccaagatggtgttgattatgatgaacaaggttttatcgatgtttctgacctttttttatgttaccaacaagattntatcgatggtgttgatcatgatgaccagagcattctaggaacgccatgtcaatgtgaaaatacaagtttctgctcacaacttttaaatatgttggtctatggttg

SEQ ID NO: 271556 - DNA, 459 bp, Glycine max
  unsure (1)..(459): unsure at all n locations
tgagtgtcaaactccttaacatttagaatcaattatcccaaaggcttaaatagttcaacgatatgaatggtttaatactttaattacatcttttaacatttactattcaaacttaggctgcagtttacaacataggagctataagtgctgccttccttgccaacattgccaaaactgatgcaaaagtaagcttcaatggaaattcatatcacttatccgcatggtctttgagcatcttaccacactgcaagagtgtagtgcttaatacggcaaaggtttgctttatcaacttcgtgatcaaaatagatgatgcaattgaatgaagttccttttgaaatgcatgtgattaatctatctatagtctatagcttagatcttttctttcattctctagtacaagaagtggcatatcctatacgtatntatgatatgacagaataactctgcatctatgatttc

SEQ ID NO: 271557 - DNA, 545 bp, Glycine max
  unsure (1)..(545): unsure at all n locations
tacccttctcctctctccatccanatctttttttcntttcatttctcctctacaccatgattgtcctttgctgccgcgtnctatanaacgacctgcagcatgcaagcttctgcatgtctaggtgtttctagagtatagtccagctcttgatagttttaaagatcttgttgtgtgaagacctgcacagaaccgagctcgaagaagaatccttcctcgaaacttgggatgaagttgcgagtgatcgggatggtctaaaggtggaggagacatccccaccactcttatttctttaagccttcatctttctcttctctttggcgaaaggaagcttcccagttatggaaagctaaatctttgtaggttcttccttgtacgtacttggtggaaatacctgaatatccatataattatgtgtttgagagttcactgtgctatcaaagacttcattctaacatgcttttggctttgtcacatagatgcatatgtttttaggacctttgaacactggaaactggtctaattcttaaacctggatatgaggggcn

SEQ ID NO: 271558 - DNA, 612 bp, Glycine max
  unsure (1)..(612): unsure at all n locations
ntcctccgtctntgctctcntnatatattcttttttgtannactcccttctttcnttccccgcgccggtgagttgtgtctctacatcacgtgcactcaagactctcaagcttggtttttggcacaanctcnncacctgacgtcnccattgtgtcctgaccttcgcgacatactcccagtgagcaccgtatggtcaaccaataacaatatcgagactgantcttccacactttgtacttcaagcttggacgactatggggctgcccgcactatcgaggcactaggtggcgatcgggcgatggtgcaactcgagtctctagtccacaagtcacacataaatctatcatccttagattcccacattcaaatgagcttacttactccaacgaagccgttatcctagtccatctcaccacgatgactacatccacccttccaagcttcaacaatcatccaaagcacttaactgtctaacatcctgaactgtccatcaccaacaaaagctgggctgaggcactacactttgtcgaaacgcagtcgcatgccacagctttcactattcgacatccgactacattctatccgacttattcgtaaccggcggatcgctccg

SEQ ID NO: 271559 - DNA, 325 bp, Glycine max
agctatataactaagtattatgctaaaaattcgaagaaaaatagttcagacaaatatgaatttaaacaacacaaacttgtgacatgaggtataagacataaaattaaaaagcagagttcacaaatactatcttgccttccacgagcacttatttaacatctataatcggacgcatggttgtggttgaggcttcactatcatatcctccataatacttttcttcaatcgcgagcaaatccgatcatggacttagcacctgttggcatatgctctaatgccttgaaaaaaagaatgttaacatgcaaatgtttaaaatgcttatact

SEQ ID NO: 271560 - DNA, 286 bp, Glycine max
  unsure (1)..(286): unsure at all n locations
gtattgcatgccaaggcaagcacagtagcagggggaggaccaacagcactcagccgcagatgcaccgttgccacctctacggtagccaccatctctactcacatgcggaggatggagctccagatgcatgcatatgtgcagcatgtgaccgactagtatgcagccaatcatangggtcaggtgcagctgaatgagagctttaaccactacaccctgcatcagtagagccaagatcccagccctttcccatggcctaaccttaaccattttggggccacaattgcat

SEQ ID NO: 271561 - DNA, 266 bp, Glycine max
agcttcgattcatgcgcataatatatcgaggctctcgaaagtgagcaacggaagctctcgagaaatttaaatggtcatagcttttcactcagatgtccgattcatgtgcataatatatcgagacgctcaaaatctaacaatggaagctctggagcaattcaaatgggcgtaacttttcactcggagatccgattcatgcgcataatatatcgagacgcttcaatattcaacaacggaagctctcgagaaattcgaatgggcataac

SEQ ID NO: 271562 - DNA, 328 bp, Glycine max
tgagatgaggaagtgttgaacggtgaaactttctgcttttattgttgaccacagagcggcacctggagatatgtcccggcggtcaggagaccttgcggacctcacgtggggtgctattgcccaaaaccaagcttgaccaatcccgacccaacccgggcatagtccgtcagtgagaacctgtgatgtacctaagcaggcgagctcctggcagtcccccgattaaaggaaaacaataccacaaagcaacgaggcttgtggtggctggccaactgtgaattctgtgtaatatgtggattgtggcctctggtcatcgattaccaacggtggg

SEQ ID NO: 271563 - DNA, 414 bp, Glycine max
  unsure (1)..(414): unsure at all n locations
agcttctccccaattttctataaatagggggagaaatgaagtagaaaagggttcagccccttaggcacttctctctctttcgaatttgcttaggaaaattgtttccgtgaagaaaatccaagccgaggcgcttccgtaacgtttccgtaacgtttccgtgagtgatttcgcaaaggttttcgaccgttcttcgacgttcttcattcgttcttcaccattcttcagtcttcaacgggtaagtacctcaaaccaagcttttcgattcattctatgtacccgtggtggtccacatttggtttcatgtatttttattctcgtttcatttactttttatacccccttttgacgtgcttaagccattntatttaagtcatttctcgcttaacctaaacataaaataaatttccaccgatc

SEQ ID NO: 271564 - DNA, 90 bp, Glycine max
agcttttaatggaagtcaagagcatgatattactcccataccgtggactggtgagcaggtatatcagcgggttcaacactctgcacactg

SEQ ID NO: 271565 - DNA, 345 bp, Glycine max
  unsure (1)..(345): unsure at all n locations
acataaagaacatctgatattcatttggtacctaaacacattgaaatcgcaatggttccttttgcttttgcaaaaatatagccaccattccaaattctaacctttgagacattagttggcttcaaatccttgaatagagtcttatcatatgtcatgtggtttgtacaaccactatcaatcaaccaacatttagatctactcctgattgaataacatgtagtancaaaaatataatcttcttcctcctgctcaacaacttacgcattcactttatgctgctgaaatttgcttctacaaattatagcttcctgcccaagttgattgcacttgctgcactttgcgtct

SEQ ID NO: 271566 - DNA, 427 bp, Glycine max
gatccttaagtcacctgcagctgcagcttagattttatacgggccttcctctcttgcaggggttcacggtcatcatggtcgttgtcgatcgtttctctaaggctgcgcatttcgctgctctccccacacaccattctgcctataaggtggccgtgttgtttctcgacaccgcttgcaagttgcgcgggtttccccgtagcctattttcagaccgagatcccatttttatcagccatttctggcgtgacctattcaaacttagtggcaccaagctcagaatgagcaccgcataccacccgcaaaccgacgggcagacagaggtgctcaatcagacgctcgaacagtacttacgcgccttcgtccatcaccaaccttcacggtggtttcgattcttatccctggccgaatggtcttataacaccaccat

SEQ ID NO: 271567 - DNA, 412 bp, Glycine max
  unsure (1)..(412): unsure at all n locations
actaagcttcttatgtctccaaatggatcagaaaatgaatctcatctttggtattgccagttcggtcacttaggctacaacggattgaggatactttnttataagatggtaaatgggttgccttcaatcaagatttcgaagaagatatgcataacatgtttaactggccagcaacacagagactttatgcctaagaaaagtttatggagagcatcaaacaagctaccacttgtgcatgcaaacatatgcacgcctattaaaccacaatcaaacagcaacaagaggtacatcctaagttctattgatgatctcattcgtaaaacttgaatttatttcttacatgaaaaatcataagtttttctcatgtttagaaattctaaaactcgtgttgaanaggagactgatgcatata

SEQ ID NO: 271568 - DNA, 307 bp, Glycine max
  unsure (1)..(307): unsure at all n locations
agcttaagactcccttgaaccatcatacactatctagagtatgttatagtcaaacaaacaacaaattagttattaaaaaaaaatccagcaaaaccaaacactttcaaataaaacttcaaaatgtactgcagattagaaaaattacaaatattcaaaatagactcaaaacagaagaaaaagaaaaacgtatcaaatgaaagacctcacctcacctccgaatcctgatccanatctttcctctcagtctcactctctccgagcaagctcttattttttttcctcttcaatttggaaactttagtgtccc

SEQ ID NO: 271569 - DNA, 500 bp, Glycine max
  unsure (1)..(500): unsure at all n locations
tctaacatcaaagattctaaaccaaaacccaaccgtcctatttgcatcatacttctactactcaactttcatccccaccccttcccaagttacaatccctaaaccagccaccccctaacttcccatacctacaatgaaatcaacctaaatgcaagaccataaaacactaagtttattctacaactgcgatgaaaagtatgtgcttggccataggtgtagtgcgaagcattttctcctgttgttggtcgaggatgatgctgattctaaaaccattgacccagcaactcctaacccaccccccttgatgaccagtcagaacctatacantttcacttttccccataagcctttactggatccccttcccctcaaacactcaaattccaaggatttattggaaatntacctctcactgtgctagttgattcgggtagctcacataacatactgcaacttagaatacccancatcttcacttatccatcacttccaccactcct

SEQ ID NO: 271570 - DNA, 390 bp, Glycine max
  unsure (1)..(390): unsure at all n locations
agcttgtaggctacatttacaaccatacattcgctntgaacaccatgaggaaattcacacaaaaaactgaattggtgagacacggagttacaagatttgctaccactttcttaactttgcaaagattgcataagccaaaggccaatctttgaaggacttcggatgaatggttgaagtctaaggcagctaaagagcccaaggggaagaaagcagctgatgttgttcttatgccatcattttggaatgatgctgtctacactttataggctatggggcctcttgtaagtgtgttgacgttggtggataatgaaaaaaagaaaactgcaatgggttcattattaagcaatggatggggccaagagcaattcaagagctttcataacaatgaag

SEQ ID NO: 271571 - DNA, 412 bp, Glycine max
  unsure (1)..(412): unsure at all n locations
ctcactttcatttttntggtctttggttattgcttgtctctctgtttccttgcttgtgagttgccatatangaaattggaaaggaggattggtgccatatcttgaagaatttgagtcaagaagcaaggggccaaccaccttaagagatattggactaagaagcactccaaattgagtgaaacactaaagagagaatagccaccacaattgaggacttttttctttgtaattntgtaattggcaatttgctttgctttcaaattttgtaacaaaaggcctttcattggaagtaagttgggagcctccgctacgtcaccctacttccatttgtgtgtaataattctaggcaattctcccttaggatagtgagtgttttgttgggaaccttaaatgaggtcatccaaacactcct

SEQ ID NO: 271572 - DNA, 395 bp, Glycine max
agcttgcacaacaagtaactaaatattattttgtacaaaatgaagtaactaactaactaacttccactaaatatatagagtgactactcagaaggaagcgatgggccttgattaggcccatctaatctacctaattaaactaattacacaaagcaaagcccaaatttgtagcctatattattcaaatgcaaagttatcgacttccaagcccaatttgacccccaaaatggcagaattgggcaaagcttatatgtgaaaaaaattgaagttcttttcttatatttccaaagactactcacatgctccatttggagttctgtagtgcctctaagctctgcataaggcagataggtcaagtaagcacaaaaatccaaaaataagcaacaattatcaac

SEQ ID NO: 271573 - DNA, 479 bp, Glycine max
tctatagaggctggatctttgagcttcaatgaggtccttcaatggtgattttccaccattgagatgcagtggaagacaaaggagaagatgacggaggaggatccatccactatggaataagccatggaagaacgagcttccccactaagagagtgcctttgataagaagcttggagaggatgcttcaatggaggaacagaaacagagagagaaacagagaggggggagcctgaaattgaaggaataaaagagggagagaagttgaactctgaagcttgtctcacaagactctcattcatcacatttccaacaagtgttacacatgcttctatttatagcctacgtagcttctttgagaagctttcttgagaagcttccttgaagagcctctttaagaagcttccttgagaagcttccttgaacagcttccttgagaagctagagcttagctacatacacgcttctaataactaagctca

SEQ ID NO: 271574 - DNA, 431 bp, Glycine max
agctttaaaatttgaattaaaacgtttagaaactgctggtaatcgattaccatatatgtgtaatcgattacacagcgcaaattttgaattcaaattttaatagctgttgtaaatcagttttggccactggtaatcgattacatcctctggtaatcgattaccagagagtaaatttcttgtaaaagactttataacttagatttcttggccaaaccttttgctactttaattggaattcccctcctatttaatataccttttctaagactagagacatgtcttgatcatccatcttgaatatctttaatctctgtgtctcgaataaagccttgagacgcatgtgaacctttggcatcatcaaaacattcagcttgatcctttgtctacaatctccccctctctgatgatgaccatccctgacatcagacaag

SEQ ID NO: 271575 - DNA, 420 bp, Glycine max
  unsure (1)..(420): unsure at all n locations
tatccgcaaatcatgattntatgttactatttntttagttgggtggttacgaanaataaggaattnttcatttgtctatttctaacgtgcatatttgttacctttttaatgatcgtttaaggggacatacacatcatttatcctcatgattacgttgcagcacacagagattaaagcatcatttgaaacaagtacacatgtcgttggacatgcgttccaaaaaaccttatatangaagctgcttggaatggtttcaaggtatgctttaaatcagattactgctgaattagagccaacaatccctcaagttgtggttgcgtantgagaaccacgcttggtcttccttgtgcttgtgagctatccaaatatgttggtggttgcatcccattggattcaatccatatgttctggaggagactc

SEQ ID NO: 271576 - DNA, 428 bp, Glycine max
  unsure (1)..(428): unsure at all n locations
agctatacaatatgtttcgcccaatcaatgaaggtgttcagggcctgtcccactaactaaacctctttagtgggtatagggacataagcatcagcatctcgaacttcttcaacacccaccttcaccatatcattggtcaaaggcatgtggtgtacaattgatgacccctcataaactctcccaaggacaattaaacggggaggactatcatcaacatacaacccgcacttatctaagatatcagtgtcagggtcctatcttgagggatcaacacaacttccctttttgctcacacaggcaccagaagacgctacatttggctcaactggatgtggttgctgggattgcatctagctgaacgacaacattagttgttttgtcactttntcaatgatcgactattctaactcgtctcgaatattctatgt

SEQ ID NO: 271577 - DNA, 371 bp, Glycine max
  unsure (1)..(371): unsure at all n locations
cttatgatgaggttatcggatgtanggatgaagacctaaatcacgttaacaaaataaacagcattgatgaaggcctcaatcacgctgcctggctatttggcactcagcctgcaccacccttaacgtcttggcctagccgccactgacctccccatgatgcctgacgaatcccatagtccaacatctgaatgccacaactaggcatagcaatgaaacccgtactcgtggatatccgcccaaatccatcccgattttgatggggaatacctgagttgattacgtacgggtttgagttccaggattaccccacttatttaatccgggtcgagttccgggacaaggatgtcattatccatttcatactcattccc

SEQ ID NO: 271578 - DNA, 397 bp, Glycine max
  unsure (1)..(397): unsure at all n locations
agcttctccctcttttccctataaatagggggaggagggaagaacaataatgttcaaccctcctggtatctgagaatcacttaaaattagtgagaaaaattttttccgtgaagaaaagacaaggcgcttccgtaacgcttccgagacattttcgtgggtgatttcgtgaagattntccaccgttcttcgtcgttcttcgttcgttcttcgtcgttcttcggtcttcaaccggtaagttcccgaaatcgaacttttcaattcattctatgtacccttagtggtccccacttgtttcacgtgcttttattttcatcttatttacttttcgtacccccttttgatgtgccttaatcatttatttaagtcattttctcgcctaatcaaaaaataaaataaa

SEQ ID NO: 271579 - DNA, 472 bp, Glycine max
  unsure (1)..(472): unsure at all n locations
tcagcgactatgtttntcatgaatttcacgtgggtgaaagttcgaagatgggtgaacaagctgcactggccaaaagacgtgatactcgattctaatgtcaattctcctttgggagtacttcatattttaaagccttctatcttattttgtaatgtactttcattatcattccaccacacatcttgttatttgaatttgtgctcaactatttccgattataagcttatagcaccttcaagtgcgaggaacattacatttcagcttatgatatgatgatatttagtatcttgcctcatatatatctttttncacttatttaataattagatgtaattctgaatttttatttgaaaagaataaaattaactcgtatgttatttaaccccaaaagttatatcttatgaaacattacttatttttactattatatctgaggtggagaacattgaaaactatgtggaacatgatgtct

SEQ ID NO: 271580 - DNA, 422 bp, Glycine max
  unsure (1)..(422): unsure at all n locations
agcttggagaggatgcttcaatggaggaatagaaagagagaggggggagcacgaaattgaaggaggaaaagggggagagaagttgaactttgagtggtgtctcataagactctcattcatcaaagttacagcaagtgttacacatgcttctatttatagactaggtagcttccttgagaaactttcttgagaaaacttccttgagaagcttctttgagaaaacttccttgagaagctagagcttagctacacacacccctctaataactaagctcacctccttgagaagcttccttgagaagattcctaaagaagctagagcttaactacacacacctctctaatagctaagctcacctccttgagatgagaagctagagcttagctacacacccncctatatagctaagctcacccccatg

SEQ ID NO: 271581 - DNA, 467 bp, Glycine max
  unsure (1)..(467): unsure at all n locations
tatatgagttagcaactcctatctcacatgacacaaccaaatcatctcactcagcctttgcnttggcacctgattcagcttcattcattacatgcaaataactaaaatcgttagtcgtggaatagactgaattggcccacttgttcatgcaatgattagttctagttgattaatgttccttattactgtaccaatcctttattgctccactttcccattgtcttgtttagtttaatacatggtgtgattagaatatgatgatccttcactacccttaaatggcatttgctagtactatgctagttgtatgtggcatttactcatcctctaatctatcatctatctacacaaccataggctgacaatttgagtagggaaccatatatagttcanagttaactttatactaattactaaatttatttgactaattgaagaagacaatctttgtaatttattacaatcat

SEQ ID NO: 271582 - DNA, 363 bp, Glycine max
  unsure (1)..(363): unsure at all n locations
agcttctaaactntatacaagaatgaagctctgataccacttgttagacaagtggcctcagatatcttaagaagggggggttgaattaagatattccaaactacttccccaattaaaaatctatttcactttttattcaagttataaattcccttaataatgaacttcttagatgttgattcaaataaaacaatttgaatatgaatataaagcaataataaacaaaggagattaagggaagagaaagtgcaaactcacatttatactggttcggccacacccttgtgcctacgtncaatccccaagcaacccgcttgagagttccactatcttgtaaattccttttacaagttctaaacacac

SEQ ID NO: 271583 - DNA, 463 bp, Glycine max
  unsure (1)..(463): unsure at all n locations
tattggtctgtccacaatctaccttctcactaaagccaatgcaatacatttgatgctcttcacataattctgtgaaatactccatataatttattttttctgcaatttcaagcaaacaaaaaattgtttgatgtcagtcaattggttgttcttggtatgacccacgtggattcaggtgacagttaaccatacaccatatgttatttgaatcggcatancatgaaccggcatatanctaaccttaccaaaagttggtggacaattaagcaattggctccactcacatcctatcatagcatttctctctagctaataccaccatttttccatattcttttatgattaagattattacacatgaattaaaaaatatttaataaaattagaaattgatatatctaanataaatataattatccttatttaatagcttgctctttaatacatgtgtcactactagtga

SEQ ID NO: 271584 - DNA, 440 bp, Glycine max
agcttgtagaattcaccccaattccagtgtcctatgctgacttgctctcatatctactagataatgcaacggtagccataaccctagccaaggttcatcaacctccatttctccgagaatacgactcgaacgcaacgtgtgcttgtcacggagaagccccggcgcgttccattgagcatggtagggctctgaaacgtaatgtgcaaagactaattgatgcgggctggctgaaatttgaggagaattgcgtgtaaatcctgacattgacaagagatgccacacatggggcaattttgaaagctgttgttaggtgtccctaatgactcatcacggtttccaagattatgccattattggtaaccacagctacaatgttaaatgaaatggataaagttgatattctttgccctcatcctcatacaaacgcatgtctgcttatt

SEQ ID NO: 271585 - DNA, 436 bp, Glycine max
  unsure (1)..(436): unsure at all n locations
ngcttcattccttgcccatctctttctttttcatttccaattccagttacacccaactgctttccttgttgttcatatctgccttccctagttggtgataatcttgaccctcatcctgtttgacctcctcctttaacttgactactgcttttctagaaaaaagaaacgacactgacatttgttaaccctatatgtagtgtacttttgctagactggggcttctggttattacccagtgggaatagaaatgtttcttctctgattgaacaccttgtcgtgctttccgatctgcctcctgcttccataacccctctttattcctatcttcctccagatcacagtccataaagtgctctaacatggatgagcctattttgagctccattttacttccttcattggatactcaatcttcgttagttctatacctacccat

SEQ ID NO: 271586 - DNA, 323 bp, Glycine max
  unsure (1)..(323): unsure at all n locations
ctcataactttcactcttcatatccacaggtttccaaacaagataatgttaaatgcattcataatcttcaattctttgaaaacatttctgaatatttttgttctaacaaagactctcaagtctgaagacaaaaacctaagaatgacccacaaaaagactctattttccttctttagacgtcatcaaacgaatcaattctttctttatatattctggaagagcccaatcaaatctgtaaatattacataatgacccaaacgtcaaaatcaggtcttgctgggaacatatntaacgaatctactacaataaagactatctaacgc

SEQ ID NO: 271587 - DNA, 394 bp, Glycine max
  unsure (1)..(394): unsure at all n locations
ngcttcatgatgaatcaacaatgattcaaagatgttttgatgataacaatgatgacaactgatgatgatgagcacttagctcaagagaatcaggaacatgttaagagttcatgaatcatgaagaattcatgattcaagaagaaagcctactaacaagattcaagatcaagattcaagactcaagattcaagaataaagaaaagactcaatcaagataagtattaaaaagcttttcacaactttgaatagcacatgagttattgacaaaacctttaccaaagagtttttactctctggtcatcgagtaccatattgttgtcatcgattaccagttgcaaaatgagtttgaaaatggtttcaaactgaatttacaatgctccanatattttcaaaa

SEQ ID NO: 271588 - DNA, 131 bp, Glycine max
acctacatgatgtgaaagtgttcgttaccatgtatatgcgtatatacaatagctagcacgaggcgcgcacgttctcaaacaaagcgtacatgtgggatacgtagccaactgctctgccaatgtgcatatat

SEQ ID NO: 271589 - DNA, 403 bp, Glycine max
ctcaagacagcttcttattgaagctacctatcctataaagaaagcctgtgtacactgttgaaccttgatgaatgaatctggatacatcttaatgttcacttcttccgcctttcattccttcacatacgtgctccccccgttctctctctctccctgtatctcttcctccattgaagcatccttctaagctcgttatccaaggctcatcttcggtagggaagctccatctttcctggcttactccgaaatggatggggtctcctttcacctcctctcctttgtaatccgcttcaacgtcatggtggaaaatcaccattaaaggaccctattgaagtctcaaagatactccttcatacaaccccacaagcagcttccattaccggtatcatagcatcactacttc

SEQ ID NO: 271590 - DNA, 476 bp, Glycine max
  unsure (1)..(476): unsure at all n locations
agattctaaaacaaaacccaaccgtctcatttgcatcatacttctactactcaactctcatctccacctcttcccaagttacaatccctaaaccagccaccccctaacttctcatacctacaatgaaatcaacctaaatgcaagaccataaaacactaagtttattctacaactgcgatgaaaagtatgtgcttggccatacgtgtagtgcgaagcattttctcctgttgttggtcgacgatgatgctgattctaaaaccattgacccagcaactcctaacccaccccccttgatgaccagtcagaacctatacatctncattttctcccataagcctttactggaaatcccttccctcacacactcaaattccaacgatctattggaaatctacctctcactgtgctagttgattccggtagctcacataacatactgcaacttagaattacccaccatctttacttatccatca

SEQ ID NO: 271591 - DNA, 367 bp, Glycine max
tgcgagcttgcaccaaaacagcagtcttgtagacatacattccgaacatggctggcacaagctagggtgaacaagagacaatataaataaatgaccaatgtggatgaccaatgttgaatagtaaggccatcattggataaacttctccatacgtacatataggagaagaaaatatgaaaataaaatgaatcgactttcttgtatcaagagaatgggagtatgcttaaactttagaagaagggcttcttatataagcgttattttaagaaacagaaaggatatgctctttaaaataagtcaaaattattttcttaagcataaacaatttagacggatgcactacaaaaatgagaagctcgttatttta

SEQ ID NO: 271592 - DNA, 462 bp, Glycine max
  unsure (1)..(462): unsure at all n locations
cgcaatctagcacacagttggtgaaatgacatttcatctgtgactagttaattaccttctcgcgtctctgttcctgcctcgatattccagtctaagtgacttactagtgagccctattgcaatgctggtaaaatggaggatgcaatcatgcaagcgaattatagcacagtttgtggcgtacacttggcgaatagacggatcattattaaacatcattttcattatggtaaagtaataataacgatgtacatgaccaatagtgtggaaaataaatgttgatttgaaaatactatatagagaagcatattacaaggggtaagagctactgtgggtggaaaccactacaagctacttatctttctcaactttctttccaatccaaccagctactattgcggtaagagctactgtgggtggaaacctaattggagatgcagctntatgtgcagcatatgccacagc

SEQ ID NO: 271593 - DNA, 468 bp, Glycine max
  unsure (1)..(468): unsure at all n locations
ntactatgaagagaatatccaaggaanataccttcatctgacttatcatcaaattctnctaagttatcttttccattattgaatacaaaacatttacaaacaaagatatgaagatgtgagatgtttggttttctgcgagtgaacaattaatatggagttctctttaaaatgggtcttattaaagccctatttaaaatgtagcatgcagtgttaaccgcttcagcccaaaagtattttggaagaggagtatcatttaataaagttctagcaatctcttccaatgatctatctttcctttcaacaacaccattttgttgaggggctcttggtgcagaaaagttatgcttaatcccatgcttatcacacaataattcacattctctattttcaaactcacccccatgatcactcctaatagatataatcttgagaatnttcttattttgaatgattnttgcaagtttctaa

SEQ ID NO: 271594 - DNA, 405 bp, Glycine max
agcttttcgattcattctatgtacccgtagtggtccacattgtgtttcgtgcatttttattctcgttttgtttactttttatacccccctcttgacgtgcttaagccattttacttaagtcatttctcgcttaacttaaaaataaaataaatttccaccgaatgtttgaattgtattatccattaacttcggttaaaatcaattccgaccgttcggtcatgccgtaaccacgttggaaatcaaaaagaggtaaaaaataatataataatcaaaaaaatatctttttagtgaaataaagcggaaaatcaatcggacgttttctctgtgggatttctcattcttaatcgaattaattaataactaaagtgaaactaatggctaaatcaactcgcctagtcaagctcg

SEQ ID NO: 271595 - DNA, 396 bp, Glycine max
  unsure (1)..(396): unsure at all n locations
agctntaaggtttcctctagatccgtgatctcctttgacatgtcctatgactaaacaagtcttgatttctctgctcttataagaaatcacatttatagcgcaaatcttctgattggcgcagatacgggatggtagattctagacacttgaccaacgccttgtggcgtgaataccgtatggttttacaagcaatacctaggcagatacctggggattctgtgaggcataattatcgctaatctcggcaaacagaaacaaattcattctgtccaaacactaagacgacttgattccatttgacggagtgagggcacgcgtggtggacaatgacttggcacctaacgtactgatttgtcgcattatcgtattgaaataatactcctgccacattttatc

SEQ ID NO: 271596 - DNA, 398 bp, Glycine max
agctttcataagtgaaatcaggtgcagccatctccctaagagttttctcatgtggtggagagtgagccatgttctcagtatgaaaattaataactgaatgctcaaaatcataatatgcataatcaccagctacataatactctaaatgatcacgatgctcacatgctcaaaatgcacagaatgaccagtatgcacactatgcctaactaatctatgaaacgttctatctatttcaggatcaaagggttggaaatcacctgaattgtgcctagtcatgcactatatgtagcagataatgtgttactcaacgagcacctaacaaaggggtaaaactacagctatacttcaactatatcctcatgagtagaatatttgtgaggaacaccctatatcttgaa

SEQ ID NO: 271597 - DNA, 429 bp, Glycine max
agcttgagctcactgtttctgccccacaaagctccacgaaatttttcatggccatgctcttccttgcgagccctcttggtttcttgctcaagggctcttgcggaagctgcattttcttctcgtaacccggcacactctttccagacgtctgtagcgaccaacttgaatttttctttggcaagtctcgcttttcctagttcggttattagagctcggacttcttcatcctcttcaggagcttcaaagatctcttcgttgataatctttagcttagagagccaatctaaccctcgtgtatgaactttcagccattcatgataaccaccaatgatgccattacgaatgcccctaagttctttatctgtccttaacgggctttcccacgccttatggactctatgaataatcttgaaactttgcgcgccgaaa

SEQ ID NO: 271598 - DNA, 484 bp, Glycine max
  unsure (1)..(484): unsure at all n locations
ctcatcataaggtgtgaagaatgaaatacaaagcacaagacatctagagagttactcggattatgtaatgcagagtgtgaagaagcaacggatgcacaggggctgataagcacatagtacaaacagaaatatgctcagagatgagagagtgcacaggtttgggtgccaaggtagcaacccaagtgcctctgcctctactttttaaaagttgaaatttgtatggtgcgcttatcgcgcacctgcgcttaacgtgccaacatgacatttgagtttaaaacactggcgcttagcctagcctcgcgctaagcccaactcgaagttgtaacttctagtaagcatttgcggcttatcgtaccagcggcgattagcactntctgcaacaccaaaatntctttcgcaacatgtgcttagcctgagatgcgaggcttaccatacatcaagcttcaacttacagtgagtgattcacgcttagcgccactacatg

SEQ ID NO: 271599 - DNA, 388 bp, Glycine max
agcttggttcgatgtacttacccgttgaatatcgaagaacgacgaagaacgaatgaagaacgtctaagaacggttgaaacctttgcgagattgctcacggaaaacattacggaaacgtttcggaagcgcctcggcttagattttcttcacggagacgatctgttcaagcaaattcgaaagagagagaagtgcctcatgggctgaacccctttcttcttgccttcctcccctatttatagcaaaataagggaggtggttgccgcccagctcgcccaagcgagctcatctcgccaggcgagcaaggtgcttcctcaaaacaaccggcttctgatgaatattcggaggccaagtggcctgggtgctatagcccccattgtactattcaccc

SEQ ID NO: 271600 - DNA, 424 bp, Glycine max
  unsure (1)..(424): unsure at all n locations
taatgcatncttgtgtcatttncaagcacacgtaggtgattggagaaaaatgggaacactactcatttccttagatgtttctatatgatctctttgaggtaaaaatttataacccattgtgttagatgagtattttatagcactgattagttatgtgttgtgtgaaaagagttagaaactacgtattaagaattattatggcttccttaaaatcctaggtttgctaaaattggggattttgtctaatctcttgttctcttattttaaatacttaaatcctgtggaaaatatggtggttgatctacccaacaacagtggaagacattgattgcattatttatgtgaatagctaatctacttancgacatttctttaaagttcttttatgagaagcacgtaaacttcaatatatatatatatatat

SEQ ID NO: 271601 - DNA, 272 bp, Glycine max
agcttgctaagtgtttgtgtaagcgattctatcatcttagctagcagcttgttctgtgccaatagtgcatcttgggaagaaagctctaacatgcttctttttgtggttacgtgagttttatcacgcagaatagcatgatcactagcagccatgttctctatgagttccattgcttcttcaagagtcttcaatttaatttttcctccaacagaagcatccaataactgcttgaactgcagtctcaaaccatcaatggaaatgttcagttgaat

SEQ ID NO: 271602 - DNA, 378 bp, Glycine max
  unsure (1)..(378): unsure at all n locations
tatgagaattccaagctntataagcaaagcggtaaagtttatcatgttaaaaagcttttgaaaaggaattntcagcctggtcaatacgttttgttatttaattctagattgatattgtgtctagggaagctaaaatctaagtggtctagactattcatcatcaatgaacttattccacatggagctatgatattaaaggatccacccattaagaggacatggactgtgaatggaagcacaatcaaacagtacttgggtggtgatgttgagaggctcaccactgttgtctaattgcacgaagtctgagccacaagaacggcatccaacttaaaagacattaaagaagcgctcctgcgaggcaaccctatatttctaaac

SEQ ID NO: 271603 - DNA, 380 bp, Glycine max
agcttgtccgtcattgtttctaatttgaagtactgggtttgctacatttagtggggttttgagtggtgaatttgacattgaatgtctggtgaaacaggatccttttagcccgtaacagaacagtgaaagttgcagtttggatttgtactttcaactaataaatgtcgaggggatctgatggatcacaaaaaaagcgtttagttgctgcgatctgtgttgtggcaatttttcttggctttctgtatgtgtatggcggatccatctttggttctcagaatagtggttcatctgctcttgaatatggcagatcattgaaaagacttggctcgtcatatttgggtgcagaggatgacactgatggcaagcaagatgaatcttca

SEQ ID NO: 271604 - DNA, 425 bp, Glycine max
  unsure (1)..(425): unsure at all n locations
taattcccttaagtgcaggagtgataacagtcccctccattcttgtgtcttgctgcacataacatggccaanaaccaataaatagataggtaaaattttaacagagatcaaatttaaagtacataaatgtattccctttcttttctctatctggtaagtttcaaaatatgaaatgcagggaagaaaaatacagaactttcgtcagtagcatgcatgcatactaaagtaaagtctggatacaatttacgtgaattaatgtcggaaatatctaaaaatcacaccagcaaaacgatgaaaagaagcaaatttaatgaaaattgcacaaacaacgcatcaaaacttataatttaaaacaataatttgtggtgagtacatctaactcttatatgatcatcacaatctgtttgtcttaacataattgaact

SEQ ID NO: 271605 - DNA, 410 bp, Glycine max
agcttcagcttgattgctaagtgacaacttatccttggctaagcattacttattatcgccaagcgcaattccttacggccaaaattgaggtccatgaagctaagcgccagtcatggcagctaagcgagattcattgtggcagtgtgagcactatgcgagtacttatcagctaagctcatgctcctttgtacttaagatgcatcattttagctaagccagccagagtctggcttagcgagagttgcaacttttcggatctacaaacctcgctaagcggtctgatcctccactgagccaagcctgtgttaaaaaaaaagattttgaatttgaaacttcggctaagcgcgcttatccactaagcgagccttgttgagaaaccaaacgtctctctggctcgcttagcacagctt

SEQ ID NO: 271606 - DNA, 394 bp, Glycine max
tgttgttttcaccttctcgttaagccaatctgttggcttagcgagcgtccgttaagcacaacactcataggctaagcgcgaggaagactctggaagaagatgagttgtacaggtttgctaagtgcaccgcttcatctcactaagcgcaccgcttcagttcatccactaagcgagaaaggcacgcgctaagccgaaattcactaatgtgcgctaagcagtccataagaaatactctccacagtccaagactgcggaagggaaagatgcaatctctttatttcatcagtttcctgatgaatctttgagtgaagcattggagaggttcagaggcttgttgagaagaactctcactcatgggttttccaagccaatccaattgaatatgtttatagat

SEQ ID NO: 271607 - DNA, 420 bp, Glycine max
agcttcagatctaaattgtgcgcgtctagatatattacgggactcgttcagacatctgagtaaaaagttattgtcgctagaatttgatacgagcttccattttcaatttggagcgtctctcgataaattgcaacactctgtcgggcatccgagaaaaaagttatcgtcgtttgatattttaaagagtttccattttcaatttgaagcttctcgatatattacgggactcaaccagacatccgtgtataaagttattgtcatttcaatttgctcagagcttctagtctcaattttgagcgtctcaatatattacccgatacaatcggacatgcgagaaaaaagttattgtcgtttgaatttcctacgagcttccgttttcaatttggagtgtctcgatatattacgggactcaactggaca

SEQ ID NO: 271608 - DNA, 188 bp, Glycine max
ctgagcaaatggaaatgacaataactctatacacggatgtccggttgagtctcgtatgatatcgagacgctcaaaatttagatccgaagctctgagaaaattgaatcgacaataactctatacacggatgtccggttgagtccctgtactatatcgagacgctgcatattgaaaacggaagctcgtac

SEQ ID NO: 271609 - DNA, 409 bp, Glycine max
agctcttcgattcattctatgtacccgtagtggtctctattgtgtttcgtgcatttttattctcgttttgtttactttttataccccctgttgacgtgcttaagccattttacttaagtcatttctcgcttaacttaaaaataaaataaatttccaccgaacgtttgaattgtattatccattaacttcgtttaaaataaattccgaccgttcggtcgtgccgtaaccacgttggaaatcaaaaagaggtaaaaaataatataataatcaaaaagacatcttttagtaaaataaagcggaatatcaatcggacgttctctctttgggatttctcattcttaatcgaattggataataactaaagtgaaactaaaggctaaaatcaattctgctagtcaagctcgtccat

SEQ ID NO: 271610 - DNA, 303 bp, Glycine max
caatttgagcgtcttgatatattatgtccccgtatcggacatccgtttgaaaacttatgaccattcgaatttctcgagagcttccgctgctcaatactgagcgtctagatgagttatgtccccggatctgacattcgtgcgaaaagttacgaccattcgaatttctcgagagctttcgctgctcaatttccagcgtcttgatatattatgtcctccaatcgtacattcttctcaaaagttatgaccattctaatttctcgagagcttctgttgttcaatttccagcgtcttgatctattatgt

SEQ ID NO: 271611 - DNA, 450 bp, Glycine max
agcttaaagtatgcccgagtcattcatccctatgagatgttgttgaagtattggcgatcagaattgccatctccttggattataggattgaaccaagctcatgcttttacaaaaaggttcatcaagtcaagttgaaatacggaagtaaccgtcttgcaaaattggggcaaaagatgaatcgagtcacatcactgcttcatctactgccaaacatatttaagattgttgatgtccttgttacttccagtttcaccttgacaaagttgtcatggaccatgttgaaaatctaaattgattcaaccccatatcctgcgtaaaaattcgcaatacttcaactttacatcattcgcatgcatccatgcttttcattggttgcattgctcattgcattctttcctttgaaaataaaataaaataaaataaaatgaacttaatcattggtataaaaaa

SEQ ID NO: 271612 - DNA, 454 bp, Glycine max
  unsure (1)..(454): unsure at all n locations
cgtagaatggctagacatgatacatgtcacggtttggtttggttcaaggataaaagggatgccccacattatttccatgacacaaatgcaaaaatgatgatttggaaactttatgcaaaactggtcatgcatgcacctatgtggacactcaagtgtcaaatttttatggtcatgtgatgctagggctcaggattcatttcctctattttagtcaacccaacgtttccaaaatatgttcttttatcaatttgtgcattcatccgagtccattttgggcgtctgggaaaatcttcacagcattcacccttcaggtgtatacacattntttcaaaaactagttatgatcagtgaattcttttcaaagaacagttggaagtcatctcttttcaaaagcatgttggttattcagcttgacaacttattattcttgtttctcccttatnttttttcatta

SEQ ID NO: 271613 - DNA, 380 bp, Glycine max
agctttcatatggatgacgagcgattggtctatatttaacttacaatagaaatttcatgtcactaataatttgagatgggtcaattttgacatcaatgatttaatatttactttcgaactcatttatttttcttcatttaccaaaaatttttgttggctgggtgagcccatcacatatatttatttaataagtcttttgacgaagaggaataattagcttttatttaacctcaggacttgagtaaaccaataataagataaatgctacttgttaagtttcatagtattgtgcttctattgaagaaaaaaataatagtattgtgcttctgtgagtaaccatttctgataatgataaagtctttcatctttatcaacgatat

SEQ ID NO: 271614 - DNA, 388 bp, Glycine max
agtctctaagagatcatcctcgaggctcttccggtatatgaaccaaatatgaatattgtgtgcatcagcttcactagtttgctatagtggctttcgggtagattaaattttgtagtctgcaccttcttgttttcaacatcttgacgttcatttaactggagctagtgaatgtgaatccctattacaagtaaatcgggaaaatttctccatttctgcaaataacaaatgtccaatggacacatgtttaggacccaacatcttttctcttactttgttagaaaacatagtgcatgtttggatcgaacttaaaaatattatgggcacgttccaatgtaaatccacccgataaaaacaaaatacaagcacaagccatggtcttgcttctttg

SEQ ID NO: 271615 - DNA, 432 bp, Glycine max
agctttgaacaatatacttggccttcatttaactgtctttgggcttggcggccacactcaacaaagtactttcgacacctactgtacgttggtttgaccaatgctgttatgggaatgttgcgataatcctttaaaaccttattgatacattctgaaaggttggttgtcatgtggccatatcgatgtccttctctatcataagccatcgtccatttttcctttgaaatgcgatcaatccatgttgctatggctggactcagttgacgaaatttttctaaattttgatcaaaaatacacttgctaggagtgtaggctgcataaaattagttatgaataacaattttaagtatatatgaaacttaaataaacgtgaccatcaaatacgaaatcttacccaatttctttaacatttctttttgtttggcattattg

SEQ ID NO: 271616 - DNA, 430 bp, Glycine max
taggaactataaaactaagcttataatgaacaccgcatcagagattcaaaatatatgacaaatgtaagcagcaaccctaagtactcccaattattgaaatcttgcttatagaagttacaacgatacccatcctgcgaagcatgaggtgcaattggtaggtgtcaataataatatcttttttaagaagattgattctcagtaatgatctaatgaaatgtcacaaggataaaagaaacaggtccagcaactacgacactttcttctaaaaccatccatatttgcacatcagtaccttgatttggagagcactattgatagcatcacttacgagctcccagtttggacccatatcatgcaccagcaccacaagagcctgcaacaggcatgagaataatggtaagccctctacacaattgatagactttaaagt

SEQ ID NO: 271617 - DNA, 416 bp, Glycine max
agcttcctagaggccttcactgtataaccttggtggacctcccattttctaattctctggatgtggacttggactaagaaattttattcggccttttatcattatttttcttttacttttggtaatccacattgctttctttttcttcagtgataatggacaagtttgaattattgttcaattaggaaggctcacgccgagaaggctgagaaggttcctacggagaaggacaaatggaagcaaaaagaaaatccccaagatgattgggtgcctcctcctcttcccgttacaatcggtatcattatctgggaaggtcatgggccttctggtgggggtcctttgaagaagaaaaggttggagtctatcctgatggttgttccttttgccatagagagccatcttgcctttttattaat

SEQ ID NO: 271618 - DNA, 409 bp, Glycine max
  unsure (1)..(409): unsure at all n locations
ctgagcacccacgagtgtttcaacaccctagtagcaacagtgtatgtagggttttcttcgagcgaggacagtgtgggttctgtggggttcgagcgaccacaatgtgggtttttcggcagtgtagggggttctgtgggttccagcaaggacaatgtggatttttcggcagtgtagggggttctgtgggttcgagcgaggacaatgtggatgtcgagggagcggtttccgaaagatttcangcggcaggagaaacacaagagcgatttcacgcacgaggatgacaaacagaagagggagggcaaggttttctagcgcgcgccgcttgtgaaatctcaatttttattaacttataaacataacaacatcggttctttatggataacccgatgtaactgaatatagttaacat

SEQ ID NO: 271619 - DNA, 363 bp, Glycine max
  unsure (1)..(363): unsure at all n locations
agcttgagcatacgaacttgtatatattacttggaattggntactacgtttttgagagctgaaagatatactgaatattctagacgtctggaccaaaattataaaaaaaagaaccaagcgatttggattataggaaaaaataagaaaaatcacacaagcttggtagaaaaatcagtgtccatgaaaaaaaaaagtgagatacaagtgtgcttgttggtgtgcctaacaatttgctctattaatggtgcctattttataccaatcctagttctgaaatttcaattgaaaattattgtgaatacatgtgccaaaactagaagtttcttgagatnattattttatttcatagacaaactactctac

SEQ ID NO: 271620 - DNA, 154 bp, Glycine max
tatttgaccgcgattatctcttcttattggacaatattcctatgtcttctattgggcatgtgattgatgtacgtgacctatatggatcacgtttcatgaatgacctataacttctctcttgttcactgtactcaaaacttgctaattagactat

SEQ ID NO: 271621 - DNA, 377 bp, Glycine max
  unsure (1)..(377): unsure at all n locations
agccttggtaagaagctcataaacctcttattttctactcatttcttcatcatttntgtgcaaaactctcattcttggttctaaattacttttttcatcctttgcagcttgngaacatccatatttgagttcttggttcatctgagcattttcatgcaagcttcatcaaggtaaggagggtctttccacttcttgaacattgaccttgttatctttggaagctagacttcattgcatgttgtgttgatgttcaaaatttcatagctactgccttggctagaactatgtgatatgtngcttttcttggaagtttatgtttaaaaatgagttcttacgatgtcaaaacttcgagttagccttaaatttcacttaaatcg

SEQ ID NO: 271622 - DNA, 390 bp, Glycine max
  unsure (1)..(390): unsure at all n locations
ntattcaagacacagacattaaagatattcaagatggatgatcatgacagtcttcagagtcttacgaagggtatattaaataggaagggaattcctaattgaagtagcaaaaggtttgaccaagaaatttaagttaaaaagtctttttcaagagatttactctttggtaatcgattaccagaggatgtaatcgattaccagtggccaaaaatgatttacaacaactattaaaacttgaattcaaaatttgcactgtgtaatcgattacacatatatggtaatcgattaccaccagttattgaacgttttaatttacattttacagcttgtaatcgattacacacatactgtcattgattacacacgagattctagaaaatattctcaact

SEQ ID NO: 271623 - DNA, 329 bp, Glycine max
agcttatcttatcacataaatgacatgtttatccctccgatttataacaaactcatgcacactctttatgtgaaaaatgtatgcacatgcgtatgtgtagaatatgctactatttatgtcaacgtacaaagacattcaacacattctaattgccatacatatatatgcatttgagaagaacacacattctcatgctcactgcattggcgtaaaattacacctaatcacaacctaaacatttgctatcacaaactacctacacatatttgagacatatatcatacaaacttcttattgtttcactcacatttaattatatgcatgttgga

SEQ ID NO: 271624 - DNA, 262 bp, Glycine max
  unsure (1)..(262): unsure at all n locations
agcttaaacattcaatttcgagagtctcgttatattacgggactcaatcagacatccgagtaaaaagttattgtcgtatgaattggcttaaagcataaacattcaactttgagcctctcgatatattacgggactcaatcagacatccgagtaaaaaattattgtcgtttgaatttgctcagaggttcaaaattcaatttcgagcgtctcgatatattncgggactcaatcagacatccgagtataaaagtattggtctttg

SEQ ID NO: 271625 - DNA, 191 bp, Glycine max
  unsure (1)..(191): unsure at all n locations
gagcccattctaacgataatcactntttattcggacgtctcattgagtcccataatatatcgacacgctcgaaattgaatgctgaagctctgagccacaccacaacacaataacactcttacttggatgattgattgagtcctcgaatataaccggactctctaaatcgaatgttgacagctttgacccaa

SEQ ID NO: 271626 - DNA, 376 bp, Glycine max
agcttctacagtgttacctatcatcaaacattgtatacgtaccaattctattaataatgattttaggttacaatattgatattgcttgtacaagataattttcattagttgggtgttatatgccatttaatttcacttctcatcatctataaacactaattatttacagagtttaatgcaactggatgataattattaattattgaatgcattattatcaaataatcattttaaaagtcaataacttgatcatatatcataaattatgcctggacggatatatcaaacgccttatacggtcactgagatacgtttcttgttcttctctcatttaaatgccaattgctacacatgagaatcatgaaaactctgtagc

SEQ ID NO: 271627 - DNA, 343 bp, Glycine max
tgaattatggagtgcacaaaacatatatgtcacctaacatactatgtatagattctctcactgactcatgcctcgttcggatagtcaatgatccacggacgactgacatctgcctaacacattagaaatgaatttaagcgaaatcttaaaggtgttcgcattcttgaaactacgaaagaatacaaggaaatatctttacttctttaattaagatcatgaagcttacatacaagacctatgatcaaatatgactttgacaagtttgcccgttctatatgacctgatcccatagaaaaatcatatatatgcatgcttgtcataaaaaatatatctcattacatgt

SEQ ID NO: 271628 - DNA, 424 bp, Glycine max
agcttctagtgactgggaagcacgttattctgttgttttccagatcggttccttcgccatgtatgtgtatatgtgtatatctgtattatattcgttgttctggttgttgtttgtattttgttttgtacagaagaaaaaaaaagaagtagagatgagagtcgtcatcgcgaaaagggcaggacggacgaaatcagtgtcctatctttgctttcctcttatctccgataagaggtaagtaaagatgggcaactgtcatatcctaatttcgtccggggattattactttatgacatgcaatctttggttagccgctatgagatacttggcgtcctttgttgacaataaatgaagtcccgagacgtctcataaatctaaaggaagcatgcttgtgcgatccgtgaaattccgtaatgtggcggaagtc

SEQ ID NO: 271629 - DNA, 352 bp, Glycine max
  unsure (1)..(352): unsure at all n locations
taagctctgactcgtgtcatcaagagattataaatatgtgaccatgacatgtatntaaaagatagatctatctttcattatctatcgntcaatcttctctcaacatctttcaacaatatatctttcaacttttttctacagaattttctgattcattgctcttcatatttctaaaagcttttgttcaatactttctctctgaagaaaagttctttgatcaaaaacttgcgttattcatctcttttattctcttctccctttgccaaaataatataaggactcaccgcctcaattcttttgtgtctcatttctcccttacaaaagattccaaggactaaccgcctgagaattc

SEQ ID NO: 271630 - DNA, 439 bp, Glycine max
agcttcacgttgctcattgactccagattgctgcataataggacagagatctgtatggtgatctgcagaaaaacatagaccacagactctcgcaacaggtgcagatgcagatttctgattcatggcaagctgagttactaggttgaccaaggcatcaagttttccctcaagctttttattttcagcagatgaagatgaatccgtggccacctcattgactcctctaaggacaattgcatcatttcttgaactgaattgttgggagttggaagccatctcctcaatcaaattcctagactcaacaggagtcatatcaccaagagctccaccactggcagcatcaatcatactcctctccatgttgctaagtccctcatagaaatattgcaaaaggagttgctcagaaatctggtggtgaggacaacttgcacacaatttc

SEQ ID NO: 271631 - DNA, 406 bp, Glycine max
tcgattacacacatactatagtcgattaccaaaggagtcttttagaatacattctcaacagtcacatctttttatttcgcttttaaatggccatcacaggcttgcctatatgtgacttgagacaccaattttgatcagagttctgaagaacaaaaaggtcttatcctcttaacaagcaaaactgttttatcctcttaaaaattccttggccaaaacacttgtgattcaataacgaattatttgagtgctcaaattgttcaatctatctctttcaagagagattttttcttctcttctttattctgaaaagggattaagagaccgacggtctcttgtcggaaagaatctaaacacaaaggaacgattgtccttgtgtgtttataacttgtaaaacgaatgtacaaga

SEQ ID NO: 271632 - DNA, 436 bp, Glycine max
agcttagaacaaggacgaaaaattccaacaactactcaatgggattttttttgaaagaattaaacttcataatttggtaattcaaacattctaccaaccaattatattaccttcaagaatttttggaagctattgatggaagcttgcttgtggggcttctatggaggctggatctttaagcttcaatgaggtcctttaatggtgattttccaccatgaagatgcagcagaagacaaaggagaagaggtgagaggaggcgccatccactatggaataagccatggaagaaggagcttcaccaccaagatgagccttggataagaagcttggagagggtgcttcaatggaggaaaagaaagagggagagaaagagagaggggggagcacgatattgaagggaaaaaaagggagagaaattgaactttgagttgtgtct

SEQ ID NO: 271633 - DNA, 425 bp, Glycine max
  unsure (1)..(425): unsure at all n locations
taggaacttgaaactaagctntaacaagagtcttcacacataactatcatgaagcagnaaactaacaaaactacccatcatatctnccanaaccgcatacccacgaaaatcaaaggagaaagaagtccacccaaacctgaaatttcaaagtcccacacgtagagacgcgcttcacgactccgaaaatgtnctcctttcgcgatttggagcagaaatgggcaccaaaggttgaagctttgttgggcaacaatggtggaggaagaaaagaagaagaacgctgcgtgagagagagggagagagagctgtctgaaatttttgggctgagtgaggagagagaatatagctntttggttctaaatatagggtttttctctttctctattattctatttaagctatgccacatgtctccatttgagtggagc

SEQ ID NO: 271634 - DNA, 432 bp, Glycine max
agcttgtcgctggagctgacccatcaactgtcctagctcctttagactggtgattcctaggctcttgaccttgacttgatagaacctctttttaagcgaaggcgtttgacttgatcccatgttttactaaagtgaaacaaaatctagtgcgaatcaaaattctgacatctatcatgggtggaatggatgaatgcatgaagaaatgcatatgacacagatgcaatctatgaatacgagagcccgggaaattgtctccttcttagatacaacgtcttggggtagcacagtgcccgacgtatgtatttaagaaggtgacacggaccctctattggtttgccaaagagaaaggatcaagacagaacccgtgcatgatgcatatgcgaagggcacaacacggggatgtacatagcacgacaatattcaccaacaaat

SEQ ID NO: 271635 - DNA, 457 bp, Glycine max
  unsure (1)..(457): unsure at all n locations
cgagagacgaaggcatcgngttnggaaagtgtgggctgctgaataccccacagcagcatggtctcttcagcggcggattcctctccaccaaccaccaaccgaacctcagcaccgtaagaacccaacttcaccattggcgtcactgcttcctcttcctcttcgatgttgttggccatggtgtcctcgctctctctgtttcggattgaattgggttttaatttgtggcctttataggtatgggcgttgaaaggaggagggctttttgcttctgcaccccataaaaagtgaaaacatcatgtaccccatcgaaagtaggccaaccgagcttcaagtcacctcatgcattccctctgtcagatactgactcagtcttagataaatgataacttctgtgtaaccacntacgacacacatccagagatctcagaataactattacagtcagtaaatgtacata

SEQ ID NO: 271636 - DNA, 427 bp, Glycine max
  unsure (1)..(427): unsure at all n locations
agcttttaaaatacactctcttcccttcaaaatctcctcatattatctctctctctctaaaatcacaaattacaaaatccccttccattctctctctaaaaccatcatgtcctccactgcgcctcctgtcctccccatctccaacccccaaaccactgcaagaaccaccagtgcaggcggcggcgccatcaaggctccggcgaacaacctgaccttctgtgccttcatcaacaacctttccacctccctccaccacggcctcgaccaatgtcgcccctggtcggagctcgcagaccgctccacgttctcgaaacccgagtcctccaaagccacccttcgtgtccgcaaaaacttctcctactttcacaccaactactancgtgtcgttcactcatcctcgcagtctcttctctactgngaatgtatg

SEQ ID NO: 271637 - DNA, 463 bp, Glycine max
ctacatagcccttgacgccatctggaatcgatcttgcaataacaattataattagtaactattttcccgcgacaatttagggaaaaaatcaacaagatccaatttgttgatagtagtttccatctgatacatagtctgtcaatggctacctaggctgtgactgtcgtggattgagcaataaacatacaagaccacgtggtgactgtctctcctcccaaggaatgacatatatgtgagaaactttataaaaccaatacagatagttagaggtgcaagcccaaggatccctgcgtggcacaacattacctacaggaatgatatgttgctgccactcctccactccttatcacacagctgatacgagcgacgggaaggtagctgatgtggaatcatttgtacatggccaaactgcctcaacatcatctctggacaataacgcatcacattagtttcgcatatgatg

SEQ ID NO: 271638 - DNA, 412 bp, Glycine max
  unsure (1)..(412): unsure at all n locations
cgcgctgttctatgtaatgatctntaagaagatcatccaacccaataattntcttcctggttggatttcaaattccacttatttgttatcacccacagtttgtttgaaaaaaccatggaacacccacataatgcaaaacactgattattataaaaattgtaagacggaaaaaataaaaccctaaacccaagaaaaaaatggtaaaaattgaaactttgaagaatttgcgggcaaaaagtanccaattatggcggtaaaggaataccttttaataatattgttaattggagggcatttgagaacgtcgtcttcaacctcaaaatccaaagggtcgttcgtatccatcacagagagttcaaagttggtatttgaaactatcggtttgcacacaaatacaacagttgaggggagt

SEQ ID NO: 271639 - DNA, 392 bp, Glycine max
gcttatgccaagaggagatggaccttctctagtctcggagaggatcaataacatgcctataggtttaacctcctataagagtatggagtcagcaacaccacttttaacatttctaatttaatttcttttgcaggtggagctgatattgaggaggatgaaccaatagatttgaggtaaaatcgtcttcaagggggaggggatgatacaatactccctaggaaggaactattcaccaaagccatgagcaagagactccaagaggattgggctagagttgctgaagaaggccctatgattctcatgaaccccagggtagaattttgagccaatgggccaaggttgggtccacttatatttgtacatattagatttggatttcattatttttgggc

SEQ ID NO: 271640 - DNA, 340 bp, Glycine max
acttacccgttgaagactgaagaactacaagaactaacgatgaatcttgacaaacggccaagactatttgcgtcattagtcacggaaaacgtctccgaagcgcctcggcttgaatcttcttcacggaactcactttcctcatccatttctagagagagagaagtgcctaacgggctgaaccctctccttcgtcacttctttccctatctatagcaaaataggggaaaagcttgccgaccacctcgcccaagcgagcaaggatgcttccttcaaaatcaacagccttctggaggaatattctggaggcgccaagtgggcctggttgcgatttgcacccccc

SEQ ID NO: 271641 - DNA, 578 bp, Glycine max
  unsure (1)..(578): unsure at all n locations
atctccgtcgacccacttntcncncccctcctctcnanttgtnttnatcgaatctattttannntnctccccnncaacgaccacaaccaatgatttcattgccgtagcatgtaancccgtatataanacccgcacgcctctaaagtcgactcgcagcactccaactctntacattacccttgggctacaactatttacctattggctccacttgccaattactactatataaagcattttatgcttctaaagcttgatcgaattgaaacacattttattcatatgttatactggaagccgctgtcggtaatcaaaaacctctcccacacttgaaacatccaccatgttcataatgccttgaaaaatctctaatgtatcaaatcactcaattatcttatttatttacgtggaagcccaatcaaaccttaattttgtgatggatgaaaaataattaattattaaaaccaccaaattcatggtcccgtcgtaatgactacctctaatctatatacatgtgatatcaaataacggttatatatttatttaaatgtaaaattaacctgtcctttgtggaaaan

SEQ ID NO: 271642 - DNA, 311 bp, Glycine max
tgaaagttatatatacactcatgccagcgacatcaatggattaatctagtctacacctacgagcatcttcctcagattattcacatccttgttccccaatccaataacccttggatgggcaaatggaccacatttgatcccaccaaaaacttttttcagcatttgtattatacaacagggagataactttcagtcaatggactgaacccaattgaaagttttgcaacaatggagatggagcaccaattgaagcttaaaaatgaacttttatcaatattaataattagaaaaagccacacgtactcactgaa

SEQ ID NO: 271643 - DNA, 319 bp, Glycine max
agcttgtgtattcctgcattctactaatatatggaattgcccagtgctttgcctgagaataacaattggttgaccacaacagcgctgggggcggcaacgggcaatggtctttcaaataaacctgttgtacatgaacaaacattatatcatgcgctgaccgtgccaaacgaaccagcgaagtcattgcataattgttacactaactatattcaatgtacctgaacaaaatgatttccaaacacgtgaccgacacatatgatgcggtggccagaaaagtcaagtggtggttgacttctaagaaggaaaaatgtcatgcttt

SEQ ID NO: 271644 - DNA, 547 bp, Glycine max
  unsure (1)..(547): unsure at all n locations
cgacgcgtccnctcgctcgactcccctgctatntaagcgacactatataatacctaagctccgcgaatgtctgcacgaggttagtgtgtctttttcacactctcattcatgtcactctcatttcctatcttatcggcgtgctctctgattgatgactactcctacttttctcttttctaatatcagatttttgcattaaataatgttctgagtgcacttcatagacacctggagagaatcatataaacgagagagaagtgtatctctataacaaatatctcgtatgatagaaaaacggtataaaacaataacacgaataataatattttctcttctaatcccatccgcgagaataattatacaactttgttacacgagtatgtcgaatatatttgatgttagaaactctccatcaacatgcactcctcttgcataattgctgtctgcgttgcgcatgcccacaactacgacaagtaaccttcagttgcccatcancctcctctatgttccattttaatccctacgagaccacctcaacctccatcct

SEQ ID NO: 271645 - DNA, 344 bp, Glycine max
agctctcccttttcataaaagaaaaacgtatctgaggtgaataaatatgaaaaacatattcttatatcgatttattacgctacaaaaagattatttactaacattaaaggtttgtcttttggtaaatttacattgacatagacttttactagtggaaattaaaattaaattgttagtataactattgttagtagtcttttaagagaaatattgttagtaagtctacattaatattaagtgtccttataaacatatattttactctcttacatacaactatctatttttttctacctctctatatttttctatatattacatactatatctattattcttttctc

SEQ ID NO: 271646 - DNA, 443 bp, Glycine max
agctcgatgaacaaaagagaagtgttgagaataaggatagtaagttggaagcagaggatgtggttctgccccagagaaagagaatttccttgagtaaaatatccgagacatctgtgtggatcactggtgaaagtgggtctatctatgagaggttttggaatggaatggaatgggtgattgtccctcatgacttgcccgtatcagcaggaagtgccatatcaatttttgtcatcaatcagacgattcttgctctatcagaagcaggaaaattgtatcaggttagaagcatctgttaagttagaagatacatgccaagcatcatactatgttaaatgttctcatcaactgtagaacttgatttttatccttatatttctctgggcatatcaactctcttccaagtatgtagtcccggtcaatctctacctgacatgtaaccacat

SEQ ID NO: 271647 - DNA, 485 bp, Glycine max
  unsure (1)..(485): unsure at all n locations
aagctcgatgagcacaacacgtggatcatcaaccattcccanaagcatcactcgttaattacttgcctaccagattaagaatgtagcatatcagaaaaactctctgctgctaattccaccaccaatatatcatgttttaaaaatctcagaatgcatattttttaatattatcgtgaccaaccaccagatgcattatattcacagatacaaaaagttgttgcaccaacctgttttgtggaagcttattgtcataaaattaaacagactgcgtaaaattaacccaacctcaagcttctataaggaaaagtaccgaatatccataatacagaaagaagatgatatgatacattcttctcttcccatattaatctttgtattggttaaactgtgttaggcaggcattcctttcagtatattntggtactgattattagcatgataccaaagtatacttaanaatctaagtagctaattgatacatatgt

SEQ ID NO: 271648 - DNA, 427 bp, Glycine max
  unsure (1)..(427): unsure at all n locations
acatcttgacttgctttccaatctgacattcaccacagattctgccttatgctattttcagatggggaatgcctctaacagcacctttgtcaatgattttcttcatgcctcttaagtgcagatgtccaaatctttgatgccatatattgacttcatcttctttggagactagacatgtggaggagtaactggtttcttgaggtgtccatangtaacagttgtcctttgatctgctgcccttcattaggacttcactcttctcatttgtcaccaagcattctgactttgtgaagtttacattgagtccttcatcacacaactgactgatgctgatcaagttcgcagtcagtcccttcaccagcagtactttgttcagactaggaagtccttcatggactagctttcccattccagtgatcctttcttt

SEQ ID NO: 271649 - DNA, 336 bp, Glycine max
  unsure (1)..(336): unsure at all n locations
aggaatcttctggagggcccaggtgggcttggttgctatttacacccccctctntactaaatgcancccccctttctatttttttgaattcttttccgtacgtacgaacttatgaattcgtacgatcttattttcttccgaaggtaccaatctacagatatgttttactcttttggcttcaagaagtacgaactcaggattgcgcaaatcctcttttattccgcacatacggatttacgatacgcagcctgttctttgattcgaacgctcgactcattatgatgtataatatatcccgacaaataggatgacaccaacattatatgctgctgactg

SEQ ID NO: 271650 - DNA, 418 bp, Glycine max
agctatgccataaacagcgttcacaaaagtcaagtttctccaccttatcttcatttagcacgttctattttcccagttcaatcaaccccctctcactcacatgtcctaaccttctgtgccatagttcagtctttgacaaccttttgacagaaactgcaacagctgatccaatcatcacttctccaatcagagaatacaagccattcttttgcatccctttcatgaatattatggagcactttagaacctttagaactccattctcctctttgaacacatagccttgtttgtcaaactcactcagagaaatcaaatttctcttcaaatctgggataagccttacattcttgatgactctcttagcaccatcatgaagcttgaaccttacagacccaattctagtgatcttacaagactt

SEQ ID NO: 271651 - DNA, 166 bp, Glycine max
  unsure (1)..(166): unsure at all n locations
ctataaatngatctcgaacttcttgcgtaatgttggagatcccgcgtcttcgactagtgatgagcataaaatagtgtaacaattgcgtaatgttggagatcccagttntgtagggttgagttaggcctataaccgacattctaaggtgtaacattgttgttgttgt

SEQ ID NO: 271652 - DNA, 416 bp, Glycine max
  unsure (1)..(416): unsure at all n locations
gaaagggtataattagatatgcggaggactcgtgcatcattatgcaaagaacaacctataaggatcaaagaatttaaaacgggggcagtttgaaaagggctcagcacagccattgtcagttgcagtaaatttgacacatccaatgtgcaagctttttaatgcataggtgcagacattttggaagtattatatcagaaaagtcacacccattccaaagcttaagatatgtcaaagacttagagcaaaagattaaagggagggactcaaagttgggtctaaaacctgaatatatatatatatatatatatatatatatatatatatatatatatatatatataatatcaagggctggacattatgaaacagagcatatttgatgaccctatctatgagttcgggctcggtccaactan

SEQ ID NO: 271653 - DNA, 313 bp, Glycine max
  unsure (1)..(313): unsure at all n locations
tgtgatcgtgctatgactnatgtgaaataatataacagggttgctacaaatactctctgtgtatatatctgataccacattttaacaaagtgaattgtctctcctctaccctttatgtatttgcctgcaaagagttttccacgttaaatatgtgagtgcattcttctactttctagatctcttctgcttattatctctaaaatatagtaactgaaatctttattcactgcttttgtttgtgactacaactaaatattacttactatttcttcataacaaacttcttgtggatgagaaactntgacatgaatag

SEQ ID NO: 271654 - DNA, 446 bp, Glycine max
  unsure (1)..(446): unsure at all n locations
agctctgaccagaccagcatgaanagaagagaaagttaataaggaaaagggtccatcattcacgtgagccacggactcttgctcttacatgacctgagccaacccacgccacgctctctcttgcctcagcttgacctttcagcttctgagccttctgaccacactgttggttacgcaacaagggccttcgcacgtgtcagctgcatcatgcacgcgtgaagggttcacacttggcatcacagtacaatgattttcttgtttttggtacaacactgccttgaggtttgacgaacacaatttgcttgtttagccatctgggcccttgatcgatcctggagacaatcagtgggccacatgttgggtttttgggcctcgaaaggtcgacatacatgatagttcacattcttgtgcatcacacaaaacagagagcctattaatttattctt

SEQ ID NO: 271655 - DNA, 432 bp, Glycine max
  unsure (1)..(432): unsure at all n locations
tgctctgaattctctgttggtgtgggctagtattctaattaagtatgcttgtntttcccaaaacaatagttttgaagcaaatgggtttaacccaatttgccaagtggatntgtgcattggatactatgctatcttgcaccaactttgaggtaataatgattnttttaacaattgatatttgaagttagtttacaaattaagaagcgtttaataggtgtagaatattaatttatttgtaaaaaatgatttttatttaatatagatgtaatgtgatttgtgttgttgaatgatttgagaagctgatgtgcatattcctgtatggcgatactggaaaataatatgaattgaattgatacatcaatctttgaataaaaactgaacaaagggatcatgcagagcatgatctgacttatcaaattggttgaaatgtat

SEQ ID NO: 271656 - DNA, 501 bp, Glycine max
  unsure (1)..(501): unsure at all n locations
nngggcataaggggatgnaggaatnnnncnacctttagtctaagccccgcctgctctaagtgtacttagatgtctgtatctatgggaggatgttgtttaccacttctgtaataagagtagggtgccactggtcaaactaactctccaaatcatttgccttcacaggatatggccacaaggaatgtcgcctcagagaggtccatgaatgataatgcagcccaacgaactagctcgcgttcggagcatgacagtcactgctataggagcgctgtcacgcacaggcttcgagccatcatgggatggcgtacgtctggaggacctgtccactatggacgagagttactgtttccatagaataggcacgggggggcataccgttacccatgagcgattgaccaaagagccttggttatgcatgccgccacacagaggcatcggactgaaccgcggatggttggagcccttgtgcgcctatcgcactctaaattcttgcgagagcgg

SEQ ID NO: 271657 - DNA, 393 bp, Glycine max
  unsure (1)..(393): unsure at all n locations
agctttcgattcattctatgtgcccgtagtggtccacattgtgtttcgtgcanttttattctcgttttgtttactttttataccccttgttgacgtgcttaagccattttacttaagtcatttctcgcttaacttaaaaataaaataaatttccaccgaacgtttgaattgtattatccattaacttcggttaaaataaattccgaccgttcggtcgtgccgtaaccacgttggaaatcaaaaagaggtaaaaaataaaggctaaaatcaattcgcctagtcaagctcgtccataaaaaatacgcttttgaagtttgtcatttcatttcctcactaagtaaaatggatcatttctaacgtccaacgccttaaaatgatcacctcttaaagtaa

SEQ ID NO: 271658 - DNA, 397 bp, Glycine max
agcttgagatgaggaagtgtagaatggtgaaactttctgcttttattcgttgaccacagagtggtacctggagatatgtcgcgggggtcacgagaccttggagacgtcaggtggggtgctattgcccaaaaccaagcttgaccaatcccgacccaacccgggcatagttggtcagtgagaacctgtgatgtacctaaacaggcgagctcctggcagtccacagataaaaggaacaaagaccacaaagcaaggaggcttgtggtggctggccagctatgaacttgattgatgtgtgagagatagcctctggtaatcgattaccaagggtgggtaatcgattacaaggcttaaaaatgaagacaggagactaagatggtctctggtaatcgattaccac

SEQ ID NO: 271659 - DNA, 326 bp, Glycine max
ctgccgcaagagtctagtggatatgctcttctgctgaccaccatacagactgttgcccttccatgcaacaacctggagcaattgagtagcctgaagcttatgctgcaaacatttacaatagacctcctcaacctcagcagcataatcaatcacagctgaacaattatgacctctccagctacagatacaatccctggatggaggaatcaccctaatctcagatggtctaaccctcaacaacaacaacagcagcctgctccttccttcagaatgatgctggcccaagcagaccataccatcctccaccaattcaacaactgcaacag

SEQ ID NO: 271660 - DNA, 94 bp, Glycine max
agcttgagaatggagaattgcgctatacaatcacttcgcatagcttcaaactcgaatgtggaggacacatgaacgaaaacaccattcatggtgc

SEQ ID NO: 271661 - DNA, 345 bp, Glycine max
  unsure (1)..(345): unsure at all n locations
tgaatagttcgttcagtctgaccatctgtttgaggatgataagctgaactaagcttcagctttgtccccaaggcttcatgtagacttgtccaaaatcgcgaagtgaaccttggatccctgtcagatacaatactagaaggaattccatgcaaccttactacttccttgatatacaactccactagctnttccattctatacctcatattcactgcgataaaatgagcagaattggtgagtcgatctactatgacccacacggcatcatgcncacgactagtctngggtaaactagatacaaaatccatagatatgctctcccatttccattccggaatctccaat

SEQ ID NO: 271662 - DNA, 439 bp, Glycine max
agcttatcaccatttgcacctttctcatcaactaatttgtcactgagaggtgacagagacttgaataatccaagtaactaagcaagtgtgtcgtaatctccagaaccagttcctccatcatggacgatcccattcatcaacaccaccagccctggagtgggactgggcccaagcattttagtgcggccgccgttgaggtagggcacgacggcggcaccagaattggaggtgcaatcgcagtggtgaagggagaaaaaggatcttatgaaagagaaaagtgtgaaaaggaaacaaagcttatggtttcgagagagagaaagagggtactgagaagtgagcttgcgagggtcttatgtaaaaacctgaacatcggtttgttgtttgagctttcacaacatcgatttttaaaaaaccaatgttaaaatcattttgttaacat

SEQ ID NO: 271663 - DNA, 520 bp, Glycine max
  unsure (1)..(520): unsure at all n locations
tatctcagcctcagctcgatcaacacanagtgaatggttcatgtcaccttatatacatgcccaaagcctccttgtcctaacttggtttcagttgaaaaatcatcggttgctgacagtactgatgtatagtttaatacttgtagatcctgtctcttcttgaactcatcttcaagatctttgacatcatagaatctatttgcagctgctaaatctgtcatcttattagtcttcattccttttcttctttcctctgtttagatgtagttattaatgataaagattgggaatcaaggagttacgctccaaaaagtatctagaacaatgtatatttcaaatacaaagctaacctttaaacaaaagtnttctattcttcaatgccagaaacagaacgaaagcgctgattacaactagagttgctactattagaatagttatccatatccacttctntgtacctgcatgcaccatctataacttacaagcaacgagttctgtatatgtgattcctgatctatcgctt

SEQ ID NO: 271664 - DNA, 301 bp, Glycine max
catcatcaatagtctcagacgggacaggctctttcttatcagctgattttgactgagttattaaagatggaacgtaccaaacttaaatttagtttggcttaccaccctaaagctgatggccaaactcagggtggcaatagatgcatagacatttatttgcaatgtttaaaagttcacagcgtaagcaatggccaactgtctcaggtgggctgagtattggtataacaccaataatcatggcaccactgcatgtacctggcttctttttaccttaatttataatacagacgattcattcttt

SEQ ID NO: 271665 - DNA, 443 bp, Glycine max
  unsure (1)..(443): unsure at all n locations
acattagtatggaaagataaacatgttatnntatggttttgtgcaaatacaacggaaaatgctattaccatcttgctcctcttagcctcttcatcactgtcattaccatcatcaccaacagctttcctggaaaagttcatagcattcttaaatgttaagtacatcaataacaatatgcatatcagaaaagtgaaacaacaaaacanaataaagatattggacttcaaaccttctntntgcaatggcccgatcatcangaccagcctcagcatggccatggccatggctgtagtcaggaaccctgctaacaatcgtcctcagaaagtcaaagacattatagctttgtacacaatgatntcttgcaatttcattcaccactntgtanggcttatagttcgcagtaattatagagcttggaaacagaataatatcataatcaaaca

SEQ ID NO: 271666 - DNA, 414 bp, Glycine max
  unsure (1)..(414): unsure at all n locations
agctntgtgtaatcaattacactaatttggtaatcgattaccagtgattgtttatgagtaaatcaaaagatgtaactcttcaaatggtttttgactttttcaaattggttttaagtttttctaaaagtcataactcttctaaatggttctcttgaccagacatgaagagtctataaaagcaaggctttgatttgcttttcaatacacttttccaatcaatcttatacaatcctttacaagccttgaatctctttgaacttcttcttctntgtgccaaaagctttccaaagttttctggttttctaaaccttgaaaacttatgctattcattcttttcatctcttcctcctttgccaaaaagaattcgctaaggactaaccgcctgaattctttctgtgtctctcttctcccttt

SEQ ID NO: 271667 - DNA, 320 bp, Glycine max
  unsure (1)..(320): unsure at all n locations
ataagcgcgggtctgggagacaaaggtcaagtggttgcgatattctaagatgatgttccgagtacatnggatttggtacgaccatgccctcctgatttccagctggggaattggcgagtggaggaacgccccggcattacgcaacgagcataatgtaaaccttacggttttaaagctctatagttggcctaggcttcgagttgtttcttattgtaaagcttgtgtctttgttttgaattataatacaagatcttcttatctgtctacgtcctaccatctatcattgcagttacttttttctgaccgcaatcgagacagtc

SEQ ID NO: 271668 - DNA, 444 bp, Glycine max
agcttggagtgattagtattgaataagttaggaggattagcctaggtaaacatgtttgcgatttgattggaggaggaggcatgaagtaaacgcattaaaccttgttgagctttctcacggacaatgtgacaatcaatatccaaatgcttgttgcgttcttgaaagatggggttgtgataacataacagggactcaggtgcaattagcagattcaggtgcagagcaagtaagacagggaaaacaggaggtacaatcagcaattgacagagctagcagtatcaaaaggagaatttcaaagcccacttacctcagagactatgtctgaatattccagaatcaagaggaaggaagttgcgggattgttgttgactttggggagacaagaataacaacctgatattccattgtatagaaaaggacaaaattagttatgagaattatcac

SEQ ID NO: 271669 - DNA, 445 bp, Glycine max
  unsure (1)..(445): unsure at all n locations
agctngtcccagagatgcgcgaaagcaagagctaatcctgttgttctcaaagcagaaactcaggtgaagtttttccagcatcacgatcggcaagcgtcgcatagcgcagtggaatctgtggattggtgagaagataatgaagacgatgtcttttaatcgcaggttcaacctgttgacaccgtaacagataattggacttcttgagtttctccaatatcgaatgtgaaaaatcctttgtacttgcggtggaagatgcgacggcgactggtgtttctgcggaaattggtgtcagaatttcttcagaagcagaagccatgaagaggaataaatggggatcgaacaactagctcaatgataccatacaggaaacagagagagaaaaaggaaagatgcactgaggtgaaaagttgttactattcaacccagacagaanacagtttacact

SEQ ID NO: 271670 - DNA, 528 bp, Glycine max
  unsure (1)..(528): unsure at all n locations
nnnnnnggtcgcccttatgcctttagnatactnanatttgtagnnncggcctactgagacgctnagcgncaatctcacnaaaannattctattttttactacnncaacnncacgcagagacattggtaaataagaggaacgtcaacttatcgaagaagctgaacatagccctacanatcaagcgacaaataaactagctctgcggaagtgtcgtgcggaattgattaccagcttacagctattgggtgattatgaggccttactgacaccacctcaacttgttcttgcggaagccaatcaagctgctgacgaagctattatgttcttatcatgaaccctggtgggctggatgcttcgatatgtgaacacgactgatatgccgtgaaatgttggagcaattctatgctgggtatcgaatctgtaaagtcgttctcctgtacatttgacttcacatgaatgcatcttctaaatttaattgaggtctaacgacgcaaattgggtaactgtgagtgaccaattcaatacccg

SEQ ID NO: 271671 - DNA, 396 bp, Glycine max
  unsure (1)..(396): unsure at all n locations
acctgttgcatgcaagcctcactgattatccatctcatagttatcattggtgccctaccttgtataccttatctncttttctgtacttggtttgtcttttttcatgatttgaaacctgaataggagtgaaccaatctgtaaatgaatggcaaattggtactcatgaaccaatttgttgttctgcgggtagccaaaaattatgttactctctgaaacaaaaaaaattttatgctgggtgtttcttgtaaaaattctatgcaggcttatcgattcagttcttctcttggtggcagttatcactcatggtagtcaatagcatgctatagcggcactatagtagagtggaacatacctggaccactattggattctgataacggagtggttctcaaaagt

SEQ ID NO: 271672 - DNA, 367 bp, Glycine max
  unsure (1)..(367): unsure at all n locations
gtagcattgatcaaggtgaaccacataattntgtgtgttctttctctcctttcttctctntcaattctgctacaattttgtgtgtatgacatttatggtctattgcattntctgctactttcttgtttgttcttcatcacttccataacacttataatgtgtgcatgtgacagaagaatttccacttggccgacccttggcttgcggcaacatgaaacaacaaanatgtaacttgagttacatttcatgggaccatagctgaatcacccnctggaaatagactcctttaaccattcagctaaatgaaaatgaaaaccactgctcaaggtacagtcacaccaatcattaaatcanacgctcctcatct

SEQ ID NO: 271673 - DNA, 441 bp, Glycine max
  unsure (1)..(441): unsure at all n locations
acaagcctatgttgagcttcagcgtcaacatcttcttccatctcgccaacgtttccagttgcatgccttcccactattatccattcatgatcaacaaacctcattccaagcttcttgagatggttttcagtaatctcactagaagctttggtaaaatccacaatcttattagagacatcaacaacgaagtagtcagtgtatcttgaggcaaacacaacataaggaaattcataatccaccaggcgatgacacttcagcataatgtcttcaatcagtagtacccaattcatcttgatacctgatttcagagcaaaaactatttgtagattatcatttgttacctaagcatgatagcttgacctangtgtgagaatgtaggtggtgaggtatactaacattntgtcctcggtagtcagtccaccaacttctaagtgattcctc

SEQ ID NO: 271674 - DNA, 453 bp, Glycine max
  unsure (1)..(453): unsure at all n locations
aacaaattcctcttattactagctatntngaattctttagttcctgaatatacaaccttcaaattgtttctcgttcccctctttgttttctgcaaaaaatcaaatcaatatcaaacaggtttttccagcagagattntcagaacctatgcagtgcaggccatagctgaatgggatatccttcagtaacattggccaacagcaaaatcagatgttggtgtgtaagtcttatgagcaggaaataagggctttcaacaaggaactacttggaaaatggaggtgggatatgcttcagcanagttacaagttatggtccaagatactgcattccaagtatggtggatggagatcattggtggaaggtagtagaatgaataatgagtcacggtggtggaaagacctaatggangctacacatgaccaacagatgaattctatcctncaagatcgcacta

SEQ ID NO: 271675 - DNA, 445 bp, Glycine max
  unsure (1)..(445): unsure at all n locations
agctntcagatattagacaccttaatgaanattattgaccaataaagctagtataaatactaaattaatataatagattttaatttctctctttgaattggaaggacatgtgggtaccatgtgagacttttgattgttgcaattcgctgttgcattgcatataagaacaaatggcatagtcaattattaatagtgagttgtaccatttcaagaaaaaagatataggcttcttgaaagctaattacgtaattattaaactacgattactattgactcgtgagagaattgaaatgtatgtatggaggacaagcctctaatttccttcctttctttttcggtattttgagcgacaaaagatttgtatcgatgtcagttagttgaacatgatatatatatatatatatattcagggttttgagcgacaaaagatttgtatcgatgcgag

SEQ ID NO: 271676 - DNA, 470 bp, Glycine max
  unsure (1)..(470): unsure at all n locations
ttcaccnnnnnaagctcnnnnnggcccgtgcgtacgactgatacgaattgactacttccttatacatggagaagacttgtgatgtatacactgcttgcttattgtagtagggcaactattcttcgtttttattttacagcgaaacttggacttcaaacattgcgtatgcacgtctgacgtatgcacaaagagatgaataagagtctcgatgtacagcacagatcaacatatatgtggagagatagctgagaacctgaacctccatgatgtttcacctgaagatgatgagtctgacctgtccctgaagaagtcgatgaatatcaatctgagcttcaagaacttcagaaggaaaacgtcattctgtacaatgtcaataatgagtcaatcacttagcactactgtggaaagtccttggattcatctacaaacaactaatgagagttctgtcatagcctgttcgcagatgaaag

SEQ ID NO: 271677 - DNA, 432 bp, Glycine max
agctctgcaagagaaggatgagtattttctaaaattattatcgaaatctataatgggaagagataacttagaggcacttcttgcccaacaaaagtgcgttattgaaaaggctgggttgggatacaataacaataagaaacagaaagctgacaaaatctttttcaacgttacaaaagcttccagctcacccatcatagtatgctactactgtatgaataagggacattcttcttttaattgttgattaagtagtttggaattccaagtgggaaatacaaatgggttcctatgggaactaaaaaggttgctaaccaaaaaggacccgacataatttgggtacataaatctaccttctaaatttgttttgtaggtgtgcatagcagtggaatgacaattatggtacctagatagcggctactcaaggcatatgat

SEQ ID NO: 271678 - DNA, 425 bp, Glycine max
  unsure (1)..(425): unsure at all n locations
atgacaaanaaacatgagaatacaaaaganatcctactacaaagactactcaaaatgccctgaaatacaaggctaaaaccctatactactagaatggccaaaatacaaggcccaaaataagaaaacaacctattctactatttacaaagaagagtggacccaaccttggcccatgggctaaaaaatctaccctaaggttcatgagaaccctaaggccttctntatcaactctagcccaatcctcttggaggctcttgctcatggctctggtaactagtcctttcctagggaggatngcatcatccnctcccccttgaagaggatnntgacctcaaatctgtggttccctcctctctatnatcagctccacctgcaaagggaataaatcagacatattaaaaagtggtgctgactcatactctctt

SEQ ID NO: 271679 - DNA, 434 bp, Glycine max
  unsure (1)..(434): unsure at all n locations
agctntgagccaaaatcctgactcaccataaaccttgacccagggtgagaatgccaatccttaccctcggaagcaaaaaagaatggaagggaaatttccaatcaaagaaaaagagaaggaaaatttccaatgaaagcaaaaaagaaatgaaggaaaattccccaatcaaagagtgggagaaagcaaaaaaaaggaaaagaaggaaaattccccaatcaaagagtgggagaaagcaaaaagaaaagaaaggaaaattcccaatcaaagaatgggagaaagtaaaaaaggaagaagaagaaggaaagatagctcctgatcaaggatcgaaagaaaccagaagaaatgtgcagagaggtctttggaccagacaatatctgaacagtacagaattgtcaccaaatgaacaaaaaggaaggaaaggaaaccacgaccta

SEQ ID NO: 271680 - DNA, 426 bp, Glycine max
  unsure (1)..(426): unsure at all n locations
caagcttgagaggattgatggngacccggtgttgagataaacgaggatatgggctacgtgggagtacgtgagctcagttggaggtgggcaacaggggatggtgggtttctgcgcgcattgtggatgtggaaagcttgttgtgcaccatcgcccgaccgccacctagtaccacatgtgatgggtaccccataatcctacaagcttgagatgaggaagtgttgaagggtgaaacttcctgcttttattgttgaccacagagtggtacctgcagatatgtcgcaggggtcaggagaccttggggacgttaggtggggtgctattgcccaaaaccaagcttgaccaatcccgacccaacccgggcatagtcggtcagtgagaacctgtgatgtacctaagcaggcgagctcctggcagttaacagataaa

SEQ ID NO: 271681 - DNA, 297 bp, Glycine max
  unsure (1)..(297): unsure at all n locations
gaagagaggaatnatctcaaagtggtaggttgccttcatcatcaccggcttgagcaccctttttgacccaagagccatcatgctctttgcggtaaccaaaagaagcaatcacagcagcaccaattaaaaaggatctctcgattgaacgtaaggttcagactcaagaggaatttgaaaattgcgaaaaagagagtaacaggtgtggtatggcaaggacatttatcgcatgccttatcatgcgaatctgactaatgtgcccagcagttgacacccgatgaatgccacatgatacaagat

SEQ ID NO: 271682 - DNA, 428 bp, Glycine max
agcttgaagctcaaggaaagcttgaagatgttttgacttttacatgcctaactcccttgagtggcatttgtattggttgttattgcgtatgtttcatcttagtacatatgatatttgtattgcatcattcatcatcatggttagtgcgaagaaaagtttctaagttagaaaagtttcttcaagaggcaaaactctttgttttaatttattacaagtctattgaagagttgagtctcgtatcagtttaatagattatcaatatcttgcaatcgattactattactcgatgaatacgactaacttttgtgtataaaacctgtgtaaatcgtatcaaacttccccaatttatggttattctgtagtgttataagttctttctgctaagtataggtaataaatacttagcacttccattctgtgtgcttaat

SEQ ID NO: 271683 - DNA, 375 bp, Glycine max
  unsure (1)..(375): unsure at all n locations
gcacgaagtcagacccgagaggaatgtggttacgtgatagcagaggatgtcagtgagggcgacaagagagcagtggtggtatgagaggtgcttaatgacaaaatggtagacattgtggatggcgaggagttatgggtgacaatcaacttgtaaatagttcgtaatttgattcgataatccactcgttaaattatgttcatgaatcaaatgacttgtacttgagctaaaaataaagctcattaaataagtgagccgaacttgagctacatatagttcgattcatttggttcatgaactagctcanaatatatatatatagattacgtttntctattatttatatatgcaaggtggaatagtttttatttatgtagt

SEQ ID NO: 271684 - DNA, 103 bp, Glycine max
agcttatctacataagctgcttttgagagaacttgtttgttactgacacgagacgaagacactaagtatctattacctatacttagcgagacatacttatcat

SEQ ID NO: 271685 - DNA, 424 bp, Glycine max
agctagaaaacaacaccaacagctacatccaagcccatatacctcagcggcagctgcatccaagtttggataccttactagtactagcatcaaaagccccaaacctgcctggcacttgcatcaaaagctcaaaacatgcccaacacctgcatcaaaagcacagaacctacctggcatctacatcaaaagcctggaacttcccgacacttgcattaaagcccgaaacctacccagcacccgcatcaaagcctggaacctacccgacaccaacattcaaagcccaaaattatctcagcactagcctttgagtttcaaatatgcccatcaattgcataaaggccatagtacctacattatgttgtgcattagacccctgaataaaattgattcacttctttactcatttcttaccataataatctat

SEQ ID NO: 271686 - DNA, 421 bp, Glycine max
  unsure (1)..(421): unsure at all n locations
agcttgtaaattaatggatacagatgttgatatttgcaatacatttcctaaaggggacaacttggagcatcttgctacaacaggttaatgtgatgacaagtcatatacattacgattaggagtacaggaggatcacaaaggaacattggattctatatggtataaagctattgagatgtgtctatctagcaagctcaaaactttaacaaacaatatgagatctacttcttcttctccactcatgattaaaattgcttcaagaattatgttgaagtgatcgtaaatggacaaataaatatcctcacacaaatactttctcacgtgtttactctctcaataattttttttcactcgtgtttcactctttttggctttttccctctaatagtctcaccactctttncttttaccactcaacttc

SEQ ID NO: 271687 - DNA, 431 bp, Glycine max
  unsure (1)..(431): unsure at all n locations
agcttgtctcagcgtttatgcgagacggagaccaacatgctagctatcatcgccaagtaccaagaagaagtaggtctagccacggcccacgagcatagaatcgtggatgagtatgctcaagtatatgcggaaaaagaggctagaggaagggtgatcgactctttacaccaagaggccaccatgtggatggaccggtttgctcttaccttgaatgggagtcaagaacttctccgcttgttagccaaggccaaggcgatggcaaacacctactccacccccgaagagattcatgggcttctcggctattgtcagcatatgatagacttaatggccacataattagaaatcgttaggaaacttgtatggtctctcagaccttgactggatacgaacttctttntaaaataaaatgagtcggtcccatgtttcta

SEQ ID NO: 271688 - DNA, 439 bp, Glycine max
  unsure (1)..(439): unsure at all n locations
agctntgaagactcttccattggtgattgaactgattctttgcaccctttaacaaatgcccaaacatccacactatgaacaaatatgatgcaaaccttcacattctactttatatcagtgttcttggatccaaactctctcaaccattggtttgttcaaatcaatatccacacttactcgcatatctaccctttcaagcatctagggtgtttgagtccaccctaataggcctaccaatgcagttgccaaagccaagagtatactcccatcataaaagaaaagattaaggcctaggaaacaaatccataccattgttctatcaatggtagctttagggggaacaaaactctggagatcaagtttgaactgtgggataatgatcaaagttcatccaaggaccaccctncatgacattcaccctatctcctccaggtcaaat

SEQ ID NO: 271689 - DNA, 442 bp, Glycine max
agcttgtacattcaacacattattataaacaagcaaatgagaaagttgaagctaccaataagatcttgattgatataattaagaagaatttataagatcatctgaaaatatgacaagaagcattatgggcttgtcgaaatatgcccaccaaagcaactggttgtaccctatttcggatgacatacgagcatgaagtagtttttcctttagaaatcaacatgaaatctttgagagtagccaagcaaaacatgttaagcttcgataactatcaataatccatgcttgatgagttagaagaattaaatgaggatcgactaatggcacttgaccagattcaacttaacaaaagaaaagttgaaaaagcatataacaatcacatttagctaaaatgttttagcgaatgtgacatagcttggaagtcgattatgcctttgggagcaaa

SEQ ID NO: 271690 - DNA, 406 bp, Glycine max
  unsure (1)..(406): unsure at all n locations
ttcctaggcctagaatcgcattcgggcactcaatntaacctctacatgctgctcctatgcatataaaacagntccacaatctcaagcttacaaaaccatgcccatatgtcattgaggcgtttcaccgagcacttggtgggcgcatgttttgacatgaatagcaagagagtgggggcaatgtggcaagccccattactccagaatgcaacataggcctaaggccatcccttacaacccctcaattcaacaaaaacaagcaacaatgcaaggataaatccctcaggtttttgagcaaatacatgcaacttagagcaccaaaatacatcaacgaanagctcgagagcccaagaatgaggtacttacttngtggagatgaataatagtgcaaaacggaatcaaaaacatg

SEQ ID NO: 271691 - DNA, 436 bp, Glycine max
agcttgtctctcaacactacaaagctattcacctttaatccttttgttaaaatatctgccagctgcatttcagtgctgcaatacctcaaatccagctgcttcttgctcaccttttccctcagaaaatgaaatctagtctcaatatgttttgatcttccatgtgctactggattcatggccaaactgatagtagatttgttgtctacatacaatctaactggcctctgaatttccaccttcaattcttcaagcaaggagtccaaccacaaggcttgacatgcagcatagcaagctgctatgtactctgcctcacatgaggataaagccaccacttgctgtttcttggaacaccagcttattgatgtacccagaaacttgaaaagatagcctgtagcgcttttcctttccaccttgtctccgcaccaatcagaatctg

SEQ ID NO: 271692 - DNA, 384 bp, Glycine max
  unsure (1)..(384): unsure at all n locations
actggcttctngggtctcgctcaactggacatcgtatggtatgtaatctctattttccaccacattccacagatctatatgaatatattcaaaatggtctatcatacgctccttccaatagtcgtattttatccctntgaatagaggtggtttgttggtggaaaatccttcttccatatctttgatatatatactgatatttccttagtattgtcagatactcaacccttaaggccaagctttgataccaactgaaactacaagaaatgcactaaaaggggggagggggttgaatagtgtctatcaaagataaaatattctcacaataatatggatattatggataatacacacattaaaactgattgaccactgagaatgaaa

SEQ ID NO: 271693 - DNA, 346 bp, Glycine max
ctgcaagcttaatggagagaaatgagagagcgggggtggggggccttttttctgtgagtgttacacaagactggtgaacaaactaaaagatccctgagtcccttttcttggctgaattcattttctacacatagccgccctttgcctttcaagctaaacctgccacacccccttgttagtaatttacttagggaaagctattcatatatctctatttctctccttaaggtcataaaagttatctacatgacattctacatttgtttgcatcatgtctgactgacatgagcaccagctggaactatgagcctggaatgtttattgtgtctaacaccttgggaaaaat

SEQ ID NO: 271694 - DNA, 500 bp, Glycine max
  unsure (1)..(500): unsure at all n locations
aagctatacctgacataggaacactgagtattctctatttatacattatatggnaacatagacaaaatcagagcaggctcaaattaggaacagacaagagaaatatcgctgtcagtgttcatcagaaattctaantttgcctcctaccaaaaggatacctcatacatggttntgatattgatggagtggtagtttnttaagcaaagctatatatgacaagcttnaaggcacantaatttaacaatctaaactctaccacacgggaaatcacaatgaagaacaggctaactaaagaatttagaatataaaaatcaccatcaacagtcgtgtagaaatgtgtctctttcaatatgccannataccganacaatcntttagtaacttaaggagcaactcattttcatcatcacagtctaaatctgaagaacagaagtgactgaggaanaatganacacacacagaagcagaaagtaatggggagtaatattactcaaccctac

SEQ ID NO: 271695 - DNA, 305 bp, Glycine max
agcttgaagaagtattgatctgcatatcagaggtgtattcaatccaactttgtatttctttctagtattttttacatcttggttaaggctaccaaacgattctgagttgatagggtttcaactcttgatttttctcttatagggttcaagggaaaagtagatttacgacattacatgtatatagcggctgcacttggttctctaataatggaatgttctaagggattgtacaacaattggatgtaggtcttcttgaggatcgaactagtataaattcttgtatttgattctctctgtctctaacc

SEQ ID NO: 271696 - DNA, 396 bp, Glycine max
  unsure (1)..(396): unsure at all n locations
cccaccacgcttncgctgcgccactctgattgttgagatttgtactctaaaatttaataactatttaatcattatttcgtttaaactttccattcaatgcaaacactgcttaggaaacacaaataacaaacatatatatatatatatatatatatatatatatatatattgaacaatgatttggcaaaatcagaaaagactaacgggaaaattaagagaatngcagaaacagttntgtataatccctggcacttggatttggccgtttataaatggaaactagggaagagttgtagctttggaggagctgggtttgttnttgtggtccttacaacaacaattagttttaaagttaactacagaaggtatggaaggtcaatgggactgcatggaaat

SEQ ID NO: 271697 - DNA, 400 bp, Glycine max
  unsure (1)..(400): unsure at all n locations
aaattctattggacacaactggacattcgaatgataagttatcgcccgtcgaatatgcttagagcttttgtataccactacgagcgtttgaatatcctacgggacaaaatcgcaaatccgaggtaaaagtaattgtcgctagaattttctcattgattccgttttcaattacaagcatctctatatcctactggacacaatatagaatccgactcaaatttatcgtcgcttgaatttgctcagagcttccgttcatacctacgaccgtcttgatatatctacatgacttcatcacgcgtcccagttaacagttcttggcgcntgacctttgtagaagttcatatttaatgccgggcgatttatgtgttactgggctcattgcacctccgactatattctc

SEQ ID NO: 271698 - DNA, 513 bp, Glycine max
  unsure (1)..(513): unsure at all n locations
nnaaagtcnnnnggaaccattatgnnaatccgatagaacttgananacncnnanaaaccnnacatttataataacccaanntttttttanttttacaataagagtcaatcggttgtatcttattgagagtgatcctcctaaattctcgagggatccaagaacaccctggcgtgatcaaaggactttaacaaccttggtgtgttgccctcgctggaaggagcgattctttcctgcctatcatctccacccttgttctttcaaaccacatttccagatattcaacttttgccataattatctcgtggccataactccaatttatgcactcaaattaggtgatcttgagcctaatngacttcaaacgagactttcacctcgttgaatcactcatctgagcctgagcttagtatagcattctatttctgccagcacacttaccgcatatccatccattatcctttatgcagaacacctatagaccccgaaataccacctattcatattcctaatacn

SEQ ID NO: 271699 - DNA, 431 bp, Glycine max
  unsure (1)..(431): unsure at all n locations
agcttctcaagcaatcttccatcatataggacactaccaaatgccaaatggtgaatatgagtaatccctagaaagctaagggaaaaagctacaattgttttagaaataagcttacgccaattcttttgttttgagggtcattttatgcttggaagtcagagcctttgcacttggataattgggctgcgaaattacgttttgctttgtgtaattagcttaattagatagattagatgggcctaatcaagacccatcttttccttccaattagtcacaatatatattagtatagctagttagttatttccattctgtatgaaatagaatttagaaacttcttttgcaagcttttagaanaaactcttttctctcttgttctctcaattgatattcatttttcttgcacaaattctgttgctcttccattggcg

SEQ ID NO: 271700 - DNA, 430 bp, Glycine max
agctttggaagatactggttgttcttctacttccatatgcaatagtgttgcaccccaacataattgctttagaagtaatataataactaaaaccataaccatgtctagagacataaaactaatgatacagaaactagaaatttcaccatccaattatctacaaattgtgatatttttggcaacaaaatttttataaataaagcaaacgttgtagatttgcaaccagccaaaaaaaatgattttaggacttgactttatcgtacatgataatagatcaatcactattacaaaagattacttattaatttctacaaactcacaaatgtcacccataatatacgaactcacatcagagttacgaacaaagcgtggtgatgccctcactaatactagtagccaatgtccttgcgacatacctggtagttgtaaa

SEQ ID NO: 271701 - DNA, 485 bp, Glycine max
  unsure (1)..(485): unsure at all n locations
ttgctctgtccctttccctcacttgcaactgtagctnntttntggatgtttcaagttttgaactaaagacttgaggcttgtgacatttaattaaacaacgaaataactaaagacttgcaagtgtaatataaatcttcatctattttatgttaaagttgntgacaatgtgcatgccacaataaacaaggaaataacttctgcctgctggtacaaaccttaacaatatnttggttttttatttcctattttcctaaataattatcatcttctgtacagtttatttgtgaccttcaaagatttgtataaaaaaccgtgaaaacaaccaagttcatgtcacattntaatatttctttgcgacaacacagagtgaaagcaggaaatctggtaggaaatatttaacgtttaacgttgcctttgaaatgaaatatggcanaagagtacaaggtaagaagtgataccttaaattngacactattgcataatgt

SEQ ID NO: 271702 - DNA, 429 bp, Glycine max
  unsure (1)..(429): unsure at all n locations
gaatagaatgtaagagtggaggtgggggagaaatggttatgcttggaagttttttacaacaaacactggtaagaaaaaaaattaaaaagataaaatgaattaaacttcttctctgagttagattttagtttatatacaagttaaaacaaacttttggagaagttaaataagagaacttctacaagttaacttattagtaagtaaattttaacttaggggaaaagcttatttcattatatcttcttattttcttctccttttaagtgtttatgaagaagtctatcctaacatgatcatattctacaattttgtttttgcaatccatgttcctgatcatgacattagagcaacacatgcatggtaacttattgtagccttggtgaaatgctttantttggtgatactagactaccctttgtggaaaaaaaa

SEQ ID NO: 271703 - DNA, 210 bp, Glycine max
  unsure (1)..(210): unsure at all n locations
accacaggccacagctgaggtccatgccaaacacccacacacacacatacacagacacagacacctacaataattaagcagtcgcactcccgaaccccacaattccaaattagttacataaacaactttcgatgtcgatattngtctgtaattgacaattacattctgtatgttgttgtataaaggatcatgggatcttcacctgcctcg

SEQ ID NO: 271704 - DNA, 425 bp, Glycine max
  unsure (1)..(425): unsure at all n locations
agcttgttgaaattgccatgttnggatgagttaaacatacccattctgttttagggtttttgtgataatgtttgtgatgtttatatgctgaacattgcccatggaaaactgttagagatgaaatgtagagttaacctagggttggaaagtgagaatgtggtgttatgagtggaaaaagagtgaggctttgagagttggaaggctaagtctgaattctgtggtaaatggaggttaaagtgagttaatactagcttgaaatgtcatttaggacttgggagaaagcttggactgtgctagagagaagaacaaatgatcaaagtgaacaaagagccatttctagggcaaaattgggtgttgaggagtcaaatcttgattcggtgggattttaggtgtaaattcagtttgagcaagtttagattgatgtt

SEQ ID NO: 271705 - DNA, 534 bp, Glycine max
  unsure (1)..(534): unsure at all n locations
nggtcatttttnagggatcattcctttaagtttangcgnnnntnngtaatanncnnacnnccnnnnngagctnaanacatggatagggaaacanggttcttaggtttttcaaaggaattaatggaaggtatgtccatttggctagaggctcataacaccaaaatggcctaaatacattccaaatatgcttgtgaattaggaggcttcaccaagaatcaagccaaggctattgtgcaagcaatcaatggggcaaaacacacccanaagatcttgatgatggatggctcaattctcacacagataaacttatactatcaagatgagctttcanaactatcatgacctgtagagggaaacanggtttccaatcacaaatgtcaaagactttattctagaacattacccatttctgacatatctatattcaaagacaaatgcaaagtgcctgcaacagattacctaaatttaactagaacccacaaactacaaattacaactacaaactagcaaccaagacactccctcccctcttag

SEQ ID NO: 271706 - DNA, 413 bp, Glycine max
  unsure (1)..(413): unsure at all n locations
agcttgacgcatagacctctcaattaccttcttttttgtctcctggatacacaacatgtctatgtaatgctcgctgaccagtcttctaactgctggccatttaactcccctacctaaccctcttacattatatgaaataatgttcatggggtcctcctactacttcccaatctctcggcctctttagtgcttcttacctccatttttgttatttgttntaaggggttccttcgtgaaggccccactgtaacccctatatcttttatcatctcccataaattttctgcctccttgacgcgattagtttctgcatttgctttctcgatcattggttgctatggcgattggtaattgcaactctgatctctctcattcatctgggtttgcgctgagtcttgcgtgcttggctgctt

SEQ ID NO: 271707 - DNA, 443 bp, Glycine max
  unsure (1)..(443): unsure at all n locations
agcttgtttctttntgggtgaaagtgcctatacggattcctcctggtaccattttgttggtgagatttctataataataataataacaaataaaataagattatagaaattattttcttttcataaataaatcaaatattattatataatttttattttatttcttttcagttatataagctagtaattacaattatttttctataaatggatgtacagaaataaatggttgtacaatagttatgctttccgtttaaatatgttggaaatattccttcatcattgggtgtgcagtagttacagtttctgctttaatactattcaaatattattttatgcaattatatgtgttaataattgcaaatattacttcataaaggctgtgcaacaattacgggttccggtntacaaatntacatatatatacatatttgttaattcat

SEQ ID NO: 271708 - DNA, 444 bp, Glycine max
  unsure (1)..(444): unsure at all n locations
agcttatcatttaataatttcatgaaataattgacataaaccacactgtaaaatggacttgatagtgtgttaatcagagataataattttgtaagcatttatcacataagcatactgcatatgtatgttgagtagtccactgaaaagaaaaattagttttgataaagacaagtttcatcattcagtgattgaataagataaactttcaaaacagattttcaaacaggtacttaatgtgagaagaatgatagaaaatgctacgagaatacctaatatatctaataaacagattaacaaattaacaaatgttcattttactaccccaaattaattntttaacatcttcaacgggagggagatgaagatgatgacccaccatttccactcattctttcacccatcaaccgaacaacttttgttagggtttgaaattcccaaatccct

SEQ ID NO: 271709 - DNA, 131 bp, Glycine max
taagtatgtattaccgtatacttaacattaaggacttataacactacaaaataaccattaattggaggagtttgatacaatttacacaagtttgatgcacagaagttagtcatatacatcgactgacaact

SEQ ID NO: 271710 - DNA, 434 bp, Glycine max
agctttaaactgtatggctgctcatcatcaatagtctcagacagggacaggctctttcttatcagctgattttggactgagttattcaagatggaaggtaccaaactcaaatttagtttggcttaccaccctcaagctgatggccaaactaaggttgtcaatagatgcatagagatgtatttgcaatgtttaacaagttcaaagcgtaagcaatggccaactgtctcagttgggctgagtattggtataacaccaataatcatggcaccactgcatgtacctggcttctttttcccttaatttataatacagacgattcattcttttccattcttttttccccctttcattctatacgttcttgagtaatttggttacagatctaacccagtctagaaaggggtgggtcctaacatccttctatactatttaga

SEQ ID NO: 271711 - DNA, 510 bp, Glycine max
  unsure (1)..(510): unsure at all n locations
ctaagctgtgaagaaaaatcatttgaaggaganaagacagtcgccacacacattagtatggaaagataaacatgttatttaggggttttgtgcaaatacaaggaanaatgctattaccatcttgctcctcttagcctcttcatcactgtcattaccatcatcaccaacagctttcctggaaaagttcatagcattcttaaatgttaagtacatcaataacaatatgcatatcagaaaagtgaaacaacaaaacacaataaagatattggacttcaaaccttctttntgcaatggcccgatcatcangaccagcctcagcatggccatggccatggctgtagtcaggaaccctgctaacaacgtccctcagaaagtcaaagacattatagctntgtacacaatgttttctgcaatttccattcaccacttgttaggcttcatagttcgcagtaattatagagcttggaaacagaataatatcataatcaaacaggaattgaatattacagt

SEQ ID NO: 271712 - DNA, 434 bp, Glycine max
agctctagcctgatcgctaagtgacagcttatccatggctaagcgagatctattgtcgccaagcgcaattccttacgactttaactaaggtcgatgaagctaagcgccagtcatggcagctaagcgagattcattgtgacaatatgagcgctaagcgagttcctctcagctaagcgcatgctcctttgtactcaagatgcatcattttagctaagttggtcagagccaggcttagcgagagttgtagcttttctaatctgtagacctcgctaagcggacttactcttatgctaagtcgagtttctgttaaaaaaaaattgttttcgaatttgaaatgtcggctaagcgcacatgttcgctaagtgaacctcgttgagaaaccaaacgtctctcttgctcacttagcgcaacagtctgctaagcgaaggtatcga

SEQ ID NO: 271713 - DNA, 517 bp, Glycine max
  unsure (1)..(517): unsure at all n locations
ctaagcttaatggcagttctntataacagctngagttgtaagtgagttctaaagacccctttgtccatcacatacttgcaaaattgacaaatgaacaccaattgtcatagcctttcccaattgttgcctcttaactgtttttaatccaatccagtagaggcccctcttaacacatgtctccttcccttaacatagaactccatctgcaacttattaaaattccatacaatatcgcccaaggaaaccagccactccactcccaagaccaaatcacagcatcccaatggaatgagtaacatatcagaagtgaatntggtttgctgaattgtccactggaatcctctaacgacagcagacacgtttaactgtgtaccatcagcaaccaccactctcaaggaatcaaaagcattacttntgcaacccaatctctttggccgctcaatgtccagaanaatgtgggtactcccactgtcaatcaacacatgaagaggcttctttntgtagtagcctgtcacac

SEQ ID NO: 271714 - DNA, 239 bp, Glycine max
ttttgctgcagaaccgattgtttttcactatttacgagtgactcttgaattgccaggagagctgaacgaaattcctcttcacttctacccctatctataggacaatgggggagatgctatccacccagctcgacaaggcgagcaaggtgacttcctacagaagcaaccgccttcgggaggaatcttctggagggcccaagtgggcctcgttgctatttgcacccccatttctatcaata

SEQ ID NO: 271715 - DNA, 202 bp, Glycine max
  unsure (1)..(202): unsure at all n locations
ctgcagagacatctatatgttatttccctgatcctatacacaaaaaaggagagagaaagagatgagaggagcaaatgaggaacatgcaaacctgacacaattgcatcatccatgaaaaacccatgtcagtgcagcgttccctatcaactaaattctggcagntaaaaatgtataatcctgcttttctggtacataatacaat

SEQ ID NO: 271716 - DNA, 416 bp, Glycine max
tcgatctctctagtttatataccaagtccttattaccacgaatacaaaaacctttaggttgttgcatgtatattgtctcactcaaatcaccattcagaaaagttatctttacatccatttagtgcaactccaaatcgaaatgagctatgagggtcataatgattctaaaggaatcctttgtcgatataggggaaaaagtctctttaaagtcaacaacctcattttgcataaaatcttttgtcactagtctaaccttaaatctttcaatgttaccatttgagtctttctttgtcttaaagacccatttacaaccgattgccttataattctcaggcaactcaactagctcccatacaccattaactgacatagatcgcatctcttcattcattgcatgctatcacatttcttttacg

SEQ ID NO: 271717 - DNA, 502 bp, Glycine max
  unsure (1)..(502): unsure at all n locations
atggagctcgccaacatgataagtgctcccatgttgctaaacatcgtcgttcgcctcaacgtcaccaatgtcctctggcaaggcgacaccaacaaccccctctccgccgccgagatcctncccgcatccttcccgacggcggcgacgacgccgtcgagaacctccaatggcttctccgcatgctggctagttacgacgtcttctacgagcacctctctgcaaaagctatccccattctatattttcttctgatagctccagtatcattaggtcatcaagcttggtttaattaatttttntaaggtgtacttaattacacttcagcctgtcttataagtcttaggatttatgcttccatgattntcttgtaatgatattcaatcactgcgttnggaaatgaaccattatcactggcttctcttgaaaatattagcatattcttggaatgatattcaatcacctgtggttggaaatggacatttatcactagcttctcttgaaa

SEQ ID NO: 271718 - DNA, 430 bp, Glycine max
  unsure (1)..(430): unsure at all n locations
agctnggtgtagcttgcanaaggagtggatatggccatgcgttgttacacggaccacatgttacatctgccatacttgactccacatagtgctagtagatagaccagaagaagtgcccattactgtagaccatatacattgacctgctatatcccatagggattcacatctcgcccaaagctttgttattatgcaaattctcacttgtattaggactacaaaaaccacgccatgatttggaattcctattgactccaatggagtatgatgggcggcgcaacgtttgtcgatacaacatggagcaagtgcacctaatagaggttataaaagatcaaggagaccatgcagacatgtncgtcgaggagttcgaggagtaccagatacttctaaggtagttggagtatatgtttgacgaggagagtaacgattc

SEQ ID NO: 271719 - DNA, 415 bp, Glycine max
  unsure (1)..(415): unsure at all n locations
gaccactgacctgtaaggataagtagtaacacatataatgtatatagttatatacctctntgtcacttgatgatccactatccacaggttcaggggaatcttcactgttaatgactgtctcctacaagtgggatgttaggaaccaagatattgaatgaggaagaaaataaaatatcttattgactagtgagaaatgaacagcacataggagagacaactctcctccaagggtctccccttcacaaaggatttctcctttcacaaagagctaatgctcaatctacaaatgataagatcccnctctctgctatccttcttcctctatttatatctaataaacgcccttaactaacttactcacttttagtctcactatattaactaactctccattctccttgtatcctaacaatac

SEQ ID NO: 271720 - DNA, 414 bp, Glycine max
  unsure (1)..(414): unsure at all n locations
anaatatacaaccatactcttcttgagaaatcatctatgatggtgagaaagtatgagcttcaaccatgagttttcactctagatggtcctcataaatctgaatgcacatactcaaaaggcctagatgaaacatgaatacccgcgccaaagcttattctatgtgatttaccaagcacacaatgatcacaaaattcaagtttatctagtttatcaccacctaacagatnttgtttctcaagttcatgcaatcctctttcactaacatgacctaatctcaaatgccaaagtttagttttatcaatcaatgtattactagctaccgatgcatgtccaacaatcgtggaaccttcaagaataaacaagccattactcttattcttgctacccttagctatgattaaagatccatctgan

SEQ ID NO: 271721 - DNA, 64 bp, Glycine max
  unsure (1)..(64): unsure at all n locations
cacacaanaacaatgtgtgttcccgtaatttgtcactaacgaagacatgtccgttgcgcattat

SEQ ID NO: 271722 - DNA, 429 bp, Glycine max
  unsure (1)..(429): unsure at all n locations
agcttgtanaattcaccccaatttcagtgtcctatgctgacttgctcccatatctacttgataattcaatggtagccataaccctagccaaggttcatcaacctccatttctgcgagaatacgactcgaacgcaacgtgtgcttgtcacggagaagccccggggcgttccattgagcatggtagggctctgaagcgtaaggtgcaaggtctaattgatgcgggctggctgaaatttgaggagaattgcgtgtaaatcctgacattgacaagagatgccacacatggggcaattntgaaagctgttgttaggtgtccctaatgactcatcagggtttccaagtttatgccattattgtaaaccacagctacaatgttaaatgaaatggataaagttgatatctttgtgcctcatcctctcacagacgcat

SEQ ID NO: 271723 - DNA, 437 bp, Glycine max
  unsure (1)..(437): unsure at all n locations
agctcngggaaactaagtgctatgttgtgctggtgtggagtgctataatgtggcagtttttcttcttgggagcaataggagttatcttttgtgcctcgtctttgttgtccggtattataattgctgcttttcttccagtagcggaaggtttggctgttattgtatacaaagagagttttcatgcacagaaaggggttgctttggtgctctctctttgggggtttgtatcctaattctatggagagataaaacaagacaagaaaaagaacaagagtcgttgtcaagaaacagagctgcctcaaagtcttcctcccaatgcatgattgcaagtaaagtttatttcactatcttggcttgtgttgaattgtcaatattgaaggctagctttggccccagatagaggaaaaccacataaaggcaaagtcatttctcaccct

SEQ ID NO: 271724 - DNA, 473 bp, Glycine max
  unsure (1)..(473): unsure at all n locations
tttccagaccatacttcttcgggcaactgataattcatatgaactgatggtcctctattgatgagatatgctactgtgtttattgctcttgctcagaatgctctatgcaagccaaattggatccgcatacaccttactctctcgttcaaggttctattcatcctttctgtaacaccgctttgctcacgtgttcctggtattgacttgatcattctgatcccatgttcttgacagaagtctttaaactcctgactatcatactccccgccattgtcagatttcagactnttaacctttagacctgtctgattntcaacttctggttntcaccttgtaaacacagaagacacatcagaattattgttaagacacataacacatacctctctggtagagtcattgataaaggtgacataatagtgtgagtttccaacagatttcactggggttgggaccaaacatctgtgtgcacc

SEQ ID NO: 271725 - DNA, 545 bp, Glycine max
  unsure (1)..(545): unsure at all n locations
nagttttnnnnnncctttattaatctactggcttaccaatangaaagccgcnannanacgggaaaaggtaagcanaagtangccatangataataaggnaaggcaggnnaggcgggggctgaacaacaagaaaacctacacgctgctcatatcaaaggctagctggcaactaaggcagatacatcatttcaactatggctcaggaaaataccaggtaaggctaggctcgagaatattaagaggaaagcgattattgcaagaggctagcttgcttgaaatgaggtatggaaatgaccataccagatttcacctatgttgctcgtgaataatgaagaatcctagctcgtgaatgatagtgcagactcaatantaaagctcatgaatgataacttgaagagccaaaagctacactttcaataaagtcatagctacgagattctttctacacgttcaacatgaactcaaggcatgacatttcaatcatgtgaactcaaagcatatgtgaggtccaatcaagtcataggcatgagttctcatagtgggtn

SEQ ID NO: 271726 - DNA, 421 bp, Glycine max
  unsure (1)..(421): unsure at all n locations
agcttaatctctatcctatactaactcataactgataaggaaggttaatcttaacctacaacataattctagaaaactactattcaataattattcgattatgcatgcatgcaatacctagattgtgcactactacacttctgcataatttcattctgacataaaaaacataatatttttaaaaaaaattctaactcagttaccaaatgtgaaataaagttatcctgttgtccagcataacactaccaatacagtaatgcatcggttaattgaaattcggagtgatatgtttatttctgattcccatccccccactatccatacattgcanattatgagccacacctcttagtacatagactatatgttaaaagaaaaaaggatggagtagcaacatacagattctcttgtcaagcttctc

SEQ ID NO: 271727 - DNA, 542 bp, Glycine max
  unsure (1)..(542): unsure at all n locations
acttgcttttnnaggggnnnncnnncggtcacatcgtctacgcctgacatcgaaaantcgnaacagcnnangatgccatgggatatgaataacgttttatggtttaaatnttgtatggaggctgtaggtattgggtcgatgaagttgttggaagagacataaagatgactaaactgggaagtccatgcctggtctttaaactggctatgggacacgacaactagtgggctgcgcaaacccatacttacagatcttgaagagtttgaagccaatggggaaagacatgctttatttgattgatgccaagatcataaacctacagactagtgcaattggacagagattctggctagaaaccttctgagttgactgcattgagatccagagtactgagccgacagtatttcgcaaacgtactctgcaaagagccatgaagctcgtcagttgttgatccatacttcatggatgatgagttgcatggctcgcggatgatccagcaacttgtgtgaacaagtgagacataatagacttgatgtaattac

SEQ ID NO: 271728 - DNA, 437 bp, Glycine max
  unsure (1)..(437): unsure at all n locations
agcttgtaatcgattacacacatactgtaatcgattaccagaggagattntcagatcatattcttagcagtcacatcttttcattnggttcttgaatggccatcaaaggcctatatatatgtgacttgagacacgaatntgctaagagttttcagaacaaaatggtcttatcctcttaaaaggcaaaatcgttttatcctcttacaaattccttggccaaaacacttgtgattcaataaggaattatttgagtgctcaaattgttcaatctatctctttcaagagagatttcttcttctcttcttctttattctgaaaagggattaagagaccgagggtctcttgttgtaaagaaatctgaacacaaaggaagggttgtccttgtgtgattcagatcttgtaataggcttttacaagatagtggaactctcaagcag

SEQ ID NO: 271729 - DNA, 563 bp, Glycine max
  unsure (1)..(563): unsure at all n locations
aagttcancnnnnnnngggnnnagtcccggtttctgattgttgtcttcnnnnattngnanaaggacngctgaagcgacaacttatcctggtctancangactctatnngcactagtctataataccanangaccataacggaggttcttgaagctaagcgccactcatcgcacctaagctgaatccctggcagcaatgtgagcgctaagcaagtcctgattagctatgcgcatgctccgttatacttaagatgcatcatattagcttaactggtcacagccttggctattgagagttgcagattctcggatttgcaaacctcacttagcgagcttattcttgcgctaagcgaagcttgtgtgaatattaagtaaaagttatggtgaatggaaacgtggttatacgcgtgagtctccaagcgagtctgttaagatatcatatgcttntagctcgtttactcatcacggcgtaaagagatgtatcgatgaactgcttagatattgtaagggaacgtctttcatagtagccaactttagatgcttcctgtaggaccttacgttgct

SEQ ID NO: 271730 - DNA, 438 bp, Glycine max
agcttgtctcagcgtttatgcgagacagagaccaacatgttagctatcatcgccaagtaccaagaagagttaggtctagccacggcccacgagcatagaatcgcggatgagtatgctcaagtgtatgcggaaaaagaggctagaggaagggtgatcgactctttacaccaagaggcaaccatgtggatggatcggtttgctcttaccttgaacgggagtcaagaacttccccgattgttagccaaggccaaggcgatggcagacacctactccgcccccgaagagattcatgggcttctcggttattgtcagcatatgatagacttaatggcccacataattagaaatcgttaggaaacttgtatggtctctcagaccttgactagatacgacttccttcttgaaataaaatggagtgatcccatgttctactccaaa

SEQ ID NO: 271731 - DNA, 263 bp, Glycine max
ctctgatgccacgtgatggacatgtggactcagatatagcaagaagggggggatgaatagcgatattaaaacttatacgcccgataaaacctattgactacgtttcgagcttagattcccttaagagcgaacgtcgtacatattgatgcgaatctaacagtgagaatccgaatatagacctatgagtgaaagtgagaccatagaagagaatatgcagactccgatgtatactggttcgggcacacacttgtgcctatgtccag

SEQ ID NO: 271732 - DNA, 431 bp, Glycine max
  unsure (1)..(431): unsure at all n locations
agcttatgttgatcccatatggttggagcattcttgcaaaacatcgtgaccctgactggtctncctatgatcttacttagtgagagtgacctgacaaacccattatgtggtgtgtnttgttatgtactcctaagcgccccagggtggtttttcactgacatggtacgacattgcatataggcttgagtcttagcataactgtctcatgcgcttgctaattggttattatgaaattgatgtattattatgtcttgatcagagcttgtaattcttgtgtaatgtgattgatgattgaaaagtgaactttgaatgacaaagtggtggaattacgtgaattacgtgtaactaagttttatttggtttatatgatatgtatatgtagttgtcttgtttctctattagttacgaatgtgataacttactccccgtgt

SEQ ID NO: 271733 - DNA, 483 bp, Glycine max
  unsure (1)..(483): unsure at all n locations
taaggaaatgcaagaggctagtgcacatggaaaataatggaatgcatgttaggctggtgcagaacaacaagaaaagctagatgctgctcatatcaaaggctagctngcaactaaggcagatacatcatttcaactatggctcangaaaataacaggttaggctaggctcgtgaatattaagaagaaagcgaatattgcaagaggctagctggcatgaaatgaagtatggaaatgaccatacaagatttcaactatgttgctcgtgaataatgaagaatcttagctcgtgaatgatagtgcagactcaataataaagctcatgaatgataactngaagagcccaaaggctacaccttcaataaagtccaaagctacgagattctattctacacgttcaacatgaactcaaaggcatgacatttcaatcatgtgaactcaaagcattatgtgaagtccaatcaagtacatangcatgagattctc

SEQ ID NO: 271734 - DNA, 441 bp, Glycine max
  unsure (1)..(441): unsure at all n locations
agcttacaagcaagcttccatcacagcatgaccacagatcaacctttatttcctatgtctcacacagacctgngtatagggcctaatacctcaatgtttgtgcaaaggtgtaggtgtcctgcgtgcatagaacaaacaaatattcctaactacgaatgtaatagatagctagacacacaaaaaaacacagtaacacagcaagggttatatacaaatatggacaaaataaaagataaaaggaaaaagggaacataaataaagaagaagacacgataaaacattgcacactgatcaaatggcctaactctctaacaagtccccagtggagtcgccatttgtcgcaacctaccctatgacgggagggtgaggcgaaataaaagtgcatcttccaaaaaaaagcatgcgtgggattcaccaccaacgtttattcgaggaaaaagt

SEQ ID NO: 271735 - DNA, 446 bp, Glycine max
  unsure (1)..(446): unsure at all n locations
taaatactaacctaataataaaaaatatgttaaagagtgattaagtacgaatataaaatcatntaaattcctttgtaaagcttcatttagacaactcacaagtctggaaaacataaaatcantttgtttttccactagaattgtatttttgttgtttctaagtacgaataagtgttgaaactctntntgtggacctctacttagatttccttcaatggctgtaagtataactntacactntatcctctaaacatatcattaatcaatggctgttcatcaatcatgatttgattgaataaagatgcactcatgtttagcttgccaacatatttcagctntcttcctaaatctgctctttttttctaacattcagtttattgcttacgaattggaatagtgacaagtaaagataaatcacaactcacagtcatccaattccaagaata

SEQ ID NO: 271736 - DNA, 187 bp, Glycine max
agcttaaggatgcgaatacttacttgttggtgacgaataaaagcgccattcggaatcaaaaaatgcaaaaatgatgaccctagggctgcaaactcgtaaatcccgtgagtattgcttttgaaatggggggggggaaccactcctttcatcaacaccaccagccctggagtgagactatacccaaaca

SEQ ID NO: 271737 - DNA, 478 bp, Glycine max
  unsure (1)..(478): unsure at all n locations
cctctctggtggtgaagctctcttccatggcttattcctaatggatggcacctccctaacctcttctctttatcgtctgctacatctccatagtggaaaatcaccattgaaggacatcattgaagctcaaagatccagcctccatagaagcttttcaagcaagcttccatcacaacataccttcacaaaccaaattcaatctcaattctatgacattcttgggagaaaaaagcacttagaccatngctaacttgaaattagcattcatttttccaaatggatcaataaaaaacaaccaaattggtggttattttcaatgtcctactccaataccaatgcgagttcttaatgagtgttcttttgagacacttaagagtagaatgcacaacacccttcgactaactaatgaccagttngtacatganatctattaccaatagtcatctatagatgcangtcaacaatctntttttcattc

SEQ ID NO: 271738 - DNA, 427 bp, Glycine max
agctattaatcggtataattcattcattcaaatgttaaacctgccaatgcggtaggtaagaataggtccatcattcttctgtcttttgtttcctagaggctcattaaccaaacttaataacaaccatttggatttggcgaatctgtagcttctagattctacaatcaacaacgaccgttacctacaacatcaagtgaagtgagaaacaagtaatgctgctataaaatactagtactaagcaccatgtttactttttctttataacaatgagatgaaaaccattgatggcgaatatgattatgtgttattgtgtatattaaactcgagccgttcaaaatattttaatactaagatttgaaacagattttattttgaggtattggtcttttctttttaaagatgtttaactttcacaaatgctacctac

SEQ ID NO: 271739 - DNA, 496 bp, Glycine max
  unsure (1)..(496): unsure at all n locations
agactgtcatataccacttgctgaataattgaacacattatctgttctcctaaggataatcccattgtatttgagaagttagagagctcatattttaatctgaaggtatatgcctgcctttttttaagcatagttcccttcccccaaaatacaccggctaaatagcaccagcattgtataagaaaacctgataatacaaatgatgtcctttntccatgcagcaaactaccgagctgttcaatgactcacattgaactcattaaaccctgaaaggagctctattctttttcagcatttcatggagactggccaaggtattgtctgttaatctgtttccattcttcattgcttatatccacaatatatctttgacgttcgataatctattactcctggtggaattacagacatngtatgagtacttgttccacacattgcatgggaactnngtccatannagaatagtataatggtaccttgtagtcacatattcatg

SEQ ID NO: 271740 - DNA, 419 bp, Glycine max
  unsure (1)..(419): unsure at all n locations
agcnttgatgcaacatttggagaggttaatgaaactacgagatgaaaatagaacatgttttctcatgcaacgactatgaggaggaccaaaaggtgaagcttgctgccacggagtttttcgactatgctcttgtgtggtggaacaagctacaaaaggagagagcaagaaatgaagagccaatggttgatacatggacagagatgaaaaagatcatgatgaagcggtatgtgccggctagttactcaagggacttgaaattcaagctccaaaaactaacccaaggcaacaagggggttgaggagtattttaaggaaatggatgtgctcatgattcaagcaaagattgaagaagatgaggaggtaactatggctcgatttcttaatcggttgactaatgatatccgcgatattgctgagctg

SEQ ID NO: 271741 - DNA, 368 bp, Glycine max
  unsure (1)..(368): unsure at all n locations
tatgatactngttaatgttntcttactaattatggttatctgatttttatattaatttcttttatgataaactcacccctcgcaattattgtattgtgtggttggttcttgtgatgatcgcgaactctagttcgtgagagtcgaatgacaaaagtagagtacgagaagtgagattcttttgtggagccgccgagctgacgtgatgacgttgggattatattgggagagagttgtgtttgtttacaatataaaaaggactctccaaaattcatctcanatcaaaatctaggtatttccggtcactaaatgaattacttttgggtcaaaacaaacctatagctccataatgagctatgtaagtcctatga

SEQ ID NO: 271742 - DNA, 434 bp, Glycine max
agctctgagccaaaatcctgactcaccataaaccttgtcccatggtgagaatgccaatccttaccctcggaagcaaaaaaagaatagaggggaaatttccgatcaaagaaaaagagaaggaaaatttccaatgaaagcaaaaaagaaatgaaggaaaattccccaatcaaagagtgggagaaagcacaaaaaggaaaagaaggaaaattctccaatcaaaaagtgggagaaagcaaaaagaaaagaaaggaaaattcccaatcaaagaatgggagaaagtaaaaaaggaagaagaacaaggaaagaaagctcctgatcaaggatcgaaagacaccagaagaaatgtgcagagaggtctttggaccatacaatatctgaacagtacagaattgtcaccaaatgaacgaaaaaagaaggaaagggaaccacgacct

SEQ ID NO: 271743 - DNA, 369 bp, Glycine max
  unsure (1)..(369): unsure at all n locations
ctgtaagacctgcaacttctctattgatcatgctggttaggaaaggaagttgcaactaagtgagctagatgagatatgtttagaagcctatgagaattccaaattctacaaggagaagaccaagaagtgccatgacagcttgatagctaagaaggacttcatggctggacagaaattattattgtataactctacgctcggactcatgactggtaagtcgaggtcaaagtggattggtccttttgcggtgactaaagtttttccttatggtacaattgagatcaanagtgaatccacatataagagcttcaaggtcaatggacaccggctgaaaccattcctcacacatccctccttggtggatgtagt

SEQ ID NO: 271744 - DNA, 427 bp, Glycine max
  unsure (1)..(427): unsure at all n locations
agcttgtttctacataagcatttcttcatggcatcgtaatggacgtatcgatcctgcatttgtcacttatcatttcatgcattgcattttgcataagtcatttcttcaccgtgcatctgcatctaacatgtttcttgtacaccttctattttcatgttcgctcatgcatgatccttgcattntcctctgcaaaacaaagaaagtcacgataaagctcaaacaatgcatcattcgcatacatccgtgcttttcattgagtgcattgctcattgcattctttccctgaaaaccaaactttaatcattgttatcataagggaagaacgcactttacgacacccttactgaatgcatgctagagctggagtaatggctgaagtagacgaggtgcaagagggatgaacgccgacatggacgccatgaaagaa

SEQ ID NO: 271745 - DNA, 495 bp, Glycine max
  unsure (1)..(495): unsure at all n locations
tccaaagtgtataatanaactatgaagacatgcnttattgcagtgcaatattnttcttggtttaaattttatattcacgggataagaacaagaaacatatagaatgtttaaaataattctctgaacgtaaactgagctaggcagctctacacgccatgttaatacaaattcatttcaatcattaacacccggacagaattactagaaacagtctacattgtaactgagaaaagatagaaccgatgttgcggagtcaacaaaatatggagtctcaatttccccttcctggtttctttccacaactataggcctctaatgcttacaatagcatgggtgacaggagatcctctacggttcatcaagtaggtggaagataattcatctggttcttctcttgaacaaaagatgaagatgttgtccaggcagatggagaatatgatgaaggctcangtgtagatgatgacacccacgctctcacactcctncaaaatatat

SEQ ID NO: 271746 - DNA, 438 bp, Glycine max
  unsure (1)..(438): unsure at all n locations
agcttccacactagtatcctttaattntagggtatatttttttatacgtgtatatgaagaaaaatgaaagatatcaataattgtatgctatatcataccgtttaatttttttttatgtacaaatgattaaaaaatgatttttttagaataggttttgaaaagatatttgattcgatatcgttagtttgttatgttattgattttaaatttaatttaaatctttattatctttggaattaggggtgcaccaaaaagaaaaaattaaagaagaatacaaaaaacaatctttttaaagaagataattaggggtgtattagattaagatttcaaaagatttttttaaaaaaatattgtggtattcaattaaaaattgtaaataatataaataagttgtatgatatttaattaaagtttttaagattttgtatagaagacaac

SEQ ID NO: 271747 - DNA, 447 bp, Glycine max
  unsure (1)..(447): unsure at all n locations
ctgaagcaaccagctcgcttgngcgagcaaggttactttctaatgaagcaagcagctcacctgngtgagcgtgtgtgcaacctccacccctcatttcctataaataagcgtgaggngggctgangagaangggccagcacctaaaatcaacaggttgtcaatgaaattagtgagaaagaagagaaaaaagaagaaaaaacaaggttgaggcatttccgtaacgttntcgtgatcgattccgtgataattcttcatcagtcttcgttcgntcttcgttcgtcgaccggttagtttntacttgtgaagttgtgaattcattatgtgcacccttaggggtccactcttgctttccgcatcttcatcttcattttcctacaatcagtgatctcatttccttgcgtaaagcgagtttcgaccgactaattatgccataatctcattcttatc

SEQ ID NO: 271748 - DNA, 420 bp, Glycine max
  unsure (1)..(420): unsure at all n locations
agcttgaccaagtatatgctatttagntgaactgatcaatttttttaacaataactgcacacagttttaggtttgtgacttttctgtttcatganagtagacatacaaaagggcataatgatattttttttggagtcttatttaccttgttcttgtctggccaaagtttcatttacaatgaagagaacagtattcttttcaatagttcttcaacagaagatttcagcagcaatgataattccaaatctctttacaggttggttctcagagcacaacaatgaagatgactcgtgttcctattcatggaggactatcttggaaagcgtttaatgaagaaacaaccactactgatgatagttcgttcactgtgactggcttgttggagcagataaatgcaaccagagatttatctgattactt

SEQ ID NO: 271749 - DNA, 438 bp, Glycine max
  unsure (1)..(438): unsure at all n locations
taagtttcaatcttatgttacagatctcactgtatacaagtgctttgaatntctccattcccagaacatcttgngattatntatgtaaaactaccttggagtatgccatgaatntataattcaatagatattctgcaagttacttatcatgttttggctcctatcaaggtttctatatccatgaaacaagttcaaagtaggtttaaatcaatgacacatctttactgttagcttctgttgcctgtattagagaggcagggcattcaattaagagaaaactctggcaatttggagaaatgtaaagttactgatagatgatgtaaaaatggctgcccccccctgcattgtattgggtcatttatctataatgttggattaccagctgtggatcgagtattntcgttgatattgaatgcataataatgtcatttcatacac

SEQ ID NO: 271750 - DNA, 440 bp, Glycine max
  unsure (1)..(440): unsure at all n locations
agcttaagacaactctntatggacttaaacaagctccaagacaagggtatgagagacttaccaacttccttcttgaacaaaagtttaaggaaaagttgataaaacacttttcattaaaaagtcctctcataacattttacttgtgctagtttatgtggatgacatcatttttggttctactaacaaatctctgtgaagattttgtgcacaagatgcaaggngagtttgaaatgtcaatgataggggagttaaattactttgttggtttccaagtgaagaaaatggaccatggaacatttcttcgtcaaacaaactgcaagaaacttctcaaaaagtttgagatggataaaagcaaggattctgcaactcctatggctactaattactaccttagtgcagatgaaaagggaaagacaattgatcttagttccttactttac
